United States Patent Application Publication US 2007/0054278 A1 - sequence listing, part 7

SEQ ID NO: 6602 - DNA, 4125 bp, Homo sapiens
tttccgcagttaggggctgctatttcaacgcagggagataaaaagaaaaaaacacttgctcttctaccccgctaaaaacactcatcctagggagcacgccagcatttgcagcgttcggggcagggccactcggcctgcggccgttgcactggctggaagctggcaggcgatcacggttgattggctcgggtgcggtccaagggcagcaacgccttcggcgggccgcctagggtgattggctgctgcagcccaccccctagccggtttggtgggcggcgaagcctggattggtggarctaagagctggctcagtttcagcgctggctcttcgtgcatggcagagatggcgactgcgactcggctgctggggtggcgtgtggcgagctggaggctgcggccgccgcttgccggcttcgtttcccagcgggcccactcgcttttgcccgtggacgatgcaatcaatgggcyaagcgaggagcagaggcagcttystcagaccatggctaagttccttcaggagcacctggcccccaaggcccaggagatcgatcgcagcaatgagttcaagaacctgcgagaattttggaagcagctggggaacctgggcgtattgggcatcacagcccctgttcagtatggcggctccggcctgggctacctggagcatgtgctggtgatggaggagatatcccgagcttccggagcagtggggctcagtyacggtgcccactccaacctctgcatcaaccagcttgtacgcaatgggaatgaggcccagaaagagaagtatctcccgaagctgatcagtggtgagtacatcggagccctggccatgagtgagcccaatgcaggctctgatgttgtctctatgaagctcaaagcggaaaagaaaggaaatcactacatcctgaatggcaacaagttctggatcactaatgkccctgatgctgacgtcctgattgtctatgccaagacagatctggctgctgtgccagcttctcggggcatcacagccttcattgtggagaagggtatgcctggctttagcacctctaagaagctggayaagctggggatgaggggctctaacacctgtgagctaatctttgaagactgcaagattcctgctgccaacatcctgggccatgagaataagggtgtctacgtgctgatgagtgggctggacctggagcggctggtgctggccggggggcctcttgggctcatgcaagcggtcctggaccacaccattccctacctgcacgtgagggaagcctttggccagaagatcggccacttccagttgatgcaggggaagatggctgacatgtacacccgcctcatggcgtgtcggcagtatgtctacaatgtcgccaaggcctgcgatgagggccattgcactgctaaggacygtgcaggtgtgattctttactcagctgagtgtgccacacaggtagccctggacggcattcagtgttttggtggcaatggctacatcaatgactttcccatgggccgctttcttcgagatgccaagctgtatgagataggggctgggaccagcgaggtgaggckgctggtcatcggcagagccttcaatgcagactttcactagtcctgagacccttygcccccttttcctgcacctagtggcctttcttgggaagtagagatgtggcggctttcccaccctgcccacagcaggccctcctgcccagctgctcttgtcagccctctggcctctggatgaggttgagttctccacaacagctcccaagcatcatgggcctcgcagccgggcctgtgccacggctagtgttgtgtgatttaaaatggactcagcaggaagcatattgtctggggattgttgggacargttttggtgactctgtgcccttgctctctaacttctgagcccacctcccagggtaggcacctgggggcatgcaggtgcccacctctttctcttgggtgaggctctggcaaggagatctctctgctcaagcacagcagaatcatggcccctctccatgaattggaacttggtacaggttaagtatccctaatcctgaaatctgaaacacttgtggttccaagcattttggataaggcaaattcaactttcagtctcttttctgggggaaaaaaataataaacctagcctagccaggcgtggtggctcatgcttgtaatcccagcacttcaggaggctgagatgggtggatcacctgaggtcaggagttcaagaccagcctggccaacatgtggaaacctcgcctcaactaaaaatagaaaaaaattagttgggcatggtggtgggcacctgtaatcccagctacttcaggaggctgaggcaggagaattacttgaacccaggaggcggasgttgcagtgagccgagcttgtgccattgcactccagcctgggcgacaagagcaaaactcttcaaaaaacaaaacaaaacaaaaaaaccctggcccttgtttcttccagtttctagaggtatcagctcctagcagcttatgaacacatatgcttgcttggccaggcaaggtggtgtgtgcctgtaatcccagcactttgggaggccaaggcaggtggatcacttgcagtcaggagttcaagaccagcctgtccaacgtggtgaaaccccatctctactaaaaatacaaaaattagccaggggtggtggtgcacgtctgtaatcccagctactcaggaggctgaggcaggagaatcacttgaacccgggaggtggaggttgcaatgagccaatatgacaccgctgcagtccagcctgggccatagagtgagactctgtctcaaaaaaggaaagaaaaataggctgggcacagtgactcatgcctgtaatcccaacactttgggaggccgaggcaggtggatcacgaggtcaggagttcaagaccagcctggccaagatggtaaaacctcgtctctactaaaaatacaaaaattagccaggtgtggtggcaggctcctgtaatcccagctactcaggaggctgaggcagagaattgcttgaacccrggaggcagagtttgcagtgagccaagatcacaccactgcactccagcttggacgacagagcgagactctgtctcaaaaaataataggccaggcatggtggctcaaggtctgtaatcccagcactttgggaggccgaggtgggcagatcacaaggtcaggagttcgagaccagcctgacgaccaacatggtgaaacctcgtctctactaaaaatacaaaaattagccaggcctggtggcacgcgcctgtaatcccagttacacagaagactgaggcaggagaatcgcttgaacgcaggaggcagaggttgcaggagctgagatcgcgccattgcactccagcctgggcaacagagtgagactctgtctcaaaaaataataataaaataaatgaacacacatgctgctgagtccgcaggggggcagagcagaggacagcgtgcttttgtgtactgttggaagactggctcctcctgtacagcacctctgagcccttgtgcaccgccctgccacgggcaccatccagtcctggccgtgtgaccacccacagctgactgggcagcaggcacaggccctacccgagcaggccggagttggctcgcatgactccagctgaggctgcctgtgtacatttctccagataccctatggctaattttgttataactgcacagtggctgctgccattttgtattaaatatattgtgaaacaaacctatctggggagaagcaatctacttgccgctgcttcctgtctggatccagcttgtgtccttggagagtggctggcccaggtcctattccygtcctccagcccgttctttcatgagggacaggaaggtaaaatcagcccttaggagagaggtctcagcctccctttcccagatctcccagtgagttttaaaggaagcagggagcccagagtgctaagttcttacagccagaaggaagcttatagatttctgaaaaccgcccctttgtttttaaaaagatcaacacaatttgactttctcaaggtcaaaacgaactagaatccagatctgctcatggcaaaaatgggggtgttctgagaattccag

SEQ ID NO: 6603 - DNA, 4163 bp, Homo sapiens
tttccgcagttaggggctgctatttcaacgcagggagataaaaagaaaaaaacacttgctcttctaccccgctaaaaacactcatcctagggagcacgccagcatttgcagcgttcggggcagggccactcggcctgcggccgttgcactggctggaagctggcaggcgatcacggttgattggctcgggtgcggtccaagggcagcaacgccttcggcgggccgcctagggtgattggctgctgcagcccaccccctagccggtttggtgggcggcgaagcctggattggtggarctaagagctggctcagtttcagcgctggctcttcgtgcatggcagagatggcgactgcgactcggctgctggggtggcgtgtggcgagctggaggctgcggccgccgcttgccggcttcgtttcccagcgggcccactcgcttttgcccgtggacgatgcaatcaatgggcyaagcgaggagcagaggcagcttystcagaccatggctaagttccttcaggagcacctggcccccaaggcccaggagatcgatcgcagcaatgagttcaagaacctgcgagaattttggaagcagctggggaacctgggcgtattgggcatcacagcccctgttcagtatggcggctccggcctgggctacctggagcatgtgctggtgatggaggagatatcccgagcttccggagcagtggggctcagtyacggtgcccactccaacctctgcatcaaccagcttgtacgcaatgggaatgaggcccagaaagagaagtatctcccgaagctgatcagtggtgagtacatcggagccctggccatgagtgagcccaatgcaggctctgatgttgtctctatgaagctcaaagcggaaaagaaaggaaatcactacatcctgaatggcaacaagttctggatcactaatgkccctgatgctgacgtcctgattgtctatgccaagacagatctggctgctgtgccagcttctcggggcatcacagccttcattgtggagaagggtatgcctggctttagcacctctaagaagctggayaagctggggatgaggggctctaacacctgtgagctaatctttgaagactgcaagattcctgctgccaacatcctgggccatgagaataagggtgtctacgtgctgatgagtgggctggacctggagcggctggtgctggccggggggcctcttgggctcatgcaagcggtcctggaccacaccattccctacctgcacgtgagggaagcctttggccagaagatcggccacttccagttgatgcaggggaagatggctgacatgtacacccgcctcatggcgtgtcggcagtatgtctacaatgtcgccaaggcctgcgatgagggccattgcactgctaaggacygtgcaggtgtgattctttactcagctgagtgtgccacacaggtagccctggacggcattcagtgttttggtggcaatggctacatcaatgactttcccatgggccgctttcttcgagatgccaagctgtatgagataggggctgggaccagcgaggtgaggckgctggtcatcggcagagccttcaatgcagactttcactagtcctgagacccttygcccccttttcctgcacctagtggcctttcttgggaagtagagatgtggcggctttcccaccctgcccacagcaggccctcctgcccagctgctcttgtcagccctctggcctctggatgaggttgagttctccacaacagctcccaagcatcatgggcctcgcagccgggcctgtgccacggctagtgttgtgtgatttaaaatggactcagcaggaagcatattgtctggggattgttgggacargttttggtgactctgtgcccttgctctctaacttctgagcccacctcccagggtaggcacctgggggcatgcaggtgcccacctcccagggtaggcacctgggggcatgcaggtacccacctctttctcttgggtgaggctctggcaaggagatctctctgctcaagcacagcagaatcatggcccctctccatgaattggaacttggtacaggttaagtatccctaatcctgaaatctgaaacacttgtggttccaagcattttggataaggcaaattcaactttcagtctcttttctgggggaaaaaaataataaacctagcctagccaggcgtggtggctcatgcttgtaatcccagcacttcaggaggctgagatgggtggatcacctgaggtcaggagttcaagaccagcctggccaacatgtggaaacctcgcctcaactaaaaatagaaaaaaattagttgggcatggtggtgggcacctgtaatcccagctacttcaggaggctgaggcaggagaattacttgaacccaggaggcggasgttgcagtgagccgagcttgtgccattgcactccagcctgggcgacaagagcaaaactcttcaaaaaacaaaacaaaacaaaaaaaccctggcccttgtttcttccagtttctagaggtatcagctcctagcagcttatgaacacatatgcttgcttggccaggcaaggtggtgtgtgcctgtaatcccagcactttgggaggccaaggcaggtggatcacttgcagtcaggagttcaagaccagcctgtccaacgtggtgaaaccccatctctactaaaaatacaaaaattagccaggggtggtggtgcacgtctgtaatcccagctactcaggaggctgaggcaggagaatcacttgaacccgggaggtggaggttgcaatgagccaatatgacaccgctgcagtccagcctgggccatagagtgagactctgtctcaaaaaaggaaagaaaaataggctgggcacagtgactcatgcctgtaatcccaacactttgggaggccgaggcaggtggatcacgaggtcaggagttcaagaccagcctggccaagatggtaaaacctcgtctctactaaaaatacaaaaattagccaggtgtggtggcaggctcctgtaatcccagctactcaggaggctgaggcagagaattgcttgaacccrggaggcagagtttgcagtgagccaagatcacaccactgcactccagcttggacgacagagcgagactctgtctcaaaaaataataggccaggcatggtggctcaaggtctgtaatcccagcactttgggaggccgaggtgggcagatcacaaggtcaggagttcgagaccagcctgacgaccaacatggtgaaacctcgtctctactaaaaatacaaaaattagccaggcctggtggcacgcgcctgtaatcccagttacacagaagactgaggcaggagaatcgcttgaacgcaggaggcagaggttgcaggagctgagatcgcgccattgcactccagcctgggcaacagagtgagactctgtctcaaaaaataataataaaataaatgaacacacatgctgctgagtccgcaggggggcagagcagaggacagcgtgcttttgtgtactgttggaagactggctcctcctgtacagcacctctgagcccttgtgcaccgccctgccacgggcaccatccagtcctggccgtgtgaccacccacagctgactgggcagcaggcacaggccctacccgagcaggccggagttggctcgcatgactccagctgaggctgcctgtgtacatttctccagataccctatggctaattttgttataactgcacagtggctgctgccattttgtattaaatatattgtgaaacaaacctatctggggagaagcaatctacttgccgctgcttcctgtctggatccagcttgtgtccttggagagtggctggcccaggtcctattccygtcctccagcccgttctttcatgagggacaggaaggtaaaatcagcccttaggagagaggtctcagcctccctttcccagatctcccagtgagttttaaaggaagcagggagcccagagtgctaagttcttacagccagaaggaagcttatagatttctgaaaaccgcccctttgtttttaaaaagatcaacacaatttgactttctcaaggtcaaaacgaactagaatccagatctgctcatggcaaaaatgggggtgttctgagaattccag

SEQ ID NO: 6604 - DNA, 4602 bp, Homo sapiens
cacaggcccccatggcaggcagggcgggtgggaggagggtgatttacaaggcagatgggcctctggctacagctcagtcctgcactcagccagggccaccccaggggctataagagcaactagatttctggagcagctcggggatgggtgccatttgagcccagcttggctccccctcctggctggcctccttcctgcccttctgcctgcctgtgtctgctgagattctgcaaagaggaacgcttggcaccatgtctctgctcaaccctgtcctgctgccccccaaggtgaaggcctatctgagccaaggggagcgcttcatcaaatgggatgatgaaactacagttgcctctccagttatcctccgtgtggatcctaagggctactacttatactggacgtatcaaagtaaggagatggagtttctggatatcaccagcatccgggatactcgctttgggaagtttgccaagatgcccaagagccagaagctccgggacgtcttcaacatggactttcctgataacagtttcctgctgaagacactcacggtggtgtccggcccggacatggtggacctcaccttccacaacttcgtctcctacaaggagaacgtgggcaaggcctgggctgaggacgtactggccctagtcaaacatccgctgacggccaacgcctcccgcagcaccttcctggacaagatccttgtgaagctcaagatgcagctcaactctgaagggaagattccggtgaagaactttttccagatgtttcctgctgaccgcaagcgggtggaagctgctctcagtgcctgccacctccccaaaggcaaaaatgacgccatcaatcctgaggacttcccagaacctgtctacaagagtttcctcatgagcctctgtcctcggccagaaatagatgagatcttcacttcttaccatgctaaggccaaaccctacatgacgaaggagcacctgaccaaattcatcaaccagaaacagcgggactcccggcttaactccctgctgttcccgccagcacggcctgaccaggtgcagggcctcatcgacaagtatgagcccagtggcatcaatgcacagaggggccagctgtcacctgaaggcatggtctggtttctctgtgggccagagaacagcgtgctggcccaggacaagctgctgctccaccacgacatgacgcagccactcaatcattacttcatcaactcgtcccacaacacctacctgacagccggccagttctcaggcctctcctcggctgagatgtaccgccaggtgctgctctctggctgccgttgcgtggagctagactgctggaaggggaaaccccctgacgaggagcccattatcacccatggcttcaccatgaccacagacatcttcttcaaagaagcaattgaggctattgcagaaagygcctttaagacctccccctatcccatcatcctgtcgtttgagaaccatgtggactcaccccgccagcaggctaagatggctgagtattgccggacgatctttggggatatgctgctcacagagcccctggaaaagttcccactaaaaccaggtgtccccctgcccagccctgaggatctcaggggcaagatcctcatcaagaacaagaagaaccagttttctggccccacctcctccagtaaggatacyggtggggaggctgagggcagcagyccacccagtgcccctgcagtgtgggctggcgaggaagggactgagctggaggaggaggaggtggaagaggaagaggaggaggagtcaggaaacctggatgaagaagagattaagaagatgcagtcggatgagggcacagcgggcctggaagtgacggcttatgaggagatgtccagcctagtcaattacatccagcccaccaagttcgtctcctttgagttctctgcccaaaagaaccgaagttatgtcatctcrtccttcacagagctcaaggcatatgacctgctctccaaggcctcggtgcagtttgtggactacaacaagcgccagatgagccgcatttaccccaagggaacccgcatggactcctccaactacatgccccagatgttctggaatgctggatgccagatggttgccctcaacttccagacgatggacttgcccatgcagcagaacatggcagtatttgagttcaacgggcagagcggctacctcctcaagcatgagttcatgcgccggccggacaagcagttcaaccccttctcagtggaccgcatcgacgtggtggtggccaccaccctttccattacggtgatctctgggcagttcctgtcagaacgcagcgtgcgcacctatgtagaagtggagctgtttggccttcctggggaccccaagaggcgctatcgaactaagctgtcacccagtactaactccatcaatcctgtctggaaggaggagccctttgtctttgagaagatcttgatgcctgagctggcctccctcagagtggctgtgatggaggaaggcaacaagtttcttggacaccgcatcatccccatcaatgccctaaattctgggtaccaccacctgtgcctgcacagtgagagcaacatgcccctcaccatgcctgcgctcttcatcttcctggagatgaaggactacatacctggtgcttgggcagatctcactgtggccctcgccaaccccattaagttcttcagtgcccatgacacgaagtctgtgaagctcaaggaggccatgggaggtctgcctgagaagcccttcccactggcgagtccagttgccagccaggtcaatggggcgttggccccaacgagcaatgggtcaccagcagccagggccggggccagggaagaggctatgaaagaagctgcggagccgcggaccgccagcctggaggagctccgggagctaaagggcgtggtgaagctgcagcggcggcacgagaaggagctgcgagagttggagcggcgcggagcgcggcgctgggaggagctgctgcagcggggcgcggcgcagctggcggagctcgggccaccgggcgtggggggcgtcggggcctgcaagctcggtcccggcaagggctctcgcaagaagaggagcctgccccgcgaggagagcgccggagccgcgccgggcgagggccctgagggcgtggacgggcgcgtgcgggagctgaaagacaggctggagctggagctgctgcggcagggcgaggagcagtacgagtgcgttctgaagcgcaaggagcagcacgtggccgagcaaatctccaaaatgatggagctggccagagagaaacaggcggcagagctgaaggccctgaaggagacgtcggagaacgacaccaaagagatgaagaaaaagctggagacaaagagactggagcggatccagggcatgaccaaagtmaccacagacaagatggcccaggagaggttgaagagagagattaacaactcccacatccaggaagtagtgcaggtgatcaagcagatgacggagaacttggrgaggcaccaggagaagctggaggagaagcaggcggcttgcctggaacagatacgggagatggaaaagcagttccagaaggaggcgctggcagagtacgaggccaggatgaagggtctggaggcagaggtgaaggagtcggtgagggcctgcctcaggacctgctttccctccgaggccaaggacaagcctgagagggcctgcgagtgccccccagagctgtgtgagcaggacccactcatagcaaaggcagatgcccaggagagccgcctctgatgcccccatcccactgggacatttagcaaggaggttcagccccttctctgggatgtggttctattcccccaggaaaaaggagccccagccttctgaggctgtgggaacctgtggctgccttggacgctgcagccccctcctcaacggccaggccagagtctgagacaggacccaggcaccctcacggcagggcctctctggggcctagaagtcttctcaagctgacttcctacctccccctccatctctagataagtgtcatatatttgttgagggcaaaagactatggactggaaggcagaaagtgggatcctggccccactctgcctttcctattgagcaaccagctctgggctcagtttcctcacctggagggttggacccactcacctccactctagccccgaaccctcctgccccaggcttccaggccccatcaggcctgccctgagttggccttgtccactccttgaggcagatcctggcactacctcacagctccctggggacggccactccctggctgagggccctcccctcccctctgcctgtccggaacgggaggctgaaatggaaaagctgccttggccctgcttggctgagtcacaaggggcagtgggctcttgggtgctgttccaccctgaccctggctcacccctcttcctaggcctgggggcaggcagttcctaccatgtacccctctcaggctgcctgcctgacaaggtcagcatcatttgctctcctgaatttatgaggtttatttatttttctctttcctactcctattaaagaacctcgtcccagt

SEQ ID NO: 6605 - DNA, 4853 bp, Homo sapiens
cacaggcccccatggcaggcagggcgggtgggaggagggtgatttacaaggcagatgggcctctggctacagctcagtcctgcactcagccagggccaccccaggggctataagagcaactagatttctggagcagctcggggatgggtgccatttgagcccagcttggctccccctcctggctggcctccttcctgcccttctgcctgcctgtgtctgctgagattctgcaaagaggaacgcttggcaccatgtctctgctcaaccctgtcctgctgccccccaaggtgaaggcctatctgagccaaggggagcgcttcatcaaatgggatgatgaaactacagttgcctctccagttatcctccgtgtggatcctaagggctactacttatactggacgtatcaaagtaaggagatggagtttctggatatcaccagcatccgggatactcgctttgggaagtttgccaagatgcccaagagccagaagctccgggacgtcttcaacatggactttcctgataacagtttcctgctgaagacactcacggtggtgtccggcccggacatggtggacctcaccttccacaacttcgtctcctacaaggagaacgtgggcaaggcctgggctgaggacgtactggccctagtcaaacatccgctgacggccaacgcctcccgcagcaccttcctggacaagatccttgtgaagctcaagatgcagctcaactctgaagggaagattccggtgaagaactttttccagatgtttcctgctgaccgcaagcgggtggaagctgctctcagtgcctgccacctccccaaaggcaaaaatgacgccatcaatcctgaggacttcccagaacctgtctacaagagtttcctcatgagcctctgtcctcggccagaaatagatgagatcttcacttcttaccatgctaaggccaaaccctacatgacgaaggagcacctgaccaaattcatcaaccagaaacagcgggactcccggcttaactccctgctgttcccgccagcacggcctgaccaggtgcagggcctcatcgacaagtatgagcccagtggcatcaatgcacagaggggccagctgtcacctgaaggcatggtctggtttctctgtgggccagagaacagcgtgctggcccaggacaagctgctgctccaccacgacatgacgcagccactcaatcattacttcatcaactcgtcccacaacacctacctgacagccggccagttctcaggcctctcctcggctgagatgtaccgccaggtgctgctctctggctgccgttgcgtggagctagactgctggaaggggaaaccccctgacgaggagcccattatcacccatggcttcaccatgaccacagacatcttcttcaaagaagcaattgaggctattgcagaaagygcctttaagacctccccctatcccatcatcctgtcgtttgagaaccatgtggactcaccccgccagcaggctaagatggctgagtattgccggacgatctttggggatatgctgctcacagagcccctggaaaagttcccactaaaaccaggtgtccccctgcccagccctgaggatctcaggggcaagatcctcatcaagaacaagaagaaccagttttctggccccacctcctccagtaaggatacyggtggggaggctgagggcagcagyccacccagtgcccctgcagtgtgggctggcgaggaagggactgagctggaggaggaggaggtggaagaggaagaggaggaggagtcaggaaacctggatgaagaagagattaagaagatgcagtcggatgagggcacagcgggcctggaagtgacggcttatgaggagatgtccagcctagtcaattacatccagcccaccaagttcgtctcctttgagttctctgcccaaaagaaccgaagttatgtcatctcrtccttcacagagctcaaggcatatgacctgctctccaaggcctcggtgcagtttgtggactacaacaagcgccagatgagccgcatttaccccaagggaacccgcatggactcctccaactacatgccccagatgttctggaatgctggatgccagatggttgccctcaacttccagacgatggacttgcccatgcagcagaacatggcagtatttgagttcaacgggcagagcggctacctcctcaagcatgagttcatgcgccggccggacaagcagttcaaccccttctcagtggaccgcatcgacgtggtggtggccaccaccctttccattacggtgatctctgggcagttcctgtcagaacgcagcgtgcgcacctatgtagaagtggagctgtttggccttcctggggaccccaagaggcgctatcgaactaagctgtcacccagtactaactccatcaatcctgtctggaaggaggagccctttgtctttgagaagatcttgatgcctgagctggcctccctcagagtggctgtgatggaggaaggcaacaagtttcttggacaccgcatcatccccatcaatgccctaaattctgggtaccaccacctgtgcctgcacagtgagagcaacatgcccctcaccatgcctgcgctcttcatcttcctggagatgaaggactacatacctggtgcttgggcagatctcactgtggccctcgccaaccccattaagttcttcagtgcccatgacacgaagtctgtgaagctcaaggaggccatgggaggtctgcctgagaagcccttcccactggcgagtccagttgccagccaggtcaatggggcgttggccccaacgagcaatgggtcaccagcagccagggccggggccagggaagaggctatgaaagaagctgcggagccgcggaccgccagcctggaggagctccgggagctaaagggcgtggtgaagctgcagcggcggcacgagaaggagctgcgagagttggagcggcgcggagcgcggcgctgggaggagctgctgcagcggggcgcggcgcagctggcggagctcgggccaccgggcgtggggggcgtcggggcctgcaagctcggtcccggcaagggctctcgcaagaagaggagcctgccccgcgaggagagcgccggagccgcgccgggcgagggccctgagggcgtggacgggcgcgtgcgggagctgaaagacaggctggagctggagctgctgcggcagggcgaggagcagtacgagtgcgttctgaagcgcaaggagcagcacgtggccgagcaaatctccaaaatgatggagctggccagagagaaacaggcggcagagctgaaggccctgaaggagacgtcggagaacgacaccaaagagatgaagaaaaagctggagacaaagagactggagcggatccagggcatgaccaaagtmaccacagacaagatggcccaggagaggttgaagagagagattaacaactcccacatccaggaagtagtgcaggtgatcaagcagatgacggagaacttggrgaggcaccaggagaagctggaggagaagcaggcggcttgcctggaacagatacgggagatggaaaagcagttccagaaggaggcgctggcagagtacgaggccaggatgaagggtctggaggcagaggtgaaggagtcggtgagggcctgcctcaggacctgctttccctccgaggccaaggacaagcctgagagggcctgcgagtgccccccagagctgtgtgagcaggacccactcatagcaaaggcagatgcccaggagagccgcctctgatgcccccatcccactgggacatttagcaaggaggttcagccccttctctgggatgtggttctattcccccaggaaaaaggagccccagccttctgaggctgtgggaacctgtggctgccttggacgctgcagccccctcctcaacggccaggccagagtctgagacaggacccaggcaccctcacggcagggcctctctggggcctagaagtcttctcaagctgacttcctacctccccctccatctctagataagtgtcatatatttgttgagggcaaaagactatggactggaaggcagaaagtgggatcctggccccactctgcctttcctattgagcaaccagctctgggctcagtttcctcacctggagggttggacccactcacctccactctagccccgaaccctcctgccccaggcttccaggccccatcaggcctgccctgagttggccttgtccactccttgaggcagatcctggcactacctcacagctccctggggacggccactccctggctgagggccctcccctcccctctgcctgtccggaacgggaggctgaaatggaaaagctgccttggccctgcttggctgagtcacaaggggcagtgggctcttgggtgctgttccaccctgaccctggctcacccctcttcctaggcctgggggcaggcagttcctaccatgtacccctctcaggctgcctgcctgacaaggtcagcatcatttgctctcctgaatttatgaggtttatttatttttctctttcctactcctattaaagaacctcgtcccagtccagatcccgcacatccttgaaggcctatctttaaaaggcccgagagccctctcctgcccacaactccatcttttcatccaaggactgtgttggtacgtatttagcagaagaattcagccctcaggtgacaacgtccattttttaagtcccagtgttgtcttcttaagaggtggaacgtctcgcacccagaaccgagattctgtctctctcttacccgctgccggcaacaaaatgtgcggctcatraaaag

SEQ ID NO: 6606 - DNA, 6098 bp, Homo sapiens
cctctccttcccctaaagagatcttatcaacttggctgcaccttcccacctctagcctgcgggaacaaatatcccaggatcccgggcggtttcgattgacgttacttccgggaaaagtaaccttgcatcggcggttgcgggcctggaaagctctcgcgacattttctcctgcgagatctgcttgctcactgtagcgatgacaycctcctcctcctccccgccgcctttcggcaatcttcgccagtcccagtcccgactaatctgtactcagatggcatggatcagggtctcccctcgaaccccggttcgcacggggcgtcaggtggcagcggcggggtgcgagctgcgcgaggccgacggcagcggcactacgggtggccacgggcaggcgacgagcagtgagtgtgggcggggtgggggtaagccacccgtgtagcggctcgattgttctggcctggctatggcgcctctcctcccccccgccatggctccccgtgtccctgctccgctcctctcagtgagtgaaagtggccgccgccgccgccggcccagcgcccgcagccgcctcagcgccgccgccatcttggggtcccaggagccgcggagggagcgagctaggagcgtccacgcccaacgcagtcaccgtcccacggcctcagagagcgaaccgcggctccaccgtcggcggggcgacccccccctccggaccccgcccgcaccccgccccccctccgccgccgtcgcggcggcggggccaggcggcccgagccgtgcagtcggaggtccttgtgcatgaagacagatttgttctatggcctcggagttgggtgccagggatgatggaggctgcactgagctggcaaagcccctctatcttcagtacttggagagggccctccggttggaccattttctgcgacaaacgtcagctatcttcaataggaatatttctagtgatgacagtgaagatggactggatgacagtaatccattattgccccagtctggggatcccttaatacaagttaaggaagaacctccaaattcattgcttggtgaaacttctggagcaggcagttctggaatgttaaacacatattctctgaatggagttctacagtcagaatcaaaatgtgataaggggaatttatataatttctctaagctgaagaaaagcagaaagtggctaaagagcattctgctaagtgatgaatccagcgaggctgattctcagagtgaagacgatgatgaagaagaactcaatctcagcagagaagaacttcacaacatgcttcgactacacaaatataagaaacttcaccaaaataagtatagtaaagacaaggagttgcagcaatatcagtactacagtgcaggcctgctctccacatatgaccctttctatgagcaacaacggcacctacttggacccaagaaaaagaaatttaaggaggaaaagaaacttaaagctaagttgaaaaaagtgaagaaaaaaagacgaagagatgaagaactttcctctgaagaatcccctcgtcgccatcaccaccagaccaaagtctttgccaagttttctcacgatgcacctccccctggcactaagaaaaagcacttatccattgagcagctgaatgctcgtcgcaggaaagtatggctcagcattgtgaaaaaggaactaccaaaggcaaataagcagaaagcttcagctcgtaacctgtttctcaccaatagccgaaagcttgctcaccagtgcatgaaggaggtgcgtcgagctgccttgcaggcmcagaagaactgtaaggaaaccttgcctcgtgcccgccgcctcaccaaggagatgcttctgtactggaagaaatatgagaaagtagagaaggagcaccgcaagagagcagagaaggaagctttggagcagcggaagttggatgaggaaatgcgggaggccaagaggcaacagcgaaaactcaacttcttaattacccagacagagttgtatgcccatttcatgagtcgcaaacgagatatgggtcatgatggtatccaggaagaaatcctaaggaaactggaagacagttctacccagagacaaatcgatataggtggaggagtggtagttaacatcacacaggaggattatgcaaacaagtctggcactgggtttggggagagttatagcctggctaacccatctatccgggctggtgaggatattccacagcccacaatttttaatggcaaattgaaaggttatcaactgaaaggcatgaattggttggccaatctatatgaacagggtattaatggcattcttgctgatgaaatgggccttggtaaaacagtacagagcattgcccttctggcccatctggctgagagagagaacatttggggacctttcttaataatttcacctgcgtctacacttaacaattggcaccaggagtttactagatttgttcctaaatttaaggtttctcttttcaccyttccccttttatatttacagaagaccctctacactcaggatgcccccttccatgtggttattaccagctatcagctggtggtgcaggatgtaaagtatttccagcgggtcaagtggcaatacatggtactggatgaggctcaggcgctcaagagtagttccagtgttcgttggaagatcctcttacagttccagtgtcggaatcggcttttgctaaccgggaccccaattcagaacaccatggcagagctttgggctctgctgcatttcattatgccaacattatttgattcacatgaggaatttaatgaatggttttccaaggacattgagagccatgccgaaaacaaatctgctattgatgagaatcaactttctcgcttacacatgattttgaagccatttatgctgaggagaatcaagaaagatgtggaaaatgaattatctgacaagaattgtcttgctctgttgcccaggctggagtgcaatggcgtgatttcggctcactgcaacctctggctcccagkttcaggcaattctcctgcctcagcctcccaaggagctgagactacaggagcctgccaccacgcctggctaatttttgtatttttagtagagatgaggcttccccatgttggtcaggctgctctcaaactcttggcctcaagggatccacccgcctcggcctcccaaagtgctggacgatcacagttcttcccagagccagctggaggtctgtggagcatcagacctcagaatggctggtctttcatcaggattccaggcaaggagagcctcatcactgacagtggaaagctgtatgcccttgatgkcctgctgactcggctcaagtctcaagggcatagggtccttatctactcccagatgaccaggatgatagacctactggaggaatacatggtttacaggaagcatacctacatgaggcttgatggctcatccaagatctcggagaggcgagacatggttgctgattttcagaacaggaatgacatctttgtgttcctgttaagcacacgagctggaggactgggtatcaatctcactgctgcagacacagtgattttctatgatagcgactggaaccccactgtggaccagcaggccatggacagggcccaccgcttagggcagacaaagcaggttactgtgtaccggctcatctgtaaaggcaccattgaagaacgcattctgcaaagagccaaggagaagagtgagattcagcggatggtgatttcaggtgggaacttcaaaccagataccttgaaacccaaagaggtggttagtcttcttctagacgacgaagagttggagaagaaactgaggctgcggcaggaagagaaacggcaacaggaggaaaccaaccgagtgaaagagcgcaagcggaagcgggaaaagtatgcagagaagaagaaaaaagaagatgaattggatgggaaaaggagaaaagagggtgtgaacctggtgatcccatttgttccctcggctgataactccaacctctctgctgacggagatgactccttcattagcgtggactcagccatgccaagccctttcagtgagatctccatcagcagtgagctgcacactggctccattcccctggacgagagcagcagtgacatgctggtcattgtggatgacccagcctcctcagcccctcagtctcgagctaccaactctcccgcatccataacaggctccgtctcagataccgtgaatggaatttccattcaggaaatgccagctgcaggacgtggtcactcagcccgaagccgaggccgccccaaaggttcaggaagcacagccaaaggagcagggaagggccggagccgaaagtccacggcaggcagtgctgctgcaatggcaggagccaaagccggggctgcagcggcctctgcagctgcctatgccgcatacgggtacaacgtgtctaaagctcagactctggtaaccaaggccacaggctccaaggaagcttacgcgggaytggtgcttacgttcttgtctctctcygtccccacaggaatctccgccagcagtcctctgcagacatcccttgttcggcctgctggccttgctgactttggaccttcaagcgcctcttctcctttgagttcccctttgagcaagggaaataatgttcctgggaatcccaagaacctccacatgaccagcagcctagccccagactctctggtccggaaacagggcaaaggcaccaacccctctggaggacggtaaccatctgggccctccgacttccttcaaccaaaccagggctagagtcctgacctgccagtggtctttggatggcttgcccgtgcagcatcttgcatcctgagtcagaagtggaaatgtccagcaggggaaggacaggcaggtggatggtgtgagcacttttatcatctgtgtctcatcaggagcatctggggtgcctgtaggaggaaggccacagggcatggatcagccccactgcatctcaagtgaactgtatagccaagtcttaaacctctcacggggcaagcctgacacagaccccctttagatgctcaggcatactgtttccatcccgattccactcttcggctctgacacgtcccttgcaaagtctccgcaggtgctgtgaagagccttccatggtagagatttctcttaagagtgtgatttctcatagggctagtaagggagattgtatacctgttgtccacagtcttcaggcagctccccaggtctctgaaccccagagtgtcatcattggagagagcagtgactgcgagagatggtggaggccgctaagcatggtagaggctagaggaagtctatccacaggcagttgtgttcccagcaattcctcccatcctgcatggttcacaccaagagaaccttcagatcctaccagcaaccgtagcaccttccacccaggggactcccagaagccagtaaagagaccaggagccacctcaatcagcaggacagcctcactgcccctcttgcagagtcccctttgcccatcctgaatgcacagtctccctgctcatgcccttcagtcccctgcttggctgtatgcactgtctatattgcactgagagaggaagggacagcaggagtgaggtgaagagggcggagagagggggcaggctcggcaccggccctcccagcccggccagcctgagcttgctgccctccagtagagacagaggggcagtgtttgcawgggagrtgtttctgcctgtccctgcctgatgtccctggtggagcaggtacctccgggcgggcaagcctctgatttgcacacctgaaaatcgcggaattgagtttcgatagattgatttttaaaacttttttggagtagggggtataggggaatcatttaatttaaatcattaagattcccctgctcaaacccagattcctgtgtacagatgctatttagagggaatcagaaaaatgccaagccttttctctttgaatgtgctatttttataactgaacttgtacatatgtataaagagagacacatcttccttttactaactggataaaaaaatcttaaataaaatggagtgagataattttatgtaaattg

SEQ ID NO: 6607 - DNA, 6997 bp, Homo sapiens
cctctccttcccctaaagagatcttatcaacttggctgcaccttcccacctctagcctgcgggaacaaatatcccaggatcccgggcggtttcgattgacgttacttccgggaaaagtaaccttgcatcggcggttgcgggcctggaaagctctcgcgacattttctcctgcgagatctgcttgctcactgtagcgatgacaycctcctcctcctccccgccgcctttcggcaatcttcgccagtcccagtcccgactaatctgtactcagatggcatggatcagggtctcccctcgaaccccggttcgcacggggcgtcaggtggcagcggcggggtgcgagctgcgcgaggccgacggcagcggcactacgggtggccacgggcaggcgacgagcagtgagtgtgggcggggtgggggtaagccacccgtgtagcggctcgattgttctggcctggctatggcgcctctcctcccccccgccatggctccccgtgtccctgctccgctcctctcagtgagtgaaagtggccgccgccgccgccggcccagcgcccgcagccgcctcagcgccgccgccatcttggggtcccaggagccgcggagggagcgagctaggagcgtccacgcccaacgcagtcaccgtcccacggcctcagagagcgaaccgcggctccaccgtcggcggggcgacccccccctccggaccccgcccgcaccccgccccccctccgccgccgtcgcggcggcggggccagccgtgcagtcggaggtccttgtgcatgaagacagatttgttctatggcctcggagttgggtgccagggatgatggaggctgcactgagctggcaaagcccctctatcttcagtacttggagagggccctccggttggaccattttctgcgacaaacgtcagctatcttcaataggaatatttctagtgatgacagtgaagatggactggatgacagtaatccattattgccccagtctggggatcccttaatacaagttaaggaagaacctccaaattcattgcttggtgaaacttctggagcaggcagttctggaatgttaaacacatattctctgaatggagttctacagtcagaatcaaaatgtgataaggggaatttatataatttctctaagctgaagaaaagcagaaagtggctaaagagcattctgctaagtgatgaatccagcgaggctgattctcagagtgaagacgatgatgaagaagaactcaatctcagcagagaagaacttcacaacatgcttcgactacacaaatataagaaacttcaccaaaataagtatagtaaagacaaggagttgcagcaatatcagtactacagtgcaggcctgctctccacatatgaccctttctatgagcaacaacggcacctacttggacccaagaaaaagaaatttaaggaggaaaagaaacttaaagctaagttgaaaaaagtgaagaaaaaaagacgaagagatgaagaactttcctctgaagaatcccctcgtcgccatcaccaccagaccaaagtctttgccaagttttctcacgatgcacctccccctggcactaagaaaaagcacttatccattgagcagctgaatgctcgtcgcaggaaagtatggctcagcattgtgaaaaaggaactaccaaaggcaaataagcagaaagcttcagctcgtaacctgtttctcaccaatagccgaaagcttgctcaccagtgcatgaaggaggtgcgtcgagctgccttgcaggcmcagaagaactgtaaggaaaccttgcctcgtgcccgccgcctcaccaaggagatgcttctgtactggaagaaatatgagaaagtagagaaggagcaccgcaagagagcagagaaggaagctttggagcagcggaagttggatgaggaaatgcgggaggccaagaggcaacagcgaaaactcaacttcttaattacccagacagagttgtatgcccatttcatgagtcgcaaacgagatatgggtcatgatggtatccaggaagaaatcctaaggaaactggaagacagttctacccagagacaaatcgatataggtggaggagtggtagttaacatcacacaggaggattatgatagtaaccattttaaagcccaggccctgaagaatgctgaaaatgcttaccatattcaccaagctcggacaaggtcatttgatgaagatgcaaaagaaagtcgagcagctgccctacgggcagcaaacaagtctggcactgggtttggggagagttatagcctggctaacccatctatccgggctggtgaggatattccacagcccacaatttttaatggcaaattgaaaggttatcaactgaaaggcatgaattggttggccaatctatatgaacagggtattaatggcattcttgctgatgaaatgggccttggtaaaacagtacagagcattgcccttctggcccatctggctgagagagagaacatttggggacctttcttaataatttcacctgcgtctacacttaacaattggcaccaggagtttactagatttgttcctaaatttaaggtgctaccatattggggaaatcctcatgatagaaaagtcatcagaaggttctggagtcagaagaccctctacactcaggatgcccccttccatgtggttattaccagctatcagctggtggtgcaggatgtaaagtatttccagcgggtcaagtggcaatacatggtactggatgaggctcaggcgctcaagagtagttccagtgttcgttggaagatcctcttacagttccagtgtcggaatcggcttttgctaaccgggaccccaattcagaacaccatggcagagctttgggctctgctgcatttcattatgccaacattatttgattcacatgaggaatttaatgaatggttttccaaggacattgagagccatgccgaaaacaaatctgctattgatgagaatcaactttctcgcttacacatgattttgaagccatttatgctgaggagaatcaagaaagatgtggaaaatgaattatctgacaagattgagattctaatgtattgccaactgaccagccgacagaagctgctatatcaggcactaaagaacaaaatttccattgaggatttattgcagtcttctatgggctctacccaacaagcacagaacaccaccagcagcctcatgaatctggtcatgcagtttaggaaggtgtgtaatcacccggagttatttgaacggcaagaaacttggtctccatttcatatttccctaaagccataccacatttcaaagtttatctaccgtcatggacagatcagggtcttcaatcattcacgagacaggtggttaagggttctttctccatttgcaccagactatatccaacggtctctctttcacagaaaaggtrttaatgaagaaagctgtttctctttccttcgctttattgatatatctccagcagaaatggcaaaccttatgcttcagggacttttggccagatggttagctcttttcctgtctctgaaagcctcctacaggctccatcagctacgctcctggggagcgccagaaggggagagccaccagagatacctgaggaacaaggatttccttcttggggttaattttccactctcctttccaaacctttgcagctgccctttgttaaagtctcttgttttcagcagccactgtaaagcagtgagtggctactcagaccaggttgtccatcagcggagatcagctacctcctcgctgcgtcgctgcctgctcactgagctgccatcttttttgtgtgtggccagtccacgacgcttggagcggttacgcttccttcagctagagcaggaacatacgtgtcctcaggaaggaygcgctgaacgcttaagggggcagcccctgaaggttaccgcagtgccattggattcttactgcaatgaccgaagtgcagaatatgaaaggcgagttctgaaggaaggagggagtctggcagccaagcagtgtttgttgaatggggcccctgaactggctgcagactggctaaatagacgatcacagttcttcccagagccagctggaggtctgtggagcatcagacctcagaatggctggtctttcatcaggattccaggcaaggagagcctcatcactgacagtggaaagctgtatgcccttgatgkcctgctgactcggctcaagtctcaagggcatagggtccttatctactcccagatgaccaggatgatagacctactggaggaatacatggtttacaggaagcatacctacatgaggcttgatggctcatccaagatctcggagaggcgagacatggttgctgattttcagaacaggaatgacatctttgtgttcctgttaagcacacgagctggaggactgggtatcaatctcactgctgcagacacagtgattttctatgatagcgactggaaccccactgtggaccagcaggccatggacagggcccaccgcttagggcagacaaagcaggttactgtgtaccggctcatctgtaaaggcaccattgaagaacgcattctgcaaagagccaaggagaagagtgagattcagcggatggtgatttcaggtgggaacttcaaaccagataccttgaaacccaaagaggtggttagtcttcttctagacgacgaagagttggagaagaaactgaggctgcggcaggaagagaaacggcaacaggaggaaaccaaccgagtgaaagagcgcaagcggaagcgggaaaagtatgcagagaagaagaaaaaagaagatgaattggatgggaaaaggagaaaagagggtgtgaacctggtgatcccatttgttccctcggctgataactccaacctctctgctgacggagatgactccttcattagcgtggactcagccatgccaagccctttcagtgagatctccatcagcagtgagctgcacactggctccattcccctggacgagagcagcagtgacatgctggtcattgtggatgacccagcctcctcagcccctcagtctcgagctaccaactctcccgcatccataacaggctccgtctcagataccgtgaatggaatttccattcaggaaatgccagctgcaggacgtggtcactcagcccgaagccgaggccgccccaaaggttcaggaagcacagccaaaggagcagggaagggccggagccgaaagtccacggcaggcagtgctgctgcaatggcaggagccaaagccggggctgcagcggcctctgcagctgcctatgccgcatacgggtacaacgtgtctaaagctcagactctggtaaccaaggccacaggctccaaggaagcttacgcgggaytggtgcttacgttcttgtctctctcygtccccacaggaatctccgccagcagtcctctgcagacatcccttgttcggcctgctggccttgctgactttggaccttcaagcgcctcttctcctttgagttcccctttgagcaagggaaataatgttcctgggaatcccaagaacctccacatgaccagcagcctagccccagactctctggtccggaaacagggcaaaggcaccaacccctctggaggacggtaaccatctgggccctccgacttccttcaaccaaaccagggctagagtcctgacctgccagtggtctttggatggcttgcccgtgcagcatcttgcatcctgagtcagaagtggaaatgtccagcaggggaaggacaggcaggtggatggtgtgagcacttttatcatctgtgtctcatcaggagcatctggggtgcctgtaggaggaaggccacagggcatggatcagccccactgcatctcaagtgaactgtatagccaagtcttaaacctctcacggggcaagcctgacacagaccccctttagatgctcaggcatactgtttccatcccgattccactcttcggctctgacacgtcccttgcaaagtctccgcaggtgctgtgaagagccttccatggtagagatttctcttaagagtgtgatttctcatagggctagtaagggagattgtatacctgttgtccacagtcttcaggcagctccccaggtctctgaaccccagagtgtcatcattggagagagcagtgactgcgagagatggtggaggccgctaagcatggtagaggctagaggaagtctatccacaggcagttgtgttcccagcaattcctcccatcctgcatggttcacaccaagagaaccttcagatcctaccagcaaccgtagcaccttccacccaggggactcccagaagccagtaaagagaccaggagccacctcaatcagcaggacagcctcactgcccctcttgcagagtcccctttgcccatcctgaatgcacagtctccctgctcatgcccttcagtcccctgcttggctgtatgcactgtctatattgcactgagagaggaagggacagcaggagtgaggtgaagagggcggagagagggggcaggctcggcaccggccctcccagcccggccagcctgagcttgctgccctccagtagagacagaggggcagtgtttgcawgggagrtgtttctgcctgtccctgcctgatgtccctggtggagcaggtacctccgggcgggcaagcctctgatttgcacacctgaaaatcgcggaattgagtttcgatagattgatttttaaaacttttttggagtagggggtataggggaatcatttaatttaaatcattaagattcccctgctcaaacccagattcctgtgtacagatgctatttagagggaatcagaaaaatgccaagccttttctctttgaatgtgctatttttataactgaacttgtacatatgtataaagagagacacatcttccttttactaactggataaaaaaatcttaaataaaatggagtgagataattttatgtaaattg

SEQ ID NO: 6608 - DNA, 1650 bp, Homo sapiens
ctcagactctggtaaccaaggccacaggctccaaggaagcttacgcgggaytggtgcttacgttcttgtctctctcygtccccacaggaatctccgccagcagtcctctgcagacatcccttgttcggcctgctggccttgctgactttggaccttcaagcgcctcttctcctttgagttcccctttgagcaagggaaataatgttcctgggaatcccaagaacctccacatgaccagcagcctagccccagactctctggtccggaaacagggcaaaggcaccaacccctctggaggacggtaaccatctgggccctccgacttccttcaaccaaaccagggctagagtcctgacctgccagtggtctttggatggcttgcccgtgcagcatcttgcatcctgagtcagaagtggaaatgtccagcaggggaaggacaggcaggtggatggtgtgagcacttttatcatctgtgtctcatcaggagcatctggggtgcctgtaggaggaaggccacagggcatggatcagccccactgcatctcaagtgaactgtatagccaagtcttaaacctctcacggggcaagcctgacacagaccccctttagatgctcaggcatactgtttccatcccgattccactcttcggctctgacacgtcccttgcaaagtctccgcaggtgctgtgaagagccttccatggtagagatttctcttaagagtgtgatttctcatagggctagtaagggagattgtatacctgttgtccacagtcttcaggcagctccccaggtctctgaaccccagagtgtcatcattggagagagcagtgactgcgagagatggtggaggccgctaagcatggtagaggctagaggaagtctatccacaggcagttgtgttcccagcaattcctcccatcctgcatggttcacaccaagagaaccttcagatcctaccagcaaccgtagcaccttccacccaggggactcccagaagccagtaaagagaccaggagccacctcaatcagcaggacagcctcactgcccctcttgcagagtcccctttgcccatcctgaatgcacagtctccctgctcatgcccttcagtcccctgcttggctgtatgcactgtctatattgcactgagagaggaagggacagcaggagtgaggtgaagagggcggagagagggggcaggctcggcaccggccctcccagcccggccagcctgagcttgctgccctccagtagagacagaggggcagtgtttgcawgggagrtgtttctgcctgtccctgcctgatgtccctggtggagcaggtacctccgggcgggcaagcctctgatttgcacacctgaaaatcgcggaattgagtttcgatagattgatttttaaaacttttttggagtagggggtataggggaatcatttaatttaaatcattaagattcccctgctcaaacccagattcctgtgtacagatgctatttagagggaatcagaaaaatgccaagccttttctctttgaatgtgctatttttataactgaacttgtacatatgtataaagagagacacatcttccttttactaactggataaaaaaatcttaaataaaatggagtgagataattttatgtaaattg

SEQ ID NO: 6609 - DNA, 6585 bp, Homo sapiens
cctctccttcccctaaagagatcttatcaacttggctgcaccttcccacctctagcctgcgggaacaaatatcccaggatcccgggcggtttcgattgacgttacttccgggaaaagtaaccttgcatcggcggttgcgggcctggaaagctctcgcgacattttctcctgcgagatctgcttgctcactgtagcgatgacaycctcctcctcctccccgccgcctttcggcaatcttcgccagtcccagtcccgactaatctgtactcagatggcatggatcagggtctcccctcgaaccccggttcgcacggggcgtcaggtggcagcggcggggtgcgagctgcgcgaggccgacggcagcggcactacgggtggccacgggcaggcgacgagcagtgagtgtgggcggggtgggggtaagccacccgtgtagcggctcgattgttctggcctggctatggcgcctctcctcccccccgccatggctccccgtgtccctgctccgctcctctcagtgagtgaaagtggccgccgccgccgccggcccagcgcccgcagccgcctcagcgccgccgccatcttggggtcccaggagccgcggagggagcgagctaggagcgtccacgcccaacgcagtcaccgtcccacggcctcagagagcgaaccgcggctccaccgtcggcggggcgacccccccctccggaccccgcccgcaccccgccccccctccgccgccgtcgcggcggcggggccaggcggcccgagccgtgcagtcggaggtccttgtgcatgaagacagatttgttctatggcctcggagttgggtgccagggatgatggaggctgcactgagctggcaaagcccctctatcttcagtacttggagagggccctccggttggaccattttctgcgacaaacgtcagctatcttcaataggaatatttctagtgatgacagtgaagatggactggatgacagtaatccattattgccccagtctggggatcccttaatacaagttaaggaagaacctccaaattcattgcttggtgaaacttctggagcaggcagttctggaatgttaaacacatattctctgaatggagttctacagtcagaatcaaaatgtgataaggggaatttatataatttctctaagctgaagaaaagcagaaagtggctaaagagcattctgctaagtgatgaatccagcgaggctgattctcagagtgaagacgatgatgaagaagaactcaatctcagcagagaagaacttcacaacatgcttcgactacacaaatataagaaacttcaccaaaataagtatagtaaagacaaggagttgcagcaatatcagtactacagtgcaggcctgctctccacatatgaccctttctatgagcaacaacggcacctacttggacccaagaaaaagaaatttaaggaggaaaagaaacttaaagctaagttgaaaaaagtgaagaaaaaaagacgaagagatgaagaactttcctctgaagaatcccctcgtcgccatcaccaccagaccaaagtctttgccaagttttctcacgatgcacctccccctggcactaagaaaaagcacttatccattgagcagctgaatgctcgtcgcaggaaagtatggctcagcattgtgaaaaaggaactaccaaaggcaaataagcagaaagcttcagctcgtaacctgtttctcaccaatagccgaaagcttgctcaccagtgcatgaaggaggtgcgtcgagctgccttgcaggcmcagaagaactgtaaggaaaccttgcctcgtgcccgccgcctcaccaaggagatgcttctgtactggaagaaatatgagaaagtagagaaggagcaccgcaagagagcagagaaggaagctttggagcagcggaagttggatgaggaaatgcgggaggccaagaggcaacagcgaaaactcaacttcttaattacccagacagagttgtatgcccatttcatgagtcgcaaacgagatatgggtcatgatggtatccaggaagaaatcctaaggaaactggaagacagttctacccagagacaaatcgatataggtggaggagtggtagttaacatcacacaggaggattatgatagtaaccattttaaagcccaggccctgaagaatgctgaaaatgcttaccatattcaccaagctcggacaaggtcatttgatgaagatgcaaaagaaagtcgagcagctgccctacgggcagcaaacaagtctggcactgggtttggggagagttatagcctggctaacccatctatccgggctggtgaggatattccacagcccacaatttttaatggcaaattgaaaggttatcaactgaaaggcatgaattggttggccaatctatatgaacagggtattaatggcattcttgctgatgaaatgggccttggtaaaacagtacagagcattgcccttctggcccatctggctgagagagagaacatttggggacctttcttaataatttcacctgcgtctacacttaacaattggcaccaggagtttactagatttgttcctaaatttaaggtgctaccatattggggaaatcctcatgatagaaaagtcatcagaaggttctggagtcagaagaccctctacactcaggatgcccccttccatgtggttattaccagctatcagctggtggtgcaggatgtaaagtatttccagcgggtcaagtggcaatacatggtactggatgaggctcaggcgctcaagagtagttccagtgttcgttggaagatcctcttacagttccagtgtcggaatcggcttttgctaaccgggaccccaattcagaacaccatggcagagctttgggctctgctgcatttcattatgccaacattatttgattcacatgaggaatttaatgaatggttttccaaggacattgagagccatgccgaaaacaaatctgctattgatgagaatcaactttctcgcttacacatgattttgaagccatttatgctgaggagaatcaagaaagatgtggaaaatgaattatctgacaagattgagattctaatgtattgccaactgaccagccgacagaagctgctatatcaggcactaaagaacaaaatttccattgaggatttattgcagtcttctatgggctctacccaacaagcacagaacaccaccagcagcctcatgaatctggtcatgcagtttaggaaggtgtgtaatcacccggagttatttgaacggcaagaaacttggtctccatttcatatttccctaaagccataccacatttcaaagtttatctaccgtcatggacagatcagggtcttcaatcattcacgagacaggtggttaagggttctttctccatttgcaccagactatatccaacggtctctctttcacagaaaaggtrttaatgaagaaagctgtttctctttccttcgctttattgatatatctccagcagaaatggcaaaccttatgcttcagggacttttggccagatggttagctcttttcctgtctctgaaagcctcctacaggctccatcagctacgctcctggggagcgccagaaggggagagccaccagagatacctgaggaacaaggatttccttcttggggttaattttccactctcctttccaaacctttgcagctgccctttgttaaagtctcttgttttcagcagccactgtaaagcagtgagtggctactcagaccaggttgtccatcagcggagatcagctacctcctcgctgcgtcgctgcctgctcactgagctgccatcttttttgtgtgtggccagtccacgagttaccgcagtgccattggattcttactgcaatgaccgaagtgcagaatatgaaaggcgagttctgaaggaaggagggagtctggcagccaagcagtgtttgttgaatggggcccctgaactggctgcagactggctaaatagacgatcacagttcttcccagagccagctggaggtctgtggagcatcagacctcagaatggctggtctttcatcaggattccaggcaaggagagcctcatcactgacagtggaaagctgtatgcccttgatgkcctgctgactcggctcaagtctcaagggcatagggtccttatctactcccagatgaccaggatgatagacctactggaggaatacatggtttacaggaagcatacctacatgaggcttgatggctcatccaagatctcggagaggcgagacatggttgctgattttcagaacaggaatgacatctttgtgttcctgttaagcacacgagctggaggactgggtatcaatctcactgctgcagacacagtgattttctatgatagcgactggaaccccactgtggaccagcaggccatggacagggcccaccgcttagggcagacaaagcaggttactgtgtaccggctcatctgtaaaggcaccattgaagaacgcattctgcaaagagccaaggagaagagtgagattcagcggatggtgatttcaggtgggaacttcaaaccagataccttgaaacccaaagaggtggttagtcttcttctagacgacgaagagttggagaagaaactgaggctgcggcaggaagagaaacggcaacaggaggaaaccaaccgagtgaaagagcgcaagcggaagcgggaaaagtatgcagagaagaagaaaaaagaagatgaattggatgggaaaaggagaaaagagggtgtgaacctggtgatcccatttgttccctcggctgataactccaacctctctgctgacggagatgactccttcattagcgtggactcagccatgccaagccctttcagtgagatctccatcagcagtgagctgcacactggctccattcccctggacgagagcagcagtgacatgctggtcattgtggatgacccagcctcctcagcccctcagtctcgagctaccaactctcccgcatccataacaggctccgtctcagataccgtgaatggaatttccattcaggaaatgccagctgcaggacgtggtcactcagcccgaagccgaggccgccccaaaggttcaggaagcacagccaaaggagcagggaagggccggagccgaaagtccacggcaggcagtgctgctgcaatggcaggagccaaagccggggctgcagcggcctctgcagctgcctatgccgcatacgggtacaacgtgtctaaaggaatctccgccagcagtcctctgcagacatcccttgttcggcctgctggccttgctgactttggaccttcaagcgcctcttctcctttgagttcccctttgagcaagggaaataatgttcctgggaatcccaagaacctccacatgaccagcagcctagccccagactctctggtccggaaacagggcaaaggcaccaacccctctggaggacggtaaccatctgggccctccgacttccttcaaccaaaccagggctagagtcctgacctgccagtggtctttggatggcttgcccgtgcagcatcttgcatcctgagtcagaagtggaaatgtccagcaggggaaggacaggcaggtggatggtgtgagcacttttatcatctgtgtctcatcaggagcatctggggtgcctgtaggaggaaggccacagggcatggatcagccccactgcatctcaagtgaactgtatagccaagtcttaaacctctcacggggcaagcctgacacagaccccctttagatgctcaggcatactgtttccatcccgattccactcttcggctctgacacgtcccttgcaaagtctccgcaggtgctgtgaagagccttccatggtagagatttctcttaagagtgtgatttctcatagggctagtaagggagattgtatacctgttgtccacagtcttcaggcagctccccaggtctctgaaccccagagtgtcatcattggagagagcagtgactgcgagagatggtggaggccgctaagcatggtagaggctagaggaagtctatccacaggcagttgtgttcccagcaattcctcccatcctgcatggttcacaccaagagaaccttcagatcctaccagcaaccgtagcaccttccacccaggggactcccagaagccagtaaagagaccaggagccacctcaatcagggcagtgtttgcawgggagrtgtttctgcctgtccctgcctgatgtccctggtggagcaggtacctccgggcgggcaagcctctgatttgcacacctgaaaatcgcggaattgagtttcgatagattgatttttaaaacttttttggagtagggggtataggggaatcatttaatttaaatcattaagattcccctgctcaaacccagattcctgtgtacagatgctatttagagggaatcagaaaaatgccaagccttttctctttgaatgtgctatttttataactgaacttgtacatatgtataaagagagacacatcttccttttactaactggataaaaaaatcttaaataaaatggagtgagataatttt

SEQ ID NO: 6610 - DNA, 2092 bp, Homo sapiens
agtggagtgggggcagcgtggttatgtggctggaccgccgcggatggctcagggttcttggacattggcgctacgaccttaggcgccctagctttaccaggacttggagtggcgataagggcccaatggcagaaacagtgtctacccaggttgggacagagggcgggctgagggcttcgcatcagcaaaacggtgacgctggtggcgacgcgaaggttgagctgtcccccgggcccccgaagccggctggccgggaagtggagccggccccagtaggcggggagcatccctcggctgcagccccaggcccgggcaagcataagaagcggcggggcgcaaccagggagcgtgtcgtgccgcccccgaagaagcggcggaccggggtgagcttcggagatgagcacttygcagaaaccagttattacttcgagggcggcctgcgtaaggtgcgsccctattactttgacttccggacctactgcaaaggtcgctgggtgggccacagcttgctgcacgtcttcagtaccgagttccgagctcagcccctggcytactatgaggccgcsgtccgggcgggccgcctgcaactcaacgagaagccggtgcaggacctcaacatcgtgctcaaggacartgatttcttgcggaacacagtgcacaggcatgagccaccagtcacagcagagcccattcgcctgctagctgagaacgaagatgtggtggttgtagacaagccttcstccattcccgttyacccctgtggccgcttccgacacaacacagttatcttcatcctaggcaaggagcaccaactcaaggagctacaccccttgcatcggcttgaccgccttacctcaggggtgcttatgtttkccaagacagctgcagtctctgagagaattcacgagcaggttcgggaccggcagctggagaaggagtacgtgtgccgggtggaaggggagttccccactgaggaagtgacctgtaaagaacccatcttagtggtgtcttacaaagtaggggtgtgccgtgtagatccccggggcaagccctgtgagacagtgttccagaggctaagctacaatggccagtccagtgtggtacggtgccggccactcacaggccgcacacaccagattcgagtccaccttcagttcttgggccatcccattctcaacgaccccatctacaactcagttgcctggggtccttctcgaggccggggcggctacattcccaagacaaacgaggagttgctacgggacctggtagcagagcaccaggccaaacagagcctggatgtgctagatctctgtgagggtgacctgtccccaggactcacagactctacggccccctcctcagagttgggcaaggacgacctggaagagttggctgcagctgcccagaagatggaggaagtagctgaggcagcccctcaggagttggacacaatagccttggcatcagagaaggcagttgaaacagatgtcatgaatcaagagacagacccactctgtgcagagtgccggctggtgcgacaggatcccttgccccaagaccttgtgatgttcctacatgccctacgctataaagggccaggctttgagtacttttcaccaatgcctgcctgggcacaggatgactggcaaaaggactgagggtgtggccaatggagggattgcttcttgggttgtgacaaggatgggctatagggcaagggctgaccccatgggctagtacttggggtttctataggaatgaggacgggcttctaaagagacctgctcatacttgctacctccttccagtgggaatttggagactttttggtttgtaaatatatccctttttctaacatctttgatgtctggttttcttccggcttcttttttattactgatgtaaaattcacataacataaaattaaccactttaactagccaggcacagtggctcatggctataatcctagtactttgggaggtagaagtgaaaggatcactggaggycaagagttcaaggttaaagtgaactgtgattgtgctgctgcactccagagcctaggtgacagagtgagaccctgtctctt

SEQ ID NO: 6611 - DNA, 2096 bp, Homo sapiens
tgrgagtggagtgggggcagcgtggttatgtggctggaccgccgcggatggctcagggttcttggacattggcgctacgaccttaggcgccctagctttaccaggacttggagtggcgataagggcccaatggcagaaacagtgtctacccaggttgggacagagggcgggctgagggcttcgcatcagcaaaacggtgacgctggtggcgacgcgaaggttgagctgtcccccgggcccccgaagccggctggccgggaagtggagccggccccagtaggcggggagcatccctcggctgcagccccaggcccgggcaagcataagaagcggcggggcgcaaccagggagcgtgtcgtgccgcccccgaagaagcggcggaccggggtgagcttcggagatgagcacttygcagaaaccagttattacttcgagggcggcctgcgtaaggtgcgsccctattactttgacttccggacctactgcaaaggtcgctgggtgggccacagcttgctgcacgtcttcagtaccgagttccgagctcagcccctggcytactatgaggccgcsgtccgggcgggccgcctgcaactcaacgagaagccggtgcaggacctcaacatcgtgctcaaggacartgatttcttgcggaacacagtgcacaggcatgagccaccagtcacagcagagcccattcgcctgctagctgagaacgaagatgtggtggttgtagacaagccttcstccattcccgttyacccctgtggccgcttccgacacaacacagttatcttcatcctaggcaaggagcaccaactcaaggagctacaccccttgcatcggcttgaccgccttacctcaggggtgcttatgtttkccaagacagctgcagtctctgagagaattcacgagcaggttcgggaccggcagctggagaaggagtacgtgtgccgggtggaaggggagttccccactgaggaagtgacctgtaaagaacccatcttagtggtgtcttacaaagtaggggtgtgccgtgtagatccccggggcaagccctgtgagacagtgttccagaggctaagctacaatggccagtccagtgtggtacggtgccggccactcacaggccgcacacaccagattcgagtccaccttcagttcttgggccatcccattctcaacgaccccatctacaactcagttgcctggggtccttctcgaggccggggcggctacattcccaagacaaacgaggagttgctacgggacctggtagcagagcaccaggccaaacagagcctggatgtgctagatctctgtgagggtgacctgtccccaggactcacagactctacggccccctcctcagagttgggcaaggacgacctggaagagttggctgcagctgcccagaagatggaggaagtagctgaggcagcccctcaggagttggacacaatagccttggcatcagagaaggcagttgaaacagatgtcatgaatcaagagacagacccactctgtgcagagtgccggctggtgcgacaggatcccttgccccaagaccttgtgatgttcctacatgccctacgctataaagggccaggctttgagtacttttcaccaatgcctgcctgggcacaggatgactggcaaaaggactgagggtgtggccaatggagggattgcttcttgggttgtgacaaggatgggctatagggcaagggctgaccccatgggctagtacttggggtttctataggaatgaggacgggcttctaaagagacctgctcatacttgctacctccttccagtgggaatttggagactttttggtttgtaaatatatccctttttctaacatctttgatgtctggttttcttccggcttcttttttattactgatgtaaaattcacataacataaaattaaccactttaactagccaggcacagtggctcatggctataatcctagtactttgggaggtagaagtgaaaggatcactggaggycaagagttcaaggttaaagtgaactgtgattgtgctgctgcactccagagcctaggtgacagagtgagaccctgtctctt

SEQ ID NO: 6612 - DNA, 3950 bp, Homo sapiens
ctcgcagtcagaggcgagtgatgctaggctgagcgcgtggcggcccgtgtcgtgccccgctgagccaagtgcggaagggcagcggcgcgctccagctctgctcgccgcgcgcagggcgggggggcctggccgcccgctgggagctgcggacgagcaggcgcgctgaggacccgagggaggacacggttaaagcattgctatcaactgtgaacccagagagccctccttagccaacacgctaactccgaagcctcccttacgcccccgaaccaccgaaggcggcgacacctgattcagcgcacaaacacaggtcccttctgtcccggatacaattacgcggcagacacacactcagactcgcgcggggcagccaagagacgagctatgaagtcttacactccatatttcattctcctgtggagtgctgttgggatagcgaaggctgccaaaatcatcatcgtgccgccaattatgtttgaaagccatatgtacattttcaagacgctagcctcagccttgcacgagagaggccaccatacagtgttcctcctctctgaaggcagagacatcgccccatctaatcattacagcctccagcgctacccagggatctttaacagtaccacctcagatgctttcctacagtccaagatgcggaatattttctctgggagattgacagcaatcgaactgtttgacatactggatcactatactaagaactgtgacctgatggttggcaaccatgccctgatccagggtctgaagaaagaaaaatttgacctgctgctggtggaccctaatgatatgtgtggatttgtgatagctcatcttttaggggttaaatatgctgtattttcaactggcctttggtatcctgctgaagtgggtgctcctgctccattagcatacgtcccagagtttaactcactcctcacagaccgcatgaacttgctkcaaaggatgaaaaataccggtgtttacctcatttccagattaggggtcagctttctggttcttcccaaatatgaaaggataatgcagaagtacaacctgctgcyrgagaagtccatgtatgatttggttcatgggtccagcctgtggatgctgtgtactgaygtagcactggaattcccaagacccactctgcctaatgttgtttatgtaggaggaatcctaaccaaaccagccagcccactaccagaagatctccaaagatgggtaaatggtgctaatgaacatggctttgtcttggtgtcttttggagctggtgtcaagtatctgtcagaagacattgctaacaaactggcaggagctctggggagattgcctcaaaaagtgatttggaggttttctggacccaaaccaaagaatctaggaaacaacactaaactcatagaatggttaccacaaaatgacctgcttgggcattcaaagattaaagccttcctgagccatggtggtttgaacagtatttttgaaactatrtatcatggtgtgcctgtagtgggaattccactctttggagaccattatgatactatgaccagagtacaggcaaaaggcatggggatattgctagaatggaagacagttactgaaaaagagctctatgaagcactagtgaaggttatcaataatcccagctaccgtcagagggctcagaagctttcggaaattcacaaggatcaacctggtcaccctgtcaatcgaactatctattggatagattatattattcgtcacaatggagcccatcacctacgtgccgctgtccatcagatctccttttgtcagtattttttactggatattgcctttgtgcttttgcttggtgctgccttgttatactttctcttgtcttgggtgacaaaatttatctacagaaaaatcaaaagtctgtggtctagaaataagcatagcacagttaatggacattaccacaatggaatcctcaatggcaagtacaaaagaaatggccatattaaacatgaaaagaaagtgaaatgagccaacagyccaggtgatagaaataaattggttcactcattgaatttttattgctattatttagtctaacagctactaaaagtaaaacatcagtaaacaattctaacatgcccttatgagatctactaatgaaattctgtggaattaagatggctgtaaaaagcacaaacctaaaatgcagaaatgtattttattcaaatactgatgtagagagttttggcactgaaccttttagaagccttaattatttaaatcaattcagtgactgtgtcagaccttagttttaaatcttgatatgtgcgtgtcccggatcaggaatggtttcatttttcttaataatgtgtgtgtgtgtatgtgtgtgtgtgtgtgtgtgtgtttgtgtgtgtgtgtgtgtgtcctaattaagagaatttttactggctgcttgttacatttgttgagggtacaacacactcaagaataaagtaaaaggatagtcaggatccagatgtttcttttctagcatttaatgtgtgtgaactcagaacactaccatgaaagaacacttccccccaaaactggatgcagaggaagaaaaaaaaaaaagaaatggcacagttttttgtatttttttttttagttattttttgttgttgttgtttgtattgtttytcttttctgatagagtatggccacttctgggggaaaaacatgtaattaagtaaatgtatacattggttttcacgttttacttttgttttcccactaccaataattttcctctggaagaattttatagttttttctatttcattttaatgagtaacaatatgttaaatgcataattaagacaaagcaatgaaattctgactttattcaaagtactgaagattattgcttctagggcatttttaaacagcaccattgtattgttgaatgtttatgtaactgatggcttttctataatgtaatttttgaatgttcaggtgttacatttccaaagtttaacttttaaaaaaccatcttctgatcccttttattgtctgggccatacaatctatattacataggtgccaacatttaattcttttaaatggaacatttgcagttttccatattggtacctgctttttctggagaggtttgagatcttgttaacaaatcagactttacactatatacagatgtgacagataaattgaaccacttgtttgtgaaaatgagttcctgtcatcttcctcattcactcagccctcaccccagcagccttttccggtcattgtagctgacatggagcagtgacagtattcatttgagaacagggatgcaagtcacagacatcataaaatcagggtctccctgctgaagcattcactagttggcaactatgaatttattccatgtcattctgtttacttagcacttgcactacccttgttggttgagtgtatgctttatttgtttctagtttgaaatcccayatctgatagctgagagtaggcaaatacaacatttacctaatgtcattcactaacatggaagagttgtgaaaattctagagtgctgtaaatccttggcatacactatgacaaacaacttcattactctcccaccaggagctgctctcctgcacttagaaataatgtcacaagtagttttctaatgtacaatgcagacaaatgtactgctctctgaatacttgaagaaatggtattatacatacatagaaacttattagttataccttttcacaatcttattacgatgttgccgttaaaagggaaaaaagacacaggcaatgaatggtgggatagtaagaggacttagagtgtatgaatgagttgattttacttttttggaatttgattaagttgacagtaggcactgattggatgattaaacataagttaatctccactgtgataaaaacttaaataataaacatgatttaaaatagagaa

SEQ ID NO: 6613 - DNA, 1733 bp, Homo sapiens
caggccctgccgcgtcaggccgctcctctcggctccgcgctccttycctcgcgcgtgggyacccgcccccgagcggtgagagcgcgtgcgcgcgcgcccttctcygtgggcgagccagccagtcccgctgcacacgctcgcagtctgtgggccctccgggaggcggcggaggtcaccgcggggagaggggcgggcgcagcatggcagcctccttacgkctcctcggagctgcctccggtctccggtactggagccggcggctgcggccggcagccggcagctttgcagcggtgtgttctaggtcagtggcttcaaagactccagttggattcattggactgggcaacatggggaatccaatggcaaaaaatctcatgaaacatggctatccacttattatttatgatgtgttccctgatgcctgcaaagagtttcaagatgcaggtgaacaggtagtatcttccccagcagatgttgctgaaaaagctgacagaattattacaatgctgcccaccagtatcaatgcaatagaagcttattccggagcaaatgggattctaaaaaaagtgaagaagggctcattattaatagattccagcactattgatcctgcagtttcaaaagaattggccaaagaagttgagaaaatgggagcagttttcatggatgcccctgtttctggtggtgtaggagctgcacgatctgggaacctcacgtttatggtgggaggagttgaagatgaatttgctgctgcccaagagttgctggggtgcatgggctccaacgtggtgtactgtggagctgttgggactgggcaggcggcaaagatctgcaacaacatgctgttagctattagtatgattggaactgctgaagctatgaatcttggaatcaggttagggcttgacccaaaactactggctaaaatcctaaatatgagctcaggacggtgttggtcaagtgacacttayaatcctgtacctggagtgatggatggcgttccctcggctaataactatcagggtggatttggaacaacactcatggctaaggatctgggattggcacaagactctgctaccagcacaaagagcccaatccttcttggcagtctggcccatcagatctacaggatgatgtgtgcaaagggctactcaaagaaagacttctcatccgtgttccagttcctacgagaggaggagaccttctgagtgtgccctttggccacggacactgttgggaaccaaactctgtcttggagcctccttttagctcactccacaagtaaatggatttaatcaaaggatgaaacccatcttaaaggaaagaaaaggaattggtgtgaagagagaagttagagaagggaaatgcagtgaattactatctgtgtccatcaggaagtttgtcctgttaaccaaatggttactgcactaccagggttactggtttattttccagggagctgataaagcaggagaactgttgctgcatgttttctatttggactccgtcacaatatggtaggatatccctcaccaactcccgacactcagcagacttgtttttatatttttttctttcttgtwcattcttactacgtattttttgacttaagaatgacatctttagaygcatttcagagccaatgatgatatttgctttagataattattatattattataaatatagccatattattttgaattcaaataaatttctatactggtaata

SEQ ID NO: 6614 - DNA, 1981 bp, Homo sapiens
caggccctgccgcgtcaggccgctcctctcggctccgcgctccttycctcgcgcgtgggyacccgcccccgagcggtgagagcgcgtgcgcgcgcgcccttctcygtgggcgagccagccagtcccgctgcacacgctcgcagtctgtgggccctccgggaggcggcggaggtcaccgcggggagaggggcgggcgcagcatggcagcctccttacgkctcctcggagctgcctccggtctccggtactggagccggcggctgcggccggcagccggcagctttgcagcggtgtgttctaggtcagtggcttcaaagactccagttggattcattggactgggcaacatggggaatccaatggcaaaaaatctcatgaaacatggctatccacttattatttatgatgtgttccctgatgcctgcaaagagtttcaagatgcaggtgaacaggtagtatcttccccagcagatgttgctgaaaaagctgacagaattattacaatgctgcccaccagtatcaatgcaatagaagcttattccggagcaaatgggattctaaaaaaagtgaagaagggctcattattaatagattccagcactattgatcctgcagtttcaaaagaattggccaaagaagttgagaaaatgggagcagttttcatggatgcccctgtttctggtggtgtaggagctgcacgatctgggaacctcacgtttatggtgggaggagttgaagatgaatttgctgctgcccaagagttgctggggtgcatgggctccaacgtggtgtactgtggagctgttgggactgggcaggcggcaaagatctgcaacaacatgctgttagctattagtatgattggaactgctgaagctatgaatcttggaatcaggttagggcttgacccaaaactactggctaaaatcctaaatatgagctcaggacggtgttggtcaagtgacacttayaatcctgtacctggagtgatggatggcgttccctcggctaataactatcagggtggatttggaacaacactcatggctaaggatctgggattggcacaagactctgctaccagcacaaagagcccaatccttcttggcagtctggcccatcagatctacaggatgatgtgtgcaaagggctactcaaagaaagacttctcatccgtgttccagttcctacgagaggaggagaccttctgagtgtgccctttggccacggacactgttgggaaccaaactctgtcttggagcctccttttagctcactccacaagtaaatggatttaatcaaaggtcacctatctgcttttgattgtctaggtcacagtaatccctaggatttttcaccgcttattctttttgtctttttaacaaacatattatccgaattttttttctgcaagccactgatagtctctgctaactagcttaattgacctttttacaaagtttgatccccaagcatcctcaactaaatcattgaatacttcaatcaggatattatctgctttactttacaaataaaaccaaatcttttgtcaacaggatgaaacccatcttaaaggaaagaaaaggaattggtgtgaagagagaagttagagaagggaaatgcagtgaattactatctgtgtccatcaggaagtttgtcctgttaaccaaatggttactgcactaccagggttactggtttattttccagggagctgataaagcaggagaactgttgctgcatgttttctatttggactccgtcacaatatggtaggatatccctcaccaactcccgacactcagcagacttgtttttatatttttttctttcttgtwcattcttactacgtattttttgacttaagaatgacatctttagaygcatttcagagccaatgatgatatttgctttagataattattatattattataaatatagccatattattttgaattcaaataaatttctatactggt

SEQ ID NO: 6615 - DNA, 1977 bp, Homo sapiens
caggccctgccgcgtcaggccgctcctctcggctccgcgctccttycctcgcgcgtgggyacccgcccccgagcggtgagagcgcgtgcgcgcgcgcccttctcygtgggcgagccagccagtcccgctgcacacgctcgcagtctgtgggccctccgggaggcggcggaggtcaccgcggggagaggggcgggcgcagcatggcagcctccttacgkctcctcggagctgcctccggtctccggtactggagccggcggctgcggccggcagccggcagctttgcagcggtgtgttctaggtcagtggcttcaaagactccagttggattcattggactgggcaacatggggaatccaatggcaaaaaatctcatgaaacatggctatccacttattatttatgatgtgttccctgatgcctgcaaagagtttcaagatgcaggtgaacagtatcttccccagcagatgttgctgaaaaagctgacagaattattacaatgctgcccaccagtatcaatgcaatagaagcttattccggagcaaatgggattctaaaaaaagtgaagaagggctcattattaatagattccagcactattgatcctgcagtttcaaaagaattggccaaagaagttgagaaaatgggagcagttttcatggatgcccctgtttctggtggtgtaggagctgcacgatctgggaacctcacgtttatggtgggaggagttgaagatgaatttgctgctgcccaagagttgctggggtgcatgggctccaacgtggtgtactgtggagctgttgggactgggcaggcggcaaagatctgcaacaacatgctgttagctattagtatgattggaactgctgaagctatgaatcttggaatcaggttagggcttgacccaaaactactggctaaaatcctaaatatgagctcaggacggtgttggtcaagtgacacttayaatcctgtacctggagtgatggatggcgttccctcggctaataactatcagggtggatttggaacaacactcatggctaaggatctgggattggcacaagactctgctaccagcacaaagagcccaatccttcttggcagtctggcccatcagatctacaggatgatgtgtgcaaagggctactcaaagaaagacttctcatccgtgttccagttcctacgagaggaggagaccttctgagtgtgccctttggccacggacactgttgggaaccaaactctgtcttggagcctccttttagctcactccacaagtaaatggatttaatcaaaggtcacctatctgcttttgattgtctaggtcacagtaatccctaggatttttcaccgcttattctttttgtctttttaacaaacatattatccgaattttttttctgcaagccactgatagtctctgctaactagcttaattgacctttttacaaagtttgatccccaagcatcctcaactaaatcattgaatacttcaatcaggatattatctgctttactttacaaataaaaccaaatcttttgtcaacaggatgaaacccatcttaaaggaaagaaaaggaattggtgtgaagagagaagttagagaagggaaatgcagtgaattactatctgtgtccatcaggaagtttgtcctgttaaccaaatggttactgcactaccagggttactggtttattttccagggagctgataaagcaggagaactgttgctgcatgttttctatttggactccgtcacaatatggtaggatatccctcaccaactcccgacactcagcagacttgtttttatatttttttctttcttgtwcattcttactacgtattttttgacttaagaatgacatctttagaygcatttcagagccaatgatgatatttgctttagataattattatattattataaatatagccatattattttgaattcaaataaatttctatactggt

SEQ ID NO: 6616 - DNA, 2747 bp, Homo sapiens
gcctctgctccgctctccttctatccagttggtctttagggcactgaaggaaactcttcttcagaaataacyttttaacttttcttctgtcagctgcctgccaatcacggagccagaggctgaggggaggctttgagccggtctgcgagtccsgaaggcaaagatcgcgaagcttggcgctccagaacgctcagggggcaggtgacacagtcgtgggttccccggcgggcgctggcttgacagtttcctccccgcccactggcaggggagcgccccgccgggctgcacgcgcgcgcgcgcaggggggcataaaagccgcggccgcgcggagacgcggagctcgcccaccgcccgccccagcagtggctgcaccatgcacgtgaacggcaaagtggcgctggtgaccggcgcggctcagggcataggcagagcctttgcagaggcgctgctgcttaagggcgccaaggtagcgctggtggattggaatcttgaagcaggtgtacagtgtaaagctgccctgsatgagcartttgaacctcagaagactctgttcatccagtgcgatgtggctgaccagcaacaactgagagacacttttagaaaagttgtagaccactttggaagactggacattttggtcaataatgctggagtgaataatgagaaaaactgggaaaaaactctgcaaattaatttggtttctgttatcagtggaacctatcttggtttggattacatgagtaagcaaaatggaggtgaaggcggcatcattatcaatatgtcatctttagcaggactcatgcccgttgcacagcagccggtttattgtgcttcaaagcatggcatagttggattcacacgctcagcagcgttggctgctaatcttatgaacagtggtgtgagactgaatgccatttgtccaggctttgttaacacagccatccttgaatcaattgaaaaagaagaaaacatgggacaatatatagaatataaggatcatatcaaggatatgattaaatactatggaattttggacccaccattgattgccaatggattgataacactcattgaagatgatgctttaaatggtgctattatgaagatcacaacttctaagggaattcattttcaagactatgatacaactccatttcaagcaaaaacccaatgaacagcttatgtgttagccatagctgaaaataagcacaaatagcttatattcagatcctatcttcatttgaatatagcttttaaatgaaatgttacagtttgaagttttccttcatgcacttggtgataaacrttttctaaatttttagttaagtatatggataaaaagttatgaactattaaaaatgtgatgtggaccaaaggctaggttgtaatcttgatagtctaaaaaatgatcaaaacaaatgattttcaaggaatattcaatattctgcctttcagaaagtgtatttatatctgtgcttcataaatattaatgtttttaaaagaggaaakctacttaacaatgacaaatatttcacaataataatttttacttatataccatctttcaactgaacatttcagttcttccaagagcttcttagagtagtatattttgggggcagtcaaggaataaactacagtgtaaacatatcccagatgaaaactgctgtatggaaaaatgacagaaagtaactgattgacactgttgattcacagttcarcctcctatctgggaaagacatttctttcctctgctcactttaagaacttttaccgactccaaaaatctcaggaattaaacttttaacagttacagcaataaagaatagttagtactccaaaaatattatatttaagatgctcaacaagaaaaaaatgcaaatgtaatatttttttcaaattacttctttattgacttgtccaaatttcaaaagtgcctacccttcaataaaacttttttattctgatctccataaattacttagtcttctatgtatagctatcaaggaaataaaaccaattttgccacagccacaactgtaaatgtttttgtacccatgctgaaactcataacaacacagacataaaaatagctgtgaggttttgctttttttgttgtcagctatcttaagaatcattaaatacacctgctttgggtaaaactctttgcaagcagtaattaacactagtaacagtgaaagcacaagatttccaaatcagtcgttttctcaaaaaaatatcgtataagtgactcatcctgtctgctaactccagacctcccagcttgaagccaaatctttccatgtgagattgatatggatttcctagaagtactggaatgttgtcatatcttgccctattttaattctgctatagaaaacaattgccttcacttttaaggagtaatttgaatattaataactctggtctagattttcatataatgtattaaagacaaagtagtgaacatcaatgaacatctgatagagataaactgtaatcaggcataagcttgtttgtatgttctggcagtgactaatcagtaaatgatgtcggtttgcccagtatcacttatcttctgtatttttcctctgtcgtgtaaatagtataaccttttcatttatggacaattttttggactagtagccttcaatatacattctgctttgaattaattttttcaaatgtgagttacataagttaaaaacttactttaaatcttaccttctataggtagctctaaataa

SEQ ID NO: 6617 - DNA, 3073 bp, Homo sapiens
gcctctgctccgctctccttctatccagttggtctttagggcactgaaggaaactcttcttcagaaataacyttttaacttttcttctgtcagctgcctgccaatcacggagccagaggctgaggggaggctttgagccggtctgcgagtccsgaaggcaaagatcgcgaagcttggcgctccagaacgctcagggggcaggtgacacagtcgtgggttccccggcgggcgctggcttgacagtttcctccccgcccactggcaggggagcgccccgccgggctgcacgcgcgcgcgcgcaggggggcataaaagccgcggccgcgcggagacgcggagctcgcccaccgcccgccccagcagtggctgcaccatgcacgtgaacggcaaagtggcgctggtgaccggcgcggctcagggcataggcagagcctttgcagaggcgctgctgcttaagggcgccaaggtagcgctggtggattggaatcttgaagcaggtgtacagtgtaaagctgccctgsatgagcartttgaacctcagaagactctgttcatccagtgcgatgtggctgaccagcaacaactgagagacacttttagaaaagttgtagaccactttggaagactggacattttggtcaataatgctggagtgaataatgagaaaaactgggaaaaaactctgcaaattaatttggtttctgttatcagtggaacctatcttggtttggattacatgagtaagcaaaatggaggtgaaggcggcatcattatcaatatgtcatctttagcaggactcatgcccgttgcacagcagccggtttattgtgcttcaaagcatggcatagttggattcacacgctcagcagcgttggctgctaatcttatgaacagtggtgtgagactgaatgccatttgtccaggctttgttaacacagccatccttgaatcaattgaaaaagaagaaaacatgggacaatatatagaatataaggatcatatcaaggatatgattaaatactatggaattttggacccaccattgattgccaatggattgataacactcattgaagatgatgctttaaatggtgctattatgaagatcacaacttctaagggaattcattttcaagactatgatacaactccatttcaagcaaaaacccaatgaacagcttatgtgttagccatagctgaaaataagcacaaatagcttatattcagatcctatcttcatttgaatatagcttttaaatgaaatgttacagtttgaagttttccttcatgcacttggtgataaacrttttctaaatttttagttaagtatatggataaaaagttatgaactattaaaaatgtgatgtggaccaaaggctaggttgtaatcttgatagtctaaaaaatgatcaaaacaaatgattttcaaggaatattcaatattctgcctttcagaaagtgtatttatatctgtgcttcataaatattaatgttcttcagaacatcattttaaaggagatacttgaattgttatttaaatcaaaccagatgtaaaacactcacatacaagttcatactttaaaagaggaaakctacttaacaatgacaaatatttcacaataataatttttacttatataccatctttcaactgaacatttcagttcttccaagagcttcttagagtagtatattttgggggcagtcaaggaataaactacagtgtaaacatatcccagatgaaaactgctgtatggaaaaatgacagaaagtaactgattgacactgttgattcacagttcarcctcctatctgggaaagacatttctttcctctgctcactttaagaacttttaccgactccaaaaatctcaggaattaaacttttaacagttacagcaataaagaatagttagtactccaaaaatattatatttaagatgctcaacaagaaaaaaatgcaaatgtaatatttttttcaaattacttctttattgacttgtccaaatttcaaaagtgcctacccttcaataaaacttttttattctgatctccataaattacttagtcttctatgtatagctatcaaggaaataaaaccaattttgccacagccacaactgtaaatgtttttgtacccatgctgaaactcataacaacacagacataaaaatagctgtgaggttttgctttttttgttgtcagctatcttaagaatcattaaatacacctgctttgggtaaaactctttgcaagcagtaattaacactagtaacagtgaaagcacaagatttccaaatcagtcgttttctcaaaaaaatatcgtataagtgactcatcctgtctgctaactccagacctcccagcttgaagccaaatctttccatgtgagattgatatggatttcctagaagtactggaatgttgtcatatcttgccctattttaattctgctatagaaaacaattgccttcacttttaaggagtaatttgaatattaataactctggtctagattttcatataatgtattaaagacaaagtagtgaacatcaatgaacatctgatagagataaactgtaatcaggcataagcttgtttgtatgttctggcagtgactaatcagtaaatgatgtcggtttgcccagtatcacttatcttctgtatttttcctctgtcgtgtaaatagtataaccttttcatttatggacaattttttggactagtagccttcaatatacattctgctttgaattaattttttcaaatcaataaattatgtagacatttaaaatcaaatatcaagtagaattgaaaaatgtgagttacataagttaaaaacttactttaaatcttaccttctataggtagctctaaataaattcatatggttatatgryatctctggtgtatactgattgagaaaataattaaactgaagttaggggagggggaccttggtttcttgtatttttcagtgaatatcctaatgtaaatggtatatatatttttccaatgtgtttttcttagtaaaatgaagttggtacttctcagaacagcaacactagaaata

SEQ ID NO: 6618 - DNA, 2666 bp, Homo sapiens
gcctctgctccgctctccttctatccagttggtctttagggcactgaaggaaactcttcttcagaaataacyttttaacttttcttctgtcagctgcctgccaatcacggagccagaggctgaggggaggctttgagccggtctgcgagtccsgaaggcaaagatcgcgaagcttggcgctccagaacgctcagggggcaggtgacacagtcgtgggttccccggcgggcgctggcttgacagtttcctccccgcccactggcaggggagcgccccgccgggctgcacgcgcgcgcgcgcaggggggcataaaagccgcggccgcgcggagacgcggagctcgcccaccgcccgccccagcagtggctgcaccatgcacgtgaacggcaaagtggcgctggtgaccggcgcggctcagggcataggcagagcctttgcagaggcgctgctgcttaagggcgccaaggtagcgctggtggattggaatcttgaagcaggtgtacagtgtaaagctgccctgsatgagcartttgaacctcagaagactctgttcatccagtgcgatgtggctgaccagcaacaactgagagacacttttagaaaagttgtagaccactttggaagactggacattttggtcaataatgctggagtgaataatgagaaaaactgggaaaaaactctgcaaattaatttggtttctgttatcagtggaacctatcttggtttggattacatgagtaagcaaaatggaggtgaaggcggcatcattatcaatatgtcatctttagcaggactcatgcccgttgcacagcagccggtttattgtgcttcaaagcatggcatagttggattcacacgctcagcagcgcccaccattgattgccaatggattgataacactcattgaagatgatgctttaaatggtgctattatgaagatcacaacttctaagggaattcattttcaagactatgatacaactccatttcaagcaaaaacccaatgaacagcttatgtgttagccatagctgaaaataagcacaaatagcttatattcagatcctatcttcatttgaatatagcttttaaatgaaatgttacagtttgaagttttccttcatgcacttggtgataaacrttttctaaatttttagttaagtatatggataaaaagttatgaactattaaaaatgtgatgtggaccaaaggctaggttgtaatcttgatagtctaaaaaatgatcaaaacaaatgattttcaaggaatattcaatattctgcctttcagaaagtgtatttatatctgtgcttcataaatattaatgttcttcagaacatcattttaaaggagatacttgaattgttatttaaatcaaaccagatgtaaaacactcacatacaagttcatactttaaaagaggaaakctacttaacaatgacaaatatttcacaataataatttttacttatataccatctttcaactgaacatttcagttcttccaagagcttcttagagtagtatattttgggggcagtcaaggaataaactacagtgtaaacatatcccagatgaaaactgctgtatggaaaaatgacagaaagtaactgattgacactgttgattcacagttcarcctcctatctgggaaagacatttctttcctctgctcactttaagaacttttaccgactccaaaaatctcaggaattaaacttttaacagttacagcaataaagaatagttagtactccaaaaatattatatttaagatgctcaacaagaaaaaaatgcaaatgtaatatttttttcaaattacttctttattgacttgtccaaatttcaaaagtgcctacccttcaataaaacttttttattctgatctccataaattacttagtcttctatgtatagctatcaaggaaataaaaccaattttgccacagccacaactgtaaatgtttttgtacccatgctgaaactcataacaacacagacataaaaatagctgtgaggttttgctttttttgttgtcagctatcttaagaatcattaaatacacctgctttgggtaaaactctttgcaagcagtaattaacactagtaacagtgaaagcacaagatttccaaatcagtcgttttctcaaaaaaatatcgtataagtgactcatcctgtctgctaactccagacctcccagcttgaagccaaatctttccatgtgagattgatatggatttcctagaagtactggaatgttgtcatatcttgccctattttaattctgctatagaaaacaattgccttcacttttaaggagtaatttgaatattaataactctggtctagattttcatataatgtattaaagacaaagtagtgaacatcaatgaacatctgatagagataaactgtaatcaggcataagcttgtttgtatgttctggcagtgactaatcagtaaatgatgtcggtttgcccagtatcacttatcttctgtatttttcctctgtcgtgtaaatagtataaccttttcatttatggacaattttttggactagtagccttcaatatacattctgctttgaattaattttttcaaatgtgagttacataagttaaaaacttactttaaatcttaccttctataggtagctctaaataa

SEQ ID NO: 6619 - DNA, 1053 bp, Homo sapiens
ggcgtgggcgccaggcgggcggggcactggggattaattgttcggcgatcgctggctgccgggacttttctcgcgctggtctcttcggtggtcagggatggcgcggaagtcgaacttgccygtgcttctcktgccgtttctgctctgccaggccctagygcgctgctccagccctctgcccctggtcgtcaacacttggccctttaagaatgcaaccgaagcagcgtggagggcattagcatctggaggctctgccctggatgcagtggagagcgrctgtgccatgtgwgagagagagcagtgtgacggcyctgtaggctttggaggaagtcctgatgaacttggagaaaccacactagatgccatgatcatggatggcactactatggatgtagragyagtaggagatctcagacgaattaaaaatgctattggtgtggcacggaaagtactggaacatacaacacacacacttttagtaggagagtcagccaccacatytgctcaaagtatggggtttatcaatgaagacttatctaccastgcttctcaagctcttcattcagattggcttgctcggaattsccagccaaattattrgaggaatgttataccagatccctcaaaatactgcggaccctacaaaccacctggtatcttaaagcaggatattcctatccataaagaaacagaagatgatcgtggtcatgacactattggcatggttgtaatccataagacaggacatattgctgctggtacatctacaaatrgagactcaccaatacctggagctggagcctatgctgacgatactgcasrggcagccgcagccactgggaatggtgatatattgatgcgcttcctgccaagttagtttcatggtttataattcckaaaaaaatcagccaactgaggaaaaagtggactgcatctaatccatctytactgtcaacatctgtatttaaagaagaaagaaacaaaggctgaaaaggctgctcactctcatcatctagtgttcctcatgtgttctaaagtctttttgtaaaataa

SEQ ID NO: 6620 - DNA, 2076 bp, Homo sapiens
ggcgtgggcgccaggcgggcggggcactggggattaattgttcggcgatcgctggctgccgggacttttctcgcgctggtctcttcggtggtcagggatggcgcggaagtcgaacttgccygtgcttctcktgccgtttctgctctgccaggccctagygcgctgctccagccctctgcccctggtcgtcaacacttggccctttaagaatgcaaccgaagcagcgtggagggcattagcatctggaggctctgccctggatgcagtggagagcgrctgtgccatgtgwgagagagagcagtgtgacggcyctgtaggctttggaggaagtcctgatgaacttggagaaaccacactagatgccatgatcatggatggcactactatggatgtagragyagtaggagatctcagacgaattaaaaatgctattggtgtggcacggaaagtactggaacatacaacacacacacttttagtaggagagtcagccaccacatytgctcaaagtatggggtttatcaatgaagacttatctaccastgcttctcaagctcttcattcagattggcttgctcggaattsccagccaaattattrgaggaatgttataccagatccctcaaaatactgcggaccctacaaaccacctggtatcttaaagcaggatattcctatccataaagaaacagaagatgatcgtggtcatgacactattggcatggttgtaatccataagacaggacatattgctgctggtacatctacaaatgrtataaaattcaaaatacatggccgtgtaggagactcaccaatacctggagctggagcctatgctgacgatactgcasrggcagccgcagccactgggaatggtgatatattgatgcgcttcctgccaagctaccaagctgtagaatacatgagaagaggagaagatccaaccatagcttgccaaaaagtgatttcaagaatccagaarcattttccagaattctytggggctgttatatgtgccaatgtgactggaagttacggtgctgcttgcaataaactttcaacatttactcagtttagtttcatggtttataattcckaaaaaaatcagccaactgaggaaaaagtggactgcatctaatccatctytactgtcaacatctgtatttaaagaagaaagaaacaaaggctgaaaaggctgctcactctcatcatctagtgttcctcatgtgttctaaagtctttttgtaaaataaacacaaaaataaatttatgttgaattggcactttctatatctgaaattgtattatctatttttatttmacctttcttatattatctgaagatgaatatgtatgtsgctgtattttgtatatatttaagttttaagtgacacttggatttctgatcagtgttgcaaaaaattgctactttgagatttatttccacagtgatrtattaaacccaaaaggaatcatcatatttggatgcttaaaatagagtatacaagttttttagacccaaagaaaaaaacagcagagtctcagcatgatcagtcctgattgaatttcattatgtcacagtgatgcatgtcttrgcactgattattggttttacttaatattccctaaaaacttgaggaaggaagatgatagaacatgagatactctttgttttgtacatactagaaaatacagctatcttctgatgagcaattgtgttgattttctttgcttttttcctcttatggagctctcagtgtgtgaaagttctaaagccacaagaatcaatgatgttttagctgctaatatttagtattgatcgtttcttttaaaaatgatttggggaacttgatctgtactgtaattttactaattccttgtgcagaggtgggtatggcaattagaagtcaagaaatgggttgtttagcttggtttgtttccctaacttctgattaactctctgtatgacaactctacagaagttgtgcgcgtgctttctcagcagcatttttccttcaamatcatctttttaatcaacagtcattaataaatgtacatgtacgatattcaaacttt

SEQ ID NO: 6621 - DNA, 1799 bp, Homo sapiens
ggcgtgggcgccaggcgggcggggcactggggattaattgttcggcgatcgctggctgccgggacttttctcgcgctggtctcttcggtggtcagggatggcgcggaagtcgaacttgccygtgcttctcktgccgtttctgctctgccaggccctagygcgctgctccagccctctgcccctggtcgtcaacacttggccctttaagaatgcaaccgaagcagcgtggagggcattagcatctggaggctctgccctggatgcagtggagagcgrctgtgccatgtgwgagagagagcagtgtgacggcyctgtaggctttggaggaagtcctgatgaacttggagaaaccacactagatgccatgatcatggatggcactactatggatgtagragyagtaggagatctcagacgaattaaaaatgctattggtgtggcacggaaagtactggaacatacaacacacacacttttagtaggagagtcagccaccacatytgctcaaagtatggggtttatcaatgaagacttatctaccastgcttctcaagctcttcattcagattggcttgctcggaattsccagccaaattattrgaggaatgttataccagatccctcaaaatactgcggaccctacaaaccacctggtatcttaaagcaggatattcctatccataaagaaacagaagatgatcgtggtcatgacactattggcatggttgtaatccataagacaggacatattgctgctggtacatctacaaatgrtataaaattcaaaatacatggccgtgtaggagactcaccaatacctggagctggagcctatgctgacgatactgcasrggcagccgcagccactgggaatggtgatatattgatgcgcttcctgccaagctaccaagctgtagaatacatgagaagaggagaagatccaaccatagcttgccaaaaagtgatttcaagaatccagaarcattttccagaattctytggggctgttatatgtgccaatgtgactggaagttacggtgctgcttgcaataaactttcaacatttactcagtttagtttcatggtttataattcckaaaaaaatcagccaactgaggaaaaagtggactgcatctaatccatctytactgtcaacatctgtatttaaagaagaaagaaacaaaggctgaaaaggctgctcactctcatcatctagtgttcctcatgtgttctaaagtctttttgtaaaataaacacaaaaataaatttatgttgaattggcactttctatatctgaaattgtattatctatttttatttmaccrgcactgattattggttttacttaatattccctaaaaacttgaggaaggaagatgatagaacatgagatactctttgttttgtacatactagaaaatacagctatcttctgatgagcaattgtgttgattttctttgcttttttcctcttatggagctctcagtgtgtgaaagttctaaagccacaagaatcaatgatgttttagctgctaatatttagtattgatcgtttcttttaaaaatgatttggggaacttgatctgtactgtaattttactaattccttgtgcagaggtgggtatggcaattagaagtcaagaaatgggttgtttagcttggtttgtttccctaacttctgattaactctctgtatgacaactctacagaagttgtgcgcgtgctttctcagcagcatttttccttcaamatcatctttttaatcaacagtcattaataaatgtacatgtacgatattc

SEQ ID NO: 6622 - DNA, 2000 bp, Homo sapiens
ggcgtgggcgccaggcgggcggggcactggggattaattgttcggcgatcgctggctgccgggacttttctcgcgctggtctcttcggtggtcagggatggcgcggaagtcgaacttgccygtgcttctcktgccgtttctgctctgccaggccctagygcgctgctccagccctctgcccctggtcgtcaacacttggccctttaagaatgcaaccgaagcagcgtggagggcattagcatctggaggctctgccctggatgcagtggagagcgrctgtgccatgtgwgagagagagcagtgtgacggcyctgtaggctttggaggaagtcctgatgaacttggagaaaccacactagatgccatgatcatggatggcactactatggatgtagragyagtaggagatctcagacgaattaaaaatgctattggtgtggcacggaaagtactggaacatacaacacacacacttttagtaggagagtcagccaccacatytgctcaaagtatggggtttatcaatgaagacttatctaccastgcttctcaagctcttcattcagattggcttgctcggaattsccagccaaattattrgaggaatgttataccagatccctcaaaatactgcggaccctacaaaccacctggtatcttaaagcaggatattcctatccataaagaaacagaagatgatcgtggtcatgacactattgccgtgtaggagactcaccaatacctggagctggagcctatgctgacgatactgcasrggcagccgcagccactgggaatggtgatatattgatgcgcttcctgccaagctaccaagctgtagaatacatgagaagaggagaagatccaaccatagcttgccaaaaagtgatttcaagaatccagaarcattttccagaattctytggggctgttatatgtgccaatgtgactggaagttacggtgctgcttgcaataaactttcaacatttactcagtttagtttcatggtttataattcckaaaaaaatcagccaactgaggaaaaagtggactgcatctaatccatctytactgtcaacatctgtatttaaagaagaaagaaacaaaggctgaaaaggctgctcactctcatcatctagtgttcctcatgtgttctaaagtctttttgtaaaataaacacaaaaataaatttatgttgaattggcactttctatatctgaaattgtattatctatttttatttmacctttcttatattatctgaagatgaatatgtatgtsgctgtattttgtatatatttaagttttaagtgacacttggatttctgatcagtgttgcaaaaaattgctactttgagatttatttccacagtgatrtattaaacccaaaaggaatcatcatatttggatgcttaaaatagagtatacaagttttttagacccaaagaaaaaaacagcagagtctcagcatgatcagtcctgattgaatttcattatgtcacagtgatgcatgtcttrgcactgattattggttttacttaatattccctaaaaacttgaggaaggaagatgatagaacatgagatactctttgttttgtacatactagaaaatacagctatcttctgatgagcaattgtgttgattttctttgcttttttcctcttatggagctctcagtgtgtgaaagttctaaagccacaagaatcaatgatgttttagctgctaatatttagtattgatcgtttcttttaaaaatgatttggggaacttgatctgtactgtaattttactaattccttgtgcagaggtgggtatggcaattagaagtcaagaaatgggttgtttagcttggtttgtttccctaacttctgattaactctctgtatgacaactctacagaagttgtgcgcgtgctttctcagcagcatttttccttcaamatcatctttttaatcaacagtcattaataaatgtacatgtacgatattcaaacttt

SEQ ID NO: 6623 - DNA, 5929 bp, Homo sapiens
gcgcgcgggaggagggagccgggaggagggggcggggccgcgccgcccgcgccgcgctgggcgctctcggccaatgagcggcgtccacatgccgcggcggcggcgaaaggggaggcagcggccgataaatgctattagagcagccgccgcggagccgtccccgacgccacctccttttccttcgycgcagtttcctccgccgctgtcgggcgtgcggcgctgagggacccgggcgagcgcgccgcgcaccgccccgccggctcgcctccctcgscgcgttccgccctcagtggtctgccgggcgccccctcctccggcccgggcggggcctctgatcgcctcaagagagcggggagggggctcgggggccgcggcctgccctcccggcgggcggctgagggcgagggaggccctcccttctggcgaggggagggagggtgggtcaggagcccccaacccgccctgcggagctcggggccgcgcgaggggcggttgtctgggggagggggcgcggggtgattcagcgcccggcgaggcggaagcggccgcaagaggaggaggggagagcccgtccgcgcctgggctcccggggtggcacgagcccgcggccggagtgcgaggcggaggcgaggaggccgcggggacgggaggcgaggccggccgggcccccgaagccatggagaacgcgcacaccaagacggtggaggaggtgctgggccacttcggcgtcaacgagagtacggrgctgagcctggarcaggtcaagaagcttaaggagagatggggctccrmcgagttaccggctgaagaaggaaaaaccttgctggaacttgtgattgagcagtttgaagacttgctagttaggattttattactggcagcatgtatatcttttgttttggcttggtttgaagaaggtgaagaaacaattacagcctttgtagaaccttttgtaattttactcatattagtagccaatgcaattgtgggtgtatggyaggaaagaaatgctgaaaatgccatcgaagcccttaaggaatakgagcctgaaatgggcaaagtgtatcracaggacagaaagagtgtgcagcggattaaagctaaagacatagttcctggtgatattgtagaaattgctgttggtgacaaagttcctgctgatataaggttaacttccatcaaatctaccacactaagagttgaccagtcaattctcacaggtgaatctgtctytgtcatcaagcacactgatcccgtccctgacccacgagctgtcaaccaagataaaaagaacatgctgttttctgrtacaaacattgctgctgggaaagctatgggagtggtggtagcaactggagttaacaccgaaattggcaagatccgggatgaaatggtggcaacagaacaggagagaacaccccttcagcaaaaactagatgaatttggggaacagctttccaaagtcatctcccttatttkcattgcagtctggatcrtaaatattgggcacttcaatgacccggttcatggagggtcctggatcagaggtgctatttactactttaaaattgcagtggccctggctgtagcagccattcctgaaggtctgcctgcagtcatcaccaccygcctggctyttggaactcgcagaatggcaaagaaaaatgccattgttcgaagcctcccgtctgyggaaacccttggttrtacttctgttayctgctcagacaagactggtacacttacaacaaaccagatgtcagtctgmaggatgttcattctggacagagtggaaggtgatacttgttcccttaatgagtttaccataactggatcaacttatgcacctattggagaagtgcataaagatgataaaccagtgaattgtcaccagtatgatggtctggtagrattagcaacaatttgtgctctttgtaatgactctgctttggattacaatgaggcaaagggtgtgtatgaaaaagttggagaagctacagagactgctctcacttgcctagtagagaagatgaatgtatttgataccgaattgaagggtctttctaaaatagaacgtgcaaatgcctgcaactcagtcattaaacagctgatgaaaaaggaattcactctagagttttcacgtgacagaaagtcaatgtyggtttactgtacaccaaataaaccaagcaggacatcaatgagcaagatgtttgtgaaggcaaggtgctcctgaaggtgtcattgacaggtgcacccacattygagttggaagtactaaggttcctatgacctctggagtcaaacagaagatcatgtctgtcattcgagagtrgggtagtggcagcgacacactgcgaygcctggccctggccactcatgacaacccactgagaagagaagaaatgcaccttgaggactctgccaactttattaaatatgagaccaatctgaccttcgttggctgcgtgggcatgctggatcctccgagaatcgaggtggcctcctccgtgaagctgtgmcggcaagcaggcatccgggtcatcatgatcactggggacaacaagggcactgctgtggccatctgtcgccgcatcggcatcttcgggcaggatgaggacgtgacgtcaaaagctttcacaggccgggagtttgatgaactcaacccctccgcccagcgagaygcctgcctgaacgcccgctgttytgctygagttgaacyctcccacrrgtctaaaatcgtagaatttcttcagtcttttgatkagattacagctatgactggcratggcgtgaacgatgctcctgctctgaagaaagccgagattggcattgctatrggctctggcactgcggtggctaaaaccgcctctgagatggtcctggcggatgacaacttctccaccattgtggctgmcgttgaggagrggcrggcaatctacaacaacatgaaacagttcatccgctacctcatctcgtccarcgtcvgggaagttgtctgtattttcctgacagcagcccttggatttcccgaggctttgattcctgttyagctgctctgggtcaatctggtgacagatggcctgcctrccactgcactgsggttcawccctcctgatctggacatcatgaataaacctccccggaacccaaaggaaccattgatcagcgggtggctctttttccgttacttgsctattggctgttacktcggcgctgctaccgtgggtgctgctgcatggtggttcattgctgctgacggtggtccaagagtgtccttctaccagctgagtcatttcctacagkgtaaagaggacaacccggactttgaaggcgtggattgtgcaatctttgaatccccatamccgatgacaatggcgctctctgttctagtaactatagaaatgtgtaacgccctcaacagcttgtmckaaaaccagtmcttgctgaggatgcccccctgggagaacatctggctcgtgggctccatctgcctgtccatgtcactccacttcctgatcctctatgtcgaacccttgccactcatcttccagatcacaccgctgaacgtgacccagtggctgatggtgctgaaaatctccttgcscgtgattctcatggatgagacgctcaagtttgtggcccgcaactacctggaacctggtaaagagtgtgtgcagcctgccaccaaatcctgctcgttctcggcatgcaccgatgggatttcctggccgtttgtgctgctcataatgcccctggtgatctgggtctatagcacagacactaactttagcgatatgttctggtcttgactgacagttttccataaagaagatgtttaacttaatcaattaatttttttattgtttaaagcaactgtctatttctgctgaattttcacatgaacataytggctggtgawggaggtttcatactctagattttgttttgctttttctgactccagtgggrcaagattttccttttttatacacataattaaagtgtccattgacatgtacagagaactaacactattttatgcaaatatttttttktagatgaaaaagcatgtacagtgttctgtttaatactcatccttgtataaaaaaaayagttgagccagcagacattgtcagcaaattaattggcagcagattttaggaaatgaatgtgtgtggttttttttctaaaactaaatagcatgtattgtgtcttttgcatgatgatccggatttaatttgatatcacagtctaatttttattcataagccaatttttctgcactgagcagagtcttgctacctcagtcagtattgttttggtttgctacttccctcacccactttggcctccgttcaccccaccccaccccacctctccccaccttacccccgccccgcttggcttcttctttaggattgtgatggttcgytctgtttacatcagttttaacgagaggtatgcctgtactcgcttgtgcagaaaacattgttccagattcaatcgactgggtttatgtcccttcacatagtttttaaggttatttatttaaatgtctaatgtattttattgtaacagacattgttttgccaacattgcytatttcagtggcacgtcatctagttttaaaaaaataaaacattttaaatggacagagaaaaataactgtcttgtctttaactcgtaagtggcttacctgggactaacagacatgtccaactttctctccagttcttagctcagaactttagttgtactctgcttgaggggaagaaggctcctgctctgctgtgtaggtagtcataggaattgtattcttaatgtacaggcactaattgtcatctgtgatgtacattttatgcaagtttctgctggcctggtatagagaacataagggcaagtgtgtatgtgtgtgtatgtgtgtgttttgtaaaatctgtaaatagcacatgaccaaatgaacatattgtatagaactatttttatttgaatgtggcactaaccaccaccaccgttactacgatcaatgtttgcgcatgttcragatgagtctcaccaacagtgtgtaagtcattaacagtcctaactgtggtgttttcctccaatgccttccaacatccatcaactaaccaatactggagtaaccgcttcctaaaccattttgcagaaatgtaagggtgttcggttgcgtgcatgtgcgtttttagcaacacatctaccaaccctgtgcatgactgatgttggggaaaaagaaaagtaaaaaacttcccaactcactttgtgttatgtggaggaaatgtgtattaccaatggggttgttagcttttaaatcaaaatactgattacagatgtacaatttagcttaatcagaaagcctctccagagaagtttggtttctttgctgcaagaggaatgaggctctgtaaccttatctaagaacttggaagccgtcagccaagtcgccacatttctctgcaaaatgtcatagcttatataaatgtacagtattcaattgtaatgcatgccttcggttgtaagtagccagatccctctccagtgacattggaacatgctactttttaattggccctgtacagtttgcttatttataaattcattaaaaacactacaggtgttgaatggttaaaatgtaggcctccagttcattttcagttattttctgagtgtgcagacagctatttcgcactgtattaaatgtaacttatttaatgaaatcwgaagcagtagacagatgttggtgcaatacaaatattgtgatgcatttatcttmataaaatgctaaatgtcaatttatcactgcgcatgtttgactttagactgtaaatagagatcagtttgtttctttctgtgctggtaacaatgagcgtygcacagacatggtttcaggtaaataaatctattctatgat

SEQ ID NO: 6624 - DNA, 5924 bp, Homo sapiens
gcgcgcgggaggagggagccgggaggagggggcggggccgcgccgcccgcgccgcgctgggcgctctcggccaatgagcggcgtccacatgccgcggcggcggcgaaaggggaggcagcggccgataaatgctattagagcagccgccgcggagccgtccccgacgccacctccttttccttcgycgcagtttcctccgccgctgtcgggcgtgcggcgctgagggacccgggcgagcgcgccgcgcaccgccccgccggctcgcctccctcgscgcgttccgccctcagtggtctgccgggcgccccctcctccggcccgggcggggcctctgatcgcctcaagagagcggggagggggctcgggggccgcggcctgccctcccggcgggcggctgagggcgagggaggccctcccttctggcgaggggagggagggtgggtcaggagcccccaacccgccctgcggagctcggggccgcgcgaggggcggttgtctgggggagggggcgcggggtgattcagcgcccggcgaggcggaagcggccgcaagaggaggaggggagagcccgtccgcgcctgggctcccggggtggcacgagcccgcggccggagtgcgaggcggaggcgaggaggccgcggggacgggaggcgaggccggccgggcccccgaagccatggagaacgcgcacaccaagacggtggaggaggtgctgggccacttcggcgtcaacgagagtacggrgctgagcctggarcaggtcaagaagcttaaggagagatggggctccrmcggtaggtgcagggcgaaaaaccttgctggaacttgtgattgagcagtttgaagacttgctagttaggattttattactggcagcatgtatatcttttgttttggcttggtttgaagaaggtgaagaaacaattacagcctttgtagaaccttttgtaattttactcatattagtagccaatgcaattgtgggtgtatggyaggaaagaaatgctgaaaatgccatcgaagcccttaaggaatakgagcctgaaatgggcaaagtgtatcracaggacagaaagagtgtgcagcggattaaagctaaagacatagttcctggtgatattgtagaaattgctgttggtgacaaagttcctgctgatataaggttaacttccatcaaatctaccacactaagagttgaccagtcaattctcacaggtgaatctgtctytgtcatcaagcacactgatcccgtccctgacccacgagctgtcaaccaagataaaaagaacatgctgttttctgrtacaaacattgctgctgggaaagctatgggagtggtggtagcaactggagttaacaccgaaattggcaagatccgggatgaaatggtggcaacagaacaggagagaacaccccttcagcaaaaactagatgaatttggggaacagctttccaaagtcatctcccttatttkcattgcagtctggatcrtaaatattgggcacttcaatgacccggttcatggagggtcctggatcagaggtgctatttactactttaaaattgcagtggccctggctgtagcagccattcctgaaggtctgcctgcagtcatcaccaccygcctggctyttggaactcgcagaatggcaaagaaaaatgccattgttcgaagcctcccgtctgyggaaacccttggttrtacttctgttayctgctcagacaagactggtacacttacaacaaaccagatgtcagtctgmaggatgttcattctggacagagtggaaggtgatacttgttcccttaatgagtttaccataactggatcaacttatgcacctattggagaagtgcataaagatgataaaccagtgaattgtcaccagtatgatggtctggtagrattagcaacaatttgtgctctttgtaatgactctgctttggattacaatgaggcaaagggtgtgtatgaaaaagttggagaagctacagagactgctctcacttgcctagtagagaagatgaatgtatttgataccgaattgaagggtctttctaaaatagaacgtgcaaatgcctgcaactcagtcattaaacagctgatgaaaaaggaattcactctagagttttcacgtgacagaaagtcaatgtyggtttactgtacaccaaataaaccaagcaggacatcaatgagcaagatgtttgtgaaggcaaggtgctcctgaaggtgtcattgacaggtgcacccacattygagttggaagtactaaggttcctatgacctctggagtcaaacagaagatcatgtctgtcattcgagagtrgggtagtggcagcgacacactgcgaygcctggccctggccactcatgacaacccactgagaagagaagaaatgcaccttgaggactctgccaactttattaaatatgagaccaatctgaccttcgttggctgcgtgggcatgctggatcctccgagaatcgaggtggcctcctccgtgaagctgtgmcggcaagcaggcatccgggtcatcatgatcactggggacaacaagggcactgctgtggccatctgtcgccgcatcggcatcttcgggcaggatgaggacgtgacgtcaaaagctttcacaggccgggagtttgatgaactcaacccctccgcccagcgagaygcctgcctgaacgcccgctgttytgctygagttgaacyctcccacrrgtctaaaatcgtagaatttcttcagtcttttgatkagattacagctatgactggcratggcgtgaacgatgctcctgctctgaagaaagccgagattggcattgctatrggctctggcactgcggtggctaaaaccgcctctgagatggtcctggcggatgacaacttctccaccattgtggctgmcgttgaggagrggcrggcaatctacaacaacatgaaacagttcatccgctacctcatctcgtccarcgtcvgggaagttgtctgtattttcctgacagcagcccttggatttcccgaggctttgattcctgttyagctgctctgggtcaatctggtgacagatggcctgcctrccactgcactgsggttcawccctcctgatctggacatcatgaataaacctccccggaacccaaaggaaccattgatcagcgggtggctctttttccgttacttgsctattggctgttacktcggcgctgctaccgtgggtgctgctgcatggtggttcattgctgctgacggtggtccaagagtgtccttctaccagctgagtcatttcctacagkgtaaagaggacaacccggactttgaaggcgtggattgtgcaatctttgaatccccatamccgatgacaatggcgctctctgttctagtaactatagaaatgtgtaacgccctcaacagcttgtmckaaaaccagtmcttgctgaggatgcccccctgggagaacatctggctcgtgggctccatctgcctgtccatgtcactccacttcctgatcctctatgtcgaacccttgccactcatcttccagatcacaccgctgaacgtgacccagtggctgatggtgctgaaaatctccttgcscgtgattctcatggatgagacgctcaagtttgtggcccgcaactacctggaacctggtaaagagtgtgtgcagcctgccaccaaatcctgctcgttctcggcatgcaccgatgggatttcctggccgtttgtgctgctcataatgcccctggtgatctgggtctatagcacagacactaactttagcgatatgttctggtcttgactgacagttttccataaagaagatgtttaacttaatcaattaatttttttattgtttaaagcaactgtctatttctgctgaattttcacatgaacataytggctggtgawggaggtttcatactctagattttgttttgctttttctgactccagtgggrcaagattttccttttttatacacataattaaagtgtccattgacatgtacagagaactaacactattttatgcaaatatttttttktagatgaaaaagcatgtacagtgttctgtttaatactcatccttgtataaaaaaaayagttgagccagcagacattgtcagcaaattaattggcagcagattttaggaaatgaatgtgtgtggttttttttctaaaactaaatagcatgtattgtgtcttttgcatgatgatccggatttaatttgatatcacagtctaatttttattcataagccaatttttctgcactgagcagagtcttgctacctcagtcagtattgttttggtttgctacttccctcacccactttggcctccgttcaccccaccccaccccacctctccccaccttacccccgccccgcttggcttcttctttaggattgtgatggttcgytctgtttacatcagttttaacgagaggtatgcctgtactcgcttgtgcagaaaacattgttccagattcaatcgactgggtttatgtcccttcacatagtttttaaggttatttatttaaatgtctaatgtattttattgtaacagacattgttttgccaacattgcytatttcagtggcacgtcatctagttttaaaaaaataaaacattttaaatggacagagaaaaataactgtcttgtctttaactcgtaagtggcttacctgggactaacagacatgtccaactttctctccagttcttagctcagaactttagttgtactctgcttgaggggaagaaggctcctgctctgctgtgtaggtagtcataggaattgtattcttaatgtacaggcactaattgtcatctgtgatgtacattttatgcaagtttctgctggcctggtatagagaacataagggcaagtgtgtatgtgtgtgtatgtgtgtgttttgtaaaatctgtaaatagcacatgaccaaatgaacatattgtatagaactatttttatttgaatgtggcactaaccaccaccaccgttactacgatcaatgtttgcgcatgttcragatgagtctcaccaacagtgtgtaagtcattaacagtcctaactgtggtgttttcctccaatgccttccaacatccatcaactaaccaatactggagtaaccgcttcctaaaccattttgcagaaatgtaagggtgttcggttgcgtgcatgtgcgtttttagcaacacatctaccaaccctgtgcatgactgatgttggggaaaaagaaaagtaaaaaacttcccaactcactttgtgttatgtggaggaaatgtgtattaccaatggggttgttagcttttaaatcaaaatactgattacagatgtacaatttagcttaatcagaaagcctctccagagaagtttggtttctttgctgcaagaggaatgaggctctgtaaccttatctaagaacttggaagccgtcagccaagtcgccacatttctctgcaaaatgtcatagcttatataaatgtacagtattcaattgtaatgcatgccttcggttgtaagtagccagatccctctccagtgacattggaacatgctactttttaattggccctgtacagtttgcttatttataaattcattaaaaacactacaggtgttgaatggttaaaatgtaggcctccagttcattttcagttattttctgagtgtgcagacagctatttcgcactgtattaaatgtaacttatttaatgaaatcwgaagcagtagacagatgttggtgcaatacaaatattgtgatgcatttatcttmataaaatgctaaatgtcaatttatcactgcgcatgtttgactttagactgtaaatagagatcagtttgtttctttctgtgctggtaacaatgagcgtygcacagacatggtttcaggtaaataaatctattctatgat

SEQ ID NO: 6625 - DNA, 5245 bp, Homo sapiens
gcgcgcgggaggagggagccgggaggagggggcggggccgcgccgcccgcgccgcgctgggcgctctcggccaatgagcggcgtccacatgccgcggcggcggcgaaaggggaggcagcggccgataaatgctattagagcagccgccgcggagccgtccccgacgccacctccttttccttcgycgcagtttcctccgccgctgtcgggcgtgcggcgctgagggacccgggcgagcgcgccgcgcaccgccccgccggctcgcctccctcgscgcgttccgccctcagtggtctgccgggcgccccctcctccggcccgggcggggcctctgatcgcctcaagagagcggggagggggctcgggggccgcggcctgccctcccggcgggcggctgagggcgagggaggccctcccttctggcgaggggagggagggtgggtcaggagcccccaacccgccctgcggagctcggggccgcgcgaggggcggttgtctgggggagggggcgcggggtgattcagcgcccggcgaggcggaagcggccgcaagaggaggaggggagagcccgtccgcgcctgggctcccggggtggcacgagcccgcggccggagtgcgaggcggaggcgaggaggccgcggggacgggaggcgaggccggccgggcccccgaagccatggagaacgcgcacaccaagacggtggaggaggtgctgggccacttcggcgtcaacgagagtacggrgctgagcctggarcaggtcaagaagcttaaggagagatggggctccrmcggtaggtgcagggcgaaaaaccttgctggaacttgtgattgagcagtttgaagacttgctagttaggattttattactggcagcatgtatatcttttgttttggcttggtttgaagaaggtgaagaaacaattacagcctttgtagaaccttttgtaattttactcatattagtagccaatgcaattgtgggtgtatggyaggaaagaaatgctgaaaatgccatcgaagcccttaaggaatakgagcctgaaatgggcaaagtgtatcracaggacagaaagagtgtgcagcggattaaagctaaagacatagttcctggtgatattgtagaaattgctgttggtgacaaagttcctgctgatataaggttaacttccatcaaatctaccacactaagagttgaccagtcaattctcacaggtgaatctgtctytgtcatcaagcacactgatcccgtccctgacccacgagctgtcaaccaagataaaaagaacatgctgttttctgrtacaaacattgctgctgggaaagctatgggagtggtggtagcaactggagttaacaccgaaattggcaagatccgggatgaaatggtggcaacagaacaggagagaacaccccttcagcaaaaactagatgaatttggggaacagctttccaaagtcatctcccttatttkcattgcagtctggatcrtaaatattgggcacttcaatgacccggttcatggagggtcctggatcagaggtgctatttactactttaaaattgcagtggccctggctgtagcagccattcctgaaggtctgcctgcagtcatcaccaccygcctggctyttggaactcgcagaatggcaaagaaaaatgccattgttcgaagcctcccgtctgyggaaacccttggttrtacttctgttayctgctcagacaagactggtacacttacaacaaaccagatgtcagtctgmaggatgttcattctggacagagtggaaggtgatacttgttcccttaatgagtttaccataactggatcaacttatgcacctattggagaagtgcataaagatgataaaccagtgaattgtcaccagtatgatggtctggtagrattagcaacaatttgtgctctttgtaatgactctgctttggattacaatgaggcaaagggtgtgtatgaaaaagttggagaagctacagagactgctctcacttgcctagtagagaagatgaatgtatttgataccgaattgaagggtctttctaaaatagaacgtgcaaatgcctgcaactcagtcattaaacagctgatgaaaaaggaattcactctagagttttcacgtgacagaaagtcaatgtyggtttactgtacaccaaataaaccaagcaggacatcaatgagcaagatgtttgtgaagggtgctcctgaaggtgtcattgacaggtgcacccacattygagttggaagtactaaggttcctatgacctctggagtcaaacagaagatcatgtctgtcattcgagagtrgggtagtggcagcgacacactgcgaygcctggccctggccactcatgacaacccactgagaagagaagaaatgcaccttgaggactctgccaactttattaaatatgagaccaatctgaccttcgttggctgcgtgggcatgctggatcctccgagaatcgaggtggcctcctccgtgaagctgtgmcggcaagcaggcatccgggtcatcatgatcactggggacaacaagggcactgctgtggccatctgtcgccgcatcggcatcttcgggcaggatgaggacgtgacgtcaaaagctttcacaggccgggagtttgatgaactcaacccctccgcccagcgagaygcctgcctgaacgcccgctgttytgctygagttgaacyctcccacrrgtctaaaatcgtagaatttcttcagtcttttgatkagattacagctatgactggcratggcgtgaacgatgctcctgctctgaagaaagccgagattggcattgctatrggctctggcactgcggtggctaaaaccgcctctgagatggtcctggcggatgacaacttctccaccattgtggctgmcgttgaggagrggcrggcaatctacaacaacatgaaacagttcatccgctacctcatctcgtccarcgtcvgggaagttgtctgtattttcctgacagcagcccttggatttcccgaggctttgattcctgttyagctgctctgggtcaatctggtgacagatggcctgcctrccactgcactgsggttcawccctcctgatctggacatcatgaataaacctccccggaacccaaaggaaccattgatcagcgggtggctctttttccgttacttgsctattggctgttacktcggcgctgctaccgtgggtgctgctgcatggtggttcattgctgctgacggtggtccaagagtgtccttctaccagctgagtcatttcctacagkgtaaagaggacaacccggactttgaaggcgtggattgtgcaatctttgaatccccatamccgatgacaatggcgctctctgttctagtaactatagaaatgtgtaacgccctcaacagcttgtmckaaaaccagtmcttgctgaggatgcccccctgggagaacatctggctcgtgggctccatctgcctgtccatgtcactccacttcctgatcctctatgtcgaacccttgccactcatcttccagatcacaccgctgaacgtgacccagtggctgatggtgctgaaaatctccttgcscgtgattctcatggatgagacgctcaagtttgtggcccgcaactacctggaacctggtaaagagtgtgtgcagcctgccaccaaatcctgctcgttctcggcatgcaccgatgggatttcctggccgtttgtgctgctcataatgcccctggtgatctgggtctatagcacagacactaactttagcgatatgttctggtcttgactgacagttttccataaagaagatgtttaacttaatcaattaatttttttattgtttaaagcaactgtctatttctgctgaattttcacatgaacataytggctggtgawggaggtttcatactctagattttgttttgctttttctgactccagtgggrcaagattttccttttttatacacataattaaagtgtccattgacatgtacagagaactaacactattttatgcaaatatttttttktagatgaaaaagcatgtacagtgttctgtttaatactcatccttgtataaaaaaaayagttgagccagcagacattgtcagcaaattaattggcagcagattttaggaaatgaatgtgtgtggttttttttctaaaactaaatagcatgtattgtgtcttttgcatgatgatccggatttaatttgatatcacagtctaatttttattcataagccaatttttctgcactgagcagagtcttgctacctcagtcagtattgttttggtttgctacttccctcacccactttggcctccgttcaccccaccccaccccacctctccccaccttacccccgccccgcttggcttcttctttaggattgtgatggttcgytctgtttacatcagttttaacgagaggtatgcctgtactcgcttgtgcagaaaacattgttccagattcaatcgactgggtttatgtcccttcacatagtttttaaggttatttatttaaatgtctaatgtattttattgtaacagacattgttttgccaacattgcytatttcagtggcacgtcatctagttttaaaaaaataaaacattttaaatggacagagaaaaataactgtcttgtctttaactcgtaagtggcttacctgggactaacagacatgtccaactttctctccagttcttagctcagaactttagttgtactctgcttgaggggaagaaggctcctgctctgctgtgtaggtagtcataggaattgtattcttaatgtacaggcactaattgtcatctgtgatgtacattttatgcaagtttctgctggcctggtatagagaacataagggcaagtgtgtatgtgtgtgtatgtgtgtgttttgtaaaatctgtaaatagcacatgaccaaatgaacatattgtatagaactatttttatttgaatgtggcactaaccaccaccaccgttactacgatcaatgtttgcgcatgttcragatgagtctcaccaacagtgtgtaagtcattaacagtcctaactgtggtgttttcctccaatgccttccaacatccatcaactaacgtgagtattttcttcctgggatttggatgctttagcctaaaggtgactgccaccaagtgagataactgtatgtcactaacttataagccgcctccatggcagatgctgctgtgctccctgatgc

SEQ ID NO: 6626 - DNA, 4450 bp, Homo sapiens
gcgcgcgggaggagggagccgggaggagggggcggggccgcgccgcccgcgccgcgctgggcgctctcggccaatgagcggcgtccacatgccgcggcggcggcgaaaggggaggcagcggccgataaatgctattagagcagccgccgcggagccgtccccgacgccacctccttttccttcgycgcagtttcctccgccgctgtcgggcgtgcggcgctgagggacccgggcgagcgcgccgcgcaccgccccgccggctcgcctccctcgscgcgttccgccctcagtggtctgccgggcgccccctcctccggcccgggcggggcctctgatcgcctcaagagagcggggagggggctcgggggccgcggcctgccctcccggcgggcggctgagggcgagggaggccctcccttctggcgaggggagggagggtgggtcaggagcccccaacccgccctgcggagctcggggccgcgcgaggggcggttgtctgggggagggggcgcggggtgattcagcgcccggcgaggcggaagcggccgcaagaggaggaggggagagcccgtccgcgcctgggctcccggggtggcacgagcccgcggccggagtgcgaggcggaggcgaggaggccgcggggacgggaggcgaggccggccgggcccccgaagccatggagaacgcgcacaccaagacggtggaggaggtgctgggccacttcggcgtcaacgagagtacggrgctgagcctggarcaggtcaagaagcttaaggagagatggggctccrmcggtaggtgcagggcgaaaaaccttgctggaacttgtgattgagcagtttgaagacttgctagttaggattttattactggcagcatgtatatcttttgttttggcttggtttgaagaaggtgaagaaacaattacagcctttgtagaaccttttgtaattttactcatattagtagccaatgcaattgtgggtgtatggyaggaaagaaatgctgaaaatgccatcgaagcccttaaggaatakgagcctgaaatgggcaaagtgtatcracaggacagaaagagtgtgcagcggattaaagctaaagacatagttcctggtgatattgtagaaattgctgttggtgacaaagttcctgctgatataaggttaacttccatcaaatctaccacactaagagttgaccagtcaattctcacaggtgaatctgtctytgtcatcaagcacactgatcccgtccctgacccacgagctgtcaaccaagataaaaagaacatgctgttttctgrtacaaacattgctgctgggaaagctatgggagtggtggtagcaactggagttaacaccgaaattggcaagatccgggatgaaatggtggcaacagaacaggagagaacaccccttcagcaaaaactagatgaatttggggaacagctttccaaagtcatctcccttatttkcattgcagtctggatcrtaaatattgggcacttcaatgacccggttcatggagggtcctggatcagaggtgctatttactactttaaaattgcagtggccctggctgtagcagccattcctgaaggtctgcctgcagtcatcaccaccygcctggctyttggaactcgcagaatggcaaagaaaaatgccattgttcgaagcctcccgtctgyggaaacccttggttrtacttctgttayctgctcagacaagactggtacacttacaacaaaccagatgtcagtctgmaggatgttcattctggacagagtggaaggtgatacttgttcccttaatgagtttaccataactggatcaacttatgcacctattggagaagtgcataaagatgataaaccagtgaattgtcaccagtatgatggtctggtagrattagcaacaatttgtgctctttgtaatgactctgctttggattacaatgaggcaaagggtgtgtatgaaaaagttggagaagctacagagactgctctcacttgcctagtagagaagatgaatgtatttgataccgaattgaagggtctttctaaaatagaacgtgcaaatgcctgcaactcagtcattaaacagctgatgaaaaaggaattcactctagagttttcacgtgacagaaagtcaatgtyggtttactgtacaccaaataaaccaagcaggacatcaatgagcaagatgtttgtgaagggtgctcctgaaggtgtcattgacaggtgcacccacattygagttggaagtactaaggttcctatgacctctggagtcaaacagaagatcatgtctgtcattcgagagtrgggtagtggcagcgacacactgcgaygcctggccctggccactcatgacaacccactgagaagagaagaaatgcaccttgaggactctgccaactttattaaatatgagaccaatctgaccttcgttggctgcgtgggcatgctggatcctccgagaatcgaggtggcctcctccgtgaagctgtgmcggcaagcaggcatccgggtcatcatgatcactggggacaacaagggcactgctgtggccatctgtcgccgcatcggcatcttcgggcaggatgaggacgtgacgtcaaaagctttcacaggccgggagtttgatgaactcaacccctccgcccagcgagaygcctgcctgaacgcccgctgttytgctygagttgaacyctcccacrrgtctaaaatcgtagaatttcttcagtcttttgatkagattacagctatgactggcratggcgtgaacgatgctcctgctctgaagaaagccgagattggcattgctatrggctctggcactgcggtggctaaaaccgcctctgagatggtcctggcggatgacaacttctccaccattgtggctgmcgttgaggagrggcrggcaatctacaacaacatgaaacagttcatccgctacctcatctcgtccarcgtcvgggaagttgtctgtattttcctgacagcagcccttggatttcccgaggctttgattcctgttyagctgctctgggtcaatctggtgacagatggcctgcctrccactgcactgsggttcawccctcctgatctggacatcatgaataaacctccccggaacccaaaggaaccattgatcagcgggtggctctttttccgttacttgsctattggctgttacktcggcgctgctaccgtgggtgctgctgcatggtggttcattgctgctgacggtggtccaagagtgtccttctaccagctgagtcatttcctacagkgtaaagaggacaacccggactttgaaggcgtggattgtgcaatctttgaatccccatamccgatgacaatggcgctctctgttctagtaactatagaaatgtgtaacgccctcaacagcttgtmckaaaaccagtmcttgctgaggatgcccccctgggagaacatctggctcgtgggctccatctgcctgtccatgtcactccacttcctgatcctctatgtcgaacccttgccactcatcttccagatcacaccgctgaacgtgacccagtggctgatggtgctgaaaatctccttgcscgtgattctcatggatgagacgctcaagtttgtggcccgcaactacctggaacctgcaatactggagtaaccgcttcctaaaccattttgcagaaatgtaagggtgttcggttgcgtgcatgtgcgtttttagcaacacatctaccaaccctgtgcatgactgatgttggggaaaaagaaaagtaaaaaacttcccaactcactttgtgttatgtggaggaaatgtgtattaccaatggggttgttagcttttaaatcaaaatactgattacagatgtacaatttagcttaatcagaaagcctctccagagaagtttggtttctttgctgcaagaggaatgaggctctgtaaccttatctaagaacttggaagccgtcagccaagtcgccacatttctctgcaaaatgtcatagcttatataaatgtacagtattcaattgtaatgcatgccttcggttgtaagtagccagatccctctccagtgacattggaacatgctactttttaattggccctgtacagtttgcttatttataaattcattaaaaacactacaggtgttgaatggttaaaatgtaggcctccagttcattttcagttattttctgagtgtgcagacagctatttcgcactgtattaaatgtaacttatttaatgaaatcwgaagcagtagacagatgttggtgcaatacaaatattgtgatgcatttatcttmataaaatgctaaatgtcaatttatcactgcgcatgtttgactttagactgtaaatagagatcagtttgtttctttctgtgctggtaacaatgagcgtygcacagacatggtttcaggtaaataaatctattctatgat

SEQ ID NO: 6627 - DNA, 4837 bp, Homo sapiens
cgaaaacggagaaaccccgggtccggcgagaggggctgtgacagtcggagtcccaagctgcggttcggctgctgccgagggctacatgattccctgaaagataagaacaatgttatgttggggatattggtctctgggccaacctggtatcagcaccaacctgcagggaattgtggctgagccccaggtgtgtgggttcatatctgacagaagtgtcaaggaagtggcctgtgggggaaaccactctgtgttcctgctggaagatggggaagtttacacrtgtggtttgaacaccaaggggcaactgggccatgagagggaaggaaacaagccagaacaaattggagctctggcagatcagcatatcattcatgtggcatgtggcgagtcccacagtctggccctcagtgaccgaggccagctgttttcttggggtgcagggagtgatggtcagctaggactcatgactactgaggattctgtggcagtgcccaggttaatacaaaagctgaaccagcaaacaatattacaagtttcctgtggcaactggcattgcttggctcttgcggctgatggccagttcttcacctggggaaagaacagccatgggcagcttggcttagggaaggagttcccctcccaagccagcccacagagggtgaggtccctggaggggatcccactggctcaggtggctgccggaggggctcacagctttgccctgtctctctcaggagctgtttttggctgggggatgaataatgccgggcagctagggctcagtgatgaaaaagatcgagaatctccatgccatgtaaaactcttacgcacgcaaaaagttgtctatattagttgtggagaagaacacacagcagttctcacaaagagtggaggtgtgtttacctttggcgctggttcctgtgggcaacttggacacgactccatgaatgatgaggttaaccctagaagagttctagagctgatgggtagtgaagtaactcaaattgcttgtggcagacaacataccctagccttcgtgccttcttctggactcatctatgcatttggttgtggagcaagaggtcaattaggaactgggcacacttgtaatgttaagtgcccatctcctgtcaagggttactgggctgcccacagtggccagctttcagcccgagctgatcgctttaaatatcatatcgttaagcagatcttctctggaggagaccagacttttgtactttgctccaaatacgagaattattctcctgctgttgacttcaggactatgaaccaagcacattataccagtttaataaatgatgaaaccatagcagtttggagacaaaaactctcagaacacaacaatgcaaatacaatcaatggtgttgttcagatattatcttctgcagcctgttggaatggaagttttcttgaaaaaaaaattgatgaacattttaaaacgagtcccaaaatccctgggattgacctgaactcaactagggtgttatttgagaagttaatgaactctcagcactccatgattctagaacagattttgaacagttttgaaagttgtctgattccccagttgtcaagctcaccaccagatgttgaagccatgagaatctatttaatactacctgagtttcccctrctccaggattccaagtattatataacattgactattcccttggctatggccattcttcggctggatacaaaccccagcaaagtactagataactggtggtctcaggtatgcccgaaatatttcatgaagctggtaaacctctataaaggtgcagtcctttatctactgaggggaagaaagacattcttaattcccgtactgtttaacaattatatcacagcagctctcaaactcttggagaagttatataaggtaaatcttaaagtgaagcatgtggaatatgatacattttacattcctgagatttccaatctcgtggacattcaggaagactacctcatgtggttcttgcatcaagcagggatgaaggctagaccatcaataatacaggatactgtaacactttgttcctaccctttcatctttgatgcccaagccaagaccaaaatgttacagacagatgctgaactacagatgcaggtggcagtcaatggagccaacctgcagaatgtcttcatgcttctcaccctggagcctctgctggccagaagccccttcctggtccttcacgttcgcaggaacaaccttgttggagatgccctaagagagctgagcattcattctgatattgatttgaaaaagcctctcaaagtaatctttgatggtgaagaagcagtggatgccggtggtgttacaaaggaattttttcttttgctgttaaaagaacttttgaatcccatctatggaatgtttacctactatcaagattcaaatctcttgtggttttcagacacgtgttttgtagagcacaactggtttcacttgattggtataacctgtggactagctatctacaactccactgtggtcgatctccacttcccattggctctctacaagaagttactcaatktaaagcctggcttggaagacttaaaggagttgtcacccactgaaggaaggagtctccaagagcttttrgattacccyggggaggatgtggaggaractttctgcctcaacttcacgatctgccgagaaagctatggagtgattgaacagaagaagctgatacctgggggagataatgtaactgtgtgcaaggataacaggcaggaatttgtggatgcttatgtgaattatgtcttccaaatctcagttcatgaatggtacacagccttctctagtggcttcctaaaggtgtgtggtggcaaagtacttgagctcttccagccttcagaactgagggctatgatggtggggaacagcaactacaactgggaagaactgsaagagactgccatctacaagggagattactcggccacacatcccactgtaaaactattttgggaaacatttcatgagtttccattggaaaagaagaagaagtttctcttgttcctgacaggcagcgatcggattcccatctacggcatggccagtctgcagattgtcatccagtccacagccagcggggaggagtacttgccggtggcccacacttgctacaaccttcttgacctccccaagtacagcagcaaagagattctgagtgcccggctgacccaggcccttgacaactatgaagggtttagtttggcctgaggcttctcagcttgtccagtatttcccttcgttcctcagtgtccacattgaggcytatacagaaaatcatggggagtgatttctatttttttattgtctaagtgggttgggacttttaaatactgagcctkgttgatgtgtttctgggattgtatagcagtaaacaacctttttgaaaaattagaggttggggatggggtgaaaaattggcccttgtatgggaggtgtttttgtttttgttttaaaccaaactacccagtattccttgcacttgtgaatgtgttgcactctgctggatgaaatggcagtggatttttaaactttaatttcccaaatgtctctctcagccctgatgttttctcacagtgcttccttgtccttctcttaacttctcattcctctataagaatgatttagactgacctgtccttttttatctgcgcatgcragaacatcaccttcctctgtacacttggaaatgcctctggcttgttgcagccctcctttaacccaaaggaggaaaggactgcttcagaaactcccaattccaaaaagctgagtctgggtccattattttggcagaactcctaagaatttatgggagcctatataaacatatctwgcttttaaaaagttcttgagggaatagcaactttcccatggctgtgcctatttcctagaccttttaaaagatgtgcagagcagcttagcattcgttgcagctgagcctaattttttcttgctcatccttgtccctttgacaataaggttaattgatagacccaccacctcttgcactctcgcttttggagcaagttgcattaactattttgagtctctatattgtccaagaaaagtagaaataataaatttactttccctttttctrtcaccttatgtcctctaccattttctccttcctcccttcccttattttctccttttcgtaccctgygtcctccctgattttcctttcgtttcttctttattttatcccattctctgttacttgactcagtgctcccttcctctcctctccttctagtggatgcatgcagcctttttttcaatttttatttaaattgcaaaatttttactcagattttttttcctcttccctaattgctaagatttaaggacgttctttattatgaaactttatcacattcgaaatgtttgtttacagtgggattttaggggggattgtgtttaaatcaaatatatgtattttaaaaataatgacatgctcaaccttcctcatcatggagtaagaaaattctacatgattaaagaatccatgtaagtctaattttaaattcctagtaactagagaaaagacttatttatataaaatgaagtatttatgaactgtgataaagcatcaaatcttgatgaaggattgtagatttttgctttttctttttgtttttaaaacttattccaattgctaaattggtagtttttcagtctttataaatacaggattaaaaatatatatacagttatatgaaatgtttattttctatgtgtgtgcatatagttcaatattatgcaataaatttggtgttttaactt

SEQ ID NO: 6628 - DNA, 4597 bp, Homo sapiens
aacttgggggamccagcgaaatggaagaagttaggtgtccagagcacgggactttctgctttcttaagaccggcgtccgcgatggcccgaataaaggaaagagcttctacgtgtgccgggcagacacktgcagcttcgtgcgggccaccgacattcctgtttcccattgcttattgcatgaggactttgtggtagagcttcagggtttgcttctgccacaggacaagaaagaatacagattgttcttccgatgcattagaagtaaggcagaggggaaacgctggtgtggaagtattccatggcaggatcctgattccaaagaacattctgtatccaataagtctcagcatgcatctgagacatttcatcattcttccaactggctgagaaatccattcaaggtacttgacaagaatcaagaaccagctctctggaaacagctcatcaaaggtgaaggtgaggaaaagaaggctgataagaagcaaagagaaaagggagatsagcttttcgatcaaaagraagaacagaagcctgaaatgatggagaaagacctctcatctggcctggtaccaaagaaaaaacaatctgtagttcaagagaagaagcaagaagagggagcagagattcagtgtgaggcagagactggaggcacacacaraagagacttttctgaaattaaatctcaacagtgccaaggtaatgagcttacaagaccatctgcatcttctcaggagaaatcaagtggtaagagtcaagatgtccaaagagaatcagaacctctgagagraaaggttacccagcttttgcctcaaaatgttcacagtcacaactcaataavcaagccccagaaagggggacccctcaacaaggagtacacgaabtgggaggctaaagaaacaaaggcaaaggatggccctagcatacaggccacccagaaaagcctgcctcaggggcatttccaagagcggccggagacccacagtgtgcctgctcctggaggaccagcggctcaggctgcaccagcagcaccagggctttccctgggtgagggccgtgaagctgccacaagcagtgacgacgaggaggaagatgatgttgtttttgtttcctctaagcctgggagccccctactctttgactcgactctggacttagagacgaaggaaaacctccaattccctgatcgaagtgtgcaaagaaaggtgtctcctgcctcaggtgtttccaagaaggtagaaccctcagacccagtagcccggcgtgtctaccttacaacacaaytgaaacaaaagaagagcacactggcatcagtgaacatccaggctcttccagacaagggtcagaagttgatcaaacaaatccaggagctggaggaagtactcagtggtcttaccctttccccagagcaaggaactaatgagaagagtaacagtcaagtaccacagcagagtcacttcaccaaaactaccactggccctccccacctggtgcctccccaacccyttcctcgtcgtggtacccaacctgtgggttctctagaactaaagtctgcctgccaggtgactgctggaggatccagtcagtgctatcgaggccatacaaaccaagatcacgttcatgcagtgtggaaaatcacragtgaagccatcggtcaactgcatcgctcacttgagtcatgtcctggtgagacggttgtggcagaagatcccgccgggctgaaggtccctttgctactacaccagaagcaggcattggcttggttactatggcgagaaagtcagaagccacaaggaggaattctggcagatgatatgggcttaggaaaaaccctgacaatgattgcgctcatcctgacccagaagaatcaagagaaaaaggaagaaaaggagaaaagcacagctttgacgtggctctccaaagatgactcttgtgactttacttcccatggaacactaatcatctgtcctgcctccctgatccatcattggaaaaatgaggtggagaaacgggtgaacagcaacaaactaagagtctatctctaccatgggccaaaccgsgattcacgtgccagagtcctctctacatatgacatcgtgatcactacctatagcctcgtggccaaggagattccyacaaacaagcaagaggcagagatcccaggtgcaaacctcaatgtggagggcacctcaacacctttgcttcgaatagcctgggctcgaatcataytggatgaagctcacaatgttaagaatccccgagtgcagacttccatagctgtgtgtaagctacaagcctgtgccygttgggctgtcactggaacccccattcaaaacaacttattggatatgtattcgctgctgaagtttctccgttgctctccatttgatgagttcaatctgtggaggagtcaggttgacaatggctcaaagaaaggaggagaacggttaagtattttaaccaagagccttttgctgaggagaacaaaagaccagctggactctactggcagacctttggtgatactgccccagcgtaaatttcagttgcaccatttaaagctttctgaagatgaagagactgtttacaatgtgttttttgcaagatcaaggtcagctctgcaatcctatctaaaaagacatgaaagtagaggcaaccaatctggaagaagccctaataatccattcagtagagtggcactggagtttgggtctgaggagcctagacactcggaggcagcagactcaccgagatccagcaccrtccacatactgtcccagttgctgagactccgccagtgttgctgtcatctttctttactgaagtcggccctggatccaatggaactgaagggtgaaggtcttgtcctttccctrgaagaacagctcagtgctttgaccttgtcagaactccgtgactcagagccatcttccactgtttcccttaacggcaccttcttcaagatggagctttttgaaggcatgcgagagagcaccaagatttcatctctgttggcagaattggaggcaattcaragaaattcagcatcccaaaagagtgtcattgtctctcagtggaccaacatgctgaaagttgtagcattgcacctgaagaagcatggactgacttatgccaccatcgatggctctgtcaatcccaagcagagaatggacttggtagaggcatttaaccactccagaggccctcaggtaatgctaatctctctcttggcyggaggtgttggtctaaacctgactggaggaaatcacctctttcttttggacatgcactggaatccatcacttgaagatcaagcttgtgaccgaatttaccgagtagggcagcagaaagatgttgtcatacacagatttgtttgtgagggaacagtagaagaaaagatcttacagctccaagaaaaaaagaaagatttggccaaacaagttctatcagggtctggagaatctgtcaccaagctcaccttggctsacctcagagtcctttttggcatctaacctcctgtggataagggctcagaatagcaccattgctggtttgtattaggatctgggaataacaacctaaccatgagccttgaactctgttctttgcatttcaatttcaccgtcaagcctttcaccttcctcaaaatgaggcataatcttatccccagaattgaggaggggttgtgttaaccaattakttaaccaattatgttaataatttatttaatgagtggtatggaaaccaattgatttttttagataaaagaatatgttttagagttggatgattttggaaaacaactctggcagaattgtatataagcttcagtaaagttcaaaaagcgggccaggtgtggtggctcatgcctgtaatcccgacactttgggaggccaaggcaggaggatggcttgaagccagtagttcaagaccagcctgggcaacatagtaagaccccatctctatgaagaataaaaaaatgagctaggcgtggtagtgcacacctgtagtcctagctacttgggaggctgaggcaggaggatcccttgagtccaggaggttgaggctgcagtgagctgtgattgtgccactgttttccagcctgggcaatacagtgagaccctgtctcaaaaaaaggaaaaaaaagctcaaaaagttctgtgttgcctttctcttcttagctgatgatgggagaaccagttactaccttctctaacacaggctccatcctatctcttcatctcttcttgccagtgatgttgcacctgtaaccatctttttatgggtggagcagagagtcaatccctgcagccaccctgcagccagccatctctgcagttctctcagtgcaggcagttcttcctctcaggctgaagatcaaggagatgctttgtacatgaacagatgctgagtatctgttatcattgtattgtttagtgtcagtgtatcatttagtatttgtatcactgtaccatttagtgttgtatatcactcagtcatttaatattggttatcaccatacagtttaatatttgtatcatttggttcattgtatcgtttagtatttctattataacatttctatttgtagtatttgtat

SEQ ID NO: 6629 - DNA, 4278 bp, Homo sapiens
aacttgggggamccagcgaaatggaagaagttaggtgtccagagcacgggactttctgctttcttaagaccggcgtccgcgatggcccgaataaaggaaagagcttctacgtgtgccgggcagacacktgcagcttcgtgcgggccaccgacattcctgtttcccattgcttattgcatgaggactttgtggtagagcttcagggtttgcttctgccacaggacaagaaagaatacagattgttcttccgatgcattagaagtaaggcagaggggaaacgctggtgtggaagtattccatggcaggatcctgattccaaagaacattctgtatccaataagtctcagcatgcatctgagacatttcatcattcttccaactggctgagaaatccattcaaggtacttgacaagaatcaagaaccagctctctggaaacagctcatcaaaggtgaaggtgaggaaaagaaggctgataagaagcaaagagaaaagggagatsagcttttcgatcaaaagraagaacagaagcctgaaatgatggagaaagacctctcatctggcctggtaccaaagaaaaaacaatctgtagttcaagagaagaagcaagaagagggagcagagattcagtgtgaggcagagactggaggcacacacaraagagacttttctgaaattaaatctcaacagtgccaaggtaatgagcttacaagaccatctgcatcttctcaggagaaatcaagtggtaagagtcaagatgtccaaagagaatcagaacctctgagagraaaggttacccagcttttgcctcaaaatgttcacagtcacaactcaataavcaagccccagaaagggggacccctcaacaaggagtacacgaabtgggaggctaaagaaacaaaggcaaaggatggccctagcatacaggccacccagaaaagcctgcctcaggggcatttccaagagcggccggagacccacagtgtgcctgctcctggaggaccagcggctcaggctgcaccagcagcaccagggctttccctgggtgagggccgtgaagctgccacaagcagtgacgacgaggaggaagatgatgttgtttttgtttcctctaagcctgggagccccctactctttgactcgactctggacttagagacgaaggaaaacctccaattccctgatcgaagtgtgcaaagaaaggtgtctcctgcctcaggtgtttccaagaaggtagaaccctcagacccagtagcccggcgtgtctaccttacaacacaaytgaaacaaaagaagagcacactggcatcagtgaacatccaggctcttccagacaagggtcagaagttgatcaaacaaatccaggagctggaggaagtactcagtggtcttaccctttccccagagcaaggaactaatgagaagagtaacagtcaagtaccacagcagagtcacttcaccaaaactaccactggccctccccacctggtgcctccccaacccyttcctcgtcgtggtacccaacctgtgggttctctagaactaaagtctgcctgccaggtgactgctggaggatccagtcagtgctatcgaggccatacaaaccaagatcacgttcatgcagtgtggaaaatcacragtgaagccatcggtcaactgcatcgctcacttgagtcatgtcctggtgagacggttgtggcagaagatcccgccgggctgaaggtccctttgctactacaccagaagcaggcattggcttggttactatggcgagaaagtcagaagccacaaggaggaattctggcagatgatatgggcttaggaaaaaccctgacaatgattgcgctcatcctgacccagaagaatcaagagaaaaaggaagaaaaggagaaaagcacagctttgacgtggctctccaaagatgactcttgtgactttacttcccatggaacactaatcatctgtcctgcctccctgatccatcattggaaaaatgaggtggagaaacgggtgaacagcaacaaactaagagtctatctctaccatgggccaaaccgsgattcacgtgccagagtcctctctacatatgacatcgtgatcactacctatagcctcgtggccaaggagattccyacaaacaagcaagaggcagagatcccaggtgcaaacctcaatgtggagggcacctcaacacctttgcttcgaatagcctgggctcgaatcataytggatgaagctcacaatgttaagaatccccgagtgcagacttccatagctgtgtgtaagctacaagcctgtgccygttgggctgtcactggaacccccattcaaaacaacttattggatatgtattcgctgctgaagtttctccgttgctctccatttgatgagttcaatctgtggaggagtcaggttgacaatggctcaaagaaaggaggagaacggttaagtattttaaccaagagccttttgctgaggagaacaaaagaccagctggactctactggcagacctttggtgatactgccccagcgtaaatttcagttgcaccatttaaagctttctgaagatgaagagactgtttacaatgtgttttttgcaagatcaaggtcagctctgcaatcctatctaaaaagacatgaaagtagaggcaaccaatctggaagaagccctaataatccattcagtagagtggcactggagtttgggtctgaggagcctagacactcggaggcagcagactcaccgagatccagcaccrtccacatactgtcccagttgctgagactccgccagtgttgctgtcatctttctttactgaagtcggccctggatccaatggaactgaagggtgaaggtcttgtcctttccctrgaagaacagctcagtgctttgaccttgtcagaactccgtgactcagagccatcttccactgtttcccttaacggcaccttcttcaagatggagctttttgaaggcatgcgagagagcaccaagatttcatctctgttggcagaattggaggcaattcaragaaattcagcatcccaaaagagtgtcattgtctctcagtggaccaacatgctgaaagttgtagcattgcacctgaagaagcatggactgacttatgccaccatcgatggctctgtcaatcccaagcagagaatggacttggtagaggcatttaaccactccagaggccctcaggtaatgctaatctctctcttggcyggaggtgttggtctaaacctgactggaggaaatcacctctttcttttggacatgcactggaatccatcacttgaagatcaagcttgtgaccgaatttaccgagtagggcagcagaaagatgttgtcatacacagatttgtttgtgagggaacagtagaagaaaagatcttacagctccaagaaaaaaagaaagatttggccaaacaagttctatcagggtctggagaatctgtcaccaagctcaccttggctsacctcagagtcctttttggcatctaacctcctgtggataagggctcagaatagcaccattgctggtttgtattaggatctgggaataacaacctaaccatgagccttgaactctctgatgatgggagaaccagttactaccttctctaacacaggctccatcctatctcttcatctcttcttgccagtgatgttgcacctgtaaccatctttttatgggtggagcagagagtcaatccctgcagccaccctgcagccagccatctctgcagttctctcagtgcaggcagttcttcctctcaggctgaagatcaaggagatgctttgtacatgaacagatgctgagtatctgttatcattgtattgtttagtgtcagtgtatcatttagtatttgtatcactgtaccatttagtgttgtatatcactcagtcatttaatattggttatcaccatacagtttaatatttgtatcatttggttcattgtatcgtttagtatttctattataacatttctatttgtagtatttgtataatatttgtgtcatttttaatagtatttgtatttttacaaatttgcagtatttgtagcatttagtatcattgtttcatttagtatttggtacaatctaataaatactaatccagtccaatactaatccaatccaatactaataatactattggtacaatccaatactaataatactattggtacaatccaatactaataatactaacagtagtattgatacaatctaataaataatgtgtttgacagtgtagcagaaataat

SEQ ID NO: 6630 - DNA, 1050 bp, Homo sapiens
atggtgaaggtgaagcctggagtcaatggattaggctgtattgggtgcgtggtcaccagggctgcttttaactctggtaaagtggatattgtcgccatcaatgatgmcttcaatgacctcaactacatggtctacatgttccagtatgatttcacccatggcgaattccatggcactgtcaaagctgagaacaggaagcttgtcatcaatagagatcccatcaccatcttccaggagctagattccaccagaatcaaatggggtgatgctggcactgggtatgttgtgaagtccactgacatcttcatcatggagaaggctggggctcatttgcagggggagccaaagggrtcatcatctctgccccctctgctgatgcccccatgttcatgatgggcttgaaccatgagaagtaggacaacagccccaagatagtcagcaatgcttcctgtgccatcaactgcttagcaccccaggccaagatcatccatgacaactttggtactgtggagggactcgtgaccacagtccacaccatcactgccacccagaaaactgtggatggcccctccaggaaactgtgtcataacagccgcagggctctccagaacatcatccttgcctctaccggcactgccaagcctgtgggcaaggtcatccctgagctgaatgggaagctcactggcatggccttytgagtccccactgacaatgtgttggccaggaacctgacctgctgtctggaaaaacctgccacatakgatgacatcaagaaggtggtgaagcagcatcagagggccccctcaagggcatcctggcctacactgagcaccaggctgtctcctccgacttcaacagtgacacccactcctccacctttgatactggggctggcattgccctcaatgaccactttgtcaagcttatttcctgttatgacaatgaatttggctacagcaacagggtggtggacttcatggcccacatggcctccaaggagtaagacccccagaccaccagccccagtgacagcatgagaggaagagagag

SEQ ID NO: 6631 - DNA, 768 bp, Homo sapiens
atggtgaaggtgaagcctggagtcaatggattaggctgtattgggtgcgtggtcaccagggctgcttttaactctggtaaagtggatattgtcgccatcaatgatgmcttcaatgacctcaactacatggtctacatgttccagtatgatttcacccatggcgaattccatggcactgtcaaagctgagaacaggaagcttgtcatcaatagagatcccatcaccatcttccaggagctagattccaccagaatcaaatgggcaccccaggccaagatcatccatgacaactttggtactgtggagggactcgtgaccacagtccacaccatcactgccacccagaaaactgtggatggcccctccaggaaactgtgtcataacagccgcagggctctccagaacatcatccttgcctctaccggcactgccaagcctgtgggcaagggcatcctggcctacactgagcaccaggctgtctcctccgacttcaacagtgacacccactcctccacctttgatactggggctggcattgccctcaatgaccactttgtcaagcttatttcctgttatgacaatgaatttggctacagcaacagggtggtggacttcatggcccacatggcctccaaggagaacctgagctccacaggactcaatgaaaaagcaactgtaacagaagagatagatgtctacctggattctggagctccaggaaagaacccccctgtgttcacaatggcggtccctggtgcctgcagaact

SEQ ID NO: 6632 - DNA, 471 bp, Homo sapiens
ccccaagatagtcagcaatgcttcctgtgccatcaactgcttagcaccccaggccaagatcatccatgacaactttggtactgtggagggactcgtgaccacagtccacaccatcactgccacccagaaaactgtggatggcccctccaggaaactgtgtcataacagccgcagggctctccagaacatcatccttgcctctaccggcactgccaagcctgtgggcaaggtcatccctgagctgaatgggaagctcactggcatggccttytgagtccccactgacaatgtgttggccaggaacctgacctgctgtctggaaaaacctgccacatakgatgacatcaagaaggtggtgaagcagcatcagagggccccctcaagggcatcctggcctacactgagcaccaggctgaagagagaggccctcactgctggggagtttctgctgcactcagtcccccattgcac

SEQ ID NO: 6633 - DNA, 2930 bp, Homo sapiens
cttttacaggaatgttcataaacagcaggttctcctaggctttgaacaaaatttagcttctccaaggccaaaagcctcattgtgaagagaaagaaaggtatagcagtcttggcagttgctgaactgaattcctggctgatttccttactgcataaactcaactgctctcactgaggtcgtcattaagtcctgtgtgtgtttgggcaggccgacttgatttacagccagcactccactgcggaaacggcttacaaaatatacagatcttggtagacaacgtggctgcaggctgttgaattggaattccctgtggctgtccgaaggcagggtgtccggagagcggtgggctgacctgttcctacaccttgcatcatgccagctttgtcaacgggatctgggagtgacactggtctgtatgagctgttggctgctctgccagcccagctgcagccacatgtggatagccaggaagacctgaccttcctctgggatatgtttggtgaaaaaagcctgcattcattggtaaagattcatgaaaaactacactactatgagaagcagagtccggtgcccattctccatggtgcggcggccttggccgatgatctggccgaagagcttcagaacaagccattaaacagtgagatcagagagctgttgaaactactgtcaaaacccaatgtgaaggctttgctctctgtacatgatactgtggctcagaagaattacgacccagtgttgcctcctatgcctgaagatattgacgatgaggaagactcagtaaaaataatccgtctggtcaaaaatagagaaccactgggagctaccattaagaaggatgaacagmccggggcgatcattgtggccagaatcatgagaggaggagctgcagatagaagtggtcttattcatgttggtgatgaacttagggaagtcaacgggataccagtggaggataaaaggcctgaggaaataatacagattttggctcagtctcagggagcaattacatttaagattatacccggcagcaaagaggagacaccatcaaaagaaggcaagatgtttatcaaagccctctttgactataatcctaatgaggataaggcaattccatgtaaggaagctgggctttctttcaaaaagggagatattcttcagattatgagccaagatgatgcaacttggtggcaagcgaaacacgaagctgatgccaaccccagggcaggcttgatcccctcaaagcatttccaggaaaggagattggctttgagacgaccagaaatattggttcagcccctgaaagtttccaacaggaaatcatctggttttagaaraagttttcgtcttagtagaaaagataagaaaacaaataaatccatgtatgaatgcaagaagagtgatcagtacgacacagctgacgtacccacatacgaagaagtgacaccgtatcggcgacaaactaatgaaaaatacagactygttgtcttggttggtcccgtgggagtagggctgaatgaactgaaacgaaagctgctgatcagtgacacccagcactatggcgtgacagtgccccataccaccagagcaagaagaagccaggagagtgatggtgttgaatacattttcatttccaagcatttgtttgagacagatgtacaaaataacaagtttattgaatatggagaatataaaaacaactactacggcacaagtatagactcagttyggtctgtccttgctaaaaacaaagtttgtttgttggatgttcagcctcatacagtgaagcatttaaggacactagaatttaagccctatgtgatatttataaagcctccatcaatagagcgtttgagagaaacaagaaaaaatgcaaagattatttcaagcagagatgaccaaggtgctgcaaaacccttcacagaagaagattttcaagaaatgattaaatctgcacagataatggaaagtcaatatggtcatctttttgacaaaattataataaatgatgacctcactgtggcattcaatgagctcaaaacaacttttgacaaattagagacagagacccattgggtgccagtgagctggttacattcataactaagagaaatttccataattgtctttttctatagagtgcatgatgaaatcaattacagttttggtagtagggtttttaaatctrtatcactgtcatagatrtacaatcttggttcaagttgaatgctggttttgtttgtatctttttacagccttatttcaaacgccatgtgttagtataagatccgaaatcaaaatatgcacagtactgtattctaagcaaaacctcaaaccttctcgttgtcttcaataccgctctatctccaagatgaggctgaaattttcagagagacttagctagaggcttagtatgtatgggagttcagcgcttctgctggtctcaggtgtggctgctgctgtcgagtttgaatgttagctgttgaaggtatcaattcagcagccatgagcagctccagacagacaggtgagctctgctgtttctgggtggatcatcacagatttagccgggcaggcagtaaggtgtcctcttactattcaaaaagtgtagactttcttacatattcgcaatacgttcacagtgtgtgcattttaaaataattcttaaaggagtaactgaaattttaccttgagtgaatggccttcataatatagcttgagaagtccttttgagtacctgtcagtgactcaacaacatttaataagggaaagtagacttttaacagttattatatatgtaacgaaaagcctttcctttgggattaatataagtaagaatggtagccttgtggcaagaaatgattacaaaggatatttttatttgtaattcctcagaagacaatttatgaagtcacccaaaatgttatttt

SEQ ID NO: 6634 - DNA, 2213 bp, Homo sapiens
cttttacaggaatgttcataaacagcaggttctcctaggctttgaacaaaatttagcttctccaaggccaaaagcctcattgtgaagagaaagaaaggtatagcagtcttggcagttgctgaactgaattcctggctgatttccttactgcataaactcaactgctctcactgaggtcgtcattaagtcctgtgtgtgtttgggcaggccgacttgatttacagccagcactccactgcggaaacggcttacaaaatatacagatcttggtagacaacgtggctgcaggctgttgaattggaattccctgtggctgtccgaaggcagggtgtccggagagcggtgggctgacctgttcctacaccttgcatcatgccagctttgtcaacgggatctgggagtgacactggtctgtatgagctgttggctgctctgccagcccagctgcagccacatgtggatagccaggaagacctgaccttcctctgggatatgtttggtgaaaaaagcctgcattcattggtaaagcatttccaggaaaggagattggctttgagacgaccagaaatattggttcagcccctgaaagtttccaacaggaaatcatctggttttagaaraagttttcgtcttagtagaaaagataagaaaacaaataaatccatgtatgaatgcaagaagagtgatcagtacgacacagctgacgtacccacatacgaagaagtgacaccgtatcggcgacaaactaatgaaaaatacagactygttgtcttggttggtcccgtgggagtagggctgaatgaactgaaacgaaagctgctgatcagtgacacccagcactatggcgtgacagtgccccataccaccagagcaagaagaagccaggagagtgatggtgttgaatacattttcatttccaagcatttgtttgagacagatgtacaaaataacaagtttattgaatatggagaatataaaaacaactactacggcacaagtatagactcagttyggtctgtccttgctaaaaacaaagtttgtttgttggatgttcagcctcatacagtgaagcatttaaggacactagaatttaagccctatgtgatatttataaagcctccatcaatagagcgtttgagagaaacaagaaaaaatgcaaagattatttcaagcagagatgaccaaggtgctgcaaaacccttcacagaagaagattttcaagaaatgattaaatctgcacagataatggaaagtcaatatggtcatctttttgacaaaattataataaatgatgacctcactgtggcattcaatgagctcaaaacaacttttgacaaattagagacagagacccattgggtgccagtgagctggttacattcataactaagagaaatttccataattgtctttttctatagagtgcatgatgaaatcaattacagttttggtagtagggtttttaaatctrtatcactgtcatagatrtacaatcttggttcaagttgaatgctggttttgtttgtatctttttacagccttatttcaaacgccatgtgttagtataagatccgaaatcaaaatatgcacagtactgtattctaagcaaaacctcaaaccttctcgttgtcttcaataccgctctatctccaagatgaggctgaaattttcagagagacttagctagaggcttagtatgtatgggagttcagcgcttctgctggtctcaggtgtggctgctgctgtcgagtttgaatgttagctgttgaaggtatcaattcagcagccatgagcagctccagacagacaggtgagctctgctgtttctgggtggatcatcacagatttagccgggcaggcagtaaggtgtcctcttactattcaaaaagtgtagactttcttacatattcgcaatacgttcacagtgtgtgcattttaaaataattcttaaaggagtaactgaaattttaccttgagtgaatggccttcataatatagcttgagaagtccttttgagtacctgtcagtgactcaacaacatttaataagggaaagtagacttttaacagttattatatatgtaacgaaaagcctttcctttgggattaatataagtaagaatggtagccttgtggcaagaaatgattacaaaggatatttttatttgtaattcctcagaagacaatttatgaagtcacccaaaatgttatttt

SEQ ID NO: 6635 - DNA, 1558 bp, Homo sapiens
gaatccaactcctgcagaatcagaagaagaacctgcccaaccagaagtagtagaatgtggcttttacccagatgaactgtgttccgctttatttgaagggaaaggggcggccccccaaattgcaaaattttgcaaaacccctcataaatctgaaatacatgctcatttacacacaccaggaaactgctccaggatttctcgggggctgcatttcataaccagacccctgtctgcagaagagggcgatttctctttggcatatattataactattcataaggagctggccatgtttgtgcagcttctcagagctatttatgtacctcaaaatgtttattgtattcatgttgatgaaaaggccccaatgaagtataagactgctgtgcaaaccttggttaactgttttgaaaacgtttttatttcctccaagacagagaaggtggcttatgctggctttacaagactacaggcagatattaattgtatgaaagttctagtgcattctaaatttcaatggaactatgtcatcaatctttgtggacaggattttcccatcaaaaccaacagagaaatcatacactacatcagaagcaaatggagtgataaaaatattactcctggagtaatccaaccattgcacattaaatccaagacaagtcaaagtcatctcgaattcgttcctaaaggaagtatctatgcacctccaaataacagattcaaagacaaaccaccccataacttaaccatttattttggaagtgcttactatgtacttacaaggaagtttgtagagttcatactgactgacatccatgcaaaagacatgcttcagtggtccaaagacatccgcagcccagagcaacactactgggtgaccctgaaccgactaaaaggtttttgtgtttctttctgcaggccgctacgtcgaagacatctgcgtatacggaccaggagacctgccgtggctcattcagtcgccttctctgtttgccaacaaattcgaaccctcgacagacccgcttgtggttacctgcttagagcggcggcacagacttcaagtgctgaggcaggcagaagttcctatagagccacactggcattttcaacagcagagtcatttcmatatgagactgaaccgctagggagtgtttgctttcttactggtatcattctgtttccttgacttgaaacaagagaacattgaaccaaagaagtgggaaaatgattccttgatacaaactattcctaaaatgaattcagaaacatgctattgacaagactttactattgattacaggccacttttatagctttgggaaagaaatcacaagacaaaaaaactcaagctaccactggtgacatatagcaatgcacttagaaggccaaatgcttcagtaaaaagctgctgaaaacccaaattctccaaacacctggatccaggctcaagctggaataagaacgacacagcctgttttgaagacccagatactactgtgtatgagatactaagaaagaacagactcccagtgaaaatgaaaatatgcttatctgaaacagt

SEQ ID NO: 6636 - DNA, 1582 bp, Homo sapiens
gaatccaactcctgcagaatcagaagaagaacctgcccaaccagaagtagtagaatgtggcttttacccagatgaactgtgttccgctttatttgaagggaaaggggcggccccccaaattgcaaaattttgcaaaacccctcataaatctgaaatacatgctcatttacacacaccaggaaactgctccaggatttctcgggggctgcatttcataaccagacccctgtctgcagaagagggcgatttctctttggcatatattataactattcataaggagctggccatgtttgtgcagcttctcagagctatttatgtacctcaaaatgtttattgtattcatgttgatgaaaaggccccaatgaagtataagactgctgtgcaaaccttggttaactgttttgaaaacgtttttatttcctccaagacagagaaggtggcttatgctggctttacaagactacaggcagatattaattgtatgaaagttctagtgcattctaaatttcaatggaactatgtcatcaatctttgtggacaggattttcccatcaaaaccaacagagaaatcatacactacatcagaagcaaatggagtgataaaaatattactcctggagtaatccaaccattgcacattaaatccaagacaagtcaaagtcatctcgaattcgttcctaaaggaagtatctatgcacctccaaataacagattcaaagacaaaccaccccataacttaaccatttattttggaagtgcttactatgtacttacaaggaagtttgtagagttcatactgactgacatccatgcaaaagacatgcttcagtggtccaaagacatccgcagcccagagcaacactactgggtgaccctgaaccgactaaaaggtgctacaccaaacgctggctgggaaggaaatgttcgagccattaagccgctacgtcgaagacatctgcgtatacggaccaggagacctgccgtggctcattcagtcgccttctctgtttgccaacaaattcgaaccctcgacagacccgcttgtggttacctgcttagagcggcggcacagacttcaagtgctgaggcaggcagaagttcctatagagccacactggcattttcaacagcagagtcatttcmatatgagactgaaccgctagggagtgtttgctttcttactggtatcattctgtttccttgacttgaaacaagagaacattgaaccaaagaagtgggaaaatgattccttgatacaaactattcctaaaatgaattcagaaacatgctattgacaagactttactattgattacaggccacttttatagctttgggaaagaaatcacaagacaaaaaaactcaagctaccactggtgacatatagcaatgcacttagaaggccaaatgcttcagtaaaaagctgctgaaaacccaaattctccaaacacctggatccaggctcaagctggaataagaacgacacagcctgttttgaagacccagatactactgtgtatgagatactaagaaagaacagactcccagtgaaaatgaaaatatgcttatctgaaacagt

SEQ ID NO: 6637 - DNA, 2744 bp, Homo sapiens
gtcactcgtataaaaacctatgctttgaaggttctcgtgtrtctcggcctgcaggtctcgctcagagctgtgtccctgaacatccaccctgctggggtggcttgacgcacttctgtgcaaatctgttcgctcrcaaccctrcctacctctctyccgaaccggagaaaaccttcggcggggtccttccgggttttgtgtcgaatctgcggcggcgacccggcgccgcgtcacgcggtggtgaatgtgcggcagcacgcgcgccgcgtcgtttacgcggcgatttcatcatgctccgagccgggcggcgcgcgccgcttccgtcgccaccctctctggacagcccagggccgcasgctcatgccctctcygcgtccagtgctgcttagaggtgctcgcgccgctctgctgctgctgctgccgccccggctcttagcccgaccctcgctcctsctccgccggtccctcagcgcggcctcctgcsccccgatctccttgcccgccgccgcctcccggagcagcatggacggcgcgggggctgaggaggtgctggcacctctgaggctagcagtgcgccagcagggagatcttgtgcgaaaactcaaagaagataaagcaccccaagtagacgtagacaaagcagtggctgagctcaaagcccgcaagagggttctggaagcaaaggagctggcgttacagcccaaagatgatattgtagaccgagcaaaaatggaagataccctgaagaggaggtttttctatgatcaagcttttgctatttatggaggtgttagtggtctgtatgactttgggccagttggctgtgctttgaagaacaatattattcagacctggaggcagcactttatccaagaggaacagatcctggagatcgattgcaccatgctcacccctgagccagttttaaagacctctggccatgtagacaaatttgctgacttcatggtgaaagacgtaaaaaatggagaatgttttcgtgctgaccatctattaaaagctcatttacagaaattgatgtctgataagaagtgttctgtcgaaaagaaatcagaaatggaaagtgttttggcccagcttgataactayggacagcaagaacttgcggatctttttgtgaactataatgtaaaatctcccattaytggaaatgatctatcccctccagtgtcttttaacttaatgttcaagactttcattgggcctggaggaaacatgcctgggtacttgagaccagaaactgcacaggggattttcttgaatttcaaacgacttttggagttcaaccaaggaaagttgccttttgctgctgcccagattggaaattcttttagaaatgagatctcccctcgatctggactgatcagagtcagagaattcacaatggcagaaattgagcactttgtagatcccagtgagaaagaccaccccaagttccagaatgtggcagaccttcacctttatttgtattcagcaaaagcccaggtcagcggacagtccgctcrgaaaatgcgcctgggagatgctgttgaacagggtgtgattaataacacagtattaggctatttcattggccgcatctacctctacctcacgaaggttggaatatctccagataaactccgcttccggcagcacatggagaatgagatggcccattatgcctgtgactgttgggatgcagaatccaaaacatcctacggttggattgagattgttggatgtgctgatcgttcctgttatgacctctcctgtcatgcacgagccaccaaagtcccacttgtagctgagaaacctctgaaagaacccatatccttcaatgttgttcagtttgaacccagtaagggagcaattggtaaggcatataagaaggatgcaaaactggtgatggagtatcttgccatttgtgatgagtgctacattacagaaatggagatgctgctgaatgagaaaggggaattcacaattgaaactgaagggaaaacatttcagttaacaaaagacatgatcaatgtgaagagattccagaaaacactatatgtggaagaagttgttccgaatgtaattgaaccttccttcggcctgggtaggatcatgtatacrgtatttgaacatacattccatgtacgagaaggagatgaacagagaacattcttcagtttccctgctgtagtygctccattcaaatgttccgtcctcccactgagccaaaaccaggagttcatgccatttgtcaaggaattatcggaagccctgaccaggcatggagtatctcacaaagtagacgattcctctgggtcaatcggaaggcgctatgccaggactgatgagattggcgtggcttttggtgtcaccattgactttgacacagtgaacaagaccccccacactgcaactctgagggaccgtgactcaatgcggcagataagagcagagatctctgagctgcccagcatagtccaagacctagccaatggcaacatcacrtgggctgatgtggaggccaggtatcctctgtttgaagggcaagagactggtaaaaaagagacaatcgaggaatgaggacaattttgacaacttttgaccacttgcgctaataaaaaaaaaaaaaactactcttatgtccactttacaaaagaaaacagcattgtgattactcccagggaccgtattttatcttcagtggctgcctgattttacccccacaattaaagttgaaggaatcctga

SEQ ID NO: 6638 - DNA, 2744 bp, Homo sapiens
gtcactcgtataaaaacctatgctttgaaggttctcgtgtrtctcggcctgcaggtctcgctcagagctgtgtccctgaacatccaccctgctggggtggcttgacgcacttctgtgcaaatctgttcgctcrcaaccctrcctacctctctyccgaaccggagaaaaccttcggcggggtccttccgggttttgtgtcgaatctgcggcggcgacccggcgccgcgtcacgcggtggtgaatgtgcggcagcacgcgcgccgcgtcgtttacgcggcgatttcatcatgctccgagccgggcggcgcgcgccgcttccgtcgccaccctctctggacagcccagggccgcasgctcatgccctctcygcgtccagtgctgcttagaggtgctcgcgccgctctgctgctgctgctgccgccccggctcttagcccgaccctcgctcctsctccgccggtccctcagcgcggcctcctgcsccccgatctccttgcccgccgccgcctcccggagcagcatggacggcgcgggggctgaggaggtgctggcacctctgaggctagcagtgcgccagcagggagatcttgtgcgaaaactcaaagaagataaagcaccccaagtagacgtagacaaagcagtggctgagctcaaagcccgcaagagggttctggaagcaaaggagctggcgttacagcccaaagatgatattgtagaccgagcaaaaatggaagataccctgaagaggaggtttttctatgatcaagcttttgctatttatggaggtgttagtggtctgtatgactttgggccagttggctgtgctttgaagaacaatattattcagacctggaggcagcactttatccaagaggaacagatcctggagatcgattgcaccatgctcacccctgagccagttttaaagacctctggccatgtagacaaatttgctgacttcatggtgaaagacgtaaaaaatggagaatgttttcgtgctgaccatctattaaaagctcatttacagaaattgatgtctgataagaagtgttctgtcgaaaagaaatcagaaatggaaagtgttttggcccagcttgataactayggacagcaagaacttgcggatctttttgtgaactataatgtaaaatctcccattaytggaaatgatctatcccctccagtgtcttttaacttaatgttcaagactttcattgggcctggaggaaacatgcctgggtacttgagaccagaaactgcacaggggattttcttgaatttcaaacgacttttggagttcaaccaaggaaagttgccttttgctgctgcccagattggaaattcttttagaaatgagatctcccctcgatctggactgatcagagtcagagaattcacaatggcagaaattgagcactttgtagatcccagtgagaaagaccaccccaagttccagaatgtggcagaccttcacctttatttgtattcagcaaaagcccaggtcagcggacagtccgctcrgaaaatgcgcctgggagatgctgttgaacagggtgtgattaataacacagtattaggctatttcattggccgcatctacctctacctcacgaaggttggaatatctccagataaactccgcttccggcagcacatggagaatgagatggcccattatgcctgtgactgttgggatgcagaatccaaaacatcctacggttggattgagattgttggatgtgctgatcgttcctgttatgacctctcctgtcatgcacgagccaccaaagtcccacttgtagctgagaaacctctgaaagaacccaaaacagtcaatgttgttcagtttgaacccagtaagggagcaattggtaaggcatataagaaggatgcaaaactggtgatggagtatcttgccatttgtgatgagtgctacattacagaaatggagatgctgctgaatgagaaaggggaattcacaattgaaactgaagggaaaacatttcagttaacaaaagacatgatcaatgtgaagagattccagaaaacactatatgtggaagaagttgttccgaatgtaattgaaccttccttcggcctgggtaggatcatgtatacrgtatttgaacatacattccatgtacgagaaggagatgaacagagaacattcttcagtttccctgctgtagtygctccattcaaatgttccgtcctcccactgagccaaaaccaggagttcatgccatttgtcaaggaattatcggaagccctgaccaggcatggagtatctcacaaagtagacgattcctctgggtcaatcggaaggcgctatgccaggactgatgagattggcgtggcttttggtgtcaccattgactttgacacagtgaacaagaccccccacactgcaactctgagggaccgtgactcaatgcggcagataagagcagagatctctgagctgcccagcatagtccaagacctagccaatggcaacatcacrtgggctgatgtggaggccaggtatcctctgtttgaagggcaagagactggtaaaaaagagacaatcgaggaatgaggacaattttgacaacttttgaccacttgcgctaataaaaaaaaaaaaaactactcttatgtccactttacaaaagaaaacagcattgtgattactcccagggaccgtattttatcttcagtggctgcctgattttacccccacaattaaagttgaaggaatcctga

SEQ ID NO: 6639 - DNA, 2566 bp, Homo sapiens
acatttcagggacaccatgaagggtggcttcactgggggtgatgagtaccagaagcacttcctgcccagggactacttggctacttactacagcttyratggcagcccctcacccgaggccgagatgctgaagtttaacttggaatgtctccacaagaccttcggccctggaggcctccaaggggacacgctgattgacattggctcaggtcctaccatctaccaagttcttgctgcctgtgattccttccaagacatcactctctccgactttaccgaccgcaaccgggaggagctggaaaagtggctgaagaaggagccgggggcctatgactggaccccagcggtgaaattcgcctgtgagctggaaggaaacagcggccgatgggaggagaaggaggagaagctgcgggcagcggtgaagcgggtgctcaagtgcgatgtccacctgggcaacccrctggccccggctgtgttgcctctcgcygactgtgtgctcaccctgctggccatggagtgtgcctgctgtagccttgatgcctaccgcgctgccctgtgcaaccttgcctcactgctcaagccgggtggccacctggtgaccactgtcacgcttcggctcccgtcctacrtggtggggaagcgtgaattttcctgcgtggccctggagaaagrggaggtggagcaggctgtcctggatgctggctttgacattgaacagctcctacacagtccccagagctactctgtcaccaatgctgcyaacaatggggtctgctkcattgtggctcgcaagaagcctgggccctsagccaggagggccagccagaggtctggtcaggctgtgaggccttggccatctgtatgctagagaggggtgaggaatggatgctgtctaacagtctctgatttcaacactaacattccatcttctgaaattctgagattctaacatccttgttttagaattctaagtttccaacattcctcattctaggatcctaggagtggaattttccattttctaatatactaagccttacagctatcttagatgcgatctgactcctgtgtgactgtggagcacccagggacgtggttttagagtctacctaatatgttaaggacaaggaaacctctgagtctacctaatatgttaaggacaaggaaacctctggacagtggtatattggggaattttttttttttttttgagacggagtctggctctgtcacccaggctagagtgcaatggcacgatctcggctcactgcaagctctgcgtcctgggttgacgccattctcctgcctcagcctcctgagtagctgggactacaggagctcgccaccacacccagctaatttttttttttttttttttttttatttgagacggagtttcgctctgtcgcccaggctggagtgcagtggcgcgatctcgactcactgcaagctccgcctcccgggttcacgccattctcctgcctcagcctcccgtgtagctgggactacaggcacgcgccaccatgcccggctaatttttgtatttttagtagagatggggtttcaccgtgttagccaggatggtctcgatctcctgacctggtgatccacccacctcggcctcccaaagtgctgggattacaggcgtgagccaccgcacccagccagggggaatgttctataaccagctctgtaaaggaaaagcactgatgtgtggtagtcaccaatttctgtggtgtaaatactcccaccatggttgatttcaagccaccagkggtttaataaccagctcataaatctcctaaatattttacagttgactctcatgagctgattggagtcagctggaacataccactgcctctagactaaggycagcagatttagcaaatacagactgccccagttcattgaattttagataaatgaaataaatctataaggttaagtatgtccccagaactgcatggaacatgcttaatctaaacaatgatttgttgttcacctgaaattcaaatttagctgggtgtcctgtatttcatctggcaaccctacttcagacccaggtgtaaggtacatggatgtgctttggtcaaggaataggccaaggcagagatccatgcctgcatgactcagtgggtttggtgcacaggcacacacctccacttgttatataacctgtttgtgtaagttcatacttggtctgagccactgttgtctgtaaaaggtaattgtcctgctaatgctgtacaggggctcttggggttcggctcagctcaacatggcttgacatggtgggcacactggcgcccagyaagagagagagagagccaaagctgtccgttttgcagatggacaggaaggagccaggacacagctcagcttgctcacgcccagagagagaaaaagttaagctgctgaccctgaaggcaagggagagcaggctgcacagctgtgtgtggaagccacgggctcaagcagccaaggcagkyggacagtgtgagagagctagtgtaagctgttgatgagagctgttgctgaataaaaccatattcacctgcctatg

SEQ ID NO: 6640 - DNA, 1081 bp, Homo sapiens
atggttaaagtgaaggatggagtaaatggttttggccgtattgggcacctggtcaccagggctgcttttaattctgtcaaagtagatattgtcaccctcaatgattccttcattgacctcagctacatggtctacatgttccagtatgatttcatccatggcaagttccatggcactatcaaggctaagaacaggaagtttgtcatcaatggaaatcccatcattatcttccaggagtragagcccatcacaatcaaatgggatgatactggtgctgattatgttgtggaatccaccagcattttcactactgtggagaaagatggggctcatggggtgggaagtcaaaagagtcatcatctctgctccctttgctgattccccctgttcatgatggtcataaagcatgagaattataaatcagcaatgccacctgtaccaccaactgagtagccccctagccaaggtcatccaagacaaccttggaaatcatggagggactcatgaccacactcatgatcactgtcacttcacccagaagaccatggatgccccctctgggaaactgcggtgtgatggccatggggctctccagaaatcatccctatatctacgggtgctgctaaggctgtgggcaaggtcatccctgagctgaacaagaagctcactggcatggccttccatgtccccastgccaacatgttggtacgagacctgacctggcatctggagaaacctgccaaatatgatgacaccaacaaggtggtgaagcaggcatcagagggcctcctcaaggacatcctgggctatactgagcaccacgttgtctcttactttaacagtgacacccattcttccaccttgatgctgaggctgcyattgccctcaatgactactttgtcaagctcatgtcctggtattacagtgcagttagctacagcaacagagtggtggacttcgcagaccacatggcctctgaggagtcagaaccccagaccatcaacacaagcaagagcacgagaggaagagagaggccctcagctgctagagagttcctgccacactcagtcccccaccacac

SEQ ID NO: 6641 - DNA, 3144 bp, Homo sapiens
  misc_feature (1)...(3144): n = A,T,C or G
gcgcgctgtgtaggcaagttrcccgtgttctgcgttgccggccgtgggtgctctggccacagtgagttaggggcgtcggagcgggtttctccaaccgcaatcggctccgctcaaggggaggaggagagtcccttctcggaagrcctaaggaaacgtgtcgtctggaatgggcttgggggccacgcctgcacatctccgcgagacagagggataaagtgaagatggtgctgttattgttacctcgagtgccacatgcgayctctgagatatgtacacagtcattcttactatcgcactcagccattcttactacgctaaagaagaaataattattcgaggatatttgcctggcccagaagaaacttatgtaaatttcatgaactattatatccgttttcctcggagtgagagaaaactctttttagatatcatctgagaggtagttaatttggcaccatggggatacagggattgctacaatttatcaaagaagcttcagaacccatccatgtgaggaagtataaagggcaggtagyagctgtggatacatattgctggcttcacaaaggagctattgcttgtgctgaaaaactagccaaaggtgaacctactgataggtatgtaggattttgtatgaaatttgtaaatatgttactatctcatgggatcaagcctattctcgtatttgatggatgtactttaccttctaaaaaggaagtagagagatctagaagagaaagacgacaagccaatcttcttaagggaaagcaacttcttcgtraggggaaagtctcggaagctcgagagtgtttcacccggtctatcaatatcacacatgccatggcccacaaagtaattaaagctgcccggtctcagggggtagattgcctcgtggctccctatgaagctgatgcgcagttggcctatcttaacaaagcgggaattgtgcaagccataattacagaggactcggatctcctagcttttggctgtaaaaaggtaattttaaagatggaccagtttggaaatggacttgaaattgatcaagctcggctaggaatgtgcagacagcttggggatgtattcacggaagagaagtttcgttacatgtgtattctttcaggttgtgactacctgtcatcactgcgtgggattggattagcaaaggcatgcaaagtcctaagactagccaataatccagatatagtaaaggttatcaagaaaattggacattatctcaagatgaatatcacggtaccagaggattacatcaacgggtttattcgggccaacaataccttcctctatcagctagtttttgatcccatcaaaaggaaacttattcctctgaacgcctatgaagatgatgttgatcctgaaacactaagctacgctgggcaatatgttgatgattccatagctcttcaaatagcacttggaaataaagatataaatacttttgaacagatcgatgactacaatccagacactgctatgcctgcccattcaagaagtcrtagttgggatgacaaaacrtgtcaaaagtcagctaatgttagcagcatttggcataggaattactctcccagaccagagtcgggtactgtttcagatgccccacaattgaaggaaaatccaagtactgtgggagtggaacgagtgattagtactaaagggttaaatctcccaaggaaatcatccattgtgaaaagaccaagaagtgcagagctgtcagaagatgacctgttgagtcagtattctctttcatttaygaagaagaccaagaaaaatagctctgaaggcaataaatcattgagcttttctgaartgtttgtgcctgacctggtaaatggacctactaacaaaaagagtgtaagcactccacctaggacgagaaataaatttgcaacatttttacaaaggaaaaatgaagaaagtggtgcagttgtggttccagggaccagaagcaggtttttttgcagttcagattctactgactgtgtatcaaacaaagtgagcatccagcctctggatgaaactgctgtcacagataaagagaacaatctgcatgaatcagagtatggagaccaagaaggcaagagactggttgacacagatgtagcacgtaattcaagtgatgacattccgaataatcatattccaggtgatcatattccagacaaggcaacagtgtttacagatgaagagtcctactcttttragagcagcaaatttacaaggaccatttcaccacccactttgggaacactaagaagttgttttrgttggtctggaggtcttggagatttttcaagaacgccgagcccctctccaagcacagcattgcagcagttccgaagaaagagcgattccbccacctctttgcctgagaataatatgtctgatgtgtcgcagttaaagagcgaggagtccagtgacgatgagtctcatcccttacgagaagrggcatgttcttcacagtcccaggaaagtggagaattctcactgcagagttcaaatgcatcaaagctttctcagtgctctagtaaggactctgattcagaggaatctgattgcaatattaagttacttgacagtcaaagtgaccagacctccaagctangtttatcwcatttctcaaaaaaagacacacctctaaggaacaaggttcctgggctatataagtccagttctgcagactctctttctacaaccaagatcaaacytctagracctgccagagccagtgggctgagcaagaagcyggcaagcatccagaagagaaagcatcataatgccgagaacaagccggggttacagatcaaactcaatgagctctggaaaaactttggatttaaaaaattctgaaaagcttcctccttgtaagaaacccctgtccccagtcagagataacatccaactaactccagaagyggaagaggatatatttaacaaacctgaatgtggccgtgttcaaagagcaatattccagtaaatgcagactgctgcaaagcttttgcctgcaagagaatctgatcaatttgaagtccctgtttgggaatgaggcacttatcagcatgaagaattttttctcattctgtgccattttaaaaatagaatacattttgtatattractttataa

SEQ ID NO: 6642 - DNA, 3005 bp, Homo sapiens
  misc_feature (1)...(3005): n = A,T,C or G
rcctaaggaaacgtgtcgtctggaatgggcttgggggccacgcctgcacatctccgcgagacagagggataaagtgaagatggtgctgttattgttacctcgagtgccacatgcgayctctgagatatgtacacagtcattcttactatcgcactcagccattcttactacgctaaagaagaaataattattcgaggatatttgcctggcccagaagaaacttatgtaaatttcatgaactattatatccgttttcctcggagtgagagaaaactctttttagatatcatctgagaggtagttaatttggcaccatggggatacagggattgctacaatttatcaaagaagcttcagaacccatccatgtgaggaagtataaagggcaggtagyagctgtggatacatattgctggcttcacaaaggagctattgcttgtgctgaaaaactagccaaaggtgaacctactgataggtatgtaggattttgtatgaaatttgtaaatatgttactatctcatgggatcaagcctattctcgtatttgatggatgtactttaccttctaaaaaggaagtagagagatctagaagagaaagacgacaagccaatcttcttaagggaaagcaacttcttcgtraggggaaagtctcggaagctcgagagtgtttcacccggtctatcaatatcacacatgccatggcccacaaagtaattaaagctgcccggtctcagggggtagattgcctcgtggctccctatgaagctgatgcgcagttggcctatcttaacaaagcgggaattgtgcaagccataattacagaggactcggatctcctagcttttggctgtaaaaaggtaattttaaagatggaccagtttggaaatggacttgaaattgatcaagctcggctaggaatgtgcagacagcttggggatgtattcacggaagagaagtttcgttacatgtgtattctttcaggttgtgactacctgtcatcactgcgtgggattggattagcaaaggcatgcaaagtcctaagactagccaataatccagatatagtaaaggttatcaagaaaattggacattatctcaagatgaatatcacggtaccagaggattacatcaacgggtttattcgggccaacaataccttcctctatcagctagtttttgatcccatcaaaaggaaacttattcctctgaacgcctatgaagatgatgttgatcctgaaacactaagctacgctgggcaatatgttgatgattccatagctcttcaaatagcacttggaaataaagatataaatacttttgaacagatcgatgactacaatccagacactgctatgcctgcccattcaagaagtcrtagttgggatgacaaaacrtgtcaaaagtcagctaatgttagcagcatttggcataggaattactctcccagaccagagtcgggtactgtttcagatgccccacaattgaaggaaaatccaagtactgtgggagtggaacgagtgattagtactaaagggttaaatctcccaaggaaatcatccattgtgaaaagaccaagaagtgcagagctgtcagaagatgacctgttgagtcagtattctctttcatttaygaagaagaccaagaaaaatagctctgaaggcaataaatcattgagcttttctgaartgtttgtgcctgacctggtaaatggacctactaacaaaaagagtgtaagcactccacctaggacgagaaataaatttgcaacatttttacaaaggaaaaatgaagaaagtggtgcagttgtggttccagggaccagaagcaggtttttttgcagttcagattctactgactgtgtatcaaacaaagtgagcatccagcctctggatgaaactgctgtcacagataaagagaacaatctgcatgaatcagagtatggagaccaagaaggcaagagactggttgacacagatgtagcacgtaattcaagtgatgacattccgaataatcatattccaggtgatcatattccagacaaggcaacagtgtttacagatgaagagtcctactcttttragagcagcaaatttacaaggaccatttcaccacccactttgggaacactaagaagttgttttrgttggtctggaggtcttggagatttttcaagaacgccgagcccctctccaagcacagcattgcagcagttccgaagaaagagcgattccbccacctctttgcctgagaataatatgtctgatgtgtcgcagttaaagagcgaggagtccagtgacgatgagtctcatcccttacgagaagrggcatgttcttcacagtcccaggaaagtggagaattctcactgcagagttcaaatgcatcaaagctttctcagtgctctagtaaggactctgattcagaggaatctgattgcaatattaagttacttgacagtcaaagtgaccagacctccaagctangtttatcwcatttctcaaaaaaagacacacctctaaggaacaaggttcctgggctatataagtccagttctgcagactctctttctacaaccaagatcaaacytctagracctgccagagccagtgggctgagcaagaagcyggcaagcatccagaagagaaagcatcataatgccgagaacaagccggggttacagatcaaactcaatgagctctggaaaaactttggatttaaaaaagattctgaaaagcttcctccttgtaagaaacccctgtccccagtcagagataacatccaactaactccagaagyggaagaggatatatttaacaaacctgaatgtggccgtgttcaaagagcaatattccagtaaatgcagactgctgcaaagcttttgcctgcaagagaatctgatcaatttgaagtccctgtttgggaatgaggcacttatcagcatgaagaattttttctcattctgtgccattttaaaaatagaatacattttgtatattractttataat

SEQ ID NO: 6643 - DNA, 3147 bp, Homo sapiens
  misc_feature (1)...(3147): n = A,T,C or G
gcgcgctgtgtaggcaagttrcccgtgttctgcgttgccggccgtgggtgctctggccacagtgagttaggggcgtcggagcgggtttctccaaccgcaatcggctccgctcaaggggaggaggagagtcccttctcggaagrcctaaggaaacgtgtcgtctggaatgggcttgggggccacgcctgcacatctccgcgagacagagggataaagtgaagatggtgctgttattgttacctcgagtgccacatgcgayctctgagatatgtacacagtcattcttactatcgcactcagccattcttactacgctaaagaagaaataattattcgaggatatttgcctggcccagaagaaacttatgtaaatttcatgaactattatatccgttttcctcggagtgagagaaaactctttttagatatcatctgagaggtagttaatttggcaccatggggatacagggattgctacaatttatcaaagaagcttcagaacccatccatgtgaggaagtataaagggcaggtagyagctgtggatacatattgctggcttcacaaaggagctattgcttgtgctgaaaaactagccaaaggtgaacctactgataggtatgtaggattttgtatgaaatttgtaaatatgttactatctcatgggatcaagcctattctcgtatttgatggatgtactttaccttctaaaaaggaagtagagagatctagaagagaaagacgacaagccaatcttcttaagggaaagcaacttcttcgtraggggaaagtctcggaagctcgagagtgtttcacccggtctatcaatatcacacatgccatggcccacaaagtaattaaagctgcccggtctcagggggtagattgcctcgtggctccctatgaagctgatgcgcagttggcctatcttaacaaagcgggaattgtgcaagccataattacagaggactcggatctcctagcttttggctgtaaaaaggtaattttaaagatggaccagtttggaaatggacttgaaattgatcaagctcggctaggaatgtgcagacagcttggggatgtattcacggaagagaagtttcgttacatgtgtattctttcaggttgtgactacctgtcatcactgcgtgggattggattagcaaaggcatgcaaagtcctaagactagccaataatccagatatagtaaaggttatcaagaaaattggacattatctcaagatgaatatcacggtaccagaggattacatcaacgggtttattcgggccaacaataccttcctctatcagctagtttttgatcccatcaaaaggaaacttattcctctgaacgcctatgaagatgatgttgatcctgaaacactaagctacgctgggcaatatgttgatgattccatagctcttcaaatagcacttggaaataaagatataaatacttttgaacagatcgatgactacaatccagacactgctatgcctgcccattcaagaagtcrtagttgggatgacaaaacrtgtcaaaagtcagctaatgttagcagcatttggcataggaattactctcccagaccagagtcgggtactgtttcagatgccccacaattgaaggaaaatccaagtactgtgggagtggaacgagtgattagtactaaagggttaaatctcccaaggaaatcatccattgtgaaaagaccaagaagtgcagagctgtcagaagatgacctgttgagtcagtattctctttcatttaygaagaagaccaagaaaaatagctctgaaggcaataaatcattgagcttttctgaartgtttgtgcctgacctggtaaatggacctactaacaaaaagagtgtaagcactccacctaggacgagaaataaatttgcaacatttttacaaaggaaaaatgaagaaagtggtgcagttgtggttccagggaccagaagcaggtttttttgcagttcagattctactgactgtgtatcaaacaaagtgagcatccagcctctggatgaaactgctgtcacagataaagagaacaatctgcatgaatcagagtatggagaccaagaaggcaagagactggttgacacagatgtagcacgtaattcaagtgatgacattccgaataatcatattccaggtgatcatattccagacaaggcaacagtgtttacagatgaagagtcctactcttttragagcagcaaatttacaaggaccatttcaccacccactttgggaacactaagaagttgttttrgttggtctggaggtcttggagatttttcaagaacgccgagcccctctccaagcacagcattgcagcagttccgaagaaagagcgattccbccacctctttgcctgagaataatatgtctgatgtgtcgcagttaaagagcgaggagtccagtgacgatgagtctcatcccttacgagaagrggcatgttcttcacagtcccaggaaagtggagaattctcactgcagagttcaaatgcatcaaagctttctcagtgctctagtaaggactctgattcagaggaatctgattgcaatattaagttacttgacagtcaaagtgaccagacctccaagctangtttatcwcatttctcaaaaaaagacacacctctaaggaacaaggttcctgggctatataagtccagttctgcagactctctttctacaaccaagatcaaacytctagracctgccagagccagtgggctgagcaagaagcyggcaagcatccagaagagaaagcatcataatgccgagaacaagccggggttacagatcaaactcaatgagctctggaaaaactttggatttaaaaaagattctgaaaagcttcctccttgtaagaaacccctgtccccagtcagagataacatccaactaactccagaagyggaagaggatatatttaacaaacctgaatgtggccgtgttcaaagagcaatattccagtaaatgcagactgctgcaaagcttttgcctgcaagagaatctgatcaatttgaagtccctgtttgggaatgaggcacttatcagcatgaagaattttttctcattctgtgccattttaaaaatagaatacattttgtatattractttataat

SEQ ID NO: 6644 - DNA, 3024 bp, Homo sapiens
  misc_feature (1)...(3024): n = A,T,C or G
gcgcgctgtgtaggcaagttrcccgtgttctgcgttgccggccgtgggtgctctggccacagtgagttaggggcgtcggagcgggtttctccaaccgcaatcggctccgctcaaggggaggaggagagtcccttctcggaagrcctaaggaaacgtgtcgtctggaatgggcttgggggccacgcctgcacatctccgcgagacagagggataaagtgaagatggtgctgttattgttacctcgagtgccacatgcgayctctgagatatgtacacagtcattcttactatcgcactcagccattcttactacgctaaagaagaaataattattcgaggatatttgcctggcccagaagaaacttatgtaaatttcatgaactattatatccgttttcctcggagtgagagaaaactctttttagatatcatctgagaggtagttaatttggcaccatggggatacagggattgctacaatttatcaaagaagcttcagaacccatccatgtgaggaagtataaagggcaggtagyagctgtggatacatattgctggcttcacaaaggagctattgcttgtgctgaaaaactagccaaaggtgaacctactgatagaagacgacaagccaatcttcttaagggaaagcaacttcttcgtraggggaaagtctcggaagctcgagagtgtttcacccggtctatcaatatcacacatgccatggcccacaaagtaattaaagctgcccggtctcagggggtagattgcctcgtggctccctatgaagctgatgcgcagttggcctatcttaacaaagcgggaattgtgcaagccataattacagaggactcggatctcctagcttttggctgtaaaaaggtaattttaaagatggaccagtttggaaatggacttgaaattgatcaagctcggctaggaatgtgcagacagcttggggatgtattcacggaagagaagtttcgttacatgtgtattctttcaggttgtgactacctgtcatcactgcgtgggattggattagcaaaggcatgcaaagtcctaagactagccaataatccagatatagtaaaggttatcaagaaaattggacattatctcaagatgaatatcacggtaccagaggattacatcaacgggtttattcgggccaacaataccttcctctatcagctagtttttgatcccatcaaaaggaaacttattcctctgaacgcctatgaagatgatgttgatcctgaaacactaagctacgctgggcaatatgttgatgattccatagctcttcaaatagcacttggaaataaagatataaatacttttgaacagatcgatgactacaatccagacactgctatgcctgcccattcaagaagtcrtagttgggatgacaaaacrtgtcaaaagtcagctaatgttagcagcatttggcataggaattactctcccagaccagagtcgggtactgtttcagatgccccacaattgaaggaaaatccaagtactgtgggagtggaacgagtgattagtactaaagggttaaatctcccaaggaaatcatccattgtgaaaagaccaagaagtgcagagctgtcagaagatgacctgttgagtcagtattctctttcatttaygaagaagaccaagaaaaatagctctgaaggcaataaatcattgagcttttctgaartgtttgtgcctgacctggtaaatggacctactaacaaaaagagtgtaagcactccacctaggacgagaaataaatttgcaacatttttacaaaggaaaaatgaagaaagtggtgcagttgtggttccagggaccagaagcaggtttttttgcagttcagattctactgactgtgtatcaaacaaagtgagcatccagcctctggatgaaactgctgtcacagataaagagaacaatctgcatgaatcagagtatggagaccaagaaggcaagagactggttgacacagatgtagcacgtaattcaagtgatgacattccgaataatcatattccaggtgatcatattccagacaaggcaacagtgtttacagatgaagagtcctactcttttragagcagcaaatttacaaggaccatttcaccacccactttgggaacactaagaagttgttttrgttggtctggaggtcttggagatttttcaagaacgccgagcccctctccaagcacagcattgcagcagttccgaagaaagagcgattccbccacctctttgcctgagaataatatgtctgatgtgtcgcagttaaagagcgaggagtccagtgacgatgagtctcatcccttacgagaagrggcatgttcttcacagtcccaggaaagtggagaattctcactgcagagttcaaatgcatcaaagctttctcagtgctctagtaaggactctgattcagaggaatctgattgcaatattaagttacttgacagtcaaagtgaccagacctccaagctangtttatcwcatttctcaaaaaaagacacacctctaaggaacaaggttcctgggctatataagtccagttctgcagactctctttctacaaccaagatcaaacytctagracctgccagagccagtgggctgagcaagaagcyggcaagcatccagaagagaaagcatcataatgccgagaacaagccggggttacagatcaaactcaatgagctctggaaaaactttggatttaaaaaattctgaaaagcttcctccttgtaagaaacccctgtccccagtcagagataacatccaactaactccagaagyggaagaggatatatttaacaaacctgaatgtggccgtgttcaaagagcaatattccagtaaatgcagactgctgcaaagcttttgcctgcaagagaatctgatcaatttgaagtccctgtttgggaatgaggcacttatcagcatgaagaattttttctcattctgtgccattttaaaaatagaatacattttgtatattractttataa

SEQ ID NO: 6645 - DNA, 3252 bp, Homo sapiens
  misc_feature (1)...(3252): n = A,T,C or G
gcgcgctgtgtaggcaagttrcccgtgttctgcgttgccggccgtgggtgctctggccacagtgagttaggggcgtcggagcgggtttctccaaccgcaatcggctccgctcaaggggaggaggagagtcccttctcggaagrcctaaggaaacgtgtcgtctggaatgggcttgggggccacgcctgcacatctccgcgagacagagggataaagtgaagatggtgctgttattgttacctcgagtgccacatgcgayctctgagatatgtacacagtcattcttactatcgcactcagccattcttactacgctaaagaagaaataattattcgaggatatttgcctggcccagaagaaacttatgtaaatttcatgaactattatatccgttttcctcggagtgagagaaaactctttttagatatcatctgagagaactagtgaatcccagtcactgagtggagttgagagtctaagaacctctgaaatttgagaactgctggaccagagcctttagagctctgataaggtgtcaacagggtagttaatttggcaccatggggatacagggattgctacaatttatcaaagaagcttcagaacccatccatgtgaggaagtataaagggcaggtagyagctgtggatacatattgctggcttcacaaaggagctattgcttgtgctgaaaaactagccaaaggtgaacctactgataggtatgtaggattttgtatgaaatttgtaaatatgttactatctcatgggatcaagcctattctcgtatttgatggatgtactttaccttctaaaaaggaagtagagagatctagaagagaaagacgacaagccaatcttcttaagggaaagcaacttcttcgtraggggaaagtctcggaagctcgagagtgtttcacccggtctatcaatatcacacatgccatggcccacaaagtaattaaagctgcccggtctcagggggtagattgcctcgtggctccctatgaagctgatgcgcagttggcctatcttaacaaagcgggaattgtgcaagccataattacagaggactcggatctcctagcttttggctgtaaaaaggtaattttaaagatggaccagtttggaaatggacttgaaattgatcaagctcggctaggaatgtgcagacagcttggggatgtattcacggaagagaagtttcgttacatgtgtattctttcaggttgtgactacctgtcatcactgcgtgggattggattagcaaaggcatgcaaagtcctaagactagccaataatccagatatagtaaaggttatcaagaaaattggacattatctcaagatgaatatcacggtaccagaggattacatcaacgggtttattcgggccaacaataccttcctctatcagctagtttttgatcccatcaaaaggaaacttattcctctgaacgcctatgaagatgatgttgatcctgaaacactaagctacgctgggcaatatgttgatgattccatagctcttcaaatagcacttggaaataaagatataaatacttttgaacagatcgatgactacaatccagacactgctatgcctgcccattcaagaagtcrtagttgggatgacaaaacrtgtcaaaagtcagctaatgttagcagcatttggcataggaattactctcccagaccagagtcgggtactgtttcagatgccccacaattgaaggaaaatccaagtactgtgggagtggaacgagtgattagtactaaagggttaaatctcccaaggaaatcatccattgtgaaaagaccaagaagtgcagagctgtcagaagatgacctgttgagtcagtattctctttcatttaygaagaagaccaagaaaaatagctctgaaggcaataaatcattgagcttttctgaartgtttgtgcctgacctggtaaatggacctactaacaaaaagagtgtaagcactccacctaggacgagaaataaatttgcaacatttttacaaaggaaaaatgaagaaagtggtgcagttgtggttccagggaccagaagcaggtttttttgcagttcagattctactgactgtgtatcaaacaaagtgagcatccagcctctggatgaaactgctgtcacagataaagagaacaatctgcatgaatcagagtatggagaccaagaaggcaagagactggttgacacagatgtagcacgtaattcaagtgatgacattccgaataatcatattccaggtgatcatattccagacaaggcaacagtgtttacagatgaagagtcctactcttttragagcagcaaatttacaaggaccatttcaccacccactttgggaacactaagaagttgttttrgttggtctggaggtcttggagatttttcaagaacgccgagcccctctccaagcacagcattgcagcagttccgaagaaagagcgattccbccacctctttgcctgagaataatatgtctgatgtgtcgcagttaaagagcgaggagtccagtgacgatgagtctcatcccttacgagaagrggcatgttcttcacagtcccaggaaagtggagaattctcactgcagagttcaaatgcatcaaagctttctcagtgctctagtaaggactctgattcagaggaatctgattgcaatattaagttacttgacagtcaaagtgaccagacctccaagctangtttatcwcatttctcaaaaaaagacacacctctaaggaacaaggttcctgggctatataagtccagttctgcagactctctttctacaaccaagatcaaacytctagracctgccagagccagtgggctgagcaagaagcyggcaagcatccagaagagaaagcatcataatgccgagaacaagccggggttacagatcaaactcaatgagctctggaaaaactttggatttaaaaaagattctgaaaagcttcctccttgtaagaaacccctgtccccagtcagagataacatccaactaactccagaagyggaagaggatatatttaacaaacctgaatgtggccgtgttcaaagagcaatattccagtaaatgcagactgctgcaaagcttttgcctgcaagagaatctgatcaatttgaagtccctgtttgggaatgaggcacttatcagcatgaagaattttttctcattctgtgccattttaaaaatagaatacattttgtatattractttataat

SEQ ID NO: 6646 - DNA, 3002 bp, Homo sapiens
  misc_feature (1)...(3002): n = A,T,C or G
rcctaaggaaacgtgtcgtctggaatgggcttgggggccacgcctgcacatctccgcgagacagagggataaagtgaagatggtgctgttattgttacctcgagtgccacatgcgayctctgagatatgtacacagtcattcttactatcgcactcagccattcttactacgctaaagaagaaataattattcgaggatatttgcctggcccagaagaaacttatgtaaatttcatgaactattatatccgttttcctcggagtgagagaaaactctttttagatatcatctgagaggtagttaatttggcaccatggggatacagggattgctacaatttatcaaagaagcttcagaacccatccatgtgaggaagtataaagggcaggtagyagctgtggatacatattgctggcttcacaaaggagctattgcttgtgctgaaaaactagccaaaggtgaacctactgataggtatgtaggattttgtatgaaatttgtaaatatgttactatctcatgggatcaagcctattctcgtatttgatggatgtactttaccttctaaaaaggaagtagagagatctagaagagaaagacgacaagccaatcttcttaagggaaagcaacttcttcgtraggggaaagtctcggaagctcgagagtgtttcacccggtctatcaatatcacacatgccatggcccacaaagtaattaaagctgcccggtctcagggggtagattgcctcgtggctccctatgaagctgatgcgcagttggcctatcttaacaaagcgggaattgtgcaagccataattacagaggactcggatctcctagcttttggctgtaaaaaggtaattttaaagatggaccagtttggaaatggacttgaaattgatcaagctcggctaggaatgtgcagacagcttggggatgtattcacggaagagaagtttcgttacatgtgtattctttcaggttgtgactacctgtcatcactgcgtgggattggattagcaaaggcatgcaaagtcctaagactagccaataatccagatatagtaaaggttatcaagaaaattggacattatctcaagatgaatatcacggtaccagaggattacatcaacgggtttattcgggccaacaataccttcctctatcagctagtttttgatcccatcaaaaggaaacttattcctctgaacgcctatgaagatgatgttgatcctgaaacactaagctacgctgggcaatatgttgatgattccatagctcttcaaatagcacttggaaataaagatataaatacttttgaacagatcgatgactacaatccagacactgctatgcctgcccattcaagaagtcrtagttgggatgacaaaacrtgtcaaaagtcagctaatgttagcagcatttggcataggaattactctcccagaccagagtcgggtactgtttcagatgccccacaattgaaggaaaatccaagtactgtgggagtggaacgagtgattagtactaaagggttaaatctcccaaggaaatcatccattgtgaaaagaccaagaagtgcagagctgtcagaagatgacctgttgagtcagtattctctttcatttaygaagaagaccaagaaaaatagctctgaaggcaataaatcattgagcttttctgaartgtttgtgcctgacctggtaaatggacctactaacaaaaagagtgtaagcactccacctaggacgagaaataaatttgcaacatttttacaaaggaaaaatgaagaaagtggtgcagttgtggttccagggaccagaagcaggtttttttgcagttcagattctactgactgtgtatcaaacaaagtgagcatccagcctctggatgaaactgctgtcacagataaagagaacaatctgcatgaatcagagtatggagaccaagaaggcaagagactggttgacacagatgtagcacgtaattcaagtgatgacattccgaataatcatattccaggtgatcatattccagacaaggcaacagtgtttacagatgaagagtcctactcttttragagcagcaaatttacaaggaccatttcaccacccactttgggaacactaagaagttgttttrgttggtctggaggtcttggagatttttcaagaacgccgagcccctctccaagcacagcattgcagcagttccgaagaaagagcgattccbccacctctttgcctgagaataatatgtctgatgtgtcgcagttaaagagcgaggagtccagtgacgatgagtctcatcccttacgagaagrggcatgttcttcacagtcccaggaaagtggagaattctcactgcagagttcaaatgcatcaaagctttctcagtgctctagtaaggactctgattcagaggaatctgattgcaatattaagttacttgacagtcaaagtgaccagacctccaagctangtttatcwcatttctcaaaaaaagacacacctctaaggaacaaggttcctgggctatataagtccagttctgcagactctctttctacaaccaagatcaaacytctagracctgccagagccagtgggctgagcaagaagcyggcaagcatccagaagagaaagcatcataatgccgagaacaagccggggttacagatcaaactcaatgagctctggaaaaactttggatttaaaaaattctgaaaagcttcctccttgtaagaaacccctgtccccagtcagagataacatccaactaactccagaagyggaagaggatatatttaacaaacctgaatgtggccgtgttcaaagagcaatattccagtaaatgcagactgctgcaaagcttttgcctgcaagagaatctgatcaatttgaagtccctgtttgggaatgaggcacttatcagcatgaagaattttttctcattctgtgccattttaaaaatagaatacattttgtatattractttataa

SEQ ID NO: 6647 - DNA, 3211 bp, Homo sapiens
attaacaggcggtggctagggaggacggagagggggcgtttgctcctctgggacttttcatgcctcgttttttttttcagatgtggcttggtctggacgcaaggtcccagcagccagcttaagcttactcttctgtgaaaggggaaagtatcccctgtggaaagcagttaaacttgtggagggggtgcgagacgtgagttctcccccatgccaggcgaatggtgtggacttgagctggtccagcagccggctcgacttgtctgagggagccctggagggggcggggaggggscccacagaacgtgggttctataaagagacattgggaagattcgattccgagaagaggaagagccggattgaaagagagccaggcccttgagggggagggggctgccaagatggcgtcggcctcctccgggccgttgtcttcggtcggtttttctccgttgatcccgcggtcccttcctgtacctcgtcctcagcatctggaatcaagagtcccatggcatctgaggtgccttatgcctctggcatgcccatcaagaaaataggccatagaagtgttgattcctcaggagggacaacctcatcagccttgaaaggtgccatccagttaggcattacccacactgtggggagcctgagtaccaaaccagagagtgatgtcctcatgcaagatttccacatggtggagagtatcttctttcccagtgaagggagcaacctgacccctgctcatcactacaatgcctttcgtttcaagacctatgcacctgttgccttccgctacttctgggagctatttggtatccggcccgatgattacttgtattccctctgcagtgagccgctgattgaactctgtagctctggagctagtggttccctgttctatgtgtccagcgacgatgagttcattgttaagacagtccgacataaagaagcggagtttctgcagaagctgcttccaggatactacataaacctcaaccagaaccctcggactttgctgcctaaattctatggactgtactgtgtgcagacaggtggcaagaacattcggattgtggtgatgaacaatcttttaccaagatcggtaaaaatgcatatcaaatatgacctcaaaggctcaacctacaggcggcgggcttcccagaaagagcgagagaagcctcttcccacatttaaagacctagacttcttacaagacatccctgatggtctttttttggatgctgacgtgcacaacgctctctgtaagaccctgcagcgtgactgtttggtgctgcagagcttcaagataatggattayagcctcttgatgtcaatccataatatagatcatgcacaacgagagcccttaagcagcgaaacacaatactcagttgatactcgaagaccagccccccaaaaggctctgtattccacagccatggaatccatccagggagaggctcgacggggtggcaccatggagaccgatgaccatatgggtggcatccctgcccggaatagtaaaggggaaaggcttctgctttatattggcatcattgacattctacagtcttacaggtttgttaagaagttggagcactcttggaaagccctgatacatgacggagacactgtctcagtgcatcgcccaggcttctatgctgaatggttccagcgcttcatgtgcaacacggtatttaagaagattcccttgaagccttctccttccaaaaaacttcggtctggctcatctttctctcagcgagcaggctccagtggcaactcctgcattacttaccagccattggtctctggggaacacaaggcacaagtgacaacaaaggcggaagtggagccaggtgttcaccttggttgtcctgatgttttacctcagactccacctttggaggaaatcagtgagggctcacctactcctgaccccagtttctcacctctagttgaagagactttgcaaatgctaactacaagtgtggacaacagtgagtatatggggaatggagacttcttacccacccggctgcaggcccagcaggatgctgtcaacacagtttgtcattcaaagacccgcagcaaccctgagaacaacgtgggccttatcacactggataatgactgtgaagtgctgaccacactcaccccagacactggccgtatcctgtccaagctacatactgtccaacccaagggcaagatcaccttctgcatgggcatccacgtggcccatctggctctgaagcaccgacaaggcaacaatcacaagatccgcatcattgcctttgtgggaaacccggtggaggacaatgagaagaatctggtgaaactggctaaatgcctcaagaaggagaaagtaaatgttgacattatcaattttggggaagaggaggtgaacacagaaaagctgacagcctttgtaaacacgttgaatggcaaagatggaaccggttctcatctggtgacagtgcctcctgggcccagtttggctgatgctctcatcagttttccgattttggctggtgaaggtggtgccatgatgggtcttggtgccagtgactttgaatttggagtagatcccagtgctgatcctgagctggccttggtccttcgtgtatttatggaagagcagcggcagcggcaggaggaggaggcccggcaggcagctgcagyttctgctgctgaggccgggattgctacractgggactgaagactcagacgatgccctgctgaagatgaccatcagccagcawgagtttggccacactgggcttcctgacctaagcagtatgactgaggaagagaagattgtttgtgccatgcagatgtccctgcagggagcagaktttggcctggcagaatcagcagacattgatgccagctcagccatggacacatcygagccagccaaggaggaggatgattacgacgtgatgcaagaccctgagttccttcagagtgtcctagagaacctcccaggtgtrgatcccaacaatgaagccattcgaaatgctgtgggctccctggcctcccaggccaccaaggacagcaagaaggacaagaaggaggaagacaagaagtgagactggagggaaagggtagctgagcctgctcaggggactgcatgggaagcacggaatatagggttagatgtgtgttatctgtaatcattacagcctaaataaagcttggcaagattt

SEQ ID NO: 6648 - DNA, 2571 bp, Homo sapiens
ggccgggttgggcgattaacaggcggtggctagggaggacggagagggggcgtttgctcctctgggacttttcatgcctcgttttttttttcagatgtggcttggtctggacgcaaggtcccagcagccagcttaagcttactcttctgtgaaaggggaaagtatcccctgtggaaagcagttaaacttgtggagggggtgcgagacgtgagttctcccccatgccaggcgaatggtgtggacttgagctggtccagcagccggctcgacttgtctgagggagccctggagggggcggggaggggscccacagaacgtgggttctataaagagacattgggaagattcgattccgagaagaggaagagccggattgaaagagagccaggcccttgagggggagggggctgccaagatggcgtcggcctcctccgggccgttgtcttcggtcggtttttctccgttgatcccgcggtcccttcctgtacctcgtcctcagcatctggaatcaagagtcccatggcatctgaggtgccttatgcctctggcatgcccatcaagaaaataggccatagaagtgttgattcctcaggagggacaacctcatcagccttgaaaggtgccatccagttaggcattacccacactgtggggagcctgagtaccaaaccagagagtgatgtcctcatgcaagatttccacatggtggagagtatcttctttcccagtgaagggagcaacctgacccctgctcatcactacaatgcctttcgtttcaagacctatgcacctgttgccttccgctacttctgggagctatttggtatccggcccgatgattacttgtattccctctgcagtgagccgctgattgaactctgtagctctggagctagtggttccctgttctatgtgtccagcgacgatgagttcattgttaagacagtccgacataaagaagcggagtttctgcagaagctgcttccaggatactacataaacctcaaccagaaccctcggactttgctgcctaaattctatggactgtactgtgtgcagacagacttcttacaagacatccctgatggtctttttttggatgctgacgtgcacaacgctctctgtaagaccctgcagcgtgactgtttggtgctgcagagcttcaagataatggattayagcctcttgatgtcaatccataatatagatcatgcacaacgagagcccttaagcagcgaaacacaatactcaactccacctttggaggaaatcagtgagggctcacctactcctgaccccagtttctcacctctagttgaagagactttgcaaatgctaactacaagtgtggacaacagtgagtatatggggaatggagacttcttacccacccggctgcaggcccagcaggatgctgtcaacacagtttgtcattcaaagacccgcagcaaccctgagaacaacgtgggccttatcacactggataatgactgtgaagtgctgaccacactcaccccagacactggccgtatcctgtccaagctacatactgtccaacccaagggcaagatcaccttctgcatgggcatccacgtggcccatctggctctgaagcaccgacaaggcaacaatcacaagatccgcatcattgcctttgtgggaaacccggtggaggacaatgagaagaatctggtgaaactggctaaatgcctcaagaaggagaaagtaaatgttgacattatcaattttggggaagaggaggtgaacacagaaaagctgacagcctttgtaaacacgttgaatggcaaagatggaaccggttctcatctggtgacagtgcctcctgggcccagtttggctgatgctctcatcagttttccgattttggctggtgaaggtggtgccatgatgggtcttggtgccagtgactttgaatttggagtagatcccagtgctgatcctgagctggccttggtccttcgtgtatttatggaagagcagcggcagcggcaggaggaggaggcccggcaggcagctgcagyttctgctgctgaggccgggattgctacractgggactgaagactcagacgatgccctgctgaagatgaccatcagccagcawgagtttggccacactgggcttcctgacctaagcagtatgactgaggaagagaagattgtttgtgccatgcagatgtccctgcagggagcagaktttggcctggcagaatcagcagacattgatgccagctcagccatggacacatcygagccagccaaggaggaggatgattacgacgtgatgcaagaccctgagttccttcagagtgtcctagagaacctcccaggtgtrgatcccaacaatgaagccattcgaaatgctgtgggctccctggcctcccaggccaccaaggacagcaagaaggacaagaaggaggaagacaagaagtgagactggagggaaagggtagctgagcctgctcaggggactgcatgggaagcacggaatatagggttagatgtgtgttatctgtaatcattacagcctaaataaagcttggcaagattt

SEQ ID NO: 6649 - DNA, 1995 bp, Homo sapiens
ggcaccggaaagaacaagaaaaaagaacaccttatttttatcttcttcagtgagccaatgttcattcaaaagagagattaaagtgctttttgctgactagtcacagtcagagtcagaatcacaggtggattagtagggagtgttataaaagccttgaagtgaaagcccgcagttgtcttactaagaagagaagccttcaatggatccagctgtggctctggtgctctgtctctcctgtttgtttctcctttcactctggaggcagagctctggaagagggaggctcccgtctggccccactcctctcccgattattggaaatatcctgcagttagatgttaaggacatgagcaaatccttaaccaatttctcaaaagtctatggccctgtgttcactgtgtattttggcctgaagcccattgtggtgttgcatggatatgaagcagtgaaggaggccctgattgatcatggagaggagttttctggaagaggaagttttccagtggctgaaaaagttaacaaaggacttggaatccttttcagcaatggaaagagatggaaggagatccggcgtttctgcctcatgactctgcggaattttgggatggggaagaggagcatcgaggaccgtgttcaagaggaagcccgctgccttgtggaggagttgagaaaaaccaatgcctcaccctgtgatcccactttcatcctgggctgtgctccctgcaatgtgatctgctctgttattttccatgatcgatttgattataaagatcagaggtttcttaacttgatggaaaaattcaatgaaaacctcaggattctgagctctccatggatccaggtctgcaataatttccctgctctcatcgattatctcccaggaagtcataatraaatagctgaaaattttgcttacattaaaagttatgtattggagagaataaaagaacatcaagaatccctggacatgaacagtgctcgggactttattgattgtttcctgatcaaaatggaacaggaaaagcacaatcaacagtctgaatttactgttgaaagcttgatagccactgtaactgatatgtttggggctggaayagagacaacgagcaccactctgagatatggactcctgctcctgctgaagtacccagaggtcacagctaaagtccaggaagagattgaatgtktagttggcagaaaccggagcccctgtatgcaggacaggagtcacatgccctacacagatgctgtggtgcacgagatccagagatacattgacctcctccccaccaacctgccccatgcagtgacctgtgatgttaaattcaaaaactacctcatccccaagggcaygaccataataacatccctgacttctgtgctgcacaatgacaaagaattccccaacccagagatgtttgaccctggccactttctggataagagtggcaactttaagaaaagtgactacttcatgcctttctcagcaggaaaacggatgtgtatgggagagggcctggccckcatggagctgtttttattcctgaccaccattttgcagaactttaacctgaaatctcaggttgacccaaaggatattgacatcacccccattgccaatgcatttggtcgtgtgccacccttgtaccagctctgcttcattcctgtctgaagaagggcagatagtttggctgctcctgtgytgtcacctgcaattctcccttatcagggccattrgcctctcccttctctctrtgagggatattttctctgacttgtcaatccacatcttcccattccctcaagatccaatgaacatccaacctccattaaagagagtttcttgggtcacttcctaaatatatctgctattctccatactctgtatcacttgtattgaccaccacatatgctaatacctatctactgctgagttgtcagtatgttatcactakaaaacaaagaaaaatgattaataaatgacaattcagagcc

SEQ ID NO: 6650 - DNA, 6719 bp, Homo sapiens
atttggctagaaggctgggccggcagcggttgtgaggagttagctcgcggcattgcaggctctgagaggaggggacccggttcccgggtgagtgtccaggcatgccagcggaacggcccgcgggcagcggcggctcggaggctccagcaatggttgaacaactggacactgctgtgattaccccggccatgctagaagaggaagaacagcttgaagctgctggactagagagagagcggaagatgctggaaaaggctcgcatgtcttgggatagagagtcgacagaaattcggtaccgtagacttcaacatttgcttgaaaaaagcaatatatactccaaatttttattgacgaaaatggaacagcaacaattagaggaacagaagaagaaagaaaaattggagagaaaaaaggagtctttaaaagttaaaaagggtaaaaattcaattgatgcaagtgaagagaagccagttatgaggaaaaaaagaggaagagaagatgaatcatacaatatttcagaggtcatgtcaaaagaggaaattttgtctgtggctaaaaaaaataaaaaggagaatgaggatgaaaactcctcctctactaatctctgtgtggaagatcttcagaaaaataaagattcgaatagtataattaaagatagattgtctgaaacggttaggcagaatactaaattcttttttgacccagtccggaagtgtaatggtcagccagtaccttttcaacaaccaaagcacttcactggaggagtgatgcgatggtaccaagtagaaggcatggaatggcttaggatgctttgggaaaatggaattaatggcattttagcagatgaaatgggattgggtaagacagttcagtgcattgctactattgcattgatgattcagagaggagtaccaggaccttttcttgtctgtggccctttgtctacacttcctaactggatggctgaattcaaaagatttacaccagatatccctacaatgttatatcatggaacccaggaggaacgtcaaaaattggtaagaaatatttacaaacggaaagggactttgcagattcatcctgtggtaatcacgtcatttgaaatagccatgagagaccgaaatgcgttacagcattgctattggaaatacttaatagtagatgaaggacacaggattaagaatatgaagtgccgtctaatcagggagttaaaacgattcaatgctgataacaaacttcttttgactggtactcccttgcaaaacaatttatcagaactttggtcattgctaaactttttgttgccagatgtatttgatgacttgaaaagctttgagtcttggtttgacatcactagtctttctgaaactgctgaagatattattgctaaagaaagagaacagaatgtattgcatatgctgcaccagattttaacacctttcttattgagaagactgaagtctgatgttgctcttgaagttcctcctaaacgagaagtagtcgtttatgctccactttcaaagaagcaggagatcttttatacagccattgtgaaccgtacaattgcaaacatgtttggatccagtgagaaagaaacaattgagttaagtcctactggtcgaccaaaacgacgaactagaaaatcaataaattacagcaaaatagatgatttccctaatgaattggaaaaactgatcagtcaaatacagccagaggtggaccgagaaagagctgttgtggaagtgaatatccctgtagaatctgaagttaatctgaagctgcagaatataatgatgctacttcgtaaatgttgtaatcatccatatttgattgaatatcctatagaccctgttacacaagaatttaagatcgatgaagaattggtaacaaattctgggaagttcttgattttggatcgaatgctgccagaactaaaaaaaagaggtcacaaggtggtgctgcttttttcacaaatgacaagcatgttggacattttgatggattactgccatctcagagatttcaacttcagcaggcttgatgggtccatgtcttactcagagagagaaaaaaacatgcacagcttcaacacggatccagaggtgtttatcttcttagtgagtacacgagctggtggcctgggcattaatctgactgcagcagatacagttatcatttatgatagtgattggaacccccagtcggatcttcaggcccaggatagatgtcatagaattggtcagacaaagccagttgttgtttatcgccttgttacagcaaatactatcgatcagaaaattgtggaaagagcagctgctaaaaggaaactggaaaagttgatcatccataaaaatcatttcaaaggtggtcagtctggattaaatctgtctaagaatttcttagatcctaaggaattaatggaattattaaaatctagagattatgaaagggaaataaaaggatcaagagagaaggtcattagtgataaagatctagagttgttgttagatcgaagtgatcttattgatcaaatgaatgcttcaggaccaattaaagagaagatggggatattcaagatattagaaaattctgaagattccagtcctgaattagagacagggtttcaccatcttggcctgactggtcccgaactgatctcaggtgatctgcccacctcggcctcccaaagtgctgggattacaagcgtgagccactgcgtggcctgagcactagggcgcaagagaagccgtactggaatattacactactcagcacaagacaggtttaatctttttcttgggggacaagattggaaaattgaggtctgagcagacctgaagagaggcatccagcaactctgagattaaattcatcattgatcaattcgttattgtttggaattgacgtttagctgtgttcctcactcagatacgtgcatgatagctgcttgctaatttggtcttagctcacatttcacctagaatgtatggtctccctctcccctgcaaaatatcccactgttgctaatctgtctgcctcataatttccatgagattgagcatcttgtttgttttgtcaccactatataacagcatgttggaaacaaagcagtaataaagctagaaaaaccaagcgaatacactggattawaaaaaatactgtttcctagaattaaagaaataaatgaggccgggcgcagtggtgcctgtartcccagcagtttgggaggctgaggctagtggatcatgtggccgagatcgcgtcactgcactccagtctagcaacagagcgataccttgtttcttacttaaaaaaaaaaaaagacctcatttgttaactgttaaacagaaaacaagaaattccctatacctgtatgcattrtagagcaaataagagcatcaaaaacaatcttagaaatctttcagagaaaggtcacctacaaaggaacattgatcagataatagatttttttttttttctcagatggagttctgctcttgtcgcccagactggagtgcaatggcacgatgttggctcactgcartctccgcttcccaggttcaagcagttctccagccttagcctcccaagtagctgggattacaggctcccactaccattcccagaatttttgtattttaattagtagagacggggtttcgccatgttggccaggctagcctcgaactcctgaactcaggtgatctgcctgcctcggcctcacaaagtgctgtgattacagggtgtgagccactgcacctggccgataacagatgttttaatagtaagataaaaagtaaaatttccagtgtgtcgaaggaagaaaattacagcctagaattttatcttcatgtacattatttaagtgtgagggaatagtttcagtgacattatgtcattgaagaccttagaagatttccctcgctaaaggagataaagcgactggcacaacatgtatttctctgagtaaktagaagtgttcttttctggctgtactgaagggactttcatgatttcttcgtttttgtactcttagttttataatattgcatagtagctaaggcctggctgtagcagttataaactgttctgcaagtgcgggaagtaatagttattcctatctcaaggatgtggggtttaaatgggttagtgcacaaaaggacatttattaaatttagtcataatcatctcaaggacatggtaagtgaaagagtgtacataaagtacttaatgtaatgtttgctacttaatgttcaataactcaaagagaccaccaccactactacattttacttttattagtaattaataataattaataattagtaattcagtggtaattagtatactaccaaagaaagtacttgagcagaagagccaaaattcaaaccatagaatcattttactgtgcttttattctacctcaaacactaatctccaggccttggataaagggattatttctctgaaggggaaagttatcctctttttgcccaagtcacacttgtgtcatttcttatactgtaaacatgtggttccaattctgaggtattttcccggyttgtaggacccaaaaagaagttaggcttgagaaattttaagtgaagagaacaattctagttcagagtgattggctcttcctaaaagctgacatttgactgaaaattttgaggggagggaaagaaacaataccttttacggcatgtaataggaagaagacctggattttagttgctgctctgatgtcccaacttgggtaaggcaacataacataaatgtcagtttcttcagatttgtgatgaagctgataatccatgctcagcttcctttatgggtctcttgcctatcaaataaggtacagtatgtgaagatacattgcagattatcttatgcattgcttcaggggatgattaaaccatcctttattatagccagagtctagtctaagggaagaaggtcattctctataccagtgaaggctccatccaaaccagtgtttgggggcatagtcataattgaaaaatgattgttttccttatctgtaaracaggtaaatggtattaatcctcaggtggttgtgaggattaagtgatacatgtaaaaaaaagaaagctttggatagtacctattataagaaactcagtgttgctgcaatgtatgtattataatggatttgaaatttgccctaaccaagagtcacagacagaaaaaaggaagttaatgtatctcttgatcactatcaagatgtggtattgaaccttcaagatccttttcagggaatatgtgagatcaaaatttttatactggcactatgatgttatttgccttttcctcatattcacaagtgaacagtggagttttacagaagctatataatgtcatgacatcactgatgggtaatagaatgtgtgcttgtatattccgaaactttcagttccaatttcttcgatcaatgtaatcctcataagtaaaagttatttgaggacctcagacatttttaaaaatgtaaagggggtggggtcaggctcagtggctcatgcctgtaatcccagcattttggaaggccgaggcgaacggatcacttgaggccaggagtttgaaactagtctggtcaacatggtgaaaccccgtctccactaaaacaaaaagttttctggatgtggtggcacacatacctgtaatcccagctactttggtggctgaggcatgagaatcacttgaacccagaagacaggttgcagtgagccaagattgtgcccctgcattctagcctgggtgacagtgagactgtctcaaaaaataaaggtgtacagggattgtatatttgacaacttggtatgtaggatgtgctacctctaatgttccatgctgttacttagttttcactcactactatattttggagatttgttcatattgctctgtgtacatttaattcttcagtgtgtatccaccacatttaacttattcacttacagaactatgcaagaatttctctggtaaatttcactaagtacttaygtacttttcagaacgattgtgagtttacacccctaccagcaggactgagttgagtacccatttcctcacatccttgccagtacttcatttgcctaatttttgccattctcataatgtggcaattgttcaattttgcatttcttccattttatttttttgcatctctgcttttcttttggttagctttgccagttctgcctattatattaatctcccagaatcagcttttagttttgttaaatctctgacatgtttcgttgattcctgctttcatcttaaacatttcttcgttgttaatttgtgtttgctataaaataagcaacatcttaaatgcttgatttgctttcgatgtttattctgtaataagatatttaaagatataattttttccctaaatgctttattagacttttctcataagttttgactggtactgttttcattgttatttaattttgtgttttttaacttctttcatgatttccttttaactgaaggttttcttagatatttagtttgctggtatattcttttaaaattgtatcattgctttctttctatattggattattgtcagagaacatgatttgcatgatattaactttttggagtatattgttgcatctttgtggcctagtacatagttaatttagtgaatgcttccagttgtacttgaaaagaatgtatattttctgatt

SEQ ID NO: 6651 - DNA, 6716 bp, Homo sapiens
atttggctagaaggctgggccggcagcggttgtgaggagttagctcgcggcattgcaggctctgagaggaggggacccggttcccgggtgagtgtccaggcatgccagcggaacggcccgcgggcagcggcggctcggaggctccagcaatggttgaacaactggacactgctgtgattaccccggccatgctagaagaggaagaacagcttgaagctgctggactagagagagagcggaagatgctggaaaaggctcgcatgtcttgggatagagagtcgacagaaattcggtaccgtagacttcaacatttgcttgaaaaaagcaatatatactccaaatttttattgacgaaaatggaacagcaacaattagaggaacagaagaagaaagaaaaattggagagaaaaaaggagtctttaaaagttaaaaagggtaaaaattcaattgatgcaagtgaagagaagccagttatgaggaaaaaaagaggaagagaagatgaatcatacaatatttcagaggtcatgtcaaaagaggaaattttgtctgtggctaaaaaaaataaaaaggagaatgaggatgaaaactcctcctctactaatctctgtgtggaagatcttcagaaaaataaagattcgaatagtataattaaagatagattgtctgaaacggttaggcagaatactaaattcttttttgacccagtccggaagtgtaatggtcagccagtaccttttcaacaaccaaagcacttcactggaggagtgatgcgatggtaccaagtagaaggcatggaatggcttaggatgctttgggaaaatggaattaatggcattttagcagatgaaatgggattgggtaagacagttcagtgcattgctactattgcattgatgattcagagaggagtaccaggaccttttcttgtctgtggccctttgtctacacttcctaactggatggctgaattcaaaagatttacaccagatatccctacaatgttatatcatggaacccaggaggaacgtcaaaaattggtaagaaatatttacaaacggaaagggactttgcagattcatcctgtggtaatcacgtcatttgaaatagccatgagagaccgaaatgcgttacagcattgctattggaaatacttaatagtagatgaaggacacaggattaagaatatgaagtgccgtctaatcagggagttaaaacgattcaatgctgataacaaacttcttttgactggtactcccttgcaaaacaatttatcagaactttggtcattgctaaactttttgttgccagatgtatttgatgacttgaaaagctttgagtcttggtttgacatcactagtctttctgaaactgctgaagatattattgctaaagaaagagaacagaatgtattgcatatgctgcaccagattttaacacctttcttattgagaagactgaagtctgatgttgctcttgaagttcctcctaaacgagaagtagtcgtttatgctccactttcaaagaagcaggagatcttttatacagccattgtgaaccgtacaattgcaaacatgtttggatccagtgagaaagaaacaattgagttaagtcctactggtcgaccaaaacgacgaactagaaaatcaataaattacagcaaaatagatgatttccctaatgaattggaaaaactgatcagtcaaatacagccagaggtggaccgagaaagagctgttgtggaagtgaatatccctgtagaatctgaagttaatctgaagctgcagaatataatgatgctacttcgtaaatgttgtaatcatccatatttgattgaatatcctatagaccctgttacacaagaatttaagatcgatgaagaattggtaacaaattctgggaagttcttgattttggatcgaatgctgccagaactaaaaaaaagaggtcacaaggtgctgcttttttcacaaatgacaagcatgttggacattttgatggattactgccatctcagagatttcaacttcagcaggcttgatgggtccatgtcttactcagagagagaaaaaaacatgcacagcttcaacacggatccagaggtgtttatcttcttagtgagtacacgagctggtggcctgggcattaatctgactgcagcagatacagttatcatttatgatagtgattggaacccccagtcggatcttcaggcccaggatagatgtcatagaattggtcagacaaagccagttgttgtttatcgccttgttacagcaaatactatcgatcagaaaattgtggaaagagcagctgctaaaaggaaactggaaaagttgatcatccataaaaatcatttcaaaggtggtcagtctggattaaatctgtctaagaatttcttagatcctaaggaattaatggaattattaaaatctagagattatgaaagggaaataaaaggatcaagagagaaggtcattagtgataaagatctagagttgttgttagatcgaagtgatcttattgatcaaatgaatgcttcaggaccaattaaagagaagatggggatattcaagatattagaaaattctgaagattccagtcctgaattagagacagggtttcaccatcttggcctgactggtcccgaactgatctcaggtgatctgcccacctcggcctcccaaagtgctgggattacaagcgtgagccactgcgtggcctgagcactagggcgcaagagaagccgtactggaatattacactactcagcacaagacaggtttaatctttttcttgggggacaagattggaaaattgaggtctgagcagacctgaagagaggcatccagcaactctgagattaaattcatcattgatcaattcgttattgtttggaattgacgtttagctgtgttcctcactcagatacgtgcatgatagctgcttgctaatttggtcttagctcacatttcacctagaatgtatggtctccctctcccctgcaaaatatcccactgttgctaatctgtctgcctcataatttccatgagattgagcatcttgtttgttttgtcaccactatataacagcatgttggaaacaaagcagtaataaagctagaaaaaccaagcgaatacactggattawaaaaaatactgtttcctagaattaaagaaataaatgaggccgggcgcagtggtgcctgtartcccagcagtttgggaggctgaggctagtggatcatgtggccgagatcgcgtcactgcactccagtctagcaacagagcgataccttgtttcttacttaaaaaaaaaaaaagacctcatttgttaactgttaaacagaaaacaagaaattccctatacctgtatgcattrtagagcaaataagagcatcaaaaacaatcttagaaatctttcagagaaaggtcacctacaaaggaacattgatcagataatagatttttttttttttctcagatggagttctgctcttgtcgcccagactggagtgcaatggcacgatgttggctcactgcartctccgcttcccaggttcaagcagttctccagccttagcctcccaagtagctgggattacaggctcccactaccattcccagaatttttgtattttaattagtagagacggggtttcgccatgttggccaggctagcctcgaactcctgaactcaggtgatctgcctgcctcggcctcacaaagtgctgtgattacagggtgtgagccactgcacctggccgataacagatgttttaatagtaagataaaaagtaaaatttccagtgtgtcgaaggaagaaaattacagcctagaattttatcttcatgtacattatttaagtgtgagggaatagtttcagtgacattatgtcattgaagaccttagaagatttccctcgctaaaggagataaagcgactggcacaacatgtatttctctgagtaaktagaagtgttcttttctggctgtactgaagggactttcatgatttcttcgtttttgtactcttagttttataatattgcatagtagctaaggcctggctgtagcagttataaactgttctgcaagtgcgggaagtaatagttattcctatctcaaggatgtggggtttaaatgggttagtgcacaaaaggacatttattaaatttagtcataatcatctcaaggacatggtaagtgaaagagtgtacataaagtacttaatgtaatgtttgctacttaatgttcaataactcaaagagaccaccaccactactacattttacttttattagtaattaataataattaataattagtaattcagtggtaattagtatactaccaaagaaagtacttgagcagaagagccaaaattcaaaccatagaatcattttactgtgcttttattctacctcaaacactaatctccaggccttggataaagggattatttctctgaaggggaaagttatcctctttttgcccaagtcacacttgtgtcatttcttatactgtaaacatgtggttccaattctgaggtattttcccggyttgtaggacccaaaaagaagttaggcttgagaaattttaagtgaagagaacaattctagttcagagtgattggctcttcctaaaagctgacatttgactgaaaattttgaggggagggaaagaaacaataccttttacggcatgtaataggaagaagacctggattttagttgctgctctgatgtcccaacttgggtaaggcaacataacataaatgtcagtttcttcagatttgtgatgaagctgataatccatgctcagcttcctttatgggtctcttgcctatcaaataaggtacagtatgtgaagatacattgcagattatcttatgcattgcttcaggggatgattaaaccatcctttattatagccagagtctagtctaagggaagaaggtcattctctataccagtgaaggctccatccaaaccagtgtttgggggcatagtcataattgaaaaatgattgttttccttatctgtaaracaggtaaatggtattaatcctcaggtggttgtgaggattaagtgatacatgtaaaaaaaagaaagctttggatagtacctattataagaaactcagtgttgctgcaatgtatgtattataatggatttgaaatttgccctaaccaagagtcacagacagaaaaaaggaagttaatgtatctcttgatcactatcaagatgtggtattgaaccttcaagatccttttcagggaatatgtgagatcaaaatttttatactggcactatgatgttatttgccttttcctcatattcacaagtgaacagtggagttttacagaagctatataatgtcatgacatcactgatgggtaatagaatgtgtgcttgtatattccgaaactttcagttccaatttcttcgatcaatgtaatcctcataagtaaaagttatttgaggacctcagacatttttaaaaatgtaaagggggtggggtcaggctcagtggctcatgcctgtaatcccagcattttggaaggccgaggcgaacggatcacttgaggccaggagtttgaaactagtctggtcaacatggtgaaaccccgtctccactaaaacaaaaagttttctggatgtggtggcacacatacctgtaatcccagctactttggtggctgaggcatgagaatcacttgaacccagaagacaggttgcagtgagccaagattgtgcccctgcattctagcctgggtgacagtgagactgtctcaaaaaataaaggtgtacagggattgtatatttgacaacttggtatgtaggatgtgctacctctaatgttccatgctgttacttagttttcactcactactatattttggagatttgttcatattgctctgtgtacatttaattcttcagtgtgtatccaccacatttaacttattcacttacagaactatgcaagaatttctctggtaaatttcactaagtacttaygtacttttcagaacgattgtgagtttacacccctaccagcaggactgagttgagtacccatttcctcacatccttgccagtacttcatttgcctaatttttgccattctcataatgtggcaattgttcaattttgcatttcttccattttatttttttgcatctctgcttttcttttggttagctttgccagttctgcctattatattaatctcccagaatcagcttttagttttgttaaatctctgacatgtttcgttgattcctgctttcatcttaaacatttcttcgttgttaatttgtgtttgctataaaataagcaacatcttaaatgcttgatttgctttcgatgtttattctgtaataagatatttaaagatataattttttccctaaatgctttattagacttttctcataagttttgactggtactgttttcattgttatttaattttgtgttttttaacttctttcatgatttccttttaactgaaggttttcttagatatttagtttgctggtatattcttttaaaattgtatcattgctttctttctatattggattattgtcagagaacatgatttgcatgatattaactttttggagtatattgttgcatctttgtggcctagtacatagttaatttagtgaatgcttccagttgtacttgaaaagaatgtatattttctgatt

SEQ ID NO: 6652 - DNA, 3024 bp, Homo sapiens
atttggctagaaggctgggccggcagcggttgtgaggagttagctcgcggcattgcaggctctgagaggaggggacccggttcccgggtgagtgtccaggcatgccagcggaacggcccgcgggcagcggcggctcggaggctccagcaatggttgaacaactggacactgctgtgattaccccggccatgctagaagaggaagaacagcttgaagctgctggactagagagagagcggaagatgctggaaaaggctcgcatgtcttgggatagagagtcgacagaaattcggtaccgtagacttcaacatttgcttgaaaaaagcaatatatactccaaatttttattgacgaaaatggaacagcaacaattagaggaacagaagaagaaagaaaaattggagagaaaaaaggagtctttaaaagttaaaaagggtaaaaattcaattgatgcaagtgaagagaagccagttatgaggaaaaaaagaggaagagaagatgaatcatacaatatttcagaggtcatgtcaaaagaggaaattttgtctgtggctaaaaaaaataaaaaggagaatgaggatgaaaactcctcctctactaatctctgtgtggaagatcttcagaaaaataaagattcgaatagtataattaaagatagattgtctgaaacggttaggcagaatactaaattcttttttgacccagtccggaagtgtaatggtcagccagtaccttttcaacaaccaaagcacttcactggaggagtgatgcgatggtaccaagtagaaggcatggaatggcttaggatgctttgggaaaatggaattaatggcattttagcagatgaaatgggattgggtaagacagttcagtgcattgctactattgcattgatgattcagagaggagtaccaggaccttttcttgtctgtggccctttgtctacacttcctaactggatggctgaattcaaaagatttacaccagatatccctacaatgttatatcatggaacccaggaggaacgtcaaaaattggtaagaaatatttacaaacggaaagggactttgcagattcatcctgtggtaatcacgtcatttgaaatagccatgagagaccgaaatgcgttacagcattgctattggaaatacttaatagtagatgaaggacacaggattaagaatatgaagtgccgtctaatcagggagttaaaacgattcaatgctgataacaaacttcttttgactggtactcccttgcaaaacaatttatcagaactttggtcattgctaaactttttgttgccagatgtatttgatgacttgaaaagctttgagtcttggtttgacatcactagtctttctgaaactgctgaagatattattgctaaagaaagagaacagaatgtattgcatatgctgcaccagattttaacacctttcttattgagaagactgaagtctgatgttgctcttgaagttcctcctaaacgagaagtagtcgtttatgctccactttcaaagaagcaggagatcttttatacagccattgtgaaccgtacaattgcaaacatgtttggatccagtgagaaagaaacaattgagttaagtcctactggtcgaccaaaacgacgaactagaaaatcaataaattacagcaaaatagatgatttccctaatgaattggaaaaactgatcagtcaaatacagccagaggtggaccgagaaagagctgttgtggaagtgaatatccctgtagaatctgaagttaatctgaagctgcagaatataatgatgctacttcgtaaatgttgtaatcatccatatttgattgaatatcctatagaccctgttacacaagaatttaagatcgatgaagaattggtaacaaattctgggaagttcttgattttggatcgaatgctgccagaactaaaaaaaagaggtcacaaggtggtgctgcttttttcacaaatgacaagcatgttggacattttgatggattactgccatctcagagatttcaacttcagcaggcttgatgggtccatgtcttactcagagagagaaaaaaacatgcacagcttcaacacggatccagaggtgtttatcttcttagtgagtacacgagctggtggcctgggcattaatctgactgcagcagatacagttatcatttatgatagtgattggaacccccagtcggatcttcaggcccaggatagatgtcatagaattggtcagacaaagccagttgttgtttatcgccttgttacagcaaatactatcgatcagaaaattgtggaaagagcagctgctaaaaggaaactggaaaagttgatcatccataaaaatcatttcaaaggtggtcagtctggattaaatctgtctaagaatttcttagatcctaaggaattaatggaattattaaaatctagagattatgaaagggaaataaaaggatcaagagagaaggtcattagtgataaagatctagagttgttgttagatcgaagtgatcttattgatcaaatgaatgcttcaggaccaattaaagagaagatggggatattcaagatattagaaaattctgaagattccagtcctgaatgtttgttttaaagtggagctcaagaatagcttttaaaagttcttatttacatctagtgatttccctgtattgggtttgaaatactgattgtccacttcmccttttttattatatcagttgacatgtaactagtaccatgcgtacttaaatagatggtaattttctgagccttaccaagaacaaagaagtatccatattaagtttagattttcagttaatttttgagactgagtagtattcttggatacaggctgatgtgtacttaaccacttccagatttatacagtcttcctgtggaagtttagtaaatgtctttttccctcctttcttctagtaatgcagttcatgggctttaggtacttcagttatgaagtaggcttttcatggggagagattgggattatgctytctgtt

SEQ ID NO: 6653 - DNA, 3260 bp, Homo sapiens
tccccagtcgcctgtaccaaccaccttctcaagttgtagcggtcgctcgcctggggttctccgtgggcggccgacgggcgcgtgggggagggggttcgggccgcccagcgcggcaaggagcgagtgtgtgcacgcagagggccggggctacggggcagcgccccgggcgatgaggggccggcgttgaccgggaagagcgggcaccgcggcagtggctccgaggggacccgcgatggcagcgccctgagaggaggctccaggcagggcgggctgcgctggcagcggccgctgaggtgctggccggccggctggctggcgacgggggcagaagcgacgagaggcgcgctcggcacccgcacccccgtgcccccgcctcagttgtctaaacttcgggctctcttccacccgctctgcgcgcccagagtcaacaacttcttcacccccctccgcccccgcccttccctccgtcagccccgggagctcgccgcgcgccggggaccaggaacctccrgcgctgagatgtggccgtgaggcgttggcgggcggcgaggagaagctcggcggcgtcccggggccggagggccgtggggccggggcgcaggggcgcgagcaccccgcgcctctcccccgcctcctcctgccgtctccgccgctgcccgtgccttgcaagcagcagccggagctgccaagcgtcagggccgcggagatgtcgtcgtcgtcgccgccggcgggggctgccagcgccgccatctcggcctcggagaaagtggacggcttcacccggaaatcggtccgcaaggcgcagaggcagaagcgctcccagggctcgtcgcagtttcgcagccagggcagccaggcagagctgcacccgctgccycagctcaaagatgccacttcaaatgaacaacaagagcttttctgtcagaagttgcagcagtgttgtatactgtttgatttcatggactctgtttcagacttgaagagcaaagaaattaaaagagcaacactgaatgaactggttgagtatgtttcaactaatcgtggtgtaattgttgaatcagcgtattctgatatagtaaaaatgatcagtgctaacatcttccgtacacttcctccaagtgataatccagattttgatccagaagaggatgaacccacgcttgaggcctcttggcctcacatacagttggtatatgaattcttcttgagatttttggagagccctgatttccagcctagcattgcaaaacgatacattgatcagaaattygtacaacagctcctggagctttttgatagtgaagatcccagagaacgtgacttcctgaagactgttctgcaccgaatttatgggaaatttcttggattaagagcattcatcagaaaacaaattaacaacattttcctcaggtttatatatgaaacagaacatttcaatggtgttgctgaacttcttgaaatattaggaagtattatcaatggctttgcattgccactgaaagcagaacataaacaatttctaatgaaggttcttattcctatgcatactgcaaaaggattagctttgtttcatgctcagctagcatattgtgttgtacagttcctggagaaagatacaacactaacagagccagtgatcagaggactgctgaaattttggccaaaaacctgcagtcagaaagaggtgatgtttttaggagaaattgaagaaatcttagatgtcattgaaccaacacagttcaaaaaaattgaagagccacttttcaagcagatatccaagtgtgtatccagttctcattttcaggttgcagaaagggcattgtacttctggaataacgaatatattcttagtttgattgaggagaacattgataaaattctgccaattatgtttgccagtttgtacaaaatttccaaagaacactggaatccgaccattgtagcactggtatacaatgtgctgaaaaccctaatggaaatgaatggcaagcttttcgatgaccttactagctcatacaaagctgaaagacagagagagaaaaagaaggaattggaacgtgaagaattatggaaaaaattagaggagctaaagctaaagaaagctctagaaaaacagaatagtgcttacaacatgcacagtattctcagcaatacaagtgccgaataaaaaaaaagcctcccacctctgccggataggcagagttttgtatgcttttttgaaatatgtaaaaattacaaaacaaacctcatcagtataatataattaaaaggccaattttttctggcaactgtaaatggaaaaatatatggactaaacgtagccctgtgctgtatcatggccatagtatattgtaacctttgtctaatcattggatttattgtgtcacttctgaagtttcacagaaatgaatgaattttatcatctatgatawgagtgagataattatgggagtggtaagaattatgacttgaattcttctttgattgtgttgcacatagatayggtagtctgctctgtatatttttcccttttataatgtgcttttcacactgctgcaaaccttagttacatcctaggaaaaaatacttcctaaaataaaactaaggtatcatccttacccttctctttgtctcacccagaaatatgatggggggaattacctgccctaacccctccctcaataaatacattactgtactctggaatttaggcaaaaccttaaatctccaggctttttaaagcacaaaatataaataaaagctgggaaagtaaaccaaaattcttcagattgttcctcatgaatatcccccttcctctgcaattctccagagtggtaacagatgggtagaggcagctcaggtgaattacccagcttgcctctcaattcattcctcctcttcctctcaaaggctgaaggcagggcctttccagtcctcacaacctgtccttcacctagtccctcctgacccagggatggaggctttgagtcccacagtgtggtgatacagagcactagttgtcactgcctggctttatttaaaggaactgcagtaggcttcctctgtagagctctgaaaaggttgackatatagaggtcttgtatktttttacttggtcaagtatttctcacatcttttgttatcagagtaccattccaatctcttaacttgcagttgtgtggaaaactgttttgtaatgaaagatcttcattgggggattgagcagcatttaataaagtctatgtttgtattttgcctta

SEQ ID NO: 6654 - DNA, 3206 bp, Homo sapiens
tccccagtcgcctgtaccaaccaccttctcaagttgtagcggtcgctcgcctggggttctccgtgggcggccgacgggcgcgtgggggagggggttcgggccgcccagcgcggcaaggagcgagtgtgtgcacgcagagggccggggctacggggcagcgccccgggcgatgaggggccggcgttgaccgggaagagcgggcaccgcggcagtggctccgaggggacccgcgatggcagcgccctgagaggaggctccaggcagggcgggctgcgctggcagcggccgctgaggtgctggccggccggctggctggcgacgggggcagaagcgacgagaggcgcgctcggcacccgcacccccgtgcccccgcctcagttgtctaaacttcgggctctcttccacccgctctgcgcgcccagagtcaacaacttcttcacccccctccgcccccgcccttccctccgtcagccccgggagctcgccgcgcgccggggaccaggaacctccrgcgctgagatgtggccgtgaggcgttggcgggcggcgaggagaagctcggcggcgtcccggggccggagggccgtggggccggggcgcaggggcgcgagcaccccgcgcctctcccccgcctcctcctgccgtctccgccgctgcccgtgccttgcaagcagcagccggagctgccaagcgtcagggccgcggagatgtcgtcgtcgtcgccgccggcgggggctgccagcgccgccatctcggcctcggagaaagtggacggcttcacccggaaatcggtccgcaaggcgcagaggcagaagcgctcccagggctcgtcgcagtttcgcagccagggcagccaggcagagctgcacccgctgccycagctcaaagatgccacttcaaatgaacaacaagagcttttctgtcagaagttgcagcagtgttgtatactgtttgatttcatggactctgtttcagacttgaagagcaaagaaattaaaagagcaacactgaatgaactggttgagtatgtttcaactaatcgtggtgtaattgttgaatcagcgtattctgatatagtaaaaatgatcagtgctaacatcttccgtacacttcctccaagtgataatccagattttgatccagaagaggatgaacccacgcttgaggcctcttggcctcacatacagttggtatatgaattcttcttgagatttttggagagccctgatttccagcctagcattgcaaaacgatacattgatcagaaattygtacaacagctcctggagctttttgatagtgaagatcccagagaacgtgacttcctgaagactgttctgcaccgaatttatgggaaatttcttggattaagagcattcatcagaaaacaaattaacaacattttcctcaggtttatatatgaaacagaacatttcaatggtgttgctgaacttcttgaaatattaggaagtattatcaatggctttgcattgccactgaaagcagaacataaacaatttctaatgaaggttcttattcctatgcatactgcaaaaggattagctttgtttcatgctcagctagcatattgtgttgtacagttcctggagaaagatacaacactaacagagccagtgatcagaggactgctgaaattttggccaaaaacctgcagtcagaaagaggtgatgtttttaggagaaattgaagaaatcttagatgtcattgaaccaacacagttcaaaaaaattgaagagccacttttcaagcagatatccaagtgtgtatccagttctcattttcaggttgcagaaagggcattgtacttctggaataacgaatatattcttagtttgattgaggagaacattgataaaattctgccaattatgtttgccagtttgtacaaaatttccaaagaacactggaatccgaccattgtagcactggtatacaatgtgctgaaaaccctaatggaaatgaatggcaagcttttcgatgaccttactagctcatacaaagctgaaagacagagagagaaaaagaaggaattggaacgtgaagaattatggaaaaaattagaggagctaaagctaaagaaagctctagaaaaacagaatagtgcttacaacatgcacagtattctcagcaatacaagtgccgaataaaaaaaaagcctcccacctctgccggataggcagagttttgtatgcttttttgaaatatgtaaaaattacaaaacaaacctcatcagtataatataattaaaaggccaattttttctggcaactgtaaatggaaaacctttgtctaatcattggatttattgtgtcacttctgaagtttcacagaaatgaatgaattttatcatctatgatawgagtgagataattatgggagtggtaagaattatgacttgaattcttctttgattgtgttgcacatagatayggtagtctgctctgtatatttttcccttttataatgtgcttttcacactgctgcaaaccttagttacatcctaggaaaaaatacttcctaaaataaaactaaggtatcatccttacccttctctttgtctcacccagaaatatgatggggggaattacctgccctaacccctccctcaataaatacattactgtactctggaatttaggcaaaaccttaaatctccaggctttttaaagcacaaaatataaataaaagctgggaaagtaaaccaaaattcttcagattgttcctcatgaatatcccccttcctctgcaattctccagagtggtaacagatgggtagaggcagctcaggtgaattacccagcttgcctctcaattcattcctcctcttcctctcaaaggctgaaggcagggcctttccagtcctcacaacctgtccttcacctagtccctcctgacccagggatggaggctttgagtcccacagtgtggtgatacagagcactagttgtcactgcctggctttatttaaaggaactgcagtaggcttcctctgtagagctctgaaaaggttgackatatagaggtcttgtatktttttacttggtcaagtatttctcacatcttttgttatcagagtaccattccaatctcttaacttgcagttgtgtggaaaactgttttgtaatgaaagatcttcattgggggattgagcagcatttaataaagtctatgtttgtattttgcctt

SEQ ID NO: 6655 - DNA, 1470 bp, Homo sapiens
gtggagggtcgcggcaggaacaagtgcgggggcctcaaagccccgccccaggcccagcggaaccctgaagaggagggggagggtgagccgggcgcggctgtgtcagctgagtgacagtcacgggaccgcgaccaactctgtctggcttcctagaggagcaggagggatgagcaagggtctcccagcgcgacaggccagacatggagaaagagcgagagactctgcaggcctggaaggagcgcgtggggcaggagctggaccgcgtggtggctttctggatggagcactcccacgaccaggagcacgggggcttcttcacgtgccttggccgcgaggggcgggtgtatgatgacctcaagtatgtgtggctgcaggggaggcaggtatggatgtattgtcgcctgtaccgcactttcgagcgcttccgccatgctcagcttctggacgcagcaaaagcaggtggtgagttcttgctgcrgtatgcccgggtggcacctcctggcaagaagtgtgcctttgtgctgactcgggacggccgcccggtcaaggtgcagcgaaccatcttcagtgagtgtttctacaccatggccatgaacgagctgtggagagccacaggggaagtgcggtaccagacggaagcggtggagatgatggatcagatcgtccactgggtgcaggaggacgcgtcgggactgggccggccccagctccagggggccccggctgcggagcccatggcggtgcccatgatgctactgaacctggtggagcagctcggggaggcagatgaggagctggcgggcaaatacgcagagctgggggactggtgcgcccggaggattctgcagcacgtgcagagggatggacaagctgtgctggagaatgtgtcagagggtggcaaggaacttcctggctgcctggggagacagcagaacccaggccacacgctggaagccggctggtttctgctccgtcattgcattcggaaaggcgaccccgaacttcgagcccacgtgattgrcaagttcctattgttgcccttccactccggatgggaccctgaccacggaggcctcttttacttccaggatgctgataacttctgccccacccagctggagtgggccatgaagctctggtggccacacagtgaagccatgattgccttcctcatgggttacagtgacagtggggaccctgtgctgctgcgcctcttctaccaagtggctgagtacaccttccgccagtttcgcgatcccgagtacggggaatggtttggctacctgagccgagagggcaaggtggccctctccatcaagggaggtcctttcaaaggctgcttccacgtgccgcggtgcctagccatgtgcgaggagatgctgggcgccctgctgagccgccccgcccccgccccctcccccgcccccacccccgcctgccgaggcgcggaataaaggctgagtccgctcc

SEQ ID NO: 6656 - DNA, 1663 bp, Homo sapiens
gcacccctgccccacaggcttggtagggccaaggccctcagccgccctgccggggcccctggtgtagggcggggtgggtggcagccccgttccccctcatcccagaccctccggccatcccagcttttcccaccaagcaggatcttgagaccagagctcccagcaggggccctggagggactggcccattcgagtggagggtcgcggcaggaacaagtgcgggggcctcaaagccccgccccaggcccagcggaaccctgaagaggagggggagggtgagccgggcgcggctgtgtcagctgagtgacagtcacgggaccgcgaccaactctgtctggcttcctagaggagcaggagggatgagcaagggtctcccagcgcgacaggccagacatggagaaagagcgagagactctgcaggcctggaaggagcgcgtggggcaggagctggaccgcgtggtggctttctggatggagcactcccacgaccaggagcacgggggcttcttcacgtgccttggccgcgaggggcgggtgtatgatgacctcaagtatgtgtggctgcaggggaggcaggtatggatgtattgtcgcctgtaccgcactttcgagcgcttccgccatgctcagcttctggacgcagcaaaagcaggtggtgagttcttgctgcrgtatgcccgggtggcacctcctggcaagaagtgtgcctttgtgctgactcgggacggccgcccggtcaaggtgcagcgaaccatcttcagtgagtgtttctacaccatggccatgaacgagctgtggagagccacaggggaagtgcggtaccagacggaagcggtggagatgatggatcagatcgtccactgggtgcaggaggacgcgtcgggactgggccggccccagctccagggggccccggctgcggagcccatggcggtgcccatgatgctactgaacctggtggagcagctcggggaggcagatgaggagctggcgggcaaatacgcagagctgggggactggtgcgcccggaggattctgcagcacgtgcagagggatggacaagctgtgctggagaatgtgtcagagggtggcaaggaacttcctggctgcctggggagacagcagaacccaggccacacgctggaagccggctggtttctgctccgtcattgcattcggaaaggcgaccccgaacttcgagcccacgtgattgrcaagttcctattgttgcccttccactccggatgggaccctgaccacggaggcctcttttacttccaggatgctgataacttctgccccacccagctggagtgggccatgaagctctggtggccacacagtgaagccatgattgccttcctcatgggttacagtgacagtggggaccctgtgctgctgcgcctcttctaccaagtggctgagtacaccttccgccagtttcgcgatcccgagtacggggaatggtttggctacctgagccgagagggcaaggtggccctctccatcaagggaggtcctttcaaaggctgcttccacgtgccgcggtgcctagccatgtgcgaggagatgctgggcgccctgctgagccgccccgcccccgccccctcccccgcccccacccccgcctgccgaggcgcggaataaaggctgagtccgctcc

SEQ ID NO: 6657 - DNA, 1659 bp, Homo sapiens
gcacccctgccccacaggcttggtagggccaaggccctcagccgccctgccggggcccctggtgtagggcggggtgggtggcagccccgttccccctcatcccagaccctccggccatcccagcttttcccaccaagcaggatcttgagaccagagctcccagcaggggccctggagggactggcccattcgagtggagggtcgcggcaggaacaagtgcgggggcctcaaagccccgccccaggcccagcggaaccctgaagaggagggggagggtgagccgggcgcggctgtgtcagctgagtgacagtcacgggaccgcgaccaactctgtctggcttcctagaggagcaggagggatgagcaagggtctcccagcgcgacaggacatggagaaagagcgagagactctgcaggcctggaaggagcgcgtggggcaggagctggaccgcgtggtggctttctggatggagcactcccacgaccaggagcacgggggcttcttcacgtgccttggccgcgaggggcgggtgtatgatgacctcaagtatgtgtggctgcaggggaggcaggtatggatgtattgtcgcctgtaccgcactttcgagcgcttccgccatgctcagcttctggacgcagcaaaagcaggtggtgagttcttgctgcrgtatgcccgggtggcacctcctggcaagaagtgtgcctttgtgctgactcgggacggccgcccggtcaaggtgcagcgaaccatcttcagtgagtgtttctacaccatggccatgaacgagctgtggagagccacaggggaagtgcggtaccagacggaagcggtggagatgatggatcagatcgtccactgggtgcaggaggacgcgtcgggactgggccggccccagctccagggggccccggctgcggagcccatggcggtgcccatgatgctactgaacctggtggagcagctcggggaggcagatgaggagctggcgggcaaatacgcagagctgggggactggtgcgcccggaggattctgcagcacgtgcagagggatggacaagctgtgctggagaatgtgtcagagggtggcaaggaacttcctggctgcctggggagacagcagaacccaggccacacgctggaagccggctggtttctgctccgtcattgcattcggaaaggcgaccccgaacttcgagcccacgtgattgrcaagttcctattgttgcccttccactccggatgggaccctgaccacggaggcctcttttacttccaggatgctgataacttctgccccacccagctggagtgggccatgaagctctggtggccacacagtgaagccatgattgccttcctcatgggttacagtgacagtggggaccctgtgctgctgcgcctcttctaccaagtggctgagtacaccttccgccagtttcgcgatcccgagtacggggaatggtttggctacctgagccgagagggcaaggtggccctctccatcaagggaggtcctttcaaaggctgcttccacgtgccgcggtgcctagccatgtgcgaggagatgctgggcgccctgctgagccgccccgcccccgccccctcccccgcccccacccccgcctgccgaggcgcggaataaaggctgagtccgctcc

SEQ ID NO: 6658 - DNA, 2547 bp, Homo sapiens
ggagaggccgccacccggggttccggtggcgttaggctgcagcagtggcgcttcccgccgcccgagcttcggaaacttcccggccgcgacgcagggaaccggcgcggagaaccgagcagagcggaggggtagggggagatgggggaccgggggccagaccacctctgagaggactcgctgaggcccagcacctcggcgcctcctctgttcccctggcccacctggccctgggggagatctaggcctcgaacggcactcctcgcacgcacacccccagccagagtcggaagctcgaacttggggagcgttcgcgagaagaccgagacaggagcagaaaggggcgcccgtggtccagcgtgtagggagccgatcgcccatggagggtctgggccgctcgtgcctgtggctgcgtcgggagctgtcgcccccgcggccgcggctcctgctcctggactgccgcagccgcgagctgtacgagtcggcgcgcatcggtggggcgctgagcgtggccctgccggcgctcctgctgcgccgcctgcggaggggcagcctgtcggtgcgcgcgctcctgcctgggccgccgctgcagccgcccccgcctgcccccgtgctcctgtacgaccagggcgggggccggcgccggcgcggggaggccgaggccgaggccgaggagtgggaggccgagtcggtgctgggcaccctgctgcagaagctgcgagaggaaggctacctggcctactacctccagggaggcttcagcagattccaggccgagtgccctcacctgtgtgagaccagccttgctggccgtgccggctccagcatggygccggtgcccggtccagtgcccgtggtggggttgggcagcctgtgcctgggctccgactgctctgatgcggaatccgaggctgaccgcgactccatgagctgtggcctggattcggagggtgccacacccccaccagtggggctgcgggcatccttccctgtccagatcctgcccaacctctatctgggcagtgcccgggattccgccaatttggagagcctggccaaactgggcatccgctacatcctcaatgtcacccccaacctcccaaacttcttcgagaagaatggtgactttcactacaagcagatccccatctccgaccactggagccagaacctgtcgcggttctttccggaggccattgagttcattgatgaggccttgtcccagaactgcggggtgctcgtccactgcttggcgggggtcagccgttctgtcaccgtcactgtggcctacctcatgcagaagctccacctctctctcaacgatgcctatgacctggtcaagaggaagaagtctaacatctcccccaacttcaacttcatggggcagttgctggactttgagcgcagcttgcggctggaggagcgccactcgcaggagcagggcagtggggggcaggcatctgcggcctccaacccgccctccttcttcaccacccccaccagtgatggcgccttcgagctggcccccacctagggccccgtggccggcaggccggcccctgccccacccccacccacgggtgtccctgcccactcgtgtggcaagggaggggagggcaggagggctcggcctgagcagggtgctggggggagagcgcaatacctcacgcgggctgccgtcctaatcaacgtgcctatggcgggaccacgctcggagcctgcctcttctgcgactgttactttttctttgcgggatgggggtgggggttccctctccaggtggttgtccaggcccaggtcccggccctgggtgctcagccagctcggctaggccctgcgcctccctgcgcttcccccttcaggaagggtgtgtgccacctcgttgcagtggctgcttgggggagaggcgtttgccatcactggtgttgtcacctccctgtttctccaccaagggcttgggcctctcggggctggggcctcccaggggatggggacccagaggtgcagtggccgcccacatccatggcctaggagctactgggcaggttcccggccacacatctggtgggctgttttgttttttttttttcctcttcccccagatgtcttgacgggatcactggggctctttgtgagtgagggtggccaaactaccgccggaggagatggggtctcagagcgagagctgcggagggggaggggaagaagaaggcctcacttttgctgctgcggggcccacacagccgctgctactttggggggtggggaaggggccaagctgcagacacacacagtcattcatttctgtccacacccctgtgggtggcgggtgtgcgtgtgtgtgcttgtgtgtgcgcacgtgtcggcgctcacacacacatgctagcccactgatgcacccagcccagggctggcagtctttgcagcgtggggccgtctcaccctggagcctggagaggatctatgcttgtttgtttttgtaatccatatcatagttgctttctttaattgttccttctgaataaacagtttatttaagatactgagtag

SEQ ID NO: 6659 - DNA, 2294 bp, Homo sapiens
cgcttcccgccgcccgagcttcggaaacttcccggccgcgacgcagggaaccggcgcggagaaccgagcagagcggagcgcccgtggtccagcgtgtagggagccgatcgcccatggagggtctgggccgctcgtgcctgtggctgcgtcgggagctgtcgcccccgcggccgcggctcctgctcctggactgccgcagccgcgagctgtacgagtcggcgcgcatcggtggggcgctgagcgtggccctgccggcgctcctgctgcgccgcctgcggaggggcagcctgtcggtgcgcgcgctcctgcctgggccgccgctgcagccgcccccgcctgcccccgtgctcctgtacgaccagggcgggggccggcgccggcgcggggaggccgaggccgaggccgaggagtgggaggccgagtcggtgctgggcaccctgctgcagaagctgcgagaggaaggctacctggcctactacctccagggaggcttcagcagattccaggccgagtgccctcacctgtgtgagaccagccttgctggccgtgccggctccagcatggygccggtgcccggtccagtgcccgtggtggggttgggcagcctgtgcctgggctccgactgctctgatgcggaatccgaggctgaccgcgactccatgagctgtggcctggattcggagggtgccacacccccaccagtggggctgcgggcatccttccctgtccagatcctgcccaacctctatctgggcagtgcccgggattccgccaatttggagagcctggccaaactgggcatccgctacatcctcaatgtcacccccaacctcccaaacttcttcgagaagaatggtgactttcactacaagcagatccccatctccgaccactggagccagaacctgtcgcggttctttccggaggccattgagttcattgatgaggccttgtcccagaactgcggggtgctcgtccactgcttggcgggggtcagccgttctgtcaccgtcactgtggcctacctcatgcagaagctccacctctctctcaacgatgcctatgacctggtcaagaggaagaagtctaacatctcccccaacttcaacttcatggggcagttgctggactttgagcgcagcttgcggctggaggagcgccactcgcaggagcagggcagtggggggcaggcatctgcggcctccaacccgccctccttcttcaccacccccaccagtgatggcgccttcgagctggcccccacctagggccccgtggccggcaggccggcccctgccccacccccacccacgggtgtccctgcccactcgtgtggcaagggaggggagggcaggagggctcggcctgagcagggtgctggggggagagcgcaatacctcacgcgggctgccgtcctaatcaacgtgcctatggcgggaccacgctcggagcctgcctcttctgcgactgttactttttctttgcgggatgggggtgggggttccctctccaggtggttgtccaggcccaggtcccggccctgggtgctcagccagctcggctaggccctgcgcctccctgcgcttcccccttcaggaagggtgtgtgccacctcgttgcactggatcccagtggctgcttgggggagaggcgtttgccatcactggtgttgtcacctccctgtttctccaccaagggcttgggcctctcggggctggggcctcccaggggatggggacccagaggtgcagtggccgcccacatccatggcctaggagctactgggcaggttcccggccacacatctggtgggctgttttgttttttttttttcctcttcccccagatgtcttgacgggatcactggggctctttgtgagtgagggtggccaaactaccgccggaggagatggggtctcagagcgagagctgcggagggggaggggaagaagaaggcctcacttttgctgctgcggggcccacacagccgctgctactttggggggtggggaaggggccaagctgcagacacacacagtcattcatttctgtccacacccctgtgggtggcgggtgtgcgtgtgtgtgcttgtgtgtgcgcacgtgtcggcgctcacacacacatgctagcccactgatgcacccagcccagggctggcagtctttgcagcgtggggccgtctcaccctggagcctggagaggatctatgcttgtttgtttttgtaatccatatcatagttgctttctttaattgttccttctgaataaacagtttatttaagatactgagtag

SEQ ID NO: 6660 - DNA, 2446 bp, Homo sapiens
agtttccaaggtggaagctgggtccggctgccaggaagcggccggtgcgcgggctgcgcgggctgcgcggggctcggcttccacgtgcgagcctgcaccgccgccccgccctctcctggcggccaggcctggggactctctgccgcgggacggcgcctcgcgttccgccgtggcagtggccgtggccagaacgtccacgcgcggtcgtccaccgccggatctcgctccagcgcccgtggtccagcgtgtagggagccgatcgcccatggagggtctgggccgctcgtgcctgtggctgcgtcgggagctgtcgcccccgcggccgcggctcctgctcctggactgccgcagccgcgagctgtacgagtcggcgcgcatcggtggggcgctgagcgtggccctgccggcgctcctgctgcgccgcctgcggaggggcagcctgtcggtgcgcgcgctcctgcctgggccgccgctgcagccgcccccgcctgcccccgtgctcctgtacgaccagggcgggggccggcgccggcgcggggaggccgaggccgaggccgaggagtgggaggccgagtcggtgctgggcaccctgctgcagaagctgcgagaggaaggctacctggcctactacctccagggaggcttcagcagattccaggccgagtgccctcacctgtgtgagaccagccttgctggccgtgccggctccagcatggygccggtgcccggtccagtgcccgtggtggggttgggcagcctgtgcctgggctccgactgctctgatgcggaatccgaggctgaccgcgactccatgagctgtggcctggattcggagggtgccacacccccaccagtggggctgcgggcatccttccctgtccagatcctgcccaacctctatctgggcagtgcccgggattccgccaatttggagagcctggccaaactgggcatccgctacatcctcaatgtcacccccaacctcccaaacttcttcgagaagaatggtgactttcactacaagcagatccccatctccgaccactggagccagaacctgtcgcggttctttccggaggccattgagttcattgatgaggccttgtcccagaactgcggggtgctcgtccactgcttggcgggggtcagccgttctgtcaccgtcactgtggcctacctcatgcagaagctccacctctctctcaacgatgcctatgacctggtcaagaggaagaagtctaacatctcccccaacttcaacttcatggggcagttgctggactttgagcgcagcttgcggctggaggagcgccactcgcaggagcagggcagtggggggcaggcatctgcggcctccaacccgccctccttcttcaccacccccaccagtgatggcgccttcgagctggcccccacctagggccccgtggccggcaggccggcccctgccccacccccacccacgggtgtccctgcccactcgtgtggcaagggaggggagggcaggagggctcggcctgagcagggtgctggggggagagcgcaatacctcacgcgggctgccgtcctaatcaacgtgcctatggcgggaccacgctcggagcctgcctcttctgcgactgttactttttctttgcgggatgggggtgggggttccctctccaggtggttgtccaggcccaggtcccggccctgggtgctcagccagctcggctaggccctgcgcctccctgcgcttcccccttcaggaagggtgtgtgccacctcgttgcactggatcccagtggctgcttgggggagaggcgtttgccatcactggtgttgtcacctccctgtttctccaccaagggcttgggcctctcggggctggggcctcccaggggatggggacccagaggtgcagtggccgcccacatccatggcctaggagctactgggcaggttcccggccacacatctggtgggctgttttgttttttttttttcctcttcccccagatgtcttgacgggatcactggggctctttgtgagtgagggtggccaaactaccgccggaggagatggggtctcagagcgagagctgcggagggggaggggaagaagaaggcctcacttttgctgctgcggggcccacacagccgctgctactttggggggtggggaaggggccaagctgcagacacacacagtcattcatttctgtccacacccctgtgggtggcgggtgtgcgtgtgtgtgcttgtgtgtgcgcacgtgtcggcgctcacacacacatgctagcccactgatgcacccagcccagggctggcagtctttgcagcgtggggccgtctcaccctggagcctggagaggatctatgcttgtttgtttttgtaatccatatcatagttgctttctttaattgttccttctgaataaacagtttatttaagatactgagtag

SEQ ID NO: 6661 - DNA, 3158 bp, Homo sapiens
acttccggccggtggccggcccggcgcgcaccgccccttccgccgtcgcccagcgagcccagctccggtcccagccccggccgtcccggcgtcgcttcggagcgcggcggcagctgactgcgccttcacgatccgctgggacccgcgagccccgccgccgttatgaacatccgcaatgcgaggccagaggacctaatgaacatgcagcactgcaacctcctctgcctgcccgagaactaccagatgaaatactacttctaccatgscctttcctggccccagctctcttacattgctgaggacgagaatgggaagattgtggggtatgtcctggccaaaatggaagaggacccagatgatgtgccccatggacatatcacctcattggctgtgaagcgttcccaccggcgcctcggtctggctcagaaactgatggaccaggcctctcgagccatgatagagaacttcaatgccaaatatgtctccctgcatgtcaggaagaggtggaagccgggctgagggaagggggattgagggggagagatactgccttgacgggggtcctggggtacctcagcttttggtgaagatccaggaagtgggattggggggaaggagggaccaggaggaggggcaagacctggacgtgctacccctccctggccaaatccgtgcagctcagcagtgccttgttcccctgcagtaaccgggccgccctgcacctctattccaacaccctcaactttcagtaagtagatctcgatttttctaatgggctggggttgatcccaggtctggcccatcagggcacctgagaccggctgagttgccttccaggtcgggggtgggccggctgtggggaagaggctgtggaccccagcactgccaggatacctccacattcactcggcggctgatggttgaaaagccggcatggagacagcacctgcctgctgaaacgtgctccatgtgttgtgatggaggagctctggcccatgatggctgaggctggcgaagggcacacgggctgtttagtaatgtttgggaatagagaggtgtgggtccctggcgtgagcagatgctgaggagcaggactcaagcatgaccaagcacctagaagaatccaagagagagcagaatcraggagaatgcacattcaggaaggaagggccagtggccaggcagcctagtggatgggggaggtctgcctgaggaccaggaggccccgtgtgcctagcacactagagagaacctggcagttggcatgcccagtagacagtggaaaaaagtgcttgcaagtgaagctggggtgggctgcctgtggagggacactaactgcactcagcccgtttggtaggggatgaagaagagggactgttgggaagggcggtggcctctgggctggatgctrgcaagagggatctgtgacccagatgacgatgtctggtgggaattgctttatagctaagtcagcaatcctcatgtcttaggcctggcagggccagcctaggccattgagtccagctccccttccagggacatggccacgcgagtctgcacacacacctgcccagtgtagtcacggccscagagctgctcaggcagggctcaccgtctttcctgggttctgatggctgttgtgaggcagctcagtaagggacagggcgcagggcagggagggaaggggaaggctgaattcagggcttcagctcacaagaaaccgcagaaatggatccttagtatccaggctaaggacacagaacgggggcaggacgggtggggcgggccgctgtgtcctggagcctttgctggagagaacagagggcaggtcacactggacttkttgtctcaggatggagccttcagggagaaaacatggcaccttgctccagtagccacgataccaggagtggaggagggtgtcccygggatacaggtcttcctccttgctctctaaccctctgcccccaggatcagtgaagtggagcccaaatactatgcagatggggaggacgcctatgccatgaagcgggacctcactcagatggccgacgagctgaggcggcacctggagctgaaagagaagggcaggcacgtggtgctgggtgccatcgagaacaaggtggagagcaaaggcaattcacctccgagctcaggagaggcctgtcgcgaggagaagggcctggctgccgaggatagtggtggggacagcaaggacctcagcgaggtcagcgagaccacagagagcacagatgtcaaggacagctcagaggcctccgactcagcctcctagagcctgccccatcccctcctcaccccacgagctttcacaataaattygctccgtggcactggggaactttgtgtgtgagcgcgcgcacatttagagggtgtgtttctccaggtcctctggtggggatgtgagccttggccttttgacccagagcatcctgccaggcccgagtacaaggaaagagctttggaggtgggactccctagtctcatgaccttcagcagctgtggccccggggaaggaggccctggacttatgggagagaccctgccttggaggtctgcttggccacgctgaatgtgttttgtggcacaagccggggctgctcaggctcaaagctcaacagcagggctcccactcttggtggccttcagttctcttcccaccttcaccttcagactttctctccctaatcacacctgcttcgggctacagcagctccccagcatacccgtgggctccagatgtggacatccaactgctcattgggcttatctacaaatgtcctgtctgagtaatgacccagccagatgccccatcaacagtccttgagtcctccctcccctgccaccctaatggtcagtgagtccatgatacctcttgagtctactccctaacctgagtttgcatttgaaaataatttatttttagtacaattccccgcgtttccccattgacattttgtattagttggtgtatttgttattgttgatgcgccaatactgataagttattgtaaactacagcccatggtttacagtaggtttcctgtctgtgttgtacagtttctatggggttacacaaatgcataaagccatgtattccctcattaacaatttcatgcaaaatacaaaactgggcggct

SEQ ID NO: 6662 - DNA, 1735 bp, Homo sapiens
acttccggccggtggccggcccggcgcgcaccgccccttccgccgtcgcccagcgagcccagctccggtcccagccccggccgtcccggcgtcgcttcggagcgcggcggcagctgactgcgccttcacgatccgctgggacccgcgagccccgccgccgttatgaacatccgcaatgcgaggccagaggacctaatgaacatgcagcactgcaacctcctctgcctgcccgagaactaccagatgaaatactacttctaccatgscctttcctggccccagctctcttacattgctgaggacgagaatgggaagattgtggggtatgtcctggccaaaatggaagaggacccagatgatgtgccccatggacatatcacctcattggctgtgaagcgttcccaccggcgcctcggtctggctcagaaactgatggaccaggcctctcgagccatgatagagaacttcaatgccaaatatgtctccctgcatgtcaggaagagtaaccgggccgccctgcacctctattccaacaccctcaactttcagatcagtgaagtggagcccaaatactatgcagatggggaggacgcctatgccatgaagcgggacctcactcagatggccgacgagctgaggcggcacctggagctgaaagagaagggcaggcacgtggtgctgggtgccatcgagaacaaggtggagagcaaaggcaattcacctccgagctcaggagaggcctgtcgcgaggagaagggcctggctgccgaggatagtggtggggacagcaaggacctcagcgaggtcagcgagaccacagagagcacagatgtcaaggacagctcagaggcctccgactcagcctcctagagcctgccccatcccctcctcaccccacgagctttcacaataaattygctccgtggcactggggaactttgtgtgtgagcgcgcgcacatttagagggtgtgtttctccaggtcctctggtggggatgtgagccttggccttttgacccagagcatcctgccaggcccgagtacaaggaaagagctttggaggtgggactccctagtctcatgaccttcagcagctgtggccccggggaaggaggccctggacttatgggagagaccctgccttggaggtctgcttggccacgctgaatgtgttttgtggcacaagccggggctgctcaggctcaaagctcaacagcagggctcccactcttggtggccttcagttctcttcccaccttcaccttcagactttctctccctaatcacacctgcttcgggctacagcagctccccagcatacccgtgggctccagatgtggacatccaactgctcattgggcttatctacaaatgtcctgtctgagtaatgacccagccagatgccccatcaacagtccttgagtcctccctcccctgccaccctaatggtcagtgagtccatgatacctcttgagtctactccctaacctgagtttgcatttgaaaataatttatttttagtacaattccccgcgtttccccattgacattttgtattagttggtgtatttgttattgttgatgcgccaatactgataagttattgtaaactacagcccatggtttacagtaggtttcctgtctgtgttgtacagtttctatggggttacacaaatgcataaagccatgtattccctcattaacaatttcatgcaaaatacaaaactgggcggct

SEQ ID NO: 6663 - DNA, 1690 bp, Homo sapiens
acttccggccggtggccggcccggcgcgcaccgccccttccgccgtcgcccagcgagcccagctccggtcccagccccggccgtcccggcgtcgcttcggagcgcggcggcagctgactgcgccttcacgatccgctgggacccgcgagccccgccgccgttatgaacatccgcaatgcgaggccagaggacctaatgaacatgcagcactgcaacctcctctgcctgcccgagaactaccagatgaaatactacttctaccatgscctttcctggccccagctctcttacattgctgaggacgagaatgggaagattgtggggtatgtcctggccaaaatggaagaggacccagatgatgtgccccatggacatatcacctcattggctgtgaagcgttcccaccggcgcctcggtctggctcagaaactgatggaccaggcctctcgagccatgatagagaacttcaatgccaaatatgtctccctgcatgtcaggaagaggatcagtgaagtggagcccaaatactatgcagatggggaggacgcctatgccatgaagcgggacctcactcagatggccgacgagctgaggcggcacctggagctgaaagagaagggcaggcacgtggtgctgggtgccatcgagaacaaggtggagagcaaaggcaattcacctccgagctcaggagaggcctgtcgcgaggagaagggcctggctgccgaggatagtggtggggacagcaaggacctcagcgaggtcagcgagaccacagagagcacagatgtcaaggacagctcagaggcctccgactcagcctcctagagcctgccccatcccctcctcaccccacgagctttcacaataaattygctccgtggcactggggaactttgtgtgtgagcgcgcgcacatttagagggtgtgtttctccaggtcctctggtggggatgtgagccttggccttttgacccagagcatcctgccaggcccgagtacaaggaaagagctttggaggtgggactccctagtctcatgaccttcagcagctgtggccccggggaaggaggccctggacttatgggagagaccctgccttggaggtctgcttggccacgctgaatgtgttttgtggcacaagccggggctgctcaggctcaaagctcaacagcagggctcccactcttggtggccttcagttctcttcccaccttcaccttcagactttctctccctaatcacacctgcttcgggctacagcagctccccagcatacccgtgggctccagatgtggacatccaactgctcattgggcttatctacaaatgtcctgtctgagtaatgacccagccagatgccccatcaacagtccttgagtcctccctcccctgccaccctaatggtcagtgagtccatgatacctcttgagtctactccctaacctgagtttgcatttgaaaataatttatttttagtacaattccccgcgtttccccattgacattttgtattagttggtgtatttgttattgttgatgcgccaatactgataagttattgtaaactacagcccatggtttacagtaggtttcctgtctgtgttgtacagtttctatggggttacacaaatgcataaagccatgtattccctcattaacaatttcatgcaaaatacaaaactgggcggct

SEQ ID NO: 6664 - DNA, 3393 bp, Homo sapiens
caacggcggtggcgcccggagcccgagtttccaggakggcttctgcatcaacttctaaatataattcacactccttggagaatkagtctattaagaggacgtctygagatggagtcaatcgagatctcactgaggctgttcctcgacttccaggagaaacactaatcactgacaaakaakttatttacatatgtcctttcaatggccccattaagkgaagagtttacatcacaaattatcgtctttatttaagaagtttggaaacggattcttctctaatacttgatgttcctctgggtgtgatctcgagaattgaaaaaatgggaggcgcgacaagtagaggagaaaattcctatggtctagatattacttgtaaagacatgagaaacctgaggttcgctttgaaacaggaaggccacagcagaagagatatgtttgagatcctcacgagatacgcgtttcccctggctcacagtctgccattatttgcatttttaaatgaagaaaagtttaacgtggatggatggacagtttacaatccagtggaagaatacaggaggcagggcttgyccaatcaccattggrgaataacttttattartaagtgctatgagctctgtgacaytwamyctgctctttyggtggttcygtatcgtgcctcagatgatgacctccggagagttgcaacttttaggtccygaaatygaaytccartgcygycatrkattcrtccagaaaataagacggtcattgtgykttgcagtcagcctcttgtcggtatgagtgggaaaygaaataaagatgatgagaaatatctcgatgttakcaggkagactaataaacaaatttctaaactcaccatttatgatgcaagacccagcgtaaatgcagtggccaacaaggcaacaggaggaggatatgaaagtgatgatgcatatcataacgccgaacttttcttcttagacattcataatattcatgttakgcgggaatctttaaaaaaagtgaaggacattgtttatcctaatgtagaagaatctcattggttgtccagtttggagtctactcattggttagaacatatcaagctcgttttgacaggagccattcaagtagcagacaaagtttcttsagggaagagttcagtgcttgtgsattgcartgacrratgrgacaggactgctcagctgacatccttggmcatgcygatgttggatagcttctrtaggagcattgaarbgttcraaatacyggtacaaaaagaatggataagttttggacataaatttgcatctyraataggtcatggtgataaaaaccacaccgatgctgaccgttctcctatttttctccagtttattgattrtgtgtgrcaaatgtsaaaacagttccctacagcttttgaattcaatgaacaatttttgattataattttggatcmtcygtatagttgcygatttggtactttcttattcaactgtgaatctgctygagaaagacagaaggttacagaaaggactgtttctttatggtcactgataaacagtaataaagaaaaattcaaaaaccccttctatactaaakaaatcaatygagttttatawccagttgccagtatgcgtcacttggaactctgggtgaattactacattagatggaaccccaggatcaagcaacaacagccgaatccagtggagcagcgttacatggagctcttagccttacgcgacgaatacataaagcggcttgaggaactgcagctcgccaactctgccaagctttctgatcccccaacttcaccttccagtccttcgcaaatgatgccccatgtgcaaactcacttctgaggggggaccctggcaccgcattagagctcgaaataaaggcgatagctgactttcatttggggcatttgtaaaaagtagattaaaatatttgcctccatgtagaacttgaactaacataatcttaaactcttgaatatgtgccttctagaatacatattacaagaaaactacagggtccacayggcaatcagaagaaaggagctgagatgaggttttggaaaaccctgacacctttaaaaagcagtttttgaaagacaaaatttagatttaatttacgtcttgagaaatactatatatacaatatatattttgtgggcttaattgaaacaacattattttaaaatcaaaggggatatatgtttgtggaatggattttcctgaagctgcttaacagttgctttggattctctaagatgaatccaaatgtgaaagatkcatgttactgccaaaaccaaattgagctcagcttcctaggcattacccaaaagcaaggtgtttaagtaattgccagcttttataccatcatgagtggtgacttaakgagaaatagctgtatagatgagtttttcattatttggaaatttaggggtagaaaatgttttcccctaattttccagagaagcctatttttatatttttaaaaaactgacagggcccagttaaatatgatttgcattttttaaatttgccagttttattttctaaattctttcatgagcttgcctaaaattcggaatggttttcgggttgtggcaaaccccaaagagagcactgtccaaggatgtcgggagcatcctgctgcttaggggaatgttttcgcaaatgttgctctagtcagtccagctcatctgccaaaatgtagggctaccgtcttggatgcatgagctattgctagagcatcatccttagaaatcagtgccccagatgtacatgtgttgagcgtattcttgaaagtattgtgtttatgcatttcaatttcaatggtgttggcttcccctccccaccccacgcgtgcataaaaactggttctacaaatttttacttgaagtaccaggccgtttgctttttcaggttgttttgttttatagtattaagtgaaattttaaatgcacagttctatttgctatctgaactaattcatttattaagtatatttgtaaaagctaaggctcgagttaaaacaatgaagtgttttacaatgatttgtaaaggactatttataactaatayggttttgttttcaatgaattaagaaagattaaatatatctttgtaaattattttatgtcatagtttaattggtctmccaagtaagacatctcaaatacagtagtataatgtatgaattttgtaagtataagaaattttattagacattctcttactttttgtaaatgctgtaaatatttcataaattaacaaagtgtcactccataaaaagaaagctaatactaatagcctaaaagattttgtgaaatttcatgaaaactttttaatggcaataatgactaaagacctgctgtaataaatgtattaactgaaacct

SEQ ID NO: 6665 - DNA, 3414 bp, Homo sapiens
cggcagccgagcagcctggcaacggcggtggcgcccggagcccgagagtttccaggakggcttctgcatcaacttctaaatataattcacactccttggagaatkagtctattaagaggacgtctygagatggagtcaatcgagatctcactgaggctgttcctcgacttccaggagaaacactaatcactgacaaakaakttatttacatatgtcctttcaatggccccattaagkgaagagtttacatcacaaattatcgtctttatttaagaagtttggaaacggattcttctctaatacttgatgttcctctgggtgtgatctcgagaattgaaaaaatgggaggcgcgacaagtagaggagaaaattcctatggtctagatattacttgtaaagacatgagaaacctgaggttcgctttgaaacaggaaggccacagcagaagagatatgtttgagatcctcacgagatacgcgtttcccctggctcacagtctgccattatttgcatttttaaatgaagaaaagtttaacgtggatggatggacagtttacaatccagtggaagaatacaggaggcagggcttgyccaatcaccattggrgaataacttttattartaagtgctatgagctctgtgacaytwamyctgctctttyggtggttcygtatcgtgcctcagatgatgacctccggagagttgcaacttttaggtccygaaatygaaytccartgcygycatrkattcrtccagaaaataagacggtcattgtgykttgcagtcagcctcttgtcggtatgagtgggaaaygaaataaagatgatgagaaatatctcgatgttakcaggkagactaataaacaaatttctaaactcaccatttatgatgcaagacccagcgtaaatgcagtggccaacaaggcaacaggaggaggatatgaaagtgatgatgcatatcataacgccgaacttttcttcttagacattcataatattcatgttakgcgggaatctttaaaaaaagtgaaggacattgtttatcctaatgtagaagaatctcattggttgtccagtttggagtctactcattggttagaacatatcaagctcgttttgacaggagccattcaagtagcagacaaagtttcttsagggaagagttcagtgcttgtgsattgcartgacrratgrgacaggactgctcagctgacatccttggmcatgcygatgttggatagcttctrtaggagcattgaarbgttcraaatacyggtacaaaaagaatggataagttttggacataaatttgcatctyraataggtcatggtgataaaaaccacaccgatgctgaccgttctcctatttttctccagtttattgattrtgtgtgrcaaatgtsaaaacagttccctacagcttttgaattcaatgaacaatttttgattataattttggatcmtcygtatagttgcygatttggtactttcttattcaactgtgaatctgctygagaaagacagaaggttacagaaaggactgtttctttatggtcactgataaacagtaataaagaaaaattcaaaaaccccttctatactaaakaaatcaatygagttttatawccagttgccagtatgcgtcacttggaactctgggtgaattactacattagatggaaccccaggatcaagcaacaacagccgaatccagtggagcagcgttacatggagctcttagccttacgcgacgaatacataaagcggcttgaggaactgcagctcgccaactctgccaagctttctgatcccccaacttcaccttccagtccttcgcaaatgatgccccatgtgcaaactcacttctgaggggggaccctggcaccgcattagagctcgaaataaaggcgatagctgactttcatttggggcatttgtaaaaagtagattaaaatatttgcctccatgtagaacttgaactaacataatcttaaactcttgaatatgtgccttctagaatacatattacaagaaaactacagggtccacayggcaatcagaagaaaggagctgagatgaggttttggaaaaccctgacacctttaaaaagcagtttttgaaagacaaaatttagatttaatttacgtcttgagaaatactatatatacaatatatattttgtgggcttaattgaaacaacattattttaaaatcaaaggggatatatgtttgtggaatggattttcctgaagctgcttaacagttgctttggattctctaagatgaatccaaatgtgaaagatkcatgttactgccaaaaccaaattgagctcagcttcctaggcattacccaaaagcaaggtgtttaagtaattgccagcttttataccatcatgagtggtgacttaakgagaaatagctgtatagatgagtttttcattatttggaaatttaggggtagaaaatgttttcccctaattttccagagaagcctatttttatatttttaaaaaactgacagggcccagttaaatatgatttgcattttttaaatttgccagttttattttctaaattctttcatgagcttgcctaaaattcggaatggttttcgggttgtggcaaaccccaaagagagcactgtccaaggatgtcgggagcatcctgctgcttaggggaatgttttcgcaaatgttgctctagtcagtccagctcatctgccaaaatgtagggctaccgtcttggatgcatgagctattgctagagcatcatccttagaaatcagtgccccagatgtacatgtgttgagcgtattcttgaaagtattgtgtttatgcatttcaatttcaatggtgttggcttcccctccccaccccacgcgtgcataaaaactggttctacaaatttttacttgaagtaccaggccgtttgctttttcaggttgttttgttttatagtattaagtgaaattttaaatgcacagttctatttgctatctgaactaattcatttattaagtatatttgtaaaagctaaggctcgagttaaaacaatgaagtgttttacaatgatttgtaaaggactatttataactaatayggttttgttttcaatgaattaagaaagattaaatatatctttgtaaattattttatgtcatagtttaattggtctmccaagtaagacatctcaaatacagtagtataatgtatgaattttgtaagtataagaaattttattagacattctcttactttttgtaaatgctgtaaatatttcataaattaacaaagtgtcactccataaaaagaaagctaatactaatagcctaaaagattttgtgaaatttcatgaaaactttttaatggcaataatgactaaagacctgctgtaataaatgtattaactgaaacct

SEQ ID NO: 6666 - DNA, 3339 bp, Homo sapiens
caacggcggtggcgcccggagcccgagtttccaggakggcttctgcatcaacttctaaatataattcacactccttggagaatkagtctattaagaggacgtctygagatggagtcaatcgagatctcactgaggctgttcctcgacttccaggagaaacactaatcactgacaaakaakttatttacatatgtcctttcaatggccccattaagkgaagagtttacatcacaaattatcgtctttatttaagaagtttggaaacggattcttctctaatacttgatgttcctctgggtgtgatctcgagaattgaaaaaatgggaggcgcgacaagtagaggagaaaattcctatggtctagatattacttgtaaagacatgagaaacctgaggttcgctttgaaacaggaaggccacagcagaagagatatgtttgagatcctcacgagatacgcgtttcccctggctcacagtctgccattatttgcatttttaaatgaagaaaagtttaacgtggatggatggacagtttacaatccagtggaagaatacaggaggcagggcttgyccaatcaccattggrgaataacttttattartaagtgctatgagctctgtgacaytwamyctgctctttyggtggttcygtatcgtgcctcagatgatgacctccggagagttgcaacttttaggtccygaaatygaaytccartgcygycatrkattcrtccagaaaataagacggtcattgtgykttgcagtcagcctcttgtcggtatgagtgggaaaygaaataaagatgatgagaaatatctcgatgttakcaggkagactaataaacaaatttctaaactcaccatttatgatgcaagacccagcgtaaatgcagtggccaacaaggcaacaggaggaggatatgaaagtgatgatgcatatcataacgccgaacttttcttcttagacattcataatattcatgttakgcgggaatctttaaaaaaagtgaaggacattgtttatcctaatgtagaagaatctcattggttgtccagtttggagtctactcattggttagaacatatcaaggcaagtatattttgagccattcaagtagcagacaaagtttcttsagggaagagttcagtgcttgtgsattgcartgacrratgrgacaggactgctcagctgacatccttggmcatgcygatgttggatagcttctrtaggagcattgaarbgttcraaatacyggtacaaaaagaatggataagttttggacataaatttgcatctyraataggtcatggtgataaaaaccacaccgatgctgaccgttctcctatttttctccagtttattgattrtgtgtgrcaaatgtsaaaacagttccctacagcttttgaattcaatgaacaatttttgattataattttggatcmtcygtatagttgcygatttggtactttcttattcaactgtgaatctgctygagaaagacagaaggttacagaaaggactgtttctttatggtcactgataaacagtaataaagaaaaattcaaaaaccccttctatactaaakaaatcaatygagttttatawccagttgccagtatgcgtcacttggaactctgggtgaattactacattagatggaaccccaggatcaagcaacaacagccgaatccagtggagcagcgttacatggagctcttagccttacgcgacgaatacataaagcggcttgaggaactgcagctcgccaactctgccaagctttctgatcccccaacttcaccttccagtccttcgcaaatgatgccccatgtgcaaactcacttctgaggggggaccctggcaccgcattagagctcgaaataaaggcgatagctgactttcatttggggcatttgtaaaaagtagattaaaatatttgcctccatgtagaacttgaactaacataatcttaaactcttgaatatgtgccttctagaatacatattacaagaaaactacagggtccacayggcaatcagaagaaaggagctgagatgaggttttggaaaaccctgacacctttaaaaagcagtttttgaaagacaaaatttagatttaatttacgtcttgagaaatactatatatacaatatatattttgtgggcttaattgaaacaacattattttaaaatcaaaggggatatatgtttgtggaatggattttcctgaagctgcttaacagttgctttggattctctaagatgaatccaaatgtgaaagatkcatgttactgcctaattgccagcttttataccatcatgagtggtgacttaakgagaaatagctgtatagatgagtttttcattatttggaaatttaggggtagaaaatgttttcccctaattttccagagaagcctatttttatatttttaaaaaactgacagggcccagttaaatatgatttgcattttttaaatttgccagttttattttctaaattctttcatgagcttgcctaaaattcggaatggttttcgggttgtggcaaaccccaaagagagcactgtccaaggatgtcgggagcatcctgctgcttaggggaatgttttcgcaaatgttgctctagtcagtccagctcatctgccaaaatgtagggctaccgtcttggatgcatgagctattgctagagcatcatccttagaaatcagtgccccagatgtacatgtgttgagcgtattcttgaaagtattgtgtttatgcatttcaatttcaatggtgttggcttcccctccccaccccacgcgtgcataaaaactggttctacaaatttttacttgaagtaccaggccgtttgctttttcaggttgttttgttttatagtattaagtgaaattttaaatgcacagttctatttgctatctgaactaattcatttattaagtatatttgtaaaagctaaggctcgagttaaaacaatgaagtgttttacaatgatttgtaaaggactatttataactaatayggttttgttttcaatgaattaagaaagattaaatatatctttgtaaattattttatgtcatagtttaattggtctmccaagtaagacatctcaaatacagtagtataatgtatgaattttgtaagtataagaaattttattagacattctcttactttttgtaaatgctgtaaatatttcataaattaacaaagtgtcactccataaaaagaaagctaatactaatagcctaaaagattttgtgaaatttcatgaaaactttttaatggcaataatgactaaagacctgctgtaataaatgtattaactgaaacct

SEQ ID NO: 6667 - DNA, 3405 bp, Homo sapiens
cggcagccgagcagcctggcaacggcggtggcgcccggagcccgagagtttccaggakggcttctgcatcaacttctaaatataattcacactccttggagaatkagtctattaagaggacgtctygagatggagtcaatcgagatctcactgaggctgttcctcgacttccaggagaaacactaatcactgacaaakaakttatttacatatgtcctttcaatggccccattaagkgaagagtttacatcacaaattatcgtctttatttaagaagtttggaaacggattcttctctaatacttgatgttcctctgggtgtgatctcgagaattgaaaaaatgggaggcgcgacaagtagaggagaaaattcctatggtctagatattacttgtaaagacatgagaaacctgaggttcgctttgaaacaggaaggccacagcagaagagatatgtttgagatcctcacgagatacgcgtttcccctggctcacagtctgccattatttgcatttttaaatgaagaaaagtttaacgtggatggatggacagtttacaatccagtggaagaatacaggaggcagggcttgyccaatcaccattggrgaataacttttattartaagtgctatgagctctgtgacaytwamyctgctctttyggtggttcygtatcgtgcctcagatgatgacctccggagagttgcaacttttaggtccygaaatygaaytccartgcygycatrkattcrtccagaaaataagacggtcattgtgykttgcagtcagcctcttgtcggtatgagtgggaaaygaaataaagatgatgagaaatatctcgatgttakcaggkagactaataaacaaatttctaaactcaccatttatgatgcaagacccagcgtaaatgcagtggccaacaaggcaacaggaggaggatatgaaagtgatgatgcatatcataacgccgaacttttcttcttagacattcataatattcatgttakgcgggaatctttaaaaaaagtgaaggacattgtttatcctaatgtagaagaatctcattggttgtccagtttggagtctactcattggttagaacatatcaaggcaagagccattcaagtagcagacaaagtttcttsagggaagagttcagtgcttgtgsattgcartgacrratgrgacaggactgctcagctgacatccttggmcatgcygatgttggatagcttctrtaggagcattgaarbgttcraaatacyggtacaaaaagaatggataagttttggacataaatttgcatctyraataggtcatggtgataaaaaccacaccgatgctgaccgttctcctatttttctccagtttattgattrtgtgtgrcaaatgtsaaaacagttccctacagcttttgaattcaatgaacaatttttgattataattttggatcmtcygtatagttgcygatttggtactttcttattcaactgtgaatctgctygagaaagacagaaggttacagaaaggactgtttctttatggtcactgataaacagtaataaagaaaaattcaaaaaccccttctatactaaakaaatcaatygagttttatawccagttgccagtatgcgtcacttggaactctgggtgaattactacattagatggaaccccaggatcaagcaacaacagccgaatccagtggagcagcgttacatggagctcttagccttacgcgacgaatacataaagcggcttgaggaactgcagctcgccaactctgccaagctttctgatcccccaacttcaccttccagtccttcgcaaatgatgccccatgtgcaaactcacttctgaggggggaccctggcaccgcattagagctcgaaataaaggcgatagctgactttcatttggggcatttgtaaaaagtagattaaaatatttgcctccatgtagaacttgaactaacataatcttaaactcttgaatatgtgccttctagaatacatattacaagaaaactacagggtccacayggcaatcagaagaaaggagctgagatgaggttttggaaaaccctgacacctttaaaaagcagtttttgaaagacaaaatttagatttaatttacgtcttgagaaatactatatatacaatatatattttgtgggcttaattgaaacaacattattttaaaatcaaaggggatatatgtttgtggaatggattttcctgaagctgcttaacagttgctttggattctctaagatgaatccaaatgtgaaagatkcatgttactgccaaaaccaaattgagctcagcttcctaggcattacccaaaagcaaggtgtttaagtaattgccagcttttataccatcatgagtggtgacttaakgagaaatagctgtatagatgagtttttcattatttggaaatttaggggtagaaaatgttttcccctaattttccagagaagcctatttttatatttttaaaaaactgacagggcccagttaaatatgatttgcattttttaaatttgccagttttattttctaaattctttcatgagcttgcctaaaattcggaatggttttcgggttgtggcaaaccccaaagagagcactgtccaaggatgtcgggagcatcctgctgcttaggggaatgttttcgcaaatgttgctctagtcagtccagctcatctgccaaaatgtagggctaccgtcttggatgcatgagctattgctagagcatcatccttagaaatcagtgccccagatgtacatgtgttgagcgtattcttgaaagtattgtgtttatgcatttcaatttcaatggtgttggcttcccctccccaccccacgcgtgcataaaaactggttctacaaatttttacttgaagtaccaggccgtttgctttttcaggttgttttgttttatagtattaagtgaaattttaaatgcacagttctatttgctatctgaactaattcatttattaagtatatttgtaaaagctaaggctcgagttaaaacaatgaagtgttttacaatgatttgtaaaggactatttataactaatayggttttgttttcaatgaattaagaaagattaaatatatctttgtaaattattttatgtcatagtttaattggtctmccaagtaagacatctcaaatacagtagtataatgtatgaattttgtaagtataagaaattttattagacattctcttactttttgtaaatgctgtaaatatttcataaattaacaaagtgtcactccataaaaagaaagctaatactaatagcctaaaagattttgtgaaatttcatgaaaactttttaatggcaataatgactaaagacctgctgtaataaatgtattaactgaaacct

SEQ ID NO: 6668 - DNA, 3627 bp, Homo sapiens
aggcggggaggctgcgcggtcagaggcgcctggagcgagcgaatcctggcccaccgcctgcccaaccgcgtgaccttgattgagttaatgaacttcacgcctcagcgtccaggtctgtaaaatggggtgtctaacgcagaccgtacagcccagctgggtttagcaaacttccgggagccagttggagcctctccccatccctagcggtgatcccaggtgacgacatgccgcggggggtcctgcggaggccaccctagggcgttgctgctgcctttgggagtgtggagctccaaaccatgtcgcgagaggcggattttgggaggccgggatcctcgcgccagggggatgtgcgagggtgtgggataaatcttaattcctccggcccacccaaagcctggaaatccagcctccgcgcctcttgccctgcgggccccgccctcagtcccgccctcatctaacccgctaccccattggtggcgtccggcggcgcggctgctgttatttttcgaatatataaggaggtggaagtggcagctgcaactagaggcttcccwggctggtgcctgagcccggcgtccctcgccccccgccctccccgcatccctctcctccctcgcgcctggccctgtggctcttcctccctccctccttccccccccccccacccctcgcccgctgcctccctcggcccagccagctgtgccggcgtttgttggctgccctgcgcccggccctccagccagccttctgccggccccgccgcgatggaggtgccccagccggagcccgcgccaggctcggctctcagtccagcaggcgtgtgcggtggcgcccagcgtccgggccacctcccgggcctcctgctgggatctcatggcctcctggggtccccggtgcgggcggccgcttcctcgccggtcaccaccctcacccagaccatgcacgacctcgccgggctcggcagccgcagccgcctgacgcacctatccctgtctcgacgggcatccgaatcctccctgtcgtctgaatcctccgaatcttctgatgcaggtctctgcatggattcccccagccctatggacccccacatggcggagcagacgtttgaacaggccatccaggcagccagccggatcattcgaaacgagcagtttgccatcagacgcttccagtctatgccggtgaggctgctgggccacagccccgtgcttcggaacatcaccaactcccaggcgcccgacggccggaggaagagcgaggcgggcagtggagctgccagcagctctggggaagacaaggagaatgatggatttgtcttcaagatgccatggaagcccacacatcccagctccacccatgctctggcagagtgggccagccgcagggaagcctttgcccagagacccagctcggcccccgacctgatgtgtctcagtcctgaccggaagatggaagtggaggagctcagccccctggccctaggtcgcttctctctgacccctgcagagggggatactgaggaagatgatggatttgtggacatcctagagagtgacttaaaggatgatgatgcagttcccccaggcatggagagtctcattagtgccccactggtcaagaccttggaaaaggaagaggaaaaggacctcgtcatgtacagcaagtgccagcggctcttccgctctccgtccatgccctgcagcgtgatccggcccatcctcaagaggctggagcggccccaggacagggacacgccygtgcagaataagcggagrcggagcgtgacccctcctgaggagcagcaggaggctgaggaacctaaagcccgcgtcctccgctcaaaatcactgtgtcacgatgagatcgagaacctcctggacagtgaccaccgagagctgattggagattactctaaggccttcctcctacagacagtagacggaaagcaccaagacctcaagtacatctcaccagaaacgatggtggccytattgacgggcaagttcagcaacatcgtggataagtttgtgattgtagactgcagatacccctatgaatatgaaggcgggcacatcaagactgcggtgaacttgcccctggaacgckacgccgagagcttcctactgaagagccccatygcgccctgtagcctggacaagagagtcatcctcattttccactgtgaattctcatctgagcgtgggccccgcatgtgccgtttcatcagggaacgagaccgtgctgtcaacgactaccccagcctctactaccctgagatgtatatcctgaaaggcggctacaaggagttcttccctcagcacccgaacttctgtgaaccccaggactaccggcccatgaaccacgaggccttcaaggatgagctaaagaccttccgcctcaagactcgcagctgggctggggagcggasscggcgggagctctgtagccggctgcaggaccagtgaggggcctgcgccagtcctgctacctcccttgcctttcgaggcctgaagccagctgccctatgggyctgccgggctgagggcctgctggaggcctcaggtgctgtccatgggaaagatggtgtgggtgtcctgcctgtctgccccagcccagattcccctgtgtcatcccatcattttccatatcctggtgccccccacccctggaagagcccagtctgttgagttagttaagttgggttaataccagcttaaaggcagtattttgtgtcctccaggagcttcttgtttccttgttagggttaacccttcatcttcctgtgtcctgaaacgctcctttgtgtgtgtgtcagctgaggctgggggagagccgtggtccctgaggatgggtcagagctaaactccttcctggcctgagagtcagctctctgccctgtgtacttcccgggccagggctgcccctaatctctgtaggaaccgtggtatgtctgccatgttgcccctttctcttttcccctttcctgtcccaccatacgagcacctccagcctgaacagaagctcttactctttcctatttcagtgttacctgtgtgcttggtctgtttgactttacgcccatctcaggacacttccgtagactgtttaggttcccctgtcaaatatcagttacccactcggtcccagttttgttgccccagaaagggatgttattatccttgggggctcccagggcaagggttaaggcctgaatcatgagcctgctggaagcccagcccctactgctgtgaaccctggggcctgactgctcagaacttgctgctgtcttgttgcggatggatggaaggttggatggatgggtggatggccgtggatggccgtggatgcgcagtgccttgcatacccaaaccaggtgggagcgttttgttgagcatgacagcctgcagcaggaatatatgtgtgyctatttgtgtggacaaaaatatttacacttagggtttggagctattcaagaggaaatgtcacagaagcasctaaaccaaggactgagcaccctctggattctgaatctcaagaygggggcagggctgtgcttgaaggccctgctgagtcatctgttagggccttggttcaataaagcactgagcaagttgagaaaccagcatt

SEQ ID NO: 6669 - DNA, 3524 bp, Homo sapiens
aggcggggaggctgcgcggtcagaggcgcctggagcgagcgaatcctggcccaccgcctgcccaaccgcgtgaccttgattgagttaatgaacttcacgcctcagcgtccaggtctgtaaaatggggtgtctaacgcagaccgtacagcccagctgggtttagcaaacttccgggagccagttggagcctctccccatccctagcggtgatcccaggtgacgacatgccgcggggggtcctgcggaggccaccctagggcgttgctgctgcctttgggagtgtggagctccaaaccatgtcgcgagaggcggattttgggaggccgggatcctcgcgccagggggatgtgcgagggtgtgggataaatcttaattcctccggcccacccaaagcctggaaatccagcctccgcgcctcttgccctgcgggccccgccctcagtcccgccctcatctaacccgctaccccattggtggcgtccggcggcgcggctgctgttatttttcgaatatataaggaggtggaagtggcagctgcaactagaggcttcccwggctggtgcctgagcccggcgtccctcgccccccgccctccccgcatccctctcctccctcgcgcctggccctgtggctcttcctccctccctccttccccccccccccacccctcgcccgctgcctccctcggcccagccagctgtgccggcgtttgttggctgccctgcgcccggccctccagccagccttctgccggccccgccgcgatggaggtgccccagccggagcccgcgccaggctcggctctcagtccagcaggcgtgtgcggtggcgcccagcgtccgggccacctcccgggcctcctgctgggatctcatggcctcctggggtccccggtgcgggcggccgcttcctcgccggtcaccaccctcacccagaccatgcacgacctcgccgggctcggcagccgcagccgcctgacgcacctatccctgtctcgacgggcatccgaatcctccctgtcgtctgaatcctccgaatcttctgatgcaggtctctgcatggattcccccagccctatggacccccacatggcggagcagacgtttgaacaggccatccaggcagccagccggatcattcgaaacgagcagtttgccatcagacgcttccagtctatgccggtgaggctgctgggccacagccccgtgcttcggaacatcaccaactcccaggcgcccgacggccggaggaagagcgaggcgggcagtggagctgccagcagctctggggaagacaaggagaatgatggatttgtcttcaagatgccatggaagcccacacatcccagctccacccatgctctggcagagtgggccagccgcagggaagcctttgcccagagacccagctcggcccccgacctgatgtgtctcagtcctgaccggaagatggaagtggaggagctcagccccctggccctaggtcgcttctctctgacccctgcagagggggatactgaggaagatgatggatttgtggacatcctagagagtgacttaaaggatgatgatgcagttcccccaggcatggagagtctcattagtgccccactggtcaagaccttggaaaaggaagaggaaaaggacctcgtcatgtacagcaagtgccagcggctcttccgctctccgtccatgccctgcagcgtgatccggcccatcctcaagaggctggagcggccccaggacagggacacgccygtgcagaataagcggagrcggagcgtgacccctcctgaggagcagcaggaggctgaggaacctaaagcccgcgtcctccgctcaaaatcactgtgtcacgatgagatcgagaacctcctggacagtgaccaccgagagctgattggagattactctaaggccttcctcctacagacagtagacggaaagcaccaagacctcaagtacatctcaccagaaacgatggtggccytattgacgggcaagttcagcaacatcgtggataagtttgtgattgtagactgcagatacccctatgaatatgaaggcgggcacatcaagactgcggtgaacttgcccctggaacgckacgccgagagcttcctactgaagagccccatygcgccctgtagcctggacaagagagtcatcctcattttccactgtgaattctcatctgagcgtgggccccgcatgtgccgtttcatcagggaacgagaccgtgctgtcaacgactaccccagcctctactaccctgagatgtatatcctgaaaggcggctacaaggagttcttccctcagcacccgaacttctgtgaaccccaggactaccggcccatgaaccacgaggccttcaaggatgagctaaagaccttccgcctcaagactcgcagctgggctggggagcggasscggcgggagctctgtagccggctgcaggaccagtgaggggcctgcgccagtcctgctacctcccttgcctttcgaggcctgaagccagctgccctatgggyctgccgggctgagggcctgctggaggcctcaggtgctgtccatgggaaagatggtgtgggtgtcctgcctgtctgccccagcccagattcccctgtgtcatcccatcattttccatatcctggtgccccccacccctggaagagcccagtctgttgagttagttaagttgggttaataccagcttaaaggcagtattttgtgtcctccaggagcttcttgtttccttgttagggttaacccttcatcttcctgtgtcctgaaacgctcctttgtgtgtgtgtcagctgaggctgggggagagccgtggtccctgaggatgggtcagagctaaactccttcctggcctgagagtcagctctctgccctgtgtacttcccgggccagggctgcccctaatctctgtaggaaccgtggtatgtctgccatgttgcccctttctcttttcccctttcctgtcccaccatacgagcacctccagcctgaacagaagctcttactctttcctatttcagtgttacctgtgtgcttggtctgtttgactttacgcccatctcaggacacttccgtagactgtttaggttcccctgtcaaatatcagttacccactcgaaagggatgttattatccttgggggctcccagggcaagggttaaggcctgaatcatgagcctgctggaagcccagcccctactgctgtgaaccctggggcctgactgctcagaacttgctgctgtcttgttgcggatggatggaaggttggatggatgggtggatggccgtggatggccgtggatgcgcagtgccttgcatacccaaaccaggtgggagcgttttgttgagcatgacagcctgcagcaggaatatatgtgtgyctatttgtaagcasctaaaccaaggactgagcaccctctggattctgaatctcaagaygggggcagggctgtgcttgaaggccctgctgagtcatctgttagggccttggttcaataaagc

SEQ ID NO: 6670 - DNA, 3669 bp, Homo sapiens
aggcggggaggctgcgcggtcagaggcgcctggagcgagcgaatcctggcccaccgcctgcccaaccgcgtgaccttgattgagttaatgaacttcacgcctcagcgtccaggtctgtaaaatggggtgtctaacgcagaccgtacagcccagctgggtttagcaaacttccgggagccagttggagcctctccccatccctagcggtgatcccaggtgacgacatgccgcggggggtcctgcggaggccaccctagggcgttgctgctgcctttgggagtgtggagctccaaaccatgtcgcgagaggcggattttgggaggccgggatcctcgcgccagggggatgtgcgagggtgtgggataaatcttaattcctccggcccacccaaagcctggaaatccagcctccgcgcctcttgccctgcgggccccgccctcagtcccgccctcatctaacccgctaccccattggtggcgtccggcggcgcggctgctgttatttttcgaatatataaggaggtggaagtggcagctgcaactagaggcttcccwggctggtgcctgagcccggcgtccctcgccccccgccctccccgcatccctctcctccctcgcgcctggccctgtggctcttcctccctccctccttccccccccccccacccctcgcccgctgcctccctcggcccagccagctgtgccggcgtttgttggctgccctgcgcccggccctccagccagccttctgccggccccgccgcgatggaggtgccccagccggagcccgcgccaggctcggctctcagtccagcaggcgtgtgcggtggcgcccagcgtccgggccacctcccgggcctcctgctgggatctcatggcctcctggggtccccggtgcgggcggccgcttcctcgccggtcaccaccctcacccagaccatgcacgacctcgccgggctcggcagcgaaaccccaaagagtcaggtagggaccctgctcttccgcagccgcagccgcctgacgcacctatccctgtctcgacgggcatccgaatcctccctgtcgtctgaatcctccgaatcttctgatgcaggtctctgcatggattcccccagccctatggacccccacatggcggagcagacgtttgaacaggccatccaggcagccagccggatcattcgaaacgagcagtttgccatcagacgcttccagtctatgccggtgaggctgctgggccacagccccgtgcttcggaacatcaccaactcccaggcgcccgacggccggaggaagagcgaggcgggcagtggagctgccagcagctctggggaagacaaggagaatgatggatttgtcttcaagatgccatggaagcccacacatcccagctccacccatgctctggcagagtgggccagccgcagggaagcctttgcccagagacccagctcggcccccgacctgatgtgtctcagtcctgaccggaagatggaagtggaggagctcagccccctggccctaggtcgcttctctctgacccctgcagagggggatactgaggaagatgatggatttgtggacatcctagagagtgacttaaaggatgatgatgcagttcccccaggcatggagagtctcattagtgccccactggtcaagaccttggaaaaggaagaggaaaaggacctcgtcatgtacagcaagtgccagcggctcttccgctctccgtccatgccctgcagcgtgatccggcccatcctcaagaggctggagcggccccaggacagggacacgccygtgcagaataagcggagrcggagcgtgacccctcctgaggagcagcaggaggctgaggaacctaaagcccgcgtcctccgctcaaaatcactgtgtcacgatgagatcgagaacctcctggacagtgaccaccgagagctgattggagattactctaaggccttcctcctacagacagtagacggaaagcaccaagacctcaagtacatctcaccagaaacgatggtggccytattgacgggcaagttcagcaacatcgtggataagtttgtgattgtagactgcagatacccctatgaatatgaaggcgggcacatcaagactgcggtgaacttgcccctggaacgckacgccgagagcttcctactgaagagccccatygcgccctgtagcctggacaagagagtcatcctcattttccactgtgaattctcatctgagcgtgggccccgcatgtgccgtttcatcagggaacgagaccgtgctgtcaacgactaccccagcctctactaccctgagatgtatatcctgaaaggcggctacaaggagttcttccctcagcacccgaacttctgtgaaccccaggactaccggcccatgaaccacgaggccttcaaggatgagctaaagaccttccgcctcaagactcgcagctgggctggggagcggasscggcgggagctctgtagccggctgcaggaccagtgaggggcctgcgccagtcctgctacctcccttgcctttcgaggcctgaagccagctgccctatgggyctgccgggctgagggcctgctggaggcctcaggtgctgtccatgggaaagatggtgtgggtgtcctgcctgtctgccccagcccagattcccctgtgtcatcccatcattttccatatcctggtgccccccacccctggaagagcccagtctgttgagttagttaagttgggttaataccagcttaaaggcagtattttgtgtcctccaggagcttcttgtttccttgttagggttaacccttcatcttcctgtgtcctgaaacgctcctttgtgtgtgtgtcagctgaggctgggggagagccgtggtccctgaggatgggtcagagctaaactccttcctggcctgagagtcagctctctgccctgtgtacttcccgggccagggctgcccctaatctctgtaggaaccgtggtatgtctgccatgttgcccctttctcttttcccctttcctgtcccaccatacgagcacctccagcctgaacagaagctcttactctttcctatttcagtgttacctgtgtgcttggtctgtttgactttacgcccatctcaggacacttccgtagactgtttaggttcccctgtcaaatatcagttacccactcggtcccagttttgttgccccagaaagggatgttattatccttgggggctcccagggcaagggttaaggcctgaatcatgagcctgctggaagcccagcccctactgctgtgaaccctggggcctgactgctcagaacttgctgctgtcttgttgcggatggatggaaggttggatggatgggtggatggccgtggatggccgtggatgcgcagtgccttgcatacccaaaccaggtgggagcgttttgttgagcatgacagcctgcagcaggaatatatgtgtgyctatttgtgtggacaaaaatatttacacttagggtttggagctattcaagaggaaatgtcacagaagcasctaaaccaaggactgagcaccctctggattctgaatctcaagaygggggcagggctgtgcttgaaggccctgctgagtcatctgttagggccttggttcaataaagcactgagcaagttgagaaaccagcatt

SEQ ID NO: 6671 - DNA, 3629 bp, Homo sapiens
aggcggggaggctgcgcggtcagaggcgcctggagcgagcgaatcctggcccaccgcctgcccaaccgcgtgaccttgattgagttaatgaacttcacgcctcagcgtccaggtctgtaaaatggggtgtctaacgcagaccgtacagcccagctgggtttagcaaacttccgggagccagttggagcctctccccatccctagcggtgatcccaggtgacgacatgccgcggggggtcctgcggaggccaccctagggcgttgctgctgcctttgggagtgtggagctccaaaccatgtcgcgagaggcggattttgggaggccgggatcctcgcgccagggggatgtgcgagggtgtgggataaatcttaattcctccggcccacccaaagcctggaaatccagcctccgcgcctcttgccctgcgggccccgccctcagtcccgccctcatctaacccgctaccccattggtggcgtccggcggcgcggctgctgttatttttcgaatatataaggaggtggaagtggcagctgcaactagaggcttcccwggctggtgcctgagcccggcgtccctcgccccccgccctccccgcatccctctcctccctcgcgcctggccctgtggctcttcctccctccctccttccccccccccccacccctcgcccgctgcctccctcggcccagccagctgtgccggcgtttgttggctgccctgcgcccggccctccagccagccttctgccggccccgccgcgatggaggtgccccagccggagcccgcgccaggctcggctctcagtccagcaggcgtgtgcggtggcgcccagcgtccgggccacctcccgggcctcctgctgggatctcatggcctcctggggtccccggtgcgggcggccgcttcctcgccggtcaccaccctcacccagaccatgcacgacctcgccgggctcggcagccgcagccgcctgacgcacctatccctgtctcgacgggcatccgaatcctccctgtcgtctgaatcctccgaatcttctgatgcaggtctctgcatggattcccccagccctatggacccccacatggcggagcagacgtttgaacaggccatccaggcagccagccggatcattcgaaacgagcagtttgccatcagacgcttccagtctatgccggtgaggctgctgggccacagccccgtgcttcggaacatcaccaactcccaggcgcccgacggccggaggaagagcgaggcgggcagtggagctgccagcagctctggggaagacaaggagaatgtgcgcttctggaaggccggggtgggagctctccgggaagaggagggggcatgctggggtggttccctggcatgtgaggaccctcctctcccatcttggctgcaggatggatttgtcttcaagatgccatggaagcccacacatcccagctccacccatgctctggcagagtgggccagccgcagggaagcctttgcccagagacccagctcggcccccgacctgatgtgtctcagtcctgaccggaagatggaagtggaggagctcagccccctggccctaggtcgcttctctctgacccctgcagagggggatactgaggaagatgatggatttgtggacatcctagagagtgacttaaaggatgatgatgcagttcccccaggcatggagagtctcattagtgccccactggtcaagaccttggaaaaggaagaggaaaaggacctcgtcatgtacagcaagtgccagcggctcttccgctctccgtccatgccctgcagcgtgatccggcccatcctcaagaggctggagcggccccaggacagggacacgccygtgcagaataagcggagrcggagcgtgacccctcctgaggagcagcaggaggctgaggaacctaaagcccgcgtcctccgctcaaaatcactgtgtcacgatgagatcgagaacctcctggacagtgaccaccgagagctgattggagattactctaaggccttcctcctacagacagtagacggaaagcaccaagacctcaagtacatctcaccagaaacgatggtggccytattgacgggcaagttcagcaacatcgtggataagtttgtgattgtagactgcagatacccctatgaatatgaaggcgggcacatcaagactgcggtgaacttgcccctggaacgckacgccgagagcttcctactgaagagccccatygcgccctgtagcctggacaagagagtcatcctcattttccactgtgaattctcatctgagcgtgggccccgcatgtgccgtttcatcagggaacgagaccgtgctgtcaacgactaccccagcctctactaccctgagatgtatatcctgaaaggcggctacaaggagttcttccctcagcacccgaacttctgtgaaccccaggactaccggcccatgaaccacgaggccttcaaggatgagctaaagaccttccgcctcaagactcgcagctgggctggggagcggasscggcgggagctctgtagccggctgcaggaccagtgaggggcctgcgccagtcctgctacctcccttgcctttcgaggcctgaagccagctgccctatgggyctgccgggctgagggcctgctggaggcctcaggtgctgtccatgggaaagatggtgtgggtgtcctgcctgtctgccccagcccagattcccctgtgtcatcccatcattttccatatcctggtgccccccacccctggaagagcccagtctgttgagttagttaagttgggttaataccagcttaaaggcagtattttgtgtcctccaggagcttcttgtttccttgttagggttaacccttcatcttcctgtgtcctgaaacgctcctttgtgtgtgtgtcagctgaggctgggggagagccgtggtccctgaggatgggtcagagctaaactccttcctggcctgagagtcagctctctgccctgtgtacttcccgggccagggctgcccctaatctctgtaggaaccgtggtatgtctgccatgttgcccctttctcttttcccctttcctgtcccaccatacgagcacctccagcctgaacagaagctcttactctttcctatttcagtgttacctgtgtgcttggtctgtttgactttacgcccatctcaggacacttccgtagactgtttaggttcccctgtcaaatatcagttacccactcgaaagggatgttattatccttgggggctcccagggcaagggttaaggcctgaatcatgagcctgctggaagcccagcccctactgctgtgaaccctggggcctgactgctcagaacttgctgctgtcttgttgcggatggatggaaggttggatggatgggtggatggccgtggatggccgtggatgcgcagtgccttgcatacccaaaccaggtgggagcgttttgttgagcatgacagcctgcagcaggaatatatgtgtgyctatttgtaagcasctaaaccaaggactgagcaccctctggattctgaatctcaagaygggggcagggctgtgcttgaaggccctgctgagtcatctgttagggccttggttcaataaagc

SEQ ID NO: 6672 - DNA, 3592 bp, Homo sapiens
aggcggggaggctgcgcggtcagaggcgcctggagcgagcgaatcctggcccaccgcctgcccaaccgcgtgaccttgattgagttaatgaacttcacgcctcagcgtccaggtctgtaaaatggggtgtctaacgcagaccgtacagcccagctgggtttagcaaacttccgggagccagttggagcctctccccatccctagcggtgatcccaggtgacgacatgccgcggggggtcctgcggaggccaccctagggcgttgctgctgcctttgggagtgtggagctccaaaccatgtcgcgagaggcggattttgggaggccgggatcctcgcgccagggggatgtgcgagggtgtgggataaatcttaattcctccggcccacccaaagcctggaaatccagcctccgcgcctcttgccctgcgggccccgccctcagtcccgccctcatctaacccgctaccccattggtggcgtccggcggcgcggctgctgttatttttcgaatatataaggaggtggaagtggcagctgcaactagaggcttcccwggctggtgcctgagcccggcgtccctcgccccccgccctccccgcatccctctcctccctcgcgcctggccctgtggctcttcctccctccctccttccccccccccccacccctcgcccgctgcctccctcggcccagccagctgtgccggcgtttgttggctgccctgcgcccggccctccagccagccttctgccggccccgccgcgatggaggtgccccagccggagcccgcgccaggctcggctctcagtccagcaggcgtgtgcggtggcgcccagcgtccgggccacctcccgggcctcctgctgggatctcatggcctcctggggtccccggtgcgggcggccgcttcctcgccggtcaccaccctcacccagaccatgcacgacctcgccgggctcggcagcgaaaccccaaagagtcaggtagggaccctgctcttccgcagccgcagccgcctgacgcacctatccctgtctcgacgggcatccgaatcctccctgtcgtctgaatcctccgaatcttctgatgcaggtctctgcatggattcccccagccctatggacccccacatggcggagcagacgtttgaacaggccatccaggcagccagccggatcattcgaaacgagcagtttgccatcagacgcttccagtctatgccggtgaggctgctgggccacagccccgtgcttcggaacatcaccaactcccaggcgcccgacggccggaggaagagcgaggcgggcagtggagctgccagcagctctggggaagacaaggagaatgtgcgcttctggaaggccggggtgggagctctccgggaagaggagggggcatgctggggtggttccctggcatgtgaggaccctcctctcccatcttggctgcaggatggatttgtcttcaagatgccatggaagcccacacatcccagctccacccatgctctggcagagtgggccagccgcagggaagcctttgcccagagacccagctcggcccccgacctgatgtgtctcagtcctgaccggaagatggaagtggaggagctcagccccctggccctaggtcgcttctctctgacccctgcagagggggatactgaggaagatgatggatttgtggacatcctagagagtgacttaaaggacctcgtcatgtacagcaagtgccagcggctcttccgctctccgtccatgccctgcagcgtgatccggcccatcctcaagaggctggagcggccccaggacagggacacgccygtgcagaataagcggagrcggagcgtgacccctcctgaggagcagcaggaggctgaggaacctaaagcccgcgtcctccgctcaaaatcactgtgtcacgatgagatcgagaacctcctggacagtgaccaccgagagctgattggagattactctaaggccttcctcctacagacagtagacggaaagcaccaagacctcaagtacatctcaccagaaacgatggtggccytattgacgggcaagttcagcaacatcgtggataagtttgtgattgtagactgcagatacccctatgaatatgaaggcgggcacatcaagagactgcggtgaacttgcccctggaacgckacgccgagagcttcctactgaagagccccatygcgccctgtagcctggacaagagagtcatcctcattttccactgtgaattctcatctgagcgtgggccccgcatgtgccgtttcatcagggaacgagaccgtgctgtcaacgactaccccagcctctactaccctgagatgtatatcctgaaaggcggctacaaggagttcttccctcagcacccgaacttctgtgaaccccaggactaccggcccatgaaccacgaggccttcaaggatgagctaaagaccttccgcctcaagactcgcagctgggctggggagcggasscggcgggagctctgtagccggctgcaggaccagtgaggggcctgcgccagtcctgctacctcccttgcctttcgaggcctgaagccagctgccctatgggyctgccgggctgagggcctgctggaggcctcaggtgctgtccatgggaaagatggtgtgggtgtcctgcctgtctgccccagcccagattcccctgtgtcatcccatcattttccatatcctggtgccccccacccctggaagagcccagtctgttgagttagttaagttgggttaataccagcttaaaggcagtattttgtgtcctccaggagcttcttgtttccttgttagggttaacccttcatcttcctgtgtcctgaaacgctcctttgtgtgtgtgtcagctgaggctgggggagagccgtggtccctgaggatgggtcagagctaaactccttcctggcctgagagtcagctctctgccctgtgtacttcccgggccagggctgcccctaatctctgtaggaaccgtggtatgtctgccatgttgcccctttctcttttcccctttcctgtcccaccatacgagcacctccagcctgaacagaagctcttactctttcctatttcagtgttacctgtgtgcttggtctgtttgactttacgcccatctcaggacacttccgtagactgtttaggttcccctgtcaaatatcagttacccactcgaaagggatgttattatccttgggggctcccagggcaagggttaaggcctgaatcatgagcctgctggaagcccagcccctactgctgtgaaccctggggcctgactgctcagaacttgctgctgtcttgttgcggatggatggaaggttggatggatgggtggatggccgtggatggccgtggatgcgcagtgccttgcatacccaaaccaggtgggagcgttttgttgagcatgacagcctgcagcaggaatatatgtgtgyctatttgtaagcasctaaaccaaggactgagcaccctctggattctgaatctcaagaygggggcagggctgtgcttgaaggccctgctgagtcatctgttagggccttggttcaataaagc

SEQ ID NO: 6673 - DNA, 3566 bp, Homo sapiens
aggcggggaggctgcgcggtcagaggcgcctggagcgagcgaatcctggcccaccgcctgcccaaccgcgtgaccttgattgagttaatgaacttcacgcctcagcgtccaggtctgtaaaatggggtgtctaacgcagaccgtacagcccagctgggtttagcaaacttccgggagccagttggagcctctccccatccctagcggtgatcccaggtgacgacatgccgcggggggtcctgcggaggccaccctagggcgttgctgctgcctttgggagtgtggagctccaaaccatgtcgcgagaggcggattttgggaggccgggatcctcgcgccagggggatgtgcgagggtgtgggataaatcttaattcctccggcccacccaaagcctggaaatccagcctccgcgcctcttgccctgcgggccccgccctcagtcccgccctcatctaacccgctaccccattggtggcgtccggcggcgcggctgctgttatttttcgaatatataaggaggtggaagtggcagctgcaactagaggcttcccwggctggtgcctgagcccggcgtccctcgccccccgccctccccgcatccctctcctccctcgcgcctggccctgtggctcttcctccctccctccttccccccccccccacccctcgcccgctgcctccctcggcccagccagctgtgccggcgtttgttggctgccctgcgcccggccctccagccagccttctgccggccccgccgcgatggaggtgccccagccggagcccgcgccaggctcggctctcagtccagcaggcgtgtgcggtggcgcccagcgtccgggccacctcccgggcctcctgctgggatctcatggcctcctggggtccccggtgcgggcggccgcttcctcgccggtcaccaccctcacccagaccatgcacgacctcgccgggctcggcagcgaaaccccaaagagtcaggtagggaccctgctcttccgcagccgcagccgcctgacgcacctatccctgtctcgacgggcatccgaatcctccctgtcgtctgaatcctccgaatcttctgatgcaggtctctgcatggattcccccagccctatggacccccacatggcggagcagacgtttgaacaggccatccaggcagccagccggatcattcgaaacgagcagtttgccatcagacgcttccagtctatgccggtgaggctgctgggccacagccccgtgcttcggaacatcaccaactcccaggcgcccgacggccggaggaagagcgaggcgggcagtggagctgccagcagctctggggaagacaaggagaatgatggatttgtcttcaagatgccatggaagcccacacatcccagctccacccatgctctggcagagtgggccagccgcagggaagcctttgcccagagacccagctcggcccccgacctgatgtgtctcagtcctgaccggaagatggaagtggaggagctcagccccctggccctaggtcgcttctctctgacccctgcagagggggatactgaggaagatgatggatttgtggacatcctagagagtgacttaaaggatgatgatgcagttcccccaggcatggagagtctcattagtgccccactggtcaagaccttggaaaaggaagaggaaaaggacctcgtcatgtacagcaagtgccagcggctcttccgctctccgtccatgccctgcagcgtgatccggcccatcctcaagaggctggagcggccccaggacagggacacgccygtgcagaataagcggagrcggagcgtgacccctcctgaggagcagcaggaggctgaggaacctaaagcccgcgtcctccgctcaaaatcactgtgtcacgatgagatcgagaacctcctggacagtgaccaccgagagctgattggagattactctaaggccttcctcctacagacagtagacggaaagcaccaagacctcaagtacatctcaccagaaacgatggtggccytattgacgggcaagttcagcaacatcgtggataagtttgtgattgtagactgcagatacccctatgaatatgaaggcgggcacatcaagactgcggtgaacttgcccctggaacgckacgccgagagcttcctactgaagagccccatygcgccctgtagcctggacaagagagtcatcctcattttccactgtgaattctcatctgagcgtgggccccgcatgtgccgtttcatcagggaacgagaccgtgctgtcaacgactaccccagcctctactaccctgagatgtatatcctgaaaggcggctacaaggagttcttccctcagcacccgaacttctgtgaaccccaggactaccggcccatgaaccacgaggccttcaaggatgagctaaagaccttccgcctcaagactcgcagctgggctggggagcggasscggcgggagctctgtagccggctgcaggaccagtgaggggcctgcgccagtcctgctacctcccttgcctttcgaggcctgaagccagctgccctatgggyctgccgggctgagggcctgctggaggcctcaggtgctgtccatgggaaagatggtgtgggtgtcctgcctgtctgccccagcccagattcccctgtgtcatcccatcattttccatatcctggtgccccccacccctggaagagcccagtctgttgagttagttaagttgggttaataccagcttaaaggcagtattttgtgtcctccaggagcttcttgtttccttgttagggttaacccttcatcttcctgtgtcctgaaacgctcctttgtgtgtgtgtcagctgaggctgggggagagccgtggtccctgaggatgggtcagagctaaactccttcctggcctgagagtcagctctctgccctgtgtacttcccgggccagggctgcccctaatctctgtaggaaccgtggtatgtctgccatgttgcccctttctcttttcccctttcctgtcccaccatacgagcacctccagcctgaacagaagctcttactctttcctatttcagtgttacctgtgtgcttggtctgtttgactttacgcccatctcaggacacttccgtagactgtttaggttcccctgtcaaatatcagttacccactcgaaagggatgttattatccttgggggctcccagggcaagggttaaggcctgaatcatgagcctgctggaagcccagcccctactgctgtgaaccctggggcctgactgctcagaacttgctgctgtcttgttgcggatggatggaaggttggatggatgggtggatggccgtggatggccgtggatgcgcagtgccttgcatacccaaaccaggtgggagcgttttgttgagcatgacagcctgcagcaggaatatatgtgtgyctatttgtaagcasctaaaccaaggactgagcaccctctggattctgaatctcaagaygggggcagggctgtgcttgaaggccctgctgagtcatctgttagggccttggttcaataaagc

SEQ ID NO: 6674 - DNA, 1699 bp, Homo sapiens
ttgccatgggaaccagaactgaatttgaaggccaaagcaggtgtggcctctgattttgggaatgaaacttcattctttgaggctcctggtcttaccaatttaactttctcccctctccctcatcccktccgttcccttcaggccttcctcctacagacagtagacggaaagcaccaagacctcaagtacatctcaccagaaacgatggtggccctattgacgggcaagttcagcaacatcgtggataagtttgtgattgtagactgcagatacccctatgaatatgaaggcgggcacatcaagactgcggtgaacttgcccctggaacgcgacgccgagagcttcctactgaagagccccatcgcgccctgtagcctggacaagagagtcatcctcattttccactgtgaattctcatctgagcgtgggccccgcatgtgccgtttcatsagggaacgagaccgtgctgtcaacgactaccccagcctctactaccctgagatgtatatcctgaaaggcggctacaaggagttcttccctcagcacccgaycttctgtgaaccccaggactaccggcccatgaaccacgaggccttcaaggatgagctaaagaccttccgcctcaagactcgcagctgggctggggagcggagccggcgggagctctgtagccggctgcaggaccagtgaggggcctgcgccagtcctgctacctcccttgcctttcgaggcctgaagccagctgccctatgggcctgccgggctgagggcctgctggaggcctcaggtgctgtccatgggaaagatggtgtgggtgtcctgcctgtctgccccagcccagattcccctgtgtcatcccatcattttttaagttgggttaataccagcttaaaggcagtattttgtgtcctccaggagcttcttgtttccttgttagggttaacccttcatcttcctgtgtcctgaaacgctcctttgtgtgtgtgtcagctgaggctgggggagagccgtggtccctgaggatgggtcagagctaaactccttcctggcctgagagtcagctctctgccctgtgtacttcccgggccagggctgcccctaatctctgtaggaaccgtggtatgtctgccatgttgcccctttctcttttcccctttcctgtcccaccatacgagcacctccagcctgaacagaagctcttactctttcctatttcagtgttacctgtgtgcttggtctgtttgactttacgcccatctcaggacacttccgtagactgtttaggttcccctgtcaaatatcagttacccactcgaaagggatgttattatccttgggggctcccagggcaagggttaaggcctgaatcatgaycctgctggaagccsagcccctactgctgtgaaccctggggcctgactgctcagaactygctgctgtcttgttgcggatggatggaaggttggatggatgggtggatggccgtggatggccgtggatgcgcagtgccttgcatacccaaaccaggtgggagcgttttgttgagcatgacagcctgcagcaggaatatatgtgtgcctatttgtaagcagctaaaccaaggactgagcaccctctggattctgaatctcaagatgggggcagggctgtgcttgaaggccctgctgagtcatctgttagggccttggttcaataaagc

SEQ ID NO: 6675 - DNA, 3732 bp, Homo sapiens
aggcggggaggctgcgcggtcagaggcgcctggagcgagcgaatcctggcccaccgcctgcccaaccgcgtgaccttgattgagttaatgaacttcacgcctcagcgtccaggtctgtaaaatggggtgtctaacgcagaccgtacagcccagctgggtttagcaaacttccgggagccagttggagcctctccccatccctagcggtgatcccaggtgacgacatgccgcggggggtcctgcggaggccaccctagggcgttgctgctgcctttgggagtgtggagctccaaaccatgtcgcgagaggcggattttgggaggccgggatcctcgcgccagggggatgtgcgagggtgtgggataaatcttaattcctccggcccacccaaagcctggaaatccagcctccgcgcctcttgccctgcgggccccgccctcagtcccgccctcatctaacccgctaccccattggtggcgtccggcggcgcggctgctgttatttttcgaatatataaggaggtggaagtggcagctgcaactagaggcttcccwggctggtgcctgagcccggcgtccctcgccccccgccctccccgcatccctctcctccctcgcgcctggccctgtggctcttcctccctccctccttccccccccccccacccctcgcccgctgcctccctcggcccagccagctgtgccggcgtttgttggctgccctgcgcccggccctccagccagccttctgccggccccgccgcgatggaggtgccccagccggagcccgcgccaggctcggctctcagtccagcaggcgtgtgcggtggcgcccagcgtccgggccacctcccgggcctcctgctgggatctcatggcctcctggggtccccggtgcgggcggccgcttcctcgccggtcaccaccctcacccagaccatgcacgacctcgccgggctcggcagccgcagccgcctgacgcacctatccctgtctcgacgggcatccgaatcctccctgtcgtctgaatcctccgaatcttctgatgcaggtctctgcatggattcccccagccctatggacccccacatggcggagcagacgtttgaacaggccatccaggcagccagccggatcattcgaaacgagcagtttgccatcagacgcttccagtctatgccggtgaggctgctgggccacagccccgtgcttcggaacatcaccaactcccaggcgcccgacggccggaggaagagcgaggcgggcagtggagctgccagcagctctggggaagacaaggagaatgtgcgcttctggaaggccggggtgggagctctccgggaagaggagggggcatgctggggtggttccctggcatgtgaggaccctcctctcccatcttggctgcaggatggatttgtcttcaagatgccatggaagcccacacatcccagctccacccatgctctggcagagtgggccagccgcagggaagcctttgcccagagacccagctcggcccccgacctgatgtgtctcagtcctgaccggaagatggaagtggaggagctcagccccctggccctaggtcgcttctctctgacccctgcagagggggatactgaggaagatgatggatttgtggacatcctagagagtgacttaaaggatgatgatgcagttcccccaggcatggagagtctcattagtgccccactggtcaagaccttggaaaaggaagaggaaaaggacctcgtcatgtacagcaagtgccagcggctcttccgctctccgtccatgccctgcagcgtgatccggcccatcctcaagaggctggagcggccccaggacagggacacgccygtgcagaataagcggagrcggagcgtgacccctcctgaggagcagcaggaggctgaggaacctaaagcccgcgtcctccgctcaaaatcactgtgtcacgatgagatcgagaacctcctggacagtgaccaccgagagctgattggagattactctaaggccttcctcctacagacagtagacggaaagcaccaagacctcaagtacatctcaccagaaacgatggtggccytattgacgggcaagttcagcaacatcgtggataagtttgtgattgtagactgcagatacccctatgaatatgaaggcgggcacatcaagactgcggtgaacttgcccctggaacgckacgccgagagcttcctactgaagagccccatygcgccctgtagcctggacaagagagtcatcctcattttccactgtgaattctcatctgagcgtgggccccgcatgtgccgtttcatcagggaacgagaccgtgctgtcaacgactaccccagcctctactaccctgagatgtatatcctgaaaggcggctacaaggagttcttccctcagcacccgaacttctgtgaaccccaggactaccggcccatgaaccacgaggccttcaaggatgagctaaagaccttccgcctcaagactcgcagctgggctggggagcggasscggcgggagctctgtagccggctgcaggaccagtgaggggcctgcgccagtcctgctacctcccttgcctttcgaggcctgaagccagctgccctatgggyctgccgggctgagggcctgctggaggcctcaggtgctgtccatgggaaagatggtgtgggtgtcctgcctgtctgccccagcccagattcccctgtgtcatcccatcattttccatatcctggtgccccccacccctggaagagcccagtctgttgagttagttaagttgggttaataccagcttaaaggcagtattttgtgtcctccaggagcttcttgtttccttgttagggttaacccttcatcttcctgtgtcctgaaacgctcctttgtgtgtgtgtcagctgaggctgggggagagccgtggtccctgaggatgggtcagagctaaactccttcctggcctgagagtcagctctctgccctgtgtacttcccgggccagggctgcccctaatctctgtaggaaccgtggtatgtctgccatgttgcccctttctcttttcccctttcctgtcccaccatacgagcacctccagcctgaacagaagctcttactctttcctatttcagtgttacctgtgtgcttggtctgtttgactttacgcccatctcaggacacttccgtagactgtttaggttcccctgtcaaatatcagttacccactcggtcccagttttgttgccccagaaagggatgttattatccttgggggctcccagggcaagggttaaggcctgaatcatgagcctgctggaagcccagcccctactgctgtgaaccctggggcctgactgctcagaacttgctgctgtcttgttgcggatggatggaaggttggatggatgggtggatggccgtggatggccgtggatgcgcagtgccttgcatacccaaaccaggtgggagcgttttgttgagcatgacagcctgcagcaggaatatatgtgtgyctatttgtgtggacaaaaatatttacacttagggtttggagctattcaagaggaaatgtcacagaagcasctaaaccaaggactgagcaccctctggattctgaatctcaagaygggggcagggctgtgcttgaaggccctgctgagtcatctgttagggccttggttcaataaagcactgagcaagttgagaaaccagcatt

SEQ ID NO: 6676 - DNA, 3393 bp, Homo sapiens
aggcggggaggctgcgcggtcagaggcgcctggagcgagcgaatcctggcccaccgcctgcccaaccgcgtgaccttgattgagttaatgaacttcacgcctcagcgtccaggtctgtaaaatggggtgtctaacgcagaccgtacagcccagctgggtttagcaaacttccgggagccagttggagcctctccccatccctagcggtgatcccaggtgacgacatgccgcggggggtcctgcggaggccaccctagggcgttgctgctgcctttgggagtgtggagctccaaaccatgtcgcgagaggcggattttgggaggccgggatcctcgcgccagggggatgtgcgagggtgtgggataaatcttaattcctccggcccacccaaagcctggaaatccagcctccgcgcctcttgccctgcgggccccgccctcagtcccgccctcatctaacccgctaccccattggtggcgtccggcggcgcggctgctgttatttttcgaatatataaggaggtggaagtggcagctgcaactagaggcttcccwggctggtgcctgagcccggcgtccctcgccccccgccctccccgcatccctctcctccctcgcgcctggccctgtggctcttcctccctccctccttccccccccccccacccctcgcccgctgcctccctcggcccagccagctgtgccggcgtttgttggctgccctgcgcccggccctccagccagccttctgccggccccgccgcgatggaggtgccccagccggagcccgcgccaggctcggctctcagtccagcaggcgtgtgcggtggcgcccagcgtccgggccacctcccgggcctcctgctgggatctcatggcctcctggggtccccggtgcgggcggccgcttcctcgccggtcaccaccctcacccagaccatgcacgacctcgccgggctcggcagcgaaaccccaaagagtcaggtagggaccctgctcttccgcagccgcagccgcctgacgcacctatccctgtctcgacgggcatccgaatcctccctgtcgtctgaatcctccgaatcttctgatgcaggtctctgcatggattcccccagccctatggacccccacatggcggagcagacgtttgaacaggccatccaggcagccagccggatcattcgaaacgagcagtttgccatcagacgcttccagtctatgccggatggatttgtcttcaagatgccatggaagcccacacatcccagctccacccatgctctggcagagtgggccagccgcagggaagcctttgcccagagacccagctcggcccccgacctgatgtgtctcagtcctgaccggaagatggaagtggaggagctcagccccctggccctaggtcgcttctctctgacccctgcagagggggatactgaggaagatgatggatttgtggacatcctagagagtgacttaaaggatgatgatgcagttcccccaggcatggagagtctcattagtgccccactggtcaagaccttggaaaaggaagaggaaaaggacctcgtcatgtacagcaagtgccagcggctcttccgctctccgtccatgccctgcagcgtgatccggcccatcctcaagaggctggagcggccccaggacagggacacgccygtgcagaataagcggagrcggagcgtgacccctcctgaggagcagcaggaggctgaggaacctaaagcccgcgtcctccgctcaaaatcactgtgtcacgatgagatcgagaacctcctggacagtgaccaccgagagctgattggagattactctaaggccttcctcctacagacagtagacggaaagcaccaagacctcaagtacatctcaccagaaacgatggtggccytattgacgggcaagttcagcaacatcgtggataagtttgtgattgtagactgcagatacccctatgaatatgaaggcgggcacatcaagactgcggtgaacttgcccctggaacgckacgccgagagcttcctactgaagagccccatygcgccctgtagcctggacaagagagtcatcctcattttccactgtgaattctcatctgagcgtgggccccgcatgtgccgtttcatcagggaacgagaccgtgctgtcaacgactaccccagcctctactaccctgagatgtatatcctgaaaggcggctacaaggagttcttccctcagcacccgaacttctgtgaaccccaggactaccggcccatgaaccacgaggccttcaaggatgagctaaagaccttccgcctcaagactcgcagctgggctggggagcggasscggcgggagctctgtagccggctgcaggaccagtgaggggcctgcgccagtcctgctacctcccttgcctttcgaggcctgaagccagctgccctatgggyctgccgggctgagggcctgctggaggcctcaggtgctgtccatgggaaagatggtgtgggtgtcctgcctgtctgccccagcccagattcccctgtgtcatcccatcattttttaagttgggttaataccagcttaaaggcagtattttgtgtcctccaggagcttcttgtttccttgttagggttaacccttcatcttcctgtgtcctgaaacgctcctttgtgtgtgtgtcagctgaggctgggggagagccgtggtccctgaggatgggtcagagctaaactccttcctggcctgagagtcagctctctgccctgtgtacttcccgggccagggctgcccctaatctctgtaggaaccgtggtatgtctgccatgttgcccctttctcttttcccctttcctgtcccaccatacgagcacctccagcctgaacagaagctcttactctttcctatttcagtgttacctgtgtgcttggtctgtttgactttacgcccatctcaggacacttccgtagactgtttaggttcccctgtcaaatatcagttacccactcgaaagggatgttattatccttgggggctcccagggcaagggttaaggcctgaatcatgagcctgctggaagcccagcccctactgctgtgaaccctggggcctgactgctcagaacttgctgctgtcttgttgcggatggatggaaggttggatggatgggtggatggccgtggatggccgtggatgcgcagtgccttgcatacccaaaccaggtgggagcgttttgttgagcatgacagcctgcagcaggaatatatgtgtgyctatttgtaagcasctaaaccaaggactgagcaccctctggattctgaatctcaagaygggggcagggctgtgcttgaaggccctgctgagtcatctgttagggccttggttcaataaagc

SEQ ID NO: 6677 - DNA, 3546 bp, Homo sapiens
aggcggggaggctgcgcggtcagaggcgcctggagcgagcgaatcctggcccaccgcctgcccaaccgcgtgaccttgattgagttaatgaacttcacgcctcagcgtccaggtctgtaaaatggggtgtctaacgcagaccgtacagcccagctgggtttagcaaacttccgggagccagttggagcctctccccatccctagcggtgatcccaggtgacgacatgccgcggggggtcctgcggaggccaccctagggcgttgctgctgcctttgggagtgtggagctccaaaccatgtcgcgagaggcggattttgggaggccgggatcctcgcgccagggggatgtgcgagggtgtgggataaatcttaattcctccggcccacccaaagcctggaaatccagcctccgcgcctcttgccctgcgggccccgccctcagtcccgccctcatctaacccgctaccccattggtggcgtccggcggcgcggctgctgttatttttcgaatatataaggaggtggaagtggcagctgcaactagaggcttcccwggctggtgcctgagcccggcgtccctcgccccccgccctccccgcatccctctcctccctcgcgcctggccctgtggctcttcctccctccctccttccccccccccccacccctcgcccgctgcctccctcggcccagccagctgtgccggcgtttgttggctgccctgcgcccggccctccagccagccttctgccggccccgccgcgatggaggtgccccagccggagcccgcgccaggctcggctctcagtccagcaggcgtgtgcggtggcgcccagcgtccgggccacctcccgggcctcctgctgggatctcatggcctcctggggtccccggtgcgggcggccgcttcctcgccggtcaccaccctcacccagaccatgcacgacctcgccgggctcggcagcgaaaccccaaagagtcaggtagggaccctgctcttccgcagccgcagccgcctgacgcacctatccctgtctcgacgggcatccgaatcctccctgtcgtctgaatcctccgaatcttctgatgcaggtctctgcatggattcccccagccctatggacccccacatggcggagcagacgtttgaacaggccatccaggcagccagccggatcattcgaaacgagcagtttgccatcagacgcttccagtctatgccggatggatttgtcttcaagatgccatggaagcccacacatcccagctccacccatgctctggcagagtgggccagccgcagggaagcctttgcccagagacccagctcggcccccgacctgatgtgtctcagtcctgaccggaagatggaagtggaggagctcagccccctggccctaggtcgcttctctctgacccctgcagagggggatactgaggaagatgatggatttgtggacatcctagagagtgacttaaaggatgatgatgcagttcccccaggcatggagagtctcattagtgccccactggtcaagaccttggaaaaggaagaggaaaaggacctcgtcatgtacagcaagtgccagcggctcttccgctctccgtccatgccctgcagcgtgatccggcccatcctcaagaggctggagcggccccaggacagggacacgccygtgcagaataagcggagrcggagcgtgacccctcctgaggagcagcaggaggctgaggaacctaaagcccgcgtcctccgctcaaaatcactgtgtcacgatgagatcgagaacctcctggacagtgaccaccgagagctgattggagattactctaaggccttcctcctacagacagtagacggaaagcaccaagacctcaagtacatctcaccagaaacgatggtggccytattgacgggcaagttcagcaacatcgtggataagtttgtgattgtagactgcagatacccctatgaatatgaaggcgggcacatcaagactgcggtgaacttgcccctggaacgckacgccgagagcttcctactgaagagccccatygcgccctgtagcctggacaagagagtcatcctcattttccactgtgaattctcatctgagcgtgggccccgcatgtgccgtttcatcagggaacgagaccgtgctgtcaacgactaccccagcctctactaccctgagatgtatatcctgaaaggcggctacaaggagttcttccctcagcacccgaacttctgtgaaccccaggactaccggcccatgaaccacgaggccttcaaggatgagctaaagaccttccgcctcaagactcgcagctgggctggggagcggasscggcgggagctctgtagccggctgcaggaccagtgaggggcctgcgccagtcctgctacctcccttgcctttcgaggcctgaagccagctgccctatgggyctgccgggctgagggcctgctggaggcctcaggtgctgtccatgggaaagatggtgtgggtgtcctgcctgtctgccccagcccagattcccctgtgtcatcccatcattttccatatcctggtgccccccacccctggaagagcccagtctgttgagttagttaagttgggttaataccagcttaaaggcagtattttgtgtcctccaggagcttcttgtttccttgttagggttaacccttcatcttcctgtgtcctgaaacgctcctttgtgtgtgtgtcagctgaggctgggggagagccgtggtccctgaggatgggtcagagctaaactccttcctggcctgagagtcagctctctgccctgtgtacttcccgggccagggctgcccctaatctctgtaggaaccgtggtatgtctgccatgttgcccctttctcttttcccctttcctgtcccaccatacgagcacctccagcctgaacagaagctcttactctttcctatttcagtgttacctgtgtgcttggtctgtttgactttacgcccatctcaggacacttccgtagactgtttaggttcccctgtcaaatatcagttacccactcggtcccagttttgttgccccagaaagggatgttattatccttgggggctcccagggcaagggttaaggcctgaatcatgagcctgctggaagcccagcccctactgctgtgaaccctggggcctgactgctcagaacttgctgctgtcttgttgcggatggatggaaggttggatggatgggtggatggccgtggatggccgtggatgcgcagtgccttgcatacccaaaccaggtgggagcgttttgttgagcatgacagcctgcagcaggaatatatgtgtgyctatttgtgtggacaaaaatatttacacttagggtttggagctattcaagaggaaatgtcacagaagcasctaaaccaaggactgagcaccctctggattctgaatctcaagaygggggcagggctgtgcttgaaggccctgctgagtcatctgttagggccttggttcaataaagcactgagcaagttgagaaaccagcatt

SEQ ID NO: 6678 - DNA, 2111 bp, Homo sapiens
gattccgggactggaggggtttggcctatgcctgtgggttgtgaccctgtccttgctaatctggcctcaggatgatgatgcagttcccccaggcatggagagtctcattagtgccccactggtcaagaccttggaaaaggaagaggaaaaggacctcgtcatgtacagcaagtgccagcggctcttccgctctccgtccatgccctgcagcgtgatccggcccatcctcaagaggctggagcggccccaggacagggacacgccygtgcagaataagcggagrcggagcgtgacccctcctgaggagcagcaggaggctgaggaacctaaagcccgcgtcctccgctcaaaatcactgtgtcacgatgagatcgagaacctcctggacagtgaccaccgagagctgattggagattactctaaggttgttccctgggtgtcagacccaagaggtgcctctcagttgccatgggaaccagaactgaatttgaaggccaaagcaggccttcctcytacagacagtagacggaaagcaccaagacctcaagtacatctcaccagaaacgatggtggccctattgacgggcaagttcagcaacatcgtggataagtttgtgattgtagactgcagatacccctatgaatatgaaggcgggcacatyaagactgcggtgaacttgcccctggaacgcgacgccgagagcttcctactgaagagccccatcgcgccctgtagcctggacaagagagtcatcctcattttccactgtgaattctcatctgagcgtgggccccgcatgtgccgtttcatcagggaacgagaccgtgctgtcaacgactaccccagcctctactaccctgagatgtatatcctgaaaggcggctacaaggagttcttccctcagcacccgaacttctgtgaaccccaggactaccggcccatgaaccacgasgccttcaaggatgagctaaagaccttccgcctcaagactcgcagctgggctggggagcggagccggcgggagctctgtagccggctgcaggaccagtgagyggcctgcgccagtcctgctacctcccttgcctttcgaggcctgaagccagctgccctatgggcctgccgggctgagggcctgctggaggcctcaggtgctgtccatgggaaagatggtgtgggtgtcctgcctgtctgccccagcccagattcccctgtgtcatcccatcattttccatatcctggtgccccccacccctggaagagcccagtctgttgagttagttaagttgggttaataccagcttaaaggcagtattttgtgtcctccaggagcttcttgtttccttgttagggttaacccttcatcttcctgtgtcctgaaacgctcctttgtgtgtgtgtcagctgaggctgggggagagccgtggtccctgaggatgggtcagagctaaactccttcctggcctgagagtcagctctctgccctgtgtacttcccgggccagggctgcccctaatctctgtaggaaccgtggtatgtctgccatgttgcccctttctcttttcccctttcctgtcccaccatacgagcacctccagcctgaacagaagctcttactctttcctatttcagtgttacctgtgtgcttggtctgtttgactttacgcccatctcaggacacttccgtagactgtttaggttcccctgtcaaatatcagttacccactcgaaagggatgttattatccttgggggctcccagggcaagggttaaggcctgaatcatgagcctgctggaagcccagcccctactgctgtgaaccctggggcctgactgctcagaacttgctgctgtcttgttgcggatggatggaaggttggatggatgggtggatggccgtggatggccgtggatgcgcagtgccttgcytacccaaaccaggsgggagcgttttgttgagcatgacagcctgcagcaggaatatatytgtgcctatttgtaagcagctaaaccaaggactgagcaccctctggattctgaatctcaagatgggggcagggctgtgcttgaaggccctgctgagtcatctgttagggccttggttcaataaagc

SEQ ID NO: 6679 - DNA, 1473 bp, Homo sapiens
taagttcacagtcgagtggatcatagctggcgggtaaggctgaaggtgagatcaggatgagggtttggaagcccttgcctagaaggaggcagttttttgagacagcataggagagcgcaaacctccagggtcacagggctgcagtcttctcctttcggagaccccattgcagagaagagcgaaagcaggggcggggtgggggtgggagtggtctcttccggttcttgaagatagcgtcccttaggcaggaggggtgggtcactcartctccaggctcgggaggcccccagcaaatcggacgctgtgggctaggccgccaccgsgagcccactcgcccgatacgcgccttggggtccgggtcggctttcyccgggacccctggccggaaactgagccgttcacttccgccaccagccggaagttttctgtcactggacgccaaggagttttcggtggctcagctgggtaaccggggatcaccatggcggcctcattggtggggaagaagatcgtgtttgtaacggggaacgccaagaagctggaggaggtcgttcagattctaggagataagtttmcatgcactttggtggcacagaaaattgacctgccggagtaccarggggagccggatgagatttccatacagaaatgtcaggaggcagttcgccaggtacaggggcccgtgctggttgaggacacttgtctgtgcttcaatgcccttggagggctccccggcccctacataaagtggtttctggrgaagttaaagcctgaaggtctccaccagctcctggccgggttcgaggacaagtcagcctatgcgctctgcacgtttgcactcagcaccggggacccaagccagcccgtgcgcctgttcaggggccggacctcgggccggatcgtggcacccagaggctgccaggactttggctgggacccctgctttcagcctgatggatatgagcagacgtacgcagagatgcctaaggcggagaagaacgctgtctcccatcgcttccgggccctgctggagctgcaggartactttggcagtttggcagcttgacttctgcagctggaggagscccctcaggccggggatctgsggagggctagcccaaaacctcccgcatygggcaggcaccccctgaagtacttccttcagggtttcccctttgtgagggtgtcragtagcctcaccggcctgtctggaggagcagctggctctgctctgagaaactctggcaagtggacgccattctcttgcccttaggattcactgctctctcctacagccgccaggcctggggtcctgaaaggaccttgggtggtaaagctgtacttggtgggagtgagggcgtggggaggaaccatgcaaatcgccttccatggtttttaaatgcagtaaataacatttytggatgagacttgtttccaaaataaaccagctatatctgttttgaaccctgcccc

SEQ ID NO: 6680 - DNA, 898 bp, Homo sapiens
gtggctcagctgggtaaccggggatcaccatggcggcctcattggtggggaagaagatcgtgtttgtaacggggaacgccaagaagctggaggaggtacaggggcccgtgctggttgaggacacttgtctgtgcttcaatgcccttggagggctccccggcccctacataaagtggtttctggrgaagttaaagcctgaaggtctccaccagctcctggccgggttcgaggacaagtcagcctatgcgctctgcacgtttgcactcagcaccggggacccaagccagcccgtgcgcctgttcaggggccggacctcgggccggatcgtggcacccagaggctgccaggactttggctgggacccctgctttcagcctgatggatatgagcagacgtacgcagagatgcctaaggcggagaagaacgctgtctcccatcgcttccgggccctgctggagctgcaggartactttggcagtttggcagcttgacttctgcagctggaggagscccctcaggccggggatctgsggagggctagcccaaaacctcccgcatygggcaggcaccccctgaagtacttccttcagggtttcccctttgtgagggtgtcragtagcctcaccggcctgtctggaggagcagctggctctgctctgagaaactctggcaagtggacgccattctcttgcccttaggattcactgctctctcctacagccgccaggcctggggtcctgaaaggaccttgggtggtaaagctgtacttggtgggagtgagggcgtggggaggaaccatgcaaatcgccttccatggtttttaaatgcagtaaataacatttytggatgagacttgtttccaaaataaaccagctatatctgttttgaaccctgcccc

SEQ ID NO: 6681 - DNA, 1410 bp, Homo sapiens
tgggggacaggcagaaaatattcagatgcccccttcctggcacctgctctggagccaggctgggaggaatggaaaacccctgcggcctccctaacaggtgcagagggaaagggccccgacggtgacggatgggagtgtgcgccggccagggcctcaggcctttggagaygcagttttgctcttgttgcccaggctggagtccgatggcacgatctcygctcactgcaacccccacctcccgarttcaggcgattctcctgaatcctgaattctctgaactgggattacaggcatgcaccaccatgcccagctaattttgtactttttggtagagayggggtttctccatgttggtcaggctggtttcaaactcctgacctcgggtgatccactcgcctcagcctcccaaagtgctgggattacaggcgtgagccaccgggctttcccacactttgatgagcatcagaatggcctgaggagcttggtcgttcagattctaggagataagtttmcatgcactttggtggcacagaaaattgacctgccggagtaccarggggagccggatgagatttccatacagaaatgtcaggaggcagttcgccaggtacaggggcccgtgctggttgaggacacttgtctgtgcttcaatgcccttggagggctccccggcccctacataaagtggtttctggrgaagttaaagcctgaaggtctccaccagctcctggccgggttcgaggacaagtcagcctatgcgctctgcacgtttgcactcagcaccggggacccaagccagcccgtgcgcctgttcaggggccggacctcgggccggatcgtggcacccagaggctgccaggactttggctgggacccctgctttcagcctgatggatatgagcagacgtacgcagagatgcctaaggcggagaagaacgctgtctcccatcgcttccgggccctgctggagctgcaggartactttggcagtttggcagcttgacttctgcagctggaggagscccctcaggccggggatctgsggagggctagcccaaaacctcccgcatygggcaggcaccccctgaagtacttccttcagggtttcccctttgtgagggtgtcragtagcctcaccggcctgtctggaggagcagctggctctgctctgagaaactctggcaagtggacgccattctcttgcccttaggattcactgctctctcctacagccgccaggcctggggtcctgaaaggaccttgggtggtaaagctgtacttggtgggagtgagggcgtggggaggaaccatgcaaatcgccttccatggtttttaaatgcagtaaataacatttytggatgagacttgtttccaaaataaaccagctatatctgttttgaaccctgcccc

SEQ ID NO: 6682 - DNA, 799 bp, Homo sapiens
agtctgtataactttactctcagagaaaaattttcacctacaatatctcctcttagtcaacgctgaagcccatcaaaataccaagaaccaaccgcctccaggtctctacatgaagacccaggacctggccaatgcccccaacgcccctgagattctcgagatcgagttcaaaaaaggggtccctgtgaagatgaccaacgttaaggatggcaccacccaccagacctccttggagctcttcgtgtacctgagtcaagtcacgggcaagcacagtgtgggccgtactgacatcgtggagaaccgctgcattagaatgaagtctcgaggtatctatgagaccccagcaggcaccatcctttaccacacctayttagatatcraggtcttcaccatggactgggaagtgcataaagtcaaacaggcctcggcttgaaatttgctgagctgatatatactggtttctagcacagccctgagtgtgaatttgcccaccactgcatcgccaagtcccaggagcgagtggaagggaaagtacaggtgtctgtcctcaagggccaggtgtacatccttagccgggagtccccactgtctctctacaacaaggagctggtgagcatgaacatgcagggtgattatgagccaattgattccaccgggttcatcaacatcaattccctcaagctgaaggaatatcatctccagagaaaggtcactgccaaatagacccctgtacaatgaggagctggggcctcctcatatttgcagatcccccaagtacaggcgctaattgttgtgagaa

SEQ ID NO: 6683 - DNA, 1023 bp, Homo sapiens
atggagagtgaaaagcaccaagttaaagagggaggaaagtggaaaaaacttgcaacaaaaataaaatatgaaaggcgaaaagtaggggtcaacgctgaagcccatcaaaataccaagaaccaaccgcctccaggtctctacatgaagacccaggacctggccaatgcccccaacgcccctgagattctcgagatcgagttcaaaaaaggggtccctgtgaagatgaccaacgttaaggatggcaccacccaccagacctccttggagctcttcgtgtacctgagtcaagtcacgggcaagcacagtgtgggccgtactgacatcgtggagaaccgctgcattagaatgaagtctcgaggtatctatgagaccccagcaggcaccatcctttaccacacctayttagatatcraggtcttcaccatggactgggaacacagccctgagtgtgaatttgcccaccactgcatcgccaagtcccaggagcgagtggaagggaaagtacaggtgtctgtcctcaagggccaggtgtacatccttagccgggagtccccactgtctctctacaacaaggagctggtgagcatgaacatgcagggtgattatgagccaattgattccaccgggttcatcaacatcaattccctcaagctgaaggaatatcatctccagagaaagatcccccaagtacaggcgctaattgttgtgagaaatttaacagaagagtttgcccaccaacagccctacaaaccagaacgtctggaggcctcagagaaagataataccacatcaaacaggtccagtgtagagcctgaaattcgtatatggctgagaacatttgggagacccctggtgtttagccctcactggtcatcatcatcacaggtggactttcctagtacgagtcacatgatggcttcagggctgaaagaagaagaggtgtctgcagagagaaagaaaacagatacacaggatgaaccaagacgagcaggtgctgatgttattcaaggtcagatgtccctg

SEQ ID NO: 6684 - DNA, 3123 bp, Homo sapiens
ccgcgcccctcccctcacgggctctggccttaaccagagctcgcggactggcggggacaggtcccacctcctggctcccaggacgggtctgcaccaacctcagtttcggggctgcggctcacagaagtctaacctgcccgggacgcccgcaccaactcctgcgcgcggtccttccaaccctcctgctaccatgaagattgcagtgattggacagagcctgtttggccaggaagtttactgccacctgaggaaggagggccacgaagtggtgggtgtgttcactgttccagacaaggatggaaaggccgaccccctgggtctggaagctgagaaggatggagtgccggtattcaagtactcccggtggcgtgcaaaaggacaggctttgcctgatgtggtggcaaaataccaggctttgggggccgagctcaacgtcctgcccttctgcagccaattcatccccatggagataatcagtgccccccggcatggctccatcatctatcacccgtcactgctccctaggcacygaggggcctcggccatcaactggaccctcattcacggagataagaaaggggggttttccatcttctgggcggatgatggtctggacaccggagacctgctgctgcagaaggagtgtgaggtgctcccggacgacaccgtgagcacgctgtacaaccgcttcctcttccctgaaggcatcaaagggatggtgcaggccgtgaggctgatcgctgagggcaaagcccccagactccctcagcctgaggaaggagccacctatgaggggattcagaagaaggagacagccaagatcaactgggaccagccggcagaggccattcacaactggatccgcgggaacgacaaggtgccgggagcctggacagaggcctgtgaacagaaactgacatttttcaactcaacgctgaacacttcaggccyggtgcccgagggagacgctttgcccatcccaggagcccatcggccaggggtggtcaccaaagcaggactcatcctctttgggaatgatgayaaaatgctgctggtgaagaatattcagctggaggatggcaaaatgatcctggcctcgaacttctttaagggggcagccagcagtgtccttgagctgacagaggcagagctggttactgcggaggctgtgcggagtktttggcagcggatcctccccaaagtcctggaggttgaagactccactgatttcttcaagtcaggggccgcgtctgtggacgttgtgaggctggtggaggaagtgaaggagctgtgtgatggcctggagttagaaaatgaagatgtgtacatggcatccaccttyggggacttcatccagctgttagtgaggaagctkcgaggggacgatgaggagggcgagtgcagcattgactacgtggaaatggcagtgaacaagcgcactgtccgcatgccccaccagctcttcattgggggggmgttcgtggatgccgagggcgccaagacctctgagaccatcaatcccaccgatggaagtgtcatctgccaggtatccctggcccaagtcaccgacgtcgacaaggcagtggccgcagccaaggatgcctttgagaatggacggtgggggaagatcrgtgcgcgggaccggggccggctgatgtacaggttggcagatctcatggagcagcaccaggaggagctggccaccattgaggccctggatgcgggtgccgtctacacgctggccctgaagacccacgtgggcatgtccatccagaccttccgctactttgctggctggtgtgacaagatccagggctccaccatccccatcaaccaggccagacccaaccgcaacctgaccttgaccaggaaggagcctgttggggtttgtggcatcatcatcccctggaactatcccctgatgatgctgtcctggaagacagctgcctgcctggctgccgggaacacagtggtgatcaagcctgctcaggtgaccccactcacagccttgaagtttgcagagctgacattaaaggccggcattcccaaaggtgtggttaacgtcctcccaggatctggctccctggtcggccagagactctcagaccatcctgatgtgaggaaaatcgggttcacaggctccacagaggtgggcaagcacatcatgaaaagctgtgccataagtaacgtgaagaaggtgtccctggaactgggcgggaagtcacccctcatcatctttgctgactgtgacctcaacaaggctgtgcagatggggatgagttctgttttcttcaacaaaggagagaattgcattgcagcaggccgactctttgtggaggactccattcatgatgagttcgtgcggagagtggtagaagaggtgcggaagatgaaggtgggcaacccgctggacagggacaccgaccacgggccgcagaatcaccatgcccaccttgtgaagctgatggagtactgccagcatggcgtgaaggaaggggccacactggtctgcggcgggaatcaggtccctcggccagggttcttctttgagccaactgttttcacagrcgtggaagaccacatgttcatagccaaggaggagtccttcgggcctgtcatgatcrtctctcggtttgctgatggggacttggatgccgtgctgtctcgggccaatgccacggaatttggcctggcttctggtgtcttcaccagggacatcaacaaggccctgtatgtcagtgacaagctccaggcaggcactgtgtttgtcaacacgtacaacaagaccgacgtggccgctcccttcggaggattcaaacagtctggatttggcaaagatctaggagaggcggctctgaacgagtacctgcgggtcaagacagtgaccttcgaatactgaagaaaggtctttgtgagaagaaagtccctgcccctccctcgtggctggggccccctccctcttgagcctgggtgcacagcacctcccacctggggggctagtggaagccctcctgcctgcacaccatgtytgcatcttggacgccctctgtccagtcagaagcagcccttggctgggtgaggtgtgcccctcccagggagaataaagcttctgaagagagaccg

SEQ ID NO: 6685 - DNA, 1189 bp, Homo sapiens
ccgcgcccctcccctcacgggctctggccttaaccagagctcgcggactggcggggacaggtcccacctcctggctcccaggacgggtctgcaccaacctcagtttcggggctgcggctcacagaagtctaacctgcccgggacgcccgcaccaactcctgcgcgcggtccttccaaccctcctgctaccatgaagattgcagtgattggacagagcctgtttggccaggaagtttactgccacctgaggaaggagggccacgaagtggtgggtgtgttcactgttccagacaaggatggaaaggccgaccccctgggtctggaagctgagaaggatggagtgccggtattcaagtactcccggtggcgtgcaaaaggacaggctttgcctgatgtggtggcaaaataccaggctttgggggccgagctcaacgtcctgcccttctgcagccaattcatccccatggagataatcagtgccccccggcatggctccatcatctatcacccgtcactgctccctaggcacygaggggcctcggccatcaactggaccctcattcacggagataagaaaggggggttttccatcttctgggcggatgatggtctggacaccggagacctgctgctgcagaaggagtgtgaggtgctcccggacgacaccgtgagcacgctgtacaaccgcttcctcttccctgaaggcatcaaagggatggccgtgaggctgatcgctgagggcaaagcccccagactccctcagcctgaggaaggagccacctatgaggggattcagaagaaggagacagccaagatcaactgggaccagccggcagaggccattcacaactggatccgcgggaacgacaaggtgccgggagcctggacagaggcctgtgaacagaaactgacatttttcaactcaacgctgaacacttcaggccyggtgcccgagggagacgctttgcccatcccaggagcccatcggccaggggtggtcaccaaagcaggactcatcctctttgggaatgatgayaaaatggtaagggcayggctgtgggtcacttrcctgctcaaagccacccatgctcctgtccttggactcaggcctcacaggaagaccctaggctcctctggagaaaatggaaaaaaccagacccaggaaggaacactgaccctgatttgtccc

SEQ ID NO: 6686 - DNA, 1705 bp, Homo sapiens
ccgcgcccctcccctcacgggctctggccttaaccagagctcgcggactggcggggacaggtcccacctcctggctcccaggacgggtctgcaccaacctcagtttcggggctgcggctcacagaagtctaacctgcccgggacgcccgcaccaactcctgcgcgcggtccttccaaccctcctgctaccatgaagattgcagtgattggacagagcctgtttggccaggaagtttactgccacctgaggaaggagggccacgaagtggtgggtgtgttcactgttccagacaaggatggaaaggccgaccccctgggtctggaagctgagaaggatggagtgccggtattcaagtactcccggtggcgtgcaaaaggacaggctttgcctgatgtggtggcaaaataccaggctttgggggccgagctcaacgtcctgcccttctgcagccaattcatccccatggagataatcagtgccccccggcatggctccatcatctatcacccgtcactgctccctaggcacygaggggcctcggccatcaactggaccctcattcacggagataagaaaggggggttttccatcttctgggcggatgatggtctggacaccggagacctgctgctgcagaaggagtgtgaggtgctcccggacgacaccgtgagcacgctgtacaaccgcttcctcttccctgaaggcatcaaagggatggtgcaggccgtgaggctgatcgctgagggcaaagcccccagactccctcagcctgaggaaggagccacctatgaggggattcagaagaaggagacagccaagatcaactgggaccagccggcagaggccattcacaactggatccgcgggaacgacaaggtgccgggagcctggacagaggcctgtgaacagaaactgacatttttcaactcaacgctgaacacttcaggccyggtgcccgagggagacgctttgcccatcccaggagcccatcggccaggggtggtcaccaaagcaggactcatcctctttgggaatgatgayaaaatgctgctggtgaagaatattcagctggaggatggcaaaatgatcctggcctcgaacttctttaagggggcagccagcagtgtccttgagctgacagaggcagagctggttactgcggaggctgtgcggagtktttggcagcggatcctccccaaagtcctggaggttgaagactccactgatttcttcaagtcaggggccgcgtctgtggacgttgtgaggctggtggaggaagtgaaggagctgtgtgatggcctggagttagaaaatgaagatgtgtacatggcatccaccttyggggacttcatccagctgttagtgaggaagctkcgaggggacgatgaggagggcgagtgcagcattgactacgtggaaatggcagtgaacaagcgcactgtccgcatgccccaccagctcttcattgggggggmgttcgtggatgccgagggcgccaagacctctgagaccatcaatcccaccgatggaagtgtcatctgccaggtatccctggcccaagtcaccgacgtcgacaaggcagtggccgcagccaaggatgcctttgagaatggacggtgggggaagatcrgtgcgcgggaccggggccggctgatgtacagggctccaccatccccatcaaccaggccagacccaaccgcaacc

SEQ ID NO: 6687 - DNA, 3372 bp, Homo sapiens
gaatcatcggaatccttcaccatggcatccagcccggcccagcgtcggcgaggcaatgatcctctcacctccagccctggccgaagctcccggcgtactgatgccctcacctccagccctggccgtgaccttccaccatttgaggatgagtccgaggggctcctaggcacagaggggcccctggaggaagaagaggakggagaggagctcattggagatggcatggaaagggactaccgcgccatcccagagctggacgcctatgaggccgagggactggctctggatgatgaggacgtagaggagctgacggccagtcagagggaggcagcagagcgggccatgcggcagcgtgaccgggaggctggccgrggcctgggccgcatgcgccrtgggytcctgtatgacagcgatgaggaggacgaggagcgccctgcccrcaagcgccgccaggtggagcgggccacggaggayggcgaggaggacgagsagatgatygagagcatcgagaacctggaggatctcaaaggccactctgtgcgcgagtgggtgagcatggcgggcccccggctggagatccaccaccgcttcaagaacttcctgcgcactcacgtcgacagccacggccacaacgtcttcaaggagcgcatcagcgacatgtgcaaagagaaccgtgagagcctggtggtgaactatgaggacttggcagccagggagcacgtgctggcctacttcctgcctgaggcaccggcrgagctgctgcagatctttgatgaggctgccctggaggtggtactggccatgtaccccaagtacgaccgcatcaccaaccacatccatgtccgcatctcccacctgcctctggtggaggagctgcgctcgctgaggcagctgcatctgaaccagctgatccgcaccagtggggtggtgaccagctgcactggcgtcctgccccagctcagcatggtcaagtacaactgcaacaagtgcaatttcgtcctgggtcctttctgccagtcccagaaccaggaggtgaaaccaggctcctgtcctgagtgccagtcggccggcccctttgaggtcaacatggaggagaccatctatcagaactaccagcgtatccgaatccaggagagtccaggcaaagtggcggctggccggctgccccgctccaaggacrccattctcctygcagatctggtggacagctgcaagccaggagacgagatagagctgactggcatctatcacaacaactatgatggctccctcaacactgccaatggcttccctgtctttgccactgtcatcctagccaaccacgtggccaagaaggacaacaaggttgctgtaggggaactgaccgatgaagatgtgaagatgatcactagcctctccaaggatcagcagatcggagagaagatctttgccagcattgctccttccatctatggtcatgaagacatcaagagaggcctggctctggccctgttcggaggggagcccaaaaacccaggtggcaagcacaaggtacgtggtgatatcaacgtgctcttgtgcggagaccctggcacagcgaagtcgcagtttctcaagtatattgagaaagtgtccagccgagccatcttcaccactggccagggggcgtcggctgtgggcctcacggcgtatgtccagcggcaccctgtcagcagggagtggaccttggaggctggggccctggttctggctgaccgaggagtgtgtctcattgatgaatttgacaagatgaatgaccaggacagaaccagcatccatgaggccatggagcaacagagcatctccatctcgaaggctggcatcgtcacctccctgcaggctcgctgcacggtcattgctgccgccaaccccataggagggcgctacgacccctcgctgactttctctgagaacgtggacctcacagagcccatcatctcacgctttgacatcctgtgtgtggtgagggacaccrtggacccagtccaggacgagatgctggcccgcttcgtggtgggcagccacgtcagacaccaccccagcaacaaggaggaggaggggctggccaatggcagcgctgctgagcccgccatgcccaacacgtatggcgtggagcccctgccccaggaggtcctgaagaagtacatcatctacrccaaggagagggtccacccgaagctcaaccagatggaccaggacaaggtggccaagatgtacagtgacctgaggaaagaatctatggcgacaggcagcatccccattacggtgcggcacatcgagtccatgatccgcatggcggaggcccacgcgcgcatccatctgcgggactatgtgatcgaagacgacgtcaacatggccatccgcgtgatgctggagagcttcatagacacacagaagttcagcgtcatgcgcagcatgcgcaagacttttgcccgctacctttcattccggcgtgacaacaatgagctgttgctcttcatactgaagcagttagtggcagagcaggtgacatatcagcgcaaccgctttggggcccagcaggacactattgaggtccctgagaaggacttggtggataaggctcgtcagatcaacatccacaacctctctgcattttatgacagtgagctcttcaggatgaacaagttcagccacgayctgaaaaggaaaatgatcctgcagcagttctgaggccctatgccatccataaggattccttgggattctggtttggggtggtcagtgccctctgtgctttatggacacaaaaccagagcacttgatgaactcggggtactagggtcagggcttatagcaggatgtctggctgcacctggcatgactgtttgtttctccaagcctgctttgtgcttctcacctttgggtgggatgccttgccagtgtgtcttacttggttgctgaacatcttgccacctccgagtgctttgtctccactcagtaccttggatcagagctgctgagttcaggatgcctgcgtgtggtttaggtgttagccttcttacatggatgtcaggagagctgctgccctcttggcgtgagttgcgtattcaggctgcttttgctgcctttggccagagagctggttgaagatgtttgtaatcgttttcagtctcctgcaggtttctgtgcccctgtggtggaagagggcacgacagtgccagcgcagcgttctgggctcctcagtcgcaggrgtgggatgtgagtcatgcggattatccactcgccacagttatcagctgccattgctccctgtctgtttccccactctcttatttgtgcattcggtttggtttctgtagttttaatttttaataaagttgaataaaatataaa

SEQ ID NO: 6688 - DNA, 3439 bp, Homo sapiens
aaccacttttcgcgcgaaacctggttgttgctgtagtggcggagaggatcgtggtactgctatggcggaatcatcggaatccttcaccatggcatccagcccggcccagcgtcggcgaggcaatgatcctctcacctccagccctggccgaagctcccggcgtactgatgccctcacctccagccctggccgtgaccttccaccatttgaggatgagtccgaggggctcctaggcacagaggggcccctggaggaagaagaggakggagaggagctcattggagatggcatggaaagggactaccgcgccatcccagagctggacgcctatgaggccgagggactggctctggatgatgaggacgtagaggagctgacggccagtcagagggaggcagcagagcgggccatgcggcagcgtgaccgggaggctggccgrggcctgggccgcatgcgccrtgggytcctgtatgacagcgatgaggaggacgaggagcgccctgcccrcaagcgccgccaggtggagcgggccacggaggayggcgaggaggacgagsagatgatygagagcatcgagaacctggaggatctcaaaggccactctgtgcgcgagtgggtgagcatggcgggcccccggctggagatccaccaccgcttcaagaacttcctgcgcactcacgtcgacagccacggccacaacgtcttcaaggagcgcatcagcgacatgtgcaaagagaaccgtgagagcctggtggtgaactatgaggacttggcagccagggagcacgtgctggcctacttcctgcctgaggcaccggcrgagctgctgcagatctttgatgaggctgccctggaggtggtactggccatgtaccccaagtacgaccgcatcaccaaccacatccatgtccgcatctcccacctgcctctggtggaggagctgcgctcgctgaggcagctgcatctgaaccagctgatccgcaccagtggggtggtgaccagctgcactggcgtcctgccccagctcagcatggtcaagtacaactgcaacaagtgcaatttcgtcctgggtcctttctgccagtcccagaaccaggaggtgaaaccaggctcctgtcctgagtgccagtcggccggcccctttgaggtcaacatggaggagaccatctatcagaactaccagcgtatccgaatccaggagagtccaggcaaagtggcggctggccggctgccccgctccaaggacrccattctcctygcagatctggtggacagctgcaagccaggagacgagatagagctgactggcatctatcacaacaactatgatggctccctcaacactgccaatggcttccctgtctttgccactgtcatcctagccaaccacgtggccaagaaggacaacaaggttgctgtaggggaactgaccgatgaagatgtgaagatgatcactagcctctccaaggatcagcagatcggagagaagatctttgccagcattgctccttccatctatggtcatgaagacatcaagagaggcctggctctggccctgttcggaggggagcccaaaaacccaggtggcaagcacaaggtacgtggtgatatcaacgtgctcttgtgcggagaccctggcacagcgaagtcgcagtttctcaagtatattgagaaagtgtccagccgagccatcttcaccactggccagggggcgtcggctgtgggcctcacggcgtatgtccagcggcaccctgtcagcagggagtggaccttggaggctggggccctggttctggctgaccgaggagtgtgtctcattgatgaatttgacaagatgaatgaccaggacagaaccagcatccatgaggccatggagcaacagagcatctccatctcgaaggctggcatcgtcacctccctgcaggctcgctgcacggtcattgctgccgccaaccccataggagggcgctacgacccctcgctgactttctctgagaacgtggacctcacagagcccatcatctcacgctttgacatcctgtgtgtggtgagggacaccrtggacccagtccaggacgagatgctggcccgcttcgtggtgggcagccacgtcagacaccaccccagcaacaaggaggaggaggggctggccaatggcagcgctgctgagcccgccatgcccaacacgtatggcgtggagcccctgccccaggaggtcctgaagaagtacatcatctacrccaaggagagggtccacccgaagctcaaccagatggaccaggacaaggtggccaagatgtacagtgacctgaggaaagaatctatggcgacaggcagcatccccattacggtgcggcacatcgagtccatgatccgcatggcggaggcccacgcgcgcatccatctgcgggactatgtgatcgaagacgacgtcaacatggccatccgcgtgatgctggagagcttcatagacacacagaagttcagcgtcatgcgcagcatgcgcaagacttttgcccgctacctttcattccggcgtgacaacaatgagctgttgctcttcatactgaagcagttagtggcagagcaggtgacatatcagcgcaaccgctttggggcccagcaggacactattgaggtccctgagaaggacttggtggataaggctcgtcagatcaacatccacaacctctctgcattttatgacagtgagctcttcaggatgaacaagttcagccacgayctgaaaaggaaaatgatcctgcagcagttctgaggccctatgccatccataaggattccttgggattctggtttggggtggtcagtgccctctgtgctttatggacacaaaaccagagcacttgatgaactcggggtactagggtcagggcttatagcaggatgtctggctgcacctggcatgactgtttgtttctccaagcctgctttgtgcttctcacctttgggtgggatgccttgccagtgtgtcttacttggttgctgaacatcttgccacctccgagtgctttgtctccactcagtaccttggatcagagctgctgagttcaggatgcctgcgtgtggtttaggtgttagccttcttacatggatgtcaggagagctgctgccctcttggcgtgagttgcgtattcaggctgcttttgctgcctttggccagagagctggttgaagatgtttgtaatcgttttcagtctcctgcaggtttctgtgcccctgtggtggaagagggcacgacagtgccagcgcagcgttctgggctcctcagtcgcaggrgtgggatgtgagtcatgcggattatccactcgccacagttatcagctgccattgctccctgtctgtttccccactctcttatttgtgcattcggtttggtttctgtagttttaatttttaataaagttgaataaaatataaa

SEQ ID NO: 6689 - DNA, 1434 bp, Homo sapiens
gagggackcgccggagcgggaccgacgggaccgagcgagcgaccgacgcgccacccgccgacgcctcagccgcttggggcccgcacggaccctctacttcagtgtagaatgagccaaggagactcaaacccagcagctattccgcatgcagcagaagatattcaaggagatgaccgatggatgtctcagcacaacagatttgttttggactgtaaagacaaagagcctgatgtactgttcgtgggagactccatggtgcagttaatgcagcaatatgagatatggcgagagcttttttccccacttcatgcactgaattttggaattgggggagatacaacaagacatgttttgtggagactaaagaatggagaactggagaatattaagcctaaggtcattgttgtctgggtaggaacaaataaccacgaaaatacagcagaagaagtagcaggtgggatcgaggccattgtacaacttatcaacacaaggcagccacaggccaaaatcattgtattgggtttgttacctcgaggtgagaaacccaatcctttgaggcaaaagaacgccaaggtgaaccaactcctcaaggtttcgctgccgaagcttgccaacgtgcagctcctggataccgacgggggttttgtgcactcggacggtgccatctcctgccacgacatgtttgattttctgcatctgacaggagggggctatgcaaagatctgcaaacccctgcatgaactgatcatgcagttgttggaggaaacacctgaggagaaacaaaccaccattgcctgactggctcttatcagtgttaatagcatctcagcttcctcagatcagttctatcactggcactacagaatccttctctttcttaaggcactttgcattgtagaatgttcctggatgttcatatctagtgtttgaaggggaggagggatttaaactggtcctgtacatagaaggtttgtttgacagaggagaaaaattagccaaggaagattgttgtttaaattcatttgaaaccagaaggggactttttagttgtatgtgtaacacattcattgaattattatcactgttttcttgggacaacatcaagcctaaatactgaacaatatgaagattcttttcttggcctttctgtggattatgtcatatataataattatcagaatcattctacttggctttaaaacatgttttctccaatttttttaaggttcataatttagccttttgtttttatgttgcttagattcttatgtatactgaatattttattaacatgtagcatcaggttgaacatgcttgtcattgatatatggaagatgctatagttagaagtgaatttgttctgctttcttaatcttttccatgcttagcagtgaaaaacaggttttgccccagtagagggattctttggagggt

SEQ ID NO: 6690 - DNA, 3439 bp, Homo sapiens
cattgraatggcactcagggcaaaggcagaggtgtrcatggcagtgccctggctgtccctgyaaagggcacaggcactgggcacgagagccgcccgggtccccaggacagtgctgccstttgaagccatgycccrgcgtccaggcaacaggtggctgaggctgctgcagatctggagggagcagggttatgagsacctgcacctggaagtacaccagaccttccaggaactrgggcccattttcaggtaygayttgggaggagcaggcatggtgtgtgtgatgctgccggaggaygtggagaagctgcaacaggtggacagcctgcatccccacaggatgagcctggagccctrggtggcctacagacaacatcgtgggcacaaatgtggcgtgttcttgytgaatgggcctgaatggcgcttcaaccgattgcggctgaatccagaagtgctgtcgcccaacgctgtgcagaggttcctcccgatsgtggatgcagtggccagggacttctcccaggccctgargaagaaggtgctgcagaacgcccgggggagcctgaccctggacgtccagcccagcatcttccactacaccatagaagccagcaacttggctctttttggagagcggctgggcctggttggccacagccccagttctgccagcctgaacttcctccatgccctggaggtcatgttcaaatccaccgtccagctcatgttcatgcccaggagcctgtctcgctrgaycagccccaaggtgtggaaggagcactttgaggcctgggactgcatcttccagtacsrcgacaactgtatccagaaaatctaycaggaactggccttcarccgccctcaacagtacaccagcatcgtggcrgagstcctgttgaatgcggaactgtcgccagatgccatcaaggccaactctatggaactcactgcagggagcgtggacacgacggtgtttcccttgctgatgacgctctttgagctggctcggaaccccaacgtgcagyaggccctgmgccaggagagcctggccgccrcagccagcatcagtgaacatcccyagaaggcaaccaccgagctgsccttgctgcgtgcggccctcaaggrgaccttgcrgctctaccctgtgggtctgtttytggagcgagtggygagctcagacttggtgcttcagaactaccacatcccagctgggacattggtgcrsgtkttcctctactckctgggtcgcaacsccgccttgttcccgaggcctgagcgctakaacccccagcrctggctagacatcaggggctccggcaggaacttcyaccacgkgccctttggctttggcatgyrccagtgcctygggcggcgcctggcagaggcagagatgctgctgctgctgcaccatgtgctgaaacacctccaggtggagacactaacycaagaggacataaagatggtctacagcttcatattgaggcccagcatgttccccctcctcaccttcagagccatcaactaatcacgtctctgcacccagggtcccagcctggccaccagcctccctttctgcctgaccccaggccacccctcttctctcccacatgcacagcttcctgagtcacccctctgtctaaccagccccagcacaaayggaactcccgagggcctctaggaccagggtttgccaggctaagcagcaatgccagggcacagctggggaagatctkgctgaccttgtccccagccccacctggccctttctccagcaagcactgtcctctgggcagtttgcccccatccctcccagtgctggctccaggctcctcgtgtggccatrcaagggtgctgtggttttgtcccttgccttcctgcctagtctcacatgtccctgttcctcttcccctggccagggcccctgcgcagactgtcagagtcattaagcgggatcccagcatctcagagtccagtcmagttccctcctgcagcctgmcccctaggcagctcgagcatgccctgagctctctgaaagttgtcrccctggaatasgrtcctgcagggtagamtaaaaaggcccctgtggtcacttrtcctgacatccccattttcaagtgatacaactgagtctcgagggrcgtgtgttccccagctgatcrtgtcagcctcrtgccccaggcctcrtctttcatggaccaggycttgttccagsagtgrgygttgggtcctctgcttcctgwgctgtcccctggrgaaggtcccraggatgctgtcaggagatggaagagtcatgtggggtgggaacctggggtgtggttccagaaatgtttttggcaacaggagagacaggattgggccaacaaggactcagacgagttttattgactcatttctctggttgatacggagccatgtcatgtgccacgacctggggtgggcacagggaggctgcagttycctrcgtgaacctgccttgggcctcatctgctcctagcccagcagagagagttgacccctcctgaactggccactccccagtgctccygtgcagggakaggaagcacccagtttgagagtgtacccagccagactgtctttatctccatggattttcatcagggcaaagatcacagcagccagctcctggtggctgatgaggatcagagcatttgttcccccatgccctgcaggactcagcctgtacagggagatgaagtgccccaggttgggagcacacctagctagagttatttgtgttaatctattcaggatgctctaagaaaacgccatagactgggttgctgacaaacatcagaattctatttctcatggttctgaaggcttagaaggctaagatcaaggtgtcagcaggttctgtgtctggtgaggacccacctcttgtttcatagataaaaccttcttgctgtgtcctcacatggtggaaaagggcaagacagctcacagagacctyttttataaggacgccagttccattcaagagggcactgcctgcattcccttcccccctcaaaggccckgccctgctattatcgtcaccttggtgactagatttcagcctatgaattctggaggcggacacaaaaattcagattaaactactctgcttctgtttctctaaaatctacatccttctcatatacaaaatacatgcatttctccccagtagccccaaatatcaactcattttagcatcaactttaaaattgtagtccaaagtgtgatttaaatgttatctgagtcaaacatgggtaagactcaaggtacaatttatcctgagtccaactgttcttgctgcgaacctakgaaatcaaacatgttatgtgcttccaaaatacagtggttggagaggcataggataaacattcccattccagaaaggagaaacaggaaagaagaaaggagtaacaagtttcaagcaactcca

SEQ ID NO: 6691 - DNA, 3387 bp, Homo sapiens
cattgraatggcactcagggcaaaggcagaggtgtrcatggcagtgccctggctgtccctgyaaagggcacaggcactgggcacgagagccgcccgggtccccaggacagtgctgccstttgaagccatgycccrgcgtccaggcaacaggtggctgaggctgctgcagatctggagggagcagggttatgagsacctgcacctggaagtacaccagaccttccaggaactrgggcccattttcaggtaygayttgggaggagcaggcatggtgtgtgtgatgctgccggaggaygtggagaagctgcaacaggtggacagcctgcatccccacaggatgagcctggagccctrggtggcctacagacaacatcgtgggcacaaatgtggcgtgttcttgytgaatgggcctgaatggcgcttcaaccgattgcggctgaatccagaagtgctgtcgcccaacgctgtgcagaggttcctcccgatsgtggatgcagtggccagggacttctcccaggccctgargaagaaggtgctgcagaacgcccgggggagcctgaccctggacgtccagcccagcatcttccactacaccatagaagccagcaacttggctctttttggagagcggctgggcctggttggccacagccccagttctgccagcctgaacttcctccatgccctggaggtcatgttcaaatccaccgtccagctcatgttcatgcccaggagcctgtctcgctrgaycagccccaaggtgtggaaggagcactttgaggcctgggactgcatcttccagtacsrcgacaactgtatccagaaaatctaycaggaactggccttcarccgccctcaacagtacaccagcatcgtggcrgagstcctgttgaatgcggaactgtcgccagatgccatcaaggccaactctatggaactcactgcagggagcgtggacacgacggtgtttcccttgctgatgacgctctttgagctggctcggaaccccaacgtgcagyaggccctgmgccaggagagcctggccgccrcagccagcatcagtgaacatcccyagaaggcaaccaccgagctgsccttgctgcgtgcggccctcaaggrgaccttgcrgctctaccctgtgggtctgtttytggagcgagtggygagctcagacttggtgcttcagaactaccacatcccagctgggacattggtgcrsgtkttcctctactckctgggtcgcaacsccgccttgttcccgaggcctgagcgctakaacccccagcrctggctagacatcaggggctccggcaggaacttcyaccacgkgccctttggctttggcatgyrccagtgcctygggcggcgcctggcagaggcagagatgctgctgctgctgcaccatgtgctgaaacacctccaggtggagacactaacycaagaggacataaagatggtctacagcttcatattgaggcccagcatgttccccctcctcaccttcagagccatcaactaatcacgtctctgcacccagggtcccagcctggccaccagcctccctttctgcctgaccccaggccacccctcttctctcccacatgcacagcttcctgagtcacccctctgtctaaccagccccagcacaaayggaactcccgagggcctctaggaccagggtttgccaggctaagcagcaatgccagggcacagctggggaagatctkgctgaccttgtccccagccccacctggccctttctccagcaagcactgtcctctgggcagtttgcccccatccctcccagtgctggctccaggctcctcgtgtggccatrcaagggtgctgtggttttgtcccttgccttcctgcctagtctcacatgtccctgttcctcttcccctggccagggcccctgcgcagactgtcagagtcattaagcgggatcccagcatctcagagtccagtcmagttccctcctgcagcctgmcccctaggcagctcgagcatgccctgagctctctgaaagttgtcrccctggaatasgrtcctgcagggtagamtaaaaagtctcgagggrcgtgtgttccccagctgatcrtgtcagcctcrtgccccaggcctcrtctttcatggaccaggycttgttccagsagtgrgygttgggtcctctgcttcctgwgctgtcccctggrgaaggtcccraggatgctgtcaggagatggaagagtcatgtggggtgggaacctggggtgtggttccagaaatgtttttggcaacaggagagacaggattgggccaacaaggactcagacgagttttattgactcatttctctggttgatacggagccatgtcatgtgccacgacctggggtgggcacagggaggctgcagttycctrcgtgaacctgccttgggcctcatctgctcctagcccagcagagagagttgacccctcctgaactggccactccccagtgctccygtgcagggakaggaagcacccagtttgagagtgtacccagccagactgtctttatctccatggattttcatcagggcaaagatcacagcagccagctcctggtggctgatgaggatcagagcatttgttcccccatgccctgcaggactcagcctgtacagggagatgaagtgccccaggttgggagcacacctagctagagttatttgtgttaatctattcaggatgctctaagaaaacgccatagactgggttgctgacaaacatcagaattctatttctcatggttctgaaggcttagaaggctaagatcaaggtgtcagcaggttctgtgtctggtgaggacccacctcttgtttcatagataaaaccttcttgctgtgtcctcacatggtggaaaagggcaagacagctcacagagacctyttttataaggacgccagttccattcaagagggcactgcctgcattcccttcccccctcaaaggccckgccctgctattatcgtcaccttggtgactagatttcagcctatgaattctggaggcggacacaaaaattcagattaaactactctgcttctgtttctctaaaatctacatccttctcatatacaaaatacatgcatttctccccagtagccccaaatatcaactcattttagcatcaactttaaaattgtagtccaaagtgtgatttaaatgttatctgagtcaaacatgggtaagactcaaggtacaatttatcctgagtccaactgttcttgctgcgaacctakgaaatcaaacatgttatgtgcttccaaaatacagtggttggagaggcataggataaacattcccattccagaaaggagaaacaggaaagaagaaaggagtaacaagtttcaagcaactcca

SEQ ID NO: 6692 - DNA, 3492 bp, Homo sapiens
cattgraatggcactcagggcaaaggcagaggtgtrcatggcagtgccctggctgtccctgyaaagggcacaggcactgggcacgagagccgcccgggtccccaggacagtgctgccstttgaagccatgycccrgcgtccaggcaacaggtggctgaggctgctgcagatctggagggagcagggttatgagsacctgcacctggaagtacaccagaccttccaggaactrgggcccattttcaggtaygayttgggaggagcaggcatggtgtgtgtgatgctgccggaggaygtggagaagctgcaacaggtggacagcctgcatccccacaggatgagcctggagccctrggtggcctacagacaacatcgtgggcacaaatgtggcgtgttcttgytgaatgggcctgaatggcgcttcaaccgattgcggctgaatccagaagtgctgtcgcccaacgctgtgcagaggttcctcccgatsgtggatgcagtggccagggacttctcccaggccctgargaagaaggtgctgcagaacgcccgggggagcctgaccctggacgtccagcccagcatcttccactacaccatagaagccagcaacttggctctttttggagagcggctgggcctggttggccacagccccagttctgccagcctgaacttcctccatgccctggaggtcatgttcaaatccaccgtccagctcatgttcatgcccaggagcctgtctcgctrgaycagccccaaggtgtggaaggagcactttgaggcctgggactgcatcttccagtacsrcgacaactgtatccagaaaatctaycaggaactggccttcarccgccctcaacagtacaccagcatcgtggcrgagstcctgttgaatgcggaactgtcgccagatgccatcaaggccaactctatggaactcactgcagggagcgtggacacgacggtgtttcccttgctgatgacgctctttgagctggctcggaaccccaacgtgcagyaggccctgmgccaggagagcctggccgccrcagccagcatcagtgaacatcccyagaaggcaaccaccgagctgsccttgctgcgtgcggccctcaaggrgaccttgcrgctctaccctgtgggtctgtttytggagcgagtggygagctcagacttggtgcttcagaactaccacatcccagctgggacattggtgcrsgtkttcctctactckctgggtcgcaacsccgccttgttcccgaggcctgagcgctakaacccccagcrctggctagacatcaggggctccggcaggaacttcyaccacgkgccctttggctttggcatgyrccagtgcctygggcggcgcctggcagaggcagagatgctgctgctgctgcaccatgtgctgaaacacctccaggtggagacactaacycaagaggacataaagatggtctacagcttcatattgaggcccagcatgttccccctcctcaccttcagagccatcaactaatcacgtctctgcacccagggtcccagcctggccaccagcctccctttctgcctgaccccaggccacccctcttctctcccacatgcacagcttcctgagtcacccctctgtctaaccagccccagcacaaayggaactcccgagggcctctaggaccagggtttgccaggctaagcagcaatgccagggcacagctggggaagatctkgctgaccttgtccccagccccacctggccctttctccagcaagcactgtcctctgggcagtttgcccccatccctcccagtgctggctccaggctcctcgtgtggccatrcaagggtgctgtggttttgtcccttgccttcctgcctagtctcacatgtccctgttcctcttcccctggccagggcccctgcgcagactgtcagagtcattaagcgggatcccagcatctcagagtccagtcmagttccctcctgcagcctgmcccctaggcagctcgagcatgccctgagctctctgaaagttgtcrccctggaatasgrtcctgcagggtagamtaaaaaggcccctgtggtcacttrtcctgacatccccattttcaagtgatacaactgagtctcgagggrcgtgtgttccccagctgatcrtgtcagcctcrtgccccaggcctcrtctttcatggaccaggycttgttccagsagtgrgygttgggtcctctgcttcctgwgctgtcccctggrgaaggtcccraggatgctgtcaggagatggaagagtcatgtggggtgggaacctggggtgtggttccagaaatgtttttggcaacaggagagacaggattgggccaacaaggactcagacgagttttattgactcatttctctggttgatacggagccatgtcatgtgccacgacctggggtgggcacagggaggctgcagttycctrcgtgaacctgccttgggcctcatctgctcctagcccagcagagagagttgacccctcctgaactggccactccccagtgctccygtgcagggakaggaagcacccagtttgagagtgtacccagccagactgtctttatctccatggattttcatcagggcaaagatcacagcagccagctcctggtggctgatgaggatcagagcatttgttcccccatgaaaggggaaatccctatggcatcattccagtggtggtcagtagatccaggacgccctgcaggactcagcctgtacagggagatgaagtgccccaggttgggagcacacctagctagagttatttgtgttaatctattcaggatgctctaagaaaacgccatagactgggttgctgacaaacatcagaattctatttctcatggttctgaaggcttagaaggctaagatcaaggtgtcagcaggttctgtgtctggtgaggacccacctcttgtttcatagataaaaccttcttgctgtgtcctcacatggtggaaaagggcaagacagctcacagagacctyttttataaggacgccagttccattcaagagggcactgcctgcattcccttcccccctcaaaggccckgccctgctattatcgtcaccttggtgactagatttcagcctatgaattctggaggcggacacaaaaattcagattaaactactctgcttctgtttctctaaaatctacatccttctcatatacaaaatacatgcatttctccccagtagccccaaatatcaactcattttagcatcaactttaaaattgtagtccaaagtgtgatttaaatgttatctgagtcaaacatgggtaagactcaaggtacaatttatcctgagtccaactgttcttgctgcgaacctakgaaatcaaacatgttatgtgcttccaaaatacagtggttggagaggcataggataaacattcccattccagaaaggagaaacaggaaagaagaaaggagtaacaagtttcaagcaactcca

SEQ ID NO: 6693 - DNA, 1080 bp, Homo sapiens
aattaaatttctttaaaagacataggactactccagttatctttttcttcctgggtgagctttggttgtttatgtctctcaagaaatgtcatttcagttgtcaaatttattagcataaatttattcatgtatttatgtattttaatataaaacagtctaaagtccaccaatgtataaaacaatttttcaaataaatattttgaaaattaggctttctgctcctcccgtttgacaacagcatcttcttgtgcagggccagctgcacccctgggacaccatggtgaaggtgaaggccagggtaaatgaatttagttgtactggtcacctggtcaccagggctgcttttaactctggcaaagtggatattgttgccatcaatgatccctttgttgacctcaactacatggtctacatgttctagtatgattccacccatagcaagttccacagcatcatcaagcctgagaatgggaaacttgtcatcaatggaaatgccatcatcatcttccaagagagagatcccaccaaaatcaaatggggtgatgctggcactaattacatcatggagtccactggtgtcttcactaccatgaagaaggctgggactcatttagacgggggaaccaaaaaggtcatcatctctgccccctctgtcgacgtccccatgtttgtaatgggtgtgaaccatgagaagtacaaaaacggcctcaagattgtcagtaatgcctyctgtaccaccaattgctcagttcccctggccaaggtcatccatgacaattctggcatcatggaagaattcatgaccacagtccatgccatcacggacacccagaagactgtggatggcccctctgggaaactatggcacaatggctgtggaattttccagaacatcatgcttgcatctactggcactgacaaggctgtgggtaaggtcatccctgagctgaacaggaaggtcactggcatgatcttccatgtctcccaccaccactgtgtctgtcagtcatggatctgatctgctatctagaraaacctggcaaatataatgacatcaagaaggtagtgaaacaggctacg

SEQ ID NO: 6694 - DNA, 1985 bp, Homo sapiens
tctggctggactgccgcggaggaggcgagaaggaatccgacgctggggggcttgctcgggcggcagcgactgctgctgcggatgggagsgggccggctcggcgcgcccatggagcgccacggcagggcttccgccacctccgtctcgtcggctggggagyaggcggccggggaccccgaagggcggcggcaggagccactgcggcgccgggcgagcagcgcgtcggtgcccgcggtcggggcctcggctgagggcacgaggcgggatcgactgggctcttasagcggccccacctcggtctcccgccagcgcgtcgaaagcctgaggaaaaagcggccgctttttccatggtttggactggatatcggtggaactctggtcaagctggtatattttgaacccaaagacatcrctgctgaagaagaagaggaagaagtggaaagtcttaaaagcattcggaagtacctgacctccaatgtggcttatgggtctacaggcattygggacgtgcacctcgagctgaaggacctgactctgtgtggaygcaaaggcaatstgcactttataygctttcccactcatgacatgcctgcttttattcaaatgggcagagataaaaacttctcgagtctccacactgtcttttgtgccactggaggtggagcgtacaaatttgagcaggattttctcacaataggtgatcttcagctttgcaaactggatgaactagattgcttgatcwaaggaattttatacattgacycagtcggattcartggacggtcacagtgctattactttgaaaaccctgctgattctgaaaagtgtcagaagttaccatttgatttgaaaaatccgtatcctctgcttctggtgaacattggctcaggggttagcatcttagcagtatattccaaagataattacaaacgggtcacaggtactagtcttggaggaggaactttttttggtctctgctgtcttcttactggctgtaccacttttgaagaagctcttgaaatggcatctcgtggagatagcaccaaagtggataaactagtaygagatatttatggaggggactatgagaggtttggactgccaggctgggctgtggcttcaagctttggaaacatgatgagcaaggagaagcgagaggctgtcagtaaagaggacctggccagagcgactttgatcaccatcaccaacaacattggctcaatagcaagaatgtgtgcccttaatgaaaacattaaccaggtggtatttgttggaaatttcttgagaattaatacgatcgccatgcggcttttggcatatgctttggattattggtccaaggggcagttgaaagcacttttttcggaacacgagggttattttggagctgttggagcactccttgagctgttgaagatcccgtgatcattacctggggaggggttcctgaaaccttccacaatgggatctgtggactttcatttttttaagagacttactcaatttcatgactgtactacctgaaacaaagtgagaaaggacaggtgtatttttctaagtcatcaagataaatccttaagaattcagtctaaattagcaaccaggaaggaaaaatatattaaaaacaacaaaaaagtggcacatgtccaggcagtgtgaggatttgctgtatataagttgcctgctttgtatttttgaaatctctgcatcactcattggaagtgcttctgaagagagctgctctgtgttcagttgactggttttgtgtcctgtttgaacttgctgaatgtaaggcaggctactatgcgttataatctaatcacaatttgtcaatatggtcttggcaatcatctgtgcattactctggtttgcattaagcctgtgtgtgaacttactgtaaaacatgttttatttcaaggttctgcaaaattaattgggcaggttaattgtgtacctgaaacttaacaagcagtttttggaagggc

SEQ ID NO: 6695 - DNA, 1711 bp, Homo sapiens
atgctgggggaggggctggcggcctcgacggcagctgcggaactaggccgagggacaaaggctaagtttttccatggtttggactggatatcggtggaactctggtcaagctggtatattttgaacccaaagacatcrctgctgaagaagaagaggaagaagtggaaagtcttaaaagcattcggaagtacctgacctccaatgtggcttatgggtctacaggcattygggacgtgcacctcgagctgaaggacctgactctgtgtggaygcaaaggcaatstgcactttataygctttcccactcatgacatgcctgcttttattcaaatgggcagagataaaaacttctcgagtctccacactgtcttttgtgccactggaggtggagcgtacaaatttgagcaggattttctcacaataggtgatcttcagctttgcaaactggatgaactagattgcttgatcwaaggaattttatacattgacycagtcggattcartggacggtcacagtgctattactttgaaaaccctgctgattctgaaaagtgtcagaagttaccatttgatttgaaaaatccgtatcctctgcttctggtgaacattggctcaggggttagcatcttagcagtatattccaaagataattacaaacgggtcacaggtactagtcttggaggaggaactttttttggtctctgctgtcttcttactggctgtaccacttttgaagaagctcttgaaatggcatctcgtggagatagcaccaaagtggataaactagtaygagatatttatggaggggactatgagaggtttggactgccaggctgggctgtggcttcaagctttggaaacatgatgagcaaggagaagcgagaggctgtcagtaaagaggacctggccagagcgactttgatcaccatcaccaacaacattggctcaatagcaagaatgtgtgcccttaatgaaaacattaaccaggtggtatttgttggaaatttcttgagaattaatacgatcgccatgcggcttttggcatatgctttggattattggtccaaggggcagttgaaagcacttttttcggaacacgagggttattttggagctgttggagcactccttgagctgttgaagatcccgtgatcattacctggggaggggttcctgaaaccttccacaatgggatctgtggactttcatttttttaagagacttactcaatttcatgactgtactacctgaaacaaagtgagaaaggacaggtgtatttttctaagtcatcaagataaatccttaagaattcagtctaaattagcaaccaggaaggaaaaatatattaaaaacaacaaaaaagtggcacatgtccaggcagtgtgaggatttgctgtatataagttgcctgctttgtatttttgaaatctctgcatcactcattggaagtgcttctgaagagagctgctctgtgttcagttgactggttttgtgtcctgtttgaacttgctgaatgtaaggcaggctactatgcgttataatctaatcacaatttgtcaatatggtcttggcaatcatctgtgcattactctggtttgcattaagcctgtgtgtgaacttactgtaaaacatgttttatttcaaggttctgcaaaattaattgggcaggttaattgtgtacctgaaacttaacaagcagtttttggaagggc

SEQ ID NO: 6696 - DNA, 2159 bp, Homo sapiens
catttaatcgccgttttctgttcttggacatcaaagctggggcttaggcgctgtgctggggtcgcggcggcgcgggcgctgggggagaggagtgtggtcttcagcatagagtgagcttctagtgacacgagctggagggaaagaggaagtgcatcakgacggctcgtccaatggacaagaagggctgaactgatggaaggaatgctgttagcctgagactcaggaagacaacttctgcagggtcactccctggcttctggaggaaagagaaggagggcagtgctccagtggtacagaagtgagacataatggaatcaggcttcacctccaaggacacctatctaagccattttaaccctcgggattacctagaraaatattacaagtttggttctaggcactctgcagaaagcmagattcttaagcaccttctgaaaaatcttttcaagatattctgcctagacggtgtgaagggagacctgctgattgacatcggctctggccccactatctatcagctcctctctgcttgtgaatcctttaaggagatcgtcgtcactgactactcagaccagaacctgcaggagctggagaagtggctgaagaaagagccagaggcctttgactggtccccagtggtgacctatgtgtgtgatcttgaagggaacagagtcaagggtccagagaaggaggagaagttgagacaggcggtcaagcaggtgctgaagtgtgatgtgactcagagccagccactgggggccgtccccttacccccggctgactgcgtgctcagcacactgtgtctggatgccgcctgcccagacctccccacctactgcagggcgctcaggaacctcggcagcctactgaagccagggggcttcctggtgatcatggatgcgctcaagagcagctactacatgattggtgagcagaagttctccagcctccccctgggccgggaggcagtagaggctgctgtgaaagaggctggctacacaatcgaatggtttgaggtgatctcgcaaagttattcttccmccatggccaacaacgaaggacttttctccctggtggcgaggaagctgagcagacccctgtgatgcctgtgacctcaattaaagcaattcctttgacctgtccagttgactttagtccttgtttctaactgccaagtcatgtgctgagtagaggctcagtggttggggcccartggttcatctaggacgggactagagaggtcagtctacaagcaatccattgaccacttacttggtgctgcacacaaatgttggtgctatgggacccaaagatgagcaattagtattccagtcttcattgcctgtrcttacaaaagaagacctcacttccctaaacatctagttatggcggctcaagcccgtacctgcctacagagaagtgtctgcagttactcactattagtttcctaagggggcactgctggctccttctctcccaggaatgggcttctcctattctttaactcttgccttctccctggagaggctaccaaaccctggcctctgccgctgttcaggctgccatgtgggtatagctgtttgctagactccactctggcctcaggggccagagaacagctgtccagcatttctgttcatcccagcaatccaaaaaaaaatttttttaagctacaaagatcactccattttcaaattcagactctgccacttattagctgtttctcattaggcaagttatataaccttgcagtgcctcactttcctcatctataaaatgagattaaaatagtctttttattaagagaattaaagtgaattgtggccaggcactgtggctcatgcctgtaatcccagcgctttgggaggctgaggcagacagattgcttgagctcagaagttcgagactggcctggggaacatgcaaaaaccctgtctgtattaaaaatacaaaaaaattagctaggtgtggcggcatatgcctgtggtcccagctactcaggaggctgaagtgggaggatggcttgagcccgggaggcggaggttgcaatgaactgagatcgcaccactgtgttccagacagagtgcgatgctgtctcgaaaaaagtaaaataataaataaataataaataaaataaaataaagtgaattgttacatgt

SEQ ID NO: 6697 - DNA, 2908 bp, Homo sapiens
catttaatcgccgttttctgttcttggacatcaaagctggggcttaggcgctgtgctggggtcgcggcggcgcgggcgctgggggagaggagtgtggtcttcagcatagagtgagcttctagtgacacgagctggagggaaagaggaagtgcatcakgacggctcgtccaatggacaaggaacgtgtgaacagaggaaacctgtgccctttccctgggcatagcctagaaagtgtcaagactccagactcatctctattctcaatgtggtgctggagcagaagcaatgctttgatggttgtttcacagcccagagtatcgtgcttgccagacactgggtcatggcagtggtcggtgaagctgcagttgcctagggcagggatggagagagagtctgggcatgaggagagggtctcgggatgtttggctggactagattttacagaaagccttatccaggcttttaaaattactctttccagacttcatctgagactccttcttcagccaacattccttagccctgaatacatttcctatcctcatctttcccttctttttttycctttcttttacatgtttaaatttaaaccattcttcgtgaccccttttcttgggagattcatggcaagaacgagaagaatgatggtgcttgttrggggatgtcctgtctctctgaactttggggtcctatgcattaaataattttcctgacgagctcwagtgctccctctggtctacaatccctggcggctggccttcatcccttgggcaagcattgcatacagctcatggccctccctctaccataccctccacccccgttcgcctaagctcccttctccgggaatttcatcatttcctagaacagccagaacatttgtggtctatttctctgttagtgtttaaccaaccatctgttctaaaagaagggctgaactgatggaaggaatgctgttagcctgagactcaggaagacaacttctgcagggtcactccctggcttctggaggaaagagaaggagggcagtgctccagtggtacagaagtgagacataatggaatcaggcttcacctccaaggacacctatctaagccattttaaccctcgggattacctagaraaatattacaagtttggttctaggcactctgcagaaagcmagattcttaagcaccttctgaaaaatcttttcaagatattctgcctagacggtgtgaagggagacctgctgattgacatcggctctggccccactatctatcagctcctctctgcttgtgaatcctttaaggagatcgtcgtcactgactactcagaccagaacctgcaggagctggagaagtggctgaagaaagagccagaggcctttgactggtccccagtggtgacctatgtgtgtgatcttgaagggaacagagtcaagggtccagagaaggaggagaagttgagacaggcggtcaagcaggtgctgaagtgtgatgtgactcagagccagccactgggggccgtccccttacccccggctgactgcgtgctcagcacactgtgtctggatgccgcctgcccagacctccccacctactgcagggcgctcaggaacctcggcagcctactgaagccagggggcttcctggtgatcatggatgcgctcaagagcagctactacatgattggtgagcagaagttctccagcctccccctgggccgggaggcagtagaggctgctgtgaaagaggctggctacacaatcgaatggtttgaggtgatctcgcaaagttattcttccmccatggccaacaacgaaggacttttctccctggtggcgaggaagctgagcagacccctgtgatgcctgtgacctcaattaaagcaattcctttgacctgtccagttgactttagtccttgtttctaactgccaagtcatgtgctgagtagaggctcagtggttggggcccartggttcatctaggacgggactagagaggtcagtctacaagcaatccattgaccacttacttggtgctgcacacaaatgttggtgctatgggacccaaagatgagcaattagtattccagtcttcattgcctgtrcttacaaaagaagacctcacttccctaaacatctagttatggcggctcaagcccgtacctgcctacagagaagtgtctgcagttactcactattagtttcctaagggggcactgctggctccttctctcccaggaatgggcttctcctattctttaactcttgccttctccctggagaggctaccaaaccctggcctctgccgctgttcaggctgccatgtgggtatagctgtttgctagactccactctggcctcaggggccagagaacagctgtccagcatttctgttcatcccagcaatccaaaaaaaaatttttttaagctacaaagatcactccattttcaaattcagactctgccacttattagctgtttctcattaggcaagttatataaccttgcagtgcctcactttcctcatctataaaatgagattaaaatagtctttttattaagagaattaaagtgaattgtggccaggcactgtggctcatgcctgtaatcccagcgctttgggaggctgaggcagacagattgcttgagctcagaagttcgagactggcctggggaacatgcaaaaaccctgtctgtattaaaaatacaaaaaaattagctaggtgtggcggcatatgcctgtggtcccagctactcaggaggctgaagtgggaggatggcttgagcccgggaggcggaggttgcaatgaactgagatcgcaccactgtgttccagacagagtgcgatgctgtctcgaaaaaagtaaaataataaataaataataaataaaataaaataaagtgaattgttacatgt

SEQ ID NO: 6698 - DNA, 1980 bp, Homo sapiens
aagggctgaactgatggaaggaatgctgttagcctgagactcaggaagacaacttctgcagggtcactccctggcttctggaggaaagagaaggagggcagtgctccagtggtacagaagtgagacataatggaatcaggcttcacctccaaggacacctatctaagccattttaaccctcgggattacctagaraaatattacaagtttggttctaggcactctgcagaaagcmagattcttaagcaccttctgaaaaatcttttcaagatattctgcctagacggtgtgaagggagacctgctgattgacatcggctctggccccactatctatcagctcctctctgcttgtgaatcctttaaggagatcgtcgtcactgactactcagaccagaacctgcaggagctggagaagtggctgaagaaagagccagaggcctttgactggtccccagtggtgacctatgtgtgtgatcttgaagggaacagagtcaagggtccagagaaggaggagaagttgagacaggcggtcaagcaggtgctgaagtgtgatgtgactcagagccagccactgggggccgtccccttacccccggctgactgcgtgctcagcacactgtgtctggatgccgcctgcccagacctccccacctactgcagggcgctcaggaacctcggcagcctactgaagccagggggcttcctggtgatcatggatgcgctcaagagcagctactacatgattggtgagcagaagttctccagcctccccctgggccgggaggcagtagaggctgctgtgaaagaggctggctacacaatcgaatggtttgaggtgatctcgcaaagttattcttccmccatggccaacaacgaaggacttttctccctggtggcgaggaagctgagcagacccctgtgatgcctgtgacctcaattaaagcaattcctttgacctgtccagttgactttagtccttgtttctaactgccaagtcatgtgctgagtagaggctcagtggttggggcccartggttcatctaggacgggactagagaggtcagtctacaagcaatccattgaccacttacttggtgctgcacacaaatgttggtgctatgggacccaaagatgagcaattagtattccagtcttcattgcctgtrcttacaaaagaagacctcacttccctaaacatctagttatggcggctcaagcccgtacctgcctacagagaagtgtctgcagttactcactattagtttcctaagggggcactgctggctccttctctcccaggaatgggcttctcctattctttaactcttgccttctccctggagaggctaccaaaccctggcctctgccgctgttcaggctgccatgtgggtatagctgtttgctagactccactctggcctcaggggccagagaacagctgtccagcatttctgttcatcccagcaatccaaaaaaaaatttttttaagctacaaagatcactccattttcaaattcagactctgccacttattagctgtttctcattaggcaagttatataaccttgcagtgcctcactttcctcatctataaaatgagattaaaatagtctttttattaagagaattaaagtgaattgtggccaggcactgtggctcatgcctgtaatcccagcgctttgggaggctgaggcagacagattgcttgagctcagaagttcgagactggcctggggaacatgcaaaaaccctgtctgtattaaaaatacaaaaaaattagctaggtgtggcggcatatgcctgtggtcccagctactcaggaggctgaagtgggaggatggcttgagcccgggaggcggaggttgcaatgaactgagatcgcaccactgtgttccagacagagtgcgatgctgtctcgaaaaaagtaaaataataaataaataataaataaaataaaataaagtgaattgttacatgt

SEQ ID NO: 6699 - DNA, 2024 bp, Homo sapiens
ttacggaagcagaaccttccttmcagtaacgtgcagatctgtggtttttctacttgaaggacacaatrttttccaaactagcacatttgcagaggtttgctgtacttagtcgcggagttcattcttcagtggcttctgctacatctgttgcaactaaaaaaacagtccaaggccctccaacctctgatgacatttttgaaagggaatataagtatggtgcacacaactaccatcctttacctgtagcccyggagagaggaaaaggtatttacttatgggatgtagaaggcagaaaatattttgacttcctgagttcttacagtgctgtcaamsaagggcattktcaccccaagattgtgaatgctctgaagagtcaagtggacaaattgaccttaacatctagagctttctataataacgtacttggtgaatatgaggagtatattactaaacttttcaactaccacaaagttcttcctatgaatacaggagtggaggctggagagactgcctgtaaactagctyktaagtggggctataccgtgaagggcattcagaaatacaaagcaaagattgtttttgcagctgggaacttctgrggtasgacgttgtctgctatctccagttccacagacccaaccagttacgatggttttggacmatttatgccgggattcgacatcattccctawaatgatctgcccgcactggagcgtgctcttcaggatccaaatgtggctgcgttcatggtagaaccaattcrgggtgaagcaggcgttgttgttcyggatccaggttrcctaatgggagtgcsagagctctgcaccaggcaccaggttctctttattgctgatgaaatacagacaggattggccaraactggtagatgrctggctgttgattatgaaaatgtcagacctgatatagtcctccttggaaaggccctttctgggggcttataccctgtgtctgcagtgctgtgtgatgatgacatcatgctgaccattaagccagggragyatgggtccacatacggtggcaatccactaggctgccgagtggccatcgcagcccttgaggttttagaagaagaaaaccttgctgaaaatgcagacaaattggrcattatcttgagaaatgaactcatgaagctaccttctgatgttgtaactgccgtaagaggaaaaggattattaaaygctattgtcattaaagaaaccaaagattgggatgcttggaaggtgtgtctacgacttcgagataatkgacytctggccaagccaacccatggcgacattatcaggtttgcgcctcygctggtgatcaaggaggatgagcttygagagtccattgaaattattaacaagaccatcttbtctttctgagggtagccagctgttttcagtggtccctgggagccagctggagacaggtggtcctgtaaaagctttattcctaatgtgggcacattccactcccatgagtcttcaaaaactttttttttgaatatatttttttcagttgatacataatagaacaacgtttatgaacctgccgtttgctttgtaaygtaactaaataatgtaatggcatctatattcagttgaagtgttttgatgtgcatgtgtacttcctaaggtgaaatgcatctatatacagacagcctctaaatcaagtccttcagtataattgatatatgtttttataatttcctcactggtataagtgtttcatatttgaaaaagttatctctgggtattgcataaaaggcttcatcttataaagtgaaatcattgttattgaattttaggaaggattaatggttaagtgtatataaaatactaatattaagtaaacttcatattggccaacaccagggttgtattctatggatgtcattattttgaattaagaattagygtttaacattcctaaattgttttgagtgcttgattataatttgtaaaaaatgtttattttcaatacttctttaaatttaaaataaagcttatatttcaaatgtc

SEQ ID NO: 6700 - DNA, 1931 bp, Homo sapiens
ttacggaagcagaaccttccttmcagtaacgtgcagatctgtggtttttctacttgaaggacacaatrttttccaaactagcacatttgcagaggtttgctgtacttagtcgcggagttcattcttcagtggcttctgctacatctgttgcaactaaaaaaacagtccaaggccctccaacctctgatgacatttttgaaagggaatataagtatggtgcacacaactaccatcctttacctgtagcccyggagagaggaaaaggtatttacttatgggatgtagaaggcagaaaatattttgacttcctgagttcttacagtgctgtcaamsaagggcattktcaccccaagattgtgaatgctctgaagagtcaagtggacaaattgaccttaacatctagagctttctataataacgtacttggtgaatatgaggagtatattactaaacttttcaactaccacaaagttcttcctatgaatacaggagtggaggctggagagactgcctgtaaactagctyktaagtggggctataccgtgaagggcattcagaaatacaaagcaaagattgtttttgcagctgggaacttctgrggtasgacgttgtctgctatctccagttccacagacccaaccagttacgatggttttggacmatttatgccgggattcgacatcattccctawaatgatctgcccgcactggagcgtgctcttcaggatccaaatgtggctgcgttcatggtagaaccaattcrgggtgaagcaggcgttgttgttcyggatccaggttrcctaatgggagtgcsagagctctgcaccaggcaccaggttctctttattgctgatgaaatacagacaggattggccaraactggtagatgrctggctgttgattatgaaaatgtcagacctgatatagtcctccttggaaaggccctttctgggggcttataccctgtgtctgcagtgctgtgtgatgatgacatcatgctgaccattaagccagggragyatgggtccacatacggtggcaatccactaggctgccgagtggccatcgcagcccttgaggttttagaagaagaaaaccttgctgaaaatgcagacaaattggrcattatcttgagaaatgaactcatgaagctaccttctgatgttgtaactgccgtaagaggaaaaggattattaaaygctattgtcattaaagaaaccaaagattgggatgcttggaaggtgtgtctacgacttcgagataatkgacytctggccaagccaacccatggcgacattatcaggtttgcgcctcygctggtgatcaaggaggatgagcttygagagtccattgaaattattaacaagaccatcttbtctttctgagggtagccagctgttttcagtggtccctgggagccagctggagacaggtggtcctgtaaaagctttattcctaatgtgggcacattccactcccatgagtcttcaaaaactttttttttgaatatatttttttcagttgatacataatagaacaacgtttatgaacctgccgtttgctttgtaaygtaactaaataatgtaatggcatctatattcagttgaagtgttttgatgtgcatgtgtacttcctaaggtgaaatgcatctatatacagacagcctctaaatcaagtccttcagcttcatcttataaagtgaaatcattgttattgaattttaggaaggattaatggttaagtgtatataaaatactaatattaagtaaacttcatattggccaacaccagggttgtattctatggatgtcattattttgaattaagaattagygtttaacattcctaaattgttttgagtgcttgattataatttgtaaaaaatgtttattttcaatacttctttaaatttaaaataaagcttatatttc

SEQ ID NO: 6701 - DNA, 2066 bp, Homo sapiens
aagttgcagtgackctccggcgtcactgttgcgcttcatagacgccgcgtgtacccggttgtcctcaggcgctgtcagatctgtggtttttctacttgaaggacacaatrttttccaaactagcacatttgcagaggtttgctgtacttagtcgcggagttcattcttcagtggcttctgctacatctgttgcaactaaaaaaacagtccaaggccctccaacctctgatgacatttttgaaagggaatataagtatggtgcacacaactaccatcctttacctgtagcccyggagagaggaaaaggtatttacttatgggatgtagaaggcagaaaatattttgacttcctgagttcttacagtgctgtcaamsaagggcattktcaccccaagattgtgaatgctctgaagagtcaagtggacaaattgaccttaacatctagagctttctataataacgtacttggtgaatatgaggagtatattactaaacttttcaactaccacaaagttcttcctatgaatacaggagtggaggctggagagactgcctgtaaactagctyktaagtggggctataccgtgaagggcattcagaaatacaaagcaaagattgtttttgcagctgggaacttctgrggtasgacgttgtctgctatctccagttccacagacccaaccagttacgatggttttggacmatttatgccgggattcgacatcattccctawaatgatctgcccgcactggagcgtgctcttcaggatccaaatgtggctgcgttcatggtagaaccaattcrgggtgaagcaggcgttgttgttcyggatccaggttrcctaatgggagtgcsagagctctgcaccaggcaccaggttctctttattgctgatgaaatacagacaggattggccaraactggtagatgrctggctgttgattatgaaaatgtcagacctgatatagtcctccttggaaaggccctttctgggggcttataccctgtgtctgcagtgctgtgtgatgatgacatcatgctgaccattaagccagggragyatgggtccacatacggtggcaatccactaggctgccgagtggccatcgcagcccttgaggttttagaagaagaaaaccttgctgaaaatgcagacaaattggrcattatcttgagaaatgaactcatgaagctaccttctgatgttgtaactgccgtaagaggaaaaggattattaaaygctattgtcattaaagaaaccaaagattgggatgcttggaaggtgtgtctacgacttcgagataatkgacytctggccaagccaacccatggcgacattatcaggtttgcgcctcygctggtgatcaaggaggatgagcttygagagtccattgaaattattaacaagaccatcttbtctttctgagggtagccagctgttttcagtggtccctgggagccagctggagacaggtggtcctgtaaaagctttattcctaatgtgggcacattccactcccatgagtcttcaaaaactttttttttgaatatatttttttcagttgatacataatagaacaacgtttatgaacctgccgtttgctttgtaaygtaactaaataatgtaatggcatctatattcagttgaagtgttttgatgtgcatgtgtacttcctaaggtgaaatgcatctatatacagacagcctctaaatcaagtccttcagtataattgatatatgtttttataatttcctcactggtataagtgtttcatatttgaaaaagttatctctgggtattgcataaaaggcttcatcttataaagtgaaatcattgttattgaattttaggaaggattaatggttaagtgtatataaaatactaatattaagtaaacttcatattggccaacaccagggttgtattctatggatgtcattattttgaattaagaattagygtttaacattcctaaattgttttgagtgcttgattataatttgtaaaaaatgtttattttcaatacttctttaaatttaaaataaagcttatatttcaaatgtc

SEQ ID NO: 6702 - DNA, 1988 bp, Homo sapiens
atctgtggtttttctacttgaaggacacaatrttttccaaactagcacatttgcagaggtttgctgtacttagtcgcggagttcattcttcagtggcttctgctacatctgttgcaactaaaaaaacagtccaaggccctccaacctctgatgacatttttgaaagggaatataagtatggtgcacacaactaccatcctttacctgtagcccyggagagaggaaaaggtatttacttatgggatgtagaaggcagaaaatattttgacttcctgagttcttacagtgctgtcaamsaagggcattktcaccccaagattgtgaatgctctgaagagtcaagtggacaaattgaccttaacatctagagctttctataataacgtacttggtgaatatgaggagtatattactaaacttttcaactaccacaaagttcttcctatgaatacaggagtggaggctggagagactgcctgtaaactagctyktaagtggggctataccgtgaagggcattcagaaatacaaagcaaagattgtttttgcagctgggaacttctgrggtasgacgttgtctgctatctccagttccacagacccaaccagttacgatggttttggacmatttatgccgggattcgacatcattccctawaatgatctgcccgcactggagcgtgctcttcaggatccaaatgtggctgcgttcatggtagaaccaattcrgggtgaagcaggcgttgttgttcyggatccaggttrcctaatgggagtgcsagagctctgcaccaggcaccaggttctctttattgctgatgaaatacagacaggattggccaraactggtagatgrctggctgttgattatgaaaatgtcagacctgatatagtcctccttggaaaggccctttctgggggcttataccctgtgtctgcagtgctgtgtgatgatgacatcatgctgaccattaagccagggragyatgggtccacatacggtggcaatccactaggctgccgagtggccatcgcagcccttgaggttttagaagaagaaaaccttgctgaaaatgcagacaaattggrcattatcttgagaaatgaactcatgaagctaccttctgatgttgtaactgccgtaagaggaaaaggattattaaaygctattgtcattaaagaaaccaaagattgggatgcttggaaggtgtgtctacgacttcgagataatkgacytctggccaagccaacccatggcgacattatcaggtttgcgcctcygctggtgatcaaggaggatgagcttygagagtccattgaaattattaacaagaccatcttbtctttctgagggtagccagctgttttcagtggtccctgggagccagctggagacaggtggtcctgtaaaagctttattcctaatgtgggcacattccactcccatgagtcttcaaaaactttttttttgaatatatttttttcagttgatacataatagaacaacgtttatgaacctgccgtttgctttgtaaygtaactaaataatgtaatggcatctatattcagttgaagtgttttgatgtgcatgtgtacttcctaaggtgaaatgcatctatatacagacagcctctaaatcaagtccttcagtataattgatatatgtttttataatttcctcactggtataagtgtttcatatttgaaaaagttatctctgggtattgcataaaaggcttcatcttataaagtgaaatcattgttattgaattttaggaaggattaatggttaagtgtatataaaatactaatattaagtaaacttcatattggccaacaccagggttgtattctatggatgtcattattttgaattaagaattagygtttaacattcctaaattgttttgagtgcttgattataatttgtaaaaaatgtttattttcaatacttctttaaatttaaaataaagcttatatttcaaatgtc

SEQ ID NO: 6703 - DNA, 2307 bp, Homo sapiens
tcaggagattttggactctctgcagactgtccctggatcttgggttaaaaatctgtattctagactgaaccgtgggaagaaaaaatagtcagtgagtctttggcaaaccggagtactggattttgtttagcaattgcaaattcctgaacatactggatttactgggtagtgccaagtttaaagggaagtaagccaaactccaagtattatgttttgctaatttggcagctcgaatcaagagtggctgtgagattatacatggtttgacttgtcattggtagacttctgttgaaacatgaattaactagtcttttagaaaatctgtggtttttctacttgaaggacacaatrttttccaaactagcacatttgcagaggtttgctgtacttagtcgcggagttcattcttcagtggcttctgctacatctgttgcaactaaaaaaacagtccaaggccctccaacctctgatgacatttttgaaagggaatataagtatggtgcacacaactaccatcctttacctgtagcccyggagagaggaaaaggtatttacttatgggatgtagaaggcagaaaatattttgacttcctgagttcttacagtgctgtcaamsaagggcattktcaccccaagattgtgaatgctctgaagagtcaagtggacaaattgaccttaacatctagagctttctataataacgtacttggtgaatatgaggagtatattactaaacttttcaactaccacaaagttcttcctatgaatacaggagtggaggctggagagactgcctgtaaactagctyktaagtggggctataccgtgaagggcattcagaaatacaaagcaaagattgtttttgcagctgggaacttctgrggtasgacgttgtctgctatctccagttccacagacccaaccagttacgatggttttggacmatttatgccgggattcgacatcattccctawaatgatctgcccgcactggagcgtgctcttcaggatccaaatgtggctgcgttcatggtagaaccaattcrgggtgaagcaggcgttgttgttcyggatccaggttrcctaatgggagtgcsagagctctgcaccaggcaccaggttctctttattgctgatgaaatacagacaggattggccaraactggtagatgrctggctgttgattatgaaaatgtcagacctgatatagtcctccttggaaaggccctttctgggggcttataccctgtgtctgcagtgctgtgtgatgatgacatcatgctgaccattaagccagggragyatgggtccacatacggtggcaatccactaggctgccgagtggccatcgcagcccttgaggttttagaagaagaaaaccttgctgaaaatgcagacaaattggrcattatcttgagaaatgaactcatgaagctaccttctgatgttgtaactgccgtaagaggaaaaggattattaaaygctattgtcattaaagaaaccaaagattgggatgcttggaaggtgtgtctacgacttcgagataatkgacytctggccaagccaacccatggcgacattatcaggtttgcgcctcygctggtgatcaaggaggatgagcttygagagtccattgaaattattaacaagaccatcttbtctttctgagggtagccagctgttttcagtggtccctgggagccagctggagacaggtggtcctgtaaaagctttattcctaatgtgggcacattccactcccatgagtcttcaaaaactttttttttgaatatatttttttcagttgatacataatagaacaacgtttatgaacctgccgtttgctttgtaaygtaactaaataatgtaatggcatctatattcagttgaagtgttttgatgtgcatgtgtacttcctaaggtgaaatgcatctatatacagacagcctctaaatcaagtccttcagtataattgatatatgtttttataatttcctcactggtataagtgtttcatatttgaaaaagttatctctgggtattgcataaaaggcttcatcttataaagtgaaatcattgttattgaattttaggaaggattaatggttaagtgtatataaaatactaatattaagtaaacttcatattggccaacaccagggttgtattctatggatgtcattattttgaattaagaattagygtttaacattcctaaattgttttgagtgcttgattataatttgtaaaaaatgtttattttcaatacttctttaaatttaaaataaagcttatatttcaaatgtc

SEQ ID NO: 6704 - DNA, 2656 bp, Homo sapiens
atgcggctgctggagaggacccggtgatgagaaaaggaggaggatggaaaaagagtggaaaagaagggaggggaggaaaagggcggagcccgtggccttaaataggatggtgatgcgccagagatgcgcggtttgagtgttcagagattggttgtgctactgaaggcggcggacgtgggacccccggttccgtctcgggaagtaactcatctgccccctctttgaacacctccgctcacgagcgcagcacgtggaaaccgtcagtgatttgtgtctgcaacgtgtgtgagagaatggagattcaaacaggatctaccccctctgcagcccttcaagaagaggtatgattgctaccacttttccccacaaagtgacgaaaggaaacagcgacggaagcgcaaccgaaccctggaattggtgtctcgactggtccattcccggcccacccccattaaccggctcgagccactcccaggacgaagtcaaggcctcggaaggcgactacaactcccagcaggtcgagcagctccgcccgcgctgattctccattggccttccgggggtggggattagatgggaggtggccgtggggctgcggccgggatttgtcccctcttcggcttccgtagaggaagtggcgcggaccttcatttggggtttcggttcccccccttccccttccccggggtctgggggtgacattgcaccgcgcccctcgtggggtcgcgttgccaccccacgcggactccccagctggcgcgcccctcccatttgcctgtcctggtcaggcccccacccmccttcccacctgaccagccatgggggctgcggtgtttttcggctgcactttcgtcgcgttcggcccggccttcgcgcttttcttgatcactgtggctggggacccgcttcgcgttatcatcctggtcgcaggggcatttttctggctggtctccctgctcctggcctctgtggtctggttcatcttggtccatgtgaccgaccggtcagatgcccggctccagtacggcctcctgatttttggtgctgctgtctctgtccttctacaggaggtgttccgctttgcctactacaagctgcttaagaaggcagatgaggggttagcatcgctgagtgaggacggaagatcacccatctccatccgccagatggcctatgtttctggtctctccttcggtatcatcagtggtgtcttctctgttatcaatattttggctgatgcacttgggccaggtgtggttgggatccatggagactcaccctattacttcctgacttcagcctttctgacagcagccattatcctgctccataccttttggggagttgtgttctttgatgcctgtgagaggagacggtactgggctttgggcctggtggttgggagtcacctactgacatcgggmctgacattcctgaacccctggtatgaggccagcctgctgcccatctatgcagtcactgtttccatggggctctgggccttcatcacagctggagggtccctccgaagtattcagcgcagcctcttgtgscgacggcaggaggacagtcgggtgatggtgtattctgccctgcgcatcccacccgaggactgagggaacctaggggggacccctgggcctggggtgccctcctgatgtcctcgccctgtatttctccatctccagttctggacagtgcaggttgccaagaaaagggacctagtttagccattgccctggagatgaaattaatggaggctcaaggatagatgagctctgagtttctcagtactccctcaagactggacatcttggtctttttctcaggcctgagggggaaccatttttggtgtgataaataccctaaactgcctttttttcttttttgaggtggggggagggaggaggtatattggaactcttctaacctccttgggctatattttctctcctcgagttgctcctcatggctgggctcatttcggtccctttctccttggtcccagaccttgggggaaaggaaggaagtgcatgtttgggaactggcattactggaactaatggttttaacctccttaaccaccagcatccctcctctccccaaggtgaagtggagggtgctgtggtgagctggccactccagagctgcagtgccactggaggagtcagactaccatgacatcgtagggaaggaggggagatttttttgtagtttttaattggggtgtgggaggggcggggaggttttctataaactgtatcattttctgctgagggtggagtgtcccatccttttaatcaaggtgattgtgattttgactaataaaaaagaatttgtaattgtgggggaacttggcttttaagggaggggatagcatgttaattgagatttctgtcctcagatctctcatccagccactttcctaacctggcaaccactgatttccaagcatagccttggtgcaagggcagaaatctgggctagtggtttaacatgtctgaaactttgggttaagtgtyttcccagaagcttatctttccttccaggggtgggataaaaggagttaatcacccatgcttcttttccccatcctttgcccatctttaccacctgagggattcaggaacttgcccaccctcaagagcctcaaagg

SEQ ID NO: 6705 - DNA, 2994 bp, Homo sapiens
atgcggctgctggagaggacccggtgatgagaaaaggaggaggatggaaaaagagtggaaaagaagggaggggaggaaaagggcggagcccgtggccttaaataggatggtgatgcgccagagatgcgcggtttgagtgttcagagattggttgtgctactgaaggcggcggacgtgggacccccggttccgtctcgggaagtaactcatctgccccctctttgaacacctccgctcacgagcgcagcacgtggaaaccgtcagtgatttgtgtctgcaacgtgtgtgagagaatggagattcaaacaggatctaccccctctgcagcccttcaagaagaggtatgattgctaccacttttccccacaaagtgacgaaaggaaacagcgacggaagcgcaaccgaaccctggaattggtgtctcgactggtccattcccggcccacccccattaaccggctcgagccactcccaggacgaagtcaaggcctcggaaggcgactacaactcccagcaggtcgagcagctccgcccgcgctgattctccattggccttccgggggtggggattagatgggaggtggccgtggggctgcggccgggatttgtcccctcttcggcttccgtagaggaagtggcgcggaccttcatttggggtttcggttcccccccttccccttccccggggtctgggggtgacattgcaccgcgcccctcgtggggtcgcgttgccaccccacgcggactccccagctggcgcgcccctcccatttgcctgtcctggtcaggcccccacccmccttcccacctgaccagccatgggggctgcggtgtttttcggctgcactttcgtcgcgttcggcccggccttcgcgcttttcttgatcactgtggctggggacccgcttcgcgttatcatcctggtcgcaggggcatttttctggctggtctccctgctcctggcctctgtggtctggttcatcttggtccatgtgaccgaccggtcagatgcccggctccagtacggcctcctgatttttggtgctgctgtctctgtccttctacaggaggtgttccgctttgcctactacaagctgcttaagaaggcagatgaggggttagcatcgctgagtgaggacggaagatcacccatctccatccgccagatggcctatgtttctggtctctccttcggtatcatcagtggtgtcttctctgttatcaatattttggctgatgcacttgggccaggtgtggttgggatccatggagactcaccctattacttcctgacttcagcctttctgacagcagccattatcctgctccataccttttggggagttgtgttctttgatgcctgtgagaggagacggtactgggctttgggcctggtggttgggagtcacctactgacatcgggmctgacattcctgaacccctggtatgaggccagcctgctgcccatctatgcagtcactgtttccatggggctctgggccttcatcacagctggagggtccctccgaagtattcagcgcagcctcttgtgtaaggactgactacctggactgatcgcctgacagatcccacctgcctgtccactgcccatgactgagcccagccccagcccgggtccattgcccacattctctgtctccttctcgtcggtctaccccactacctccagggttttgctttgtccttttgtgaccgttagtctctaagctttaccaggagcagcctgggttcagccagtcagtgactggtgggtttgaatctgcrcttatccccaccacctggggacccccttgttgtgtccaggactccccctgtgtcagtgctctgctctcaccctgcccaagactcacctcccttcccctctgcaggscgacggcaggaggacagtcgggtgatggtgtattctgccctgcgcatcccacccgaggactgagggaacctaggggggacccctgggcctggggtgccctcctgatgtcctcgccctgtatttctccatctccagttctggacagtgcaggttgccaagaaaagggacctagtttagccattgccctggagatgaaattaatggaggctcaaggatagatgagctctgagtttctcagtactccctcaagactggacatcttggtctttttctcaggcctgagggggaaccatttttggtgtgataaataccctaaactgcctttttttcttttttgaggtggggggagggaggaggtatattggaactcttctaacctccttgggctatattttctctcctcgagttgctcctcatggctgggctcatttcggtccctttctccttggtcccagaccttgggggaaaggaaggaagtgcatgtttgggaactggcattactggaactaatggttttaacctccttaaccaccagcatccctcctctccccaaggtgaagtggagggtgctgtggtgagctggccactccagagctgcagtgccactggaggagtcagactaccatgacatcgtagggaaggaggggagatttttttgtagtttttaattggggtgtgggaggggcggggaggttttctataaactgtatcattttctgctgagggtggagtgtcccatccttttaatcaaggtgattgtgattttgactaataaaaaagaatttgtaattgtgggggaacttggcttttaagggaggggatagcatgttaattgagatttctgtcctcagatctctcatccagccactttcctaacctggcaaccactgatttccaagcatagccttggtgcaagggcagaaatctgggctagtggtttaacatgtctgaaactttgggttaagtgtyttcccagaagcttatctttccttccaggggtgggataaaaggagttaatcacccatgcttcttttccccatcctttgcccatctttaccacctgagggattcaggaacttgcccaccctcaagagcctcaaagg

SEQ ID NO: 6706 - DNA, 2695 bp, Homo sapiens
attcaaacaggatctaccccctctgcagcccttcaagaagaggtatgattgctaccacttttccccacaaagtgacgaaaggaaacagcgacggaagcgcaaccgaaccctggaattggtgtctcgactggtccattcccggcccacccccattaaccggctcgagccactcccaggacgaagtcaaggcctcggaaggcgactacaactcccagcaggtcgagcagctccgcccgcgctgattctccattggccttccgggggtggggattagatgggaggtggccgtggggctgcggccgggatttgtcccctcttcggcttccgtagaggaagtggcgcggaccttcatttggggtttcggttcccccccttccccttccccggggtctgggggtgacattgcaccgcgcccctcgtggggtcgcgttgccaccccacgcggactccccagctggcgcgcccctcccatttgcctgtcctggtcaggcccccacccmccttcccacctgaccagccatgggggctgcggtgtttttcggctgcactttcgtcgcgttcggcccggccttcgcgcttttcttgatcactgtggctggggacccgcttcgcgttatcatcctggtcgcaggggcatttttctggctggtctccctgctcctggcctctgtggtctggttcatcttggtccatgtgaccgaccggtcagatgcccggctccagtacggcctcctgatttttggtgctgctgtctctgtccttctacaggaggtgttccgctttgcctactacaagctgcttaagaaggcagatgaggggttagcatcgctgagtgaggacggaagatcacccatctccatccgccagatggcctatgtttctggtctctccttcggtatcatcagtggtgtcttctctgttatcaatattttggctgatgcacttgggccaggtgtggttgggatccatggagactcaccctattacttcctgacttcagcctttctgacagcagccattatcctgctccataccttttggggagttgtgttctttgatgcctgtgagaggagacggtactgggctttgggcctggtggttgggagtcacctactgacatcgggmctgacattcctgaacccctggtatgaggccagcctgctgcccatctatgcagtcactgtttccatggggctctgggccttcatcacagctggagggtccctccgaagtattcagcgcagcctcttgtgtaaggactgactacctggactgatcgcctgacagatcccacctgcctgtccactgcccatgactgagcccagccccagcccgggtccattgcccacattctctgtctccttctcgtcggtctaccccactacctccagggttttgctttgtccttttgtgaccgttagtctctaagctttaccaggagcagcctgggttcagccagtcagtgactggtgggtttgaatctgcrcttatccccaccacctggggacccccttgttgtgtccaggactccccctgtgtcagtgctctgctctcaccctgcccaagactcacctcccttcccctctgcaggscgacggcaggaggacagtcgggtgatggtgtattctgccctgcgcatcccacccgaggactgagggaacctaggggggacccctgggcctggggtgccctcctgatgtcctcgccctgtatttctccatctccagttctggacagtgcaggttgccaagaaaagggacctagtttagccattgccctggagatgaaattaatggaggctcaaggatagatgagctctgagtttctcagtactccctcaagactggacatcttggtctttttctcaggcctgagggggaaccatttttggtgtgataaataccctaaactgcctttttttcttttttgaggtggggggagggaggaggtatattggaactcttctaacctccttgggctatattttctctcctcgagttgctcctcatggctgggctcatttcggtccctttctccttggtcccagaccttgggggaaaggaaggaagtgcatgtttgggaactggcattactggaactaatggttttaacctccttaaccaccagcatccctcctctccccaaggtgaagtggagggtgctgtggtgagctggccactccagagctgcagtgccactggaggagtcagactaccatgacatcgtagggaaggaggggagatttttttgtagtttttaattggggtgtgggaggggcggggaggttttctataaactgtatcattttctgctgagggtggagtgtcccatccttttaatcaaggtgattgtgattttgactaataaaaaagaatttgtaattgtgggggaacttggcttttaagggaggggatagcatgttaattgagatttctgtcctcagatctctcatccagccactttcctaacctggcaaccactgatttccaagcatagccttggtgcaagggcagaaatctgggctagtggtttaacatgtctgaaactttgggttaagtgtyttcccagaagcttatctttccttccaggggtgggataaaaggagttaatcacccatgcttcttttccccatcctttgcccatctttaccacctgagggattcaggaacttgcccaccctcaagagcctcaaagg

SEQ ID NO: 6707 - DNA, 2290 bp, Homo sapiens
aggaaggaagagctcaccccagctgggctcctgagccagggccagggctccagtgaaacttgccgcgctccagctccgagtggggccatcctgcatgcctaattggctatttaaggagctgttcaccagcagcccaggcagcacccccgtccccacatacaccagttcagagccaccttaaaagcaggaggcagttgtaaagtcgctggccagctagtggagtggagactgcagagggagataaagagagagggcaaagaggcagcaagagatttgtcctggggatccagaaacccatgataccctactgaacaccgaatcccctggaagcccacagagacagagacagcaagagaagcagagataaatacactcacgccaggagctcgctcgctctctctctctctctctcactcctccctccctctctctctgcctgtcctagtcctctagtcctcaaattcccagtcccctgcaccccttcctgggacactatgttgttctccgccctcctgctggaggtgatttggatcctggctgcagatgggggtcaacactggacgtatgagggcccacatggtcaggaccattggccagcctcttaccctgagtgtggaaacaatgcccagtcgcccatcgatattcagacagacagtgtgacatttgaccctgatttgcctgctctgcagccccacggatatgaccagcctggcaccgagcctttggacctgcacaacaatggccacacagctccacattgtacattatgactctgattcctatgacagcttgagtgargctgctgagaggcctcagggcctggctgtcctgggcatcctaattgaggtgggtgagactaagaatatagcttatgaacacattctgagtcacttgcatgaagtcaggcayaaaggtgagccttaaaaatctatagcaggaagtaagattagactttcaaaaactatccttaaaagccttgggatgaagcaattacatagagccaaggaattttgcttctgggagccctatctaggtaagctagggcacactgaaaggaagatgagtcccagtctgttctccccagatcagaagacctcagtgcctcccttcaacctaagagagctgctccccaaacagctggggcagtacttccgctacaatggctcrctcacaactcccccttgctaccagagtgtgctctggacagttttttatagaaggtcccagatttcaatggaacaggtaagtggtggagaaacgaggtgaggtgagacacagttgtaacttcagaccccttcccactccccaaagtaacacctctcccacgcttctgctcctcagctggaaaagcttcaggggacattgttctccacagaagaggagccctctaagcttctggtacagaactaccgagcccttcagcctctcaatcagcgcatggtctttgcttctttcatccaagcaggatcctcgtataccacaggaagaagaggctggaaaaccgaaagagtgtggtcttcacctcagcacaagccacgactgaggcataaattccttctcagayaccatggatgtggatgacttcccttcatgcctatcaggaagcctctaaaatggggtgtaggatctggccagaaacactgtaggagtagtaagcagatgtcctccttcccctggacatctcctagagaggaatggacccaggctgtcattccaggaagaactgcagagccttcagcctctccaaacatgtaggaggaaatgaggaaatcgctgtgttgttaatgcagagaacaaactctgtttagttgcaggggaagtttgggatataccccaaagtcctctaccccctcacttttatggccctttccctagatatactgcgggatctctccttaggataaagagttgctgttgaagttgtatatttttgatcaatatatttggaaattaaagtttctgactttaattctggcctatcctttgaggctcttgagggtgggcaagttcctgaatccctcaggtggtaaagatgggcaaaggatggggaaaagaagcatgggtgattaactccttttatcccacccctggaaggaaagataagcttctgggaaracacttaacccaaagtttcagacatgttaaaccactagcccagatttctgcccttgcaccaaggctatgcttggaaatcagtggttgccaggttaggaaagtggctggatgagagatctgaggacagaaatctcaattaacatgctatcccctcccttaaaagccaagttccccc

SEQ ID NO: 6708 - DNA, 2245 bp, Homo sapiens
aggaaggaagagctcaccccagctgggctcctgagccagggccagggctccagtgaaacttgccgcgctccagctccgagtggggccatcctgcatgcctaattggctatttaaggagctgttcaccagcagcccaggcagcacccccgtccccacatacaccagttcagagccaccttaaaagcaggaggcagttgtaaagtcgctggccagctagtggagtggagactgcagagggagataaagagagagggcaaagaggcagcaagagatttgtcctggggatccagaaacccatgataccctactgaacaccgaatcccctggaagcccacagagacagagacagcaagagaagcagagataaatacactcacgccaggagctcgctcgctctctctctctctctctcactcctccctccctctctctctgcctgtcctagtcctctagtcctcaaattcccagtcccctgcaccccttcctgggacactatgttgttctccgccctcctgctggaggtgatttggatcctggctgcagatgggggtcaacactggacgtatgagggcccacatggtcaggaccattggccagcctcttaccctgagtgtggaaacaatgcccagtcgcccatcgatattcagacagacagtgtgacatttgaccctgatttgcctgctctgcagccccacggatatgaccagcctggcaccgagcctttggacctgcacaacaatggccacacagtgcaactctctctgccctctaccctgtatctgggtggacttccccgaaaatatgtagctgcccagctccacctgcactggggtcagaaaggatccccaggkgggtcagaacaccagatcaacagtgaagccacatttgcagagctccacattgtacattatgactctgattcctatgacagcttgagtgargctgctgagaggcctcagggcctggctgtcctgggcatcctaattgaggtgggtgagactaagaatatagcttatgaacacattctgagtcacttgcatgaagtcaggcayaaagatcagaagacctcagtgcctcccttcaacctaagagagctgctccccaaacagctggggcagtacttccgctacaatggctcrctcacaactcccccttgctaccagagtgtgctctggacagttttttatagaaggtcccagatttcaatggaacagctggaaaagcttcaggggacattgttctccacagaagaggagccctctaagcttctggtacagaactaccgagcccttcagcctctcaatcagcgcatggtctttgcttctttcatccaaggatcctcgtataccacaggtgaaatgctgagtctaggtgtaggaatcttggttggctgtctctgccttctcctggctgtttatttcattgctagaaagattcggaagaagaggctggaaaaccgaaagagtgtggtcttcacctcagcacaagccacgactgaggcataaattccttctcagayaccatggatgtggatgacttcccttcatgcctatcaggaagcctctaaaatggggtgtaggatctggccagaaacactgtaggagtagtaagcagatgtcctccttcccctggacatctcctagagaggaatggacccaggctgtcattccaggaagaactgcagagccttcagcctctccaaacatgtaggaggaaatgaggaaatcgctgtgttgttaatgcagagaacaaactctgtttagttgcaggggaagtttgggatataccccaaagtcctctaccccctcacttttatggccctttccctagatatactgcgggatctctccttaggataaagagttgctgttgaagttgtatatttttgatcaatatatttggaaattaaagtttctgactttaattctggcctatcctttgaggctcttgagggtgggcaagttcctgaatccctcaggtggtaaagatgggcaaaggatggggaaaagaagcatgggtgattaactccttttatcccacccctggaaggaaagataagcttctgggaaracacttaacccaaagtttcagacatgttaaaccactagcccagatttctgcccttgcaccaaggctatgcttggaaatcagtggttgccaggttaggaaagtggctggatgagagatctgaggacagaaatctcaattaacatgctatcccctcccttaaaagccaagttccccc

SEQ ID NO: 6709 - DNA, 2170 bp, Homo sapiens
aggaaggaagagctcaccccagctgggctcctgagccagggccagggctccagtgaaacttgccgcgctccagctccgagtggggccatcctgcatgcctaattggctatttaaggagctgttcaccagcagcccaggcagcacccccgtccccacatacaccagttcagagccaccttaaaagcaggaggcagttgtaaagtcgctggccagctagtggagtggagactgcagagggagataaagagagagggcaaagaggcagcaagagatttgtcctggggatccagaaacccatgataccctactgaacaccgaatcccctggaagcccacagagacagagacagcaagagaagcagagataaatacactcacgccaggagctcgctcgctctctctctctctctctcactcctccctccctctctctctgcctgtcctagtcctctagtcctcaaattcccagtcccctgcaccccttcctgggacactatgttgttctccgccctcctgctggaggtgatttggatcctggctgcagatgggggtaggtacaactaaatgtctgtgtacagtgtgacatttgaccctgatttgcctgctctgcagccccacggatatgaccagcctggcaccgagcctttggacctgcacaacaatggccacacagtgcaactctctctgccctctaccctgtatctgggtggacttccccgaaaatatgtagctgcccagctccacctgcactggggtcagaaaggatccccaggkgggtcagaacaccagatcaacagtgaagccacatttgcagagctccacattgtacattatgactctgattcctatgacagcttgagtgargctgctgagaggcctcagggcctggctgtcctgggcatcctaattgaggtgggtgagactaagaatatagcttatgaacacattctgagtcacttgcatgaagtcaggcayaaagatcagaagacctcagtgcctcccttcaacctaagagagctgctccccaaacagctggggcagtacttccgctacaatggctcrctcacaactcccccttgctaccagagtgtgctctggacagttttttatagaaggtcccagatttcaatggaacagctggaaaagcttcaggggacattgttctccacagaagaggagccctctaagcttctggtacagaactaccgagcccttcagcctctcaatcagcgcatggtctttgcttctttcatccaagcaggatcctcgtataccacaggtgaaatgctgagtctaggtgtaggaatcttggttggctgtctctgccttctcctggctgtttatttcattgctagaaagattcggaagaagaggctggaaaaccgaaagagtgtggtcttcacctcagcacaagccacgactgaggcataaattccttctcagayaccatggatgtggatgacttcccttcatgcctatcaggaagcctctaaaatggggtgtaggatctggccagaaacactgtaggagtagtaagcagatgtcctccttcccctggacatctcctagagaggaatggacccaggctgtcattccaggaagaactgcagagccttcagcctctccaaacatgtaggaggaaatgaggaaatcgctgtgttgttaatgcagagaacaaactctgtttagttgcaggggaagtttgggatataccccaaagtcctctaccccctcacttttatggccctttccctagatatactgcgggatctctccttaggataaagagttgctgttgaagttgtatatttttgatcaatatatttggaaattaaagtttctgactttaattctggcctatcctttgaggctcttgagggtgggcaagttcctgaatccctcaggtggtaaagatgggcaaaggatggggaaaagaagcatgggtgattaactccttttatcccacccctggaaggaaagataagcttctgggaaracacttaacccaaagtttcagacatgttaaaccactagcccagatttctgcccttgcaccaaggctatgcttggaaatcagtggttgccaggttaggaaagtggctggatgagagatctgaggacagaaatctcaattaacatgctatcccctcccttaaaagccaagttccccc

SEQ ID NO: 6710 - DNA, 2325 bp, Homo sapiens
aggaaggaagagctcaccccagctgggctcctgagccagggccagggctccagtgaaacttgccgcgctccagctccgagtggggccatcctgcatgcctaattggctatttaaggagctgttcaccagcagcccaggcagcacccccgtccccacatacaccagttcagagccaccttaaaagcaggaggcagttgtaaagtcgctggccagctagtggagtggagactgcagagggagataaagagagagggcaaagaggcagcaagagatttgtcctggggatccagaaacccatgataccctactgaacaccgaatcccctggaagcccacagagacagagacagcaagagaagcagagataaatacactcacgccaggagctcgctcgctctctctctctctctctcactcctccctccctctctctctgcctgtcctagtcctctagtcctcaaattcccagtcccctgcaccccttcctgggacactatgttgttctccgccctcctgctggaggtgatttggatcctggctgcagatgggggtcaacactggacgtatgagggtgagcagatctcaaggcctcccgacaaccctttcacactgggacctcctcacctggcaggaagacacactgtgcgggcccacatggtcaggaccattggccagcctcttaccctgagtgtggaaacaatgcccagtcgcccatcgatattcagacagacagtgtgacatttgaccctgatttgcctgctctgcagccccacggatatgaccagcctggcaccgagcctttggacctgcacaacaatggccacacagtgcaactctctctgccctctaccctgtatctgggtggacttccccgaaaatatgtagctgcccagctccacctgcactggggtcagaaaggatccccaggkgggtcagaacaccagatcaacagtgaagccacatttgcagagctccacattgtacattatgactctgattcctatgacagcttgagtgargctgctgagaggcctcagggcctggctgtcctgggcatcctaattgaggtgggtgagactaagaatatagcttatgaacacattctgagtcacttgcatgaagtcaggcayaaagatcagaagacctcagtgcctcccttcaacctaagagagctgctccccaaacagctggggcagtacttccgctacaatggctcrctcacaactcccccttgctaccagagtgtgctctggacagttttttatagaaggtcccagatttcaatggaacagctggaaaagcttcaggggacattgttctccacagaagaggagccctctaagcttctggtacagaactaccgagcccttcagcctctcaatcagcgcatggtctttgcttctttcatccaagcaggatcctcgtataccacaggtgaaatgctgagtctaggtgtaggaatcttggttggctgtctctgccttctcctggctgtttatttcattgctagaaagattcggaagaagaggctggaaaaccgaaagagtgtggtcttcacctcagcacaagccacgactgaggcataaattccttctcagayaccatggatgtggatgacttcccttcatgcctatcaggaagcctctaaaatggggtgtaggatctggccagaaacactgtaggagtagtaagcagatgtcctccttcccctggacatctcctagagaggaatggacccaggctgtcattccaggaagaactgcagagccttcagcctctccaaacatgtaggaggaaatgaggaaatcgctgtgttgttaatgcagagaacaaactctgtttagttgcaggggaagtttgggatataccccaaagtcctctaccccctcacttttatggccctttccctagatatactgcgggatctctccttaggataaagagttgctgttgaagttgtatatttttgatcaatatatttggaaattaaagtttctgactttaattctggcctatcctttgaggctcttgagggtgggcaagttcctgaatccctcaggtggtaaagatgggcaaaggatggggaaaagaagcatgggtgattaactccttttatcccacccctggaaggaaagataagcttctgggaaracacttaacccaaagtttcagacatgttaaaccactagcccagatttctgcccttgcaccaaggctatgcttggaaatcagtggttgccaggttaggaaagtggctggatgagagatctgaggacagaaatctcaattaacatgctatcccctcccttaaaagccaagttccccc

SEQ ID NO: 6711 - DNA, 2248 bp, Homo sapiens
aggaaggaagagctcaccccagctgggctcctgagccagggccagggctccagtgaaacttgccgcgctccagctccgagtggggccatcctgcatgcctaattggctatttaaggagctgttcaccagcagcccaggcagcacccccgtccccacatacaccagttcagagccaccttaaaagcaggaggcagttgtaaagtcgctggccagctagtggagtggagactgcagagggagataaagagagagggcaaagaggcagcaagagatttgtcctggggatccagaaacccatgataccctactgaacaccgaatcccctggaagcccacagagacagagacagcaagagaagcagagataaatacactcacgccaggagctcgctcgctctctctctctctctctcactcctccctccctctctctctgcctgtcctagtcctctagtcctcaaattcccagtcccctgcaccccttcctgggacactatgttgttctccgccctcctgctggaggtgatttggatcctggctgcagatgggggtcaacactggacgtatgagggcccacatggtcaggaccattggccagcctcttaccctgagtgtggaaacaatgcccagtcgcccatcgatattcagacagacagtgtgacatttgaccctgatttgcctgctctgcagccccacggatatgaccagcctggcaccgagcctttggacctgcacaacaatggccacacagtgcaactctctctgccctctaccctgtatctgggtggacttccccgaaaatatgtagctgcccagctccacctgcactggggtcagaaaggatccccaggkgggtcagaacaccagatcaacagtgaagccacatttgcagagctccacattgtacattatgactctgattcctatgacagcttgagtgargctgctgagaggcctcagggcctggctgtcctgggcatcctaattgaggtgggtgagactaagaatatagcttatgaacacattctgagtcacttgcatgaagtcaggcayaaagatcagaagacctcagtgcctcccttcaacctaagagagctgctccccaaacagctggggcagtacttccgctacaatggctcrctcacaactcccccttgctaccagagtgtgctctggacagttttttatagaaggtcccagatttcaatggaacagctggaaaagcttcaggggacattgttctccacagaagaggagccctctaagcttctggtacagaactaccgagcccttcagcctctcaatcagcgcatggtctttgcttctttcatccaagcaggatcctcgtataccacaggtgaaatgctgagtctaggtgtaggaatcttggttggctgtctctgccttctcctggctgtttatttcattgctagaaagattcggaagaagaggctggaaaaccgaaagagtgtggtcttcacctcagcacaagccacgactgaggcataaattccttctcagayaccatggatgtggatgacttcccttcatgcctatcaggaagcctctaaaatggggtgtaggatctggccagaaacactgtaggagtagtaagcagatgtcctccttcccctggacatctcctagagaggaatggacccaggctgtcattccaggaagaactgcagagccttcagcctctccaaacatgtaggaggaaatgaggaaatcgctgtgttgttaatgcagagaacaaactctgtttagttgcaggggaagtttgggatataccccaaagtcctctaccccctcacttttatggccctttccctagatatactgcgggatctctccttaggataaagagttgctgttgaagttgtatatttttgatcaatatatttggaaattaaagtttctgactttaattctggcctatcctttgaggctcttgagggtgggcaagttcctgaatccctcaggtggtaaagatgggcaaaggatggggaaaagaagcatgggtgattaactccttttatcccacccctggaaggaaagataagcttctgggaaracacttaacccaaagtttcagacatgttaaaccactagcccagatttctgcccttgcaccaaggctatgcttggaaatcagtggttgccaggttaggaaagtggctggatgagagatctgaggacagaaatctcaattaacatgctatcccctcccttaaaagccaagttccccc

SEQ ID NO: 6712 - DNA, 1958 bp, Homo sapiens
tggaggcggacggagctaaaactgacgtggaaccggaatgtgagcggtgtcagacacgtggtacaaggaggcattcatcttggaaccgggcaattggcatttccgctctgggtaattggtgtgggaagagcctgcctgtggggagcggccactccatactgctgaggcctcaggactgctgctcagcttgcccgttacctgaagaggcggcggagccggscccctgaccggtcaccatgtgggccttctcggaattgcccatgccgctgctgatcaatttgatcgtctcgctgctgggatttgtggccacagtcaccctcatcccggccttcckgggccacttcattgctgcgcgcctctgtggtcaggacctcaacaaaaccagccgacagcagatcccagaatcccagggagtgatcagcggtgctgttttccttatcatcctcttctgcttcatccctttccccttcctgaactgctttgtgaaggagcagtgtaaggcattcccccaccatgaatttgtggccctgataggtgccctccttgccatctgctgcatgatcttcctgggctttgcggatgatgtactgaatctgcgctggcgccataagctgctgctacctacagctgcctcactacctctcctcatggtctatttcaccaactttggcaacacgaccattgtggtgcccaagcccttccgcccgatacttggcctgcatctggacttgggaatcctgtactatgtctacatggggctgctggcagtgttctgtaccaatgccatcaatatcctagcaggaattaayggcctagaggctggccagtcactagtcatttctgcttccatcattgtcttcaacctggtagagttggaaggtgattgtcgggatgatcatgtcttttccctctacttcatgatacccttttttttcaccactttgggattgctctaccacaactggtacccatcacgggtgtttgtgggagataccttctgttactttgctggcatgacctttgccgtggtgggcatcttgggacacttcagcaagaccatgctactattcttcatgccccaggtgttcaacttcctctactcactgcctcagctcctgcatatcatcccctgccctcgccaccgcatacccagactcaatatcaagacaggcaaactggagatgagctattccaagttcaagaccaagagcctctctttcttgggcacctttattttaaaggtggcagagagcctccagctggtgacagtacaccagagtgagactgaagatggtgaattcactgaatgtaacaacatgaccctcatcaacttgctacttaaagtccttgggcccatacatgagagaaacctcacattgctcctgctgctgctgcagatcctgggcagtgccrtcaccttctccattcgatatcagctcgttcgactcttctatgatgtctgagtcccttgatcattgtcctttacctcacagtctctaggattcctgactcaggctgacctctctctctggtcccagactgcctccttgcccaggcctctctcactcttcatactcctccagattttgttctcagcattttcctttctctgtgatcattggcatcctgggcgtttcttgccctctrctgactactgattggattttacctatggctttctgcaacttgctactctctccctctccatcccatctttgcagcctcatagggtgggatacagcagctttttttgcagttatccacactcacatttcagagtcctgactctcaaggaaccactggtttttgggatagaacttgggccagggctaggaacacaggctccacggtgacatgtcatttgattgtaaattaagtgytctgattagtaagaactaagcagggggccacatgctctcaatggagacaataaagtgttgtctttttcttattgttta

SEQ ID NO: 6713 - DNA, 1899 bp, Homo sapiens
atggaggcggacggagctaaaactgacgtggaaccggaatgtgagcggtgtcagacacgtggtacaaggaggcattcatcttggaaccgggcaattggcatttccgctctggattggtgtgggaagagcctgcctgtggggagcggccactccatactgctgaggcctcaggactgctgctcagcttgcccgttacctgaagaggcggcggagccggscccctgaccggtcaccatgtgggccttctcggaattgcccatgccgctgctgatcaatttgatcgtctcgctgctgggatttgtggccacagtcaccctcatcccggccttcckgggccacttcattgctgcgcgcctctgtggtcaggacctcaacaaaaccagccgacagcagatcccagaatcccagggagtgatcagcggtgctgttttccttatcatcctcttctgcttcatccctttccccttcctgaactgctttgtgaaggagcagtgtaaggcattcccccaccatgaatttgtggccctgataggtgccctccttgccatctgctgcatgatcttcctgggctttgcggatgatgtactgaatctgcgctggcgccataagctgctgctacctacagctgcctcactacctctcctcatggtctatttcaccaactttggcaacacgaccattgtggtgcccaagcccttccgcccgatacttggcctgcatctggacttgggaatcctgtactatgtctacatggggctgctggcagtgttctgtaccaatgccatcaatatcctagcaggaattaayggcctagaggctggccagtcactagtcatttctgcttccatcattgtcttcaacctggtagagttggaaggtgattgtcgggatgatcatgtcttttccctctacttcatgatacccttttttttcaccactttgggattgctctaccacaactggtacccatcacgggtgtttgtgggagataccttctgttactttgctggcatgacctttgccgtggtgggcatcttgggacacttcagcaagaccatgctactattcttcatgccccaggtgttcaacttcctctactcactgcctcagctcctgcatatcatcccctgccctcgccaccgcatacccagactcaatatcaagacaggcaaactggagatgagctattccaagttcaagaccaagagcctctctttcttgggcacctttattttaaaggtggcagagagcctccagctggtgacagtacaccagagtgagactgaagatggtgaattcactgaatgtaacaacatgaccctcatcaacttgctacttaaagtccttgggcccatacatgagagaaacctcacattgctcctgctgctgctgcagatcctgggcagtgccrtcaccttctccattcgatatcagctcgttcgactcttctatgatgtctgagtcccttgatcattgtcctttacctcacagtctctaggattcctgactcaggctgacctctctctctggtcccagacattttcctttctctgtgatcattggcatcctgggcgtttcttgccctctrctgactactgattggattttacctatggctttctgcaacttgctactctctccctctccatcccatctttgcagcctcatagggtgggatacagcagctttttttgcagttatccacactcacatttcagagtcctgactctcaaggaaccactggtttttgggatagaacttgggccagggctaggaacacaggctccacggtgacatgtcatttgattgtaaattaagtgytctgattagtaagaactaagcagggggccacatgctctcaatggagacaataaagtgttgtctttttcttattgttta

SEQ ID NO: 6714 - DNA, 1956 bp, Homo sapiens
atggaggcggacggagctaaaactgacgtggaaccggaatgtgagcggtgtcagacacgtggtacaaggaggcattcatcttggaaccgggcaattggcatttccgctctggattggtgtgggaagagcctgcctgtggggagcggccactccatactgctgaggcctcaggactgctgctcagcttgcccgttacctgaagaggcggcggagccggscccctgaccggtcaccatgtgggccttctcggaattgcccatgccgctgctgatcaatttgatcgtctcgctgctgggatttgtggccacagtcaccctcatcccggccttcckgggccacttcattgctgcgcgcctctgtggtcaggacctcaacaaaaccagccgacagcagatcccagaatcccagggagtgatcagcggtgctgttttccttatcatcctcttctgcttcatccctttccccttcctgaactgctttgtgaaggagcagtgtaaggcattcccccaccatgaatttgtggccctgataggtgccctccttgccatctgctgcatgatcttcctgggctttgcggatgatgtactgaatctgcgctggcgccataagctgctgctacctacagctgcctcactacctctcctcatggtctatttcaccaactttggcaacacgaccattgtggtgcccaagcccttccgcccgatacttggcctgcatctggacttgggaatcctgtactatgtctacatggggctgctggcagtgttctgtaccaatgccatcaatatcctagcaggaattaayggcctagaggctggccagtcactagtcatttctgcttccatcattgtcttcaacctggtagagttggaaggtgattgtcgggatgatcatgtcttttccctctacttcatgatacccttttttttcaccactttgggattgctctaccacaactggtacccatcacgggtgtttgtgggagataccttctgttactttgctggcatgacctttgccgtggtgggcatcttgggacacttcagcaagaccatgctactattcttcatgccccaggtgttcaacttcctctactcactgcctcagctcctgcatatcatcccctgccctcgccaccgcatacccagactcaatatcaagacaggcaaactggagatgagctattccaagttcaagaccaagagcctctctttcttgggcacctttattttaaaggtggcagagagcctccagctggtgacagtacaccagagtgagactgaagatggtgaattcactgaatgtaacaacatgaccctcatcaacttgctacttaaagtccttgggcccatacatgagagaaacctcacattgctcctgctgctgctgcagatcctgggcagtgccrtcaccttctccattcgatatcagctcgttcgactcttctatgatgtctgagtcccttgatcattgtcctttacctcacagtctctaggattcctgactcaggctgacctctctctctggtcccagactgcctccttgcccaggcctctctcactcttcatactcctccagattttgttctcagcattttcctttctctgtgatcattggcatcctgggcgtttcttgccctctrctgactactgattggattttacctatggctttctgcaacttgctactctctccctctccatcccatctttgcagcctcatagggtgggatacagcagctttttttgcagttatccacactcacatttcagagtcctgactctcaaggaaccactggtttttgggatagaacttgggccagggctaggaacacaggctccacggtgacatgtcatttgattgtaaattaagtgytctgattagtaagaactaagcagggggccacatgctctcaatggagacaataaagtgttgtctttttcttattgttta

SEQ ID NO: 6715 - DNA, 2142 bp, Homo sapiens
aagtatccgttcttggctgcctttctttaattgcgtttccagtactctctcggtgattctactcttgaacataggatgaaatttggaatcacacttctcttccacttccatccccaccctctaatgcccatattaaaaatggcggccgccgccttccgcagtaatggttgttcagcgaacaagatccgggcggaaacagtagataggcgggtgcagcggggcagaacataggttgccttagagaggttccccggtgtcccgacggcggctcaagtcagagttgctgggttttgctcagattggtgtgggaagagcctgcctgtggggagcggccactccatactgctgaggcctcaggactgctgctcagcttgcccgttacctgaagaggcggcggagccggscccctgaccggtcaccatgtgggccttctcggaattgcccatgccgctgctgatcaatttgatcgtctcgctgctgggatttgtggccacagtcaccctcatcccggccttcckgggccacttcattgctgcgcgcctctgtggtcaggacctcaacaaaaccagccgacagcagatcccagaatcccagggagtgatcagcggtgctgttttccttatcatcctcttctgcttcatccctttccccttcctgaactgctttgtgaaggagcagtgtaaggcattcccccaccatgaatttgtggccctgataggtgccctccttgccatctgctgcatgatcttcctgggctttgcggatgatgtactgaatctgcgctggcgccataagctgctgctacctacagctgcctcactacctctcctcatggtctatttcaccaactttggcaacacgaccattgtggtgcccaagcccttccgcccgatacttggcctgcatctggacttgggaatcctgtactatgtctacatggggctgctggcagtgttctgtaccaatgccatcaatatcctagcaggaattaayggcctagaggctggccagtcactagtcatttctgcttccatcattgtcttcaacctggtagagttggaaggtgattgtcgggatgatcatgtcttttccctctacttcatgatacccttttttttcaccactttgggattgctctaccacaactggtacccatcacgggtgtttgtgggagataccttctgttactttgctggcatgacctttgccgtggtgggcatcttgggacacttcagcaagaccatgctactattcttcatgccccaggtgttcaacttcctctactcactgcctcagctcctgcatatcatcccctgccctcgccaccgcatacccagactcaatatcaagacaggcaaactggagatgagctattccaagttcaagaccaagagcctctctttcttgggcacctttattttaaaggtggcagagagcctccagctggtgacagtacaccagagtgagactgaagatggtgaattcactgaatgtaacaacatgaccctcatcaacttgctacttaaagtccttgggcccatacatgagagaaacctcacattgctcctgctgctgctgcagatcctgggcagtgccrtcaccttctccattcgatatcagctcgttcgactcttctatgatgtctgagtcccttgatcattgtcctttacctcacagtctctaggattcctgactcaggctgacctctctctctggtcccagactgcctccttgcccaggcctctctcactcttcatactcctccagattttgttctcagcattttcctttctctgtgatcattggcatcctgggcgtttcttgccctctrctgactactgattggattttacctatggctttctgcaacttgctactctctccctctccatcccatctttgcagcctcatagggtgggatacagcagctttttttgcagttatccacactcacatttcagagtcctgactctcaaggaaccactggtttttgggatagaacttgggccagggctaggaacacaggctccacggtgacatgtcatttgattgtaaattaagtgytctgattagtaagaactaagcagggggccacatgctctcaatggagacaataaagtgttgtctttttcttattgttta

SEQ ID NO: 6716 - DNA, 1844 bp, Homo sapiens
attggtgtgggaagagcctgcctgtggggagcggccactccatactgctgaggcctcaggactgctgctcagcttgcccgttacctgaagaggcggcggagccggscccctgaccggtcaccatgtgggccttctcggaattgcccatgccgctgctgatcaatttgatcgtctcgctgctgggatttgtggccacagtcaccctcatcccggccttcckgggccacttcattgctgcgcgcctctgtggtcaggacctcaacaaaaccagccgacagcagatcccagaatcccagggagtgatcagcggtgctgttttccttatcatcctcttctgcttcatccctttccccttcctgaactgctttgtgaaggagcagtgtaaggcattcccccaccatgaatttgtggccctgataggtgccctccttgccatctgctgcatgatcttcctgggctttgcggatgatgtactgaatctgcgctggcgccataagctgctgctacctacagctgcctcactacctctcctcatggtctatttcaccaactttggcaacacgaccattgtggtgcccaagcccttccgcccgatacttggcctgcatctggacttgggaatcctgtactatgtctacatggggctgctggcagtgttctgtaccaatgccatcaatatcctagcaggaattaayggcctagaggctggccagtcactagtcatttctgcttccatcattgtcttcaacctggtagagttggaaggtgattgtcgggatgatcatgtcttttccctctacttcatgatacccttttttttcaccactttgggattgctctaccacaactggtacccatcacgggtgtttgtgggagataccttctgttactttgctggcatgacctttgccgtggtgggcatcttgggacacttcagcaagaccatgctactattcttcatgccccaggtgttcaacttcctctactcactgcctcagctcctgcatatcatcccctgccctcgccaccgcatacccagactcaatatcaagacaggcaaactggagatgagctattccaagttcaagaccaagagcctctctttcttgggcacctttattttaaaggtggcagagagcctccagctggtgacagtacaccagagtgagactgaagatggtgaattcactgaatgtaacaacatgaccctcatcaacttgctacttaaagtccttgggcccatacatgagagaaacctcacattgctcctgctgctgctgcagatcctgggcagtgccrtcaccttctccattcgatatcagctcgttcgactcttctatgatgtctgagtcccttgatcattgtcctttacctcacagtctctaggattcctgactcaggctgacctctctctctggtcccagactgcctccttgcccaggcctctctcactcttcatactcctccagattttgttctcagcattttcctttctctgtgatcattggcatcctgggcgtttcttgccctctrctgactactgattggattttacctatggctttctgcaacttgctactctctccctctccatcccatctttgcagcctcatagggtgggatacagcagctttttttgcagttatccacactcacatttcagagtcctgactctcaaggaaccactggtttttgggatagaacttgggccagggctaggaacacaggctccacggtgacatgtcatttgattgtaaattaagtgytctgattagtaagaactaagcagggggccacatgctctcaatggagacaataaagtgttgtctttttcttattgttta

SEQ ID NO: 6717 - DNA, 2078 bp, Homo sapiens
aagtatccgttcttggctgcctttctttaattgcgtttccagtactctctcggtgattctactcttgaacataggatgaaatttggaatcacacttctcttccacttccatccccaccctctaatgcccatattaaaaatggcggccgccgccttccgcagtaatggttgttcagcgaacaagatccgggcggaaacagtagataggcgggtgcagcggggcagaacataggttgccttagagaggttccccggtgtcccgacggcggctcaagtcagagttgctgggttttgctcagattggtgtgggaagagcctgcctgtggggcggcggagccggscccctgaccggtcaccatgtgggccttctcggaattgcccatgccgctgctgatcaatttgatcgtctcgctgctgggatttgtggccacagtcaccctcatcccggccttcckgggccacttcattgctgcgcgcctctgtggtcaggacctcaacaaaaccagccgacagcagatcccagaatcccagggagtgatcagcggtgctgttttccttatcatcctcttctgcttcatccctttccccttcctgaactgctttgtgaaggagcagtgtaaggcattcccccaccatgaatttgtggccctgataggtgccctccttgccatctgctgcatgatcttcctgggctttgcggatgatgtactgaatctgcgctggcgccataagctgctgctacctacagctgcctcactacctctcctcatggtctatttcaccaactttggcaacacgaccattgtggtgcccaagcccttccgcccgatacttggcctgcatctggacttgggaatcctgtactatgtctacatggggctgctggcagtgttctgtaccaatgccatcaatatcctagcaggaattaayggcctagaggctggccagtcactagtcatttctgcttccatcattgtcttcaacctggtagagttggaaggtgattgtcgggatgatcatgtcttttccctctacttcatgatacccttttttttcaccactttgggattgctctaccacaactggtacccatcacgggtgtttgtgggagataccttctgttactttgctggcatgacctttgccgtggtgggcatcttgggacacttcagcaagaccatgctactattcttcatgccccaggtgttcaacttcctctactcactgcctcagctcctgcatatcatcccctgccctcgccaccgcatacccagactcaatatcaagacaggcaaactggagatgagctattccaagttcaagaccaagagcctctctttcttgggcacctttattttaaaggtggcagagagcctccagctggtgacagtacaccagagtgagactgaagatggtgaattcactgaatgtaacaacatgaccctcatcaacttgctacttaaagtccttgggcccatacatgagagaaacctcacattgctcctgctgctgctgcagatcctgggcagtgccrtcaccttctccattcgatatcagctcgttcgactcttctatgatgtctgagtcccttgatcattgtcctttacctcacagtctctaggattcctgactcaggctgacctctctctctggtcccagactgcctccttgcccaggcctctctcactcttcatactcctccagattttgttctcagcattttcctttctctgtgatcattggcatcctgggcgtttcttgccctctrctgactactgattggattttacctatggctttctgcaacttgctactctctccctctccatcccatctttgcagcctcatagggtgggatacagcagctttttttgcagttatccacactcacatttcagagtcctgactctcaaggaaccactggtttttgggatagaacttgggccagggctaggaacacaggctccacggtgacatgtcatttgattgtaaattaagtgytctgattagtaagaactaagcagggggccacatgctctcaatggagacaataaagtgttgtctttttcttattgttta

SEQ ID NO: 6718 - DNA, 1718 bp, Homo sapiens
ccggaagtgacgcgaggctctgcggagaccaggagtcagactgtaggacgacctcgggtcccacgtgtccccggtactcgccggccggagccyccggcttcccggggccgggggaccttagcggcacccacacacagcctactttccaagcggagccatgtctggtaacggcaatgcggctgcaacggcggaagaaaacagcccaaagatgagagtgattcgcgtgggtacccrcaagarccagcttvctcgcatahmgayggacagtgtggtggcaacattgaaagcctcgtaccctggcctgyagtttgaaatcattkctatgtccaccacaggggacaagattcttgatactgcactctctaagattggagagaaaagcctgtttaccaaggagcttgaacatgccckggwgaagaatgaagkggaccygkttgttcactccttgaaggacctgcccactgtgcttcctcctggcttcaccatcrgagccayctgmaagyrggaaaaccytcatgatgctgttgtctttcacccaaaatttgttgggaagaccctagaaaccctgccagagaagagtgtggtgggaaccagctccctgcgaagagcagcccasctgcagagaaagttcccgcatctggagttcaggagtattyrgggaaacctcaacaccyrgcttcggaagmtggacgagcagyaggagttcagtgccatcatcctrgcaacagctggcctgcagygcatgggctggcacaaccgggtkgggcagatcctgcaccctgaggaatgcatgtatgctgtgggccagggggccttgggcgtggaagtgcgagccaaggaccaggacatcttggatctggtgggtgtgckgcacgatcccgagactctgcttcgctgcatcgctgaaaggrycttcctgagghacctggaaggagrctgcagtgtgccagtagccgtgcatacagctatgaaggatrggyaactgtaccygactrgaggagtctggagtctagacggctcagatagcatacaagagaccatgcaggctaccatccatgtccctgcccagcatgaagatggccctgaggatgacccacagttggtaggcatcactgctcgtaacattccaygagggccccagttggctgcccagaacttgrrcatcagcctggccaacttgttgcygagcaaaggagccaaaaacatcctggatgttgcacggcagcttaacgatgcccattaactggtttgtggggcacagatgcctgggttgctgctgtccagtgcctacatcccgggcctcagtgccccattctcactgctatytggggagtgattaccccgggagactgaactgcagggttcaagccttccagggatttgcctcaccttggggccttgatgactgccttgcctcctcagtatgtgggggcttcatctctttagagaagtccaagcaacagcctttgaatgtaaccaatcctactaataaaccagttctgaaggtgttgtgtgtgcgcgtgtggagttggcgggaagataggaacaaacacaaagccctttcatccttacctcagagrctgggacttttgcccagagttctcctggtacgtcctttctgcttctgcctcaatagttttcatttcacacagaataaattgtctcccaggaacaccaagaaacagagccacaatcttaaattcctatggtttgcccct

SEQ ID NO: 6719 - DNA, 2107 bp, Homo sapiens
ccggaagtgacgcgaggctctgcggagaccaggagtcagactgtaggacgacctcgggtcccacgtgtccccggtactcgccggccggagccyccggcttcccggggccgggggaccttagcggcacccacacacagcctactttccaagcggagccatgtctggtaacggcaatgcggctgcaacggcggaagaaaacagcccaaagatgagagtgattcgcgtgggtacccrcaagarccagcttvctcgcatahmgayggacagtgtggtggcaacattgaaagcctcgtaccctggcctgyagtttgaaatcattkctatgtccaccacaggggacaagattcttgatactgcactctctaagattggagagaaaagcctgtttaccaaggagcttgaacatgccckggwgaagaatgaagkggaccygkttgttcactccttgaaggacctgcccactgtgcttcctcctggcttcaccatcrgagccayctgmaagyrggaaaaccytcatgatgctgttgtctttcacccaaaatttgttgggaagaccctagaaaccctgccagagaagagtgtggtgggaaccagctccctgcgaagagcagcccasctgcagagaaagttcccgcatctggagttcaggagtattgatgtaaccctattgtaagtcaaggaccatctgtcttcacttcttgaccaccccacctctaacaccgtaggctgggaagattgtgaatcagaggccagactctaggctttcatggagaaaatttacaaaaaaaaaaaaaagaggccagactcacacttaggcctacccaggctttctagatgatagggaactcccatctcactgccaggtgcttttagacacccccgtgtccrcccttttgactmcctgttccgcctccacagatcctgcaccctgaggaatgcatgtatgctgtgggccaggtacacttgaccagggaagccacatggtgacatatgccttccctttgttctcaaccaagaagcttgtctcacaaccttctgcatctgcttccccagaatagcattctcagggaggggcagaccttgggatgctaccggtccaaaaggcgctggggagcaagtagatagaggtggtcccatgctttgcgccattggttggggaaagatcaggcctgatgtcctaggatgtttttccatcagggggccttgggcgtggaagtgcgagccaaggaccaggacatcttggatctggtgggtgtgckgcacgatcccgagactctgcttcgctgcatcgctgaaaggrycttcctgagghacctggaaggagrctgcagtgtgccagtagccgtgcatacagctatgaaggatrggyaactgtaccygactrgaggagtctggagtctagacggctcagatagcatacaagagaccatgcaggctaccatccatgtccctgcccagcatgaagatggccctgaggatgacccacagttggtaggcatcactgctcgtaacattccaygagggccccagttggctgcccagaacttgrrcatcagcctggccaacttgttgcygagcaaaggagccaaaaacatcctggatgttgcacggcagcttaacgatgcccattaactggtttgtggggcacagatgcctgggttgctgctgtccagtgcctacatcccgggcctcagtgccccattctcactgctatytggggagtgattaccccgggagactgaactgcagggttcaagccttccagggatttgcctcaccttggggccttgatgactgccttgcctcctcagtatgtgggggcttcatctctttagagaagtccaagcaacagcctttgaatgtaaccaatcctactaataaaccagttctgaaggtgttgtgtgtgcgcgtgtggagttggcgggaagataggaacaaacacaaagccctttcatccttacctcagagrctgggacttttgcccagagttctcctggtacgtcctttctgcttctgcctcaatagttttcatttcacacagaataaattgtctcccaggaacaccaagaaacagagccacaatcttaaattcctatggtttgcccct

SEQ ID NO: 6720 - DNA, 1082 bp, Homo sapiens
cctggagggaccgaaggtgccgagggctccgcatcgcaaccawgscgctgcgctggggcatcgtgtctgtcggcctcatctccagcgacttcacagccgtgctgcagacgctgcctcgctctgagcaccaggtggtggcggtggcggcccgcgatctgagccgtgcgaaggagtttgcacagaaacacgacatccccaaggcctacggctcctatgaggagctggccaaggacccgarcgtggaggtggcctacattggcacccagcacccccagcacaaggcggcggtgatgctgtgcttggcggcgggcaaggcsrttctgtgcgagaagcccacgggcgtgaacgcrgcggaagttcgcgagatggtcgcggaggcccgatcccgagccctcttccttatggaggccatctggacccgcttctttcctgcctcygaggctctgaggtctgttttggcccagggaactctaggasacctccgggtggctcgggcagaatttgggaagaatctcatccacgttccccgggccgtagaccgggcccaggctgggggggccctgctggacatcggcatctactgtgtccagttcacctccatggtctttggagggcagaagccagagaagatttcygtcgtgggaaggcgtcatgaaacaggtgtggatgacactgtcacggtgctcctgcagtacccaggggaggtccatggcagcttcacctgcagcatcaccgtgyagctctccaacacggcctccgtgagcggcaccaagggcatggyacagctcctcaacccctgctggtgcccgaccgagctggtggtgaagggggagcataaggagttcccgctgcccccagtcccaaaggactgcrattttgacaacrgggcaggcatgagttatgaggccaagcacgtctgggagtgcctacgcaagggtatgaaggaaagtcctgtgattcycctgtcggaaagtgagctcctggctgacatccttgaagaggtgaggaaggccattggagtcaccttcccccaagacaaacgctgatgtatccccgaataaataaagacatcttacatcttc

SEQ ID NO: 6721 - DNA, 1413 bp, Homo sapiens
agcattaggtgacyggctgaggcggcgcmagttggccgggcacggggctgctgtaaggccgaggttgcggcggaagcggagaccatgttccgagcggcggctccggggcagctccggcgggcggcctcattgctacgatttcagagtaccctggtaatagctgagcatgcaaatgattccctagcacccattactttaaataccattactgcagccacacgccttggaggtgaagtgtcctgcttagtagctggaaccaaatgtgacaaggtggcacaagatctctgtaaagtagcaggcatagcaaaagttctggtggctcagcatgatgtgtacaaaggcctacttccagaggaactgacaccattgattttggcaactcagaagcagttcaattacacacacatctgtgctggagcatctgccttcrgaaagaaccttttgcccagagtagcagccaaacttgaggttgccccgatttctgacatcattgcaatcaagtcacctgacacatttgtgagaactatttatgcaggaaatgctctatgtacagkgaagtgtgatgagaaagtgaaagtgttttctgtccgtggaayatcctttgatgctgcagcaacaagtggcggtagtgccagttcagaaaaggcatcaagtacttcaccagtggaaatatcagagtggcttgaccagaaattaacaaaaagtgatcgaccagagctaacaggtgccaaagtggtggtatctggtggtcgaggcttgaagagtggagagaactttaagttgttatatgacttggcagatcaactacatgctgcagttggtgcttcccgtgctgctgttgatgctggctttgttmccaatgacatgcaakttggacagacgggaaaaatagtagcaccagaactttatattgctgttggaatatctggagccatccaacatttagctgggatgaaagacagcaagacaattgtggcaattaataaagacccagaagctccaattttccaagtggcagattatggaatagttgcagatttatttaaggtagttcctgaaatgactgagatattgaagaaaaaatgaatcaggatcatgccttaaaaagaaaacttttgttaaagtattccmctgaaatcacagatatttgtgggtattataacaatcattggaaagcatggagagctacatttcataatttgagggaaaatttctaacagatgcsagaatgcttgtttatgggattgctgtgtttccytttaattatttgtggttccaaacaattattgtttgaactttttwaattctgtactaaaatctataataaagcttttccacagctttaaaactatcagaaatatgcctagcctctagagaaaattgaagaaaaggagtaaaaattttgtttattta

SEQ ID NO: 6722 - DNA, 2601 bp, Homo sapiens
ccaggccacgcgcgctgttgctagggcaaccacccggccaggcctgcggctgccgggaagccccctcgggagcgcgcacgggaagggctgtgggggcgctggccggctgcgacgtcagacccccgcccctcggcgcctgccggacccagctccattcccagccgcgcctccttcggtgggcagccggccggaactcacgaatcagagcagccgacacatcgtccgctcagccaatcgtagcagatgtgtgatcccgccacctccccggaccctggcggttgtcgctgagttggcgaccgcgggagacgctgctgaggcggcttcggttgcgggtcggaacggcgctgctctgcggggccggtccaggctggcagctgccggcgcttggcggtgagggcgggctcccgagtggccccccaccgaaggcggtgggaccagcggctgaggccaggatgccgtccaggcggcgcggcggctcctcactcatcccagatgttggttatctttctgaagtagactgtccatggcctgaacattttccgaaaatcattttgagcaaaatatctgtttaataacaagataaccacatcaagatggttggaaagctgaagcagaacttactattggcatgtctggtgattagttctgtgactgtgttttacctgggccagcatgccatggaatgccatcaccggatagaggaacgtagccagccagtcaaattggagagcacaaggaccactgtgagaactggcctggacctcaaagccaacaaaacctttgcctatcacaaagatatgcctttaatatttattggaggtgtgcctcggagtggaaccacactcatgagggccatgctggacgcacatcctgacattcgctgtggagaggaaaccagggtcattccccgaatcctggccctgaagcagatgtggtcacggtcaagtaaagagaagatccgcctggatgaggctggtgttactgatgaagtgctggattctgccatgcaagccttcttactagaaattatcgttaagcatggggagccagccccttatttatgtaataaagatccttttgccctgaaatctttaacttacctttctaggttattccccaatgccaaatttctcctgatggtccgagatggccgggcatcagtacattcaatgatttctcgaaaagttactatagctggatttgatctgaacagctatagggactgtttgacaaagtggaatcgtgctatagagaccatgtataaccagtgtatggaggttggttataaaaagtgcatgttggttcactatgaacaacttgtcttacatcctgaacggtggatgagaacactcttaaagttcctccagattccatggaaccactcagtattgcaccatgaagagatgattgggaaagctgggggagtgtctctgtcaaaagtggagagatctacagaccaagtaatcaagccagtcaatgtaggagctctatcaaaatgggttgggaagataccgccagatgttttacaagacatggcagtgattgctcctatgcttgccaagcttggatatgacccatatgccaacccacctaactacggaaaacctgatcccaaaattattgaaaacactcgaagggtctataagggagaattccaactacctgactttcttaaagaaaaaccacagactgagcaagtggagtagcagaaccaggagcctcttccatacatgaggaaagattgctgccttttcagcagaagggaaattcctaggattggctgtcccctgccaagcttggtggagcgtctgcaccttggctgcgccgcctgtgcatttgccagtttcctcccactgagaggatggaggtgtccgcacagctttgggcctcgtgagggatctgcctcctgagcaaagagctcttgatcccgatttcatgcacagccctgcagtaaggagcccagaaggaacatgtgtttcctgttaaaactcctcttgttctcttttcttacattatgacgtttgttttcaaggagagggtttaaaaatgggatcctgtaagcagacttgggcagtctccttttgaaataggttgtctgtacatgttctaakgttttgtagaacacgtgtgcctgtttaagtgtattgatgtgaataatattamatatcctaattatttaattcattgtattgtttctgagaagttgggaaattaccattatacatttacaacctaatgacttttgtattttatttttcaaaataaaagctttcaatgtgaagcattctggtagttacatgttttcattaatgtgatttcagagaagcacagaccttatcagatgctgatgtgataaaccaaagtttccttggttggctgtattgtagatactcccctggagccatcacctttttttggaggggggtggtgggtagaggcagggtctcgctacattccccagcctgggctcaaacgatccttctgcctcagcctcccaaagtactaaaattacaggtgtgagccacggtgcttggcctgcattaycattttgtagtgaagttttctttttatttcaagagagaacctattgccatccacttt

SEQ ID NO: 6723 - DNA, 2726 bp, Homo sapiens
ggcgtcagccccccacctctgtggttgggagggactattgcacgtctacactctcgtggggatgaaatagtgtttgagttcgttatttgcatttgcgcgttatctccccgaggagatgacagcttctctgccagcagcgggcaaagccaggccacgcgcgctgttgctagggcaaccacccggccaggcctgcggctgccgggaagccccctcgggagcgcgcacgggaagggctgtgggggcgctggccggctgcgacgtcagacccccgcccctcggcgcctgccggacccagctccattcccagccgcgcctccttcggtgggcagccggccggaactcacgaatcagagcagccgacacatcgtccgctcagccaatcgtagcagatgtgtgatcccgccacctccccggaccctggcggttgtcgctgagttggcgaccgcgggagacgctgctgaggcggcttcggttgcgggtcggaacggcgctgctctgcggggccggtccaggctggcagctgccggcgcttggcggtgagggcgggctcccgagtggccccccaccgaaggcggtgggaccagcggctgaggccaggatgccgtccaggcggcgcggcggctcctcactcatcccagtagactgtccatggcctgaacattttccgaaaatcattttgagcaaaatatctgtttaataacaagataaccacatcaagatggttggaaagctgaagcagaacttactattggcatgtctggtgattagttctgtgactgtgttttacctgggccagcatgccatggaatgccatcaccggatagaggaacgtagccagccagtcaaattggagagcacaaggaccactgtgagaactggcctggacctcaaagccaacaaaacctttgcctatcacaaagatatgcctttaatatttattggaggtgtgcctcggagtggaaccacactcatgagggccatgctggacgcacatcctgacattcgctgtggagaggaaaccagggtcattccccgaatcctggccctgaagcagatgtggtcacggtcaagtaaagagaagatccgcctggatgaggctggtgttactgatgaagtgctggattctgccatgcaagccttcttactagaaattatcgttaagcatggggagccagccccttatttatgtaataaagatccttttgccctgaaatctttaacttacctttctaggttattccccaatgccaaatttctcctgatggtccgagatggccgggcatcagtacattcaatgatttctcgaaaagttactatagctggatttgatctgaacagctatagggactgtttgacaaagtggaatcgtgctatagagaccatgtataaccagtgtatggaggttggttataaaaagtgcatgttggttcactatgaacaacttgtcttacatcctgaacggtggatgagaacactcttaaagttcctccagattccatggaaccactcagtattgcaccatgaagagatgattgggaaagctgggggagtgtctctgtcaaaagtggagagatctacagaccaagtaatcaagccagtcaatgtaggagctctatcaaaatgggttgggaagataccgccagatgttttacaagacatggcagtgattgctcctatgcttgccaagcttggatatgacccatatgccaacccacctaactacggaaaacctgatcccaaaattattgaaaacactcgaagggtctataagggagaattccaactacctgactttcttaaagaaaaaccacagactgagcaagtggagtagcagaaccaggagcctcttccatacatgaggaaagattgctgccttttcagcagaagggaaattcctaggattggctgtcccctgccaagcttggtggagcgtctgcaccttggctgcgccgcctgtgcatttgccagtttcctcccactgagaggatggaggtgtccgcacagctttgggcctcgtgagggatctgcctcctgagcaaagagctcttgatcccgatttcatgcacagccctgcagtaaggagcccagaaggaacatgtgtttcctgttaaaactcctcttgttctcttttcttacattatgacgtttgttttcaaggagagggtttaaaaatgggatcctgtaagcagacttgggcagtctccttttgaaataggttgtctgtacatgttctaakgttttgtagaacacgtgtgcctgtttaagtgtattgatgtgaataatattamatatcctaattatttaattcattgtattgtttctgagaagttgggaaattaccattatacatttacaacctaatgacttttgtattttatttttcaaaataaaagctttcaatgtgaagcattctggtagttacatgttttcattaatgtgatttcagagaagcacagaccttatcagatgctgatgtgataaaccaaagtttccttggttggctgtattgtagatactcccctggagccatcacctttttttggaggggggtggtgggtagaggcagggtctcgctacattccccagcctgggctcaaacgatccttctgcctcagcctcccaaagtactaaaattacaggtgtgagccacggtgcttggcctgcattaycattttgtagtgaagttttctttttatttcaagagagaacctattgccatccacttt

SEQ ID NO: 6724 - DNA, 2747 bp, Homo sapiens
ggcgtcagccccccacctctgtggttgggagggactattgcacgtctacactctcgtggggatgaaatagtgtttgagttcgttatttgcatttgcgcgttatctccccgaggagatgacagcttctctgccagcagcgggcaaagccaggccacgcgcgctgttgctagggcaaccacccggccaggcctgcggctgccgggaagccccctcgggagcgcgcacgggaagggctgtgggggcgctggccggctgcgacgtcagacccccgcccctcggcgcctgccggacccagctccattcccagccgcgcctccttcggtgggcagccggccggaactcacgaatcagagcagccgacacatcgtccgctcagccaatcgtagcagatgtgtgatcccgccacctccccggaccctggcggttgtcgctgagttggcgaccgcgggagacgctgctgaggcggcttcggttgcgggtcggaacggcgctgctctgcggggccggtccaggctggcagctgccggcgcttggcggtgagggcgggctcccgagtggccccccaccgaaggcggtgggaccagcggctgaggccaggatgccgtccaggcggcgcggcggctcctcactcatcccagatgttggttatctttctgaagtagactgtccatggcctgaacattttccgaaaatcattttgagcaaaatatctgtttaataacaagataaccacatcaagatggttggaaagctgaagcagaacttactattggcatgtctggtgattagttctgtgactgtgttttacctgggccagcatgccatggaatgccatcaccggatagaggaacgtagccagccagtcaaattggagagcacaaggaccactgtgagaactggcctggacctcaaagccaacaaaacctttgcctatcacaaagatatgcctttaatatttattggaggtgtgcctcggagtggaaccacactcatgagggccatgctggacgcacatcctgacattcgctgtggagaggaaaccagggtcattccccgaatcctggccctgaagcagatgtggtcacggtcaagtaaagagaagatccgcctggatgaggctggtgttactgatgaagtgctggattctgccatgcaagccttcttactagaaattatcgttaagcatggggagccagccccttatttatgtaataaagatccttttgccctgaaatctttaacttacctttctaggttattccccaatgccaaatttctcctgatggtccgagatggccgggcatcagtacattcaatgatttctcgaaaagttactatagctggatttgatctgaacagctatagggactgtttgacaaagtggaatcgtgctatagagaccatgtataaccagtgtatggaggttggttataaaaagtgcatgttggttcactatgaacaacttgtcttacatcctgaacggtggatgagaacactcttaaagttcctccagattccatggaaccactcagtattgcaccatgaagagatgattgggaaagctgggggagtgtctctgtcaaaagtggagagatctacagaccaagtaatcaagccagtcaatgtaggagctctatcaaaatgggttgggaagataccgccagatgttttacaagacatggcagtgattgctcctatgcttgccaagcttggatatgacccatatgccaacccacctaactacggaaaacctgatcccaaaattattgaaaacactcgaagggtctataagggagaattccaactacctgactttcttaaagaaaaaccacagactgagcaagtggagtagcagaaccaggagcctcttccatacatgaggaaagattgctgccttttcagcagaagggaaattcctaggattggctgtcccctgccaagcttggtggagcgtctgcaccttggctgcgccgcctgtgcatttgccagtttcctcccactgagaggatggaggtgtccgcacagctttgggcctcgtgagggatctgcctcctgagcaaagagctcttgatcccgatttcatgcacagccctgcagtaaggagcccagaaggaacatgtgtttcctgttaaaactcctcttgttctcttttcttacattatgacgtttgttttcaaggagagggtttaaaaatgggatcctgtaagcagacttgggcagtctccttttgaaataggttgtctgtacatgttctaakgttttgtagaacacgtgtgcctgtttaagtgtattgatgtgaataatattamatatcctaattatttaattcattgtattgtttctgagaagttgggaaattaccattatacatttacaacctaatgacttttgtattttatttttcaaaataaaagctttcaatgtgaagcattctggtagttacatgttttcattaatgtgatttcagagaagcacagaccttatcagatgctgatgtgataaaccaaagtttccttggttggctgtattgtagatactcccctggagccatcacctttttttggaggggggtggtgggtagaggcagggtctcgctacattccccagcctgggctcaaacgatccttctgcctcagcctcccaaagtactaaaattacaggtgtgagccacggtgcttggcctgcattaycattttgtagtgaagttttctttttatttcaagagagaacctattgccatccacttt

SEQ ID NO: 6725 - DNA, 2516 bp, Homo sapiens
ggctgtgggggcgctggccggctgcgacgtcagacccccgcccctcggcgcctgccggacccagctccattcccagccgcgcctccttcggtgggcagccggccggaactcacgaatcagagcagccgacacatcgtccgctcagccaatcgtagcagatgtgtgatcccgccacctccccggaccctggcggttgtcgctgagttggcgaccgcgggagacgctgctgaggcggcttcggttgcgggtcggaacggcgctgctctgcggggccggtccaggctggcagctgccggcgcttggcggtgagggcgggctcccgagtggccccccaccgaaggcggtgggaccagcggctgaggccaggatgccgtccaggcggcgcggcggctcctcactcatcccagatgttggttatctttctgaagtagactgtccatggcctgaacattttccgaaaatcattttgagcaaaatatctgtttaataacaagataaccacatcaagatggttggaaagctgaagcagaacttactattggcatgtctggtgattagttctgtgactgtgttttacctgggccagcatgccatggaatgccatcaccggatagaggaacgtagccagccagtcaaattggagagcacaaggaccactgtgagaactggcctggacctcaaagccaacaaaacctttgcctatcacaaagatatgcctttaatatttattggaggtgtgcctcggagtggaaccacactcatgagggccatgctggacgcacatcctgacattcgctgtggagaggaaaccagggtcattccccgaatcctggccctgaagcagatgtggtcacggtcaagtaaagagaagatccgcctggatgaggctggtgttactgatgaagtgctggattctgccatgcaagccttcttactagaaattatcgttaagcatggggagccagccccttatttatgtaataaagatccttttgccctgaaatctttaacttacctttctaggttattccccaatgccaaatttctcctgatggtccgagatggccgggcatcagtacattcaatgatttctcgaaaagttactatagctggatttgatctgaacagctatagggactgtttgacaaagtggaatcgtgctatagagaccatgtataaccagtgtatggaggttggttataaaaagtgcatgttggttcactatgaacaacttgtcttacatcctgaacggtggatgagaacactcttaaagttcctccagattccatggaaccactcagtattgcaccatgaagagatgattgggaaagctgggggagtgtctctgtcaaaagtggagagatctacagaccaagtaatcaagccagtcaatgtaggagctctatcaaaatgggttgggaagataccgccagatgttttacaagacatggcagtgattgctcctatgcttgccaagcttggatatgacccatatgccaacccacctaactacggaaaacctgatcccaaaattattgaaaacactcgaagggtctataagggagaattccaactacctgactttcttaaagaaaaaccacagactgagcaagtggagtagcagaaccaggagcctcttccatacatgaggaaagattgctgccttttcagcagaagggaaattcctaggattggctgtcccctgccaagcttggtggagcgtctgcaccttggctgcgccgcctgtgcatttgccagtttcctcccactgagaggatggaggtgtccgcacagctttgggcctcgtgagggatctgcctcctgagcaaagagctcttgatcccgatttcatgcacagccctgcagtaaggagcccagaaggaacatgtgtttcctgttaaaactcctcttgttctcttttcttacattatgacgtttgttttcaaggagagggtttaaaaatgggatcctgtaagcagacttgggcagtctccttttgaaataggttgtctgtacatgttctaakgttttgtagaacacgtgtgcctgtttaagtgtattgatgtgaataatattamatatcctaattatttaattcattgtattgtttctgagaagttgggaaattaccattatacatttacaacctaatgacttttgtattttatttttcaaaataaaagctttcaatgtgaagcattctggtagttacatgttttcattaatgtgatttcagagaagcacagaccttatcagatgctgatgtgataaaccaaagtttccttggttggctgtattgtagatactcccctggagccatcacctttttttggaggggggtggtgggtagaggcagggtctcgctacattccccagcctgggctcaaacgatccttctgcctcagcctcccaaagtactaaaattacaggtgtgagccacggtgcttggcctgcattaycattttgtagtgaagttttctttttatttcaagagagaacctattgccatccacttt

SEQ ID NO: 6726 - DNA, 2268 bp, Homo sapiens
ggtgactacttccggtgcagtgaaggctcggggctgaagcggggtaattcctctcctgcaattacttttggatggaagtatgcccctttctcagtagaagatggtaatcttggagaatgaccatggagaaggggatgagttctggagaagggctgccttccagatcatctcaggtttcggctggtaaaataacagccaaagagttggaaacaaagcagtcctataaagagaaacgaggaggctttgtgttggtgcatgcaggtgcaggttatcattctgaatccaaagccaaggagtataaacatgtatgcaaacgagcttgtcagaaggcaattgaaaagctgcaggccggtgctcttgcaactgacgcagtcactgcagcactggtggaacttgaggattctccttttacaaatgcaggaatgggatctaatctaaatctgttaggtgaaattgagtgtgatgccagcataatggatggaaaatccttaaattttggagcagttggagcactgagtggaatcaagaacccagtctcggttgccaacagactcttatgtgaagggcagaagggcaagctctcggctggcagaattcctccctgctttttagttggagaaggagcctacagatgggcagtagatcatggaataccctcttgccctcctaacatcatgaccacaaattttatgcaactaaagaaaagaagacaatcaagtgagaaggaaaatgactcaggcactttggacacggtaggcgctgtggttgtggaccacgaagggaatgttgctgctgctgtctccagtggaggcttggccttgaaacatccggggagagttgggcaggctgctctttatggatgtggctgctgggctgaaaatactggagctcataacccctactccacagctgatgtggagagcatcttgtgcgcaccatactggctagagaatgttcacatgctttacaagctgaggatgctcaccaagccctgttggagactatgcaaaacaagtttatcmgttcacctttccttgccagtgaagatggcgtgcttggcggagtgattgtcctccgttcatgcagatgttctgccgagcctgactcctcccaaaataagcagacacttctagtggaatttctgtggagccacacgacggagagcatgtgtgtcggatatatgtcagcccaggatgggaaagccaagactcacatttcaagacttcctcctggtgcggtggcaggacagtctgtggcaatcgaaggtggggtgtgccgcctggagagcccagtgaactgacccttcaggctgagtgtgaagcgtctcagaggcatttcagaacctgagcttttgggggtttttaactgaagttggttgttttatctttcttgttttataattcctattgcaacctcgtgcactgctcgagacacaagtgctgctgtagttagcgcttagtgacacgcgggcctttggtgggtgagygggactgtgtgtgagtgtgtgcgcgtatgtgcgcacatatgtgtatgtgtggagtatgtgtgtttgcttctccgtggatgaaatagaaactcctcattgtgtgaccaggaatgrttaaatcatctttacaaaatgtgtgctttaactgtttacaagtaaaacctaaagttgcaggaaacattttttatttcgtaaagaggtaccaactgtcgctgatgtgatatgtcagaactgaagagtaaatctacttgtttaaatgacttgacagtggtagtgctccatttaataacagtaataagtaataaagtgtttttatttgttaaccagtttaagtggatcctgtggtaacttaaactgttgttctcatcccttatatggggcatttttctttaacaaagaatggtttcagtgaaacaatctagcagagaattaatgtcagaacctttttaaataatagtctgattgatacagtttgtacttatttcatcaagcttttctaagcttaaatattgcatagcttcgagctgtatggactatattatgaaagaatatgtaaagagaacatacagtaatgcacagtccttaatttgtgtataatggaaagttatttacaatataacactgtaaataagaaagcaaagtttatgggaaaattcaatattatctttgtttttgtttaaatatatttttaagataaaggcacaaaaataaaagaagcgtattactgggtatagtatgtgactcctcttctcagactaataaattatcttttgaatccttgg

SEQ ID NO: 6727 - DNA, 2347 bp, Homo sapiens
ggtgactacttccggtgcagtgaaggctcggggctgaagcggggtaattcctctcctgcaattacttttggatggaagtatgcccctttctcagtagaagatggtaatcttggagaatgaccatggagaaggggatgagttctggagaagggctgccttccagatcatctcaggtttcggctggtaaaataacagccaaagagttggaaacaaagcagtcctataaagagaaacgaggaggctttgtgttggtgcatgcaggtgcaggttatcattctgaatccaaagccaaggagtataaacatgtatgcaaacgagcttgtcagaaggcaattgaaaagctgcaggccggtgctcttgcaactgacgcagtcactgcagcactggtggaacttgaggattctccttttacaaatgcaggaatgggatctaatctaaatctgttaggtgaaattgagtgtgatgccagcataatggatggaaaatccttaaattttggagcagttggagcactgagtggaatcaagaacccagtctcggttgccaacagactcttatgtgaagggcagaagggcaagctctcggctggcagaattcctccctgctttttagttggagaaggagcctacagatgggcagtagatcatggaataccctcttgccctcctaacatcatgaccacaagattcagtttagctgcatttaaaagaaacaagaggaaactagagctggcagaaagggtggacacagattttatgcaactaaagaaaagaagacaatcaagtgagaaggaaaatgactcaggcactttggacacggtaggcgctgtggttgtggaccacgaagggaatgttgctgctgctgtctccagtggaggcttggccttgaaacatccggggagagttgggcaggctgctctttatggatgtggctgctgggctgaaaatactggagctcataacccctactccacagctgtgagtacctcaggatgtggagagcatcttgtgcgcaccatactggctagagaatgttcacatgctttacaagctgaggatgctcaccaagccctgttggagactatgcaaaacaagtttatcmgttcacctttccttgccagtgaagatggcgtgcttggcggagtgattgtcctccgttcatgcagatgttctgccgagcctgactcctcccaaaataagcagacacttctagtggaatttctgtggagccacacgacggagagcatgtgtgtcggatatatgtcagcccaggatgggaaagccaagactcacatttcaagacttcctcctggtgcggtggcaggacagtctgtggcaatcgaaggtggggtgtgccgcctggagagcccagtgaactgacccttcaggctgagtgtgaagcgtctcagaggcatttcagaacctgagcttttgggggtttttaactgaagttggttgttttatctttcttgttttataattcctattgcaacctcgtgcactgctcgagacacaagtgctgctgtagttagcgcttagtgacacgcgggcctttggtgggtgagygggactgtgtgtgagtgtgtgcgcgtatgtgcgcacatatgtgtatgtgtggagtatgtgtgtttgcttctccgtggatgaaatagaaactcctcattgtgtgaccaggaatgrttaaatcatctttacaaaatgtgtgctttaactgtttacaagtaaaacctaaagttgcaggaaacattttttatttcgtaaagaggtaccaactgtcgctgatgtgatatgtcagaactgaagagtaaatctacttgtttaaatgacttgacagtggtagtgctccatttaataacagtaataagtaataaagtgtttttatttgttaaccagtttaagtggatcctgtggtaacttaaactgttgttctcatcccttatatggggcatttttctttaacaaagaatggtttcagtgaaacaatctagcagagaattaatgtcagaacctttttaaataatagtctgattgatacagtttgtacttatttcatcaagcttttctaagcttaaatattgcatagcttcgagctgtatggactatattatgaaagaatatgtaaagagaacatacagtaatgcacagtccttaatttgtgtataatggaaagttatttacaatataacactgtaaataagaaagcaaagtttatgggaaaattcaatattatctttgtttttgtttaaatatatttttaagataaaggcacaaaaataaaagaagcgtattactgggtatagtatgtgactcctcttctcagactaataaattatcttttgaatccttgg

SEQ ID NO: 6728 - DNA, 609 bp, Homo sapiens
ggtgactacttccggtgcagtgaaggctcggggctgaagcggggtaattcctctcctgcaattacttttggatggaagtatgcccctttctcagtagaagatggtaatcttggagaatgaccatggagaaggggatgagttctggagaagggctgccttccagatcatctcaggtttcggctggtaaaataacagccaaagagttggaaacaaagcagtcctataaagagaaacgaggaggctttgtgttggtgcatgcaggtgcaggttatcattctgaatccaaagccaaggagtataaacatgtatgcaaacgagcttgtcagaaggcaattgaaaagctgcaggccggtgctcttgcaactgacgcagtcactgcagcactggtggaacttgagctcatgtggaaaggacaatttcaggtactgtgtgtgctaactaacctcttcctggacatcataaagaatccaactaaaacaaagtttaaaactatttcaaatgtgaaagtttattgaagccaatattctattttagagatttgtgttatgtttttgacaagtaactgtactgtaattatgtggctttcaattaaaaaatgtgaaaactrtt

SEQ ID NO: 6729 - DNA, 2305 bp, Homo sapiens
ggtaattcctctcctgcaattacttttggatggaagtatgcccctttctcagtagaagatggtaatcttggagaatgaccatggagaaggggatgagttctggagaagggctgccttccagatcatctcaggtttcggctggtaaaataacagccaaagagttggaaacaaagcagtcctataaagagaaacgaggaggctttgtgttggtgcatgcaggtgcaggttatcattctgaatccaaagccaaggagtataaacatgtatgcaaacgagcttgtcagaaggcaattgaaaagctgcaggccggtgctcttgcaactgacgcagtcactgcagcactggtggaacttgaggattctccttttacaaatgcaggaatgggatctaatctaaatctgttaggtgaaattgagtgtgatgccagcataatggatggaaaatccttaaattttggagcagttggagcactgagtggaatcaagaacccagtctcggttgccaacagactcttatgtgaagggcagaagggcaagctctcggctggcagaattcctccctgctttttagttggagaaggagcctacagatgggcagtagatcatggaataccctcttgccctcctaacatcatgaccacaagattcagtttagctgcatttaaaagaaacaagaggaaactagagctggcagaaagggtggacacagattttatgcaactaaagaaaagaagacaatcaagtgagaaggaaaatgactcaggcactttggacacggtaggcgctgtggttgtggaccacgaagggaatgttgctgctgctgtctccagtggaggcttggccttgaaacatccggggagagttgggcaggctgctctttatggatgtggctgctgggctgaaaatactggagctcataacccctactccacagctgtgagtacctcaggatgtggagagcatcttgtgcgcaccatactggctagagaatgttcacatgctttacaagctgaggatgctcaccaagccctgttggagactatgcaaaacaagtttatcmgttcacctttccttgccagtgaagatggcgtgcttggcggagtgattgtcctccgttcatgcagatgttctgccgagcctgactcctcccaaaataagcagacacttctagtggaatttctgtggagccacacgacggagagcatgtgtgtcggatatatgtcagcccaggatgggaaagccaagactcacatttcaagacttcctcctggtgcggtggcaggacagtctgtggcaatcgaaggtggggtgtgccgcctggagagcccagtgaactgacccttcaggctgagtgtgaagcgtctcagaggcatttcagaacctgagcttttgggggtttttaactgaagttggttgttttatctttcttgttttataattcctattgcaacctcgtgcactgctcgagacacaagtgctgctgtagttagcgcttagtgacacgcgggcctttggtgggtgagygggactgtgtgtgagtgtgtgcgcgtatgtgcgcacatatgtgtatgtgtggagtatgtgtgtttgcttctccgtggatgaaatagaaactcctcattgtgtgaccaggaatgrttaaatcatctttacaaaatgtgtgctttaactgtttacaagtaaaacctaaagttgcaggaaacattttttatttcgtaaagaggtaccaactgtcgctgatgtgatatgtcagaactgaagagtaaatctacttgtttaaatgacttgacagtggtagtgctccatttaataacagtaataagtaataaagtgtttttatttgttaaccagtttaagtggatcctgtggtaacttaaactgttgttctcatcccttatatggggcatttttctttaacaaagaatggtttcagtgaaacaatctagcagagaattaatgtcagaacctttttaaataatagtctgattgatacagtttgtacttatttcatcaagcttttctaagcttaaatattgcatagcttcgagctgtatggactatattatgaaagaatatgtaaagagaacatacagtaatgcacagtccttaatttgtgtataatggaaagttatttacaatataacactgtaaataagaaagcaaagtttatgggaaaattcaatattatctttgtttttgtttaaatatatttttaagataaaggcacaaaaataaaagaagcgtattactgggtatagtatgtgactcctcttctcagactaataaattatcttttgaatccttgg

SEQ ID NO: 6730 - DNA, 2533 bp, Homo sapiens
ggtgactacttccggtgcagtgaaggctcggggctgaagcggggtaattcctctcctgcaattacttttggatggaagtatgcccctttctcagtagaagatggtaatcttggagaatgaccatggagaaggggatgagttctggagaagggctgccttccagatcatctcaggtttcggctggtaaaataacagccaaagagttggaaacaaagcagtcctataaagagaaacgaggaggctttgtgttggtgcatgcaggtgcaggttatcattctgaatccaaagccaaggagtataaacatgtatgcaaacgagcttgtcagaaggcaattgaaaagctgcaggccggtgctcttgcaactgacgcagtcactgcagcactggtggaacttgagatgcctttacaagccccctccagatgtggttcatggagaatatgaagttaagcagctgacggagttcatttacactggagtttctcaagctagaattgaggctccatgtagtgtttatagttttaacccctacatgtaggtgtatggtccttttcaaaaacaatttttcctgaattctagtgtgaggattctccttttacaaatgcaggaatgggatctaatctaaatctgttaggtgaaattgagtgtgatgccagcataatggatggaaaatccttaaattttggagcagttggagcactgagtggaatcaagaacccagtctcggttgccaacagactcttatgtgaagggcagaagggcaagctctcggctggcagaattcctccctgctttttagttggagaaggagcctacagatgggcagtagatcatggaataccctcttgccctcctaacatcatgaccacaagattcagtttagctgcatttaaaagaaacaagaggaaactagagctggcagaaagggtggacacagattttatgcaactaaagaaaagaagacaatcaagtgagaaggaaaatgactcaggcactttggacacggtaggcgctgtggttgtggaccacgaagggaatgttgctgctgctgtctccagtggaggcttggccttgaaacatccggggagagttgggcaggctgctctttatggatgtggctgctgggctgaaaatactggagctcataacccctactccacagctgtgagtacctcaggatgtggagagcatcttgtgcgcaccatactggctagagaatgttcacatgctttacaagctgaggatgctcaccaagccctgttggagactatgcaaaacaagtttatcmgttcacctttccttgccagtgaagatggcgtgcttggcggagtgattgtcctccgttcatgcagatgttctgccgagcctgactcctcccaaaataagcagacacttctagtggaatttctgtggagccacacgacggagagcatgtgtgtcggatatatgtcagcccaggatgggaaagccaagactcacatttcaagacttcctcctggtgcggtggcaggacagtctgtggcaatcgaaggtggggtgtgccgcctggagagcccagtgaactgacccttcaggctgagtgtgaagcgtctcagaggcatttcagaacctgagcttttgggggtttttaactgaagttggttgttttatctttcttgttttataattcctattgcaacctcgtgcactgctcgagacacaagtgctgctgtagttagcgcttagtgacacgcgggcctttggtgggtgagygggactgtgtgtgagtgtgtgcgcgtatgtgcgcacatatgtgtatgtgtggagtatgtgtgtttgcttctccgtggatgaaatagaaactcctcattgtgtgaccaggaatgrttaaatcatctttacaaaatgtgtgctttaactgtttacaagtaaaacctaaagttgcaggaaacattttttatttcgtaaagaggtaccaactgtcgctgatgtgatatgtcagaactgaagagtaaatctacttgtttaaatgacttgacagtggtagtgctccatttaataacagtaataagtaataaagtgtttttatttgttaaccagtttaagtggatcctgtggtaacttaaactgttgttctcatcccttatatggggcatttttctttaacaaagaatggtttcagtgaaacaatctagcagagaattaatgtcagaacctttttaaataatagtctgattgatacagtttgtacttatttcatcaagcttttctaagcttaaatattgcatagcttcgagctgtatggactatattatgaaagaatatgtaaagagaacatacagtaatgcacagtccttaatttgtgtataatggaaagttatttacaatataacactgtaaataagaaagcaaagtttatgggaaaattcaatattatctttgtttttgtttaaatatatttttaagataaaggcacaaaaataaaagaagcgtattactgggtatagtatgtgactcctcttctcagactaataaattatcttttgaatccttgg

SEQ ID NO: 6731 - DNA, 1018 bp, Homo sapiens
ctggtgaaggtgaaggccaaagtaaaaagatttggcagtatcgggcgctggtcaccagggctgcttttaactctggtaaagcagatgttctcaccatcagtgacccctyccttgacctcaactacatagtctacatgttcccatatgattccacccatggcaaatcccatggcaccatcaaggctgagaatgggaagcttgtcatcaatggaaatcccatcagcatctttcaggagtgagatcccaccaaaatcaaatggggccatgctggtgctgagtacattatggagcccaccagtatcttcacgaccatggagaaggctggagctcacttgcagcagggagccaaaagggtcatcatctctgctgcctctgctgaggcccccatgtttatataggcatgaaccatgagaagtatgacaacagtctcaagatcgtcagcaatgcctcctgtaccaccaactgcttagcacccctggccaaagccatctatgacaactttggtatcatggaaggattcatgaccacagtccacgctatcactgccacccagaagactgtggatggcccctccgggaaactgtggcatgagggctgtgtggctctccagaacatcatccctgcatctactggcactgccaaggctgtgggcaaggtcatccccgagctgaacaggaagctcaatggcatggccttccatgtccccattgccaatgtgtcagttatggacctgacctaccgtctggagaaacctgccaaatatgatgatatcaagaaggtggtgaagcaggtgtcagagggccccctcaagggcatcctggactacactgagcaccagattgtctcctccaacagtgayacccactcttccatcttccatgctggggctggcaatgccctcaacaaccaccttgtcaagctcatttcctggtgtgacaacgaatttggctacagcaatatggtggtggacctcatggcccacatggcctccaaggaataagacccctggaccaccagc

SEQ ID NO: 6732 - DNA, 4012 bp, Homo sapiens
gccccgtctcaccctttcggatgcctcccctagaaccctaccactttccacccctttccgtctgttatttctcccaaacttgcgcccgcacaggcccctctggaacactcctgccccgtagtgcccctcgtccccgctccgtagagaaagagcgtgcgtgccgcgcatttctggcctggggagcgggtggagtaaacctgcgggaaccattttacgacaacgtgcggctgtgcggtgtggctgacggcaacgccgctgctcttggagaggtcactccggagacggcgttggttttggggtgtggggggttggtggcactatgtggcgcgtctgtgcgcgacgggctcagaatgtagccccatgggcgggactcgaggctcggtggacggccttgcaggaggtacccggaactccacgagtgacctcgcgatctggcccggctcccgytcgtcgcaacagcgtgactacagggtatggcggggtccgggcactgtgcggctggacccccagttctggggccacgccgcggaaccgcttactgctgcagcttttggggtcgcccggccgccgctattacagtcttcccccgcatcagaaggttccattgccttytytttcccccacaatgcaggcaggcaccatagcccgttgggaaaaaaaagagggggacmaaatcaatgaaggtgacctaattgcagaggttgaaactgataaagccactgttggatttgagagcctggaggagtgttatatggcaaagatacttgttgctgaaggtaccagggatgttcccatcggagcgatcatctgtatcacagttggcaagcctgaggatattgaggcctttaaaaattatacactggattcctcagcagcacctaccccacaagcggccccagcaccaacccctgctgccactgcttcgccacctacaccttctgctcaggctcctggtagctcatatccccctcacatgcaggtacttcttcctgccctctctcccaccatgacyatgggcacagttcagagatgggaaaaaaaagtgggtgagaagctaagtgaaggagacttactggcagagatagaaactgacaaagccactataggttttgaagtacaggaagaaggttatctggcaaaaatcctggtccctgaaggcacaagagatgtccctctaggaaccccactctgtatcattgtagaaaaagaggcagatatatcagcatttgctgactataggccaaccgaagtaacagatttaaaaccacaagygccaccacctaccccacccccggtggccgctgttcctccaactccccagcctttagctcctacaccttcagcaccctgcccagctactcctgctggaccaaagggaagggtgtttgttagccctcttgcaaagaagttggcagtagagaaagggattgatcttacacaagtaaaagggacaggaccagatggtagaatcaccaagaaggatatcgactcttttgtgcctagtaaagttgctcctgctccggcagctgttgtgcctcccacaggtcctggaatggcaccagttcctacaggtgtcttcacagatatcccaatcagcaacattcgtcgggttattgcacagcgattaatgcaatcaaagcaaaccatacctcattattacctttctatcratgtaaatatgggagaagttttgttggtacggaaagaacttaataagatattagaagggagaagcaaaatttctgtcaatgacttcatcataaaagcttcagctttggcatgtttaaaagttcccgaagcaaattcttcttggatggacacagttataagacaaaatcatgttgttgatgtcagtgttgcggtcagtactcctgcaggactcatcacacctattgtgtttaatgcacatataaaaggagtggaaaccattgctaatgatgttgtttctttagcaaccaaagcaagagagggtaaactacagccacatgaattccagggtggcacttttacgatctccaatttaggaatgtttggaattaagaatttctctgctattattaacccacctcaagcatgtattttggcaattggtgcttcagaggataaactggtccctgcagataatgaaaaagggtttgatgtggctagcatgatgtctgttacactcagttgtgatcaccgggtggtggatggagcagttggagcccagtggcttgctgagtttagaaagtaccttgaaaaacctatcactatgttgttgtaactaactcaagaatttytaaactctcccaggtcacactgattcattcttaacaagatatttatatgttattaaacaggtggttctttttattttaamcagttatttttattattgagtctgtccagataagttatttataatgggcattactgaatttttaaaatgccgattacacccaaatattgtgcacatttaataatcagacaccagatttttagctctgtactcctaattaagggacatgtatgtggccttgcctagccctttggtgataagtacttcctctaggaaatgtacgataggtagaattgtggttccctaaagacaagtacataaaggtgaccctgatgaaaccttgaagttctgaaatttaactgcctaaaatgttctccttagatgtgagagaaagagaaatcagraaaattaattctcttgggggaagggcttgaattgaagctttactttagaatttagccctggtttgaaattttccattacatgatcttggtttatcatcgatgggaagggtagaaaacttcaaggaaaataagtgaaattttaaaagtcagcattttcttagacctcttcagctgattgtttatttttctatgaattcctacacatggttattcccccctacttgagataatctaaatataaaccagctacttgatgtaactgagaatttgtgtggatatttatttaaacaaatgtgtaattttgagtacagaattcaacagttacctccaaaaaagaaacattgttaatataatttaacagaagttgtgaaactaaaattttctaagattaactggtagttcattgtaaatgaacataatgaacagaatttatgactccactgtggaaaatgctatcaaataactaaggaatatatatggaataagtgtacatatgtaaaatattgttactagagttagatatgtgccaaagtccatttatcccaaatcctgtctgaaaaggaggggtacattggtaaacattttggagtgcttaaaaatgccaaaaacaaaatggtaatttctactttgataaagtaaaaaagttaaatgtgtgtaaaaaagtgttctgtgtccttctactccagcatcgtctcatgtaaaataagaaagccctaaaatactattggagagaaaaaattaactaggttgctactttatttgcctaaatacttttttctattttgttagattttgcctttcttttggaaggaaggaggcgatattctgsattataaaaatgaattgggaacattatcacaattccagactttctattaatatttatgtgttttaataaacgtttgaaattatttatgactacttaaaatgaatctgaccagtgcttcctggtatatgtaatatgtggagttagcccctgaaatttgctttaagtgtttcagtgttgaatctgtttctaaatattcattattacatggtacacaagtgacactccatatattccacacagacttttaccttgctgtattattatgaaaacaatacattaatttgatttttcagtaattagtaattttaggttgaagattatccaaaagaaacaagcttatcacaagggaccatcatcaatatgatccaaatctggttcaaacattcaaaacttcaaagataattcatctttcgctaatgcttgtggttctgttgttcccttgaaaaaaaataaaaacagttgccttctaataaacattgttgagttaaaaattaatctgag

SEQ ID NO: 6733 - DNA, 3754 bp, Homo sapiens
gccccgtctcaccctttcggatgcctcccctagaaccctaccactttccacccctttccgtctgttatttctcccaaacttgcgcccgcacaggcccctctggaacactcctgccccgtagtgcccctcgtccccgctccgtagagaaagagcgtgcgtgccgcgcatttctggcctggggagcgggtggagtaaacctgcgggaaccattttacgacaacgtgcggctgtgcggtgtggctgacggcaacgccgctgctcttggagaggtcactccggagacggcgttggttttggggtgtggggggttggtggcactatgtggcgcgtctgtgcgcgacgggctcagaatgtagccccatgggcgggactcgaggctcggtggacggccttgcaggaggtacccggaactccacgagtgacctcgcgatctggcccggctcccgytcgtcgcaacagcgtgactacagggtatggcggggtccgggcactgtgcggctggacccccagttctggggccacgccgcggaaccgcttactgctgcagcttttggggtcgcccggccgccgctattacagtcttcccccgcatcagaaggttccattgccttytytttcccccacaatgcaggcaggcaccatagcccgttgggaaaaaaaagagggggacmaaatcaatgaaggtgacctaattgcagaggttgaaactgataaagccactgttggatttgagagcctggaggagtgttatatggcaaagatacttgttgctgaaggtaccagggatgttcccatcggagcgatcatctgtatcacagttggcaagcctgaggatattgaggcctttaaaaattatacactggattcctcagcagcacctaccccacaagcggccccagcaccaacccctgctgccactgcttcgccacctacaccttctgctcaggctcctggtagctcatatccccctcacatgcaggtacttcttcctgccctctctcccaccatgacyatgggcacagttcagagatgggaaaaaaaagtgggtgagaagctaagtgaaggagacttactggcagagatagaaactgacaaagccactataggttttgaagtacaggaagaaggttatctggcaaaaatcctggtccctgaaggcacaagagatgtccctctaggaaccccactctgtatcattgtagaaaaagaggcagatatatcagcatttgctgactataggccaaccgaagtaacagatttaaaaccacaagygccaccacctaccccacccccggtggccgctgttcctccaactccccagcctttagctcctacaccttcagcaccctgcccagctactcctgctggaccaaagggaagggtgtttgttagccctcttgcaaagaagttggcagtagagaaagggattgatcttacacaagtaaaagggacaggaccagatggtagaatcaccaagaaggatatcgactcttttgtgcctagtaaagttgctcctgctccggcagctgttgtgcctcccacaggtcctggaatggcaccagttcctacaggtgtcttcacagatatcccaatcagcaacattcgtcgggttattgcacagcgattaatgcaatcaaagcaaaccatacctcattattacctttctatcratgtaaatatgggagaagttttgttggtacggaaagaacttaataagatattagaagggagaagcaaaatttctgtcaatgacttcatcataaaagcttcagctttggcatgtttaaaagttcccgaagcaaattcttcttggatggacacagttataagacaaaatcatgttgttgatgtcagtgttgcggtcagtactcctgcaggactcatcacacctattgtgtttaatgcacatataaaaggagtggaaaccattgctaatgatgttgtttctttagcaaccaaagcaagagagggtaaactacagccacatgaattccagggtggcacttttacgatctccaatttaggaatgtttggaattaagaatttctctgctattattaacccacctcaagcatgtattttggcaattggtgcttcagaggataaactggtccctgcagataatgaaaaagggtttgatgtggctagcatgatgtctgttacactcagttgtgatcaccgggtggtggatggagcagttggagcccagtggcttgctgagtttagaaagtaccttgaaaaacctatcactatgttgttgtaactaactcaagaatttytaaactctcccaggtcacactgattcattcttaacaagatatttatatgttattaaacaggtggttctttttattttaamcagttatttttattattgagtctgtccagataagttatttataatgggcattactgaatttttaaaatgccgattacacccaaatattgtgcacatttaataatcagacaccagatttttagctctgtactcctaattaagggacatgtatgtggccttgcctagccctttggtgataagtacttcctctaggaaatgtacgataggtagaattgtggttccctaaagacaagtacataaaggtgaccctgatgaaaccttgaagttctgaaatttaactgcctaaaatgttctccttagatgtgagagaaagagaaatcagraaaattaattctcttgggggaagggcttgaattgaagctttactttagaatttagccctggtttgaaattttccattacatgatcttggtttatcatcgatgggaagggtagaaaacttcaaggaaaataagtgaaattttaaaagtcagcattttcttagacctcttcagctgattgtttatttttctatgaattcctacacatggttattcccccctacttgagataatctaaatataaaccagctacttgatgtaactgagaatttgtgtggatatttatttaaacaaatgtgtaattttgagtacagaattcaacagttacctccaaaaaagaaacattgttaatataatttaacagaagttgtgaaactaaaattttcaaaatggtaatttctactttgataaagtaaaaaagttaaatgtgtgtaaaaaagtgttctgtgtccttctactccagcatcgtctcatgtaaaataagaaagccctaaaatactattggagagaaaaaattaactaggttgctactttatttgcctaaatacttttttctattttgttagattttgcctttcttttggaaggaaggaggcgatattctgsattataaaaatgaattgggaacattatcacaattccagactttctattaatatttatgtgttttaataaacgtttgaaattatttatgactacttaaaatgaatctgaccagtgcttcctggtatatgtaatatgtggagttagcccctgaaatttgctttaagtgtttcagtgttgaatctgtttctaaatattcattattacatggtacacaagtgacactccatatattccacacagacttttaccttgctgtattattatgaaaacaatacattaatttgatttttcagtaattaattatccaaaagaaacaagcttatcacaagggaccatcatcaatatgatccaaatctggttcaaacattcaaaacttcaaagataattcatctttcgctaatgcttgtggttctgttgttcccttgaaaaaaaataaaaacagttgccttctaataaacattgttgagtt

SEQ ID NO: 6734 - DNA, 5431 bp, Homo sapiens
gtcttcttgagttcagacctacaactcctgcagtgggggtcagaagggagccttaatcatcgggacagaaackcggctccccaacttcggctaaaccagcgtggcggccttcgtccctactgcctgggcgcggggcggggcctgggcgcggggcggggcctgggcgcggggcgggaggcggtgaccagcagcaggaggagaaagaacatggcgggcgcatcagagctcgggaccggcccaggagcagcgggtggagatggagatgattcgctatacccgatcgcggttttaatcgacgagctccgcaatgaagacgtgcagctccgactcaacagtattaagaagttatcaacaattgccctagcacttggagtagaaaggacccgaagtgaattgttgccatttcttacagatacaatttatgatgaagatgaggtactattagctcttgctgagcagctgggaaatttcactgrcctagtgggaggtcctgactttgcccactgtctgctgcctcctttggaaaatctggcaactgtggaagagactgttgttcgtgacaaggctgtggagtccctgagacagatctcccaggagcatactcctgttgctctggaagcttattttgtacctctggtgaaacgcttagcaagtggggattggttcacctctcgcacatctgcatgtggtttgttcagcgtttgctatcccagggcatcaaatgctgttaaagcagaaatcagacagcaattccgttccttgtgctcagatgacacaccaatggtacgacgtgctgctgcttccaaattgggtgaatttgcaaaagttttggaattagacagtgtgaaaagtgaaattgttccactgttcactagtctagcttcagatgaacaggattcagtgcgcctccttgctgtggaagcttgtgtcagtattgcccagttattgtctcaggatgaccttgagactttggtgatgcctacacttcgacaagcagcagaagataaatcttggcgcgttcgctatatggtggctgacagattttcagagctccagaaagccatgggtcctaaaatcaccctaaatgacctcatccccgcctttcagaacctacttaaagactgtgaagctgaagtccgggcagctgctgcccacaaagtaaaagaacttggtgagaacttgcccattgaagatagagagaccataattatgaatcaaattctgccttatataaaggaattagtatccgataccaatcaacatgtcaaatcggctctagcttctgtaattatgggattgtctactattttgggcaaagaaaataccattgaacatcttctacctcttttcttagctcagttaaaggatgagtgtcctgacgttcgtttgaatatcatctccaatttggattgtgtaaatgaagtgattggaatccgtcagctctctcagtctctccttcctgccatagtggagctggcagaagatgccaaatggagggtccgcctggccatcattgagtatatgccgctgctggcaggccagctgggtgtggaattctttgatgaaaagctgaattctttatgtatggcttggctcrtggaccatgtatrcgccatccgagaagctgccaccaacaacctcatgaaactagttcagaagtttggtacagagtgggcccaaaatactattgttcccaaagtgttagtaatggcaaatgatcctaattacttgcatagaatgaccactttattctgcattaatgcactgtctgaggcctgtggtcaggaaataactactaagcaaatgctgcccatcgtattaaaaatggcaggagaccaagtagcaaatgttcgcttcaatgtggccaaatctctacaaaagattggaccaattctagataccaatgctttacagggagaagtgaagccagtactacagaagttaggtcaagatgaagacatggatgtcaaatactttgcacaggaagctataagtgttcttgcattggcataatgaggagcaggagggaaaaggcctttactagattcttgtcacaaatttmtagtcaatgtgttcttaactgggtggagaaagaatggaaaaccttcaagatctcatccaagcaaatggcaacaacttagaagaaatcatttagtgacttaattctttctaaagatgaaatgggattgttttttactcgtcttccttgttaaatcattatttaagccgttcttattgaccaattcctgacacttgattgtctcctaatgctttatccatcaccacctgggctcctgcatcctcactgtggaatcaggcaccagccacataatgttccagacaaagcctggaagggtgtggacccagacgtggagtggagtgattctcttgacgtttacatatatctctgtgtctctccatcattccaaagctaaatgtacatgtttagaataacttattttataaactcttcgggagacatgttgagatttgaccgtaatgaaarccacattttcctgaattatgatggtctgcattagtctcatgtgaaaggggaatgtggaagctcagggttaatgtagtggttgttttggtttttatttgctcaattttgtctgtactcatgtcattcagaaacctgaagtgtggctgcatcttgctgctaatgtgtgatgttgacgcctaactgaatttgaacagctcaccactgtgcctacatttaaaaatacttctctctcttttctaaaaagctttaactgtagtgcctcctaataagcagtatgtttgtttcattgtgagattgcagttctgtatttcgaatgagtctaagaaccacagggataatactgtgcagatttcctgttctttacctggctctgcttccagcagtattgacacctagtccttgctgcattgtacagtagcttttcaaactgcagttttattgctaagtttttagtatgggtgatactggagtcttatcatttgaagtstttgcttttctacttttacagtaaaacctcattaattctgaaatttaagataatgagttaagctgaagagtttactgaagcaaattaatagtgaggaagcctatttgaactacttaaacagtattaaagccctttttaaaaagcacctatttgggatcatttgaggtcaagaattcgagatcagcctgaccaacatggtgaaaccccatctctactaaaaatacaaaaaagttagctgggcgtggtggcacacacctgtagtcccagctactcaggaggctgaggcaggagaattgcttgaacctgggaggtagaggttgcactgagccgagatcgcgccactgcactctagcctgggccatagagcgagagtccatctcaaaaaaaaacaactatttttcacataatcaaactcaccttgtctcatgacttttggttaagggggttttcccatagtttatttttctctcagtgcatcttgctatgaggtttgcttgttacccttttggtttttgaattgttgattttgttcacaacctcttttaaatctaacaagtcctgttctgtttagtgaaggcccaaagactcctctaagactttgtatatttgttacataaaaccaagttttactaaatactttaaaatttgtcctacattcgaaaaatagaaattgtaaatcagaggttatctgtctgcattttaaactgccaaattaccttatagtaagtttctattttatgactttgggccaagaattaagtattttcctaagcacaaatctttttctatattctcattttaatatcttatgctattattctgtaaacattttaattttagtttcatgagtctttattttttgttacctgcaagttatgttcttcttcattgaatttcatatttgagagacatttgtcttcatgaagcagatttgcactggaaccattgctttactctggttggaaatgccattgttttggggacagacttttaaaatgcccttgtgtctcccagtgaggagccctaagcattgacttctctaccctaaaactgtttgagagagggagagtgggccctggctttctcaagcatgggtcgggggttcagcggggcctctgtcttttgtggtgacccctcaggggtttcattgtttccttctgacttaagcaatagagagagaatttgttttggtactcttcagaggaattgtgctttggctcataacttggccatgttctccatgaattagttctcctatttttttttttaactaccttaaacttaagggaaaagttctcctatcttgatttcactggaatataggctttaggagctctgtaaggctggtattttkgtctgttttatcttctactgtatcgccagtgcctggaacagtgtctggtgcacataataggtgctcaataaaaatgtgttcaatggatgaatttctaaaatatcctccaatgtgtgcatggaacaaataatcaaaagaaccagactgtgtcttattctcccactgacagaaagattttcctgctttcaggaaacaagctttatgtggcccttttctggtcccctggcttagactacagttctgtgtggatttgtctgattgcttcagacatgtaatgttgtttttcatccttggcagcttacatcagttgtttgtttgattagaaaaatgaagcagacacacacacacacacacacacacacacacacacacmcacacacaaayatataacctatgccaataaaaatgtctcagcaacagtggaattcaccttggtgtttctctctgtaatttgtgtggggtttacccctcacaggtttaagagaccaggtcttgtttctctctctgtgctaccaagaagatgtgaacctgaggatgcatcttgtttcataagaaggaaggcaggtgaatatgtggtttctaacgaggtcttgttgaaataacgggctgccctcagctcacagaaataccacagctcagccactgtgatgcagagccccaggggtctttgccagacaacttgtcctgactcaacagagacggcagcctgacctttgagctggcttgtccaggcattcaggttgcttgcgtagacttccagggaagcaagcctgtccttcctgacccggcggttaacctggtgcacttttgttcytttgttaactgttgtgttgtcactaaactgaaaggctggggcttgcccttagacgtcacattggctctgtccctgtggcgatggcagggcagggtggccaaacaggtcaggtgcttgttctgtcctcttgccttttacttaaattcctctgacttttaaaaatggtgacactcttatcgtaaagcttcttatttttctccactgcttggatatgaaactgtagagggagaggccctgttgcccagtgttctcctggtttagcagctgagg

SEQ ID NO: 6735 - DNA, 3808 bp, Homo sapiens
gtcttcttgagttcagacctacaactcctgcagtgggggtcagaagggagccttaatcatcgggacagaaackcggctccccaacttcggctaaaccagcgtggcggccttcgtccctactgcctgggcgcggggcggggcctgggcgcggggcggggcctgggcgcggggcgggaggcggtgaccagcagcaggaggagaaagaacatggcgggcgcatcagagctcgggaccggcccaggagcagcgggtggagatggagatgattcgctatacccgatcgcggttttaatcgacgagctccgcaatgaagacgtgcagctccgactcaacagtattaagaagttatcaacaattgccctagcacttggagtagaaaggacccgaagtgaattgttgccatttcttacagatacaatttatgatgaagatgaggtactattagctcttgctgagcagctgggaaatttcactgrcctagtgggaggtcctgactttgcccactgtctgctgcctcctttggaaaatctggcaactgtggaagagactgttgttcgtgacaaggctgtggagtccctgagacagatctcccaggagcatactcctgttgctctggaagcttattttgtacctctggtgaaacgcttagcaagtggggattggttcacctctcgcacatctgcatgtggtttgttcagcgtttgctatcccagggcatcaaatgctgttaaagcagaaatcagacagcaattccgttccttgtgctcagatgacacaccaatggtacgacgtgctgctgcttccaaattgggtgaatttgcaaaagttttggaattagacagtgtgaaaagtgaaattgttccactgttcactagtctagcttcagatgaacaggattcagtgcgcctccttgctgtggaagcttgtgtcagtattgcccagttattgtctcaggatgaccttgagactttggtgatgcctacacttcgacaagcagcagaagataaatcttggcgcgttcgctatatggtggctgacagattttcagagctccagaaagccatgggtcctaaaatcaccctaaatgacctcatccccgcctttcagaacctacttaaagactgtgaagctgaagtccgggcagctgctgcccacaaagtaaaagaacttggtgagaacttgcccattgaagatagagagaccataattatgaatcaaattctgccttatataaaggaattagtatccgataccaatcaacatgtcaaatcggctctagcttctgtaattatgggattgtctactattttgggcaaagaaaataccattgaacatcttctacctcttttcttagctcagttaaaggatgagtgtcctgacgttcgtttgaatatcatctccaatttggattgtgtaaatgaagtgattggaatccgtcagctctctcagtctctccttcctgccatagtggagctggcagaagatgccaaatggagggtccgcctggccatcattgagtatatgccgctgctggcaggccagctgggtgtggaattctttgatgaaaagctgaattctttatgtatggcttggctcrtggaccatgtatrcgccatccgagaagctgccaccaacaacctcatgaaactagttcagaagtttggtacagagtgggcccaaaatactattgttcccaaagtgttagtaatggcaaatgatcctaattacttgcatagaatgaccactttattctgcattaatgcactgtctgaggcctgtggtcaggaaataactactaagcaaatgctgcccatcgtattaaaaatggcaggagaccaagtagcaaatgttcgcttcaatgtggccaaatctctacaaaagattggaccaattctagataccaatgctttacagggagaagtgaagccagtactacagaagttaggtcaagatgaagacatggatgtcaaatactttgcacaggaagctataagtgtggtggcacaaaggctgaggaagctagaatttcctgtgaaggacagtggagaacccagtgtccctcgggctgacaagaaccacttcccaagacccacagtgcctggagaggacatggggaagggaccagtgtatcagttgcgtggagatactagagacacacttgcccagctgggaattgcagagctagtgcatttctcccaaagcacagactaataccccagatttaaaaaaagaacataaaaaataaagtaccacacatattgcactttttgccgaacgaaatttttacctcacgttcatctcaccaaagtctcttcagaggagcctggtttacagggtgatgaagctgatgatgatacagtagtgtacacactgctaacgtgaatcagactggaaagcaagtcagtacttcagagtagccccgcagaaaaagagcgatactaagccttcttagtgtttygtttgttagtagtgatgaagagaaaactgcttggaagcttccatgggtcactagttagggacagagcagcacaggtgatcagacagggctgagcaaacacctgactgaccaacagaaccagtctcctcagcagcttacattgcagtcaatacagagggttatggaatttattgatttctgcttgaaataaacaagataagcaaataggagcttacaacacaggtcccagcaggaggggtcacgctctgcatcaggccggtgtccacgccgctgccgtgtgtgacggatcctgataggcctggctgctgtagggcacctctcgatttctctctgggtccttaaccttccagtagcctctctgcagtccctcatcggctggcctaaccgtcctgccatagctcccaggtctcctgggctaagcagctcatggcattgttggggggcaggagtttatgtcgatctgtaactacaccattcctgcagttctgaaatgagtggcccccattttcaatctgcaggcattttaatatcgcaaatattgtagcacttctgtagtatattttgggaaaacgtcttccttcagtctaaacaaatcaagccccattttataactggctattttgtaaagactcaaaacagattagagatcttaatgaaatgatctcttaaatgaaatgatgttctttatttcacgaaatcatcaatcttaagcacgagcaggaataaacaactcccagaagaagcttaattcattcttcctggattttcactgkgtgttattaaatcacaaaaatgacagtccccacactgccctttcccactgacaccaagtccaaccgtgagcacagtgcctctgcgaagcatcctggcacccatggtgagcgctggcgaccaggcagtctctggccagcaacagggactgctcaagttaccgacgttggtaggagctgggctcgcatggccagaatggaaccccctagactttccacacgtcacctgcctgaacgctaactacaaagaggaaaggcaacttaaaggtgttttctagatgcagcatcagttagtccctctctttgtgctttaaggaagatgctttgtgcttaacacattcatctgctgatgggacaagccattctaaagggcagaaatgatcatctttagaattaacactgactttgtaacacctggatgttaactgtccaaatggcaaattattcatcatttctagggatacagttagctagctgtagcatctaatttttacttactttgatgactgaattgtaagtgttggttaagttttattagtaatataatgtttggcagatgatctgcttaaatggttaacac

SEQ ID NO: 6736 - DNA, 1890 bp, Homo sapiens
atttggagcaaatagcgacttattttgctgctatttgcatttcctttcccagttctcaaaagtctatggtcctgtgttcaccgtgtattttggcatgaatcccatagtggtgtttcatggatatgaggcagtgaaggaagccctgattgataatggagaggagttttctggaagaggcaattccccaatatctcaaagaattactaaaggacttggtaggtgcacatatttctgtgtcagctttggtaactggggtgagggggatggaaaacagagccctaaaaagcttctcagcagagcttagcctatctgcatggctgccragtgttgcagcactttcttccttggctgtgaattctcccagtttctgcccctttttttattaggaatcatttccagcaatggaaagagatggaaggagatccggcgtttctccctcacaaccttgcggaattttgggatggggaagargagcattgaggaccgtgttcaagaggaagctcactgccttgtggaggagttgagaaaaaccaargcttcaccctgtgatcccactttcatcctgggctgtgctccctgcaatgtgatctgctccgttgttttccagaaacgatttgattataaagatcagaattttctcaccctgatgaaaagattcaatgaaaacttcaggattctgaactccccatggatccaggtctgcaataatttccctctactcattgattgtttcccaggaactcacaacaaagtgcttaaaaatgttgctcttacacgaagttacattagggagaaagtaaaagaacaccaagcatcactggatgttaacaatcctcgggactttatsgattgcttcctgatcaaaatggagcaggaaaaggacaaccaaaagtcagaattcaatattgaaaacttggttggcactgtagctgatctatttgttgctggaacagagacaacaagcaccactctgagatatggactcctgctcctgctgaagcacccagaggtcacagctaaagtccaggaagagattgatcatgtaattggcagacacaggagcccctgcatgcaggataggagccacatgccttacactgatgctgtagtgcacgagatccagagatacagtgaccttgtccccaccggtgtgccccatgcagtgaccactgatactaagttcagaaactacctcatccccaagggcacaaccataatggcattactgacttccgtgctacatgatgacaragaatttcctaatscaaatatctttgaccctggccactttctagataagaatggcaactttaagaaaagtgactacttcatgcctttctcagcaggaaaacgaatttgtgcaggagaaggacttgcccgcatggagctatttttatttctaaccacaattttacagaactttaacctgaaatctgttgatgatttaaagaacctcaatactactgcagttaccaaagggattgtttctctgccaccctcataccagatctgcttcatccctgtctgaagaatgctagcccatctggctgcygatctgctatcacctgcaactctttttttatcaaggacattcccactattatgtcttctctgacctctcatcaaatcttcccattcactcaatatcccataagcatccaaactccattaaggagagttgttcaggtcactgcacaaatatatctgcaattattcatactctgtaacacttgtattaattgctgcatatgctaatacttttctaatgctgactttttaatatgttatcactgtaaaacacagaaaagtgattaatgaatgataatttagatccatttcttttgtgaatgtgctaaataaaaagtgttattaattgctggttcagttctc

SEQ ID NO: 6737 - DNA, 1969 bp, Homo sapiens
acatgtcaamgagacacacactaaattagcagggagtgttataaaaactttggagtgcaagctcacagctgtcttaataagaagagaaggcttcaatggaaccttttgtggtcctggtgctgtgtctctcttttatgcttctcttttcactctggagacagagctgtaggagaaggaagctccctcctggccccactcctcttcctattattggaaatatgctacagatagatgttaaggacatctgcaaatctttcaccaatttctcaaaagtctatggtcctgtgttcaccgtgtattttggcatgaatcccatagtggtgtttcatggatatgaggcagtgaaggaagccctgattgataatggagaggagttttctggaagaggcaattccccaatatctcaaagaattactaaaggacttggaatcatttccagcaatggaaagagatggaaggagatccggcgtttctccctcacaaccttgcggaattttgggatggggaagargagcattgaggaccgtgttcaagaggaagctcactgccttgtggaggagttgagaaaaaccaargcttcaccctgtgatcccactttcatcctgggctgtgctccctgcaatgtgatctgctccgttgttttccagaaacgatttgattataaagatcagaattttctcaccctgatgaaaagattcaatgaaaacttcaggattctgaactccccatggatccaggtctgcaataatttccctctactcattgattgtttcccaggaactcacaacaaagtgcttaaaaatgttgctcttacacgaagttacattagggagaaagtaaaagaacaccaagcatcactggatgttaacaatcctcgggactttatsgattgcttcctgatcaaaatggagcaggaaaaggacaaccaaaagtcagaattcaatattgaaaacttggttggcactgtagctgatctatttgttgctggaacagagacaacaagcaccactctgagatatggactcctgctcctgctgaagcacccagaggtcacagctaaagtccaggaagagattgatcatgtaattggcagacacaggagcccctgcatgcaggataggagccacatgccttacactgatgctgtagtgcacgagatccagagatacagtgaccttgtccccaccggtgtgccccatgcagtgaccactgatactaagttcagaaactacctcatccccaagagctttgataacaagataatgctggctgcataaaactagggcacaaccataatggcattactgacttccgtgctacatgatgacaragaatttcctaatscaaatatctttgaccctggccactttctagataagaatggcaactttaagaaaagtgactacttcatgcctttctcagcaggaaaacgaatttgtgcaggagaaggacttgcccgcatggagctatttttatttctaaccacaattttacagaactttaacctgaaatctgttgatgatttaaagaacctcaatactactgcagttaccaaagggattgtttctctgccaccctcataccagatctgcttcatccctgtctgaagaatgctagcccatctggctgcygatctgctatcacctgcaactctttttttatcaaggacattcccactattatgtcttctctgacctctcatcaaatcttcccattcactcaatatcccataagcatccaaactccattaaggagagttgttcaggtcactgcacaaatatatctgcaattattcatactctgtaacacttgtattaattgctgcatatgctaatacttttctaatgctgactttttaatatgttatcactgtaaaacacagaaaagtgattaatgaatgataatttagatccatttcttttgtgaatgtgctaaataaaaagtgttattaattgctggttcagttctc

SEQ ID NO: 6738 - DNA, 1930 bp, Homo sapiens
acatgtcaamgagacacacactaaattagcagggagtgttataaaaactttggagtgcaagctcacagctgtcttaataagaagagaaggcttcaatggaaccttttgtggtcctggtgctgtgtctctcttttatgcttctcttttcactctggagacagagctgtaggagaaggaagctccctcctggccccactcctcttcctattattggaaatatgctacagatagatgttaaggacatctgcaaatctttcaccaatttctcaaaagtctatggtcctgtgttcaccgtgtattttggcatgaatcccatagtggtgtttcatggatatgaggcagtgaaggaagccctgattgataatggagaggagttttctggaagaggcaattccccaatatctcaaagaattactaaaggacttggaatcatttccagcaatggaaagagatggaaggagatccggcgtttctccctcacaaccttgcggaattttgggatggggaagargagcattgaggaccgtgttcaagaggaagctcactgccttgtggaggagttgagaaaaaccaargcttcaccctgtgatcccactttcatcctgggctgtgctccctgcaatgtgatctgctccgttgttttccagaaacgatttgattataaagatcagaattttctcaccctgatgaaaagattcaatgaaaacttcaggattctgaactccccatggatccaggtctgcaataatttccctctactcattgattgtttcccaggaactcacaacaaagtgcttaaaaatgttgctcttacacgaagttacattagggagaaagtaaaagaacaccaagcatcactggatgttaacaatcctcgggactttatsgattgcttcctgatcaaaatggagcaggaaaaggacaaccaaaagtcagaattcaatattgaaaacttggttggcactgtagctgatctatttgttgctggaacagagacaacaagcaccactctgagatatggactcctgctcctgctgaagcacccagaggtcacagctaaagtccaggaagagattgatcatgtaattggcagacacaggagcccctgcatgcaggataggagccacatgccttacactgatgctgtagtgcacgagatccagagatacagtgaccttgtccccaccggtgtgccccatgcagtgaccactgatactaagttcagaaactacctcatccccaagggcacaaccataatggcattactgacttccgtgctacatgatgacaragaatttcctaatscaaatatctttgaccctggccactttctagataagaatggcaactttaagaaaagtgactacttcatgcctttctcagcaggaaaacgaatttgtgcaggagaaggacttgcccgcatggagctatttttatttctaaccacaattttacagaactttaacctgaaatctgttgatgatttaaagaacctcaatactactgcagttaccaaagggattgtttctctgccaccctcataccagatctgcttcatccctgtctgaagaatgctagcccatctggctgcygatctgctatcacctgcaactctttttttatcaaggacattcccactattatgtcttctctgacctctcatcaaatcttcccattcactcaatatcccataagcatccaaactccattaaggagagttgttcaggtcactgcacaaatatatctgcaattattcatactctgtaacacttgtattaattgctgcatatgctaatacttttctaatgctgactttttaatatgttatcactgtaaaacacagaaaagtgattaatgaatgataatttagatccatttcttttgtgaatgtgctaaataaaaagtgttattaattgctggttcagttctc

SEQ ID NO: 6739 - DNA, 1952 bp, Homo sapiens
ggttgtcttaacaagaagagaaggcttcaatggattctcttgtggtccttgtgctctgtctctcatgtttgcttctcctttcactctggagacagagctctgggagaggaaaactccctcctggccccactcctctcccagtgattggaaatatcctacagataggtattaaggacatcagcaaatccttaaccaatctctcaaaggtctatggccctgtgttcactctgtattttggcctgaaacccatagtggtgctgcatggatatgaagcagtgaaggaagccctgattgatcttggagaggagttttctggaagaggcattttcccactggctgaaagagctaacagaggatttggaattgttttcagcaatggaaagaaatggaaggagatccrgcgtttctccctcatgacgctgcggaattttgggatggggaagaggagcattgaggacygtgttcaagaggaagcccrctgccttgtggaggagttgagaaaaaccaaggcctcaccctgtgatcccactttcatcctgggctgtgctccctgcaatgtgatctgctccattattttccataaacgttttgattataaagatcagcaatttcttaacttaatggaaaagttgaatgaaaacatcaagattktgagcagcccctggatccagatctgcaataatttttctcctatcattgattacttcccgggaactcacaacaaattacttaaaaacgttgcttttatgaaaagttatattttggaaaaagtaaaagaacrccaagaatcaatggacatgaacaaccctcaggactttattgattgcttcctgatgaaaatggagaaggaaaagcacaaccaaccatctgaatttactattgaaagcttggaaaacactgcagttgacttgtttggagctgggacagagacgacaagcacaaccctgagatatgctctccttctcctgctgaagcacccagaggtcacagctaaagtccaggaagagattgaacgtgtgattggcagaaaccggagcccctgcatgcaagacaggagccacatgccctacacagatgctgtggtgcacgaggtccagagatrcmttgascttctccccaccagcctgccccatgcagtgacctgtgacattaaattcagaaactatctcattcccaagggcacaaccatattaatttccctgacttctgtgctacatgacaacaaagaatttcccaacccagagatgtttgaccctcatcactttctggatgaaggtggcaattttaagaaaagtaaatacttcatgcctttctcagcaggaaaacggatttgtgtgggagaagccctggcyggcatggagctgtttttattcctgacctccattttacagaactttaacctgaaatctctggttgacccaaagaaccttgacaccactccagttgtcaatggwtttgcctctgtgccgcccttctaccagctgtgcttcattcctgtctgaagaagagcagatggcctggctgctgctgtgcagtccctgcagctctctttcctctggggcattatccatctttcactatctgtaatgccttttctcacctgtcatctcacattttcccttccctgaagatctagtgaacattcgacctccattacggagagtttcctatgtttcactgtgcaaatatatctgctattctccatactctgtaacagttgcattgactgtcacataatgctcatacttatctaatgttgagttattaatatgttattattaaatagagaaatatgatttgtgtattataattcaaaggcatttcttttctgcatgttctaaataaaaagcattattatttgctgagtcagtttattagaccttccttcttttatgcataatgtaggtcagaaattaaagaaaatagagttccaggaggccatgctggttctc

SEQ ID NO: 6740 - DNA, 1432 bp, Homo sapiens
ggttgtcttaacaagaagagaaggcttcaatggattctcttgtggtccttgtgctctgtctctcatgtttgcttctcctttcactctggagacagagctctgggagaggaaaactccctcctggccccactcctctcccagtgattggaaatatcctacagataggtattaaggacatcagcaaatccttaaccaatctctcaaaggtctatggccctgtgttcactctgtattttggcctgaaacccatagtggtgctgcatggatatgaagcagtgaaggaagccctgattgatcttggagaggagttttctggaagaggcattttcccactggctgaaagagctaacagaggatttggaattgttttcagcaatggaaagaaatggaaggagatccrgcgtttctccctcatgacgctgcggaattttgggatggggaagaggagcattgaggacygtgttcaagaggaagcccrctgccttgtggaggagttgagaaaaaccaagggtgggtgaccctactccatatcactgaccttactggactactatcttctctactgacattcttggaaacatttcaggggtggccatatctttcattatgagtcctggttgttagctcatgtgaagcgggggtttgaagctgagagccaagggaatttgcacatatttgtgctgtgtgtgtacaggcatgattgtgcrtacagtgtgggtataaaaggttcatttaatcccatgttctcytgaactttgcttttttgctttcaaataagaaatgatgaatatagattttgagttcattttttgaaagagttaaagagcagtgtttttcccattacctattccagaacatgtcaccagagaatacttgacaagtcaacatggtgggaatggccctatcatacccatatggagcatgaaccaaatggcatgtgcttttatttaattggactgtgtttgtatggtcagcctcactgacttctctggggtttcttttaggcccgtgcttgccattctggccagtaatgacattctacagtttttattgcttaggcatatcttagtgcagttctcatcaattattatttctctgtaaacacagcattattttaaaaatagtattaattatttcttgttactgtattgatttatatattttcagtaaatacatcctgtagcataattctgtgaaatacccaaatgtcaatttataaaatgatttatttaacaagattttacttattagtaataactctgtaatctgcattccctatgtatgatttggctctgtttcagttttgcttatctctttccaaccatatttatgaaattttggcttagaaatttatgttaattattttttttccatggccaactctactcatctatgaagttttacaatgaatctgtttatcagcttggatacc

SEQ ID NO: 6741 - DNA, 700 bp, Homo sapiens
gggccgctaggggtgcggggttggggaggaggccgctagtctacgcctgtggagcsgatactsagcccwctgcgaccawggctgtgctgscggcacttctgcgcagcggcgcccgcagccgcagccccctgctccggaggctggtgcaggaaataagatatgtggaacggagttatgtatcaaaacccactttgaaggaagtggtcatagtaagtgctacaagaacacccattggatcttttttaggcagcctttccttgctgccagccactaagcttggttccattgcaattcagggagccattgaaaaggcagggattccaaaagaagaagtgaaagaagcatacatgggtartgttctacaaggaggtgaaggacaagctcctacaaggcaggcagtattgggtgcaggcttacctatttctactccatgtaccaccataaacaragtttgtgyttcaggaatgaaagccatcatgatggcctctcaaagtcttatgtgtggacatsagatcaagcaagagacaggctccttagcaaaaatatgctgtcatgtcaggaggtgagacctggacacacagaagaatcaagattctctcagatctgagcccttcatttttcagatgaagatttttttcagtgtgtctgagacagccacagagttacagggctgagcatctgccatgtgacagtcattgga

SEQ ID NO: 6742 - DNA, 2584 bp, Homo sapiens
gggccgctaggggtgcggggttggggaggaggccgctagtctacgcctgtggagcsgatactsagcccwctgcgaccawggctgtgctgscggcacttctgcgcagcggcgcccgcagccgcagccccctgctccggaggctggtgcaggaaataagatatgtggaacggagttatgtatcaaaacccactttgaaggaagtggtcatagtaagtgctacaagaacacccattggatcttttttaggcagcctttccttgctgccagccactaagcttggttccattgcaattcagggagccattgaaaaggcagggattccaaaagaagaagtgaaagaagcatacatgggtartgttctacaaggaggtgaaggacaagctcctacaaggcaggcagtattgggtgcaggcttacctatttctactccatgtaccaccataaacaragtttgtgyttcaggaatgaaagccatcatgatggcctctcaaagtcttatgtgtggacatsaggatgtgatggtggcaggtgsgatggagagcatgtcmaatgttccatatgtaatgaacagaggatcaacaccatatggtggggtaaagcttgaagatttgattgtaaaagacgggctaactgatgtctacaataaaattcatatgggcagctgtgctgagaatacagcaaagaagctgaatattgcacgaaatgaacaggacgcttatgctattaattctyataccagaagtaaagcagcatgggaagctgggaaatttggaaatgaagttattcctgtcacagttacagtaaaaggtcaaccagatgtagtggtgaaagaagatgaagaatataaacgtgttgattttagcaaagttccaaagctgaagacagttttcyagaaagaaaatggcacagtaacagctgccaatgccagtacactgaatgatggagcagctgctctggttctcatgayggcagatgcagcgaagaggctcaatgttacaccactggcaagaayagtagcatttgctgacgctgctgtagaacctattgattttccaattgctcctgtatatgctscatctatggttcttaaagatgtgggattgaaaaaagaagatattgcaatgtgggaagtaaatgwagcctttagtctggttgtactagcaaacattaaaatgttggagattgatccccaaaaagtgaatatcaatggaggagctgtttctctgggacatccaattgggatgtctggagccaggattgttggtcatttgactcatgccttgaagcaaggagaatacggtcttgccagtatttgcaatggaggaggaggtgcttctgccatgctaattcagaagctgtagacaacctctgctatttaaggagacaaccctatgtgaccagaaggcctgctgtaatcagtgtgactactgtgggtcagcttatattcagataagctgtttcattttttattattttctatgttaacttttaaaaatcaaaatgatgaaatcccaaaacattttgaaattaaaaataaatttcttcttctgcttttttcttggtaaccttgaaaagtttgatacatttttgcattctgagtctatacttatcgaaatatggtagaaataccaatgtgtaatattagtgacttacataagtagctagaagtttccatttgtgagaacacatttatatttttgaggattgttaaaggtcaagtgaatgctctttataggtaatttacatttagtaaattacggtaaattaaattacttctctttacagtaagagttggctattctggacaaactagcagtgcttcatataatcactcaaaccacagtgtgtgcagcagtactagaaacaagacagaagcccatgtcctcagggtctagagtgggggcaatttcttataacctcaacattcagggttgggggaggtcaagcagaaaaccctggmgtttgggctctgaattactatagcagcatagagagtgggaagggaggtagaaactgatatgctgaatggatatataaaaaagggaacagatcaccacttccaatacacgacaatgcctgttcttaagcaggacagactgtaacagaagtatctcgcattgcattttatctgggaaaaaattaattaattaaaacgctacaggcaggggctatgcacactaccctcaattgcagctctgaagagggaaaactccccctcaggaagaggagggggcagtaaaggtcattgtgtacacattatctgttggcaaataatgtattgtagatcttttgaaggagcaaaatgacaatatatgggagaaatagattagattgctcttcagattcagaggaagagtagagtattttcaaaaacatctgtaatcatcaccaacttttgaggcttgttatgtgctttatatgtataaactcatttaattgtcacaaaaacttctaagagtgggtaccattattatccctcctttataaacaaggaaattgaggcatagagtagctaaataaattccaagggcaaaaagctggctaggattcaactccaagttagtcaagctccagagcccacgtt

SEQ ID NO: 6743 - DNA, 2246 bp, Homo sapiens
ccggcacctggaaatggaaagccagtgaaggctgctttgggccggggcagcgggtgggaccgggcgggagggattccaaagagaccgccgggaaggctagagcttggaattccggctcctcggagtcctggccctcccccaccgccgcctcggagctcagcacaccttggatgggggaggcgggcagctcctagccccgcaccccaggaggcgcgctcggagggaagccgccaccgcgccgcctctgcctcggcgcggaacaaacggttaaagattttgggcagcgcctcgcggggggaggagccaggggcccaatccgcaattaaagatgaactttgggtgaactaattgtctgaccaagcggaggaagttcctgcagatgaagcgcaggaaatacggcttcatctacaagacgcatctgttcgggcggcccaccgtacgggtgatgggcgcggacaatgtgcggcgcatcttgctcggagagcaccggctggtgtcggtccactggccagcgtcggtgcgcaccattctgggatctggctgcctctctaacctgcacgactcctcgcacaagcagcgcaagaaggtgattatgcgggccttyagccgcgaggcactcgaatgctacgtgccggtgatcaccgaggaagtgggcagcagcctggagcagtggctgagctgcggcgagmgcggcctcctggtctaccccgaggtgaagcgcctcatgttccgaatcgccatgcgcatcctactgggctgcgaaccccaactggcgggcgacggggactccgagcagcagcttgtggaggccttcgaggaaatgacccgcaatctcttctcgctgcccatcgacgtgcccttcagcgggctgtaccggggcatgaaggcgcggaacctcattcacgcgcgcatcgagcagaacattcgcgccaagatctgcgggctgcgggcatccgaggcgggccagggctgcaaagacgcgctgcagctgttgatcgagcactcgtgggagaggggagagcggctggacatgcaggcactaaagcaatcttcaaccgaactcctctttggaggacacgaaaccacggccagtgcagccacatctctgatcacttacctggggctctacccacatgttctccagaaagtgcgagaagagctgaagagtaagggtttactttgcaagagcaatcaagacaacaagttggacatggaaattttggaacaacttaaatacatcgggtgtgttattaaggagacccttcgactgaatcccccagttccaggagggtttcgggttgctctgaagacttttgaattaaatggataccagattcccaagggctggaatgttatctacagtatctgtgatactcatgatgtggcagagatcttcaccaacaaggaagaatttaatcctgaccgattcatgctgcctcacccagaggatgcatccaggttcagcttcattccatttggaggaggscttaggagctgtgtaggcaaagaatttgcaaaaattcttctcaaaatatttacagtggagctggccaggcattgtgactggcagcttctaaatggacctcctacaatgaaaaccagtcccaccgtgtatcctgtggacaatctccctgcaagattcacccatttccatggggaaatctgatgagcttgaatgttcaaacctgagacttattggaagtgtacatatgagtttttaaggagtgttgtgttgactttatatttaatttctaaatgtatattataatatttatgtgttttgactatactaccacaatctttaaatattaaaataatgaatttgtatcatttccaaataaagtaaaatttgaaggtacttttctggtattttaagattcctgttgggtaaaactcaccagtttagtattttcttagtgtatttaaccagattttacaatgcctacctggacttatttgtcatctttgcatctgttttctgtgagaagaaatcttagctgttttttatgttaacagttattagaaaatatatgtctgtgtgtgttattccagacgtatctctgtaaattcttctatagtcacttagattccctatttggaaaattgatccaagttaatttaatttttttttggtttgctgtactttagggaaagatgaacctgaaaaggtaacactgagaactgtcactctaacctctccagcttatctaacatgtcataaacataataaatctgtgttgtccaat

SEQ ID NO: 6744 - DNA, 2099 bp, Homo sapiens
gtggcgcgggaggtcgcggcgcgccatggggctcccggcgctgctggccagtgcgctctgcaccttcgtgctgccgctgctgctcttcctggctgcgatcaagctctgggacctgtactgcgtgagcggccgcgaccgcagttgtgccctcccattgccccccgggactatgggcttccccttctttggggaaaccttgcagatggtactgcagcggaggaagttcctgcagatgaagcgcaggaaatacggcttcatctacaagacgcatctgttcgggcggcccaccgtacgggtgatgggcgcggacaatgtgcggcgcatcttgctcggagagcaccggctggtgtcggtccactggccagcgtcggtgcgcaccattctgggatctggctgcctctctaacctgcacgactcctcgcacaagcagcgcaagaaggtgattatgcgggccttyagccgcgaggcactcgaatgctacgtgccggtgatcaccgaggaagtgggcagcagcctggagcagtggctgagctgcggcgagmgcggcctcctggtctaccccgaggtgaagcgcctcatgttccgaatcgccatgcgcatcctactgggctgcgaaccccaactggcgggcgacggggactccgagcagcagcttgtggaggccttcgaggaaatgacccgcaatctcttctcgctgcccatcgacgtgcccttcagcgggctgtaccggggcatgaaggcgcggaacctcattcacgcgcgcatcgagcagaacattcgcgccaagatctgcgggctgcgggcatccgaggcgggccagggctgcaaagacgcgctgcagctgttgatcgagcactcgtgggagaggggagagcggctggacatgcaggcactaaagcaatcttcaaccgaactcctctttggaggacacgaaaccacggccagtgcagccacatctctgatcacttacctggggctctacccacatgttctccagaaagtgcgagaagagctgaagagtaagggtttactttgcaagagcaatcaagacaacaagttggacatggaaattttggaacaacttaaatacatcgggtgtgttattaaggagacccttcgactgaatcccccagttccaggagggtttcgggttgctctgaagacttttgaattaaatggataccagattcccaagggctggaatgttatctacagtatctgtgatactcatgatgtggcagagatcttcaccaacaaggaagaatttaatcctgaccgattcatgctgcctcacccagaggatgcatccaggttcagcttcattccatttggaggaggscttaggagctgtgtaggcaaagaatttgcaaaaattcttctcaaaatatttacagtggagctggccaggcattgtgactggcagcttctaaatggacctcctacaatgaaaaccagtcccaccgtgtatcctgtggacaatctccctgcaagattcacccatttccatggggaaatctgatgagcttgaatgttcaaacctgagacttattggaagtgtacatatgagtttttaaggagtgttgtgttgactttatatttaatttctaaatgtatattataatatttatgtgttttgactatactaccacaatctttaaatattaaaataatgaatttgtatcatttccaaataaagtaaaatttgaaggtacttttctggtattttaagattcctgttgggtaaaactcaccagtttagtattttcttagtgtatttaaccagattttacaatgcctacctggacttatttgtcatctttgcatctgttttctgtgagaagaaatcttagctgttttttatgttaacagttattagaaaatatatgtctgtgtgtgttattccagacgtatctctgtaaattcttctatagtcacttagattccctatttggaaaattgatccaagttaatttaatttttttttggtttgctgtactttagggaaagatgaacctgaaaaggtaacactgagaactgtcactctaacctctccagcttatctaacatgtcataaacataataaatctgtgttgtccaat

SEQ ID NO: 6745 - DNA, 3307 bp, Homo sapiens
ctttggaagtcctatgagggaccatttacggtttcctcagtaatttccaccaggatgaatttccttctcatcactctgcctcaggtagtgctctgaaggtcgtcctttctgaacaaacgcagcaaagcaagccacaccatgggtgagatcaaccaagttgccgtggagaaatacctggaggagaaccctcagtttgccaaggagtactttgacaggaagttgcgggtggaggtgctgggagaaatcttcaagaacagccaggtgccagtccagtccagcatgtccttctctgagctgacccaggtggaggagtcagccctgtgcttggagctgctgtggaycgtgcaggaggaggggggcaccccagagcagggggttcacagggccctrcagaggctggcccacctgctccaggctgaycgctgcagcatgttcctgtgccggtcccggaacggcatacctgaggtggcctctaggttgctggatgtcacccccacctccaagtttgaggacaacctggtgggccctgacaaagaagttgtgtttccattggacattgggatagtgggttgggctgctcacacgaagaaaactcataatgtcccagatgtgaaaaagaacagccatttttctgacttcatggacaagcaaactgggtatgtcactaagaacctgctggcaaccccgatcgtggtgggcaaggaggttcttgctgtgatcatggcagttaacaaagtaaatgcatctgaattttccaaacaggatgaagaggtcttttccaaatacctcaactttgtgtctatcatcctaaggcttcatcacaccagctacatgtacaatattgaatcccgaagaagccagatccttatgtggtcagccaataaagtatttgaagaactcacagatgttgagcgacagtttcacaaagcgctctacacggttagawcatatctgaactgtgaacgatactccattggactgctggacatgaccaaggagaaggaattctacgatgaatggccaatcaagcttggagaagtagagccttataaaggtccaaagacacctgatggcagggaagtcaacttttataaaatcattgattacattttacatggaaaagaagagatcaaagtgattccgacgcctcctgcagaccactggacactcattagtgggttgccaacatatgttgctgaaaatggatttatctgtaacatgatgaatgcccctgcrgatgaatacttcacatttcagaaaggacctgtagacgaaactggttgggtcattaagaatgttttgtccctgcctattgtcaacaagaaagaagatattgtgggagtggctacattttacaacaggaaggatggaaaacctttcgatgagcatgatgaatacattaccgagactctcacacaatttcttggatggtctcttttaaatactgacacctacgataagatgaataagctagaaaacagaaaggacattgctcaggaaatgctcatgaaccaaacsaaagccactcctgaagaaattaagtccattttgaaatttcaagagaagttaaatgttgatgtaattgacgactgtgaagaaaaacaacttgttgcaattttgaaagaggacttgccagacccacgctcagcagaactgtacgaattccgcttcagtgacttcccccttacagagcacggattgattaaatgtggaatacgactgttttttgaaataaatgtggtggagaaattcaaagtacctgtagaggttcttaccagatggatgtacactgtgaggaaagggtaccgagctgtcacttaccacaattggcrgcatgggttcaacgtggggcagaccatgtttactttgctgatgacaggaagattaaagaagtactacacagatctcgaagcctttgccatgcttgctgctgctttctgccatgatattgaccacagaggcaccaataatttgtaccagatgaaatccacgtctccattagcaagacttcatggttcttctattttggagaggcaccacctggagtacagtaagactctgttgcaggatgagagtttaaacatcttccagaacctaaataagcggcagtttgaaacagttattcatttgttcgaggtcgcaataatagcaactgacctggctttatatttcaagaagaggaccatgtttcaaaaaattgttgatgcctgtgaacaaatgcaaacggaagaagaagccatcaaatatgtaactgttgatccaaccaagaaagagattatcatggcaatgatgatgacggcatgtgacttgtctgctattaccaagccctgggaggtgcaaagtcaggtagcacttatggttgcaaatgaattttgggaacaaggagatctggagagaacagtgttgcagcaacaacccattcctatgatggacagaaacaaaagagatgaattacctaaacttcaagttggatttattgattttgtttgtacttttgtatataaggagttctcacggtttcacaaagaaatcacacctatgctgagtggtcttcagaataacagagtagaatggaaatcactagctgatgagtatgatgcaaagatgaaggtcattgaagaggaggcaaaaaagcaagaaggaggagccgaaaaagctgctgaagattcaggaggtggtgatgacaaaaagtccaaaacatgtttaatgttgtaatattatctaactggtctaaacttcaratatcattttacctttgaagaaaaccagaaaacattcaaaagaacttcaacaaatcatcacgtaacaggatcttcagaaaaactaccctgtgactatgaagaaaatatatattgctagcccaaaaatcccaggggcaaaataaagttcaacaaaagtgcaaaatatgacaaaaataggtacatttttggtgccaatttattttaaattaaaaaatatgcaatcctgaaactagtcacaaattcttttttaaaacattaattgtatttatttgctaaggctgctataacaaagtaccacagactgggtgcttaaccaatagaaatgtattttctcaaagtcctgggggctggaagttcaagatcaaggagttggcagggttggtttcttgggaggcctctcaacttggtttgcagatggccatcttctccctgtgtcttcacatggtcttccctctgtgtgtctgtgtcctaatctccttttcttataaggactccagtaggactggattagggcctacccatgtgacctcattttagtcttaattacctcgttaatggccttatct

SEQ ID NO: 6746 - DNA, 3311 bp, Homo sapiens
ctttggaagtcctatgagggaccatttacggtttcctcagtaatttccaccaggatgaatttccttctcatcactctgcctcaggtagtgctctgaaggtcgtcctttctgaacaaacgcagcaaagcaagccacaccatgggtgagatcaaccaagttgccgtggagaaatacctggaggagaaccctcagtttgccaaggagtactttgacaggaagttgcgggtggaggtgctgggagaaatcttcaagaacagccaggtgccagtccagtccagcatgtccttctctgagctgacccaggtggaggagtcagccctgtgcttggagctgctgtggaycgtgcaggaggaggggggcaccccagagcagggggttcacagggccctrcagaggctggcccacctgctccaggctgaycgctgcagcatgttcctgtgccggtcccggaacggcatacctgaggtggcctctaggttgctggatgtcacccccacctccaagtttgaggacaacctggtgggccctgacaaagaagttgtgtttccattggacattgggatagtgggttgggctgctcacacgaagaaaactcataatgtcccagatgtgaaaaagaacagccatttttctgacttcatggacaagcaaactgggtatgtcactaagaacctgctggcaaccccgatcgtggtgggcaaggaggttcttgctgtgatcatggcagttaacaaagtaaatgcatctgaattttccaaacaggatgaagaggtcttttccaaatacctcaactttgtgtctatcatcctaaggcttcatcacaccagctacatgtacaatattgaatcccgaagaagccagatccttatgtggtcagccaataaagtatttgaagaactcacagatgttgagcgacagtttcacaaagcgctctacacggttagawcatatctgaactgtgaacgatactccattggactgctggacatgaccaaggagaaggaattctacgatgaatggccaatcaagcttggagaagtagagccttataaaggtccaaagacacctgatggcagggaagtcaacttttataaaatcattgattacattttacatggaaaagaagagatcaaagtgattccgacgcctcctgcagaccactggacactcattagtgggttgccaacatatgttgctgaaaatggatttatctgtaacatgatgaatgcccctgcrgatgaatacttcacatttcagaaaggacctgtagacgaaactggttgggtcattaagaatgttttgtccctgcctattgtcaacaagaaagaagatattgtgggagtggctacattttacaacaggaaggatggaaaacctttcgatgagcatgatgaatacattaccgaggcaaactctcacacaatttcttggatggtctcttttaaatactgacacctacgataagatgaataagctagaaaacagaaaggacattgctcaggaaatgctcatgaaccaaacsaaagccactcctgaagaaattaagtccattttgaaatttcaagagaagttaaatgttgatgtaattgacgactgtgaagaaaaacaacttgttgcaattttgaaagaggacttgccagacccacgctcagcagaactgtacgaattccgcttcagtgacttcccccttacagagcacggattgattaaatgtggaatacgactgttttttgaaataaatgtggtggagaaattcaaagtacctgtagaggttcttaccagatggatgtacactgtgaggaaagggtaccgagctgtcacttaccacaattggcrgcatgggttcaacgtggggcagaccatgtttactttgctgatggtaggaagattaaagaagtactacacagatctcgaagcctttgccatgcttgctgctgctttctgccatgatattgaccacagaggcaccaataatttgtaccagatgaaatccacgtctccattagcaagacttcatggttcttctattttggagaggcaccacctggagtacagtaagactctgttgcaggatgagagtttaaacatcttccagaacctaaataagcggcagtttgaaacagttattcatttgttcgaggtcgcaataatagcaactgacctggctttatatttcaagaagaggaccatgtttcaaaaaattgttgatgcctgtgaacaaatgcaaacggaagaagaagccatcaaatatgtaactgttgatccaaccaagaaagagattatcatggcaatgatgatgacggcatgtgacttgtctgctattaccaagccctgggaggtgcaaagtcaggtagcacttatggttgcaaatgaattttgggaacaaggagatctggagagaacagtgttgcagcaacaacccattcctatgatggacagaaacaaaagagatgaattacctaaacttcaagttggatttattgattttgtttgtacttttgtatataaggagttctcacggtttcacaaagaaatcacacctatgctgagtggtcttcagaataacagagtagaatggaaatcactagctgatgagtatgatgcaaagatgaaggtcattgaagaggaggcaaaaaagcaagaaggaggagccgaaaaagctgctgaagattcaggaggtggtgatgacaaaaagtccaaaacatgtttaatgttgtaatattatctaactggtctaaacttcaratatcattttacctttgaagaaaaccagaaaacattcaaaagaacttcaacaaatcatcacgtaacaggatcttcagaaaaactaccctgtgactatgaagaaaatatatattgctagcccaaaaatcccaggggcaaaataaagttcaacaaaagtgcaaaatatgacaaaaataggtacatttttggtgccaatttattttaaattaaaaaatatgcaatcctgaaactagtcacaaattcttttttaaaacattaattgtatttatttgctaaggctgctataacaaagtaccacagactgggtgcttaaccaatagaaatgtattttctcaaagtcctgggggctggaagttcaagatcaaggagttggcagggttggtttcttgggaggcctctcaacttggtttgcagatggccatcttctccctgtgtcttcacatggtcttccctctgtgtgtctgtgtcctaatctccttttcttataaggactccagtaggactggattagggcctacccatgtgacctcattttagtcttaattacctcgttaatggccttatct

SEQ ID NO: 6747 - DNA, 2762 bp, Homo sapiens
tgacgcccccgaacccagctgcagaagctgccgccacctccaatgcacaaggtgtctcatctgaaaagaaacctgagccccagggaggcggcgcggagcgaccctggcagagctggcgcaaacagggcgagaggtcgctgggcagcgttcgaggaccagagggagctcggccacagaagaccccagygatctgatcccgggatcccggctccaagctctcctcgcattttacagatttcacccccgcgactatctccccaaaacggagcctttatatcaagagaaggtgcgggagctggggcaaccaggactttctcgggcacccaagatgcgctccattaggaagaggtggacgatctgcacaataagtctgctcctgatcttttataagacaaaagaaatagcaagaactgaggagcaccaggagacgcaactcatcggagatggtgaattgtctttgagtcggtcacttgtcaatagctctgataaaatcattcgaaaggctggctcttcaatcttccagcacaatgtagaaggttggaaaatcaattcctctttggtcctagagataaggaagaacatacttcgtttcttagatgcagaacgagatgtgtcagtggtcaagagcagttttaagcctggtgatgtcatacactatgtgcttgacaggcgccggacactaaacatttctcatgatctacatagcctcctacctgaagtttcaccaatgaagaatcgcaggtttaagacctgtgcagttgttggaaattctggcattctgttagacagtgaatgtggaaaggagattgacagtcacaattttgtaataaggtgtaatctagctcctgtggtggagtttgctgcagatgtgggaactaaatcagattttattaccatgaatccatcagttgtacaaagagcatttggaggctttcgaaatgagagtgacagagaaaaatttgtgcatagactttccatgctgaatgacagtgtcctttggattcctgctttcatggtcaaaggaggagagaagcacgtggagtgggttaatgcattaatccttaagaataaactgaaagtgcgaactgcctatccgtcattgagacttattcatgctgtcagaggttactggctgaccaacaaagttcctatcaaaagacccagcacaggtcttctcatgtatacacttgccacaagattctgtgatgaaattcacctgtatggattctggcccttccctaaggatttaaatggaaaagcggtcaaatatcattattatgatgacttaaaatataggtacttttccaatgcaagccctcacagaatgccattagaattcaaaacattaaatgtgctacataatagaggagctctaaaactgacaacaggaaagtgtgtaaagcaataaagcacattttgaaacaaacaatatgcacttcttttctgaagatgcttccgaagatttgaaaataggatccaaaacacggctgggtttcagcatccaccaatgaactgaaaggtgaataaaggacgttcatgagaaatcgactaccagctgatraaatacctgcaaagtgctctaaaaattaaatattttgactttaagggtcctagtaagtgccacttccactaagaatacagtttgaatgtataatcagtagtgtttacaagatccaacagtgcactcatcattagttaacaaagcaaatatgttcatcactgtcaggctgcccacagcaacaccaagcatattagaagaggaaccccaggaacgcaactcagaccttgggaaattaaaccatccttgtcagcagaagccaagatggaagcagtttgagcaatgaaatccgtaagattaaacaactcaagtaaatgcttcagtcaggactctgagtctgatcatgaattttatgttttaatttatgtttttttttttgtcttctggaatctcttttggtttggatattgggatgcttagaaatcctttctgagatgcatatgagtgaggaaataaactttaagtaattatttttaaagttcttatactttttaaaagctatcacacaaagactttttttttttttttgtctcgctctgttgcccaggctggagtacagtggcgcgatctcagctcactgcaagctccgcctcccaagttcactccattctcctgcctcagcctccggagtagctgggactgcaggcgcctgccaccacgcctggctaattttttgtatttttagtggagacggattttcaccgtgttagccaggatggtctcaatctcctgacctcgtgatccacccgccttggcctcccaaagtgctgggattacaggcgtgagccaccgtgcctggccgacatttttaaaaaagttttattttgcacggctctaaacctccatgttattttccagtggtgtagaaggtaccagctaaagtgaaccactatgtaatattaggccattctaaaggaaagatgttccatgtcatcagagatggtaaaataggcmgggaaaaaaaaatctttggtaccaaagattacacttgtgtttctacacagcaaaccatttttctttcatgaaaataatatattattaacatgaatatattattttgctattaatgtgaaagttgtctctaaatattttttaattttcaaactcatactttattttcatttgaaatgtttttcacaccttttgcattacataataattttgtggaagcattttgccctttagaataaatattagattgata

SEQ ID NO: 6748 - DNA, 1862 bp, Homo sapiens
tgacgcccccgaacccagctgcagaagctgccgccacctccaatgcacaaggtgtctcatctgaaaagaaacctgagccccagggaggcggcgcggagcgaccctggcagagctggcgcaaacagggcgagaggtcgctgggcagcgttcgaggaccagagggagctcggccacagaagaccccagygatctgatcccgggatcccggctccaagctctcctcgcattttacagatttcacccccgcgactatctccccaaaacggagcctttatatcaagagaaggtgcgggagctggggcaaccaggactttctcgggcacccaagatgcgctccattaggaagaggtggacgatctgcacaataagtctgctcctgatcttttataagacaaaagaaatagcaagaactgaggagcaccaggagacgcaactcatcggagatggtgaattgtctttgagtcggtcacttgtcaatagctctgataaaatcattcgaaaggctggctcttcaatcttccagcacaatgtagaaggttggaaaatcaattcctctttggtcctagagataaggaagaacatacttcgtttcttagatgcagaacgagatgtgtcagtggtcaagagcagttttaagcctggtgatgtcatacactatgtgcttgacaggcgccggacactaaacatttctcatgatctacatagcctcctacctgaagtttcaccaatgaagaatcgcaggtttaagacctgtgcagttgttggaaattctggcattctgttagacagtgaatgtggaaaggagattgacagtcacaattttgtaataaggtgagctttcttctgctttttgagattgtaagtttttcaaagatattttacttgggggtggaaaactgttagaaaattttaaagtattactaaaacctcaaacaaatatttgtctatgatatccttttctgtgcaacatttaaattacatttaccctggaatagaatattataattattgcgtagttgaaagaaaaagtgatcctgtcatagcaacaagattcacacagctttttttggtgaggtgaggggggaggcaaatggcaattttattaaatttaatattccacacaaacttttttcttagtatctcttcttcatactcattagttttgtgtgattttatttgttgtataaagattatgaatattactatggaatgatgtaatagatttatgttaatgttactttttattaataattatctaggagatagtaagaacatagtttagcaagtttatatttgatatcctgagccatatttctttaatttctctttatatgtggtatttgtgtatgttagtatatttgaattttatgtttttttaacataattaagcgtgcatgtttgtttttcattaacggttaaaagatatttgatgaattgtgtgtttgattaacctattaactgaaaaaaactcaacagtagaaatggaattataatcacatcataaatataagcagtttttaatgatcaatttttatatctgtacagtttttttggattgttttagttccttagaaaaattagctaaatgacagaaacatggatattgaaatatgaaatagtacaatataaagatagatagaaaagtatgctgagttgacatgttgaaaaacacagtctcttgaagatatrctggaatacattatttttgaatattttgaatattttttgaatatttttaaataaagtcttaaaagcataaataggtaactacttttaaaaaaaaagtcatgagaaatcacactcaagcattatcaagtgaagaaaattcatartagcaaataaaactgcaaacattttacctt

SEQ ID NO: 6749 - DNA, 678 bp, Homo sapiens
ttcatcctggcgtttgcctgcagcaagatggcggcggtstcaatgtcagtggtactgaggcagacgttgtrgcggagaagggcagtggctgtagctgccctttccgtttccagggttccgaccaggtcgttgaggacttccacatggagattggcacaggaccagactcaagacacacaactcataacagttgatgaaaaattggatatcactactttaactggmgttccagaagagcatataaaaactagaaaagtcaggatctttgttcctgctcgcaataacatgcagtctggagtaaacaacacaaagaaatggaagatggagtttgataccagrgagcgatgggaaaatcctttgatgggttgggcatcaacggctgatcccttatccaacatggttctaaccttcagtactaaagaagatgcagtttcctttgcagaaaaaaatggatggagctatgacattgaagagaggaaggttccaaaacccaagtccaagtcttatggtgcaaacttttcttggaacaaaagaacaagagtatccmcaaaataggttggcactgactatatctctgcttgactgtgaataaagtcagctrtgcagtatttatagtccatgtataataaatacatctcttaatctcctaataaattggacctttaaactacagataca

SEQ ID NO: 6750 - DNA, 1596 bp, Homo sapiens
cgccgagctgggccaatcctcttggtggaggaagctcggctgattctcggctcacgcgggaggggagtaaagggtggcggtccgggcctggagttcagtgggtgcagcctgcttgcgagctgaggccagacaggggggcgcctacggacggaaaagaaaagttgattacaaacgggaccatattttgcttcgaaatggaaccagcagttagcgagccartgagagaccaagtcgcacggactcatttgacagaggacactcccaaagtgaatgctgacatagaaaaggttaacsagaatcaggccaagagatgcacagtgatcggkggctctggattcctggggcagcacatggtggagcagttgctggcaagaggatatgctgtcaatgtatttgatatccagcaagggtttgataatccccaggtgcggttctttctgggtgacctctgcagccgacaggatctgtacccagctctgaaaggtgtaaacacagttttccactgtgygtcacccccaccatccagtaacaacaaggagctcttttatagagtgaattacattggcaccaagaatgtcattgaaacttgcaaagaggctggggttcagaaactcattttaaccagcagtgccagtgtcatctttgagggcgtcgatatcaagaatggaactgaagaccttccctatgccatgaaacccattgactactacacagagactaagatcttacaggagaggscagttctgggcgccaacgatcctgagaagaatttcttaaccacagccatccgccctcatggcattttcrgcccaagggacccgyagttggtacccatcctcatcgaggcagccaggaacggcaagatgaagttcgtgattggaaatgggaagaacttggtggacttcacctttgtggagaacgtggtccatggacacatcctggcggcagagcagctctcccgagactcgacactgggtgggaaggcatttcacatcaccaatgatgagcccatccctttctggacattcctgtctcgcatcctgacaggcctcaattatgaggcccccaagtaccacatcccctactgggtggcctactacctggccctcctgctatccctgctggtgatggtgatyagtcctgtcatccagctgcagcccaccttcacacccatgcgggtcgcactggctggcacattccactactacagctgcgagagagccaaaaaggccatgggctaccagccactagtgaccatggatgatgctatggagaggaccgtgcagagctttcgccacctgcggagggtcaagtgagggacactggaggctgggctctctcgacacgttgctcagccagtcactccttcccctgtggattgatgaaataacatcctttgaatgagtttgctctgagcctgtgactccttctgctaggcagagagcgcaccctactctttccgtgacgatgagggcggcaaaaacagacatttcttccttcatggaactggatttggatttcttgaagcaggcagcttcatattataccgatttgttctctgtctttttgtgtctctctgtttaccccctcccttgc

SEQ ID NO: 6751 - DNA, 1634 bp, Homo sapiens
ggaagctcggctgattctcggctcacgcgggaggggagtaaagggtggcggtccgggcctggagttcagtgggtgcagcctgcttgcgagctgaggccagacaggggggcgcctacggacggataaggaggagcattccaggccgagacgccctcatcagcagagtcacaggagttttggaagtgagagaaaagaaaagttgattacaaacgggaccatattttgcttcgaaatggaaccagcagttagcgagccartgagagaccaagtcgcacggactcatttgacagaggacactcccaaagtgaatgctgacatagaaaaggttaacsagaatcaggccaagagatgcacagtgatcggkggctctggattcctggggcagcacatggtggagcagttgctggcaagaggatatgctgtcaatgtatttgatatccagcaagggtttgataatccccaggtgcggttctttctgggtgacctctgcagccgacaggatctgtacccagctctgaaaggtgtaaacacagttttccactgtgygtcacccccaccatccagtaacaacaaggagctcttttatagagtgaattacattggcaccaagaatgtcattgaaacttgcaaagaggctggggttcagaaactcattttaaccagcagtgccagtgtcatctttgagggcgtcgatatcaagaatggaactgaagaccttccctatgccatgaaacccattgactactacacagagactaagatcttacaggagaggscagttctgggcgccaacgatcctgagaagaatttcttaaccacagccatccgccctcatggcattttcrgcccaagggacccgyagttggtacccatcctcatcgaggcagccaggaacggcaagatgaagttcgtgattggaaatgggaagaacttggtggacttcacctttgtggagaacgtggtccatggacacatcctggcggcagagcagctctcccgagactcgacactgggtgggaaggcatttcacatcaccaatgatgagcccatccctttctggacattcctgtctcgcatcctgacaggcctcaattatgaggcccccaagtaccacatcccctactgggtggcctactacctggccctcctgctatccctgctggtgatggtgatyagtcctgtcatccagctgcagcccaccttcacacccatgcgggtcgcactggctggcacattccactactacagctgcgagagagccaaaaaggccatgggctaccagccactagtgaccatggatgatgctatggagaggaccgtgcagagctttcgccacctgcggagggtcaagtgagggacactggaggctgggctctctcgacacgttgctcagccagtcactccttcccctgtggattgatgaaataacatcctttgaatgagtttgctctgagcctgtgactccttctgctaggcagagagcgcaccctactctttccgtgacgatgagggcggcaaaaacagacatttcttccttcatggaactggatttggatttcttgaagcaggcagcttcatattataccgatttgttctctgtctttttgtgtctctctgtttaccccctcccttgc

SEQ ID NO: 6752 - DNA, 4272 bp, Homo sapiens
gtgtccacgcttagcagctttctcaccgccgccaaaccttgcctgggcactgggaccgtgggtggccgcctgtccctagctgtggctgagccaagattgcacttgtgagaaggcctgacaggcagcatgggcgacatggccaatagttccatcgagttccaccccaagccccagcagcagcgggatgtcccccaggctggaggctttgggtgcacgctggcggagctgcgcaccctcatggagctgcgaggggccgaggcgctgcagaagatcgaggaggcctacggggatgtcagcgggctctgccggaggctgaagacctcacccacagagggcctggcggacaacaccaatgacctggagaagcgcaggcagatctacgggcagaacttcatccccccaaagcaacccaagaccttcctgcagctggtgtgggaggccctgcaggacgtgacmctcatcatcctggaggtggctgccatcgtctctctgggcctctcgttctatgcgccgccaggagaggagagtgaagcctgtgggaatgtgtcgggaggcgcagaagatgagggcgaggccgaagctggctggatcgagggggctgccatcctgctgtccgtcatctgtgtggtgctggtcacggccttcaatgactggagcaaggagaagcagttccgaggcctgcagagccgaattgagcaggagcagaagttcacggtcatscggaacgggcagctcctccaggtccccgtggctgcgctggtggtgggggacattgcccaggtcaagtacggcgacctgctgccagccgacggcgtgctcmtccaggccaatgacctcaagatcgacgagagctccctgacgggcgagtctgaccacgtgcgcaagtcagctgacaaagatcccatgctgctctcaggcactcatgtcatggaaggttctggaagaatggtggtgaccgccgttggcgtgaattcccagacaggcatcatcttcacgctgcttggagctggcggagaggaggaagagaagaaagataagaaaggcaagcagcaggatggggccatggagagtagccagaccaaagctaagaagcaggatggtgcagtggccatggagatgcagcccctgaagagcgcggagggtggggagatggaggagcgggagaagaagaaagccaacgcacccaaaaaggagaagtctgtccttcaggggaagctcacaaagctagccgtgcagatcgggaaagcagggctggtgatgtctgccatcaccgtcatcatcctggtcctctactttgtgattgagacgtttgtcgtggaaggccggacatggctggcagagtgcacgccggtctatgtacaatacttcgtgaagttcttcatcattggtgtcactgtgctggtcgtggctgtcccagarggcctgcctcttgctgtcaccatctccttagcttactctgtcaagaaaatgatgaaagacaacaacctggtgcgccacctggatgcctgcgagaccatgggcaacgccacagccatctgctccgacaagacgggcacgctcaccaccaaccgtatgaccgtggtccagtcctacctaggrgacacccactacaaagagattccggcccccagcgccctgacccctaagatcctcgacctcctggtccatgccatctccatcaacagtgcctataccaccaaaatactacctcctgagaaggaaggcgccctcccacgccaggtgggcaataagacggagtgygccctgctgggcttcgtcttggacctgaagcgggacttccagcccgtgcgcgagcagatcccggaagacaagctttacaaagtgtacaccttcaactcggtccgcaagtccatgagcacagtcatccgcatgcccgacggtggcttccgcctcttcagcaagggggcctcagagatcctcttgaaaaagtgcaccaacatcttgaacagcaatggcgaactccggggctttcggcctcgggaccgggacgacatggtgaggaagatcatcgagccgatggcttgcgatggcctccgcaccatctgcatcgcctaccgggacttctctgcaggccaggagcccgactgggacaacgagaatgaggtcgtgggtgacctcacctgcatagctgtcgtgggcattgaggaccctgtgcggcccgaggtccctgaagctatccgaaaatgccagcgtgctggcatcacagtccgcatggtgactggggacaacatcaacacggcccgggccatcgcagccaaatgcggcatcatccagcccggggaggacttcctgtgcctagaagggaaggagttcaaccggcggatccgcaatgagaaaggcgagatagaacaggagcggctggacaaggtgtggcccaagctgagggtgctggcccggtcgtctcccaccgacaagcacacactggtcaaagggattatcgacagcaccactggtgagcagcggcaggtggtggctgtgacaggggatggcaccaacgatgggccggccctcaagaaggcggacgtgggcttcgccatgggcatcgcagggaccgacgtggccaaggaggcctccgacatcatcctgaccgatgacaacttcaccagcatcgtcaaggcagtcatgtggggccgtaacgtctatgacagcatctccaagttcctgcagtttcaactgacggtcaatgtggtggctgtsatcgtggccttcacaggtgcctgcattactcaggactctcctctcaaagccgtgcagatgttgtgggtgaacttgatcatggacacatttgcctctctggccctggcgacggagccacccacagagtcgctgctgctgcggaagccgtacggccgcgacaagcccctcatctcccgcaccatgatgaagaacattctgggccacgccgtgtaccagctcgccatcatcttcaccctgctgtttgtcggggagctcttcttcgacatcgacagcgggaggaatgcgcccctgcactcgccaccctcagagcactacaccatcatcttcaacacgttcgtcatgatgcagctctttaacgagatcaacgcccgcaagatccacggcgagaggaacgtgttcgacggcatcttcagcaaccccatcttctgcaccatcgttttgggcactttcgggattcagattgtcatcgtccagtttggcgggaagcccttcagctgctccccactatccacagaacagtggctctggtgcctgtttgttggtgttggggagctggtctggggacaggtcattgccaccatccccaccagccagctcaagtgcctgaaggaagccgggcacgggcccgggaaggacgagatgaccgacgaggagctggccgaaggcgaggaagagatcgaccaygccgagcgggagctccgcaggggccagatcctctggttccggggcctgaaccggattcagacgcagatccgggtggtgaaagcgttccgtagctcgctctatgaaggcctggagaaaccagaatccaagacctccattcacaacttcatggccacgcccgagtttctgatcaatgactacacccacaacatcccgctcattgacgacacggacgtggacgagaacgaggagcgcctccgggcccccccgcccccgtcccccaaccagaacaacaacgccatagacagcggcatctacctgaccacgcatgtcaccaagtcagctacctcttcagtgttttcctccagtcccgggagcccgctccacagcgtggagacgtccctctaacaagaacttgtctcagcacatgcgcacacgcacactcggactcacacgaagtcacacgcacacatgcacgcacacacacatatggggacctgcacacctgcaaaacgagggaacaactaaggtggctgaagacctttctggcagggcatttgcaaggacccaaatccattcaacaagggtgcagcctgccacaggctcctcatccggactgaggaagacgaggacagggaggaggaaaaggaggaagaggaggacaaaaagggggaggagaaggttcttcgtccaaaggaggaaggagaagaagtagaaagtgcgaagagctgagttccccacctttttttctattgatgcttcttttttaacaaactacagttttaccgtgtgtttgccatttgagctgtgtggtgggcagggggctggtttgggtttatggggagcttttgttgcacccatgcaggggcaatcagatcagcatcttcatgc

SEQ ID NO: 6753 - DNA, 4426 bp, Homo sapiens
gtgtccacgcttagcagctttctcaccgccgccaaaccttgcctgggcactgggaccgtgggtggccgcctgtccctagctgtggctgagccaagattgcacttgtgagaaggcctgacaggcagcatgggcgacatggccaatagttccatcgagttccaccccaagccccagcagcagcgggatgtcccccaggctggaggctttgggtgcacgctggcggagctgcgcaccctcatggagctgcgaggggccgaggcgctgcagaagatcgaggaggcctacggggatgtcagcgggctctgccggaggctgaagacctcacccacagagggcctggcggacaacaccaatgacctggagaagcgcaggcagatctacgggcagaacttcatccccccaaagcaacccaagaccttcctgcagctggtgtgggaggccctgcaggacgtgacmctcatcatcctggaggtggctgccatcgtctctctgggcctctcgttctatgcgccgccaggagaggagagtgaagcctgtgggaatgtgtcgggaggcgcagaagatgagggcgaggccgaagctggctggatcgagggggctgccatcctgctgtccgtcatctgtgtggtgctggtcacggccttcaatgactggagcaaggagaagcagttccgaggcctgcagagccgaattgagcaggagcagaagttcacggtcatscggaacgggcagctcctccaggtccccgtggctgcgctggtggtgggggacattgcccaggtcaagtacggcgacctgctgccagccgacggcgtgctcmtccaggccaatgacctcaagatcgacgagagctccctgacgggcgagtctgaccacgtgcgcaagtcagctgacaaagatcccatgctgctctcaggcactcatgtcatggaaggttctggaagaatggtggtgaccgccgttggcgtgaattcccagacaggcatcatcttcacgctgcttggagctggcggagaggaggaagagaagaaagataagaaaggcaagcagcaggatggggccatggagagtagccagaccaaagctaagaagcaggatggtgcagtggccatggagatgcagcccctgaagagcgcggagggtggggagatggaggagcgggagaagaagaaagccaacgcacccaaaaaggagaagtctgtccttcaggggaagctcacaaagctagccgtgcagatcgggaaagcagggctggtgatgtctgccatcaccgtcatcatcctggtcctctactttgtgattgagacgtttgtcgtggaaggccggacatggctggcagagtgcacgccggtctatgtacaatacttcgtgaagttcttcatcattggtgtcactgtgctggtcgtggctgtcccagarggcctgcctcttgctgtcaccatctccttagcttactctgtcaagaaaatgatgaaagacaacaacctggtgcgccacctggatgcctgcgagaccatgggcaacgccacagccatctgctccgacaagacgggcacgctcaccaccaaccgtatgaccgtggtccagtcctacctaggrgacacccactacaaagagattccggcccccagcgccctgacccctaagatcctcgacctcctggtccatgccatctccatcaacagtgcctataccaccaaaatactacctcctgagaaggaaggcgccctcccacgccaggtgggcaataagacggagtgygccctgctgggcttcgtcttggacctgaagcgggacttccagcccgtgcgcgagcagatcccggaagacaagctttacaaagtgtacaccttcaactcggtccgcaagtccatgagcacagtcatccgcatgcccgacggtggcttccgcctcttcagcaagggggcctcagagatcctcttgaaaaagtgcaccaacatcttgaacagcaatggcgaactccggggctttcggcctcgggaccgggacgacatggtgaggaagatcatcgagccgatggcttgcgatggcctccgcaccatctgcatcgcctaccgggacttctctgcaggccaggagcccgactgggacaacgagaatgaggtcgtgggtgacctcacctgcatagctgtcgtgggcattgaggaccctgtgcggcccgaggtccctgaagctatccgaaaatgccagcgtgctggcatcacagtccgcatggtgactggggacaacatcaacacggcccgggccatcgcagccaaatgcggcatcatccagcccggggaggacttcctgtgcctagaagggaaggagttcaaccggcggatccgcaatgagaaaggcgagatagaacaggagcggctggacaaggtgtggcccaagctgagggtgctggcccggtcgtctcccaccgacaagcacacactggtcaaagggattatcgacagcaccactggtgagcagcggcaggtggtggctgtgacaggggatggcaccaacgatgggccggccctcaagaaggcggacgtgggcttcgccatgggcatcgcagggaccgacgtggccaaggaggcctccgacatcatcctgaccgatgacaacttcaccagcatcgtcaaggcagtcatgtggggccgtaacgtctatgacagcatctccaagttcctgcagtttcaactgacggtcaatgtggtggctgtsatcgtggccttcacaggtgcctgcattactcaggactctcctctcaaagccgtgcagatgttgtgggtgaacttgatcatggacacatttgcctctctggccctggcgacggagccacccacagagtcgctgctgctgcggaagccgtacggccgcgacaagcccctcatctcccgcaccatgatgaagaacattctgggccacgccgtgtaccagctcgccatcatcttcaccctgctgtttgtcggggagctcttcttcgacatcgacagcgggaggaatgcgcccctgcactcgccaccctcagagcactacaccatcatcttcaacacgttcgtcatgatgcagctctttaacgagatcaacgcccgcaagatccacggcgagaggaacgtgttcgacggcatcttcagcaaccccatcttctgcaccatcgttttgggcactttcgggattcagattgtcatcgtccagtttggcgggaagcccttcagctgctccccactatccacagaacagtggctctggtgcctgtttgttggtgttggggagctggtctggggacaggtcattgccaccatccccaccagccagctcaagtgcctgaaggaagccgggcacgggcccgggaaggacgagatgaccgacgaggagctggccgaaggcgaggaagagatcgaccaygccgagcgggagctccgcaggggccagatcctctggttccggggcctgaaccggattcagacgcagatggaggtagtgagtaccttcaagagaagcggttcagttcagggtgctgtgcgccggcggtcttcggtcctcagccagcttcatgacgtaaccaatctttctacccctactcacgcaattctctctgctgccaatcctaccagtgctgctgggaatccgggtggtgaaagcgttccgtagctcgctctatgaaggcctggagaaaccagaatccaagacctccattcacaacttcatggccacgcccgagtttctgatcaatgactacacccacaacatcccgctcattgacgacacggacgtggacgagaacgaggagcgcctccgggcccccccgcccccgtcccccaaccagaacaacaacgccatagacagcggcatctacctgaccacgcatgtcaccaagtcagctacctcttcagtgttttcctccagtcccgggagcccgctccacagcgtggagacgtccctctaacaagaacttgtctcagcacatgcgcacacgcacactcggactcacacgaagtcacacgcacacatgcacgcacacacacatatggggacctgcacacctgcaaaacgagggaacaactaaggtggctgaagacctttctggcagggcatttgcaaggacccaaatccattcaacaagggtgcagcctgccacaggctcctcatccggactgaggaagacgaggacagggaggaggaaaaggaggaagaggaggacaaaaagggggaggagaaggttcttcgtccaaaggaggaaggagaagaagtagaaagtgcgaagagctgagttccccacctttttttctattgatgcttcttttttaacaaactacagttttaccgtgtgtttgccatttgagctgtgtggtgggcagggggctggtttgggtttatggggagcttttgttgcacccatgcaggggcaatcagatcagcatcttcatgc

SEQ ID NO: 6754 - DNA, 4384 bp, Homo sapiens
gtgtccacgcttagcagctttctcaccgccgccaaaccttgcctgggcactgggaccgtgggtggccgcctgtccctagctgtggctgagccaagattgcacttgtgagaaggcctgacaggcagcatgggcgacatggccaatagttccatcgagttccaccccaagccccagcagcagcgggatgtcccccaggctggaggctttgggtgcacgctggcggagctgcgcaccctcatggagctgcgaggggccgaggcgctgcagaagatcgaggaggcctacggggatgtcagcgggctctgccggaggctgaagacctcacccacagagggcctggcggacaacaccaatgacctggagaagcgcaggcagatctacgggcagaacttcatccccccaaagcaacccaagaccttcctgcagctggtgtgggaggccctgcaggacgtgacmctcatcatcctggaggtggctgccatcgtctctctgggcctctcgttctatgcgccgccaggagaggagagtgaagcctgtgggaatgtgtcgggaggcgcagaagatgagggcgaggccgaagctggctggatcgagggggctgccatcctgctgtccgtcatctgtgtggtgctggtcacggccttcaatgactggagcaaggagaagcagttccgaggcctgcagagccgaattgagcaggagcagaagttcacggtcatscggaacgggcagctcctccaggtccccgtggctgcgctggtggtgggggacattgcccaggtcaagtacggcgacctgctgccagccgacggcgtgctcmtccaggccaatgacctcaagatcgacgagagctccctgacgggcgagtctgaccacgtgcgcaagtcagctgacaaagatcccatgctgctctcaggcactcatgtcatggaaggttctggaagaatggtggtgaccgccgttggcgtgaattcccagacaggcatcatcttcacgctgcttggagctggcggagaggaggaagagaagaaagataagaaagctaagaagcaggatggtgcagtggccatggagatgcagcccctgaagagcgcggagggtggggagatggaggagcgggagaagaagaaagccaacgcacccaaaaaggagaagtctgtccttcaggggaagctcacaaagctagccgtgcagatcgggaaagcagggctggtgatgtctgccatcaccgtcatcatcctggtcctctactttgtgattgagacgtttgtcgtggaaggccggacatggctggcagagtgcacgccggtctatgtacaatacttcgtgaagttcttcatcattggtgtcactgtgctggtcgtggctgtcccagarggcctgcctcttgctgtcaccatctccttagcttactctgtcaagaaaatgatgaaagacaacaacctggtgcgccacctggatgcctgcgagaccatgggcaacgccacagccatctgctccgacaagacgggcacgctcaccaccaaccgtatgaccgtggtccagtcctacctaggrgacacccactacaaagagattccggcccccagcgccctgacccctaagatcctcgacctcctggtccatgccatctccatcaacagtgcctataccaccaaaatactacctcctgagaaggaaggcgccctcccacgccaggtgggcaataagacggagtgygccctgctgggcttcgtcttggacctgaagcgggacttccagcccgtgcgcgagcagatcccggaagacaagctttacaaagtgtacaccttcaactcggtccgcaagtccatgagcacagtcatccgcatgcccgacggtggcttccgcctcttcagcaagggggcctcagagatcctcttgaaaaagtgcaccaacatcttgaacagcaatggcgaactccggggctttcggcctcgggaccgggacgacatggtgaggaagatcatcgagccgatggcttgcgatggcctccgcaccatctgcatcgcctaccgggacttctctgcaggccaggagcccgactgggacaacgagaatgaggtcgtgggtgacctcacctgcatagctgtcgtgggcattgaggaccctgtgcggcccgaggtccctgaagctatccgaaaatgccagcgtgctggcatcacagtccgcatggtgactggggacaacatcaacacggcccgggccatcgcagccaaatgcggcatcatccagcccggggaggacttcctgtgcctagaagggaaggagttcaaccggcggatccgcaatgagaaaggcgagatagaacaggagcggctggacaaggtgtggcccaagctgagggtgctggcccggtcgtctcccaccgacaagcacacactggtcaaagggattatcgacagcaccactggtgagcagcggcaggtggtggctgtgacaggggatggcaccaacgatgggccggccctcaagaaggcggacgtgggcttcgccatgggcatcgcagggaccgacgtggccaaggaggcctccgacatcatcctgaccgatgacaacttcaccagcatcgtcaaggcagtcatgtggggccgtaacgtctatgacagcatctccaagttcctgcagtttcaactgacggtcaatgtggtggctgtsatcgtggccttcacaggtgcctgcattactcaggactctcctctcaaagccgtgcagatgttgtgggtgaacttgatcatggacacatttgcctctctggccctggcgacggagccacccacagagtcgctgctgctgcggaagccgtacggccgcgacaagcccctcatctcccgcaccatgatgaagaacattctgggccacgccgtgtaccagctcgccatcatcttcaccctgctgtttgtcggggagctcttcttcgacatcgacagcgggaggaatgcgcccctgcactcgccaccctcagagcactacaccatcatcttcaacacgttcgtcatgatgcagctctttaacgagatcaacgcccgcaagatccacggcgagaggaacgtgttcgacggcatcttcagcaaccccatcttctgcaccatcgttttgggcactttcgggattcagattgtcatcgtccagtttggcgggaagcccttcagctgctccccactatccacagaacagtggctctggtgcctgtttgttggtgttggggagctggtctggggacaggtcattgccaccatccccaccagccagctcaagtgcctgaaggaagccgggcacgggcccgggaaggacgagatgaccgacgaggagctggccgaaggcgaggaagagatcgaccaygccgagcgggagctccgcaggggccagatcctctggttccggggcctgaaccggattcagacgcagatggaggtagtgagtaccttcaagagaagcggttcagttcagggtgctgtgcgccggcggtcttcggtcctcagccagcttcatgacgtaaccaatctttctacccctactcacgcaattctctctgctgccaatcctaccagtgctgctgggaatccgggtggtgaaagcgttccgtagctcgctctatgaaggcctggagaaaccagaatccaagacctccattcacaacttcatggccacgcccgagtttctgatcaatgactacacccacaacatcccgctcattgacgacacggacgtggacgagaacgaggagcgcctccgggcccccccgcccccgtcccccaaccagaacaacaacgccatagacagcggcatctacctgaccacgcatgtcaccaagtcagctacctcttcagtgttttcctccagtcccgggagcccgctccacagcgtggagacgtccctctaacaagaacttgtctcagcacatgcgcacacgcacactcggactcacacgaagtcacacgcacacatgcacgcacacacacatatggggacctgcacacctgcaaaacgagggaacaactaaggtggctgaagacctttctggcagggcatttgcaaggacccaaatccattcaacaagggtgcagcctgccacaggctcctcatccggactgaggaagacgaggacagggaggaggaaaaggaggaagaggaggacaaaaagggggaggagaaggttcttcgtccaaaggaggaaggagaagaagtagaaagtgcgaagagctgagttccccacctttttttctattgatgcttcttttttaacaaactacagttttaccgtgtgtttgccatttgagctgtgtggtgggcagggggctggtttgggtttatggggagcttttgttgcacccatgcaggggcaatcagatcagcatcttcatgc

SEQ ID NO: 6755 - DNA, 1513 bp, Homo sapiens
ctgccgagagccgcacttctgggcggatgccgcaggtcgggagggatgaggccgacggcgctgattggctgaccgccgcggcctggggtttccctggccccgcccctgctgcactccccccgcccgcgaacccgcgcgctgcccggtcctgcgctgcycagcgggaggggctggaccccgcgttcctcctccctgccggtccccatccttaaagcgagagtctggacgccccgcctgtgggagagagcgccgggatccggacggggagcaaccggggcaggccgtgccggctgaggaggtcctgaggctacagagctgccgcggctggcacacgagcgcctcggcactaaccgagtgttcgcgggggctgtgaggggagggccccgggcgccattgctggcggtgggagcgccgcccggtctcagcccgccctcggctgctctcctcctccggctgggaggggccgtagctcggggccgtcgccagccccggcccgggctcgakaatcaagggcctcggccgycgtcccgcasctcagtccatcgcccttgccgggcagcccgggcagagaccatgtttgacaagacgcggctgccgtacgtggccctcgatgtgctctgcgtgttgctggctggattgccttttgcaattcttacttcaaggcatacccccttccaacgaggagtattctgtaatgatgagtccatcaagtacccttacaaagaagacaccataccttatgcgttattaggtggaataatcattccattcagtattatcgttattattcttggagaaaccctgtctgtttactgtaaccttttgcactcaaattcctttatcaggaataactacatagccactatttacaaagccattggaacctttttatttggtgcagctgctagtcagtccctgactgacattgccaagtattcaataggcagactgcggcctcacttcttggatgtttgtgatccagattggtcaaaaatcaactgcagcgatggttacattgaatactacatatgtcgagggaatgcagaaagagttaaggaaggcaggttgtccttctattcaggccactcttcgttttccatgtactgcatgctgtttgtggcactttatcttcaagccaggatgaagggagactgggcaagactcttacgccccacactgcaatttggtcttgttgccgtatccatttatgtgggcctttctcgagtttctgattataaacaccactggagcgatgtgttgactggactcattcagggagctctggttgcaatattagttgctgtatatgtatcggatttcttcaaagaaagaacttcttttaaagaaagaaaagaggaggactctcatacaactctgcatgaaacaccaacaactgggaatcactatccgagcaatcaccagccttgaaaggcagcagggtgcccaggtgaagctggcctgttttctaaaggaaaatgacttctrctgctgctatgcctcttggatgcacact

SEQ ID NO: 6756 - DNA, 1899 bp, Homo sapiens
ctgccgagagccgcacttctgggcggatgccgcaggtcgggagggatgaggccgacggcgctgattggctgaccgccgcggcctggggtttccctggccccgcccctgctgcactccccccgcccgcgaacccgcgcgctgcccggtcctgcgctgcycagcgggaggggctggaccccgcgttcctcctccctgccggtccccatccttaaagcgagagtctggacgccccgcctgtgggagagagcgccgggatccggacggggagcaaccggggcaggccgtgccggctgaggaggtcctgaggctacagagctgccgcggctggcacacgagcgcctcggcactaaccgagtgttcgcgggggctgtgaggggagggccccgggcgccattgctggcggtgggagcgccgcccggtctcagcccgccctcggctgctctcctcctccggctgggaggggccgtagctcggggccgtcgccagccccggcccgggctcgakaatcaagggcctcggccgycgtcccgcasctcagtccatcgcccttgccgggcagcccgggcagagaccatgtttgacaagacgcggctgccgtacgtggccctcgatgtgctctgcgtgttgctggctggattgccttttgcaattcttacttcaaggcatacccccttccaacgaggagtattctgtaatgatgagtccatcaagtacccttacaaagaagacaccataccttatgcgttattaggtggaataatcattccattcagtattatcgttattattcttggagaaaccctgtctgtttactgtaaccttttgcactcaaattcctttatcaggaataactacatagccactatttacaaagccattggaacctttttatttggtgcagctgctagtcagtccctgactgacattgccaagtattcaataggcagactgcggcctcacttcttggatgtttgtgatccagattggtcaaaaatcaactgcagcgatggttacattgaatactacatatgtcgagggaatgcagaaagagttaaggaaggcaggttgtccttctattcaggccactcttcgttttccatgtactgcatgctgtttgtggcactttatcttcaagccaggatgaagggagactgggcaagactcttacgccccacactgcaatttggtcttgttgccgtatccatttatgtgggcctttctcgagtttctgattataaacaccactggagcgatgtgttgactggactcattcagggagctctggttgcaatattagttgctgtatatgtatcggatttcttcaaagaaagaacttcttttaaagaaagaaaagaggaggactctcatacaactctgcatgaaacaccaacaactgggaatcactatccgagcaatcaccagccttgaaaggcagcagggtgcccaggtgaagctggcctgttttctaaaggaaaatgattgccacaaggcaagaggatgcatctttcttcctggtgtacaagcctttaaagacttctrctgctgctatgcctcttggatgcacactttgtgtgtacatagttacctttaactcagtggttatytaatagctctaaactcattaaaaaaactccaagccttcyaccaaaacagtgccccacctgtatacatttttattaaaaaaatgtaatgcttatgtataaacatgtatgtaatatgctttctatgaatgatgtttgatttaaatataatacatattaaaatgtatgggagaaccaaatccacacttgcaggcatttgtagtcaactgtaatcaaacaggtggtcaataatttaaaatctcacattcctttagctgactctacaagtagaggctggcagcaaacacaatatctctct

SEQ ID NO: 6757 - DNA, 1516 bp, Homo sapiens
ctgccgagagccgcacttctgggcggatgccgcaggtcgggagggatgaggccgacggcgctgattggctgaccgccgcggcctggggtttccctggccccgcccctgctgcactccccccgcccgcgaacccgcgcgctgcccggtcctgcgctgcycagcgggaggggctggaccccgcgttcctcctccctgccggtccccatccttaaagcgagagtctggacgccccgcctgtgggagagagcgccgggatccggacggggagcaaccggggcaggccgtgccggctgaggaggtcctgaggctacagagctgccgcggctggcacacgagcgcctcggcactaaccgagtgttcgcgggggctgtgaggggagggccccgggcgccattgctggcggtgggagcgccgcccggtctcagcccgccctcggctgctctcctcctccggctgggaggggccgtagctcggggccgtcgccagccccggcccgggctcgakaatcaagggcctcggccgycgtcccgcasctcagtccatcgcccttgccgggcagcccgggcagagaccatgtttgacaagacgcggctgccgtacgtggccctcgatgtgctctgcgtgttgctggcttccatgcctatggctgttctaaaattgggccaaatatatccatttcagagaggctttttctgtaaagacaacagcatcaactatccgtaccatgacagtaccgtcacatccactgtcctcatcctagtgggggttggcttgcccrtttcctctattattcttggagaaaccctgtctgtttactgtaaccttttgcactcaaattcctttatcaggaataactacatagccactatttacaaagccattggaacctttttatttggtgcagctgctagtcagtccctgactgacattgccaagtattcaataggcagactgcggcctcacttcttggatgtttgtgatccagattggtcaaaaatcaactgcagcgatggttacattgaatactacatatgtcgagggaatgcagaaagagttaaggaaggcaggttgtccttctattcaggccactcttcgttttccatgtactgcatgctgtttgtggcactttatcttcaagccaggatgaagggagactgggcaagactcttacgccccacactgcaatttggtcttgttgccgtatccatttatgtgggcctttctcgagtttctgattataaacaccactggagcgatgtgttgactggactcattcagggagctctggttgcaatattagttgctgtatatgtatcggatttcttcaaagaaagaacttcttttaaagaaagaaaagaggaggactctcatacaactctgcatgaaacaccaacaactgggaatcactatccgagcaatcaccagccttgaaaggcagcagggtgcccaggtgaagctggcctgttttctaaaggaaaatgacttctrctgctgctatgcctcttggatgcacact

SEQ ID NO: 6758 - DNA, 2523 bp, Homo sapiens
ggggcgtggcctcgacgggcaagcggcgataagaggtggcgtcctccgcggcattgcgagcaccgccagtctgcgccgcyaggcgtaggcggggtggcccttgcgtctcccgcttccttgaaaaacccggcgggcgagcgaggctgcgggccggccgctgcccttccccacactccccgccgagaagcctcgctcggcgcccaacatggcgggtgggcgctgcggcccgcagctaacggcgctcctggccgcctggatcgcggctgtggcggcgacggcaggccccgaggaggccgcgctgccgccggagcagagccgggtccagcccatgaccgcctccaactggacgctggtgatggagggcgagtggatgctgaaattttacgccccatggtgtccatcctgccagcagactgattcagaatgggaggcttttgcaaagaatggtgaaatacttcagatcagtgtggggaaggtagatgtcattcaagaaccaggtttgagtgrccgcttctttgtcaccactctcccagcattttttcatgcaaaggatgggatattccgccgttatcgtggcccaggaatcttcgaagacctgcagaattatatcttagagaagaaatggcaatcagtcgagcctctgactggctggaaatccccrgcttctctaacgatgtctggaatggctggtctttttagcatctctggcaagatatggcatcttcacaactatttcacagtgactcttggaattcctgcttggtgttcttatgtstttttcgtcatagccaccttggtttttggcctttttatgggtctggtcttggtggtaatatcagaatgtttctrtgtgccacttccaaggcatttatctgagcgttctgagcagaatcggagatcagaggaggctcatagagctgaacagttgcaggatgcggaggaggaaaaagatgattcaaatgaagaagaaaacaaagacagccttgtagatgatgaagaagagaaagaagatcttggcgatgaggatgaagcagaggaagaagaggaggaggacaacttggctgctggtgtggatgaggagagaagtgaggccaatgatcaggggcccccargagaggacggtgtgacccgggaggaagtagagcctgaggaggctgaagaaggcatctctgagcaaccctgcccagctgacacagaggtggtggaagactccttgaggcagcgtaaaagtcagcatgctgacaagggactgtagatttaatgatgcgttttcaagaatacacaccaaaacaatatgtcagcttccctttggcctkcagtttgtaccaaatccttaatttttcctgaatgagcaagcttctcttaaaagatgctctctagtcatttggtctcatggcagtaagcctcatgtatactaaggagagtcttccaggtgtgacaatcagkatatagaaaaacaaacgtagtgttgggatctgtttggagactgggatgggaacaagttcatttacttaggggtcagagagtctcgaccagaggaggccattcccagtcctaatcagcaccttccagagacaaggctgcaggccctgtgaaatgaaagccaagcaggagccttggctcctgagcatccccaaagtgtaacgtagaagccttgcatccttttcttgtgtaaagtatttatttttgtcaaattgcaggaaacatcaggcaccacagtgcatgaaaaatctttcacagctagaaattgaaagggccttgggtatagagagcagctcagaagtcatcccagccctctgaatctcctgtgctatgttttatttcttacctttaatttttccagcatttccaccatgggcattcaggctctccacactcttcactattatctcttggtcagaggactccaataacagccaggtttacatgaactgtgtttgttcattctgacctaaggggtttagataatcagtaaccataacccctgaagctgtgactgccaaacatctcaaatgaaatgttgtrgccatcagagactcaaaaggaagtaaggattttacaagacagattaaaaaaaaatkgttttgtccaaaatatagttgttgttgatttttttttaagttttctaagcaatatttttcaagccagaagtcctctaagtcttgccagtacaaggtagtcttgtgaagaaaagttgaatactgttttgttttcatctcaaggggttccctgggtcttgaactactttaataataactaaaaaaccacttctgattttccttcagtgatgtgcttttggtgaaagaattaatgaactccagtacctgaaagtgaaagatttgattttgtttccatcttctgtaatcttccaaagaattatatctttgtaaatctctcaatactcaatctactgtaagtacccagggaggctaatttcyttaaaaaaaaaaaatctatccatctacttctctcttacctgatttatgtgttagaataaattcatgaaattcgattccaagcata

SEQ ID NO: 6759 - DNA, 2142 bp, Homo sapiens
ttacgccccatggtgtccatcctgccagcagactgattcagaatgggaggcttttgcaaagaatggtgaaatacttcagatcagtgtggggaaggtagatgtcattcaagaaccaggtttgagtgrccgcttctttgtcaccactctcccagcattttttcatgcaaaggatgggatattccgccgttatcgtggcccaggaatcttcgaagacctgcagaattatatcttagagaagaaatggcaatcagtcgagcctctgactggctggaaatccccrgcttctctaacgatgtctggaatggctggtctttttagcatctctggcaagatatggcatcttcacaactatttcacagtgactcttggaattcctgcttggtgttcttatgtstttttcgtcatagccaccttggtttttggcctttttatgggtctggtcttggtggtaatatcagaatgtttctrtgtgccacttccaaggcatttatctgagcgttctgagcagaatcggagatcagaggaggctcatagagctgaacagttgcaggatgcggaggaggaaaaagatgattcaaatgaagaagaaaacaaagacagccttgtagatgatgaagaagagaaagaagatcttggcgatgaggatgaagcagaggaagaagaggaggaggacaacttggctgctggtgtggatgaggagagaagtgaggccaatgatcaggggcccccargagaggacggtgtgacccgggaggaagtagagcctgaggaggctgaagaaggcatctctgagcaaccctgcccagctgacacagaggtggtggaagactccttgaggcagcgtaaaagtcagcatgctgacaagggactgtagatttaatgatgcgttttcaagaatacacaccaaaacaatatgtcagcttccctttggcctkcagtttgtaccaaatccttaatttttcctgaatgagcaagcttctcttaaaagatgctctctagtcatttggtctcatggcagtaagcctcatgtatactaaggagagtcttccaggtgtgacaatcagkatatagaaaaacaaacgtagtgttgggatctgtttggagactgggatgggaacaagttcatttacttaggggtcagagagtctcgaccagaggaggccattcccagtcctaatcagcaccttccagagacaaggctgcaggccctgtgaaatgaaagccaagcaggagccttggctcctgagcatccccaaagtgtaacgtagaagccttgcatccttttcttgtgtaaagtatttatttttgtcaaattgcaggaaacatcaggcaccacagtgcatgaaaaatctttcacagctagaaattgaaagggccttgggtatagagagcagctcagaagtcatcccagccctctgaatctcctgtgctatgttttatttcttacctttaatttttccagcatttccaccatgggcattcaggctctccacactcttcactattatctcttggtcagaggactccaataacagccaggtttacatgaactgtgtttgttcattctgacctaaggggtttagataatcagtaaccataacccctgaagctgtgactgccaaacatctcaaatgaaatgttgtrgccatcagagactcaaaaggaagtaaggattttacaagacagattaaaaaaaaatkgttttgtccaaaatatagttgttgttgatttttttttaagttttctaagcaatatttttcaagccagaagtcctctaagtcttgccagtacaaggtagtcttgtgaagaaaagttgaatactgttttgttttcatctcaaggggttccctgggtcttgaactactttaataataactaaaaaaccacttctgattttccttcagtgatgtgcttttggtgaaagaattaatgaactccagtacctgaaagtgaaagatttgattttgtttccatcttctgtaatcttccaaagaattatatctttgtaaatctctcaatactcaatctactgtaagtacccagggaggctaatttcyttaaaaaaaaaaaatctatccatctacttctctcttacctgatttatgtgttagaataaattcatgaaattcgattccaagcata

SEQ ID NO: 6760 - DNA, 2212 bp, Homo sapiens
cttaggcaacgttgggtcatctgtttattgtcagcttggcggtcaggaagaaagggcggtggttgctgagttacgccccatggtgtccatcctgccagcagactgattcagaatgggaggcttttgcaaagaatggtgaaatacttcagatcagtgtggggaaggtagatgtcattcaagaaccaggtttgagtgrccgcttctttgtcaccactctcccagcattttttcatgcaaaggatgggatattccgccgttatcgtggcccaggaatcttcgaagacctgcagaattatatcttagagaagaaatggcaatcagtcgagcctctgactggctggaaatccccrgcttctctaacgatgtctggaatggctggtctttttagcatctctggcaagatatggcatcttcacaactatttcacagtgactcttggaattcctgcttggtgttcttatgtstttttcgtcatagccaccttggtttttggcctttttatgggtctggtcttggtggtaatatcagaatgtttctrtgtgccacttccaaggcatttatctgagcgttctgagcagaatcggagatcagaggaggctcatagagctgaacagttgcaggatgcggaggaggaaaaagatgattcaaatgaagaagaaaacaaagacagccttgtagatgatgaagaagagaaagaagatcttggcgatgaggatgaagcagaggaagaagaggaggaggacaacttggctgctggtgtggatgaggagagaagtgaggccaatgatcaggggcccccargagaggacggtgtgacccgggaggaagtagagcctgaggaggctgaagaaggcatctctgagcaaccctgcccagctgacacagaggtggtggaagactccttgaggcagcgtaaaagtcagcatgctgacaagggactgtagatttaatgatgcgttttcaagaatacacaccaaaacaatatgtcagcttccctttggcctkcagtttgtaccaaatccttaatttttcctgaatgagcaagcttctcttaaaagatgctctctagtcatttggtctcatggcagtaagcctcatgtatactaaggagagtcttccaggtgtgacaatcagkatatagaaaaacaaacgtagtgttgggatctgtttggagactgggatgggaacaagttcatttacttaggggtcagagagtctcgaccagaggaggccattcccagtcctaatcagcaccttccagagacaaggctgcaggccctgtgaaatgaaagccaagcaggagccttggctcctgagcatccccaaagtgtaacgtagaagccttgcatccttttcttgtgtaaagtatttatttttgtcaaattgcaggaaacatcaggcaccacagtgcatgaaaaatctttcacagctagaaattgaaagggccttgggtatagagagcagctcagaagtcatcccagccctctgaatctcctgtgctatgttttatttcttacctttaatttttccagcatttccaccatgggcattcaggctctccacactcttcactattatctcttggtcagaggactccaataacagccaggtttacatgaactgtgtttgttcattctgacctaaggggtttagataatcagtaaccataacccctgaagctgtgactgccaaacatctcaaatgaaatgttgtrgccatcagagactcaaaaggaagtaaggattttacaagacagattaaaaaaaaatkgttttgtccaaaatatagttgttgttgatttttttttaagttttctaagcaatatttttcaagccagaagtcctctaagtcttgccagtacaaggtagtcttgtgaagaaaagttgaatactgttttgttttcatctcaaggggttccctgggtcttgaactactttaataataactaaaaaaccacttctgattttccttcagtgatgtgcttttggtgaaagaattaatgaactccagtacctgaaagtgaaagatttgattttgtttccatcttctgtaatcttccaaagaattatatctttgtaaatctctcaatactcaatctactgtaagtacccagggaggctaatttcyttaaaaaaaaaaaatctatccatctacttctctcttacctgatttatgtgttagaataaattcatgaaattcgattccaagcata

SEQ ID NO: 6761 - DNA, 2066 bp, Homo sapiens
aaaaaaaaaaaaacaacgaactccatctgggatagcaataacctgtgaaaatgctcccccggctaatttgtatcaatgattatgaacaacatgctaaatcagtacttccaaagtctatatatgactattacagrtctggggcaaatgatgaagaaactttggctgataatattgcagcattttccagatggaagctgtatccaaggatgctccggaatgttgctgaaacagatctgtcgacttctgttttaggacagagggtcagcatgccaatatgtgtgggggctacggccatgcagcgcatggctcatgtggacggcgagcttgccactgtgagagcctgtcagtccctgggaacgggcatgatgttgagttcctgggccacctcctcaattgaagaagtggcggaagctggtcctgaggcacttcgttggctgcaactgtatatctacaaggaccgagaagtcaccaagaagctagtgcggcaggcagagaagatgggctacaaggccatatttgtgacagtggacacaccttacctgggcaaccgtctggatgatgtgcgtaacagattcaaactgccgccacaactcaggatgaaaaattttgaaaccagtactttatcattttctcctgaggaaaattttggagaygacagtggacttgctgcatatgtggctaaagcaatagacccatctatcagctgggaagatatcaaatggctgagaagactgacatcattgccaattgttgcaaagggcattttgagagattgatgttctgccagaaattgtggaggctgtggaagggaaggtggaagtcttcctggacgggggtgtgcggaaaggcactgatgttctgaaagctctggctcttggcgccaaggctgtgtttgtggggagaccaatcgtttggggcttagctttccagggggagaaaggtgttcaagatgtcctcgagatactaaaggaagaattccggttggccatggctctgagtgggtgccagaatgtgaaagtcatcgacragacattggggttgtgaaagacraaagaagaaatyatctgaaatggatctgaagagttctcagaggaagtgactcatgttgaagaggaagtgacaaagcaggtggtagtggcggggaaagatgaaggagagaactacaacggtattcctaagtgacgtccaatagcctaaatttatcacagttccatcagaacacccaactcattcactgagagggattttatccaagtgtctgcctacatttaacccagttaagacaattcacattcaagtgtgatcaataacaaatccatctaagcttgaccttcttttcaaagtaggagattattaaccagcaaaagtttcaagctgagtaaatttggagtatgatgtagaaggagaacacataaggcaacttcacaggaagatgtttgatcatttagtatctactgcatttaaaaataagatcattattttttaagacaagaacattatcaacaagatcaattctaggctggtctaaagcaatgatctcacggtagctgtaaaatagttggctgtgtcctatctactctagggtcagtttgtgtgtctgtgaaataagggggctggaccaggatagggacaaacatgagctgtgaaaaatcagaaagctatcatcgtgttattccttttcaaatatgacagtaagmacacacacacacacacacacacacacacacacacacacactaaacctagctgaaaaatgtatgcaagtaatacatgctcacggtgtaaaaatgaacaccccaaatcagactaaactccaaactggaaaccctttgctccaacgacaaccctttgctccagaccataacaacacaacatccaatcatacacgttgttatgaagtaacagcagaagttgccttctacaccattaggacacctagttcatttctcaaagataattaagattaatttcttgcatatctttccgaaaatgttcttagggcattgtgttagttaaggttctctgggtttcaggccacaaaaaataaactctggctgacttaagcc

SEQ ID NO: 6762 - DNA, 1772 bp, Homo sapiens
aaaaaaaaaaaaacaacgaactccatctgggatagcaataacctgtgaaaatgctcccccggctaatttgtatcaatgattatgaacaacatgctaaatcagtacttccaaagtctatatatgactattacagrtctggggcaaatgatgaagaaactttggctgataatattgcagcattttccagatggaagctgtatccaaggatgctccggaatgttgctgaaacagatctgtcgacttctgttttaggacagagggtcagcatgccaatatgtgtgggggctacggccatgcagcgcatggctcatgtggacggcgagcttgccactgtgagagcctgtcagtccctgggaacgggcatgatgttgagttcctgggccacctcctcaattgaagaagtggcggaagctggtcctgaggcacttcgttggctgcaactgtatatctacaaggaccgagaagtcaccaagaagctagtgcggcaggcagagaagatgggctacaaggccatatttgtgacagtggacacaccttacctgggcaaccgtctggatgatgtgcgtaacagattcaaactgccgccacaactcaggatgaaaaattttgaaaccagtactttatcattttctcctgaggaaaattttggagaygacagtggacttgctgcatatgtggctaaagcaatagacccatctatcagctgggaagatatcaaatggctgagaagactgacatcattgccaattgttgcaaagggcattttgagaggtgatgatgccagggaggctgttaaacatggcttgaatgggatcttggtgtcgaatcatggggctcgacaactcgatggggtgccagccactattgatgttctgccagaaattgtggaggctgtggaagggaaggtggaagtcttcctggacgggggtgtgcggaaaggcactgatgttctgaaagctctggctcttggcgccaaggctgtgtttgtggggagaccaatcgtttggggcttagctttccagggggagaaaggtgttcaagatgtcctcgagatactaaaggaagaattccggttggccatggctctgagtgggtgccagaatgtgaaagtcatcgacragacattggtgaggaaaaatcctttggccgtttccaagatctgacagtgcacaatattttcccatctgtattattttttttcagcatgtattacttgacaaagagacactgtgcagagggtgaccacagtctgtaattccccacttcaatacaaagggtgtcgttcttttccaacaaaatagcaatcccttttatttcattgcttttgacttttcaatgggtgtcctaggaaccttttagaaagaaatggactttcatcctggaaatatattaactgttaaaaakaaaacattgaaaatgtgtttagacaacgtcatcccctggcaggctaaagtgctgtatcctttagtaaaattggaggtagcaaacactaaggtgaaaagataatgatctcattgtttattaacctgtattctgtttacatgtctttaaaacagtggttcttaaattgtaagctcaggttcaaagtgttggtaatgcctgattcacaactttgagaaggtagcactggagagaattggaatgggtggcggtaattggtgatacttctttgaatgtagatttccaatcacatctttagtgtctgaatatatccaaatgttttaggatgtatgttacttcttagagagaaataaagcatttttgggaagaat

SEQ ID NO: 6763 - DNA, 1593 bp, Homo sapiens
aaaaaaaaaaaaacaacgaactccatctgggatagcaataacctgtgaaaatgctcccccggctaatttgtatcaatgattatgaacaacatgctaaatcagtacttccaaagtctatatatgactattacagrtctggggcaaatgatgaagaaactttggctgataatattgcagcattttccagatggaagctgtatccaaggatgctccggaatgttgctgaaacagatctgtcgacttctgttttaggacagagggtcagcatgccaatatgtgtgggggctacggccatgcagcgcatggctcatgtggacggcgagcttgccactgtgagagcctgtcagtccctgggaacgggcatgatgttgagttcctgggccacctcctcaattgaagaagtggcggaagctggtcctgaggcacttcgttggctgcaactgtatatctacaaggaccgagaagtcaccaagaagctagtgcggcaggcagagaagatgggctacaaggccatatttgtgacagtggacacaccttacctgggcaaccgtctggatgatgtgcgtaacagattcaaactgccgccacaactcaggatgaaaaattttgaaaccagtactttatcattttctcctgaggaaaattttggagaygacagtggacttgctgcatatgtggctaaagcaatagacccatctatcagctgggaagatatcaaatggctgagaagactgacatcattgccaattgttgcaaagggcattttgagaggtgatgatgccagggaggctgttaaacatggcttgaatgggatcttggtgtcgaatcatggggctcgacaactcgatggggtgccagccactattgatgttctgccagaaattgtggaggctgtggaagggaaggtggaagtcttcctggacgggggtgtgcggaaaggcactgatgttctgaaagctctggctcttggcgccaaggctgtgtttgtggggagaccaatcgtttggggcttagctttccagggggagaaaggtgttcaagatgtcctcgagatactaaaggaagaattccggttggccatggctctgagtgggtgccagaatgtgaaagtcatcgacragacattggtgaggaaaaatcctttggccgtttccaagatctgacagtgcacaatattttcccatctgtattattttttttcagcatgtattacttgacaaagagacactgtgcagagggtgaccacagtctgtaattccccacttcaatacaaagggtgtcgttcttttccaacaaaatagcaatcccttttatttcattgcttttgacttttcaatgggtgtcctaggaaccttttagaaagaaatggactttcatcctggaaatatattaactgttaaaaakaaaacattgaaaatgtgtttagacaacgtcatcccctggcaggctaaagtgctgtatcctttagtaaaattggaggtagcaaacactaaggtgaaaagataatgatctcattgtttattaacctgtattctgtttacatgcctgattcacaactttgagaaggtagcactggagagaattggaatgggt

SEQ ID NO: 6764 - DNA, 2409 bp, Homo sapiens
gggtcaggcgcacagggcagcggcgctgccggaggacmagggccggcgtgccggcgtccagcgaggatgcgcagactgcctcaggcccggcgccgccgcacwgggcatgcgccgacccggtcgggcgggaacaccccgcccckcccgggctccgccccagctccgcccccgcgcgccccggccccgcccccgcgcgctctcttgcttttctcaggtcctcggctccgccccgctctagaccccgccccacgccgccatccccgtgcccctcggccccgcccccgcgccccggatatgctgggacagcccgcgcccctagaacgctttgcgtcccgacgcccgcaggtcctcgcggtgcgcaccgtttgcgacttggtacttggaaaaatggacaaggattgtgaaatgaaacgcaccacactggacagccctttggggaagctggagctgtctggttgtgagcagggtctgcacraaataaagctcctgggcaaggggacgtctgcagctgagccccttctggttctcccgtgcctcggtgtgatcattaggaggatggatcawccyggtgctatcgggaacgcactgcgttaatggcctcagtgcccagcaatggagaactttccactgagtatccgcatgcagcgtgcccggcggaaggtgaaagcttcaccctttgtctcccttgccatcctttggccttgtgtgtttggaagtagccagaggtggtggaacagtggtgggctggtttgggtcttgttggcagtgccaaagggacaaaggctggatgtgggcacgacctcagcctcgtgatgggcaagacaggtgggggtgactttctgttctgaaaatgacctcctccccttcttcctcccctcaatgccgtggaggtcccagcccccgctgcggttctyggaggtccggagyccctgatgcagtgcacagcctgsctgaatgcctatttccaccagcccgaggctatcgaagagttccccgtgccggctyttcaccatcccgttttccagcaagagtcgttcaccagacaggtgttatggaagctgctgaaggttgtgaaattcggagaagtgatttcttaccagcaattagcagccctggcaggcaaccccaaagccgcgcragcagtgggaggagcaatgagaggcaatcctgtccccatcctcrtcccgtgccacagagtggtctgcagcagcggagccgtgggcaactactccrgaggactggcygtgaaggawtggcttctggcccatgaaggccaccggttggggargccaggcttgggagggagctcaggtctggcaggggcctggctcaagggagcgggagcwacctcgggctccccgcctgctggccgaaactgagtatgtgcagtaggatggatgtttgagcgacacacacgtgtaacactgcatcggatgcggggcgtggaggcaccgctgtattaaaggaagtggcagtgtcctgggaacaagcgtgtctgccctttctgtttccatattttacagcaggatgagttcagacgcccgcggtcctgcacacatttgtttccttctctaacgctgcccttgctctatttttcatgtccattaaaacaggccaagtgagtgtggaaggcctggctcatgttgggccacagcccaggatggggcagtctggcaccctcaggccacagacggctgccatagccgctgtccagggccagctaaggcccatcccaggccgtccacactagaaagctggccctgccccatccccaccatgcctcccttcctggctgtgtccatggctgtgatggcattctccactcagcagttcctagcatcccacacccaggtctcactgaaagaaaggggaacaggccatggcagtcagtgcttacagaggttttctagctttgtttcctacctgccaaaaaggctaatgcaagatgcatccacttatggtctgtatcaggtgaatagaaaataaccatttgccaagatttggaaagacagagagctctctggacacgggttcgatggagcttgcacctctctgagagctgaagtcaagtctcaccctctctccatactccctggcctagtgtgctctgggcagcaggtaggaagggacagggacctctcatctcaagggctgccccaaagggccctcagggaccatgggcctgttaggaccccagcaccccagtgtcgatcctggaagtcaaaggtcacgactgtggggggccagctcatgtcactgatggcagcaggcagggtttccagcatgggcggtgcgctgctgtctgatacttcattattgtgttgtcatcctagctgtataattaactatatccaaaagccggaagggaaacctgtagctctgcatatggagaaataaaacagagcatat

SEQ ID NO: 6765 - DNA, 1667 bp, Homo sapiens
ggtacttggaaaaatggacaaggattgtgaaatgaaacgcaccacactggacagccctttggggaagctggagctgtctggttgtgagcagggtctgcacraaataaagctcctgggcaaggggacgtctgcagctgatgccgtggaggtcccagcccccgctgcggttctyggaggtccggagyccctgatgcagtgcacagcctgsctgaatgcctatttccaccagcccgaggctatcgaagagttccccgtgccggctyttcaccatcccgttttccagcaagagtcgttcaccagacaggtgttatggaagctgctgaaggttgtgaaattcggagaagtgatttcttaccagcaattagcagccctggcaggcaaccccaaagccgcgcragcagtgggaggagcaatgagaggcaatcctgtccccatcctcrtcccgtgccacagagtggtctgcagcagcggagccgtgggcaactactccrgaggactggcygtgaaggawtggcttctggcccatgaaggccaccggttggggargccaggcttgggagggagctcaggtctggcaggggcctggctcaagggagcgggagcwacctcgggctccccgcctgctggccgaaactgagtatgtgcagtaggatggatgtttgagcgacacacacgtgtaacactgcatcggatgcggggcgtggaggcaccgctgtattaaaggaagtggcagtgtcctgggaacaagcgtgtctgccctttctgtttccatattttacagcaggatgagttcagacgcccgcggtcctgcacacatttgtttccttctctaacgctgcccttgctctatttttcatgtccattaaaacaggccaagtgagtgtggaaggcctggctcatgttgggccacagcccaggatggggcagtctggcaccctcaggccacagacggctgccatagccgctgtccagggccagctaaggcccatcccaggccgtccacactagaaagctggccctgccccatccccaccatgcctcccttcctggctgtgtccatggctgtgatggcattctccactcagcagttcctagcatcccacacccaggtctcactgaaagaaaggggaacaggccatggcagtcagtgcttacagaggttttctagctttgtttcctacctgccaaaaaggctaatgcaagatgcatccacttatggtctgtatcaggtgaatagaaaataaccatttgccaagatttggaaagacagagagctctctggacacgggttcgatggagcttgcacctctctgagagctgaagtcaagtctcaccctctctccatactccctggcctagtgtgctctgggcagcaggtaggaagggacagggacctctcatctcaagggctgccccaaagggccctcagggaccatgggcctgttaggaccccagcaccccagtgtcgatcctggaagtcaaaggtcacgactgtggggggccagctcatgtcactgatggcagcaggcagggtttccagcatgggcggtgcgctgctgtctgatacttcattattgtgttgtcatcctagctgtataattaactatatccaaaagccggaagggaaacctgtagctctgcatatggagaaataaaacagagcatat

SEQ ID NO: 6766 - DNA, 2119 bp, Homo sapiens
ggatatgctgggacagcccgcgcccctagaacgctttgcgtcccgacgcccgcaggtcctcgcggtgcgcaccgtttgcgacttggtacttggaaaaatggacaaggattgtgaaatgaaacgcaccacactggacagccctttggggaagctggagctgtctggttgtgagcagggtctgcacraaataaagctcctgggcaaggggacgtctgcagctgagccccttctggttctcccgtgcctcggtgtgatcattaggaggatggatcawccyggtgctatcgggaacgcactgcgttaatggcctcagtgcccagcaatggagaactttccactgagtatccgcatgcagcgtgcccggcggaaggtgaaagcttcaccctttgtctcccttgccatcctttggccttgtgtgtttggaagtagccagaggtggtggaacagtggtgggctggtttgggtcttgttggcagtgccaaagggacaaaggctggatgtgggcacgacctcagcctcgtgatgggcaagacaggtgggggtgactttctgttctgaaaatgacctcctccccttcttcctcccctcaatgccgtggaggtcccagcccccgctgcggttctyggaggtccggagyccctgatgcagtgcacagcctgsctgaatgcctatttccaccagcccgaggctatcgaagagttccccgtgccggctyttcaccatcccgttttccagcaagagtcgttcaccagacaggtgttatggaagctgctgaaggttgtgaaattcggagaagtgatttcttaccagcaattagcagccctggcaggcaaccccaaagccgcgcragcagtgggaggagcaatgagaggcaatcctgtccccatcctcrtcccgtgccacagagtggtctgcagcagcggagccgtgggcaactactccrgaggactggcygtgaaggawtggcttctggcccatgaaggccaccggttggggargccaggcttgggagggagctcaggtctggcaggggcctggctcaagggagcgggagcwacctcgggctccccgcctgctggccgaaactgagtatgtgcagtaggatggatgtttgagcgacacacacgtgtaacactgcatcggatgcggggcgtggaggcaccgctgtattaaaggaagtggcagtgtcctgggaacaagcgtgtctgccctttctgtttccatattttacagcaggatgagttcagacgcccgcggtcctgcacacatttgtttccttctctaacgctgcccttgctctatttttcatgtccattaaaacaggccaagtgagtgtggaaggcctggctcatgttgggccacagcccaggatggggcagtctggcaccctcaggccacagacggctgccatagccgctgtccagggccagctaaggcccatcccaggccgtccacactagaaagctggccctgccccatccccaccatgcctcccttcctggctgtgtccatggctgtgatggcattctccactcagcagttcctagcatcccacacccaggtctcactgaaagaaaggggaacaggccatggcagtcagtgcttacagaggttttctagctttgtttcctacctgccaaaaaggctaatgcaagatgcatccacttatggtctgtatcaggtgaatagaaaataaccatttgccaagatttggaaagacagagagctctctggacacgggttcgatggagcttgcacctctctgagagctgaagtcaagtctcaccctctctccatactccctggcctagtgtgctctgggcagcaggtaggaagggacagggacctctcatctcaagggctgccccaaagggccctcagggaccatgggcctgttaggaccccagcaccccagtgtcgatcctggaagtcaaaggtcacgactgtggggggccagctcatgtcactgatggcagcaggcagggtttccagcatgggcggtgcgctgctgtctgatacttcattattgtgttgtcatcctagctgtataattaactatatccaaaagccggaagggaaacctgtagctctgcatatggagaaataaaacagagcatat

SEQ ID NO: 6767 - DNA, 1483 bp, Homo sapiens
agttacagtccctccgggtggcggggcgccccgagcgtggcagcgcgctaggcggcagcagcgggcgcggagcggggcgcggccgccgcgcgttccctcttggyggggttggccggccggggcggggcgcggcgctcsggctcgaggcattcggagctgcgggagccgggctggcaggagcaggatggcggcggcggcggctgcaggcgaggcgcgccgggtgcyggtgtacskcgrcaggggcgctctgggttctcgatgcgtgcaggcttttcgggcycgcaactggygggttgccagcgttgatgtggtggagaatgaagaggccagcgctagcatcattgttaaaatgacagactcgttcactgagcaggctgaccrggtgactgctgaggttggaaagcycttgggtgaagagaaggtggatgcaattctttgygttgctggaggatgggccgggggcaatgccaaatccaagtctctctttaagaactgtgacctgatgtggaagcagagcatatggacatcraccatctccagccatctggctaccaagcatctcaaggaaggaggcctcctraccttggctggygcaaaggctgccctggatgggactcctggtatgatcgggtacggcatggccaagggtgctgttcaccagctctgccagagcctggctgggaagaacagcggcatgccgcccggggcagccgccatcgctgtgctcccggttaccctggataccccgatgaacaggaaatcaatgcctgaggctgacttcagctcctggacaccctkagaattcctagttgaaacttkccatgactggatcacagggaaaaaccgaccgagctcaggaagcctaatccaggtggtaaccacagaaggaaggacggaactcaccccagcatatttttaggcctcatctcagtgcctatgaggggcctgccagaaaacccctgtttgtggtacgagataatgagtcctatttttctctcacataatatgcatttgctctcctaggacagtgtaatacatttatgtgaagtaaagacatgcgagactggtggcctgcaaatagcatccgtyratctgtgttaactgcatagggagggctctgcatagcacctgctatagcggtgtcatgttggatcgcttttgtgactgttcatctgtccttgacagtggctgtcatcttgactactttgttgatttgttggtattggggacattttaaaggctgagttatttttgaatgtcatgtttatgtcrtagaygtagttttcgcatccttgaattaaactgccttaactccttttgtggtataagcaaaactmcatggactctgtcctggtatccttttcctgtgtggttgcccygtgtcctctggcctagggttaagtgtgcaagataactactcgtgagtattcagaatgttgttcctaataaatgcacttgttgtctgtcttctttaatcaaatca

SEQ ID NO: 6768 - DNA, 2072 bp, Homo sapiens
agttacagtccctccgggtggcggggcgccccgagcgtggcagcgcgctaggcggcagcagcgggcgcggagcggggcgcggccgccgcgcgttccctcttggyggggttggccggccggggcggggcgcggcgctcsggctcgaggcattcggagctgcgggagccgggctggcaggagcaggatggcggcggcggcggctgcaggcgaggcgcgccgggtgcyggtgtacskcgrcaggggcgctctgggttctcgatgcgtgcaggcttttcgggcycgcaactggygggttgccagcgttgatgtggtggagaatgaagaggccagcgctagcatcattgttaaaatgacagactcgttcactgagcaggctgaccrggtgactgctgaggttggaaagcycttgggtgaagagaaggtggatgcaattctttgygttgctggaggatgggccgggggcaatgccaaatccaagtctctctttaagaactgtgacctgatgtggaagcagagcatatggacatcraccatctccagccatctggctaccaagcatctcaaggaaggaggcctcctraccttggctggygcaaaggctgccctggatgggactcctggtatgatcgggtacggcatggccaagggtgctgttcaccagctctgccagagcctggctgggaagaacagcggcatgccgcccggggcagccgccatcgctgtgctcccggttaccctggataccccgatgaacaggaaatcaatgcctgaggctgacttcagctcctggacaccctkagaattcctagttgaaacttkccatgactggatcacagggaaaaaccgaccgagctcaggaagcctaatccaggtggtaaccacagaaggaaggacggaactcaccccagcatatttttaggcctcatctcagtgcctatgaggggcctgccagaaaagtcactaacctgtctcagtgtggccttgtccagccttgtgttttctgtaacccctgtttgtggtacgagataatgagtcctatttttctctcacataatatgcatttgctctcctaggacagtgtaatacatttatgtgaagtaaagacatgcgagactggtggcctgcaaatagcatccgtyratctgtgttaactgcatagggagggctctgcatagcacctgctatagcggtgtcatgttggatcgcttttgtgactgttcatctgtccttgacagtggctgtcatcttgactactttgttgatttgttggtattggggacattttaaaggctgagttatttttgaatgtcatgtttatgtcrtagaygtagttttcgcatccttgaattaaactgccttaactccttttgtggtataagcaaaactmcatggactctgtcctggtatccttttcctgtgtggttgcccygtgtcctctggcctagggttaagtgtgcaagataactactcgtgagtattcagaatgttgttcctaataaatgcacttgttgtctgtcttctttaatcaaatcacatcttayatacagcagtcagagatgagtatactagaatcatggattgctggaggtcttttaatctgrtgttctcrgaagggggtggatttaaatcctgaaataaatatttcaacacaagaacacaggcctgattctgccttggacatgtcaaaatctgggggtgatgggatggccctgtgcatttagaagcagctctccacatatggccaatgtaggctgtcctggtygagaactagtagtggtttaatccaacccgatcattttacagatgaggaaactgaggcccagagagacattaccttgttgccagtaactggcagagctaagcccagatctctagtcaccagacagttgctgtttttaaaggcctttaccacgtattttctttctttttttagtgaggtgaaattcacataatttttttwttttttttttgagacagagtcttaccctgtcgcccaggctggagtgcagtggcgccatctcggttcactgcaagctccgcctcctgggttcacaccattctcctgcctcagc

SEQ ID NO: 6769 - DNA, 5356 bp, Homo sapiens
tcagcaatgggtagaaggcctgagatcaatcatacacaacttcagggccaacaacgtcagtccaatgacatgcctcaagaaacactggatgaaattggcatttatgaccaacacaaatggtaaaattccagttaggagtattactagaacatttgcatcgggaaaaacagaaaaggtgatctttcaagcactcaaggagttaggtcttcccagtggaaagaatgatgaaattgagcccacagcattttcttatgaaaagttctatgaactgacacaaaagatttgtcctcggacagatatagaagatcttttcaaaaaaatcaatggagacaaaactgattatttaacggtagaccaattagtgagctttctaaatgaacatcaacgagatcctcgattgaatgaaattttatttccattttatgatgccaaaagggcaatgcagatcattgagatgtatgaacctgatgaagatttgaagaaaaaaggccttatatcaagtgatgggttttgcagatatctgatgtcagatgaaaacgccccagtcttcctagatcgtttagaactttaccaagaaatggaccatcctctggctcactacttcatcagttcttcccataacacttatctcactggcagacagttcggcgggaagtcttcggtagaaatgtacagacaggttctcctggctggttgcagatgtgttgaacttgactgctgggatggaaaaggtgaagaccaagaaccaataataactcatggaaaagcaatgtgtacagatatcctttttaaggatgtaattcaagccatcaaggaaactgcatttgtcacatcagaatatcctgtaattctctcctttgaaaatcactgcagcaaatatcaacagtacaagatgtccaaatattgcgaagatctatttggggatctcctgttgaaacaagcacttgaatcacatccacttgaaccaggcagggctttgccatcccccaatgacctcaaaagaaaaatactcataaaaaacaagcggctgaaacctgaagttgaaaaaaaacagctggaagctttgagaagcatgatggaagctggagaatctgcctccccagcaaacatcttagaggacgataatgaagaggagatcgaaagtgctgaccaagaggaggaagctcaccccgaattcaaatttggaaatgaactttctgctgatgacttgggtcacaaggaagctgttgcaaatagcgtcaagaagggcctggtcactgtagaagatgagcaggcrtggatggcatcttataaatatgtaggtgctaccactaatatccatccatatttgtccacaatgatcaactacgcccagcctgtaaagtttcaaggtttccatgtggcagaagaacgcaatattcattataacatgtcttcttttaatgaatcagtcggtcttggctacttgaagacacatgcaattgaatttgtcaattataacaaacggcaaatgagtcgcatttaccccaagggaggccgagtcgattccagtaattacatgcctcagattttctggaacgctggctgccagatggtttcactgaactatcaaaccccagatttagcgatgcaattgaatcagggaaaatttgagtataatggatcgtgcgggtaccttctcaaaccagatttcatgaggcggcctgatcgaacatttgaccccttctctgaaactcctgttgatggtgttattgcagccacttgctcagtgcaggttatatcaggtcaattcttatcagataagaaaattggcacctacgtagaggtggatatgtatgggttgcccactgacaccatacgtaaggaattccgaactcgcatggttatgaataatggactcaatccagtttacaatgaagagtcatttgtatttcggaaggtgatcctgccggacctggctgtcttgagaatagctgtgtatgatgataacaacaagctgattggccagaggatcctcccgcttgatggcctccaagccggatatcgacacatttcccttcgaaatgagggaaataaaccattatcactaccaacaattttctgcaatattgttcttaaaacatatgtgcctgatggatttggagatatcgtggatgctttatcagatccaaagaaatttctctcaattacagaaaagagagcagaccaaatgagagctatgggcattgaaactagtgacatagccgaygtgcccagtgacacttccaaaaatgacaagaaaggaaaggccaacacygccaaagcaaatgtgacccctcagagtagctctgagctcagaccaaccaccacggctgccctggcctctggtgtggaagccaagaaaggtattgaacttatccctcaagtaaggatagaagacttaaagcagatgaaggcttacttgaagcatttaaagaaacagcagaaggagctaaattctttaaagaagaaacatgcaaaggaacacagtaccatgcagaagttacactgcacgcaagttgacaaaattgtggcacagtatgacaaagagaagtcgactcatgagaaaatcctagagaaggcaatgaagaagaaggggggaagtaattgtctcgaaatgaaaaaagaaacagaaatcaaaattcaracgctgacatcagatcacaaatctaaggtcaaagagattgtagcacagcacacaaaggaatggtcagaaatgatcaatacccacagtgctgaggagcaagaaatccgagacctgcacctcagccagcagtgtgagctgctgaaaaagctactcatcaatgcccacgagcagcaaacccagcagctgaaactgtcccatgacagggaaagcaaggaaatgcgagcacaccaggctaagatttctatggaaaatagcaaagccatcagccaagataaatctatcaagaataaagcagaacgggaaaggcgagtcagggagttaaacagcagcaacactaaaaagtttctggaagaaagaaagagacttgccatgaagcagtccaaagaaatggatcagttgaaaaaagtccagcttgaacatctagaattcctagagaaacagaatgagcagcttttgaaatcctgtcatgcagtgtcccaaacgcaaggcgaaggagatgcagcagatggtgaaattggaagccgagatggaccgcagaccagcaacagtagtatgaaactccaaaatgcaaactgaagcagcaaacccacaaagcatcaaaagactcactcacaaacttctgaacacaaactccatggatgaaagctgtttattttgtttcctttatgtgtaaacaagatgatatctgaaaccagagagacttggaatgtctgactgacttctatttaacagcttgagtattgcatttccttggccaaacaaaaatagctacaaatccacaaaaatttactattccagtaaggcagagtccaaccattgataatacaacttaaacatgtttgctatraaataccatcacaagtaaatgagcttggtgtgaacaactctcctttgtgatgccttaggacatgtttgaactgcagcaaaaaacaaaaacaaaaaacagtgcattagcaatttcatagcaagtgcatgcactaggaaaagaaaactctgtctacaagtttattagcagaagtggtggtctgctagacaaataattttgcaaaatttttctacatctaagttacctcatcagtaagtgccatgtctctaccatgccatcagaggctaatttcctgtaaaagttgtggaaattgttagaacaatagaaaaatagagcagtgtatgtgtgccaaaactcatcattactcaaaggagaactgtgttaggcacatttaagaaagtttacatctgacattgctttataggaattgtttctgcagattccggatattataattcacaccataaagattgtgaagtggttattggcaaacgtttgtaaatgtgaccatgtataaagtatttatactctttaattcacactgttagagagcaaaatcatctaagtattgccacatgacaagattagtaaacaggaatactagaactatgtttgcatgatacacaagcaccaataaagactaatccatacacagttaacctaatgccaaataaatactggttaaataaatgtatggcacagaatataatttgactatcaagacttttagcataatgaaaaaccctctctctatatatatatgtgtatatgaattatgtgggcattcttgatacttcaagttctagtttgaaaaaaatacataactaatttaattttacacaaaaatatttatgcagattttcagaatttcatatcaggaaatgacctttttatgtctgttaaatatcaaaacaatttgctacagtgttaatctgcatggtctttaagcctgctgtagttgagttgcagacagtgcatgaaaaagtattccgctgggaattgagccatgccaccaaagccaagaggagcgcatggaaacccggtagtctagaactaatcagattactgattttagggcacagcaccagatgaattgttgtatatgcttgtaaaaattgattctgtgtgttcctctgaacaaagcggagaaaatgatgataccatcaatattgaaattaaacttccaacttctctaataaaaaattaaaacacgcataacactcgtcaagagtatttgctcccaagacacattctagcaaatgttttgcctttttcatatacatgatatcatcgttattttcaaagggggcttattaataccctcagcatgtttttcacccaaatgatgcaaaacatgcagattctagttgacttcagttgtaatagacttgtttttctcctatttatgatttgaagtggattctgtaaaatatctcttgttcttagtttccttatctgtaaaacagtggagttagactacatatcttttggcactaacatctcatgaaaaattatggttaataaaatatcaccacatttggattgccaattttcaaagattctgagtggcttctcatcatcaaatcaaatcaaatccaagagctcaactatgctcaccattctgtaacacttgactgaattcatcacttgcctcctcttgtttctgctttggagaggtactactagtttttccatttttcttatttcttccctcttttcatcctcctaggccaccataagcatttatattttccagtgttatacatggaaccagtttgtttttctttgatccaggttacttttagtatttgagacatcataccattaatccattgtagtaggattaaaatgtacacacaactcaaatgtgcaacaaaagcatgtgt

SEQ ID NO: 6770 - DNA, 5498 bp, Homo sapiens
gtgtgtccctccagtgccgcttgccccttgttctcccaagcaccagggggacccctggtcttagattcaagttgcatcactagactaaccagctctgggaaccagagggacactggaggaactagtttgggaaatgaaaaacatctgcaatgagaggtaattttattctcctcttccttttaccctagtctcactctccatagtaggacctggatctttgcatcagagaaaacataatgaacaataactggaatgtgtgtttctttcttttctgccctagtattactagaacatttgcatcgggaaaaacagaaaaggtgatctttcaagcactcaaggagttaggtcttcccagtggaaagaatgatgaaattgagcccacagcattttcttatgaaaagttctatgaactgacacaaaagatttgtcctcggacagatatagaagatcttttcaaaaaaatcaatggagacaaaactgattatttaacggtagaccaattagtgagctttctaaatgaacatcaacgagatcctcgattgaatgaaattttatttccattttatgatgccaaaagggcaatgcagatcattgagatgtatgaacctgatgaagatttgaagaaaaaaggccttatatcaagtgatgggttttgcagatatctgatgtcagatgaaaacgccccagtcttcctagatcgtttagaactttaccaagaaatggaccatcctctggctcactacttcatcagttcttcccataacacttatctcactggcagacagttcggcgggaagtcttcggtagaaatgtacagacaggttctcctggctggttgcagatgtgttgaacttgactgctgggatggaaaaggtgaagaccaagaaccaataataactcatggaaaagcaatgtgtacagatatcctttttaaggatgtaattcaagccatcaaggaaactgcatttgtcacatcagaatatcctgtaattctctcctttgaaaatcactgcagcaaatatcaacagtacaagatgtccaaatattgcgaagatctatttggggatctcctgttgaaacaagcacttgaatcacatccacttgaaccaggcagggctttgccatcccccaatgacctcaaaagaaaaatactcataaaaaacaagcggctgaaacctgaagttgaaaaaaaacagctggaagctttgagaagcatgatggaagctggagaatctgcctccccagcaaacatcttagaggacgataatgaagaggagatcgaaagtgctgaccaagaggaggaagctcaccccgaattcaaatttggaaatgaactttctgctgatgacttgggtcacaaggaagctgttgcaaatagcgtcaagaagggcctggtcactgtagaagatgagcaggcrtggatggcatcttataaatatgtaggtgctaccactaatatccatccatatttgtccacaatgatcaactacgcccagcctgtaaagtttcaaggtttccatgtggcagaagaacgcaatattcattataacatgtcttcttttaatgaatcagtcggtcttggctacttgaagacacatgcaattgaatttgtcaattataacaaacggcaaatgagtcgcatttaccccaagggaggccgagtcgattccagtaattacatgcctcagattttctggaacgctggctgccagatggtttcactgaactatcaaaccccagatttagcgatgcaattgaatcagggaaaatttgagtataatggatcgtgcgggtaccttctcaaaccagatttcatgaggcggcctgatcgaacatttgaccccttctctgaaactcctgttgatggtgttattgcagccacttgctcagtgcaggttatatcaggtcaattcttatcagataagaaaattggcacctacgtagaggtggatatgtatgggttgcccactgacaccatacgtaaggaattccgaactcgcatggttatgaataatggactcaatccagtttacaatgaagagtcatttgtatttcggaaggtgatcctgccggacctggctgtcttgagaatagctgtgtatgatgataacaacaagctgattggccagaggatcctcccgcttgatggcctccaagccggatatcgacacatttcccttcgaaatgagggaaataaaccattatcactaccaacaattttctgcaatattgttcttaaaacatatgtgcctgatggatttggagatatcgtggatgctttatcagatccaaagaaatttctctcaattacagaaaagagagcagaccaaatgagagctatgggcattgaaactagtgacatagccgaygtgcccagtgacacttccaaaaatgacaagaaaggaaaggccaacacygccaaagcaaatgtgacccctcagagtagctctgagctcagaccaaccaccacggctgccctggcctctggtgtggaagccaagaaaggtattgaacttatccctcaagtaaggatagaagacttaaagcagatgaaggcttacttgaagcatttaaagaaacagcagaaggagctaaattctttaaagaagaaacatgcaaaggaacacagtaccatgcagaagttacactgcacgcaagttgacaaaattgtggcacagtatgacaaagagaagtcgactcatgagaaaatcctagagaaggcaatgaagaagaaggggggaagtaattgtctcgaaatgaaaaaagaaacagaaatcaaaattcaracgctgacatcagatcacaaatctaaggtcaaagagattgtagcacagcacacaaaggaatggtcagaaatgatcaatacccacagtgctgaggagcaagaaatccgagacctgcacctcagccagcagtgtgagctgctgaaaaagctactcatcaatgcccacgagcagcaaacccagcagctgaaactgtcccatgacagggaaagcaaggaaatgcgagcacaccaggctaagatttctatggaaaatagcaaagccatcagccaagataaatctatcaagaataaagcagaacgggaaaggcgagtcagggagttaaacagcagcaacactaaaaagtttctggaagaaagaaagagacttgccatgaagcagtccaaagaaatggatcagttgaaaaaagtccagcttgaacatctagaattcctagagaaacagaatgagcagcttttgaaatcctgtcatgcagtgtcccaaacgcaaggcgaaggagatgcagcagatggtgaaattggaagccgagatggaccgcagaccagcaacagtagtatgaaactccaaaatgcaaactgaagcagcaaacccacaaagcatcaaaagactcactcacaaacttctgaacacaaactccatggatgaaagctgtttattttgtttcctttatgtgtaaacaagatgatatctgaaaccagagagacttggaatgtctgactgacttctatttaacagcttgagtattgcatttccttggccaaacaaaaatagctacaaatccacaaaaatttactattccagtaaggcagagtccaaccattgataatacaacttaaacatgtttgctatraaataccatcacaagtaaatgagcttggtgtgaacaactctcctttgtgatgccttaggacatgtttgaactgcagcaaaaaacaaaaacaaaaaacagtgcattagcaatttcatagcaagtgcatgcactaggaaaagaaaactctgtctacaagtttattagcagaagtggtggtctgctagacaaataattttgcaaaatttttctacatctaagttacctcatcagtaagtgccatgtctctaccatgccatcagaggctaatttcctgtaaaagttgtggaaattgttagaacaatagaaaaatagagcagtgtatgtgtgccaaaactcatcattactcaaaggagaactgtgttaggcacatttaagaaagtttacatctgacattgctttataggaattgtttctgcagattccggatattataattcacaccataaagattgtgaagtggttattggcaaacgtttgtaaatgtgaccatgtataaagtatttatactctttaattcacactgttagagagcaaaatcatctaagtattgccacatgacaagattagtaaacaggaatactagaactatgtttgcatgatacacaagcaccaataaagactaatccatacacagttaacctaatgccaaataaatactggttaaataaatgtatggcacagaatataatttgactatcaagacttttagcataatgaaaaaccctctctctatatatatatgtgtatatgaattatgtgggcattcttgatacttcaagttctagtttgaaaaaaatacataactaatttaattttacacaaaaatatttatgcagattttcagaatttcatatcaggaaatgacctttttatgtctgttaaatatcaaaacaatttgctacagtgttaatctgcatggtctttaagcctgctgtagttgagttgcagacagtgcatgaaaaagtattccgctgggaattgagccatgccaccaaagccaagaggagcgcatggaaacccggtagtctagaactaatcagattactgattttagggcacagcaccagatgaattgttgtatatgcttgtaaaaattgattctgtgtgttcctctgaacaaagcggagaaaatgatgataccatcaatattgaaattaaacttccaacttctctaataaaaaattaaaacacgcataacactcgtcaagagtatttgctcccaagacacattctagcaaatgttttgcctttttcatatacatgatatcatcgttattttcaaagggggcttattaataccctcagcatgtttttcacccaaatgatgcaaaacatgcagattctagttgacttcagttgtaatagacttgtttttctcctatttatgatttgaagtggattctgtaaaatatctcttgttcttagtttccttatctgtaaaacagtggagttagactacatatcttttggcactaacatctcatgaaaaattatggttaataaaatatcaccacatttggattgccaattttcaaagattctgagtggcttctcatcatcaaatcaaatcaaatccaagagctcaactatgctcaccattctgtaacacttgactgaattcatcacttgcctcctcttgtttctgctttggagaggtactactagtttttccatttttcttatttcttccctcttttcatcctcctaggccaccataagcatttatattttccagtgttatacatggaaccagtttgtttttctttgatccaggttacttttagtatttgagacatcataccattaatccattgtagtaggattaaaatgtacacacaactcaaatgtgcaacaaaagcatgtgt

SEQ ID NO: 6771 - DNA, 5461 bp, Homo sapiens
gtgtgtccctccagtgccgcttgccccttgttctcccaagcaccagggggacccctggtcttagattcaagttgcatcactagactaaccagctctgggaaccagagggacactggaggaactagtttgggaaatgaaaaacatctgcaatgagaggtaattttattctcctcttccttttaccctagtctcactctccatagtaggacctggatctttgcatcagagaaaacataatgaacaataactggaatgtgtgtttctttcttttctgccctagtattactagaacatttgcatcgggaaaaacagaaaaggtgatctttcaagcactcaaggagttaggtcttcccagtggaaagaatgatgaaattgagcccacagcattttcttatgaaaagttctatgaactgacacaaaagatttgtcctcggacagatatagaagatcttttcaaaaaaatcaatggagacaaaactgattatttaacggtagaccaattagtgagctttctaaatgaacatcaacgagatcctcgattgaatgaaattttatttccattttatgatgccaaaagggcaatgcagatcattgagatgtatgaacctgatgaagatttgaagaaaaaaggccttatatcaagtgatgggttttgcagatatctgatgtcagatgaaaacgccccagtcttcctagatcgtttagaactttaccaagaaatggaccatcctctggctcactacttcatcagttcttcccataacacttatctcactggcagacagttcggcgggaagtcttcggtagaaatgtacagacaggttctcctggctggttgcagatgtgttgaacttgactgctgggatggaaaaggtgaagaccaagaaccaataataactcatggaaaagcaatgtgtacagatatcctttttaaggatgtaattcaagccatcaaggaaactgcatttgtcacatcagaatatcctgtaattctctcctttgaaaatcactgcagcaaatatcaacagtacaagatgtccaaatattgcgaagatctatttggggatctcctgttgaaacaagcacttgaatcacatccacttgaaccaggcagggctttgccatcccccaatgacctcaaaagaaaaatactcataaaaaacaagcggctgaaacctgaagttgaaaaaaaacagctggaagctttgagaagcatgatggaagctggagaatctgcctccccagcaaacatcttagaggacgataatgaagaggagatcgaaagtgctgaccaagaggaggaagctcaccccgaattcaaatttggaaatgaactttctgctgatgacttgggtcacaaggaagctgttgcaaatagcgtcaagaagggcctggtcactgtagaagatgagcaggcrtggatggcatcttataaatatgtaggtgctaccactaatatccatccatatttgtccacaatgatcaactacgcccagcctgtaaagtttcaaggtttccatgtggcagaagaacgcaatattcattataacatgtcttcttttaatgaatcagtcggtcttggctacttgaagacacatgcaattgaatttgtcaattataacaaacggcaaatgagtcgcatttaccccaagggaggccgagtcgattccagtaattacatgcctcagattttctggaacgctggctgccagatggtttcactgaactatcaaaccccagatttagcgatgcaattgaatcagggaaaatttgagtataatggatcgtgcgggtaccttctcaaaccagatttcatgaggcggcctgatcgaacatttgaccccttctctgaaactcctgttgatggtgttattgcagccacttgctcagtgcaggttatatcaggtcaattcttatcagataagaaaattggcacctacgtagaggtggatatgtatgggttgcccactgacaccatacgtaaggaattccgaactcgcatggttatgaataatggactcaatccagtttacaatgaagagtcatttgtatttcggaaggtgatcctgccggacctggctgtcttgagaatagctgtgtatgatgataacaacaagctgattggccagaggatcctcccgcttgatggcctccaagccggatatcgacacatttcccttcgaaatgagggaaataaaccattatcactaccaacaattttctgcaatattgttcttaaaacatatgtgcctgatggatttggagatatcgtggatgctttatcagatccaaagaaatttctctcaattacagaaaagagagcagaccaaatgagagctatgggcattgaaactagtgacatagccgaygtgcccagtgacacttccaaaaatgacaagaaaggaaaggccaacacygccaaagcaaatgtgacccctcagagtagctctgagctcagaccaaccaccacggctgccctggcctctggtgtggaagccaagaaaggtattgaacttatccctcaagtaaggatagaagacttaaagcagatgaaggcttacttgaagcatttaaagaaacagcagaaggagctaaattctttaaagaagaaacatgcaaaggaacacagtaccatgcagaagttacactgcacgcaagttgacaaaattgtggcacagtatgacaaagagaagtcgactcatgagaaaatcctagagaaggcaatgaagaagaaggggggaagtaattgtctcgaaatgaaaaaagaaacagaaatcaaaattcaracgctgacatcagatcacaaatctaaggtcaaagagattgtagcacagcacacaaaggaatggtcagaaatgatcaatacccacagtgctgaggagcaagaaatccgagacctgcacctcagccagcagtgtgagctgctgaaaaagctactcatcaatgcccacgagcagcaaacccagcagctgaaactgtcccatgacagggaaagcaaggaaatgcgagcacaccaggctaagatttctatggaaaatagcaaagccatcagccaagataaatctatcaagaataaagcagaacgggaaaggcgagtcagggagttaaacagcagcaacactaaaaagtttctggaagaaagaaagagacttgccatgaagcagtccaaagaaatggatcagttgaaaaaagtccagcttgaacatctagaattcctagagaaacagaatgagcaggcgaaggagatgcagcagatggtgaaattggaagccgagatggaccgcagaccagcaacagtagtatgaaactccaaaatgcaaactgaagcagcaaacccacaaagcatcaaaagactcactcacaaacttctgaacacaaactccatggatgaaagctgtttattttgtttcctttatgtgtaaacaagatgatatctgaaaccagagagacttggaatgtctgactgacttctatttaacagcttgagtattgcatttccttggccaaacaaaaatagctacaaatccacaaaaatttactattccagtaaggcagagtccaaccattgataatacaacttaaacatgtttgctatraaataccatcacaagtaaatgagcttggtgtgaacaactctcctttgtgatgccttaggacatgtttgaactgcagcaaaaaacaaaaacaaaaaacagtgcattagcaatttcatagcaagtgcatgcactaggaaaagaaaactctgtctacaagtttattagcagaagtggtggtctgctagacaaataattttgcaaaatttttctacatctaagttacctcatcagtaagtgccatgtctctaccatgccatcagaggctaatttcctgtaaaagttgtggaaattgttagaacaatagaaaaatagagcagtgtatgtgtgccaaaactcatcattactcaaaggagaactgtgttaggcacatttaagaaagtttacatctgacattgctttataggaattgtttctgcagattccggatattataattcacaccataaagattgtgaagtggttattggcaaacgtttgtaaatgtgaccatgtataaagtatttatactctttaattcacactgttagagagcaaaatcatctaagtattgccacatgacaagattagtaaacaggaatactagaactatgtttgcatgatacacaagcaccaataaagactaatccatacacagttaacctaatgccaaataaatactggttaaataaatgtatggcacagaatataatttgactatcaagacttttagcataatgaaaaaccctctctctatatatatatgtgtatatgaattatgtgggcattcttgatacttcaagttctagtttgaaaaaaatacataactaatttaattttacacaaaaatatttatgcagattttcagaatttcatatcaggaaatgacctttttatgtctgttaaatatcaaaacaatttgctacagtgttaatctgcatggtctttaagcctgctgtagttgagttgcagacagtgcatgaaaaagtattccgctgggaattgagccatgccaccaaagccaagaggagcgcatggaaacccggtagtctagaactaatcagattactgattttagggcacagcaccagatgaattgttgtatatgcttgtaaaaattgattctgtgtgttcctctgaacaaagcggagaaaatgatgataccatcaatattgaaattaaacttccaacttctctaataaaaaattaaaacacgcataacactcgtcaagagtatttgctcccaagacacattctagcaaatgttttgcctttttcatatacatgatatcatcgttattttcaaagggggcttattaataccctcagcatgtttttcacccaaatgatgcaaaacatgcagattctagttgacttcagttgtaatagacttgtttttctcctatttatgatttgaagtggattctgtaaaatatctcttgttcttagtttccttatctgtaaaacagtggagttagactacatatcttttggcactaacatctcatgaaaaattatggttaataaaatatcaccacatttggattgccaattttcaaagattctgagtggcttctcatcatcaaatcaaatcaaatccaagagctcaactatgctcaccattctgtaacacttgactgaattcatcacttgcctcctcttgtttctgctttggagaggtactactagtttttccatttttcttatttcttccctcttttcatcctcctaggccaccataagcatttatattttccagtgttatacatggaaccagtttgtttttctttgatccaggttacttttagtatttgagacatcataccattaatccattgtagtaggattaaaatgtacacacaactcaaatgtgcaacaaaagcatgtgt

SEQ ID NO: 6772 - DNA, 5640 bp, Homo sapiens
caggaatcctttgtgtttgaacccaactgcctcttcaaagtggatgagtttggcttctttctgacatggagaagtgaaggcaaggaaggacaggtgctagaatgctccctcatcaacagtattcggtcgggagccataccaaaggatcccaaaatcttggctgctcttgaagctgttggaaaatcagaaaatgatctggaagggcggatagtttgtgtctgcagtggcacagatctagtgaacattagttttacctacatggtggctgaaaatccagaagtaactaagcaatgggtagaaggcctgagatcaatcatacacaacttcagggccaacaacgtcagtccaatgacatgcctcaagaaacactggatgaaattggcatttatgaccaacacaaatggtaaaattccagttaggagtattactagaacatttgcatcgggaaaaacagaaaaggtgatctttcaagcactcaaggagttaggtcttcccagtggaaagaatgatgaaattgagcccacagcattttcttatgaaaagttctatgaactgacacaaaagatttgtcctcggacagatatagaagatcttttcaaaaaaatcaatggagacaaaactgattatttaacggtagaccaattagtgagctttctaaatgaacatcaacgagatcctcgattgaatgaaattttatttccattttatgatgccaaaagggcaatgcagatcattgagatgtatgaacctgatgaagatttgaagaaaaaaggccttatatcaagtgatgggttttgcagatatctgatgtcagatgaaaacgccccagtcttcctagatcgtttagaactttaccaagaaatggaccatcctctggctcactacttcatcagttcttcccataacacttatctcactggcagacagttcggcgggaagtcttcggtagaaatgtacagacaggttctcctggctggttgcagatgtgttgaacttgactgctgggatggaaaaggtgaagaccaagaaccaataataactcatggaaaagcaatgtgtacagatatcctttttaaggatgtaattcaagccatcaaggaaactgcatttgtcacatcagaatatcctgtaattctctcctttgaaaatcactgcagcaaatatcaacagtacaagatgtccaaatattgcgaagatctatttggggatctcctgttgaaacaagcacttgaatcacatccacttgaaccaggcagggctttgccatcccccaatgacctcaaaagaaaaatactcataaaaaacaagcggctgaaacctgaagttgaaaaaaaacagctggaagctttgagaagcatgatggaagctggagaatctgcctccccagcaaacatcttagaggacgataatgaagaggagatcgaaagtgctgaccaagaggaggaagctcaccccgaattcaaatttggaaatgaactttctgctgatgacttgggtcacaaggaagctgttgcaaatagcgtcaagaagggcctggtcactgtagaagatgagcaggcrtggatggcatcttataaatatgtaggtgctaccactaatatccatccatatttgtccacaatgatcaactacgcccagcctgtaaagtttcaaggtttccatgtggcagaagaacgcaatattcattataacatgtcttcttttaatgaatcagtcggtcttggctacttgaagacacatgcaattgaatttgtcaattataacaaacggcaaatgagtcgcatttaccccaagggaggccgagtcgattccagtaattacatgcctcagattttctggaacgctggctgccagatggtttcactgaactatcaaaccccagatttagcgatgcaattgaatcagggaaaatttgagtataatggatcgtgcgggtaccttctcaaaccagatttcatgaggcggcctgatcgaacatttgaccccttctctgaaactcctgttgatggtgttattgcagccacttgctcagtgcaggttatatcaggtcaattcttatcagataagaaaattggcacctacgtagaggtggatatgtatgggttgcccactgacaccatacgtaaggaattccgaactcgcatggttatgaataatggactcaatccagtttacaatgaagagtcatttgtatttcggaaggtgatcctgccggacctggctgtcttgagaatagctgtgtatgatgataacaacaagctgattggccagaggatcctcccgcttgatggcctccaagccggatatcgacacatttcccttcgaaatgagggaaataaaccattatcactaccaacaattttctgcaatattgttcttaaaacatatgtgcctgatggatttggagatatcgtggatgctttatcagatccaaagaaatttctctcaattacagaaaagagagcagaccaaatgagagctatgggcattgaaactagtgacatagccgaygtgcccagtgacacttccaaaaatgacaagaaaggaaaggccaacacygccaaagcaaatgtgacccctcagagtagctctgagctcagaccaaccaccacggctgccctggcctctggtgtggaagccaagaaaggtattgaacttatccctcaagtaaggatagaagacttaaagcagatgaaggcttacttgaagcatttaaagaaacagcagaaggagctaaattctttaaagaagaaacatgcaaaggaacacagtaccatgcagaagttacactgcacgcaagttgacaaaattgtggcacagtatgacaaagagaagtcgactcatgagaaaatcctagagaaggcaatgaagaagaaggggggaagtaattgtctcgaaatgaaaaaagaaacagaaatcaaaattcaracgctgacatcagatcacaaatctaaggtcaaagagattgtagcacagcacacaaaggaatggtcagaaatgatcaatacccacagtgctgaggagcaagaaatccgagacctgcacctcagccagcagtgtgagctgctgaaaaagctactcatcaatgcccacgagcagcaaacccagcagctgaaactgtcccatgacagggaaagcaaggaaatgcgagcacaccaggctaagatttctatggaaaatagcaaagccatcagccaagataaatctatcaagaataaagcagaacgggaaaggcgagtcagggagttaaacagcagcaacactaaaaagtttctggaagaaagaaagagacttgccatgaagcagtccaaagaaatggatcagttgaaaaaagtccagcttgaacatctagaattcctagagaaacagaatgagcagcttttgaaatcctgtcatgcagtgtcccaaacgcaaggcgaaggagatgcagcagatggtgaaattggaagccgagatggaccgcagaccagcaacagtagtatgaaactccaaaatgcaaactgaagcagcaaacccacaaagcatcaaaagactcactcacaaacttctgaacacaaactccatggatgaaagctgtttattttgtttcctttatgtgtaaacaagatgatatctgaaaccagagagacttggaatgtctgactgacttctatttaacagcttgagtattgcatttccttggccaaacaaaaatagctacaaatccacaaaaatttactattccagtaaggcagagtccaaccattgataatacaacttaaacatgtttgctatraaataccatcacaagtaaatgagcttggtgtgaacaactctcctttgtgatgccttaggacatgtttgaactgcagcaaaaaacaaaaacaaaaaacagtgcattagcaatttcatagcaagtgcatgcactaggaaaagaaaactctgtctacaagtttattagcagaagtggtggtctgctagacaaataattttgcaaaatttttctacatctaagttacctcatcagtaagtgccatgtctctaccatgccatcagaggctaatttcctgtaaaagttgtggaaattgttagaacaatagaaaaatagagcagtgtatgtgtgccaaaactcatcattactcaaaggagaactgtgttaggcacatttaagaaagtttacatctgacattgctttataggaattgtttctgcagattccggatattataattcacaccataaagattgtgaagtggttattggcaaacgtttgtaaatgtgaccatgtataaagtatttatactctttaattcacactgttagagagcaaaatcatctaagtattgccacatgacaagattagtaaacaggaatactagaactatgtttgcatgatacacaagcaccaataaagactaatccatacacagttaacctaatgccaaataaatactggttaaataaatgtatggcacagaatataatttgactatcaagacttttagcataatgaaaaaccctctctctatatatatatgtgtatatgaattatgtgggcattcttgatacttcaagttctagtttgaaaaaaatacataactaatttaattttacacaaaaatatttatgcagattttcagaatttcatatcaggaaatgacctttttatgtctgttaaatatcaaaacaatttgctacagtgttaatctgcatggtctttaagcctgctgtagttgagttgcagacagtgcatgaaaaagtattccgctgggaattgagccatgccaccaaagccaagaggagcgcatggaaacccggtagtctagaactaatcagattactgattttagggcacagcaccagatgaattgttgtatatgcttgtaaaaattgattctgtgtgttcctctgaacaaagcggagaaaatgatgataccatcaatattgaaattaaacttccaacttctctaataaaaaattaaaacacgcataacactcgtcaagagtatttgctcccaagacacattctagcaaatgttttgcctttttcatatacatgatatcatcgttattttcaaagggggcttattaataccctcagcatgtttttcacccaaatgatgcaaaacatgcagattctagttgacttcagttgtaatagacttgtttttctcctatttatgatttgaagtggattctgtaaaatatctcttgttcttagtttccttatctgtaaaacagtggagttagactacatatcttttggcactaacatctcatgaaaaattatggttaataaaatatcaccacatttggattgccaattttcaaagattctgagtggcttctcatcatcaaatcaaatcaaatccaagagctcaactatgctcaccattctgtaacacttgactgaattcatcacttgcctcctcttgtttctgctttggagaggtactactagtttttccatttttcttatttcttccctcttttcatcctcctaggccaccataagcatttatattttccagtgttatacatggaaccagtttgtttttctttgatccaggttacttttagtatttgagacatcataccattaatccattgtagtaggattaaaatgtacacacaactcaaatgtgcaacaaaagcatgtgt

SEQ ID NO: 6773 - DNA, 5603 bp, Homo sapiens
caggaatcctttgtgtttgaacccaactgcctcttcaaagtggatgagtttggcttctttctgacatggagaagtgaaggcaaggaaggacaggtgctagaatgctccctcatcaacagtattcggtcgggagccataccaaaggatcccaaaatcttggctgctcttgaagctgttggaaaatcagaaaatgatctggaagggcggatagtttgtgtctgcagtggcacagatctagtgaacattagttttacctacatggtggctgaaaatccagaagtaactaagcaatgggtagaaggcctgagatcaatcatacacaacttcagggccaacaacgtcagtccaatgacatgcctcaagaaacactggatgaaattggcatttatgaccaacacaaatggtaaaattccagttaggagtattactagaacatttgcatcgggaaaaacagaaaaggtgatctttcaagcactcaaggagttaggtcttcccagtggaaagaatgatgaaattgagcccacagcattttcttatgaaaagttctatgaactgacacaaaagatttgtcctcggacagatatagaagatcttttcaaaaaaatcaatggagacaaaactgattatttaacggtagaccaattagtgagctttctaaatgaacatcaacgagatcctcgattgaatgaaattttatttccattttatgatgccaaaagggcaatgcagatcattgagatgtatgaacctgatgaagatttgaagaaaaaaggccttatatcaagtgatgggttttgcagatatctgatgtcagatgaaaacgccccagtcttcctagatcgtttagaactttaccaagaaatggaccatcctctggctcactacttcatcagttcttcccataacacttatctcactggcagacagttcggcgggaagtcttcggtagaaatgtacagacaggttctcctggctggttgcagatgtgttgaacttgactgctgggatggaaaaggtgaagaccaagaaccaataataactcatggaaaagcaatgtgtacagatatcctttttaaggatgtaattcaagccatcaaggaaactgcatttgtcacatcagaatatcctgtaattctctcctttgaaaatcactgcagcaaatatcaacagtacaagatgtccaaatattgcgaagatctatttggggatctcctgttgaaacaagcacttgaatcacatccacttgaaccaggcagggctttgccatcccccaatgacctcaaaagaaaaatactcataaaaaacaagcggctgaaacctgaagttgaaaaaaaacagctggaagctttgagaagcatgatggaagctggagaatctgcctccccagcaaacatcttagaggacgataatgaagaggagatcgaaagtgctgaccaagaggaggaagctcaccccgaattcaaatttggaaatgaactttctgctgatgacttgggtcacaaggaagctgttgcaaatagcgtcaagaagggcctggtcactgtagaagatgagcaggcrtggatggcatcttataaatatgtaggtgctaccactaatatccatccatatttgtccacaatgatcaactacgcccagcctgtaaagtttcaaggtttccatgtggcagaagaacgcaatattcattataacatgtcttcttttaatgaatcagtcggtcttggctacttgaagacacatgcaattgaatttgtcaattataacaaacggcaaatgagtcgcatttaccccaagggaggccgagtcgattccagtaattacatgcctcagattttctggaacgctggctgccagatggtttcactgaactatcaaaccccagatttagcgatgcaattgaatcagggaaaatttgagtataatggatcgtgcgggtaccttctcaaaccagatttcatgaggcggcctgatcgaacatttgaccccttctctgaaactcctgttgatggtgttattgcagccacttgctcagtgcaggttatatcaggtcaattcttatcagataagaaaattggcacctacgtagaggtggatatgtatgggttgcccactgacaccatacgtaaggaattccgaactcgcatggttatgaataatggactcaatccagtttacaatgaagagtcatttgtatttcggaaggtgatcctgccggacctggctgtcttgagaatagctgtgtatgatgataacaacaagctgattggccagaggatcctcccgcttgatggcctccaagccggatatcgacacatttcccttcgaaatgagggaaataaaccattatcactaccaacaattttctgcaatattgttcttaaaacatatgtgcctgatggatttggagatatcgtggatgctttatcagatccaaagaaatttctctcaattacagaaaagagagcagaccaaatgagagctatgggcattgaaactagtgacatagccgaygtgcccagtgacacttccaaaaatgacaagaaaggaaaggccaacacygccaaagcaaatgtgacccctcagagtagctctgagctcagaccaaccaccacggctgccctggcctctggtgtggaagccaagaaaggtattgaacttatccctcaagtaaggatagaagacttaaagcagatgaaggcttacttgaagcatttaaagaaacagcagaaggagctaaattctttaaagaagaaacatgcaaaggaacacagtaccatgcagaagttacactgcacgcaagttgacaaaattgtggcacagtatgacaaagagaagtcgactcatgagaaaatcctagagaaggcaatgaagaagaaggggggaagtaattgtctcgaaatgaaaaaagaaacagaaatcaaaattcaracgctgacatcagatcacaaatctaaggtcaaagagattgtagcacagcacacaaaggaatggtcagaaatgatcaatacccacagtgctgaggagcaagaaatccgagacctgcacctcagccagcagtgtgagctgctgaaaaagctactcatcaatgcccacgagcagcaaacccagcagctgaaactgtcccatgacagggaaagcaaggaaatgcgagcacaccaggctaagatttctatggaaaatagcaaagccatcagccaagataaatctatcaagaataaagcagaacgggaaaggcgagtcagggagttaaacagcagcaacactaaaaagtttctggaagaaagaaagagacttgccatgaagcagtccaaagaaatggatcagttgaaaaaagtccagcttgaacatctagaattcctagagaaacagaatgagcaggcgaaggagatgcagcagatggtgaaattggaagccgagatggaccgcagaccagcaacagtagtatgaaactccaaaatgcaaactgaagcagcaaacccacaaagcatcaaaagactcactcacaaacttctgaacacaaactccatggatgaaagctgtttattttgtttcctttatgtgtaaacaagatgatatctgaaaccagagagacttggaatgtctgactgacttctatttaacagcttgagtattgcatttccttggccaaacaaaaatagctacaaatccacaaaaatttactattccagtaaggcagagtccaaccattgataatacaacttaaacatgtttgctatraaataccatcacaagtaaatgagcttggtgtgaacaactctcctttgtgatgccttaggacatgtttgaactgcagcaaaaaacaaaaacaaaaaacagtgcattagcaatttcatagcaagtgcatgcactaggaaaagaaaactctgtctacaagtttattagcagaagtggtggtctgctagacaaataattttgcaaaatttttctacatctaagttacctcatcagtaagtgccatgtctctaccatgccatcagaggctaatttcctgtaaaagttgtggaaattgttagaacaatagaaaaatagagcagtgtatgtgtgccaaaactcatcattactcaaaggagaactgtgttaggcacatttaagaaagtttacatctgacattgctttataggaattgtttctgcagattccggatattataattcacaccataaagattgtgaagtggttattggcaaacgtttgtaaatgtgaccatgtataaagtatttatactctttaattcacactgttagagagcaaaatcatctaagtattgccacatgacaagattagtaaacaggaatactagaactatgtttgcatgatacacaagcaccaataaagactaatccatacacagttaacctaatgccaaataaatactggttaaataaatgtatggcacagaatataatttgactatcaagacttttagcataatgaaaaaccctctctctatatatatatgtgtatatgaattatgtgggcattcttgatacttcaagttctagtttgaaaaaaatacataactaatttaattttacacaaaaatatttatgcagattttcagaatttcatatcaggaaatgacctttttatgtctgttaaatatcaaaacaatttgctacagtgttaatctgcatggtctttaagcctgctgtagttgagttgcagacagtgcatgaaaaagtattccgctgggaattgagccatgccaccaaagccaagaggagcgcatggaaacccggtagtctagaactaatcagattactgattttagggcacagcaccagatgaattgttgtatatgcttgtaaaaattgattctgtgtgttcctctgaacaaagcggagaaaatgatgataccatcaatattgaaattaaacttccaacttctctaataaaaaattaaaacacgcataacactcgtcaagagtatttgctcccaagacacattctagcaaatgttttgcctttttcatatacatgatatcatcgttattttcaaagggggcttattaataccctcagcatgtttttcacccaaatgatgcaaaacatgcagattctagttgacttcagttgtaatagacttgtttttctcctatttatgatttgaagtggattctgtaaaatatctcttgttcttagtttccttatctgtaaaacagtggagttagactacatatcttttggcactaacatctcatgaaaaattatggttaataaaatatcaccacatttggattgccaattttcaaagattctgagtggcttctcatcatcaaatcaaatcaaatccaagagctcaactatgctcaccattctgtaacacttgactgaattcatcacttgcctcctcttgtttctgctttggagaggtactactagtttttccatttttcttatttcttccctcttttcatcctcctaggccaccataagcatttatattttccagtgttatacatggaaccagtttgtttttctttgatccaggttacttttagtatttgagacatcataccattaatccattgtagtaggattaaaatgtacacacaactcaaatgtgcaacaaaagcatgtgt

SEQ ID NO: 6774 - DNA, 1541 bp, Homo sapiens
cttcccacgcgacttcctgcgggaaacatggcggyattgagcggagtccgctggctgacccgagcgctggtctccgccgggaaccctggggcatggagaggtctgagtacctcggccgcggcgcacgctgcatcgcggagccaggccgaggacgtgagggtggagggctcctttcccgtgaccatgcttccgggagacggtgtggggcctgagctgatgcacgccgtcaaggaggtgttcaaggctgccgctgtcccagtggagttccaggagcaccacctgagtgaggtgcagaatatggcatctgaggagaagctggagcaggtgctgagttccatgaaggagaacaaagtggccatcattggaaagattcataccccgatggagtataagggggagctagcctcctatgatatgcggctgaggcgtaagttggacttatttgccaacgtagtccatgtgaagtcacttcctgggtatatgactcggcacaacaatctagacctggtgatcattcgagagcagacagaaggggagtacagctctctggaacatgaggtgaggccccagaaactgggggagggcaaggatgaagatgggagagaggtggagctccttgtttcccttcccagtgtcacctagctgctgctttcttcttacccagagtgcaaggggtgtgattgagtgtttgaagattgtcacacgagccaagtctcagcggattgcaaagttcgcctttgactatgccaccaagaaggggcggggcaaggtcactgctgtccacaaggccaacatcatgaaacttggggatgggttgttcctgcagtgctgtgaggaagttgctgaactgtaccccaaaatcaaatttgagacaatgatcatagacaactgctgcatgcagctggtgcagaatccttaccagtttgatgtgcttgtgatgcccaatctctatgggaacattattgacaatctggctgctggcctggttgggggagctggtgtggtccctggtgagagctatagtgcagaatacgcagtctttgagacgggtgcccggcacccatttgcccaggcagtgggcaggaatatagccaatcccacggccatgctgctgtcggcttccaacatgctgcggcatcttaatcttgagtatcactccagcatgatcgcagatgcggtgaagaaggtgatcaaagttggcaaggtgcgractcgagacatgggcggctacagcaccacaaccgacttcatcaagtctgtcatcggtcacctgcagactaaagggagctagagccctttatttcttccaaccttgcaaggaccacactccccatacccttcagtgcagtgtaccagggaagagaccttgtgcctctaagcagtggaccatggtcaccttgctgggtagagcctaggttcgarcctctgacatgggtggctatgctacttgccatgacttcactgaggctgtcattgctgccttgccccacccataggccctgtccatacccatgtaaggtgttcaataaagaacatgaacc

SEQ ID NO: 6775 - DNA, 1541 bp, Homo sapiens
cttcccacgcgacttcctgcgggaaacatggcggyattgagcggagtccgctggctgacccgagcgctggtctccgccgggaaccctggggcatggagaggtctgagtacctcggccgcggcgcacgctgcatcgcggagccaggccgaggacgtgagggtggagggctcctttcccgtgaccatgcttccgggagacggtgtggggcctgagctgatgcacgccgtcaaggaggtgttcaaggctgccgctgtcccagtggagttccaggagcaccacctgagtgaggtgcagaatatggcatctgaggagaagctggagcaggtgctgagttccatgaaggagaacaaagtggccatcattggaaagattcataccccgatggagtataagggggagctagcctcctatgatatgcggctgaggcgtaagttggacttatttgccaacgtagtccatgtgaagtcacttcctgggtatatgactcggcacaacaatctagacctggtgatcattcgagagcagacagaaggggagtacagctctctggaacatgagagtgcaaggggtgtgattgagtgtttgaagattgtcacacgagccaagtctcagcggattgcaaagttcgcctttgactatgccaccaagaaggggcggggcaaggtcactgctgtccacaaggccaacatcatgaaacttggggatgggttgttcctgcagtgctgtgaggaagttgctgaactgtaccccaaaatcaaatttgagacaatgatcatagacaactgctgcatgcagctggtgcagaatccttaccagtttgatgtgcttgtgatgcccaatctctatgggaacattattgacaatctggctgctggcctggttgggggagctggtgtggtccctggtgagagctatagtgcagaatacgcagtctttgagacgggtgcccggcacccatttgcccaggcagtgggcaggaatatagccaatcccacggccatgctgctgtcggcttccaacatgctgcggcatcttaatcttgagtatcactccagcatgatcgcagatgcggtgaagaaggtgatcaaagttggcaaggtgcgractcgagacatgggcggctacagcaccacaaccgacttcatcaagtctgtcatcggtcacctgcagactaaagggagctagagccctttatttcttccaaccttgcaaggaccacactccccatacccttcagtgcagtgtaccagggaagagaccttgtgcctctaagcagtggaccatggtcaccttgctgggtagagcctaggttgtccttgggccggcttccttaggggacagactgttgggtggtgatggggattgttaggatggagcccaggccacatggatgatgatgattctcccccacaggttcgarcctctgacatgggtggctatgctacttgccatgacttcactgaggctgtcattgctgccttgccccacccataggccctgtccatacccatgtaaggtgttcaataaagaacatgaaccaa

SEQ ID NO: 6776 - DNA, 1435 bp, Homo sapiens
cttcccacgcgacttcctgcgggaaacatggcggyattgagcggagtccgctggctgacccgagcgctggtctccgccgggaaccctggggcatggagaggtctgagtacctcggccgcggcgcacgctgcatcgcggagccaggccgaggacgtgagggtggagggctcctttcccgtgaccatgcttccgggagacggtgtggggcctgagctgatgcacgccgtcaaggaggtgttcaaggctgccgctgtcccagtggagttccaggagcaccacctgagtgaggtgcagaatatggcatctgaggagaagctggagcaggtgctgagttccatgaaggagaacaaagtggccatcattggaaagattcataccccgatggagtataagggggagctagcctcctatgatatgcggctgaggcgtaagttggacttatttgccaacgtagtccatgtgaagtcacttcctgggtatatgactcggcacaacaatctagacctggtgatcattcgagagcagacagaaggggagtacagctctctggaacatgagagtgcaaggggtgtgattgagtgtttgaagattgtcacacgagccaagtctcagcggattgcaaagttcgcctttgactatgccaccaagaaggggcggggcaaggtcactgctgtccacaaggccaacatcatgaaacttggggatgggttgttcctgcagtgctgtgaggaagttgctgaactgtaccccaaaatcaaatttgagacaatgatcatagacaactgctgcatgcagctggtgcagaatccttaccagtttgatgtgcttgtgatgcccaatctctatgggaacattattgacaatctggctgctggcctggttgggggagctggtgtggtccctggtgagagctatagtgcagaatacgcagtctttgagacgggtgcccggcacccatttgcccaggcagtgggcaggaatatagccaatcccacggccatgctgctgtcggcttccaacatgctgcggcatcttaatcttgagtatcactccagcatgatcgcagatgcggtgaagaaggtgatcaaagttggcaaggtgcgractcgagacatgggcggctacagcaccacaaccgacttcatcaagtctgtcatcggtcacctgcagactaaagggagctagagccctttatttcttccaaccttgcaaggaccacactccccatacccttcagtgcagtgtaccagggaagagaccttgtgcctctaagcagtggaccatggtcaccttgctgggtagagcctaggttcgarcctctgacatgggtggctatgctacttgccatgacttcactgaggctgtcattgctgccttgccccacccataggccctgtccatacccatgtaaggtgttcaataaagaacatgaacc

SEQ ID NO: 6777 - DNA, 1225 bp, Homo sapiens
cttcccacgcgacttcctgcgggaaacatggcggyattgagcggagtccgctggctgacccgagcgctggtctccgccgggaaccctggggcatggagaggtctgagtacctcggccgcggcgcacgctgcatcgcggagccaggccgaggacgtgagggtggagggctcctttcccgtgaccatgcttccgggagacggtgtggggcctgagctgatgcacgccgtcaaggaggtgttcaaggctgccgctgtcccagtggagttccaggagcaccacctgagtgaggtgcagaatatggcatctgaggagaagctggagcaggtgctgagttccatgaaggagaacaaagtggccatcattggaaagattcataccccgatggagtataagggggagctagcctcctatgatatgcggctgaggcgtaagttggacttatttgccaacgtagtccatgtgaagtcacttcctgggtatatgactcggcacaacaatctagacctggtgatcattcgagagcagacagaaggggagtacagctctctggaacatgagagtgcaaggggtgtgattgagtgtttgaagattgtcacacgagccaagtctcagcggattgcaaagttcgcctttgactatgccaccaagaaggggcggggcaaggtcactgctgtccacaaggccaacatcatgaaacttggggatgggttgttcctgcagtgctgtgaggaagttgctgaactgtaccccaaaatcaaatttgagacaatgatcatagacaactgctgcatgcagctggtgcagaatccttaccagtttgatgtgcttgtgatgcccaatctctatgggaacattattgacaatctggctgctggcctggttgggggagctggtgtggtccctggtgagagctatagtgcagaatacgcagtctttgagacgggtgcccggcacccatttgcccaggcagtgggcaggaatatagccaatcccacggccatgctgctgtcggcttccaacatgctgcggcatcttaatcttgagtatcactccagcatgatcgcagatgcggtgaagaaggtgatcaaagttggcaaggttcgarcctctgacatgggtggctatgctacttgccatgacttcactgaggctgtcattgctgccttgccccacccataggccctgtccatacccatgtaaggtgttcaataaagaacatgaacca

SEQ ID NO: 6778 - DNA, 1305 bp, Homo sapiens
cttcccacgcgacttcctgcgggaaacatggcggyattgagcggagtccgctggctgacccgagcgctggtctccgccgggaaccctggggcatggagaggtctgagtacctcggccgcggcgcacgctgcatcgcggagccaggccgaggacgtgagggtggagggctcctttcccgtgaccatgcttccgggagacggtgtggggcctgagctgatgcacgccgtcaaggaggtgttcaaggctgccgctgtcccagtggagttccaggagcaccacctgagtgaggtgcagaatatggcatctgaggagaagctggagcaggtgctgagttccatgaaggagaacaaagtggccatcattggaaagattcataccccgatggagtataagggggagctagcctcctatgatatgcggctgaggcgtaagttggacttatttgccaacgtagtccatgtgaagtcacttcctgggtatatgactcggcacaacaatctagacctggtgatcattcgagagcagacagaaggggagtacagctctctggaacatgagagtgcaaggggtgtgattgagtgtttgaagattgtcacacgagccaagtctcagcggattgcaaagttcgcctttgactatgccaccaagaaggggcggggcaaggtcactgctgtccacaaggccaacatcatgaaacttggggatgggttgttcctgcagtgctgtgaggaagttgctgaactgtaccccaaaatcaaatttgagacaatgatcatagacaactgctgcatgcagctggtgcagaatccttaccagtttgatgtgcttgtgatgcccaatctctatgggaacattattgacaatctggctgctggcctggttgggggagctggtgtggtccctggtgagagctatagtgcagaatacgcagtctttgagacgggtgcccggcacccatttgcccaggcagtgggcaggaatatagccaatcccacggccatgctgctgtcggcttccaacatgctgcggcatcttaatcttgagtatcactccagcatgatcgcagatgcggtgaagaaggtgatcaaagttggcaaggtgcgractcgagacatgggcggctacagcaccacaaccgacttcatcaagtctgtcatcggtcacctgcagactaaaggttcgarcctctgacatgggtggctatgctacttgccatgacttcactgaggctgtcattgctgccttgccccacccataggccctgtccatacccatgtaaggtgttcaataaagaacatgaaccaa

SEQ ID NO: 6779 - DNA, 2715 bp, Homo sapiens
atggacattcactggctgaatcgaggagaggagaaaatgttgaamggatatmaggaaactcacagaccagctggaaatattagggaatcaggcttagaaaacacgcaggcgcaaagagtgaccatgaagcccagcactacagccaaaactgcaccacaaagcccatcagggatcagagtcaccaaggtggactggcagcggtcgaggaatggcgctgcccaccacacccaggagtacccctgccctgagctggtggttcgcaggggccagtcgttcagcctcacgctggagctgagcagagccctggactgtgaggagatcctcatcttcacgrtggagacaggaccccgggcttctgaggccctccacaccaaagctgtgttccagacatcggagctggagcggggtgagggctggacagcagcaagggaggctcagatggagaaaactctgaccgtcagtctcgccagccctcccagtgctgtcattggccgctacctgctgagcatcaggctttcctctcaccgcaaacacagcaaccggaggctgggcgagtttgttctccttttcaacccatgcaaggccagagccccagtccacaccgggcctgatgactgcttttcagaggacgatgtgtttctggcctcagaggaggagagacaggagtacgtgctcagcgacagcggcatcatcttccgaggcgtggagaagcacatacgagcccagggctggaactacgggcaggtctccaggggcacaggccagacaaggatgtgggctggggcatggggagcctctaagcacagcctctctggggagcagtttgaggaggacatcctgaacatctgcctctccatcctggatcgaagccccggtcaccaaaacaacccagccaccgacrtgtcctgccgccacaaccccatctacgtcaccagggtcatcagtgccatggtgaacagcaacaacgaccgaggtgtggtgcaaggacagtggcagggcaagtacggcggcggcaccagcccgctgcactggcgcggcagcgtggccattctgcagaagtggctcaarggcaggtacaagccagtcaagtacggccagtgctgggtcttcgccggagtcctgtgcacagtcctcaggtgcttggggatagccacacgggtcgtgtccaacttcaactcagcccacgacacagaccagaacctgagtgtggacaaatacgtggactccttcgggcggaccctggaggacctgacagaagacagcatgtggaatttccatgtctggaatgagagctggtttgcccggcaggacctaggcccctcttacaatggctggcaggttctggatgccaccccccaggaggagagtgaaggtgtgttccggtgcggcccarcctcagtcaccgccatccgcgagggtgatgtgcacctggctcacgatggccccttcgtgtttgcggaggtcaacgccgactacatcacctggctgtggcacgaggatgagagccgggagcgtgtatactcaaacacgaagaagattgggagatgcatcagcaccaaggcggtgggcagtgactcccgcgtggacatcactgacctctacaagtatccggaagggtcccggaaagagaggcaggtgtacagcaaggcggtgaacaggctgttcggcgtggaagcctctggaaggagaatctggatccgcagggctgggggtcgctgtctctggcgtgacgacctcctggagcctgccaccaarcccagcatcgctggcaagttcaaggtgctagagcctcccatgctgggccacgacctgagactggccctgtgcttggccaacctcacctcccgggcccagcgggwgagggtcaacctgagcggtgccaccatcctctatacccgcaagccagtggcagagatcctgcatgaatcccacgccgtgaggctggggccgcaagaaggtagttatcagcttattgctattaaaaataacactaaacttttgtttatctacagagtgtcagagaagagaatcccaattacaatatcttactctaagtataaagaagacctgacagaggacaagaagatcctgttggctgccatgtgccttgtcaccaaaggagagaagcttctggtggagaaggacattactctagaggacttcatcaccatcaaggttctgggcccagccatggtgggagtggcagttacagtggaagtgacagtagtcaaccccctcatagagagagtgaaggactgtgcgctgatggtggagggcagcggccttctccaggaacagctcagcatcgacgtgcctaccctggagcctcaggagagggcctcagtccagtttgacatcaccccctccaaaagtggcccaaggcagctgcaggtggaccttccccagtggaaagcagaagccrccccaacagccaatgagaaagccctgcttgtgagtgggagaggtagagaaattgacagaagacagcttagaagtccaagggagagtgtgagtgggaatgtggttttggaaattacaaagaaaaatgtgcaggctgaggaagacagatctttctgcagcctgccctcagtacagcccacagtgggtgccttgactcagatggtgcatatgctccctcctggaacttggatcttaagagatcagaatggagagaagcttcagaaggcactaaaggtggtggtggtggtagtgccc

SEQ ID NO: 6780 - DNA, 4278 bp, Homo sapiens
acctgcatgtgttttgggggaaacagagagaaaggtgtggcctctccacttctgtggacaccccaaataggaagaagggtgcacacaaagcaccgcttcctccacgaagccctcctcrggcacatcgaggagaaccagctgcccaagctcttggctgctgcccttctgaggcctgcctgatttgggccacatagatctggttttggccattgactggcaacatggcagtagccaactgcagagccaccagggagcagcctcattctgattgagtataacgaagacgctgatgggaaagagagacacggctgacatcatctctaccgttgagttcaaccacacgggagagctgctggccacaggtgacaagggcggccgggtcgtcatcttccagcgggaaccagagagtaaaaatgcgccccacagccagggcgaatacgacgtgtacagcactttccagagccacgagccggagtttgactatctcaagagcctggagatagaggagaagatcaacaagatcaagtggctcccacagcagaacgccgcccactcactcctgtccaccaacgataaaactatcaaattatggaagattaccgaacgagataaaaggcccgaaggatacaacctgaaggatgaagaggggaaacttaaggacctgtccacggtgacrtcactgcaggtgccagtgctgaagcccatggatctgatggtggaggtgagccctcggaggatctttgccaatggccacacctaccacatcaactccatctccgtcaacagtgactgcgagacctacatgtcggcggatgacctgcgcatcaacctctggcacctggccatcacygacaggagcttcaacatcgtggacatcaagccggccaacatggaggaccttacggaggtgatcacagcatctgagttccatccgcaccactgcaacctcttcgtctacagcagcagcaagggctccctgcggctctgcgacatgcgggcagctgccctgtgtgacaagcattccaagctctttgaagagcctgaggaccccagtaaccgctcattcttctcggaaatcatctcctccgtgtccgacgtgaagttcagccacagcggccgctacatgctcacccgggactaccttacagtcaaggtctgggacctgaacatggaggcaagacccatagagacctaccaggtccatgactaccttcggagcaagctctgttccctgtacgagaacgactgcattttcgacaagtttgaatgtgcctggaacgggagcgacagcgtcatcatgaccggggcctacaacaacttcttccgcatgttcgatcggaacaccaagcgggacgtgaccctggaggcctcgagggaaagcagcaagccccgggctgtgctcaagccacggcgcgtgtgcgtggggggcaagcgccggcgtgatgacatcagtgtggacagcttggacttcaccaagaagatcctgcacacggcctggcacccggctgagaacatcattgccatygccgccaccaacaacctgtacatcttccaggacaaggtaaactctgacatgcactaggtatgtgcagwtcccggcccctgccacccagcctcatgcaagtcatccccgacatgaccttcacgaccgcaatgcaaggaggggaagaaagtcacagcactgatgaggacagctgcagaggtggcagtgtgtggacacaggaagtttgggycccctccctgccccagctttcctaggccagaattgtgtttggcagtaattgtctgtttaaaaaaataaaaaggaraggaagcgttcaccgccrcaaatcataaaatggacatgactgtggagtcttacagttcagggttctttcattcacgtcccttcctgtctcggtctgcggtctttaccacatcaataggactttttatgcgtccgggttaatttttcactccagtgcgtcctgttgcagggaccggagctgatgggagctgcttctcccccatgcctcactggtcccagatcagggctccagggacagatgatgagtctcaaacgagccagccaggggttcttttggttataaatggggcaattcgccctgtctcagagctgatgacctcaccgttgttttttggatggtgaattcatgctgagaatttgcagatgcaagctcctctcmtaggtcttctgaatgtcttgaaacatcccaggtcccaggtctggtgcggtttcccgagaggagcggagtggggtttgtcttctgtgtgcctgtgtcctcatctgattcacctgccatttgctgagcctctgctgtgtaccaggcgtggtgctcagccctagaggcagttgacttaccccctgcagccctccctgccgcctcacccttcagcattcactgggcaccttcccggagcggacactgactcccatgcacgattttttggaatcttcctcctgactgtgaggtgggtgttcattcatttcctccataaacaccaacttctcgaagcgtgccaggctctgggctggatgctggggataagcgggaacccttaggatcccctctgtccacgagaagaagctgaggctctgagcggatgcacaggtcacccatggcaggtgccgtgcagtggtgtcaggaacccgtccgggtcttcacacaaggttctctccagtccatctcgtgggcggctcatgttagagcgacattcaaatggaaggtttggaaaggaatgcctctgtcttgtgaagtaggacaagggtccgggagaactgagacgcaggatggaagacagagaagaccccccggagctcctcgctctgcttggtggcttcaggagtgcggccctccccaggactccacttcatcctgggcttgcaccctccttgagccaatgcactgaactgcctttgaaaggaaattgcatgttctgaccattttaggatacctttactttaaggaccacacagtcccagaggacacatccctcgggaactctgcccctctgacaatgagggccacagagaaggtggtgtttccatggtagatgctcctgttctggtgataccaaacctgcccacccctctgagtcgtctttgctcatggacttgcagcagagccacgtagttkggcattttgattcagaaagtggggagcagagacccagccaaatccaaactttttttttggttttgttttgttttgttttttacaagatataacataacccaggaaacagacccagctgaggttattctcagtggattacagtatacttttgtgtgtgtaaaagcacaaagtgcatgtgtactcacttctggccatataacatttacacagggaaatggatcattgatttttttttaatcaacgtgaatgaagaatgtttgtttatatatcactataaaatccagttgacctggacagtattatatgtacatatctattctaattaaatttaacaatcaaaggattggattacttttttcccccttgtaaagaggttcgagaatgtggtcaattgtatagatagcgtgttaaagccaaaacccagctctgagggccttacccattacttggatatttgctacgatccatctccctttgtgagtcaaatgttaagagaagaaacttgtatttgcagctagaggttactgtcacatcatagatttaacatttaccatcttcaaagtacaaatcttacatgtccttcaaaaggaggtcttaatacagttcctagttccttacttctgttttaaactttgggtaccaaaccaaaaagaagaaaaaagaaaggaaaagatcttctttgaagaaaagtatgtctctggatccctggaaaataatgatgtccaaagcaaattgtgaagatcaaatgtgtgttaagaaaaggtgtcgaggggagggacaaaaccagaaacggtggaaggaccagtgtaatagtcacagacttgcatcctggctctgcttacatttcctggtactctcgaatgtacgggcgttcacatagtcattgtgaagttgttggggtttttttggttttgtttttaatttagctcttctctgaggacgaagctgttggtggtggtggtggtgggggtggtggtgtgggatacatggtggtcaagttgtcagccctgatcagtttggactctgtaactcataggtgcattctttttttctttggtgtctcacaaattacccaattgttgaataaaactataaatatgttaataccagctttttccaataaaataacaaatgttacatc

SEQ ID NO: 6781 - DNA, 4064 bp, Homo sapiens
acatgcaaaaagtggggcctggagatggggctgtcttttttctccaaacacttgcccatccaggaaggccagccctgggcattgaagactccagctgacatcatctctaccgttgagttcaaccacacgggagagctgctggccacaggtgacaagggcggccgggtcgtcatcttccagcgggaaccagagagtaaaaatgcgccccacagccagggcgaatacgacgtgtacagcactttccagagccacgagccggagtttgactatctcaagagcctggagatagaggagaagatcaacaagatcaagtggctcccacagcagaacgccgcccactcactcctgtccaccaacgataaaactatcaaattatggaagattaccgaacgagataaaaggcccgaaggatacaacctgaaggatgaagaggggaaacttaaggacctgtccacggtgacrtcactgcaggtgccagtgctgaagcccatggatctgatggtggaggtgagccctcggaggatctttgccaatggccacacctaccacatcaactccatctccgtcaacagtgactgcgagacctacatgtcggcggatgacctgcgcatcaacctctggcacctggccatcacygacaggagcttcaacatcgtggacatcaagccggccaacatggaggaccttacggaggtgatcacagcatctgagttccatccgcaccactgcaacctcttcgtctacagcagcagcaagggctccctgcggctctgcgacatgcgggcagctgccctgtgtgacaagcattccaagctctttgaagagcctgaggaccccagtaaccgctcattcttctcggaaatcatctcctccgtgtccgacgtgaagttcagccacagcggccgctacatgctcacccgggactaccttacagtcaaggtctgggacctgaacatggaggcaagacccatagagacctaccaggtccatgactaccttcggagcaagctctgttccctgtacgagaacgactgcattttcgacaagtttgaatgtgcctggaacgggagcgacagcgtcatcatgaccggggcctacaacaacttcttccgcatgttcgatcggaacaccaagcgggacgtgaccctggaggcctcgagggaaagcagcaagccccgggctgtgctcaagccacggcgcgtgtgcgtggggggcaagcgccggcgtgatgacatcagtgtggacagcttggacttcaccaagaagatcctgcacacggcctggcacccggctgagaacatcattgccatygccgccaccaacaacctgtacatcttccaggacaaggtaaactctgacatgcactaggtatgtgcagwtcccggcccctgccacccagcctcatgcaagtcatccccgacatgaccttcacgaccgcaatgcaaggaggggaagaaagtcacagcactgatgaggacagctgcagaggtggcagtgtgtggacacaggaagtttgggycccctccctgccccagctttcctaggccagaattgtgtttggcagtaattgtctgtttaaaaaaataaaaaggaraggaagcgttcaccgccrcaaatcataaaatggacatgactgtggagtcttacagttcagggttctttcattcacgtcccttcctgtctcggtctgcggtctttaccacatcaataggactttttatgcgtccgggttaatttttcactccagtgcgtcctgttgcagggaccggagctgatgggagctgcttctcccccatgcctcactggtcccagatcagggctccagggacagatgatgagtctcaaacgagccagccaggggttcttttggttataaatggggcaattcgccctgtctcagagctgatgacctcaccgttgttttttggatggtgaattcatgctgagaatttgcagatgcaagctcctctcmtaggtcttctgaatgtcttgaaacatcccaggtcccaggtctggtgcggtttcccgagaggagcggagtggggtttgtcttctgtgtgcctgtgtcctcatctgattcacctgccatttgctgagcctctgctgtgtaccaggcgtggtgctcagccctagaggcagttgacttaccccctgcagccctccctgccgcctcacccttcagcattcactgggcaccttcccggagcggacactgactcccatgcacgattttttggaatcttcctcctgactgtgaggtgggtgttcattcatttcctccataaacaccaacttctcgaagcgtgccaggctctgggctggatgctggggataagcgggaacccttaggatcccctctgtccacgagaagaagctgaggctctgagcggatgcacaggtcacccatggcaggtgccgtgcagtggtgtcaggaacccgtccgggtcttcacacaaggttctctccagtccatctcgtgggcggctcatgttagagcgacattcaaatggaaggtttggaaaggaatgcctctgtcttgtgaagtaggacaagggtccgggagaactgagacgcaggatggaagacagagaagaccccccggagctcctcgctctgcttggtggcttcaggagtgcggccctccccaggactccacttcatcctgggcttgcaccctccttgagccaatgcactgaactgcctttgaaaggaaattgcatgttctgaccattttaggatacctttactttaaggaccacacagtcccagaggacacatccctcgggaactctgcccctctgacaatgagggccacagagaaggtggtgtttccatggtagatgctcctgttctggtgataccaaacctgcccacccctctgagtcgtctttgctcatggacttgcagcagagccacgtagttkggcattttgattcagaaagtggggagcagagacccagccaaatccaaactttttttttggttttgttttgttttgttttttacaagatataacataacccaggaaacagacccagctgaggttattctcagtggattacagtatacttttgtgtgtgtaaaagcacaaagtgcatgtgtactcacttctggccatataacatttacacagggaaatggatcattgatttttttttaatcaacgtgaatgaagaatgtttgtttatatatcactataaaatccagttgacctggacagtattatatgtacatatctattctaattaaatttaacaatcaaaggattggattacttttttcccccttgtaaagaggttcgagaatgtggtcaattgtatagatagcgtgttaaagccaaaacccagctctgagggccttacccattacttggatatttgctacgatccatctccctttgtgagtcaaatgttaagagaagaaacttgtatttgcagctagaggttactgtcacatcatagatttaacatttaccatcttcaaagtacaaatcttacatgtccttcaaaaggaggtcttaatacagttcctagttccttacttctgttttaaactttgggtaccaaaccaaaaagaagaaaaaagaaaggaaaagatcttctttgaagaaaagtatgtctctggatccctggaaaataatgatgtccaaagcaaattgtgaagatcaaatgtgtgttaagaaaaggtgtcgaggggagggacaaaaccagaaacggtggaaggaccagtgtaatagtcacagacttgcatcctggctctgcttacatttcctggtactctcgaatgtacgggcgttcacatagtcattgtgaagttgttggggtttttttggttttgtttttaatttagctcttctctgaggacgaagctgttggtggtggtggtggtgggggtggtggtgtgggatacatggtggtcaagttgtcagccctgatcagtttggactctgtaactcataggtgcattctttttttctttggtgtctcacaaattacccaattgttgaataaaactataaatatgttaataccagctttttccaataaaataacaaatgttacatc

SEQ ID NO: 6782 - DNA, 4204 bp, Homo sapiens
gcggtggtgcagagctgcggcaaagggccctcgcccgtggggttcactctcatcacccagaagcagggagaagggcctgcggctgcaggcctggctgccacaccggcctccagacarcacacagcagaagtaaaatagaaagaagaccttttttgaaatgacctgtgttagtcacctctctcaggatgcgtgaggcggacacgttgaggccacctcagctgatggaagtttccgctgacatcatctctaccgttgagttcaaccacacgggagagctgctggccacaggtgacaagggcggccgggtcgtcatcttccagcgggaaccagagagtaaaaatgcgccccacagccagggcgaatacgacgtgtacagcactttccagagccacgagccggagtttgactatctcaagagcctggagatagaggagaagatcaacaagatcaagtggctcccacagcagaacgccgcccactcactcctgtccaccaacgataaaactatcaaattatggaagattaccgaacgagataaaaggcccgaaggatacaacctgaaggatgaagaggggaaacttaaggacctgtccacggtgacrtcactgcaggtgccagtgctgaagcccatggatctgatggtggaggtgagccctcggaggatctttgccaatggccacacctaccacatcaactccatctccgtcaacagtgactgcgagacctacatgtcggcggatgacctgcgcatcaacctctggcacctggccatcacygacaggagcttcaacatcgtggacatcaagccggccaacatggaggaccttacggaggtgatcacagcatctgagttccatccgcaccactgcaacctcttcgtctacagcagcagcaagggctccctgcggctctgcgacatgcgggcagctgccctgtgtgacaagcattccaagctctttgaagagcctgaggaccccagtaaccgctcattcttctcggaaatcatctcctccgtgtccgacgtgaagttcagccacagcggccgctacatgctcacccgggactaccttacagtcaaggtctgggacctgaacatggaggcaagacccatagagacctaccaggtccatgactaccttcggagcaagctctgttccctgtacgagaacgactgcattttcgacaagtttgaatgtgcctggaacgggagcgacagcgtcatcatgaccggggcctacaacaacttcttccgcatgttcgatcggaacaccaagcgggacgtgaccctggaggcctcgagggaaagcagcaagccccgggctgtgctcaagccacggcgcgtgtgcgtggggggcaagcgccggcgtgatgacatcagtgtggacagcttggacttcaccaagaagatcctgcacacggcctggcacccggctgagaacatcattgccatygccgccaccaacaacctgtacatcttccaggacaaggtaaactctgacatgcactaggtatgtgcagwtcccggcccctgccacccagcctcatgcaagtcatccccgacatgaccttcacgaccgcaatgcaaggaggggaagaaagtcacagcactgatgaggacagctgcagaggtggcagtgtgtggacacaggaagtttgggycccctccctgccccagctttcctaggccagaattgtgtttggcagtaattgtctgtttaaaaaaataaaaaggaraggaagcgttcaccgccrcaaatcataaaatggacatgactgtggagtcttacagttcagggttctttcattcacgtcccttcctgtctcggtctgcggtctttaccacatcaataggactttttatgcgtccgggttaatttttcactccagtgcgtcctgttgcagggaccggagctgatgggagctgcttctcccccatgcctcactggtcccagatcagggctccagggacagatgatgagtctcaaacgagccagccaggggttcttttggttataaatggggcaattcgccctgtctcagagctgatgacctcaccgttgttttttggatggtgaattcatgctgagaatttgcagatgcaagctcctctcmtaggtcttctgaatgtcttgaaacatcccaggtcccaggtctggtgcggtttcccgagaggagcggagtggggtttgtcttctgtgtgcctgtgtcctcatctgattcacctgccatttgctgagcctctgctgtgtaccaggcgtggtgctcagccctagaggcagttgacttaccccctgcagccctccctgccgcctcacccttcagcattcactgggcaccttcccggagcggacactgactcccatgcacgattttttggaatcttcctcctgactgtgaggtgggtgttcattcatttcctccataaacaccaacttctcgaagcgtgccaggctctgggctggatgctggggataagcgggaacccttaggatcccctctgtccacgagaagaagctgaggctctgagcggatgcacaggtcacccatggcaggtgccgtgcagtggtgtcaggaacccgtccgggtcttcacacaaggttctctccagtccatctcgtgggcggctcatgttagagcgacattcaaatggaaggtttggaaaggaatgcctctgtcttgtgaagtaggacaagggtccgggagaactgagacgcaggatggaagacagagaagaccccccggagctcctcgctctgcttggtggcttcaggagtgcggccctccccaggactccacttcatcctgggcttgcaccctccttgagccaatgcactgaactgcctttgaaaggaaattgcatgttctgaccattttaggatacctttactttaaggaccacacagtcccagaggacacatccctcgggaactctgcccctctgacaatgagggccacagagaaggtggtgtttccatggtagatgctcctgttctggtgataccaaacctgcccacccctctgagtcgtctttgctcatggacttgcagcagagccacgtagttkggcattttgattcagaaagtggggagcagagacccagccaaatccaaactttttttttggttttgttttgttttgttttttacaagatataacataacccaggaaacagacccagctgaggttattctcagtggattacagtatacttttgtgtgtgtaaaagcacaaagtgcatgtgtactcacttctggccatataacatttacacagggaaatggatcattgatttttttttaatcaacgtgaatgaagaatgtttgtttatatatcactataaaatccagttgacctggacagtattatatgtacatatctattctaattaaatttaacaatcaaaggattggattacttttttcccccttgtaaagaggttcgagaatgtggtcaattgtatagatagcgtgttaaagccaaaacccagctctgagggccttacccattacttggatatttgctacgatccatctccctttgtgagtcaaatgttaagagaagaaacttgtatttgcagctagaggttactgtcacatcatagatttaacatttaccatcttcaaagtacaaatcttacatgtccttcaaaaggaggtcttaatacagttcctagttccttacttctgttttaaactttgggtaccaaaccaaaaagaagaaaaaagaaaggaaaagatcttctttgaagaaaagtatgtctctggatccctggaaaataatgatgtccaaagcaaattgtgaagatcaaatgtgtgttaagaaaaggtgtcgaggggagggacaaaaccagaaacggtggaaggaccagtgtaatagtcacagacttgcatcctggctctgcttacatttcctggtactctcgaatgtacgggcgttcacatagtcattgtgaagttgttggggtttttttggttttgtttttaatttagctcttctctgaggacgaagctgttggtggtggtggtggtgggggtggtggtgtgggatacatggtggtcaagttgtcagccctgatcagtttggactctgtaactcataggtgcattctttttttctttggtgtctcacaaattacccaattgttgaataaaactataaatatgttaataccagctttttccaataaaataacaaatgttacatc

SEQ ID NO: 6783 - DNA, 3013 bp, Homo sapiens
cctcgtcgccgccgccattttagctgttggttccggccgcaccgtgtgggctgtagtagcgggaggggtgggggtcctccagagttaagtggctgtcctcgactgtgcccatacagcagccagctttcttccttaataactgcccgttcgaagagtgcgaggatgtccaagcggcaccggttggacctaggggaggattacccctctggcaagaagcgtgcggggaccgatgggaaggatcgagatcgagaccgggatcgtgaagatcggtctaaagatcgagaccgagaacgtgatagaggagatagagagcgagagagggagaaagaaaaggagaaggagttgcgagcttcaacaaatgctatgcttatcagtgctggattaccacctttgaaagcttcccattcagctcactcaacccactcagcacattcaacrcattcwacacattctgctcattcaacgcatgccggacatkcaggtcacacgtcacttccacagtgcattaatccgttcaccaacttaccccatactcctcgatactatgatattctaaagaaacgtcttcagctccctgtttgggaatacaaggataggtttacagatattctggttagacatcagtcctttgtactggttggtgagactgggtctggtaaaacaacacagattccacagtggtgtgtggagtacatgcgatcattaccaggacccaagagaggagttgcctgtacccaacccaggagagtggctgcaatgagtgtggctcagagagttgctgatgagatggatgtgatgttgggccaggaagttggttactccattcgatttgaagactgcagtagtgcaaaaaccattcttaagtatatgactgatgggatgttacttcgtgaagctatgaatgatcccctcctggagcgttatggtgtaataattcttgatgaggctcatgagaggacactggctacagatattctaatgggtgttctgaaggaagttgtaagacagagatcagatttaaaggttatagttatgagcgctactctagatgcaggaaaattccagatttactttgataactgtcctctcctaactattcctgggcgtacacatcctgttgagatcttctatactccagaaccagagagagattatcttgaagcagcaattcgaacagttatccagattcatatgtgtgaagaggaagagggagatcttcttcttttcttaactggtcaagaggaaattgatgaagcctgtaagagaataaagcgtgaagttgatgatttgggccctgaagttggtgayattaaaatcattccattgtattctacacttccacctcagcagcagcaacgcatttttgagcctccacctcccaaaaaacagaatggagcaattggaagaaaggtagttgtgtcaactaacatagcagagacgtctttgacaatagatggtgtggtgtttgtgattgatcctggatttgcgaaacagaaggtctacaatcctcgaatcagagttgagtcccttttggtgacagctattagtaaagcttcagctcagcaaagggctggtcgagctggacgtaccagacctggaaaatgcttcagactttacacagagaaagcttataaaacagaaatgcaggataacacctatcctgagattttgcgttctaatttaggatcagttgtgttacaattgaagaaacttggtattgatgacttggtacattttgattttatggatccaccagctcctgaaactctgatgagagccctggaacttttgaattacctggctgctttaaatgatgatggagatctgactgaattgggatccatgatggcagagtttcctctagatccacagctcgcaaaaatggttattgcaagttgtgactacaactgttctaatgaggtcctatctattactgctatgttgtcagtcccacagtgttttgttcgccccacggaggccaagaaagccgcagatgaggccaagatgagatttgcccacatagatggagatcatctgacactgctgaacgtctaccatgcttttaaacaaaatcatgaatcggttcagtggtgttatgacaacttcattaactacaggtccctgatgtccgcrgacaatgtacgccagcagctatctcgaattatggacagatttaatttgcctcgtcgaagtactgactttacaagcagggactattatattaatataagaaaagctttggttactgggtattttatgcaggtggcacatttagaacgaacagggcattacttaactgtgaaagataaccaggtggttcagttgcatccctctactgttcttgaccacaaacctgaatgggtgctttataatgagtttgttctaacaacaaagaattacatccggacatgtacagatatcaagccagaatggttggtgaaaattgcccctcaatattatgacatgagcaatttcccacagtgtgaagcaaagagacagttggaccgcatcattgccaaacttcaatycaaggaatattcacagtactgaattcagtgcttagaactgaagttattgagaggacagctttaaaagatgaatgaactcaaaagttcgagttgtgctcttcacgttggttcgataatggcctttatttgaaagctttttaatttttctytacagtaaatattccattctgatttcataaattaaacatttatgcctcccttttgtgttgacactgtagctcatactggaaaagtcgatcaatgttttgcagtttattgaaagtagttctatatataacaatgttataagcatttctttagaaatggttgawaatgcttctaaaatgtgattatcgaccatggtatgcatgatcgttgtaattgttgacattccttttagaagttgtgaaatgttacaacttgtgcttatgtagacacaatcttctgtctcagtacagaggcactgacttcaataaagtctatttatactaattttggccaaagcc

SEQ ID NO: 6784 - DNA, 3154 bp, Homo sapiens
gccgaagcagccgcaacgagccgggagctgagccgcgctgcgctgcggtgcgaagagccgggcggcggccagagccctccccgcgctgccagtgggacgcggagccagggatccccggctttgccccggggctggggtgcaacagactcttaacttggtcctcgcgccccgccaaccgccccmgggcaggaaacgcccagaaccaccaccgcgccgcgctccacaaaagccccgggagttccaagacgggagggatcgggcgcgctccagaggcaggagggtcccccacaccctcaggctcatgcccagctcccccatcgggcagcccccagccccatgaggaccctcaggccggggcgagagcccggcacagcccggaccgaaattttgccgctgccttagagcgttagacaggctaggtgtggagccgccctccgcagcccaccccggcccaggatgtggctgggccgccgggccctgtgcgctctggtccttctgctcgcctgcgcctcgctggggctcctgtacgcgagcacccgggacgcgcccggcctccggstacctcttgcgccgtgggcgcccccgcaaagcccccgcaggcccgagctgccagatcttgctcctgagccccgctacgcacacatcccggtcaggatcaaggagcaagtagtggggctgctggcttggaacaactgcagttgtgagtccagtggggggggcctccccctccccttccagaaacaagtccgagctattgacctcaccaaggcctttgaccctgcagagctgagggctgcctctgccacaagagagcaggagttccaggcctttctgtcgaggagccagtccccagctgaccagctgctcatagcccctgccaactccccgctccagtaccccctacagggtgtggaagttcagcccctcaggagcatcttggtgccagggctgagccttcaggcagcttctsgtcaggaggtataccaggtgaacctgactgcctccctaggcacctgggacgtggcaggggaagtgactggagttactctcactggagagggtcaggcagatctcacccttgtcagcccagggctggaccaactcaacaggcaactacaactkgtcacttacagcagccgaagctaccagaccaacacagcagacacagtccggttctccaccgagggacatgaggctgctttcactatccgcataagacacccgcccaaccctcggctgtacccacctgggtctctaccccagggagcccagtacaacatcagcgctctagtcacgattgccaccaagaccttcctccgttatgatcggctacgggctctcatcaccagtatccgccgcttctacccaacggttaccgtggtcatcgctgacgacagcgacaagccagagcgcgttagtggcccctacgtggaacactatctcatgcccttcggcaagggctggttcgcaggccggaacytggccgtgtctcaagtaaccaccaagtacgtgctgtgggtggacgacgacttcgtcttcacggcgcggacgcggctggagaggcttgtggacgtgctggagcggacgccgctggacctggtggggggcgcggtgcgcgagatctccggctttgccaccacttatcggcagctgctgagcgtggagcccggcgccccaggcctcgggaactgcctccggcaaaggcgcggcttccaccacgagctcgtcggcttcccaggctgcgtggtcaccgacggcgtggttaacttcttcctggcgcggactgacaaggtgcgcgaggtcggtttcgacccccgcctcagccgcgtggctcatctggaattcttcttggatgggcttggttcccttcgggttggctcctgctccgacgtcgtggtggatcatgcatccaaactgaagctgccttggacatcaagggatgccggagcagagacttacgcccggtaccgttacccaggatcactggacgagagccagatggycaaacaccggctgctcttcttcaaacaccggctgcagtgcatgacctcccagtgatrgcccgctggggatttctgactgtcaggctgggcctgcctccttgtccctgccaggaatttccaacaaaccccaccaccctgtgagcactctactggctgtccctgagcctctagttcctcactcttccttttcagaacctgatgcccagtaggggttgtcctggygacacccctcctttttccagtgcccagaggcctggtggagccataacctctcccacagccagtgccaagtcctccccctgcccattctcatggggcaggaaatggggggatcactttccaagtgccaaagagcccagagggactctaagaacctaaggtggaaacactgtcctctcatcttgggaccgagggggtggggaagttccccaacacataatcccaaractgtgcccctcatctgcatcttcagatccagtactctgtgtacctgctccagccccacccccacagagagaacttgtggctctggggctggggtgagggctggtggttggtgaaagccattcttagttgtgtctctgcaatgctgtgggcacaaaagaaggggcaccagagtccctgtgcaaacacctagactcacttcatgkattccaaagctctcagcttcattttattagttacgttaggtaagggggttcaagggtcatggtcctcatcacacacatgtcatcagggccctctgcactccacatgatgaggtcagacccacacggtgcaaatctttgggtcagtgagctcctggagaagagaggagacatgtcaggaatagattaggcacccctcttccttaatgaaatgtggcagtcctctcaggggtaccccacctacttagggatctgagttcttcagttcctcacccatagctcagcccgggctccctgatttggtcttcaatctactattcattccgtccccacccttttcttcttgatcttcctcagaccctttcccaaacccctctccctgggtctccagccacttacccctgcctcacttgccgcagcccagtgcctcctggctcccrctcctggtgctactgccccttamcaggctccccagggcataagcagctgcatcctgcacactca

SEQ ID NO: 6785 - DNA, 3137 bp, Homo sapiens
gggcgctcgcattccccgcgcggagccgaagcagccgcaacgagccgggagctgagccgcgctgcgctgcggtgcgaagagccgggcggcggccagagccctccccgcgctgccagtgggacgcggagccagggatccccggctttgccccggggctggggtgcaacagactcttaacttggtcctcgcgccccgccaaccgccccmgggcaggaaacgcccagaaccaccaccgcgccgcgctccacaaaagccccgggagttccaagacgggagggatcgggcgcgctccagaggcaggagggtcccccacaccctcaggctcatgcccagctcccccatcgggcagcccccagccccatgaggaccctcaggccggggcgagagcccggcacagcccggaccgaaattttgccgctgccttagagcgttagacaggatgtggctgggccgccgggccctgtgcgctctggtccttctgctcgcctgcgcctcgctggggctcctgtacgcgagcacccgggacgcgcccggcctccggstacctcttgcgccgtgggcgcccccgcaaagcccccgcaggcccgagctgccagatcttgctcctgagccccgctacgcacacatcccggtcaggatcaaggagcaagtagtggggctgctggcttggaacaactgcagttgtgagtccagtggggggggcctccccctccccttccagaaacaagtccgagctattgacctcaccaaggcctttgaccctgcagagctgagggctgcctctgccacaagagagcaggagttccaggcctttctgtcgaggagccagtccccagctgaccagctgctcatagcccctgccaactccccgctccagtaccccctacagggtgtggaagttcagcccctcaggagcatcttggtgccagggctgagccttcaggcagcttctsgtcaggaggtataccaggtgaacctgactgcctccctaggcacctgggacgtggcaggggaagtgactggagttactctcactggagagggtcaggcagatctcacccttgtcagcccagggctggaccaactcaacaggcaactacaactkgtcacttacagcagccgaagctaccagaccaacacagcagacacagtccggttctccaccgagggacatgaggctgctttcactatccgcataagacacccgcccaaccctcggctgtacccacctgggtctctaccccagggagcccagtacaacatcagcgctctagtcacgattgccaccaagaccttcctccgttatgatcggctacgggctctcatcaccagtatccgccgcttctacccaacggttaccgtggtcatcgctgacgacagcgacaagccagagcgcgttagtggcccctacgtggaacactatctcatgcccttcggcaagggctggttcgcaggccggaacytggccgtgtctcaagtaaccaccaagtacgtgctgtgggtggacgacgacttcgtcttcacggcgcggacgcggctggagaggcttgtggacgtgctggagcggacgccgctggacctggtggggggcgcggtgcgcgagatctccggctttgccaccacttatcggcagctgctgagcgtggagcccggcgccccaggcctcgggaactgcctccggcaaaggcgcggcttccaccacgagctcgtcggcttcccaggctgcgtggtcaccgacggcgtggttaacttcttcctggcgcggactgacaaggtgcgcgaggtcggtttcgacccccgcctcagccgcgtggctcatctggaattcttcttggatgggcttggttcccttcgggttggctcctgctccgacgtcgtggtggatcatgcatccaaactgaagctgccttggacatcaagggatgccggagcagagacttacgcccggtaccgttacccaggatcactggacgagagccagatggycaaacaccggctgctcttcttcaaacaccggctgcagtgcatgacctcccagtgatrgcccgctggggatttctgactgtcaggctgggcctgcctccttgtccctgccaggaatttccaacaaaccccaccaccctgtgagcactctactggctgtccctgagcctctagttcctcactcttccttttcagaacctgatgcccagtaggggttgtcctggygacacccctcctttttccagtgcccagaggcctggtggagccataacctctcccacagccagtgccaagtcctccccctgcccattctcatggggcaggaaatggggggatcactttccaagtgccaaagagcccagagggactctaagaacctaaggtggaaacactgtcctctcatcttgggaccgagggggtggggaagttccccaacacataatcccaaractgtgcccctcatctgcatcttcagatccagtactctgtgtacctgctccagccccacccccacagagagaacttgtggctctggggctggggtgagggctggtggttggtgaaagccattcttagttgtgtctctgcaatgctgtgggcacaaaagaaggggcaccagagtccctgtgcaaacacctagactcacttcatgkattccaaagctctcagcttcattttattagttacgttaggtaagggggttcaagggtcatggtcctcatcacacacatgtcatcagggccctctgcactccacatgatgaggtcagacccacacggtgcaaatctttgggtcagtgagctcctggagaagagaggagacatgtcaggaatagattaggcacccctcttccttaatgaaatgtggcagtcctctcaggggtaccccacctacttagggatctgagttcttcagttcctcacccatagctcagcccgggctccctgatttggtcttcaatctactattcattccgtccccacccttttcttcttgatcttcctcagaccctttcccaaacccctctccctgggtctccagccacttacccctgcctcacttgccgcagcccagtgcctcctggctcccrctcctggtgctactgccccttamcaggctccccagggcataagcagctgcatcctgcacactca

SEQ ID NO: 6786 - DNA, 3227 bp, Homo sapiens
cgtcctgcctcgccctgttcgcgcgtccgctgtcyggcctccggtcacgtgacagcagcgcaggtgagcgccgcttccggggtcgggcgcctggatagctgccggctccggcttccacttggtcggttgcgcgggagactatggcgtcctcctcggtcccaccagccacggtatcggcggcgacagcaggccccggcccaggtttcggcttcgcctccaagaccaagaagaagcatttcgtgcagcagaaggtgaaggtgttccgggcggccgacccgctggtgggtgtgttcctgtggggcgtagcccactcgatcaatgagctcagccaggtgcctcccccggtgatgctgctgccagatgactttaaggccagctccaagatcaaggtcaacaatcaccttttccacagggaaaatctgcccagtcatttcaagttcaaggagtattgtccccaggtcttcaggaacctccgtgatcgatttggcattgatgaccaagattacttggtgtcccttacccgaaacccccccagcgaaagtgaaggcagtgatggtcgcttccttatctcctacgatcggactctggtcatcaaagaagtatccagtgaggacattgctgacatgcatagcaacctctccaactatcaccagtacattgtgaagtgccatggcaacacgcttctgccccagttcctggggatgtaccgagtcagtgtggacaacgaagacagctacatgcttgtgatgcgcaatatgtttagccaccgtcttcctgtgcacaggaagtatgacctcaagggttccctagtgtcccgggaagccagcgataaggaaaaggttaaagaattgcccacccttaaggatatggactttctcaacaagaaccagaaagtatatattggtgaagaggagaagaaaatatttctggagaagctgaagagagatgtggagtttctagtgcagctgaagatcatggactacagccttctgctaggcatccacgacatcattcggggctctgaaccagaggaggaagsgcccgtgcgggaggatgagtcagaggtggatggggactgcagcctgactggacctcctgctctkgtgggctcctatggcacctccccagagggtatcggaggctacatccattcccatcggcccctgggcccaggagagtttgagtccttcattgatgtctatgccatccggagtgctgaaggagccccccagaaggaggtctacttcatgggcctcattgatatccttacacagtatgatgcyaagaagaaagcagctcatgcagccaaaactgtcaagcatggggctggggcagagatctctactgtccatccggagcagtatgctaagcgattcctggattttattaccaacatctttgcctaagagactgcctggttctctctgatgttcaaggtggtggggttctgagacacttgggggaattgtggggatattctagccaccagttctcttcttcctttgctaaattcaggctgcaggctccttccatccagataactccatcctgtcgagtaggctctttctgaccctcagaaatacattgtcctttttcctctttgcccatttttcttccctctcttcctccccatgagaagtctgcttgtagtattagaatgttattgttgactctctcccaagtgccttgatctttgtaatatctcctgttgtttctatgatataggagctaggggaagggggttgtttgccttcttcaggacctgactggacagatggacctggctcaagcaactactctggatgcactttgctgtgtgggatgaactaaaagtgtctgaattttgctgataactttataaaactcactatggcatgcttccctcctggtgggccctaggatggatgacactcaagatactacagatgtgggtgcaggcatgcacacacacgatggaatatggccattcctacacaggtggggtagagagtgggtcagcagcctggcacctcacagaggtgggacctaagaggactcatgattatgcagagaattggattgggtctctgtcatagattgagtaatctcttcccttacctcaattccatctccacccatctctacatctgggcacagcaacccagagatggccaaaagcattcaagcctgggggaagatgtttgactattgctgctcttcaccagaacctcacacctctcctgggactggaacccttcagtgggtgtgtggccagttttggaggctggaatgatgggccagggtgtaggattcattctccatgtaaagtttcctttcatcctgcctagccatccccaaggtttatttccagaagaaaggaatatctctacttggatcaattctggtcatttcaagaggatggaggcctcaagtgtgggaacttcccctactccctggatgtgtgtacctagcacacttccttctcccacccctttttccagttggatttgtttttctgttctcttctgtcctgtcttatactgcaactgtgtctcctaggggacagatggccttctttgtcatcttcactctccacccccagagaggagtcagagccataactcaatmactcagcccctccaaagatagttratgtgtgataatctcataatgttgagaaccctgatgagatacattgtcttcctctccctacaatgcctctggggccaaggcacccattcttcttgctatcctccatcccccttgaggcttccactttttttttttttagacataaagctgggcatcagcaactggcctgtggtgatgcaaagctgctttgctctgtatctggctggactgatctgtctcacaagaagccatgaggccatagggagaagctccctctccccttcatcttctgctccaaaggtggtagcaagaggagtacccagttaggggttggagcccccatataacatcttcctgtcagaagactgatggatctttttcattccaaccatctccctttcccccgatgaatgcaataaaactctgtgacaccagcaaccattgctctttagaaatgggttttctgatcatatggctgatgtgttatgggcagtatggatgtcttcatttgttgcttctgtttttcatcttttttgttttattaataaaaatttatgtatttgctcctgttactataataatacagggaataaattattcaatccaaatttctgtac

SEQ ID NO: 6787 - DNA, 2574 bp, Homo sapiens
tacattgtgaagtgccatggcaacacgcttctgccccagttcctggggatgtaccgagtcagtgtggacaacgaagacagctacatgcttgtgatgcgcaatatgtttagccaccgtcttcctgtgcacaggaagtatgacctcaagggttccctagtgtcccgggaagccagcgataaggaaaaggttaaagaattgcccacccttaaggatatggactttctcaacaagaaccagaaagtatatattggtgaagaggagaagaaaatatttctggagaagctgaagagagatgtggagtttctagtgcagctgaagatcatggactacagccttctgctaggcatccacgacatcattcggggctctgaaccagaggaggaagsgcccgtgcgggaggatgagtcagaggtggatggggactgcagcctgactggacctcctgctctkgtgggctcctatggcacctccccagagggtatcggaggctacatccattcccatcggcccctgggcccaggagagtttgagtccttcattgatgtctatgccatccggagtgctgaaggagccccccagaaggaggtctacttcatgggcctcattgatatccttacacagtatgatgcyaagaagaaagcagctcatgcagccaaaactgtcaagcatggggctggggcagagatctctactgtccatccggagcagtatgctaagcgattcctggattttattaccaacatctttgcctaagagactgcctggttctctctgatgttcaaggtggtggggttctgagacacttgggggaattgtggggatattctagccaccagttctcttcttcctttgctaaattcaggctgcaggctccttccatccagataactccatcctgtcgagtaggctctttctgaccctcagaaatacattgtcctttttcctctttgcccatttttcttccctctcttcctccccatgagaagtctgcttgtagtattagaatgttattgttgactctctcccaagtgccttgatctttgtaatatctcctgttgtttctatgatataggagctaggggaagggggttgtttgccttcttcaggacctgactggacagatggacctggctcaagcaactactctggatgcactttgctgtgtgggatgaactaaaagtgtctgaattttgctgataactttataaaactcactatggcatgcttccctcctggtgggccctaggatggatgacactcaagatactacagatgtgggtgcaggcatgcacacacacgatggaatatggccattcctacacaggtggggtagagagtgggtcagcagcctggcacctcacagaggtgggacctaagaggactcatgattatgcagagaattggattgggtctctgtcatagattgagtaatctcttcccttacctcaattccatctccacccatctctacatctgggcacagcaacccagagatggccaaaagcattcaagcctgggggaagatgtttgactattgctgctcttcaccagaacctcacacctctcctgggactggaacccttcagtgggtgtgtggccagttttggaggctggaatgatgggccagggtgtaggattcattctccatgtaaagtttcctttcatcctgcctagccatccccaaggtttatttccagaagaaaggaatatctctacttggatcaattctggtcatttcaagaggatggaggcctcaagtgtgggaacttcccctactccctggatgtgtgtacctagcacacttccttctcccacccctttttccagttggatttgtttttctgttctcttctgtcctgtcttatactgcaactgtgtctcctaggggacagatggccttctttgtcatcttcactctccacccccagagaggagtcagagccataactcaatmactcagcccctccaaagatagttratgtgtgataatctcataatgttgagaaccctgatgagatacattgtcttcctctccctacaatgcctctggggccaaggcacccattcttcttgctatcctccatcccccttgaggcttccactttttttttttttagacataaagctgggcatcagcaactggcctgtggtgatgcaaagctgctttgctctgtatctggctggactgatctgtctcacaagaagccatgaggccatagggagaagctccctctccccttcatcttctgctccaaaggtggtagcaagaggagtacccagttaggggttggagcccccatataacatcttcctgtcagaagactgatggatctttttcattccaaccatctccctttcccccgatgaatgcaataaaactctgtgacaccagcaaccattgctctttagaaatgggttttctgatcatatggctgatgtgttatgggcagtatggatgtcttcatttgttgcttctgtttttcatcttttttgttttattaataaaaatttatgtatttgctcctgttactataataatacagggaataaattattcaatccaaatttctgtac

SEQ ID NO: 6788 - DNA, 987 bp, Homo sapiens
tgggcggggttatataagccagcggcgggcggaaggcggggcgtgggggtctgtggctgctgggctggcggggcgcaggccgcgggacccgagcccggggaarcgagagagcggaggcgccgaggatccgattcaytccctggggasacctatgggccgaagccgtgtaaatgcgttttaagcagaggcctcggctccgcaactgccactcctcctcggggtgttgcacaagtttcgaggtcaccggcgacccccscyagcagcgcgcctggctctggcccccgcgaaggaggacggagtttgtgtgttgcatactttctaaggcggcggctgcagcagmggctccatccagcccgtcagctcctcctgcaaggcatggctggctacctgagtgaatcggactttgtgatggtggaggagggcttcagtacccgagacctgctgaaggaactcactctgggggcctcacaggccaccacggacgaggtagctgccttcttcgtggctgacctgggtgccatagtgaggaagcacttttgctttctgaagtgcctgccacgagtccggcccttttatgctgtcaagtgcaacagcagcccaggtgtgctgaaggttctggcccagctggggctgggctttagctgtgccaacaagattgcttccgtgatcaactcagccttggacctgtacttcccagagggctgtggcgtggacatctttgctgagctggggcgctactacgtgacctcggccttcactgtggcagtcagcatcattgccaagaaggaggttctgctagaccagcctggcagggaggaggaaaatggttccacctccaagaccatcgtgtaccaccttgatgagggcgtgtatgggatcttcaactcagtcctgtttgacaacatctgccctacccccatcctgcagaagtctaagaaccactcaccctgctacatgtctctagagtccattcatttcattgccgtg

SEQ ID NO: 6789 - DNA, 1498 bp, Homo sapiens
tgggcggggttatataagccagcggcgggcggaaggcggggcgtgggggtctgtggctgctgggctggcggggcgcaggccgcgggacccgagcccggggaarcgagagagcggaggcgccgaggatccgattcaytccctggggasacctatgggccgaagccgtgtaaatgcgttttaagcagaggcctcggctccgcaactgccactcctcctcggggtgttgcacaagtttcgaggtcaccggcgacccccscyagcagcgcgcctggctctggcccccgcgaaggaggacggagtttgtgtgttgcatactttctaaggcggcggctgcagcagmggctccatccagcccgtcagctcctcctgcaaggcatggctggctacctgagtgaatcggactttgtgatggtggaggagggcttcagtacccgagacctgctgaaggaactcactctgggggcctcacaggccaccacggacgaggtagctgccttcttcgtggctgacctgggtgccatagtgaggaagcacttttgctttctgaagtgcctgccacgagtccggcccttttatgctgtcaagtgcaacagcagcccaggtgtgctgaaggttctggcccagctggggctgggctttagctgtgccaacaaggcagagatggagttggtccagcatattggaatccctgccagtaagatcatctgcgccaacccctgtaagcaaattgcacagatcaaatatgctgccaagcatgggatccagctgctgagctttgacaatgagatggagctggcaaaggtggtaaagagccaccccagtgccaaggtttgtccagcagaggggcactgcgtgtctcatcaggatggttctgtgcattgctaccgatgactcccactccctgagctgcctgagcctaaagtttggagtgtcactgaaatcctgcagacacctgcttgaaaatgcgaagaagmaccatgtggaggtggtgggtgtgagttttcacattggcagtggctgtcctgaccctcaggcctatgctcagtccatcgcagacgcccggctcgtgtttgaaatgggcaccgagctgggtcacaagatgcacgttctggaccttggtggtggcttccctggcacagaaggggccaaagtgagatttgaagagattgcttccgtgatcaactcagccttggacctgtacttcccagagggctgtggcgtggacatctttgctgagctggggcgctactacgtgacctcggccttcactgtggcagtcagcatcattgccaagaaggaggttctgctagaccagcctggcagggaggaggaaaatggttccacctccaagaccatcgtgtaccaccttgatgagggcgtgtatgggatcttcaactcagtcctgtttgacaacatctgccctacccccatcctgcagaagtctaagaaccactcaccctgctacatgtctctagagtccattcatttcattgccgtg

SEQ ID NO: 6790 - DNA, 1461 bp, Homo sapiens
tgggcggggttatataagccagcggcgggcggaaggcggggcgtgggggtctgtggctgctgggctggcggggcgcaggccgcgggacccgagcccggggaarcgagagagcggaggcgccgaggatccgattcaytccctggggasacctatgggccgaagccgtgtaaatgcgttttaagcagaggcctcggctccgcaactgccactcctcctcggggtgttgcacaagtttcgaggtcaccggcgacccccscyagcagcgcgcctggctctggcccccgcgaaggaggacggagtttgtgtgttgcatactttctaaggcggcggctgcagcagmggctccatccagcccgtcagctcctcctgcaaggcatggctggctacctgagtgaatcggactttgtgatggtggaggagggcttcagtacccgagacctgctgaaggaactcactctgggggcctcacaggccaccacggacgaggtagctgccttcttcgtggctgacctgggtgccatagtgaggaagcacttttgctttctgaagtgcctgccacgagtccggcccttttatgctgtcaagtgcaacagcagcccaggtgtgctgaaggttctggcccagctggggctgggctttagctgtgccaacaaggcagagatggagttggtccagcatattggaatccctgccagtaagatcatctgcgccaacccctgtaagcaaattgcacagatcaaatatgctgccaagcatgggatccagctgctgagctttgacaatgagatggagctggcaaaggtggtaaagagccaccccagtgccaagatggttctgtgcattgctaccgatgactcccactccctgagctgcctgagcctaaagtttggagtgtcactgaaatcctgcagacacctgcttgaaaatgcgaagaagmaccatgtggaggtggtgggtgtgagttttcacattggcagtggctgtcctgaccctcaggcctatgctcagtccatcgcagacgcccggctcgtgtttgaaatgggcaccgagctgggtcacaagatgcacgttctggaccttggtggtggcttccctggcacagaaggggccaaagtgagatttgaagagattgcttccgtgatcaactcagccttggacctgtacttcccagagggctgtggcgtggacatctttgctgagctggggcgctactacgtgacctcggccttcactgtggcagtcagcatcattgccaagaaggaggttctgctagaccagcctggcagggaggaggaaaatggttccacctccaagaccatcgtgtaccaccttgatgagggcgtgtatgggatcttcaactcagtcctgtttgacaacatctgccctacccccatcctgcagaagtctaagaaccactcaccctgctacatgtctctagagtccattcatttcattgccgtg

SEQ ID NO: 6791 - DNA, 2167 bp, Homo sapiens
tgggcggggttatataagccagcggcgggcggaaggcggggcgtgggggtctgtggctgctgggctggcggggcgcaggccgcgggacccgagcccggggaarcgagagagcggaggcgccgaggatccgattcaytccctggggasacctatgggccgaagccgtgtaaatgcgttttaagcagaggcctcggctccgcaactgccactcctcctcggggtgttgcacaagtttcgaggtcaccggcgacccccscyagcagcgcgcctggctctggcccccgcgaaggaggacggagtttgtgtgttgcatactttctaaggcggcggctgcagcagmggctccatccagcccgtcagctcctcctgcaaggcatggctggctacctgagtgaatcggactttgtgatggtggaggagggcttcagtacccgagacctgctgaaggaactcactctgggggcctcacaggccaccacggacgaggtagctgccttcttcgtggctgacctgggtgccatagtgaggaagcacttttgctttctgaagtgcctgccacgagtccggcccttttatgctgtcaagtgcaacagcagcccaggtgtgctgaaggttctggcccagctggggctgggctttagctgtgccaacaaggcagagatggagttggtccagcatattggaatccctgccagtaagatcatctgcgccaacccctgtaagcaaattgcacagatcaaatatgctgccaagcatgggatccagctgctgagctttgacaatgagatggagctggcaaaggtggtaaagagccaccccagtgccaagatggttctgtgcattgctaccgatgactcccactccctgagctgcctgagcctaaagtttggagtgtcactgaaatcctgcagacacctgcttgaaaatgcgaagaagmaccatgtggaggtggtgggtgtgagttttcacattggcagtggctgtcctgaccctcaggcctatgctcagtccatcgcagacgcccggctcgtgtttgaaatgggcaccgagctgggtcacaagatgcacgttctggaccttggtggtggcttccctggcacagaaggggccaaagtgagatttgaagagattgcttccgtgatcaactcagccttggacctgtacttcccagagggctgtggcgtggacatctttgctgagctggggcgctactacgtgacctcggccttcactgtggcagtcagcatcattgccaagaaggaggttctgctagaccagcctggcagggaggccccactaccaccccctcacattgctacttgtgctgcctctgaaccctcccctcctgcagaggaaaatggttccacctccaagaccatcgtgtaccaccttgatgagggcgtgtatgggatcttcaactcagtcctgtttgacaacatctgccctacccccatcctgcagaagaaaccatccacggagcagcccctgtacagcagcagcctgtggggcccggcggttgatggctgtgattgcgtggctgagggcctgtggctgccgcaactacacgtaggggactggctggtctttgacaacatgggygcctacactgtgggcatgggttcccccttttgggggacccaggcctgccacatcacctatgccatgtcccgggtggcctgggaagcgctgcgaaggcagctgatggctgcagaacaggaggatgacgtggagggtgtgtgcaagcctctgtcctgcggctgggagatcacagacaccctgtgcgtgggccctgtyttcaccccagcgagcatcatgtgagtgggcctcgttccccccggagaatcccagcggggcctcagagatgcatytgggagaggtggggaagatggcaggcaagggtacccttggccaggactytggtgcccaccctgccacccccgcgctccacctgcagtgtttctgccctgtaaataggaccagtcttacactcgctgtagttcaagtatgcaacataaatcctgttccttccagctgtgtctgcctcctctgcagtgcaaggggcctggtcagccaggtgtgggggtgttcttggggtctcctttggtctccttcccacctttgtaaatataatgcaaataaataaatatttaggtttttaaaaactgca

SEQ ID NO: 6792 - DNA, 2107 bp, Homo sapiens
tgggcggggttatataagccagcggcgggcggaaggcggggcgtgggggtctgtggctgctgggctggcggggcgcaggccgcgggacccgagcccggggaarcgagagagcggaggcgccgaggatccgattcaytccctggggasacctatgggccgaagccgtgtaaatgcgttttaagcagaggcctcggctccgcaactgccactcctcctcggggtgttgcacaagtttcgaggtcaccggcgacccccscyagcagcgcgcctggctctggcccccgcgaaggaggacggagtttgtgtgttgcatactttctaaggcggcggctgcagcagmggctccatccagcccgtcagctcctcctgcaaggcatggctggctacctgagtgaatcggactttgtgatggtggaggagggcttcagtacccgagacctgctgaaggaactcactctgggggcctcacaggccaccacggacgaggtagctgccttcttcgtggctgacctgggtgccatagtgaggaagcacttttgctttctgaagtgcctgccacgagtccggcccttttatgctgtcaagtgcaacagcagcccaggtgtgctgaaggttctggcccagctggggctgggctttagctgtgccaacaaggcagagatggagttggtccagcatattggaatccctgccagtaagatcatctgcgccaacccctgtaagcaaattgcacagatcaaatatgctgccaagcatgggatccagctgctgagctttgacaatgagatggagctggcaaaggtggtaaagagccaccccagtgccaagatggttctgtgcattgctaccgatgactcccactccctgagctgcctgagcctaaagtttggagtgtcactgaaatcctgcagacacctgcttgaaaatgcgaagaagmaccatgtggaggtggtgggtgtgagttttcacattggcagtggctgtcctgaccctcaggcctatgctcagtccatcgcagacgcccggctcgtgtttgaaatgggcaccgagctgggtcacaagatgcacgttctggaccttggtggtggcttccctggcacagaaggggccaaagtgagatttgaagagattgcttccgtgatcaactcagccttggacctgtacttcccagagggctgtggcgtggacatctttgctgagctggggcgctactacgtgacctcggccttcactgtggcagtcagcatcattgccaagaaggaggttctgctagaccagcctggcagggaggaggaaaatggttccacctccaagaccatcgtgtaccaccttgatgagggcgtgtatgggatcttcaactcagtcctgtttgacaacatctgccctacccccatcctgcagaagaaaccatccacggagcagcccctgtacagcagcagcctgtggggcccggcggttgatggctgtgattgcgtggctgagggcctgtggctgccgcaactacacgtaggggactggctggtctttgacaacatgggygcctacactgtgggcatgggttcccccttttgggggacccaggcctgccacatcacctatgccatgtcccgggtggcctgggaagcgctgcgaaggcagctgatggctgcagaacaggaggatgacgtggagggtgtgtgcaagcctctgtcctgcggctgggagatcacagacaccctgtgcgtgggccctgtyttcaccccagcgagcatcatgtgagtgggcctcgttccccccggagaatcccagcggggcctcagagatgcatytgggagaggtggggaagatggcaggcaagggtacccttggccaggactytggtgcccaccctgccacccccgcgctccacctgcagtgtttctgccctgtaaataggaccagtcttacactcgctgtagttcaagtatgcaacataaatcctgttccttccagctgtgtctgcctcctctgcagtgcaaggggcctggtcagccaggtgtgggggtgttcttggggtctcctttggtctccttcccacctttgtaaatataatgcaaataaataaatatttaggtttttaaaaactgca

SEQ ID NO: 6793 - DNA, 1980 bp, Homo sapiens
ggcggggcctgggcggggttatataagccagcggcgggcggaaggcggggcgtgggggtctgtggctgctgggctggcggggcgcaggccgcgggacccgagcccggggaarcgagagagcggaggcgccgaggatccgattcaytccctggggasacctatgggccgaagccgtgtaaatgcgttttaaggcgagcctcggctccgcaactgccactcctcctcggggtgttgcacaagtttcgaggtcaccggcgacccccscyagcagcgcgcctggctctggcccccgcgaaggaggacggagtttgtgtgttgcatactttctaaggcggcggctgcagcagmggctccatccagcccgtcagctcctcctgcaaggcatggctggctacctgagtgaatcggactttgtgatggtggaggagggcttcagtacccgagacctgctgaaggaactcactctgggggcctcacaggccaccacggacgaggtagctgccttcttcgtggctgacctgggtgccatagtgaggaagcacttttgctttctgaagtgcctgccacgagtccggcccttttatgctgtcaagtgcaacagcagcccaggtgtgctgaaggttctggcccagctggggctgggctttagctgtgccaacaaggcagagatggagttggtccagcatattggaatccctgccagtaagatcatctgcgccaacccctgtaagcaaattgcacagatcaaatatgctgccaagcatgggatccagctgctgagctttgacaatgagatggagctggcaaaggtggtaaagagccaccccagtgccaattttcacattggcagtggctgtcctgaccctcaggcctatgctcagtccatcgcagacgcccggctcgtgtttgaaatgggcaccgagctgggtcacaagatgcacgttctggaccttggtggtggcttccctggcacagaaggggccaaagtgagatttgaagagattgcttccgtgatcaactcagccttggacctgtacttcccagagggctgtggcgtggacatctttgctgagctggggcgctactacgtgacctcggccttcactgtggcagtcagcatcattgccaagaaggaggttctgctagaccagcctggcagggaggaggaaaatggttccacctccaagaccatcgtgtaccaccttgatgagggcgtgtatgggatcttcaactcagtcctgtttgacaacatctgccctacccccatcctgcagaagaaaccatccacggagcagcccctgtacagcagcagcctgtggggcccggcggttgatggctgtgattgcgtggctgagggcctgtggctgccgcaactacacgtaggggactggctggtctttgacaacatgggygcctacactgtgggcatgggttcccccttttgggggacccaggcctgccacatcacctatgccatgtcccgggtggcctgggaagcgctgcgaaggcagctgatggctgcagaacaggaggatgacgtggagggtgtgtgcaagcctctgtcctgcggctgggagatcacagacaccctgtgcgtgggccctgtyttcaccccagcgagcatcatgtgagtgggcctcgttccccccggagaatcccagcggggcctcagagatgcatytgggagaggtggggaagatggcaggcaagggtacccttggccaggactytggtgcccaccctgccacccccgcgctccacctgcagtgtttctgccctgtaaataggaccagtcttacactcgctgtagttcaagtatgcaacataaatcctgttccttccagctgtgtctgcctcctctgcagtgcaaggggcctggtcagccaggtgtgggggtgttcttggggtctcctttggtctccttcccacctttgtaaatataatgcaaataaataaatatttaggtttttaaaaactgca

SEQ ID NO: 6794 - DNA, 2115 bp, Homo sapiens
ggcggggcctgggcggggttatataagccagcggcgggcggaaggcggggcgtgggggtctgtggctgctgggctggcggggcgcaggccgcgggacccgagcccggggaarcgagagagcggaggcgccgaggatccgattcaytccctggggasacctatgggccgaagccgtgtaaatgcgttttaaggcgagcctcggctccgcaactgccactcctcctcggggtgttgcacaagtttcgaggtcaccggcgacccccscyagcagcgcgcctggctctggcccccgcgaaggaggacggagtttgtgtgttgcatactttctaaggcggcggctgcagcagmggctccatccagcccgtcagctcctcctgcaaggcatggctggctacctgagtgaatcggactttgtgatggtggaggagggcttcagtacccgagacctgctgaaggaactcactctgggggcctcacaggccaccacggacgaggtagctgccttcttcgtggctgacctgggtgccatagtgaggaagcacttttgctttctgaagtgcctgccacgagtccggcccttttatgctgtcaagtgcaacagcagcccaggtgtgctgaaggttctggcccagctggggctgggctttagctgtgccaacaaggcagagatggagttggtccagcatattggaatccctgccagtaagatcatctgcgccaacccctgtaagcaaattgcacagatcaaatatgctgccaagcatgggatccagctgctgagctttgacaatgagatggagctggcaaaggtggtaaagagccaccccagtgccaagatggttctgtgcattgctaccgatgactcccactccctgagctgcctgagcctaaagtttggagtgtcactgaaatcctgcagacacctgcttgaaaatgcgaagaagmaccatgtggaggtggtgggtgtgagttttcacattggcagtggctgtcctgaccctcaggcctatgctcagtccatcgcagacgcccggctcgtgtttgaaatgggcaccgagctgggtcacaagatgcacgttctggaccttggtggtggcttccctggcacagaaggggccaaagtgagatttgaagagattgcttccgtgatcaactcagccttggacctgtacttcccagagggctgtggcgtggacatctttgctgagctggggcgctactacgtgacctcggccttcactgtggcagtcagcatcattgccaagaaggaggttctgctagaccagcctggcagggaggaggaaaatggttccacctccaagaccatcgtgtaccaccttgatgagggcgtgtatgggatcttcaactcagtcctgtttgacaacatctgccctacccccatcctgcagaagaaaccatccacggagcagcccctgtacagcagcagcctgtggggcccggcggttgatggctgtgattgcgtggctgagggcctgtggctgccgcaactacacgtaggggactggctggtctttgacaacatgggygcctacactgtgggcatgggttcccccttttgggggacccaggcctgccacatcacctatgccatgtcccgggtggcctgggaagcgctgcgaaggcagctgatggctgcagaacaggaggatgacgtggagggtgtgtgcaagcctctgtcctgcggctgggagatcacagacaccctgtgcgtgggccctgtyttcaccccagcgagcatcatgtgagtgggcctcgttccccccggagaatcccagcggggcctcagagatgcatytgggagaggtggggaagatggcaggcaagggtacccttggccaggactytggtgcccaccctgccacccccgcgctccacctgcagtgtttctgccctgtaaataggaccagtcttacactcgctgtagttcaagtatgcaacataaatcctgttccttccagctgtgtctgcctcctctgcagtgcaaggggcctggtcagccaggtgtgggggtgttcttggggtctcctttggtctccttcccacctttgtaaatataatgcaaataaataaatatttaggtttttaaaaactgca

SEQ ID NO: 6795 - DNA, 1747 bp, Homo sapiens
cagcagggtagctctgtggccagtactgaacctgggtcaggtacttggaaggatcacggatggcatgcacagggtgcgagctggatgggrtctcacattcrtccacttcttgtcattcaggacgaggtagctgccttcttcgtggctgacctgggtgccatagtgaggaagcacttttgctttctgaagtgcctgccacgagtccggcccttttatgctgtcaagtgcaacagcagcccaggtgtgctgaaggttctggcccagctggggctgggctttagctgtgccaacaaggcagagatggagttggtccagcatattggaatccctgccagtaagatcatctgcgccaacccctgtaagcaaattgcacagatcaaatatgctgccaagcatgggatccagctgctgagctttgacaatgagatggagctggcaaaggtggtaaagagccaccccagtgccaagatggttctgtgcattgctaccgatgactcccactccctgagctgcctgagcctaaagtttggagtgtcactgaaatcctgcagacacctgcttgaaaatgcgaagaagmaccatgtggaggtggtgggtgtgagttttcacattggcagtggctgtcctgaccctcaggcctatgctcagtccatcgcagacgcccggctcgtgtttgaaatgggcaccgagctgggtcacaagatgcacgttctggaccttggtggtggcttccctggcacagaaggggccaaagtgagatttgaagagattgcttccgtgatcaactcagccttggacctgtacttcccagagggctgtggcgtggacatctttgctgagctggggcgctactacgtgacctcggccttcactgtggcagtcagcatcattgccaagaaggaggttctgctagaccagcctggcagggaggaggaaaatggttccacctccaagaccatcgtgtaccaccttgatgagggcgtgtatgggatcttcaactcagtcctgtttgacaacatctgccctacccccatcctgcagaagaaaccatccacggagcagcccctgtacagcagcagcctgtggggcccggcggttgatggctgtgattgcgtggctgagggcctgtggctgccgcaactacacgtaggggactggctggtctttgacaacatgggygcctacactgtgggcatgggttcccccttttgggggacccaggcctgccacatcacctatgccatgtcccgggtggcctgggaagcgctgcgaaggcagctgatggctgcagaacaggaggatgacgtggagggtgtgtgcaagcctctgtcctgcggctgggagatcacagacaccctgtgcgtgggccctgtyttcaccccagcgagcatcatgtgagtgggcctcgttccccccggagaatcccagcggggcctcagagatgcatytgggagaggtggggaagatggcaggcaagggtacccttggccaggactytggtgcccaccctgccacccccgcgctccacctgcagtgtttctgccctgtaaataggaccagtcttacactcgctgtagttcaagtatgcaacataaatcctgttccttccagctgtgtctgcctcctctgcagtgcaaggggcctggtcagccaggtgtgggggtgttcttggggtctcctttggtctccttcccacctttgtaaatataatgcaaataaataaatatttaggtttttaaaaactgca

SEQ ID NO: 6796 - DNA, 1059 bp, Homo sapiens
atgcatcctctctcacacagtgaccctggcccagcccccttgctgagcgctgccctsagggcctggaagagaatcttctggcggcagatcctacttacacttggcctcttaggcctgtttctgtatggcctccctaaattcaggcatctggaagccctcatccccatgggcgtctgcccttcggccacaatgtcccagctgagagacaacttcacaggtgccctgcgtccctgggcccggcctgaagttctgacctgtaccccctggggggctcccattatttgggatggctctttcgacccagatgtggccaagcaagaggctagacagcagaacctcaccattgggctgactatctttgctgtaggcagatacctggagaagtacctggagcgcttcctggagacggcggagcagcacttcatggcgggccagagcgtgatgtactacgtgttcaccgagcttccgggagcggtgccccgcgtggcgctgggcccgggacgccggctgcccgtggagcgcgtggcgcgcgagcggcgctggcaakacgtgtcgatggcgcgcatgcgcacgttgcacgcggcgctgggcgggctgccgggccgcgaggcgcacttcatgttctgmatggacgtggaccagcacttcagcggcacttttgggcccgaggcgctggccgagtcggtggcgcagctgcactcctggcactaccactggccgtcgtggctgctgcccttcgaacgcgacgcgcattcggccgccgcgatggcgtggggccagggcgacttctataaccacgcggcggtgttcgggggcagcgtggcggcgctgcgcgggctgacggcgcactgtgcggggggcctggactgggaccgcgcgcgcggcctggaggcgcgctggcacgacgagagccacctcaacaagttcttctggctgcacaagcccgccaaggtgctgtcgcccgagttctgctggagcccggacatcggcccgcgggccgagatccgccgcccgcgactgctgtgggcgcccaaggggtaccggctgctgcggaactag

SEQ ID NO: 6797 - DNA, 3072 bp, Homo sapiens
cccccastgggcaggggactgcagacggcgctccccgactctcaagacgaccagggagcttcccttttcctcagcggggtgaggggcatctgtcgcccgccgacttggaggtggaggggcagggacattccctcgccatcacctcaggagctagaacgcgcccttctcgcagcagggcgtgggcctcccaatccctccaaggggcggacggcgtgcgcaaccccctggagaagcaacaggcgcccccatccccctccaagccgggtaacgccgaccccctcgtccctcccgctcttcacctccggaagccgggccaaagcctgggcgaacgactgcgcctcactccgccccctgcgccattttatcgccccctccccgacctcccctaccccgagtcagccgggccaacaccagggggagggcaaaccagcagtgattggcaggaaaccgtcccgcctctaggagggttgtgccccgctcargcgcctcagccccgccctccgcaccgcccaccgtgcccactggctccaccttttcccgtctcatcgacctgctcgactctctgctgctcctcactttttccggccgctgccggaggggtccaggccgagtaagcggagcgccgagcccagctgatgcaacctggctggactcgcgtgacagttcccggcacgcggcggcgacggtgacccaggaaggggctctggtgccgggctgagcgggggaagcaggggtagcggagccatgggggacgctcccagccctgaagagaaactgcaccttatcacccggaacctgcaggaggttctgggggaagagaagctgaaggagatactgaaggagcgggaacttaaaatttactggggaacggcaaccacgggcaaaccacatgtggcttactttgtgcccatgtcaaagattgcagacttcttaaaggcagggtgtgaggtaacaattctgtttgcggacctccacgcatacctggataacatgaaagccccatgggaacttctagaactccgagtcagttactatgagaatgtgatcaaagcaatgctggagagcattggtgtgcccttggagaagctcaagttcatcaaaggcactgattaccagctcagcaaagagtacacactagatgtgtacagactctcctccgtggtcacacagcacgattccaagaaggctggagctgaggtggtaaagcaggtggagcaccctttgctgagtggcctcttataccccggactgcakgctttggatgaagagtatttaaaagtagatgcccaatttggaggcattgatcagagaaagattttcacctttgcagagaagtacctccctgcacttggctattcaaaacgggtccatctgatgaatcctatggttccaggattaacaggcagcaaaatgagctcttcagaagaggagtccaagattgatctccttgatcggaaggaggatgtgaagaaaaaactgaagaaggccttctgtgagccaggaaatgtggagaacaatggggttctgtccttcatcaagcatgtcctttttccccttaagtccgagtttgtgatcctacgagatgagaaatggggtggaaacaaaacctacacagcttacgtggacctggaaaaggactttgctgctgaggttgtacatcctggagacctgaagaattctgttgaagtcgcactgaacaagttgctggatccaatccgggaaaagtttaatacccctgccctgaaaaaactggccagcgctgcctacccagatccctyaaagcagaagccaatggccaaaggccctgccaagaattcagaaccagwggaggtcatcccatcccggctggatatccgtgtggggaaaatcatcactgtggagaagcacccagatgcagacagcctgtatgtagagaagattgacgtgggggaagctgaaccacggactgtggtgagcggcctsgtacagttcgtgcccaaggaggaactgcaggacaggctggtagtggtgctgtgcaacctgaaaccccagaagatgagaggagtcgagtcccaaggcatgcttctgtgtgcttctatagaagggataaaccgccaggttgaacctctggaccctccggcaggctctgctcctggtgagcacgtgtttgtgaagggctatgaaaagggccaaccagatgaggagctcaagcccaagaagaaagtcttcgagaagttgcaggctgacttcaaaatttctgaggagtgcatcgcacagtggaagcaaaccaacttcatgaccaagctgggctccatttcctgtaaatcgctgaaaggggggaacattagctagccagcccagcatcttccccccttcttccaccactgagtcatctgctgtctcttcagtctgctccatccatcacccatttacccatctctcaggacacggaagcagcgggtttggactctttattcggtgcagaactcggcaaggggcagcttaccctccccagaacccaggatcatcctgtctggctgcagtgagagaccaacccctaacaagggctgggccacagcagggagtccagccctaccttyttcccttggcagctggagaaatctggtttcaatataactcatttraaaatttatgccacagtccttataattggaaaaatactggtgcccaggttttcttggagttatccaagcagctgcgcccctagctgggatctggtacctggactaggctaattacagcttctccccaacaggaaactgtgggatttgaaaaggaaagggaagggaaaacagagaacctagtggtctaccaagtggttggcaactttcccaatgtctgcttactctgaggcttggcactgggggccagggcctgccccagggctcctggaatttcccttgatccagctaggctgggacactccctaaatcagctgcgtgttgttagcatcaggcagaatgaatggcagagagtgattytgtcttcataragggtggggtacttctccataaggcatctcagtcaaatccccatcactgtcataaattcaaataaaatgtctgaacaagg

SEQ ID NO: 6798 - DNA, 1937 bp, Homo sapiens
cccccastgggcaggggactgcagacggcgctccccgactctcaagacgaccagggagcttcccttttcctcagcggggtgaggggcatctgtcgcccgccgacttggaggtggaggggcagggacattccctcgccatcacctcaggagctagaacgcgcccttctcgcagcagggcgtgggcctcccaatccctccaaggggcggacggcgtgcgcaaccccctggagaagcaacaggcgcccccatccccctccaagccgggtaacgccgaccccctcgtccctcccgctcttcacctccggaagccgggccaaagcctgggcgaacgactgcgcctcactccgccccctgcgccattttatcgccccctccccgacctcccctaccccgagtcagccgggccaacaccagggggagggcaaaccagcagtgattggcaggaaaccgtcccgcctctaggagggttgtgccccgctcargcgcctcagccccgccctccgcaccgcccaccgtgcccactggctccaccttttcccgtctcatcgacctgctcgactctctgctgctcctcactttttccggccgctgccggaggggtccaggccgagtaagcggagcgccgagcccagctgatgcaacctggctggactcgcgtgacagttcccggcacgcggcggcgacggtgacccaggaaggggctctggtgccgggctgagcgggggaagcaggggtagcggagccatgggggacgctcccagccctgaagagaaactgcaccttatcacccggaacctgcaggaggttctgggggaagagaagctgaaggagatactgaaggagcgggaacttaaaatttactggggaacggcaaccacgggcaaaccacatgtggcttactttgtgcccatgtcaaagattgcagacttcttaaaggcagggtgtgaggtaacaattctgtttgcggacctccacgcatacctggataacatgaaagccccatgggaacttctagaactccgagtcagttactatgagaatgtgatcaaagcaatgctggagagcattggtgtgcccttggagaagctcaagttcatcaaaggcactgattaccagctcagcaaagagtacacactagatgtgtacagactctcctccgtggtcacacagcacgattccaagaaggctggagctgaggtggtaaagcaggtggagcaccctttgctgagtggcctcttataccccggactgcakgctttggatgaagagtatttaaaagtagatgcccaatttggaggcattgatcagagaaagattttcacctttgcagagaagtacctccctgcacttggctattcaaaacgggtccatctgatgaatcctatggttccaggattaacaggcagcaaaatgagctcttcagaagaggtaagttgccagctgagacttgaatttagaaatcttcagcctcaatggagagattgaggactgaaaagaacagtgacctggctaactagaattctccaatatttgagttagaaggagscttacaccattcaattagtttagtggttcttgagtatcaaaggatccagagcagtcctgatgagatctaatcataacttaatggtttttgctgctgataaaaaaataaaagcaaaagtaatgtctttgttcatacgactgtgatgaaattcagccttattaatgagagcactatggttgcatttcactaattagcattttgattcctagggtaatacttgatatcactaatattatgatatcttttaatatttaagagtccctcttgagctcgtgtacttgagggaaagttcactttggttctgatcattagaacgtggaaatccaaagatgtgaaaggttgagttytgggttcccaaacatggcttaccttcagaatcatytagggaatt

SEQ ID NO: 6799 - DNA, 2994 bp, Homo sapiens
cccccastgggcaggggactgcagacggcgctccccgactctcaagacgaccagggagcttcccttttcctcagcggggtgaggggcatctgtcgcccgccgacttggaggtggaggggcagggacattccctcgccatcacctcaggagctagaacgcgcccttctcgcagcagggcgtgggcctcccaatccctccaaggggcggacggcgtgcgcaaccccctggagaagcaacaggcgcccccatccccctccaagccgggtaacgccgaccccctcgtccctcccgctcttcacctccggaagccgggccaaagcctgggcgaacgactgcgcctcactccgccccctgcgccattttatcgccccctccccgacctcccctaccccgagtcagccgggccaacaccagggggagggcaaaccagcagtgattggcaggaaaccgtcccgcctctaggagggttgtgccccgctcargcgcctcagccccgccctccgcaccgcccaccgtgcccactggctccaccttttcccgtctcatcgacctgctcgactctctgctgctcctcactttttccggccgctgccggaggggtccaggccgagtaagcggagcgccgagcccagctgatgcaacctggctggactcgcgtgacagttcccggcacgcggcggcgacggtgacccaggaaggggctctggtgccgggctgagcgggggaagcaggggtagcggagccatgggggacgctcccagccctgaagagaaactgcaccttatcacccggaacctgcaggaggttctgggggaagagaagctgaaggagatactgaaggagcgggaacttaaaatttactggggaacggcaaccacgggcaaaccacatgtggcttactttgtgcccatgtcaaagattgcagacttcttaaaggcagggtgtgaggtaacaattctgtttgcggacctccacgcatacctggataacatgaaagccccatgggaacttctagaactccgagtcagttactatgagaatgtgatcaaagcaatgctggagagcattggtgtgcccttggagaagctcaagttcatcaaaggcactgattaccagctcagcaaagagtacacactagatgtgtacagactctcctccgtggtcacacagcacgattccaagaaggctggagctgaggtggtaaagcaggtggagcaccctttgctgagtggcctcttataccccggactgcakgctttggatgaagagtatttaaaagtagatgcccaatttggaggcattgatcagagaaagattttcacctttgcagagaagtacctccctgcacttggctattcaaaacgggtccatctgatgaatcctatggttccaggattaacaggcagcaaaatgagctcttcagaagaggagtccaagattgatctccttgatcggaaggaggatgtgaagaaaaaactgaagaaggccttctgtgagccaggaaatgtggagaacaatggggttctgtccttcatcaagcatgtcctttttccccttaagtccgagtttgtgatcctacgagatgagaaatggggtggaaacaaaacctacacagcttacgtggacctggaaaaggactttgctgctgaggttgtacatcctggagacctgaagaattctgttgaagtcgcactgaacaagttgctggatccaatccgggaaaagtttaatacccctgccctgaaaaaactggccagcgctgcctacccagatccctyaaagcagaagccaatggccaaaggccctgccaagaattcagaaccagwggaggtcatcccatcccggctggatatccgtgtggggaaaatcatcactgtggagaagcacccagatgcagacagcctgtatgtagagaagattgacgtgggggaagctgaaccacggactgtggtgagcggcctsgtacagttcgtgcccaaggaggaactgcaggacaggctggtagtggtgctgtgcaacctgaaaccccagaagatgagaggagtcgagtcccaaggcatgcttctgtgtgcttctatagaagggataaaccgccaggttgaacctctggaccctccggcaggctctgctcctggtgagcacgtgtttgtgaagggctatgaaaagggccaaccagatgaggagctcaagcccaagaagaaagtcttcgagaagttgcaggctgacttcaaaatttctgaggagtgcatcgcacagtggaagcaaaccaacttcatgaccaagctgggctccatttcctgtaaatcgctgaaaggggggaacattagctagccagcccagcatcttccccccttcttccaccactgagtcatctgctgtctcttcaaactcggcaaggggcagcttaccctccccagaacccaggatcatcctgtctggctgcagtgagagaccaacccctaacaagggctgggccacagcagggagtccagccctaccttyttcccttggcagctggagaaatctggtttcaatataactcatttraaaatttatgccacagtccttataattggaaaaatactggtgcccaggttttcttggagttatccaagcagctgcgcccctagctgggatctggtacctggactaggctaattacagcttctccccaacaggaaactgtgggatttgaaaaggaaagggaagggaaaacagagaacctagtggtctaccaagtggttggcaactttcccaatgtctgcttactctgaggcttggcactgggggccagggcctgccccagggctcctggaatttcccttgatccagctaggctgggacactccctaaatcagctgcgtgttgttagcatcaggcagaatgaatggcagagagtgattytgtcttcataragggtggggtacttctccataaggcatctcagtcaaatccccatcactgtcataaattcaaataaaatgtctgaacaag

SEQ ID NO: 6800 - DNA, 5895 bp, Homo sapiens
cgacgggcccgcacggggcggggaccgcgcgcgcctgctgggcctacggctgtggggcgcgcagagtccacctggcggccaagggcgctggcgaccgctgaagctcctgggggtgttcggggtccgggctgcgcctgtgcccgcgggaaggctgggcgcttcccacacacagaccccgctccgggccagccccgcagggagactaccagggctggcggtagctgggcgtggtcgggtcgggggcggctgtgggcggccggcaggcagcgcgcggggcagccctcggcagacggccaatggcggcggtgctcggggcgctcggggcgacgcggcgcttgttggcggcgctgcgaggccagagcctagggctagcggccatgtcatcaggtactcacaggttgactgcagaggagaggaaccaagctatacttgaccttaaagcagcaggatggtcggaattaagtgagagagatgccatctacaaagaattctccttccacaattttaatcaggcatttggctttatgtcccgagttgccctacaagcagagaagatgaatcatcacccagaatggttcaatgtatacaacaaggtccagataactctcacctcacatgactgtggtgaactgaccaaaaaagatgtgaagctggccaagtttattgaaaaagcagctgcttctgtgtgatttcttccaaaatacataagtctgagaggctaaacttgatggctgtgttaacatatgtcacgtgtagcacagtggagaaagcaggatatggctcataatgacagtggtgaagacctgcgaatgaagttgctagttatcacctacattagggtttgacataggtctatgttatgggtcgctgcatctgctggaactcacagactttactatagagaatcaaagatcccgtatccgaagtctatggaaatgctcatggtggtaaattccaacagaatgaaacaccaaacttgcttaaagtaactcacgtttcaatttgaaagagatattgtcaaaattggaggcccccaggttcctgtctgttccaaatctttgcatgatgacagtggtttctctgatgtggtaagctttggctttcttctgttttctttctaaaagatcactggagtagagaggagttaaacagacatgacctttgacctcttgcatgacctccacagatagcaaaccgggccgacacatggttgacgatgtccttttctacaatgaagttaatgaaagttctgaaaatartgattactttctgacattgataggatttaggaaacctctggataaatagcttaagcatggctgtttatgtttttgctatagacaaaaagcagcagcatgtacattgtatttggacacaagcctgcctcggttaatatattgaactattggaccactagggttagtagggagcggtctgtacactttctgattcagcattcagaaacattctaggtggactctgtagctttcagttttgtaaagttatcagaaaaacatcgggagggtttggccatcatatgtgagctttgtgtttcaatgccagttactcaggattagtaaattaatgactgtccagaggacttcagggtcaccaagctgctgcacctgccattggctgactctccccggctatctgtggctgagatggtgctgcttaggtcacgcagagcatgagctgctgctgaaagggcacaggagatggcccttgggcttctcatcccaggatgcctgccctgcccaccaatccatgagaagatatgtatgatttcagtaggccctggatcagcttgtcacctctggtttcctgtttgctttccactcactcagctggagtttcatttccagactaaagtcttcatcattggcttcagaaacagcattcatctgtggctgtgctgatgtagtacaccaagaacaactgggctcttctctgtcactttcagtgggctaccttccctcacctctccaagcagcatgaaagaattctttacatttttaatctcttttttgtttttccctgaaagtatgctttggtgcttaaagagagaagtcacaaaagtatactactgagtttcctggagatgaaatcctgttgtccctagctatgtgaatgagcacagggatccctgatgccattattttgtatattcatacggcacacacttactgagggccttctgtgtgccctaggggattgagcacagtgacatatcagggcaggtagaaacagatggagagctgatgcgggctgtcttagagcagctgccccaggaggcccctgtggatggatgttgggcaggagccctgagacgttaggggcatataactaaaggacatagcaggagttataggaggagctgatccctgagggaaacaatgaagacggagaagatggggctaaagtttgaattgtggggacattaatcacagtgattcttaaaactttgctgttgatgattttaaatggagaaaatgagtacgtaagatgttatttcccagttcagtatattggttgcccacaaagtattttcctaccatgaatggtcatatatacttgttgtagaataccagggacagcagagatggtggggtagttacttccttttcttacagcccaagaactttggtgtccaggagattgaccaatttagccactgagcatttaatacaacacagggctacccagatcccactgtcctgatttgccctgaaagccaaaggagttaggagaaggtgagtggggagaatatattaatcctgagagttgaacagagcaaaaatccctattacttttgtacttaaaacatctctgccacatgtgctcactctttatattctgtttaggtggtttatatgtgcacatcccatcctatgcctgcagttagccaactcagggtttatattgcctcctttctttttttctttttttttttttttttaagagatggggtctcattctatcatgcagactggagtgcagtggtgtgatcacagctcattgtaacctccaacgcctggactaaagtgatcctcctaccttggcctctctggtagctgggactacaggtgcatgccaccacacccacctaattttttttatttttattttttgtagagacagtctcactatcttgctcaggctagtcctgaactcctgggctcaagttatcttgctgcctcagcctcccatgggtaatttttatttcctttttttttttttttggagatggagtttcgctcttgtcgcccaggctggagtgcaatggcacgatcttggctcactgcagtctccacctcctgggttcaagtgattctccatcctcagcctcctgagtagctgagattacaggcaactgccaccatgcgcggctaatttatgtatttttttttagtaagagatggggtttcaccatgttggccagactagtcttaaactcctgacctcaagcgacctgcctgccttggcctcccaaagtgctgggattacaggcatgagccgctatgcctcgtcgctgatttttatttcttattttttttttagagatgggggtctcactatgttgctcaggctgatctcaaactcctggcctcaagtgatcctcccaccttagcctcccaagttgctgggattataagtgtgagccactatccctacctcactattaccttctttgcttctcttgttttcttttgttctaagtcaaacccatcacaatcttttcttgtccttccaggtgttttccagtgctgtgccctggatgtgctctctttctcttagagcccagagaacttgcttttcccccttatatatgacccttaactttttctaacacattattaagggcctgtgtctatcagctgggggcacttcttgaagggagggcctttgtgtggtctgtttctagtgacttccagctttaacccagagcctcatgattgctgggtgcccatagcctttttgctgaatggaggcactcagtctccttgggaagagagaatccatgatagacccacttgggagctccccacttcaggggcctacacactggtaatgcaacagaatgcccaagagtgacctcataaagcaaggattcccttcgtggccccttctctgctgcctctcagaatccagacgctaaggaaaatccstaagcagagattttctgttggatgctaaaagcaaggaataaragttgaaaatttggaaaatgtctcaacaccgtcaccagcgccactcgagagtcatttctagttcaccagttgacactacatcggtgggattttgcccaacattcaagaaatttaagtaaatattatctatctccattgcctgttaagaaatgtgctagtagaagtgtgagggcagggtgtcagtgttctctcagcctcttccctcagatactcgtctgcttaccaaaataagttgcatgtccttgacaatctggtttctatgattggtgaggctggcatgctattacctttatgtgccctgtagacttgaatgaccagtttgaccagtttgactgttagataatctgaaggcttttctctttttttataatagaccccatctcaaatcagataatgaaaattacatatcttgatatattagaaaagtatatacattctggctgggcacggtggctcacacctgtaatccctgcactttgagaggctggggcggatcacttgaggtcaggagtttgagaccagcctggccaacgtggcgaaaccccatctctactaaaaatacacagattagcccggagtgatggtgtgcacctgttgtcccagctactcaggatgctgaggcaggagaatccctttaacctggggggcgaaggttgcagtgagccaagattgcaccactgcactccagcctgggtgacagaacgagactctgtctcagaaaaaaaaaaaaagaaaaggaaaaagaaaaatatatattctatatttttttaacttatgagaatgtgttcatttcatttgtaacatataatgggaaacagtaatacgtactctgagaaaaattgcaaagcacagataaatggaaataaacaggaaaaagaatcacctataacctcaccatccatagacagacactgttaaaattttggcatatttcctgctgattttttctactgctgatttttgcacaggtgagataattttgaacagagaattttgtatctttggtttttgtgttttgctgcacacaaaaacaaaagatataaaaatggatcataaacatttttctaaatcctgaaaaatgcatagacatattttagtgcctgtatttcacaagatggacataccataatttacttacacagtcctttttgttagatgtttaagttgttttcaagcttctcagtgctggaaaaaatactgagatagacatgtttagttgaagttatttcatttcaggttatattatcttgggtcagagaatgaatggttctcaggcttttcaaaagagctggtcagtttttatgcctctggcagtttttgagagtgctcaatcatactacactgttgccagcattagatcttatcacatttaagtcattgctaattttataaacaaaaacaatggttttactttgcatctccctgattggtattgctgtagaacatatttggagaagtttgtttgtctttggtgtttatttcatgaatagattgtgtgcccattttctcttggggtattcagttttttattaytgatgtgagcatgtgtatgggtgattatttgatgattatcagttttgcttagtagactggcaatatttagtcttgctgtcactgtgttcccagtgcctactagattgcttgatatgtagttgccactcaataaagatttgttgagtcaatg

SEQ ID NO: 6801 - DNA, 1017 bp, Homo sapiens
cgacgggcccgcacggggcggggaccgcgcgcgcctgctgggcctacggctgtggggcgcgcagagtccacctggcggccaagggcgctggcgaccgctgaagctcctgggggtgttcggggtccgggctgcgcctgtgcccgcgggaaggctgggcgcttcccacacacagaccccgctccgggccagccccgcagggagactaccagggctggcggtagctgggcgtggtcgggtcgggggcggctgtgggcggccggcaggcagcgcgcggggcagccctcggcagacggccaatggcggcggtgctcggggcgctcggggcgacgcggcgcttgttggcggcgctgcgaggccagagcctagggctagcggccatgtcatcaggtactcacaggttgactgcagaggagaggaaccaagctatacttgaccttaaagcagcaggatggtcggaattaagtgagagagatgccatctacaaagaattctccttccacaattttaatcaggaggaacgatgatgaatgtcgggcatttgtgaagagagtcataatgagccgtttctttaagataattatgattagcactgtcacatygaatgcgttttttatggccttgtggaccagttatgacataaggtaccgcttgttcagacttcttgagttctcggagatcttctttgtgtccatctgcacatctgagttgtccatgaaggtctatgtggaccccatcaactactggaagaacggctacaacctgctggatgtgatcattatcatcgttatgtttttaccctatgccctccgccagctcatgggcaaacagttcacttacctgtatatcgctgatggcatgcagtccctgcgcatcctcaagcttatcggctatagccagggcatccgggtgagtgcactgggggtgtcatggtgctgggagggcaggccgtaggcccatttgcccccaagacactaaggaaataatgactctmctaccatcttccagttgttgagtcca

SEQ ID NO: 6802 - DNA, 1289 bp, Homo sapiens
cgacgggcccgcacggggcggggaccgcgcgcgcctgctgggcctacggctgtggggcgcgcagagtccacctggcggccaagggcgctggcgaccgctgaagctcctgggggtgttcggggtccgggctgcgcctgtgcccgcgggaaggctgggcgcttcccacacacagaccccgctccgggccagccccgcagggagactaccagggctggcggtagctgggcgtggtcgggtcgggggcggctgtgggcggccggcaggcagcgcgcggggcagccctcggcagacggccaatggcggcggtgctcggggcgctcggggcgacgcggcgcttgttggcggcgctgcgaggccagagcctagggctagcggccatgtcatcaggtactcacaggttgactgcagaggagaggaaccaagctatacttgaccttaaagcagcaggatggtcggaattaagtgagagagatgccatctacaaagaattctccttccacaattttaatcaggcatttggctttatgtcccgagttgccctacaagcagagaagatgaatcatcacccagaatggttcaatgtatacaacaaggtccagataactctcacctcacatgactgtggtgaactgaccaaaaaagatgtgaagctggccaagtttattgaaaaagcagctgcttctgtgtgatttcttccaaaatacatgaggaacgatgatgaatgtcgggcatttgtgaagagagtcataatgagccgtttctttaagataattatgattagcactgtcacatygaatgcgttttttatggccttgtggaccagttatgacataaggtaccgcttgttcagacttcttgagggtggtggtacagccattgaaaataacatgtatgaaagcccctggttaactgtgaaactgagaaattattaacacttctgggaactccactgaaggtgccgggaaagatgtgagagagccctgatctctcacctctggctaaccttgaggctctgtgcaagcaggaaatgaaggctgaggcagagtgttctcggagatcttctttgtgtccatctgcacatctgagttgtccatgaaggtctatgtggaccccatcaactactggaagaacggctacaacctgctggatgtgatcattatcatcgttatgtttttaccctatgccctccgccagctcatgggcaaacagttcacttacctgtatatcgctgatggcatgcagtccctgcgcatcctcaagcttatcggctatagccagggcatccgggt

SEQ ID NO: 6803 - DNA, 1914 bp, Homo sapiens
attgcagggctagaagtggccctcacagacctccagagctscagaaataatgtgcggcaccacacggaggagatcactgtggaccacctgcttgttcgccggggccaggccttcaacctcaccctgtacttcaggaaccggagcttccagccaggcctggacaacatcatcttcgtggttgaaactgaggatgctgtctacttggacagtgaaccccagaggcaggagtatgtcatgaatgattatggcttcatctaccaaggcagcaagaactggatccgcccatgtccctggaactatggacagtttgaagacaaaatcatagacatctgcctgaagctgctagacaagagcctgcacttccagactgacccagccacagactgtgctctgcggggaagccccgtctaygtcagcagagtggtgtgtgccatgatcaacagcaatgatgataatggggtgctcaatggaaastggagtgagaattacacagacggcgccaaccctgcggagtggacgggcagcgtggccatcctgaagcagtggaacgccacaggctgccagcccgtgcgctacgggcaatgctgggtctttgctgccgtcatgtgcacagtgatgaggtgtctggggatccctacccgtgtgatcaccaacttcgactctggccacgatacagatggaaacctgatcatagatgagtattatgacaayacaggcaggattttggggaataagaagaaggatactatctggaacttccatgtctggaatgagtgctggatggcccggaaggatctgccccctgsatatggaggctggcaggtgctggacgccacacctcaggagatgagcaacggcgtctactgctgtggccctgcctctgtcagagccatcaaagaaggagaagtggacctgaactatgacacgccctttgtgttttcgatggtgaatgctgactgcatgtcctggctcgtccagggagggaaggagcagaagcttcaccaggacacgagttctgttggcaattttatcagcacaaagagcatccagagtgacgagcgggatgacatcacagagaactacaagtatgaagaaggatccctccaggagaggcaggtgtttctgaaggctctgcagaagctgaaggctagaagcttccatggctcccaaagaggagcagagttgcaaccttccaggcccacatcactgagccaggacagccctcggagcctgcatacaccttcccttcgacccagtgatrtggtgcaagtctccctgaaattcaagctgctcgacccgcccaacatgggccrggatatatgctttgtcctgctggccctcaacatgtcctcccagttcaaggacctcaaagtgaacctgagtgcccagtctctgctgcacgatggcagccccctgtccccattctggcaggacacagcgttcatcacactctctcctaaagaagcaaagacctacccctgcaaaatctcctattcccagtacagccagtacctgtcaacagacaagctgatccgcatcagtgccctgggtgaagagaaaagcagtcctgagaaaatcctggtgaacaagatcatcaccttatcttatccaagcatcacgattaatgtaggcaggagagcagccgttgtgaaccagccactctccatacaggtgatattttcaaaccccctctcggagcaggttgaggactgtgtgctgactgtggaaggaagtggcctcttcaagaaacagcagaaagtcttccttggagtcctcaaaccccaacaccaagcaagcatcattctggagaccgtccccttcaagagtggacaaaggcagatccaagctaatatgagaagcaacaagtttaaggacattaagggttacaggaatgtttatgtagactttgcatta

SEQ ID NO: 6804 - DNA, 2154 bp, Homo sapiens
gggctagaagtggccctcacagacctccagagctscagaaataatgtgcggcaccacacggaggagatcactgtggaccacctgcttgttcgccggggccaggccttcaacctcaccctgtacttcaggaaccggagcttccagccaggcctggacaacatcatcttcgtggttgaaactggaccgctgccagacctggccttggggactcgggctgtgttcagcctggcacgccatcacagccccagcccctggattgcctggctggagaccaatggggccacctccacagaggtgagcttgtgcgctcctcccacggcggccgtgggtcggtacctcttgaaaatccacatcgactccttccaggggtctgtgacggcctaccagctaggggagttcatcctgcttttcaatccctggtgcccagaggatgctgtctacttggacagtgaaccccagaggcaggagtatgtcatgaatgattatggcttcatctaccaaggcagcaagaactggatccgcccatgtccctggaactatggacagtttgaagacaaaatcatagacatctgcctgaagctgctagacaagagcctgcacttccagactgacccagccacagactgtgctctgcggggaagccccgtctaygtcagcagagtggtgtgtgccatgatcaacagcaatgatgataatggggtgctcaatggaaastggagtgagaattacacagacggcgccaaccctgcggagtggacgggcagcgtggccatcctgaagcagtggaacgccacaggctgccagcccgtgcgctacgggcaatgctgggtctttgctgccgtcatgtgcacagtgatgaggtgtctggggatccctacccgtgtgatcaccaacttcgactctggccacgatacagatggaaacctgatcatagatgagtattatgacaayacaggcaggattttggggaataagaagaaggatactatctggaacttccatgtctggaatgagtgctggatggcccggaaggatctgccccctgsatatggaggctggcaggtgctggacgccacacctcaggagatgagcaacggcgtctactgctgtggccctgcctctgtcagagccatcaaagaaggagaagtggacctgaactatgacacgccctttgtgttttcgatggtgaatgctgactgcatgtcctggctcgtccagggagggaaggagcagaagcttcaccaggacacgagttctgttggcaattttatcagcacaaagagcatccagagtgacgagcgggatgacatcacagagaactacaagtatgaagaaggatccctccaggagaggcaggtgtttctgaaggctctgcagaagctgaaggctagaagcttccatggctcccaaagaggagcagagttgcaaccttccaggcccacatcactgagccaggacagccctcggagcctgcatacaccttcccttcgacccagtgatrtggtgcaagtctccctgaaattcaagctgctcgacccgcccaacatgggccrggatatatgctttgtcctgctggccctcaacatgtcctcccagttcaaggacctcaaagtgaacctgagtgcccagtctctgctgcacgatggcagccccctgtccccattctggcaggacacagcgttcatcacactctctcctaaagaagcaaagacctacccctgcaaaatctcctattcccagtacagccagtacctgtcaacagacaagctgatccgcatcagtgccctgggtgaagagaaaagcagtcctgagaaaatcctggtgaacaagatcatcaccttatcttatccaagcatcacgattaatgtaggcaggagagcagccgttgtgaaccagccactctccatacaggtgatattttcaaaccccctctcggagcaggttgaggactgtgtgctgactgtggaaggaagtggcctcttcaagaaacagcagaaagtcttccttggagtcctcaaaccccaacaccaagcaagcatcattctggagaccgtccccttcaagagtggacaaaggcagatccaagctaatatgagaagcaacaagtttaaggacattaagggttacaggaatgtttatgtagactttgcatta

SEQ ID NO: 6805 - DNA, 2202 bp, Homo sapiens
ggctgccccattgcagggctagaagtggccctcacagacctccagagctscagaaataatgtgcggcaccacacggaggagatcactgtggaccacctgcttgttcgccggggccaggccttcaacctcaccctgtacttcaggaaccggagcttccagccaggcctggacaacatcatcttcgtggttgaaactggaccgctgccagacctggccttggggactcgggctgtgttcagcctggcacgccatcacagccccagcccctggattgcctggctggagaccaatggggccacctccacagaggtgagcttgtgcgctcctcccacggcggccgtgggtcggtacctcttgaaaatccacatcgactccttccaggggtctgtgacggcctaccagctaggggagttcatcctgcttttcaatccctggtgcccagaggatgctgtctacttggacagtgaaccccagaggcaggagtatgtcatgaatgattatggcttcatctaccaaggcagcaagaactggatccgcccatgtccctggaactatggacagtttgaagacaaaatcatagacatctgcctgaagctgctagacaagagcctgcacttccagactgacccagccacagactgtgctctgcggggaagccccgtctaygtcagcagagtggtgtgtgccatgatcaacagcaatgatgataatggggtgctcaatggaaastggagtgagaattacacagacggcgccaaccctgcggagtggacgggcagcgtggccatcctgaagcagtggaacgccacaggctgccagcccgtgcgctacgggcaatgctgggtctttgctgccgtcatgtgcacagtgatgaggtgtctggggatccctacccgtgtgatcaccaacttcgactctggccacgatacagatggaaacctgatcatagatgagtattatgacaayacaggcaggattttggggaataagaagaaggatactatctggaacttccatgtctggaatgagtgctggatggcccggaaggatctgccccctgsatatggaggctggcaggtgctggacgccacacctcaggagatgagcaacggcgtctactgctgtggccctgcctctgtcagagccatcaaagaaggagaagtggacctgaactatgacacgccctttgtgttttcgatggtgaatgctgactgcatgtcctggctcgtccagggagggaaggagcagaagcttcaccaggacacgagttctgttggcaattttatcagcacaaagagcatccagagtgacgagcgggatgacatcacagagaactacaagtatgaagaaggatccctccaggagaggcaggtgtttctgaaggctctgcagaagctgaaggctagaagcttccatggctcccaaagaggagcagagttgcaaccttccaggcccacatcactgagccaggacagccctcggagcctgcatacaccttcccttcgacccagtgatrtggtgcaagtctccctgaaattcaagctgctcgacccgcccaacatgggccrggatatatgctttgtcctgctggccctcaacatgtcctcccagttcaaggacctcaaagtgaacctgagtgcccagtctctgctgcacgatggcagccccctgtccccattctggcaggacacagcgttcatcacactctctcctaaagaagcaaagacctacccctgcaaaatctcctattcccagtacagccagtacctgtcaacagacaagctgatccgcatcagtgccctgggtgaagagaaaagcagtcctgagaaaatcctggtgaacaagatcatcaccttatcttatccaagcatcacgattaatgttctaggagcagccgttgtgaaccagccactctccatacaggtgatattttcaaaccccctctcggagcaggttgaggactgtgtgctgactgtggaaggaagtggcctcttcaagaaacagcagaaagtcttccttggagtcctcaaaccccaacaccaagcaagcatcattctggagaccgtccccttcaagagtggacaaaggcagatccaagctaatatgagaagcaacaagtttaaggacattaagggttacaggaatgtttatgtagactttgcattataaattctggaacaacgcgccagacgtgtgaatttc

SEQ ID NO: 6806 - DNA, 1947 bp, Homo sapiens
attgcagggctagaagtggccctcacagacctccagagctscagaaataatgtgcggcaccacacggaggagatcactgtggaccacctgcttgttcgccggggccaggccttcaacctcaccctgtacttcaggaaccggagcttccagccaggcctggacaacatcatcttcgtggttgaaactgaggatgctgtctacttggacagtgaaccccagaggcaggagtatgtcatgaatgattatggcttcatctaccaaggcagcaagaactggatccgcccatgtccctggaactatggacagtttgaagacaaaatcatagacatctgcctgaagctgctagacaagagcctgcacttccagactgacccagccacagactgtgctctgcggggaagccccgtctaygtcagcagagtggtgtgtgccatgatcaacagcaatgatgataatggggtgctcaatggaaastggagtgagaattacacagacggcgccaaccctgcggagtggacgggcagcgtggccatcctgaagcagtggaacgccacaggctgccagcccgtgcgctacgggcaatgctgggtctttgctgccgtcatgtgcacagtgatgaggtgtctggggatccctacccgtgtgatcaccaacttcgactctggccacgatacagatggaaacctgatcatagatgagtattatgacaayacaggcaggattttggggaataagaagaaggatactatctggaacttccatgtctggaatgagtgctggatggcccggaaggatctgccccctgsatatggaggctggcaggtgctggacgccacacctcaggagatgagcaacggcgtctactgctgtggccctgcctctgtcagagccatcaaagaaggagaagtggacctgaactatgacacgccctttgtgttttcgatggtgaatgctgactgcatgtcctggctcgtccagggagggaaggagcagaagcttcaccaggacacgagttctgttggcaattttatcagcacaaagagcatccagagtgacgagcgggatgacatcacagagaactacaagtatgaagaaggatccctccaggagaggcaggtgtttctgaaggctctgcagaagctgaaggctagaagcttccatggctcccaaagaggagcagagttgcaaccttccaggcccacatcactgagccaggacagccctcggagcctgcatacaccttcccttcgacccagtgatrtggtgcaagtctccctgaaattcaagctgctcgacccgcccaacatgggccrggatatatgctttgtcctgctggccctcaacatgtcctcccagttcaaggacctcaaagtgaacctgagtgcccagtctctgctgcacgatggcagccccctgtccccattctggcaggacacagcgttcatcacactctctcctaaagaagcaaagacctacccctgcaaaatctcctattcccagtacagccagtacctgtcaacagacaagctgatccgcatcagtgccctgggtgaagagaaaagcagtcctgagaaaatcctggtgaacaagatcatcaccttatcttatccaagcatcacgattaatgttctaggagcagccgttgtgaaccagccactctccatacaggtgatattttcaaaccccctctcggagcaggttgaggactgtgtgctgactgtggaaggaagtggcctcttcaagaaacagcagaaagtcttccttggagtcctcaaaccccaacaccaagcaagcatcattctggagaccgtccccttcaagagtggacaaaggcagatccaagctaatatgagaagcaacaagtttaaggacattaagggttacaggaatgtttatgtagactttgcattataaattctggaacaacgcgccagacgtgtgaatttc

SEQ ID NO: 6807 - DNA, 1069 bp, Homo sapiens
aaagccctttgctcctccctcagaatgaatggagaccagagatcagatgtttatgtccaagaaaagcaggatttcgttcagtacttctcccagatcattggggatgagatgaggcacccatagacaggagatgctatcacccagctgaaggagatcctgtagtacaatgccattggaggcaagtatcaccggggtttgacagtgctagtagcgttctgggagctggtggagccaaggaaacatgatgctgagagtctccagcgggccctgactgtgggctggtgtgtggaactgctgcaagctttgttcctggtggcaaatgacatcacggattcattgctcaccgctggtaacagatctgctggtttcagaagccgggcgtggrtttggatgccatcagtgatgctatccttgtggaagcatgtatctactgcctgctgaagctctattgctgggagcagccctattgccagaacctgatccagctcttccggcagagtttctatcagactgagattgggcagaccctggacctcatcacagccccccagggcaatgcggatcttggcagattcactgaaaagaggtacaaatctactgtcaagtacaaggcagtttctacttctacattcctgtagctgcagccatgtacatggcaggcattgatggcgagaaggagcacgacaatgccaagaagatcctgctggagatgggagagggagagttcttccagatcaggatgattaccttcacctcttttggggaccccagtgtgaccagcaaagttggcactgacatccaggacaataaatgcagctggctgctggttcagtgtctgcaacgggccactccggaacactaccagatcctgaaggagaattacagacagaaggaggccaagaaggtggcccaggtgaaggcagtatatgaggagctggatctgccggccgtgttcttgcaataataggaagacagttacagccacattatgggtctcattgaacagtacgcagctcccctgtccccagccatctttctagggctgacatgcaaaatctacaaaagtaaa

SEQ ID NO: 6808 - DNA, 2594 bp, Homo sapiens
atctgcttccggcctgcgagctcggtgttccgctttttgtgggcygggtgggtttcctaatctggtttygtctgcytggttcatctgtgtgcgatggctccggactcggatcccttccctgaagggccgctcttaaagctgctacccttagacgctagagaccggggcacccagcgctgccgcctgggcccggccgccctccacgccctgggcgcgcgcttgggctcggcagtkaagatctcgctacccgacggcggctcctgcctctgcactgcctggcctcggcgggacggagcggacggctttgtgcagctggacccgctgtgcgcgagccccggggcggcggtcggggcgtcgagatcccggaggagtctcagcctgaatcgcctcctcctagtgccctgtccgcccctgcggcgcgtcgccgtgtggccggtgttgcgagagcsggcaggcgcgcccggtgcccggaatacagccgcggtgctggaggcggcacaggagctgctgagaaaccgaccgatctccctgggccacgtggtggtcgctccgccaggcgctcctggcctggtggctgccttgcacatcgtcggcgggacgcccagtcccgatcccgctgggctggtcacccctcgtacccgcgtcagccttggcggggagcctccgtcggaagcccagccgcagcccgaggtgcccctgggaggtctttcggaggcggccgactcgctgcgggagctcctccgcctcccgctccgctacccgcgcgccctgaccgcgctgggcttagcggtgcctcgcggggtgctmctggcggggccccccggagtgggcaagacccagctggtgcrggccgtggcgcgcgaggcgggcgcggagctgctggcagtcagcgccccggcgctgcagggttcccggcctggggagaccgaggagaacgtgcggcgggtcttccagcgcgcccgggaactggccagccgcggacccagcctcctcttcctggacgagatggacgccttgtgtccccagcggggcagtcgagcacccgagagccgcgtagtggcccaggtgttgacgctgytggacggcgccagtggggaccgcgaggtcgtggttgtgggagccactaaccggccggacgctctagacccagcgctgcgtagrcccgggagatttgaccgagaggtggtcattgggactcccacacttaaacaaagaaaggaaattctgcaagtgattacctcgaagatgcccatctccagtcatgttgatttgggccttcttgcagaaatgacagttggctatgttggtgccgacctgacagcactctgtagggaggctgccatgcatgccctccttcatagtgagaagaaccaggacaatcctgtgattgatgaaatagacttccttgaagcttttaaaaatattcagccctcatcgtttcgaagcgtcattggattaatggatatcaagcctgttgactgggaggagatkggtggccttgaagatgtaaaactgaagttaaaacagagcattgagtggcctctgaaattcccttgggaatttgttagaatgggcctgacacaaccaaagggagttctcctctatgggccccctggatgtgctaaaaccactctggtgagggccctggccacaagctgtcactgctctttcgtttcagtgagtggagctgatctgttttcaccgtttgttggagattcagaaaaagtgttgtctcagatatttcgacaagcaagagcaagcactccagcaattttgtttttggatgaaattgattcaatcttgggagctcgctyagccagcaagacaggatgtgatgttcaagaacgagttctttctgttctcctgaatgaattagatggtgttggacttaagacaatagagagaagaggaagtaaatcaagtcaacagggtaaatacaaggagctgaaaaaatgaagagagtttcaagaagtttttaaccgaagtgtcatgattattgcagcaacaaatagacctgatgtgttagatactgctttgttacgacctggaagattagataagatcatctatatcccacctccagatcacaagggcaggctttctattttaaaagtctgtacaaaaaccatgccaatagggcctgatgtctccttagaaaacctcgcagcagaaacctgttttttttctggagctgatcttagaaacctctgcacagaagctgctttgctggctctgcaagaaaatggactagacgcaactacagtgaaacaagagcactttctaaaatcacttaagactgtaaaaccgtcgttaagttgcaaggacttggctttrtatgaaaacttatttaagaaagaaggattttctaacgtggaaggtatttaaaaatcaccttaaactcttgttcagttcacattaattgaaatgtgaacttgcctgtcgtttgcaacttcacacttttagaatttgtgtttatatttcctgtaagtgaataaataaaacaaaacaaaacaaaaaaaacttgtgcctgataagctaaggctcatttatttttaaaaggcatattaaataaaatactgtaatttaggaagaaa

SEQ ID NO: 6809 - DNA, 2564 bp, Homo sapiens
atctgcttccggcctgcgagctcggtgttccgctttttgtgggcygggtgggtttcctaatctggtttygtctgcytggttcatctgtgtgcgatggctccggactcggatcccttccctgaagggccgctcttaaagctgctacccttagacgctagagaccggggcacccagcgctgccgcctgggcccggccgccctccacgccctgggcgcgcgcttgggctcggcagtkaagatctcgctacccgacggcggctcctgcctctgcactgcctggcctcggcgggacggagcggacggctttgtgcagctggacccgctgtgcgcgagccccggggcggcggtcggggcgtcgagatcccggaggagtctcagcctgaatcgcctcctcctagtgccctgtccgcccctgcggcgcgtcgccgtgtggccggtgttgcgagagcsggcaggcgcgcccggtgcccggaatacagccgcggtgctggaggcggcacaggagctgctgagaaaccgaccgatctccctgggccacgtggtggtcgctccgccaggcgctcctggcctggtggctgccttgcacatcgtcggcgggacgcccagtcccgatcccgctgggctggtcacccctcgtacccgcgtcagccttggcggggagcctccgtcggaagcccagccgcagcccgaggtgcccctgggaggtctttcggaggcggccgactcgctgcgggagctcctccgcctcccgctccgctacccgcgcgccctgaccgcgctgggcttagcggtgcctcgcggggtgctmctggcggggccccccggagtgggcaagacccagctggtgcrggccgtggcgcgcgaggcgggcgcggagctgctggcagtcagcgccccggcgctgcagggttcccggcctggggagaccgaggagaacgtgcggcgggtcttccagcgcgcccgggaactggccagccgcggacccagcctcctcttcctggacgagatggacgccttgtgtccccagcggggcagtcgagcacccgagagccgcgtagtggcccaggtgttgacgctgytggacggcgccagtggggaccgcgaggtcgtggttgtgggagccactaaccggccggacgctctagacccagcgctgcgtagrcccgggagatttgaccgagaggtggtcattgggactcccacacttaaacaaagaaaggaaattctgcaagtgattacctcgaagatgcccatctccagtcatgttgatttgggccttcttgcagaaatgacagttggctatgttggtgccgacctgacagcactctgtagggaggctgccatgcatgccctccttcatagtgagaagaaccaggacaatcctgtgattgatgaaatagacttccttgaagcttttaaaaatattcagccctcatcgtttcgaagcgtcattggattaatggatatcaagcctgttgactgggaggagatkggtggccttgaagatgtaaaactgaagttaaaacagagcattgagtggcctctgaaattcccttgggaatttgttagaatgggcctgacacaaccaaagggagttctcctctatgggccccctggatgtgctaaaaccactctggtgagggccctggccacaagctgtcactgctctttcgtttcagtgagtggagctgatctgttttcaccgtttgttggagattcagaaaaagtgttgtctcagatatttcgacaagcaagagcaagcactccagcaattttgtttttggatgaaattgattcaatcttgggagctcgctyagccagcaagacaggatgtgatgttcaagaacgagttctttctgttctcctgaatgaattagatggtgttggacttaagacaatagagagaagaggaagtaaatcaagtcaacaggagtttcaagaagtttttaaccgaagtgtcatgattattgcagcaacaaatagacctgatgtgttagatactgctttgttacgacctggaagattagataagatcatctatatcccacctccagatcacaagggcaggctttctattttaaaagtctgtacaaaaaccatgccaatagggcctgatgtctccttagaaaacctcgcagcagaaacctgttttttttctggagctgatcttagaaacctctgcacagaagctgctttgctggctctgcaagaaaatggactagacgcaactacagtgaaacaagagcactttctaaaatcacttaagactgtaaaaccgtcgttaagttgcaaggacttggctttrtatgaaaacttatttaagaaagaaggattttctaacgtggaaggtatttaaaaatcaccttaaactcttgttcagttcacattaattgaaatgtgaacttgcctgtcgtttgcaacttcacacttttagaatttgtgtttatatttcctgtaagtgaataaataaaacaaaacaaaacaaaaaaaacttgtgcctgataagctaaggctcatttatttttaaaaggcatattaaataaaatactgtaatttaggaagaaa

SEQ ID NO: 6810 - DNA, 5477 bp, Homo sapiens
tctctgtctgccagggtctccgactgtcccagacgggctggtgtgggcttgggatcctcctggtgacctctcccgctaaggtccctcagccactctgccccaagatgggccgtggggctggccgtgagwactcacctgccgccaccacggcagagaatgggggcggcaagaagaaacagaaggagaaggaactggatgagctgaagaaggaggtggcaatggatgaccacaarctgtccttggatgagctgggccgcaaataccaagtggacctgtccaagggcctcaccaaccagcgggctcaggacgttctggctcgagatgggcccaacgccctcacaccacctcccacaacccctgagtgggtcaagttctgccgtcagcttttcggggggttctccatcctgctgtggattggggctatcctctgcttcctggcctacggcatccaggctgccatggaggatgaaccatccaacgacaatctatatctgggtgtggtgctggcagctgtggtcattgtcactggctgcttctcctactaccaggaggccaagagctccaagatcatggattccttcaagaacatggtacctcagcaagcccttgtgatccgggagggagagaagatgcagatcaacgcagaggaagtggtggtgggagacctggtggaggtgaagggtggagaccgcgtccctgctgacctccggatcatctcttctcatggctgtaaggtggataactcatccttaacaggagagtcggagccccagacccgctcccccgagttcacccatgagaaccccctggagacccgcaatatctgtttcttctccaccaactgtgttgaaggcactgccaggggcattgtgattgccacaggagaccggacggtgatgggccgcatagctactctcgcctcaggcctggaggttgggcggacacccatagcaatggagattgaacacttcatccagctgatcacaggggtcgctgtattcctgggggtctccttcttcgtgctctccctcatcctgggctacagctggctggaggcagtcatcttcctcatcggcatcatagtggccaacgtgcctgaggggcttctggccactgtcactgtgtgcctgaccctgacagccaagcgcatggcacggaagaactgcctggtgaagaacctggaggcggtggagacgctgggctccacgtccaccatctgctcrgacaaracgggcaccctcacccagaaccgcatgaccgtcgcccacatgtggttcgacaaccaaatccatgaggctgacaccaccgaagatcagtctggggccacttttgacaaacgatcccctacgtggacggccctgtctcgaattgctggtctctgcaaccgcgccgtcttcaaggcaggacaggagaacatctccgtgtctaaggtaggggctggtgatgcctctgagtcagctctgctcaagtgcattgagctctcctgtggctcagtgaggaaaatgagagacagaaaccccaaggtggcagagattcctttcaactctaccaacaagtaccagctgtctatccacgagcgagaagacagcccccagagccacgtgctggtgatgaagggggccccagagcgcattctggaccggtgctccaccatcctggtgcagggcaaggagatcccgctcgacaaggagatgcaagatgcctttcaaaatgcctacatggagctggggggacttggggagcgtgtgctgggattctgtcaactgaatctgccatctggaaagtttcctcggggcttcaaattcgacacggatgagctgaactttcccacggagaagctttgctttgtggggctcatgtctatgattgaccctccccgggctgctgtgccagatgctgtgggcaagtgccgaagcgcaggcatcaaggtgatcatggtaaccggggatcaccctatcacagccaaggccattgccaaaggcgtgggcatcatatcagagggggtcagctgtctctgtccccacccaccctccagagaagccaaggcatgygtggtgcacggctctgacctgaaggacatgacatcggagcagctcgatgagatcctcaagaaccacacagagatcgtctttgctcgaacgtctccccagcagaagctcatcattgtggagggatgtcagaggcagggagccattgtggccgtgacgggtgacggggtgaacgactcccctgcattgaagaaggctgacattggcattgccatgggcatctctggctctgacgtctctaagcaggcagccgacatgatcctgctggatgacaactttgcytccatcgtcacgggggtggaggagggccgcctgatctttgacaacttgaagaaatccatcgcctacaccctgaccagcaacatccccgagatcacccccttcctgctgttcatcattgccaacatccccctacctctgggcactgtgaccatcctttgcattgacctgggcacagatatggtccctgccatctccttggcctatgaggcagctgagagtgatatcatgaagcggcagccacgaaactcccagacggacaagctggtgaatgagaggctcatcagcatggcctacggacagatcgggatgatccaggcactgggtggcttcttcacctactttgtgatcctggcagagaacggtttcctgccatcacggctactgggaatccgcctcgacygggatgaccggaccatgaatgatctggaggacagctatggacaggagtggacctatgagcagcggaaggtggtggagttcacgtgccacacggcattctttgccagcatcgtggtggtgcagtgggctgacctcatcatctgcaagacccgccgcaactcagtcttccagcagggcatgaagaacaagatcctgatttttgggctcctggaggagacggcgttggctgcctttctctcttactgcccaggcatgggtgtagccctccgcatgtacccgctcaaagtcacctggtggttctgcgccttcccctacagcctcctcatcttcatctatgatgaggtccgaaagctcatcctgcggcggtatcctggtggctgggtggagaaggagacatactactgaccccattggaagaagaaccaggcatggaaagatggggagctctggaggtgttgtggggatggtgatggagarggatggaaataacgggtggcattgggtggcaacatttggggagagataatgaggcaactcagcaggctaagttgcggggtatataaattggggtgatgaccccatagacctaactgtgaacaatcagattagacactatgtgttagagtccccccgaccagatccttttccatcccactccactatgttgtctattttttctgaggaattaagggttaccccaccctgcccactcccatcccttcaaccccacttcctactgtaatagatcagcatccaaaagcaggaacccatctaaaccagaaggaagccctctcagatcaccccagcctcactccatttcccacttccacccccgttagcttcctgcaggactctatccctggcttccccttcagaccttgcaatcacaaaaggttcttctggtgagtgcaagagcctgagactggaaaaggtggacttgtctcccagtcgaggctggtaagggaccttcagggagagctgggcagacaggtgsgagatggaggtagggctggctggaggaaggaaacaacaaaggaagtgaggtagtgccaatgacaggacatttgacatgagtctccagatagatgtcgtggactccagctctacgtcccacattttagaataccccaccagcagaacaaactcagatctyatcagggtagcagcagaggcaggaccagaaggcaatcaagagcttccagaaatgccacacttgtgtgccacagagttccccgctgacccttggttaggggtcctcttagtccacaaggtccggatgtcactcatgtacttaataacacttcaccttctgtaatactaagtcctcagagctccatgctgttctgaaagggatggccacaagttctttcccagcctcttccattccctttcttttcatgcccatcccgatgaacctgcatcattccccgrcactgccaagccaaccctggaaaaggagttcgctggccattggctagaatcagggtggagaagttccctgaaccttcctgtctcccagggacatgtatgcttccagggacaagcttaggtcatgaacatggtcagaacctttggacaagaggaaaaatactaagagatttgctttttctgggtgcggtggctcatgcctgtaatcccagcactttgggaggccgaggcaggtggatcatgaggtcaggagttcraggcgagcctggccaacatggtgaaaccctgtctctactaaaagtacaaaaaattagccagtcatggtggcacacgcctgtaatctcagctactcaggaggctgaggcaggagaattgcttgaacctgtgaggaagaggttgcagtgagctgagatcgtgccattacactccagcctgggcgaaagggtgagactccatctcaaaaaaaaaaaaaatgatttgcttttgacgtcttaggtggcagggctgttccctccaggcaaatgcccttcaaaccgacgatcattgtgcccacttaccctgggctggagagttggtttcaggttcctacaggagatagctttcttycccttactccctatctaacacttttgctctgcaggcagccttgcccattctctaagcctggcttagaaggcactgggaatgtcctgtagagagagacctagataggtcatgcaagtgagaaagacatctgaggaaaatggaagacctaaggcagacaggaaggaagcacaaaagacaagcattgggtcagacccataaaccacctcccaaaggctgtcatttcattgcactggaattttgctttatcagaagcaaggaagtaagggagtcattgccttgggcctgggaatctaagtgggagacaatattaatttggatccgattaattggagattactaactgtggacaaaagtttatctttgcacaatcaataaaaatggcatttttttagtaaattaagagcataaacaatattgctagaggtggcatgtttagtctaccaaaaacaatacttttcaggcactttagaaatatccttttagaagcagcgagtgcatrggctaattatcatcaatctttatgtatttgttaaagaaacatctacaggatctttattggtgaccttttgtaagacattagtttgaggtactacctatstacttgaaaataataaagtggcatttctttatgaaaaaaaaagaaatctcttccataattcagatttctacactttatacttgcctccctcctaaatcgtgatattgaaatatgtg

SEQ ID NO: 6811 - DNA, 4716 bp, Homo sapiens
tctctgtctgccagggtctccgactgtcccagacgggctggtgtgggcttgggatcctcctggtgacctctcccgctaaggtccctcagccactctgccccaagatgggccgtggggctggccgtgagwactcacctgccgccaccacggcagagaatgggggcggcaagaagaaacagaaggagaaggaactggatgagctgaagaaggaggtggcaatggatgaccacaarctgtccttggatgagctgggccgcaaataccaagtggacctgtccaagggcctcaccaaccagcgggctcaggacgttctggctcgagatgggcccaacgccctcacaccacctcccacaacccctgagtgggtcaagttctgccgtcagcttttcggggggttctccatcctgctgtggattggggctatcctctgcttcctggcctacggcatccaggctgccatggaggatgaaccatccaacgacaatctatatctgggtgtggtgctggcagctgtggtcattgtcactggctgcttctcctactaccaggaggccaagagctccaagatcatggattccttcaagaacatggtacctcagcaagcccttgtgatccgggagggagagaagatgcagatcaacgcagaggaagtggtggtgggagacctggtggaggtgaagggtggagaccgcgtccctgctgacctccggatcatctcttctcatggctgtaaggtggataactcatccttaacaggagagtcggagccccagacccgctcccccgagttcacccatgagaaccccctggagacccgcaatatctgtttcttctccaccaactgtgttgaaggcactgccaggggcattgtgattgccacaggagaccggacggtgatgggccgcatagctactctcgcctcaggcctggaggttgggcggacacccatagcaatggagattgaacacttcatccagctgatcacaggggtcgctgtattcctgggggtctccttcttcgtgctctccctcatcctgggctacagctggctggaggcagtcatcttcctcatcggcatcatagtggccaacgtgcctgaggggcttctggccactgtcactgtgtgcctgaccctgacagccaagcgcatggcacggaagaactgcctggtgaagaacctggaggcggtggagacgctgggctccacgtccaccatctgctcrgacaaracgggcaccctcacccagaaccgcatgaccgtcgcccacatgtggttcgacaaccaaatccatgaggctgacaccaccgaagatcagtctggggccacttttgacaaacgatcccctacgtggacggccctgtctcgaattgctggtctctgcaaccgcgccgtcttcaaggcaggacaggagaacatctccgtgtctaagcgggacacagctggtgatgcctctgagtcagctctgctcaagtgcattgagctctcctgtggctcagtgaggaaaatgagagacagaaaccccaaggtggcagagattcctttcaactctaccaacaagtaccagctgtctatccacgagcgagaagacagcccccagagccacgtgctggtgatgaagggggccccagagcgcattctggaccggtgctccaccatcctggtgcagggcaaggagatcccgctcgacaaggagatgcaagatgcctttcaaaatgcctacatggagctggggggacttggggagcgtgtgctgggattctgtcaactgaatctgccatctggaaagtttcctcggggcttcaaattcgacacggatgagctgaactttcccacggagaagctttgctttgtggggctcatgtctatgattgaccctccccgggctgctgtgccagatgctgtgggcaagtgccgaagcgcaggcatcaaggtgatcatggtaaccggggatcaccctatcacagccaaggccattgccaaaggcgtgggcatcatatcagagggtaacgagactgtggaggacattgcagcccggctcaacattcccatgagtcaagtcaaccccagagaagccaaggcatgygtggtgcacggctctgacctgaaggacatgacatcggagcagctcgatgagatcctcaagaaccacacagagatcgtctttgctcgaacgtctccccagcagaagctcatcattgtggagggatgtcagaggcagggagccattgtggccgtgacgggtgacggggtgaacgactcccctgcattgaagaaggctgacattggcattgccatgggcatctctggctctgacgtctctaagcaggcagccgacatgatcctgctggatgacaactttgcytccatcgtcacgggggtggaggagggccgcctgatctttgacaacttgaagaaatccatcgcctacaccctgaccagcaacatccccgagatcacccccttcctgctgttcatcattgccaacatccccctacctctgggcactgtgaccatcctttgcattgacctgggcacagatatggtccctgccatctccttggcctatgaggcagctgagagtgatatcatgaagcggcagccacgaaactcccagacggacaagctggtgaatgagaggctcatcagcatggcctacggacagatcgggatgatccaggcactgggtggcttcttcacctactttgtgatcctggcagagaacggtttcctgccatcacggctactgggaatccgcctcgacygggatgaccggaccatgaatgatctggaggacagctatggacaggagtggacctatgagcagcggaaggtggtggagttcacgtgccacacggcattctttgccagcatcgtggtggtgcagtgggctgacctcatcatctgcaagacccgccgcaactcagtcttccagcagggcatgaagaacaagatcctgatttttgggctcctggaggagacggcgttggctgcctttctctcttactgcccaggcatgggtgtagccctccgcatgtacccgctcaaagtcacctggtggttctgcgccttcccctacagcctcctcatcttcatctatgatgaggtccgaaagctcatcctgcggcggtatcctggtggctgggtggagaaggagacatactactgaccccattggaagaagaaccaggcatggaaagatggggagctctggaggtgttgtggggatggtgatggagarggatggaaataacgggtggcattgggtggcaacatttggggagagataatgaggcaactcagcaggctaagttgcggggtatataaattggggtgatgaccccatagacctaactgtgaacaatcagattagacactatgtgttagagtccccccgaccagatccttttccatcccactccactatgttgtctattttttctgaggaattaagggttaccccaccctgcccactcccatcccttcaaccccacttcctactgtaatagatcagcatccaaaagcaggaacccatctaaaccagaaggaagccctctcagatcaccccagcctcactccatttcccacttccacccccgttagcttcctgcaggactctatccctggcttccccttcagaccttgcaatcacaaaaggttcttctggtgagtgcaagagcctgagactggaaaaggtggacttgtctcccagtcgaggctggtaagggaccttcagggagagctgggcagacaggtgsgagatggaggtagggctggctggaggaaggaaacaacaaaggaagtgaggtagtgccaatgacaggacatttgacatgagtctccagatagatgtcgtggactccagctctacgtcccacattttagaataccccaccagcagaacaaactcagatctyatcagggtagcagcagaggcaggaccagaaggcaatcaagagcttccagaaatgccacacttgtgtgccacagagttccccgctgacccttggttaggggtcctcttagtccacaaggtccggatgtcactcatgtacttaataacacttcaccttctgtaatactaagtcctcagagctccatgctgttctgaaagggatggccacaagttctttcccagcctcttccattccctttcttttcatgcccatcccgatgaacctgcatcattccccgrcactgccaagccaacccttcctgtctcccagggacatgtatgcttccagggacaagcttaggtcatgaacatggtcagaacctttggacaagaggaaaaatactaagagatttgctttttctgggtgcggtggctcatgcctgtaatcccagcactttgggaggccgaggcaggtggatcatgaggtcaggagttcraggcgagcctggccaacatggtgaaaccctgtctctactaaaagtacaaaaaattagccagtcatggtggcacacgcctgtaatctcagctactcaggaggctgaggcaggagaattgcttgaacctgtgaggaagaggttgcagtgagctgagatcgtgccattacactccagcctgggcgaaagggtgagactccatctcaaaaaaaaaaaaaatgatttgcttttgacgtctccattctctaagcctggcttagaaggcactgggaatgtcctgtagagagagacctagataggtcatgcaagtgagaaagacatctgaggaa

SEQ ID NO: 6812 - DNA, 5510 bp, Homo sapiens
tctctgtctgccagggtctccgactgtcccagacgggctggtgtgggcttgggatcctcctggtgacctctcccgctaaggtccctcagccactctgccccaagatgggccgtggggctggccgtgagwactcacctgccgccaccacggcagagaatgggggcggcaagaagaaacagaaggagaaggaactggatgagctgaagaaggaggtggcaatggatgaccacaarctgtccttggatgagctgggccgcaaataccaagtggacctgtccaagggcctcaccaaccagcgggctcaggacgttctggctcgagatgggcccaacgccctcacaccacctcccacaacccctgagtgggtcaagttctgccgtcagcttttcggggggttctccatcctgctgtggattggggctatcctctgcttcctggcctacggcatccaggctgccatggaggatgaaccatccaacgacaatctatatctgggtgtggtgctggcagctgtggtcattgtcactggctgcttctcctactaccaggaggccaagagctccaagatcatggattccttcaagaacatggtacctcagcaagcccttgtgatccgggagggagagaagatgcagatcaacgcagaggaagtggtggtgggagacctggtggaggtgaagggtggagaccgcgtccctgctgacctccggatcatctcttctcatggctgtaaggtggataactcatccttaacaggagagtcggagccccagacccgctcccccgagttcacccatgagaaccccctggagacccgcaatatctgtttcttctccaccaactgtgttgaaggcactgccaggggcattgtgattgccacaggagaccggacggtgatgggccgcatagctactctcgcctcaggcctggaggttgggcggacacccatagcaatggagattgaacacttcatccagctgatcacaggggtcgctgtattcctgggggtctccttcttcgtgctctccctcatcctgggctacagctggctggaggcagtcatcttcctcatcggcatcatagtggccaacgtgcctgaggggcttctggccactgtcactgtgtgcctgaccctgacagccaagcgcatggcacggaagaactgcctggtgaagaacctggaggcggtggagacgctgggctccacgtccaccatctgctcrgacaaracgggcaccctcacccagaaccgcatgaccgtcgcccacatgtggttcgacaaccaaatccatgaggctgacaccaccgaagatcagtctggggccacttttgacaaacgatcccctacgtggacggccctgtctcgaattgctggtctctgcaaccgcgccgtcttcaaggcaggacaggagaacatctccgtgtctaagcgggacacagctggtgatgcctctgagtcagctctgctcaagtgcattgagctctcctgtggctcagtgaggaaaatgagagacagaaaccccaaggtggcagagattcctttcaactctaccaacaagtaccagctgtctatccacgagcgagaagacagcccccagagccacgtgctggtgatgaagggggccccagagcgcattctggaccggtgctccaccatcctggtgcagggcaaggagatcccgctcgacaaggagatgcaagatgcctttcaaaatgcctacatggagctggggggacttggggagcgtgtgctgggattctgtcaactgaatctgccatctggaaagtttcctcggggcttcaaattcgacacggatgagctgaactttcccacggagaagctttgctttgtggggctcatgtctatgattgaccctccccgggctgctgtgccagatgctgtgggcaagtgccgaagcgcaggcatcaaggtgatcatggtaaccggggatcaccctatcacagccaaggccattgccaaaggcgtgggcatcatatcagagggtaacgagactgtggaggacattgcagcccggctcaacattcccatgagtcaagtcaaccccagagaagccaaggcatgygtggtgcacggctctgacctgaaggacatgacatcggagcagctcgatgagatcctcaagaaccacacagagatcgtctttgctcgaacgtctccccagcagaagctcatcattgtggagggatgtcagaggcagggagccattgtggccgtgacgggtgacggggtgaacgactcccctgcattgaagaaggctgacattggcattgccatgggcatctctggctctgacgtctctaagcaggcagccgacatgatcctgctggatgacaactttgcytccatcgtcacgggggtggaggagggccgcctgatctttgacaacttgaagaaatccatcgcctacaccctgaccagcaacatccccgagatcacccccttcctgctgttcatcattgccaacatccccctacctctgggcactgtgaccatcctttgcattgacctgggcacagatatggtccctgccatctccttggcctatgaggcagctgagagtgatatcatgaagcggcagccacgaaactcccagacggacaagctggtgaatgagaggctcatcagcatggcctacggacagatcgggatgatccaggcactgggtggcttcttcacctactttgtgatcctggcagagaacggtttcctgccatcacggctactgggaatccgcctcgacygggatgaccggaccatgaatgatctggaggacagctatggacaggagtggacctatgagcagcggaaggtggtggagttcacgtgccacacggcattctttgccagcatcgtggtggtgcagtgggctgacctcatcatctgcaagacccgccgcaactcagtcttccagcagggcatgaagaacaagatcctgatttttgggctcctggaggagacggcgttggctgcctttctctcttactgcccaggcatgggtgtagccctccgcatgtacccgctcaaagtcacctggtggttctgcgccttcccctacagcctcctcatcttcatctatgatgaggtccgaaagctcatcctgcggcggtatcctggtggctgggtggagaaggagacatactactgaccccattggaagaagaaccaggcatggaaagatggggagctctggaggtgttgtggggatggtgatggagarggatggaaataacgggtggcattgggtggcaacatttggggagagataatgaggcaactcagcaggctaagttgcggggtatataaattggggtgatgaccccatagacctaactgtgaacaatcagattagacactatgtgttagagtccccccgaccagatccttttccatcccactccactatgttgtctattttttctgaggaattaagggttaccccaccctgcccactcccatcccttcaaccccacttcctactgtaatagatcagcatccaaaagcaggaacccatctaaaccagaaggaagccctctcagatcaccccagcctcactccatttcccacttccacccccgttagcttcctgcaggactctatccctggcttccccttcagaccttgcaatcacaaaaggttcttctggtgagtgcaagagcctgagactggaaaaggtggacttgtctcccagtcgaggctggtaagggaccttcagggagagctgggcagacaggtgsgagatggaggtagggctggctggaggaaggaaacaacaaaggaagtgaggtagtgccaatgacaggacatttgacatgagtctccagatagatgtcgtggactccagctctacgtcccacattttagaataccccaccagcagaacaaactcagatctyatcagggtagcagcagaggcaggaccagaaggcaatcaagagcttccagaaatgccacacttgtgtgccacagagttccccgctgacccttggttaggggtcctcttagtccacaaggtccggatgtcactcatgtacttaataacacttcaccttctgtaatactaagtcctcagagctccatgctgttctgaaagggatggccacaagttctttcccagcctcttccattccctttcttttcatgcccatcccgatgaacctgcatcattccccgrcactgccaagccaaccctggaaaaggagttcgctggccattggctagaatcagggtggagaagttccctgaaccttcctgtctcccagggacatgtatgcttccagggacaagcttaggtcatgaacatggtcagaacctttggacaagaggaaaaatactaagagatttgctttttctgggtgcggtggctcatgcctgtaatcccagcactttgggaggccgaggcaggtggatcatgaggtcaggagttcraggcgagcctggccaacatggtgaaaccctgtctctactaaaagtacaaaaaattagccagtcatggtggcacacgcctgtaatctcagctactcaggaggctgaggcaggagaattgcttgaacctgtgaggaagaggttgcagtgagctgagatcgtgccattacactccagcctgggcgaaagggtgagactccatctcaaaaaaaaaaaaaatgatttgcttttgacgtcttaggtggcagggctgttccctccaggcaaatgcccttcaaaccgacgatcattgtgcccacttaccctgggctggagagttggtttcaggttcctacaggagatagctttcttycccttactccctatctaacacttttgctctgcaggcagccttgcccattctctaagcctggcttagaaggcactgggaatgtcctgtagagagagacctagataggtcatgcaagtgagaaagacatctgaggaaaatggaagacctaaggcagacaggaaggaagcacaaaagacaagcattgggtcagacccataaaccacctcccaaaggctgtcatttcattgcactggaattttgctttatcagaagcaaggaagtaagggagtcattgccttgggcctgggaatctaagtgggagacaatattaatttggatccgattaattggagattactaactgtggacaaaagtttatctttgcacaatcaataaaaatggcatttttttagtaaattaagagcataaacaatattgctagaggtggcatgtttagtctaccaaaaacaatacttttcaggcactttagaaatatccttttagaagcagcgagtgcatrggctaattatcatcaatctttatgtatttgttaaagaaacatctacaggatctttattggtgaccttttgtaagacattagtttgaggtactacctatstacttgaaaataataaagtggcatttctttatgaaaaaaaaagaaatctcttccataattcagatttctacactttatacttgcctccctcctaaatcgtgatattgaaatatgtg

SEQ ID NO: 6813 - DNA, 1167 bp, Homo sapiens
cgctcgccgccggtgcacggcrcaccccgsgggaggcagggwtcmgcaaagccgtgcgccccgaggcccgcccccgtctccgcacaaagaccgagctggaggatcttcagaagaagcctcccccatacctgcggaacctgtccagcgatgatgccaatgtcctggtgtggcacrctctcctcctacccgaccaacctccctaccacctgaaagccttcaacctgcgcatcagcttcccgccrgagtatccgttcaagcctcccatgatcaaattcacaaccaagatctaccaccccaacgtggacgagaacggacagatttgcctgcccatcatcagcagtgagaactggaagccttgcaccaagacttgccaagtcctggaggccctcaatgtgctggtgaatagaccgaatatcagggagcccctgcggatggacctcgctgacctgctgacacagaatccggagctgttcagaaagaatgccgaagagttcaccctccgattcggagtggaccggccctcctaactcatgttctgaccctctgtgcactggatcctcggcatagcggacggacacacctcatggactgaggccagagccccctgtggcccattccccattcatttttgtgttgtgtatggactcactcccaggttcacctggccacaggtgcacccttcccacaccctttacattccccagagccaagggagtttaagtttgcagttacaggccagttctccagctctccatcttagagagacaggtcaccttgcaggcctgcttgcaggaaatgaatccagcagccaactcgaatccccctagggctcaggcactgagggcctggggacagtggagcatatgggtgggagacagatggagggtaccctatttacaactragtcagccaagccactgatgggaatatacagatttaggtgctaaaccrwttattttccacggatgagtcacaatctgaagaatcaaacttccatcctgaaaatctatatgtttcaaaaccacttgccatcctgttagattgccagttcctgggaccaggcctcagactgtgaagtatatatcctccagcattcagtccagggggagccacggaaaccatgttcttgcttaagccattaaagtcagagatgaattctggagtgca

SEQ ID NO: 6814 - DNA, 1238 bp, Homo sapiens
gcgcgctgtgtcgcgggtcggagctcggtcctgctggaggccacgggtgccacacactcggtcccgacatgatggcgagcatgcgagtggtgaaggagctggaggatcttcagaagaagcctcccccatacctgcggaacctgtccagcgatgatgccaatgtcctggtgtggcacrctctcctcctacccgaccaacctccctaccacctgaaagccttcaacctgcgcatcagcttcccgccrgagtatccgttcaagcctcccatgatcaaattcacaaccaagatctaccaccccaacgtggacgagaacggacagatttgcctgcccatcatcagcagtgagaactggaagccttgcaccaagacttgccaagtcctggaggccctcaatgtgctggtgaatagaccgaatatcagggagcccctgcggatggacctcgctgacctgctgacacagaatccggagctgttcagaaagaatgccgaagagttcaccctccgattcggagtggaccggccctcctaactcatgttctgaccctctgtgcactggatcctcggcatagcggacggacacacctcatggactgaggccagagccccctgtggcccattccccattcatttttcccttcttaggttgttagtcattagtttgtgtgtgtgtgtggtggagggaagggagctatgagtgtgtgtgttgtgtatggactcactcccaggttcacctggccacaggtgcacccttcccacaccctttacattccccagagccaagggagtttaagtttgcagttacaggccagttctccagctctccatcttagagagacaggtcaccttgcaggcctgcttgcaggaaatgaatccagcagccaactcgaatccccctagggctcaggcactgagggcctggggacagtggagcatatgggtgggagacagatggagggtaccctatttacaactragtcagccaagccactgatgggaatatacagatttaggtgctaaaccrwttattttccacggatgagtcacaatctgaagaatcaaacttccatcctgaaaatctatatgtttcaaaaccacttgccatcctgttagattgccagttcctgggaccaggcctcagactgtgaagtatatatcctccagcattcagtccagggggagccacggaaaccatgttcttgcttaagccattaaagtcagagatgaattctggagtgca

SEQ ID NO: 6815 - DNA, 1251 bp, Homo sapiens
ttatcagttgttgagagaggggtgttaaagtctgtgattaaaattgtggatttgcacagcccaaactgcaagttgcttattatttgaaatccagtggatatcttgacctacgtggcttggaagataagtggctttcccaaaaaccgtgttattggaagtggttgcaacctggattcggcccgattccattacccgacggggaaagactgggagttcacctattaagctgtcatgggtgggtccttggggaacatggagattccagtgtgcctgtatggagtggagtgaatgttgcttgtgtcttcctgaagattctgcacccagatttaggcactgatacagataagaaacagtggaaagaggttcacaagcaggtggttgagaatgcttacgaggtgatcaaactcaaaggctacacatcctgggccattggactctgtagcagatttggtagagagtataatgaagaatcttaggcaggtgcacccaattcccaccatgattaagggtctctatggaataaaggatgatgtcttccttagtgttccttgcattttgggacagaatggaatctcagaccttgtgaaggtgactctgactcctgaggaagaggcccrtttgaagaagcgtgcagacacactttgggggatccgaaaagagctgcaattttaaagtcttctgatgtcatarcatttcactgtctatgctacaacaggactttagttggaggttgtgcctgatatcctttttatctgatctgtgattaaagcagtaatattttaagatggactgggaaaaacatcaattcctgaagttagaaataggaatggtttgtaaaatccacagctatatcctgatgctggatggtactaatttgtgtagtcctaaactggtttgtgtgaaatagttctgccacctctgaggcaccactgccaatgctgtacatgctgcatttgccccttgagccaggtggatgtttaccatgtgatatataacttcctggctccttcactgaacatgcctagtccaacattttttyccaatcagtcacatcctgggatccagtgtacaaatccaatatcgcatgtcttgtgcataattgttccaaaggatcttattttgtgaactatatatatcagtagtgtacattaccatataatgtaaaaagatctacatataaacaatgcaaccaactatccaagtgttataccaactaaaccccccaataaaccttgaacagtgaaaaaaatt

SEQ ID NO: 6816 - DNA, 4286 bp, Homo sapiens
gaatcaacagaatttgtctttttgtgactggtttatttcacttaacttcatcctcaaggttcaacttaaaggtgtatccatgttgtagcacgtgtcagcattttctttcgttctcaggctaaatagtatttcattgtgtgtgtacaccatgtttcatgcattcattcatcccttgaaagattggtgggttgtttcctcctttttgcttttgtgaacagtgctacgaacatggttgtacaaacatctcttggagccccactagcagttcctttgggtatataccccaaagtggaattgctggatctggtagctccctttttaattttttgaggaatcgccacacastttccataacagctgcaccattttacattcccaagaccttttttttttttttttttttaagaagaaaagatgtgtttctgcatttctggaagtctatgctgcatttccatttgttgaaatytaagacyagagtcrtcttttctgctgtaattataatggtcactggcttgtkccttttcctcctctctctgccccatctgcacggggtctttgaacaagtcccagcaccttggtggacaagcctgtgtccctggcccatcatggaagccgctgcctttcagagtgggagtctgtaccstgttgcctcattccttgctgcgcccatgagtgagcttgtgcctgacctctccttccaggtggacttacacactgggctgtcggagttctcggtgacgcagcgccggctggcccatggctggaatgagtttgttgctgacaacagcgaacctgtgtggaagaaatacctggatcagtttaagaaccccctgatcctgctgctgctgggctctgccctggtgagtgtcctcaccaaggagtatgaggacgccgtcagcatcgccacggcagtgcttgtcgtggtcactgtcgccttcatccaggagtacaggtcggagaaatctctggaagagctgaccaagmtggttcctccagaatgtaactgcctaagagaaggaaaactccagcacctgcttgctcgagaactggttcctggtgatgtcgtatctctctcgatyggagaccggatccctgcagacatccgactcactgaggtcacggacctcttggtggatgaatccagtttcaccggggaagccgagccatgtagtaaaacagacagccccttgacaggcggtggggacctcaccaccctcagcaacatcgtcttcatggggaccctggtgcagtatgggaggggccagggggtcgtgattggaacaggggaaagctctcagttcggagaagtgtttaagatgatgcaggctgaagagacacctaaaactcctttgcagaaaagcatggacaggctaggaaagcaactgacactcttctcctttggcataatcggtctcatcatgctcattggctggtcgcaagggaaasaactcctgagtatgttcacgatcggggtcagcctggctgtggcggcyattccagagggtctgcccatcgtcgtcatggtgacgctggtcctgggagtgctgcggatggccaagaagcgggtcatcgtgaagaagttacccatcgtggagactttaggttgctgcagcgttctctgttctgacaagacggggactctgactgccaatgaaatgacagtgacccagcttgtaacgtcagatgggcttcgtgccgaggtcagcggagttgggtatgacrgtcaagggactgtgtgtcttctaccatccaaggaagtcattaaggaattttccaatgtctcagtgggaaagttagtggaggcgggctgtgttgccaacaatgcggtcatcagaaagaacgccgtgatggggcagcccaccgagggtgcattgatggccctggcgwtgaagatggacttaagtgatattaaaaattcatatataagaaaaaaagagattccattcagttcagagcagaagtggatggcggtgaaatgcagtctgaagactgaggatcaggaagacatttacttcatgaaaggggccttggaagaggtgatccgctactgcaccatgtacaacaacgggggcatccccctgcygctgacgccccagcagaggtcattctgcctgcaggaagagaagaggatgggrtcgctcggtttgcgggtgctggccctggcttctgggcccgagctggggcggctgacgyttctmggtcttgtgggcatcattgaccccccgagagttggcrtgaaggaagcagtccaggttctctccgagtctggtgtgtctgtgaagatgataacgggggatgcccwggagacggccttggccataggttcttctgaaggaagaaacatcggcctgtgcaacgggaagctgcaagccatgtccgggraggaggtggacagcgtggagaagggcgagctggccgaccgcgtggggaaggtgtccgtgttcttcaggaccagcccaaagcacaagctcaaaatcatcaaggctctgcaggagtcaggggcgatcgtggccatgactggggatggggtgaacgacgcagtggccctgaagtctgcagacattgggatcgccatggggcagacagggacggacgtcagcaaagaggccgccaacatgatcctggtggatgatgacttctcagccatcatgaatgcagtggaggaaggcaagggtattttttacaacatcaaaaactttgtccgattccagctgagcacgagcmtctccgccctgagtctcatcactctgtccaccgtgttcaacctgcccagccccctcaacgccatgcagatcctatggatcaacatcatcatggatgggccaccrgcgcagagcttgggggtagagccyrttgacaaagacgccttcaggcagccaccacggagtgtgygggacaccatcctcagcagagccctcatcctgaagatcctcatgtccgcggccatcatcatcagcgggaccctctttatcttctggaaggagmtgcctgaagacagagcaagcactccccgcaccacgacgatgacgttcacttgttttgtgtttttcgatctcttcaacgccttgacctgccgctctcagaccaagctgatatttgagatcggctttctcaggaaccacatgttcctctactccgtcctggggtccatcctggggcagctggcggtcatttacatccccccgctgcagagsgtcttccagacggagaacctgggagcgcytgatttgctgtttttaactggattggcctcatccgtcttcattttgtcagagctcctcaaactatgtgaaaaatactgttgcagccccaagagagtccagatgcaccctgaagatgtgtagtggaccgcactccgcggcaccttccctaatcatctcgatctggttgtgactgtggcccctgccgtgtctcctcgtcaggggagacttttaggaggccgcagccttccatcaccggatcagtttttcctcttaggaaagctgcaggaacctcgtgggctccagggacccaggcccacatccatccagcgttcccgctggctgtgggacagacagggaggggcctgtacagaaacaccacactrtttattaaatcacaatgatttttattaaccatgtctaactacgtatctgtgccacagcttgcagtgaggcaggccactcgtggcagatacaaggggctcctgagaggyagtgggtaggatggtcacactctgcccattgccctcctggaggccccatttcctcatcataaaatgagggacttttaaataaagtgctatgccgggggataattattttgatgtgtttacctagggtttttcatacaaggggccaggttggaaaccmacagccatgtgttaatggccacgtggkgtgagcagcaatccatcatgaatggcctacaggaaggagagaggtctccatgctgttcttctgcctgaagccacgccagaaccaccaaagggaaccagaaggggaactccgtccccatctctcaggaaataaggccagagctagaaccccccakttactagtcaggcctcactagagaaacagaaccaacaggatggagggagatgcagagatttgttttaaggaactggctcataggatkttgggggctggcaagtctaacatcttgagggcaggccagcatcctggagacccagggaagagctggggatgcaggctggaggcagaatttcctcctcctcaagggagttcagccttttcctcttatagtcctcawctgatcggatgaggcccactsacgttatgaag

SEQ ID NO: 6817 - DNA, 4389 bp, Homo sapiens
gaatcaacagaatttgtctttttgtgactggtttatttcacttaacttcatcctcaaggttcaacttaaaggtgtatccatgttgtagcacgtgtcagcattttctttcgttctcaggctaaatagtatttcattgtgtgtgtacaccatgtttcatgcattcattcatcccttgaaagattggtgggttgtttcctcctttttgcttttgtgaacagtgctacgaacatggttgtacaaacatctcttggagccccactagcagttcctttgggtatataccccaaagtggaattgctggatctggtagctccctttttaattttttgaggaatcgccacacastttccataacagctgcaccattttacattcccaagaccttttttttttttttttttttaagaagaaaagatgtgtttctgcatttctggaagtctatgctgcatttccatttgttgaaatytaagacyagagtcrtcttttctgctgtaattataatggtcactggcttgtkccttttcctcctctctctgccccatctgcacggggtctttgaacaagtcccagcaccttggtggacaagcctgtgtccctggcccatcatggaagccgctgcctttcagagtgggagtctgtaccstgttgcctcattccttgctgcgcccatgagtgagcttgtgcctgacctctccttccaggtggacttacacactgggctgtcggagttctcggtgacgcagcgccggctggcccatggctggaatgagtttgttgctgacaacagcgaacctgtgtggaagaaatacctggatcagtttaagaaccccctgatcctgctgctgctgggctctgccctggtgagtgtcctcaccaaggagtatgaggacgccgtcagcatcgccacggcagtgcttgtcgtggtcactgtcgccttcatccaggagtacaggtcggagaaatctctggaagagctgaccaagmtggttcctccagaatgtaactgcctaagagaaggaaaactccagcacctgcttgctcgagaactggttcctggtgatgtcgtatctctctcgatyggagaccggatccctgcagacatccgactcactgaggtcacggacctcttggtggatgaatccagtttcaccggggaagccgagccatgtagtaaaacagacagccccttgacaggcggtggggacctcaccaccctcagcaacatcgtcttcatggggaccctggtgcagtatgggaggggccagggggtcgtgattggaacaggggaaagctctcagttcggagaagtgtttaagatgatgcaggctgaagagacacctaaaactcctttgcagaaaagcatggacaggctaggaaagcaactgacactcttctcctttggcataatcggtctcatcatgctcattggctggtcgcaagggaaasaactcctgagtatgttcacgatcggggtcagcctggctgtggcggcyattccagagggtctgcccatcgtcgtcatggtgacgctggtcctgggagtgctgcggatggccaagaagcgggtcatcgtgaagaagttacccatcgtggagactttaggttgctgcagcgttctctgttctgacaagacggggactctgactgccaatgaaatgacagtgacccagcttgtaacgtcagatgggcttcgtgccgaggtcagcggagttgggtatgacrgtcaagggactgtgtgtcttctaccatccaaggaagtcattaaggaattttccaatgtctcagtgggaaagttagtggaggcgggctgtgttgccaacaatgcggtcatcagaaagaacgccgtgatggggcagcccaccgagggtgcattgatggccctggcgwtgaagatggacttaagtgatattaaaaattcatatataagaaaaaaagagattccattcagttcagagcagaagtggatggcggtgaaatgcagtctgaagactgaggatcaggaagacatttacttcatgaaaggggccttggaagaggtgatccgctactgcaccatgtacaacaacgggggcatccccctgcygctgacgccccagcagaggtcattctgcctgcaggaagagaagaggatgggrtcgctcggtttgcgggtgctggccctggcttctgggcccgagctggggcggctgacgyttctmggtcttgtgggcatcattgaccccccgagagttggcrtgaaggaagcagtccaggttctctccgagtctggtgtgtctgtgaagatgataacgggggatgcccwggagacggccttggccataggaagaaacatcggcctgtgcaacgggaagctgcaagccatgtccgggraggaggtggacagcgtggagaagggcgagctggccgaccgcgtggggaaggtgtccgtgttcttcaggaccagcccaaagcacaagctcaaaatcatcaaggctctgcaggagtcaggggcgatcgtggccatgactggggatggggtgaacgacgcagtggccctgaagtctgcagacattgggatcgccatggggcagacagggacggacgtcagcaaagaggccgccaacatgatcctggtggatgatgacttctcagccatcatgaatgcagtggaggaaggcaagggtattttttacaacatcaaaaactttgtccgattccagctgagcacgagcmtctccgccctgagtctcatcactctgtccaccgtgttcaacctgcccagccccctcaacgccatgcagatcctatggatcaacatcatcatggatgggccaccrgcgcagagcttgggggtagagccyrttgacaaagacgccttcaggcagccaccacggagtgtgygggacaccatcctcagcagagccctcatcctgaagatcctcatgtccgcggccatcatcatcagcgggaccctctttatcttctggaaggagmtgcctgaagacagagcaagcactccccgcaccacgacgatgacgttcacttgttttgtgtttttcgatctcttcaacgccttgacctgccgctctcagaccaagctgatatttgagatcggctttctcaggaaccacatgttcctctactccgtcctggggtccatcctggggcagctggcggtcatttacatccccccgctgcagagsgtcttccagacggagaacctgggagcgcytgatttgctgtttttaactggattggcctcatccgtcttcattttgtcagagctcctcaaactatgtgaaaaatactgttgcagccccaagagagtccagatgcaccctgaagatgtgtagtggaccgcactccgcggcaccttccctaatcatctcgatctggttgtgactgtggcccctgccgtgtctcctcgtcaggggagacttttaggaggccgcagccttccatcaccggatcagtttttcctcttaggaaagctgcaggaacctcgtgggctccagggacccaggcccacatccatccagcgttcccgctggctgtgggacagacagggaggggcctgtacagaaacaccacactrtttattaaatcacaatgatttttattaaccatgtctaactacgtatctgtgccacagcttgcagtgaggcaggccactcgtggcagatacaaggggctcctgagaggyagtgggtaggatggtcacactctgcccattgccctcctggaggccccatttcctcatcataaaatgagggacttttaaataaagtgctatgccgggggataattattttgatgtgtttacctagggtttttcatacaaggggccaggttggaaaccmacagccatgtgttaatggccacgtggkgtgagcagcaatccatcatgaatggcctacaggaaggcctcggcttttggasataaagagtagggctgggcatggtggctcacgcctgtaatcccagcactttgcaaggccaaggcaggcagatcacttgaggccagcctggccaacacagcaaaaccctgtctgtctctactaaaagtttaaaaaaaaaaaaaaaaacagttgccaggcgtgatgatgcacacctgttaatcccagctactcgggaggctgaggcaggagaatggcttgagtccaggaggtggagattgtaccactgcactgcagcatgggcaacaaagcaagagtctctctcagaaagtggcccttctctccggaaccaggaactgtagtatctcctgctgcctgcagacaagcttgatttcccactgccccaaagacttccaaaaaccsatctgctcttccacgtgacagatggcagaggagagaggtctccatgctgttcttctgcctgaagccacgccagaaccaccaaagggaacca

SEQ ID NO: 6818 - DNA, 2705 bp, Homo sapiens
gggagcttgtctgaggctggagctctattgtctgaatccaggggcagaaagaactgagggctcttttacggcatccacctggaggctgcctgcaggcttgggttgctaagtgcactgcttaatttagaagcgccttttatcctggctctcttgaccagtcaaagttgtggtcgctgttttctacaaggactggggaaagaaagggtggaattaattaaacctggaggaagggactttgaagggcggagctaaggtcaaagaaagaaccctttaaataaagggcccacactggctgccagggagtgcgcaggactggcaagagggaagccgggctgctccacgcctttcacgccttccacctcctgcgtgtccatctgtgagaaggagccagagcccaagggagatgatggagcctgaggagtacagagagagagggagagagatggtggattacatctgccagtacctgagcactgtgcgggagagacgtgtgaygccagacgtgcagcctggctacctgcgagcccagctgcctgagagtgctcctgaggaccccgacagctgggacagcatctttggggacattgaacgaatcatcatgcctggggtggtacattggcagagcccccatatgcacgcctactacccagccctcacctcttggccctccctgmtaggagacatgctggctgatgccatcaactgcttgggattcacctgggcatccagccctgcgtgtacagagctggagatgaacgtcatggactggttggcaaaaatgctgggacttccagagcacttcttgcaccaccaccccagcagccagggcggaggcgtcctgcagagcacggtcagtgaatccactttgattgccctgctggcagcaaggaagaacaaaatcctggaaatgaaaacgtctgagcccgatgctgatgagtcctgcctaaatgcccgactcgtggcytatgcctctgaccaggctcactcctctgtggaaaaggctggtttgatttcccttgtgaagatgaaatttctgcctgtggatgacaacttctcactccgaggggaagctcttcagaaggccatcgaggaagacaagcagcggggcttggtgcccgtctttgtctgtgcaacactagggaccactggggtctgtgcatttgactgcctgtcagagctgggccccatctgtgcccgtgaggggctgtggctccacatcgatgctgcttatgcaggcactgccttcctgtgccccgagttccgggggtttctgaaggggattgagtatgcygactccttcacctttaatccttccaagtggatgatggtgcattttgactgtactgggttctgggtcaaggacaagtacaagctgcagcagaccttcagtgtgaatcccatctacctcaggcatgccaactcaggcgtggccaccgacttcatgcactggcagatccccctgagccgacggtttcgctctgttaaactctggttcgtgattcggtccttcggggtgaagaatcttcaagcacatgtcagacatggtactgaaatggctaaatattttgaatctctggtcagaaacgacccttcctttgaaattcctgccaagaggcaccttggcctggtggtttttcgtctaaagggtcctaattgtctcacagaaaatgtgttaaaggaaatagctaaagctggccgtctcttcctcatcccggccactatccaggacaagttaatcatccgtttcactgtgacatcccagtttaccactagggatgacatcctgagagactggaatctcattcgagatgctgccactctcatcctgagtcagcactgtacttcccaacccagccctcgggttgggaacctcatctcccaaatcaggggtgccagagcctgggcctgtggaacgtcccttcagtctgtcagtggggcaggagatgatccagtccaggccaggaagatcatcaagcagcctcagcgtgtgggagccggtcccatgaaaagggaaaayggcctccatcttgaaaccctgctggacccagttgatgactgcytttcagaagaggccccagatgccaccaagcacaagctgtcctccttcctgttcagttacttgtctgtgcagactaagaagaagacggtgcgctccctcagttgcaacagtgtrccagtgagtgctcagaagccactgcccacagaggcctctgtgaagaatgggggctcctccagggtcagaatcttttccaggtttccagaagacatgatgatgctgaagaaaagtgccttcaaaaaactcatcaaattctacagcgtccccagctttcctgamtgcagctctcaatgtggactccagctgccctgttgccctctgcaggccatggtttagacmcagggccttcagccagagtctgaggatatacttcagggactctgtgaacccctcacaattgtatgccaactttgtgtgcttatgtgtacatgcatttttcttggggcgagttcataattttaatcaaattctcataggggttcatgacccacaataggatacaaacsaagagtttaagccagcatgatccagatgggttcakcagtctggtcagtgagaaagggccgagggtagacaggcagcttctgtggttcagcttgtgacatgatatataacacagaaataaattatgcttgtccctgaaacaaaa

SEQ ID NO: 6819 - DNA, 2385 bp, Homo sapiens
ccggaacccccggcaacgcgcatacgactacacctgctccggagcccgcggcggtacctgcagcggaggagctctgtcttccccttcatctcacgcgagcccggcgtcccgccgcgtgcgccccggcgcagcccgccagtccgcccggagcccgcccagtcgccgcgctgcacgcccggggtgaaccctctgccctcgctgggacagagggccccgcagccgtcatgctttccgccatctacacagtcctggcgggactgctgttcctgccgctcctggtgaacctctgctgcccatacttcttccaggacataggctacttcttgaaggtggccgccgtgggccggagggtgcgcagctacgggmagcggcggccggcgcgcaccatcctgcgggcgttcctggagaaagcgcgccagacgccacacaagcyttttctgctcttccgcgacgagactctcacctacgcgcaggtggaccggcgcagcaatcaagtggcycgggcgctgcacgaccacctcggcctgcgccagggagactgcgtggcgctccttatgggtaacgagccggcctacgtgtggctgtggctggggctggtgaagctgggctgtgccatggcgtgcctcaattacaacatccgcgcgaagtccctgctgcactgcttccagtgctgcggggcgaaggtgctgctggtgtcgccagaactacaagcagctgtcgaagagatactgccaagccttaaaaaagatgatgtgtccatctattatgtgagcagaacttctaacacagatgggattgactctttcctggacaaagtggatgaagtatcaactgaacctatcccagagtcatggaggtctgaagtcactttttccactcctgccttatacatttatacttctggaaccacaggtcttccaaaagcagccatgatcactcatcagcgcatatggtatggaactggcctcacttttgtaagcggattgaaggcagatgatgtcatctatatcactctgcccttttaccacagtgctgcactactgattggcattcacggatgtattgtggctggtgctactcttgccttgcggactaaattttcagccagccagttttgggatgactgcagaaaatacaacgtcactgtcattcagtatatcggtgaactgcttcggtatttatgcaactcaccacagaaaccaaatgaccgtgatcataaagtgagactggcactgggaaatggcttacgaggagatgtgtggagacaatttgtcaagagatttggggacatatgcatctatgagttctatgctgccactgaaggcaatattggatttatgaattatgcgagaaaagttggtgctgttggaagagtaaactacctacagaaaaaaatcataacttatgacctgattaaatatgatgtggagaaagatgaacctgtccgtgatgaaaatggatattgcgtcagagttcccaaaggtgaagttggacttctggtttgcaaaatcacacaacttacaccatttaatggctatgctggagcaaaggctcagacagagaagaaaaaactgagagatgtctttaagaaaggagacctctatttcaacagtggagatctcttaatggttgaccatgaaaatttcatctatttccacgacagagttggagatacattccggtggaaaggggaaaatgtggccaccactgaagttgctgatacagttggactggttgattttgtccaagaagtaaatgtttatggagtgcatgtgccagatcatgagggtcgcattggcatggcctccatcaaaatgaaagaaaaccaygaatttgatggaaagaaactctttcagcacattgctgattacctacctagttatgcaaggccccggtttctaagaatacaggacaccattgagatcactggaacttttaaacaccgcaaaatgaccctggtggaggagggctttaaccctgctgtcatcaaagatgccttgtatttcttggatgacacagcaaaaatgtatgtgcctatgactgaggacatctataatgccataagtgctaaaaccctgaaactctgaatattcccaggaggataactcaacatttccagaaagaaactgaatggacagccacttgatataatccaactttaawttgattgaagattgtgaggaaattttgtaggaaatttgcataccmgtaaagggagacttttttaaataacagttgagtctttgcaagtaaaaagatttagagattattatttttcagtgtgcacctactgtttgtatttgcaaactgagcttgttggagggaaggcattattttttaaaatacttagtaaattaaatgaacaccaacatgtgagatggcact

SEQ ID NO: 6820 - DNA, 3202 bp, Homo sapiens
tgtggaaagagtagaagtgcctgaatgtggtgctgaatcaatacagccagctgtgaggggagcacttcctggacccaggaagggagagtcttcttccaaggtctgaatttcctgctgctgttcacaaagatgctttttatctttaactttttgttttccccacttccgaccccggcgttgatctgcatcctgacatttggagctgccatcttcttgtggctgatcaccagacctcaaccygtcttacctcttcttgacctgaacaatcagtctgtgggaattgagggaggagcacggaagggggtttcccagaagaacaatgacctaacaagttgctgcttctcagatgccaagactaygtatgaggttttccaaagaggactcgctgtgtctgacaatgggccctgcttgggatatagaaaaccaaaccagccctacagatggctatcttacaaacaggtgtctgatagagcagagtacctgggttcctgtctcttgcataaaggttataaatcatcaccagaccagtttgtcggcatctttgctcagaataggccagagtggatcatctccgaattggcttgttacacgtactctatggtagctgtacctctgtatgacaccttgggaccagaagccatcgtacatattgtcaacaaggctgatatcgccrtggtgatctgtgacacaccccaaaaggcattggtgctgatagggaatgtagagaaaggcttcaccccgagcctgaaggtgatcatccttatggacccctttgatgatgacctgaagcaaagaggggagaagagtggaattgagatcttatccctatatgatgctgagaacctaggcaaagagcacttcagaaaacctgtgcctcctagcccagaagacctgagcgtcatctgcttcaccagtgggaccacaggtgaccccaaaggagccatgataacccatcaaaatattgtttcaaatgctgctgcctttctcaaatgtgtggagcatgcttatgagcccactcctgatgatgtggccatatcctacctccctctggctcatatgtttgagaggattgtacaggctgttgtgtacagctgtggagccagagttggattcttccaaggggatattcggttgctggctgacgacatgaagactttgaagcccacattgtttcccgcggtgcctcgactccttaacaggatctacgataaggtacaaaatgaggccaagacacccttgaagaagttcttgttgaagctggctgtttccagtaaattcaaagagcttcaaaagggtatcatcaggcatgatagtttctgggacaagctcatctttgcaaagatccaggacagcctgggcrgaagggttcgtgtaattgtcactggagctgcccccatgtccacttcagtcatgacattcttccgggcagcaatgggatgtcaggtgtatgaagcttrtggtcaaacagaatgcacaggtggctgtacatttacattacctggggactggacatcaggtcacgttggggtgcccctggcttgcaattacgtgaagctggaagatgtggctgacatgaactactttrcagtgaataatgaaggagaggtctgcatcaagggtacaaacgtgttcaaaggatacctgaaggaccctgagaagacacaggaagccctggacagtgatggctggcttcacacaggagacattggtcgctggctcccgaatggaactctgaagatcatcgaccgtaaaaagaacattttcaagctggcccaaggagaatacattgcaccagagaagatagaaaatatctacaacaggagtcaaccagtgttacaaatttttgtacacggggagagcttacggtcatccttagtaggagtggtggttcctgacacagatgtacttccctcatttgcagccaagcttggggtgaagggctcctttgaggaactgtgccaaaaccaagttgtaagggaagccattttagaagacttgcagaaaattgggaaagaaagtggccttaaaacttttgaacaggtcaaagccatttttcttcatccagagccattttccattgaaaatgggctcttgacaccaacattgaaagcaaagcgaggagagctttccaaatactttcggacccaaattgacagcctgtatgagcacatccaggattaggataaggtacttaagtacctgccggcccactgtgcactgcttgtgagaaaatggattaaaaactattcttacatttgttttgcctttcctcctatttttttttaacctgttaaactctaaagccatagcttttgttttatattgagacatataatgtgtaaacttagttcccaaataaatcaatcctgtctttcccatcttcgatgttgctaatattaaggcttcagggctacttttatcaacatgcctgtcttcaagatcccagtttatgttctgtgtccttcctcatgatttccaaccttaatactattagtaaccacaagttcaagggtcaaagggaccctctgtgccttcttctttgttttgtgataaacataacttgccaacagtctctatgcttatttacatcttctactgttcaaactaagagatttttaaattctgaaaaactgcttacaattcatgttttctagccactccacaaaccactaaaattttagttttagcctatcactcatgtcaatcatatctatgagacaaatgtctccgatgctcttctgcgtaaattaaattgtgtactgaagggaaaagtttgatcataccaaacatttcctaaactctctagttagatatctgacttgggagtattaaaaattgggtctatgacataytgtccaaaaggaatgctgttcttaaagcattatttacagtaggaactggggagtaaatctgttccctacagtttgctgctgagctggaagctgtgggggaaggagttgacaggtgggcccagtgaacttttccagtaaatgaagcaagcactgaataaaaacctcctgaactgggaacaaagatctacaggcaagcaagatgcccacacaacaggcttattttctgtgaaggaaccaactgatctcccccacccttggattagagttcctgctctaccttacccacagataacacatgytgtttctacttgtaaatgtaaagtctttaaaataaactattacagatactt

SEQ ID NO: 6821 - DNA, 2943 bp, Homo sapiens
tggaaagagtagaagtgcctgaatgtggtgctgaatcaatacagccagctgtgaggggagcacttcctggacccaggaagggagattttttttttaaggtctgaatttcctgctgctgttcacaaagatgctttttatctttaactttttgttttccccacttccgaccccggcgttgatctgcatcctgacatttggagctgccatcttcttgtggctgatcaccagacctcaaccygtcttacctcttcttgacctgaacaatcagtctgtgggaattgagggaggagcacggaagggggtttcccagaagaacaatgacctaacaagttgctgcttctcagatgccaagactaygtatgaggttttccaaagaggactcgctgtgtctgacaatgggccctgcttgggatatagaaaaccaaaccagccctacagatggctatcttacaaacagtggatcatctccgaattggcttgttacacgtactctatggtagctgtacctctgtatgacaccttgggaccagaagccatcgtacatattgtcaacaaggctgatatcgccrtggtgatctgtgacacaccccaaaaggcattggtgctgatagggaatgtagagaaaggcttcaccccgagcctgaaggtgatcatccttatggacccctttgatgatgacctgaagcaaagaggggagaagagtggaattgagatcttatccctatatgatgctgagaacctaggcaaagagcacttcagaaaacctgtgcctcctagcccagaagacctgagcgtcatctgcttcaccagtgggaccacaggtgaccccaaaggagccatgataacccatcaaaatattgtttcaaatgctgctgcctttctcaaatgtgtggagcatgcttatgagcccactcctgatgatgtggccatatcctacctccctctggctcatatgtttgagaggattgtacaggctgttgtgtacagctgtggagccagagttggattcttccaaggggatattcggttgctggctgacgacatgaagactttgaagcccacattgtttcccgcggtgcctcgactccttaacaggatctacgataaggtacaaaatgaggccaagacacccttgaagaagttcttgttgaagctggctgtttccagtaaattcaaagagcttcaaaagggtatcatcaggcatgatagtttctgggacaagctcatctttgcaaagatccaggacagcctgggcrgaagggttcgtgtaattgtcactggagctgcccccatgtccacttcagtcatgacattcttccgggcagcaatgggatgtcaggtgtatgaagcttrtggtcaaacagaatgcacaggtggctgtacatttacattacctggggactggacatcaggtcacgttggggtgcccctggcttgcaattacgtgaagctggaagatgtggctgacatgaactactttrcagtgaataatgaaggagaggtctgcatcaagggtacaaacgtgttcaaaggatacctgaaggaccctgagaagacacaggaagccctggacagtgatggctggcttcacacaggagacattggtcgctggctcccgaatggaactctgaagatcatcgaccgtaaaaagaacattttcaagctggcccaaggagaatacattgcaccagagaagatagaaaatatctacaacaggagtcaaccagtgttacaaatttttgtacacggggagagcttacggtcatccttagtaggagtggtggttcctgacacagatgtacttccctcatttgcagccaagcttggggtgaagggctcctttgaggaactgtgccaaaaccaagttgtaagggaagccattttagaagacttgcagaaaattgggaaagaaagtggccttaaaacttttgaacaggtcaaagccatttttcttcatccagagccattttccattgaaaatgggctcttgacaccaacattgaaagcaaagcgaggagagctttccaaatactttcggacccaaattgacagcctgtatgagcacatccaggattaggataaggtacttaagtacctgccggcccactgtgcactgcttgtgagaaaatggattaaaaactattcttacatttgttttgcctttcctcctatttttttttaacctgttaaactctaaagccatagcttttgttttatattgagacatataatgtgtaaacttagttcccaaataaatcaatcctgtctttcccatcttcgatgttgctaatattaaggcttcagggctacttttatcaacatgcctgtcttcaagatcccagtttatgttctgtgtccttcctcatgatttccaaccttaatactattagtaaccacaagttcaagggtcaaagggaccctctgtgccttcttctttgttttgtgataaacataacttgccaacagtctctatgcttatttacatcttctactgttcaaactaagagatttttaaattctgaaaaactgcttacaattcatgttttctagccactccacaaaccactaaaattttagttttagcctatcactcatgtcaatcatatctatgagacaaatgtctccgatgctcttctgcgtaaattaaattgtgtactgaagggaaaagtttgatcataccaaacatttcctaaactctctagttagatatctgacttgggagtattaaaaattgggtctatgacataytgtccaaaaggaatgctgttcttaaagcattatttacagtaggaactggggagtaaatctgttcccggcccagtgaacttttccagtaaatgaagcaagcactgaataaaaacctcctgaactgggaacaaagggattagagttcctgctctaccttacccacagataacacatgytgtttctacttgtaaatgt

SEQ ID NO: 6822 - DNA, 3788 bp, Homo sapiens
cgatttttaagttaagttttgaggtgtgactgtatcagagggaaagaaaccatgccaattgaacgactcacagccctgtcgttcctgacttgcttattttcttggctttgccagaacttcttcagagaccaaggcaggcagctctggcgactggagagaggcggggtagaaggtgtttgtgtgggtctgagggctgaggtaccctctagccagactttcctgtcctccgaatccagcagggaacagcgtcacctctgcctctgtgaggcttctgatctgagggggcacctcaagtcattttagtttgtttgttttcatcttagttgaaagatgataggccacaggagggcagggtcaactgtgttgaggcaagctggcttttgtgtcggcccttaggggctgaggtgaaaggctttgacacggagccagggtagctttggcagcttctcccctcctggtcagaacacttccactttcagttgtgaaaaaaaaaattaaaaccaggaagtgaagtccccgagcacgttagaaagcctgacatggcctgactcgggacagctcagagcagggcagaactggggacactctgggccggccttctgcctgcatggacgctctgaagccaccctgtctctggaggaaccacgagcgagggaagaaggacagggactcgtgtggcaggaagaactcagagccgggaagcccccattcactagaagcactgagagatgcggccccctcgcagggtctgaatttcctgctgctgttcacaaagatgctttttatctttaactttttgttttccccacttccgaccccggcgttgatctgcatcctgacatttggagctgccatcttcttgtggctgatcaccagacctcaaccygtcttacctcttcttgacctgaacaatcagtctgtgggaattgagggaggagcacggaagggggtttcccagaagaacaatgacctaacaagttgctgcttctcagatgccaagactaygtatgaggttttccaaagaggactcgctgtgtctggtaagcctggtggtctgtccttgcctgaagaagacaaggtgtctgatagagcagagtacctgggttcctgtctcttgcataaaggttataaatcatcaccagaccagtttgtcggcatctttgctcagaataggccagagtggatcatctccgaattggcttgttacacgtactctatggtagctgtacctctgtatgacaccttgggaccagaagccatcgtacatattgtcaacaaggctgatatcgccrtggtgatctgtgacacaccccaaaaggcattggtgctgatagggaatgtagagaaaggcttcaccccgagcctgaaggtgatcatccttatggacccctttgatgatgacctgaagcaaagaggggagaagagtggaattgagatcttatccctatatgatgctgagcctcctagcccagaagacctgagcgtcatctgcttcaccagtgggaccacaggtgaccccaaaggagccatgataacccatcaaaatattgtttcaaatgctgctgcctttctcaaatgtgtggagcatgcttatgagcccactcctgatgatgtggccatatcctacctccctctggctcatatgtttgagaggattgtacaggctgttgtgtacagctgtggagccagagttggattcttccaaggggatattcggttgctggctgacgacatgaagactttgaagcccacattgtttcccgcggtgcctcgactccttaacaggatctacgataaggtacaaaatgaggccaagacacccttgaagaagttcttgttgaagctggctgtttccagtaaattcaaagagcttcaaaagggtatcatcaggcatgatagtttctgggacaagctcatctttgcaaagatccaggacagcctgggcrgaagggttcgtgtaattgtcactggagctgcccccatgtccacttcagtcatgacattcttccgggcagcaatgggatgtcaggtgtatgaagcttrtggtcaaacagaatgcacaggtggctgtacatttacattacctggggactggacatcaggtcacgttggggtgcccctggcttgcaattacgtgaagctggaagatgtggctgacatgaactactttrcagtgaataatgaaggagaggtctgcatcaagggtacaaacgtgttcaaaggatacctgaaggaccctgagaagacacaggaagccctggacagtgatggctggcttcacacaggagacattggtcgctggctcccgaatggaactctgaagatcatcgaccgtaaaaagaacattttcaagctggcccaaggagaatacattgcaccagagaagatagaaaatatctacaacaggagtcaaccagtgttacaaatttttgtacacggggagagcttacggtcatccttagtaggagtggtggttcctgacacagatgtacttccctcatttgcagccaagcttggggtgaagggctcctttgaggaactgtgccaaaaccaagttgtaagggaagccattttagaagacttgcagaaaattgggaaagaaagtggccttaaaacttttgaacaggtcaaagccatttttcttcatccagagccattttccattgaaaatgggctcttgacaccaacattgaaagcaaagcgaggagagctttccaaatactttcggacccaaattgacagcctgtatgagcacatccaggattaggataaggtacttaagtacctgccggcccactgtgcactgcttgtgagaaaatggattaaaaactattcttacatttgttttgcctttcctcctatttttttttaacctgttaaactctaaagccatagcttttgttttatattgagacatataatgtgtaaacttagttcccaaataaatcaatcctgtctttcccatcttcgatgttgctaatattaaggcttcagggctacttttatcaacatgcctgtcttcaagatcccagtttatgttctgtgtccttcctcatgatttccaaccttaatactattagtaaccacaagttcaagggtcaaagggaccctctgtgccttcttctttgttttgtgataaacataacttgccaacagtctctatgcttatttacatcttctactgttcaaactaagagatttttaaattctgaaaaactgcttacaattcatgttttctagccactccacaaaccactaaaattttagttttagcctatcactcatgtcaatcatatctatgagacaaatgtctccgatgctcttctgcgtaaattaaattgtgtactgaagggaaaagtttgatcataccaaacatttcctaaactctctagttagatatctgacttgggagtattaaaaattgggtctatgacataytgtccaaaaggaatgctgttcttaaagcattatttacagtaggaactggggagtaaatctgttccctacagtttgctgctgagctggaagctgtgggggaaggagttgacaggtgggcccagtgaacttttccagtaaatgaagcaagcactgaataaaaacctcctgaactgggaacaaagatctacaggcaagcaagatgcccacacaacaggcttattttctgtgaaggaaccaactgatctcccccacccttggattagagttcctgctctaccttacccacagataacacatgytgtttctacttgtaaatgtaaagtctttaaaataaactattacagatactt

SEQ ID NO: 6823 - DNA, 3848 bp, Homo sapiens
cgatttttaagttaagttttgaggtgtgactgtatcagagggaaagaaaccatgccaattgaacgactcacagccctgtcgttcctgacttgcttattttcttggctttgccagaacttcttcagagaccaaggcaggcagctctggcgactggagagaggcggggtagaaggtgtttgtgtgggtctgagggctgaggtaccctctagccagactttcctgtcctccgaatccagcagggaacagcgtcacctctgcctctgtgaggcttctgatctgagggggcacctcaagtcattttagtttgtttgttttcatcttagttgaaagatgataggccacaggagggcagggtcaactgtgttgaggcaagctggcttttgtgtcggcccttaggggctgaggtgaaaggctttgacacggagccagggtagctttggcagcttctcccctcctggtcagaacacttccactttcagttgtgaaaaaaaaaattaaaaccaggaagtgaagtccccgagcacgttagaaagcctgacatggcctgactcgggacagctcagagcagggcagaactggggacactctgggccggccttctgcctgcatggacgctctgaagccaccctgtctctggaggaaccacgagcgagggaagaaggacagggactcgtgtggcaggaagaactcagagccgggaagcccccattcactagaagcactgagagatgcggccccctcgcagggtctgaatttcctgctgctgttcacaaagatgctttttatctttaactttttgttttccccacttccgaccccggcgttgatctgcatcctgacatttggagctgccatcttcttgtggctgatcaccagacctcaaccygtcttacctcttcttgacctgaacaatcagtctgtgggaattgagggaggagcacggaagggggtttcccagaagaacaatgacctaacaagttgctgcttctcagatgccaagactaygtatgaggttttccaaagaggactcgctgtgtctgacaatgggccctgcttgggatatagaaaaccaaaccagccctacagatggctatcttacaaacaggtgtctgatagagcagagtacctgggttcctgtctcttgcataaaggttataaatcatcaccagaccagtttgtcggcatctttgctcagaataggccagagtggatcatctccgaattggcttgttacacgtactctatggtagctgtacctctgtatgacaccttgggaccagaagccatcgtacatattgtcaacaaggctgatatcgccrtggtgatctgtgacacaccccaaaaggcattggtgctgatagggaatgtagagaaaggcttcaccccgagcctgaaggtgatcatccttatggacccctttgatgatgacctgaagcaaagaggggagaagagtggaattgagatcttatccctatatgatgctgagaacctaggcaaagagcacttcagaaaacctgtgcctcctagcccagaagacctgagcgtcatctgcttcaccagtgggaccacaggtgaccccaaaggagccatgataacccatcaaaatattgtttcaaatgctgctgcctttctcaaatgtgtggagcatgcttatgagcccactcctgatgatgtggccatatcctacctccctctggctcatatgtttgagaggattgtacaggctgttgtgtacagctgtggagccagagttggattcttccaaggggatattcggttgctggctgacgacatgaagactttgaagcccacattgtttcccgcggtgcctcgactccttaacaggatctacgataaggtacaaaatgaggccaagacacccttgaagaagttcttgttgaagctggctgtttccagtaaattcaaagagcttcaaaagggtatcatcaggcatgatagtttctgggacaagctcatctttgcaaagatccaggacagcctgggcrgaagggttcgtgtaattgtcactggagctgcccccatgtccacttcagtcatgacattcttccgggcagcaatgggatgtcaggtgtatgaagcttrtggtcaaacagaatgcacaggtggctgtacatttacattacctggggactggacatcaggtcacgttggggtgcccctggcttgcaattacgtgaagctggaagatgtggctgacatgaactactttrcagtgaataatgaaggagaggtctgcatcaagggtacaaacgtgttcaaaggatacctgaaggaccctgagaagacacaggaagccctggacagtgatggctggcttcacacaggagacattggtcgctggctcccgaatggaactctgaagatcatcgaccgtaaaaagaacattttcaagctggcccaaggagaatacattgcaccagagaagatagaaaatatctacaacaggagtcaaccagtgttacaaatttttgtacacggggagagcttacggtcatccttagtaggagtggtggttcctgacacagatgtacttccctcatttgcagccaagcttggggtgaagggctcctttgaggaactgtgccaaaaccaagttgtaagggaagccattttagaagacttgcagaaaattgggaaagaaagtggccttaaaacttttgaacaggtcaaagccatttttcttcatccagagccattttccattgaaaatgggctcttgacaccaacattgaaagcaaagcgaggagagctttccaaatactttcggacccaaattgacagcctgtatgagcacatccaggattaggataaggtacttaagtacctgccggcccactgtgcactgcttgtgagaaaatggattaaaaactattcttacatttgttttgcctttcctcctatttttttttaacctgttaaactctaaagccatagcttttgttttatattgagacatataatgtgtaaacttagttcccaaataaatcaatcctgtctttcccatcttcgatgttgctaatattaaggcttcagggctacttttatcaacatgcctgtcttcaagatcccagtttatgttctgtgtccttcctcatgatttccaaccttaatactattagtaaccacaagttcaagggtcaaagggaccctctgtgccttcttctttgttttgtgataaacataacttgccaacagtctctatgcttatttacatcttctactgttcaaactaagagatttttaaattctgaaaaactgcttacaattcatgttttctagccactccacaaaccactaaaattttagttttagcctatcactcatgtcaatcatatctatgagacaaatgtctccgatgctcttctgcgtaaattaaattgtgtactgaagggaaaagtttgatcataccaaacatttcctaaactctctagttagatatctgacttgggagtattaaaaattgggtctatgacataytgtccaaaaggaatgctgttcttaaagcattatttacagtaggaactggggagtaaatctgttccctacagtttgctgctgagctggaagctgtgggggaaggagttgacaggtgggcccagtgaacttttccagtaaatgaagcaagcactgaataaaaacctcctgaactgggaacaaagatctacaggcaagcaagatgcccacacaacaggcttattttctgtgaaggaaccaactgatctcccccacccttggattagagttcctgctctaccttacccacagataacacatgytgtttctacttgtaaatgtaaagtctttaaaataaactattacagatactt

SEQ ID NO: 6824 - DNA, 3045 bp, Homo sapiens
tggaaagagtagaagtgcctgaatgtggtgctgaatcaatacagccagctgtgaggggagcacttcctggacccaggaagggagattttttttttaaggtctgaatttcctgctgctgttcacaaagatgctttttatctttaactttttgttttccccacttccgaccccggcgttgatctgcatcctgacatttggagctgccatcttcttgtggctgatcaccagacctcaaccygtcttacctcttcttgacctgaacaatcagtctgtgggaattgagggaggagcacggaagggggtttcccagaagaacaatgacctaacaagttgctgcttctcagatgccaagactaygtatgaggttttccaaagaggactcgctgtgtctgacaatgggccctgcttgggatatagaaaaccaaaccagccctacagatggctatcttacaaacaggtgtctgatagagcagagtacctgggttcctgtctcttgcataaaggttataaatcatcaccagaccagtttgtcggcatctttgctcagaataggccagagtggatcatctccgaattggcttgttacacgtactctatggtagctgtacctctgtatgacaccttgggaccagaagccatcgtacatattgtcaacaaggctgatatcgccrtggtgatctgtgacacaccccaaaaggcattggtgctgatagggaatgtagagaaaggcttcaccccgagcctgaaggtgatcatccttatggacccctttgatgatgacctgaagcaaagaggggagaagagtggaattgagatcttatccctatatgatgctgagaacctaggcaaagagcacttcagaaaacctgtgcctcctagcccagaagacctgagcgtcatctgcttcaccagtgggaccacaggtgaccccaaaggagccatgataacccatcaaaatattgtttcaaatgctgctgcctttctcaaatgtgtggagcatgcttatgagcccactcctgatgatgtggccatatcctacctccctctggctcatatgtttgagaggattgtacaggctgttgtgtacagctgtggagccagagttggattcttccaaggggatattcggttgctggctgacgacatgaagactttgaagcccacattgtttcccgcggtgcctcgactccttaacaggatctacgataaggtacaaaatgaggccaagacacccttgaagaagttcttgttgaagctggctgtttccagtaaattcaaagagcttcaaaagggtatcatcaggcatgatagtttctgggacaagctcatctttgcaaagatccaggacagcctgggcrgaagggttcgtgtaattgtcactggagctgcccccatgtccacttcagtcatgacattcttccgggcagcaatgggatgtcaggtgtatgaagcttrtggtcaaacagaatgcacaggtggctgtacatttacattacctggggactggacatcaggtcacgttggggtgcccctggcttgcaattacgtgaagctggaagatgtggctgacatgaactactttrcagtgaataatgaaggagaggtctgcatcaagggtacaaacgtgttcaaaggatacctgaaggaccctgagaagacacaggaagccctggacagtgatggctggcttcacacaggagacattggtcgctggctcccgaatggaactctgaagatcatcgaccgtaaaaagaacattttcaagctggcccaaggagaatacattgcaccagagaagatagaaaatatctacaacaggagtcaaccagtgttacaaatttttgtacacggggagagcttacggtcatccttagtaggagtggtggttcctgacacagatgtacttccctcatttgcagccaagcttggggtgaagggctcctttgaggaactgtgccaaaaccaagttgtaagggaagccattttagaagacttgcagaaaattgggaaagaaagtggccttaaaacttttgaacaggtcaaagccatttttcttcatccagagccattttccattgaaaatgggctcttgacaccaacattgaaagcaaagcgaggagagctttccaaatactttcggacccaaattgacagcctgtatgagcacatccaggattaggataaggtacttaagtacctgccggcccactgtgcactgcttgtgagaaaatggattaaaaactattcttacatttgttttgcctttcctcctatttttttttaacctgttaaactctaaagccatagcttttgttttatattgagacatataatgtgtaaacttagttcccaaataaatcaatcctgtctttcccatcttcgatgttgctaatattaaggcttcagggctacttttatcaacatgcctgtcttcaagatcccagtttatgttctgtgtccttcctcatgatttccaaccttaatactattagtaaccacaagttcaagggtcaaagggaccctctgtgccttcttctttgttttgtgataaacataacttgccaacagtctctatgcttatttacatcttctactgttcaaactaagagatttttaaattctgaaaaactgcttacaattcatgttttctagccactccacaaaccactaaaattttagttttagcctatcactcatgtcaatcatatctatgagacaaatgtctccgatgctcttctgcgtaaattaaattgtgtactgaagggaaaagtttgatcataccaaacatttcctaaactctctagttagatatctgacttgggagtattaaaaattgggtctatgacataytgtccaaaaggaatgctgttcttaaagcattatttacagtaggaactggggagtaaatctgttcccggcccagtgaacttttccagtaaatgaagcaagcactgaataaaaacctcctgaactgggaacaaagggattagagttcctgctctaccttacccacagataacacatgytgtttctacttgtaaatgt

SEQ ID NO: 6825 - DNA, 3140 bp, Homo sapiens
tggaaagagtagaagtgcctgaatgtggtgctgaatcaatacagccagctgtgaggggagcacttcctggacccaggaagggagattttttttttaaggtctgaatttcctgctgctgttcacaaagatgctttttatctttaactttttgttttccccacttccgaccccggcgttgatctgcatcctgacatttggagctgccatcttcttgtggctgatcaccagacctcaaccygtcttacctcttcttgacctgaacaatcagtctgtgggaattgagggaggagcacggaagggggtttcccagaagaacaatgacctaacaagttgctgcttctcagatgccaagactaygtatgaggttttccaaagaggactcgctgtgtctggtaagcctggtggtctgtccttgcctgaagaagacaaggtgtctgatagagcagagtacctgggttcctgtctcttgcataaaggttataaatcatcaccagaccagtttgtcggcatctttgctcagaataggccagagtggatcatctccgaattggcttgttacacgtactctatggtagctgtacctctgtatgacaccttgggaccagaagccatcgtacatattgtcaacaaggctgatatcgccrtggtgatctgtgacacaccccaaaaggcattggtgctgatagggaatgtagagaaaggcttcaccccgagcctgaaggtgatcatccttatggacccctttgatgatgacctgaagcaaagaggggagaagagtggaattgagatcttatccctatatgatgctgagcctcctagcccagaagacctgagcgtcatctgcttcaccagtgggaccacaggtgaccccaaaggagccatgataacccatcaaaatattgtttcaaatgctgctgcctttctcaaatgtgtggagcatgcttatgagcccactcctgatgatgtggccatatcctacctccctctggctcatatgtttgagaggattgtacaggctgttgtgtacagctgtggagccagagttggattcttccaaggggatattcggttgctggctgacgacatgaagactttgaagcccacattgtttcccgcggtgcctcgactccttaacaggatctacgataaggtacaaaatgaggccaagacacccttgaagaagttcttgttgaagctggctgtttccagtaaattcaaagagcttcaaaagggtatcatcaggcatgatagtttctgggacaagctcatctttgcaaagatccaggacagcctgggcrgaagggttcgtgtaattgtcactggagctgcccccatgtccacttcagtcatgacattcttccgggcagcaatgggatgtcaggtgtatgaagcttrtggtcaaacagaatgcacaggtggctgtacatttacattacctggggactggacatcaggtcacgttggggtgcccctggcttgcaattacgtgaagctggaagatgtggctgacatgaactactttrcagtgaataatgaaggagaggtctgcatcaagggtacaaacgtgttcaaaggatacctgaaggaccctgagaagacacaggaagccctggacagtgatggctggcttcacacaggagacattggtcgctggctcccgaatggaactctgaagatcatcgaccgtaaaaagaacattttcaagctggcccaaggagaatacattgcaccagagaagatagaaaatatctacaacaggagtcaaccagtgttacaaatttttgtacacggggagagcttacggtcatccttagtaggagtggtggttcctgacacagatgtacttccctcatttgcagccaagcttggggtgaagggctcctttgaggaactgtgccaaaaccaagttgtaagggaagccattttagaagacttgcagaaaattgggaaagaaagtggccttaaaacttttgaacaggtcaaagccatttttcttcatccagagccattttccattgaaaatgggctcttgacaccaacattgaaagcaaagcgaggagagctttccaaatactttcggacccaaattgacagcctgtatgagcacatccaggattaggataaggtacttaagtacctgccggcccactgtgcactgcttgtgagaaaatggattaaaaactattcttacatttgttttgcctttcctcctatttttttttaacctgttaaactctaaagccatagcttttgttttatattgagacatataatgtgtaaacttagttcccaaataaatcaatcctgtctttcccatcttcgatgttgctaatattaaggcttcagggctacttttatcaacatgcctgtcttcaagatcccagtttatgttctgtgtccttcctcatgatttccaaccttaatactattagtaaccacaagttcaagggtcaaagggaccctctgtgccttcttctttgttttgtgataaacataacttgccaacagtctctatgcttatttacatcttctactgttcaaactaagagatttttaaattctgaaaaactgcttacaattcatgttttctagccactccacaaaccactaaaattttagttttagcctatcactcatgtcaatcatatctatgagacaaatgtctccgatgctcttctgcgtaaattaaattgtgtactgaagggaaaagtttgatcataccaaacatttcctaaactctctagttagatatctgacttgggagtattaaaaattgggtctatgacataytgtccaaaaggaatgctgttcttaaagcattatttacagtaggaactggggagtaaatctgttccctacagtttgctgctgagctggaagctgtgggggaaggagttgacaggtgggcccagtgaacttttccagtaaatgaagcaagcactgaataaaaacctcctgaactgggaacaaagatctacaggcaagcaagatgcccacacaacaggcttattttctgtgaaggaaccaactgatctcccccacccttggattagagttcctgctctaccttacccacagataacacatgytgtttctacttgtaaatgtaaagtctttaaaataaactattacagatactt

SEQ ID NO: 6826 - DNA, 3047 bp, Homo sapiens
tgtggaaagagtagaagtgcctgaatgtggtgctgaatcaatacagccagctgtgaggggagcacttcctggacccaggaagggagagtcttcttccaaggtctgaatttcctgctgctgttcacaaagatgctttttatctttaactttttgttttccccacttccgaccccggcgttgatctgcatcctgacatttggagctgccatcttcttgtggctgatcaccagacctcaaccygtcttacctcttcttgacctgaacaatcagtctgtgggaattgagggaggagcacggaagggggtttcccagaagaacaatgacctaacaagttgctgcttctcagatgccaagactaygtatgaggttttccaaagaggactcgctgtgtctgacaatgggccctgcttgggatatagaaaaccaaaccagccctacagatggctatcttacaaacaggtgtctgatagagcagagtacctgggttcctgtctcttgcataaaggttataaatcatcaccagaccagtttgtcggcatctttgctcagaataggccagagtggatcatctccgaattggcttgttacacgtactctatggtagctgtacctctgtatgacaccttgggaccagaagccatcgtacatattgtcaacaaggctgatatcgccrtggtgatctgtgacacaccccaaaaggcattggtgctgatagggaatgtagagaaaggcttcaccccgagcctgaaggtgatcatccttatggacccctttgatgatgacctgaagcaaagaggggagaagagtggaattgagatcttatccctatatgatgctgagaacctaggcaaagagcacttcagaaaacctgtgcctcctagcccagaagacctgagcgtcatctgcttcaccagtgggaccacaggtgaccccaaaggagccatgataacccatcaaaatattgtttcaaatgctgctgcctttctcaaatgtgtggagcatgcttatgagcccactcctgatgatgtggccatatcctacctccctctggctcatatgtttgagaggattgtacaggctgttgtgtacagctgtggagccagagttggattcttccaaggggatattcggttgctggctgacgacatgaagactttgaagcccacattgtttcccgcggtgcctcgactccttaacaggatctacgataaggtacaaaatgaggccaagacacccttgaagaagttcttgttgaagctggctgtttccagtaaattcaaagagcttcaaaagggtatcatcaggcatgatagtttctgggacaagctcatctttgcaaagatccaggacagcctgggcrgaagggttcgtgtaattgtcactggagctgcccccatgtccacttcagtcatgacattcttccgggcagcaatgggatgtcaggtgtatgaagcttrtggtcaaacagaatgcacaggtggctgtacatttacattacctggggactggacatcaggtcacgttggggtgcccctggcttgcaattacgtgaagctggaagatgtggctgacatgaactactttrcagtgaataatgaaggagaggtctgcatcaagggtacaaacgtgttcaaaggatacctgaaggaccctgagaagacacaggaagccctggacagtgatggctggcttcacacaggagacattggtcgctggctcccgaatggaactctgaagatcatcgaccgtaaaaagaacattttcaagctggcccaaggagaatacattgcaccagagaagatagaaaatatctacaacaggagtcaaccagtgttacaaatttttgtacacggggagagcttacggtcatccttagtaggagtggtggttcctgacacagatgtacttccctcatttgcagccaagcttggggtgaagggctcctttgaggaactgtgccaaaaccaagttgtaagggaagccattttagaagacttgcagaaaattgggaaagaaagtggccttaaaacttttgaacaggtcaaagccatttttcttcatccagagccattttccattgaaaatgggctcttgacaccaacattgaaagcaaagcgaggagagctttccaaatactttcggacccaaattgacagcctgtatgagcacatccaggattaggataaggtacttaagtacctgccggcccactgtgcactgcttgtgagaaaatggattaaaaactattcttacatttgttttgcctttcctcctatttttttttaacctgttaaactctaaagccatagcttttgttttatattgagacatataatgtgtaaacttagttcccaaataaatcaatcctgtctttcccatcttcgatgttgctaatattaaggcttcagggctacttttatcaacatgcctgtcttcaagatcccagtttatgttctgtgtccttcctcatgatttccaaccttaatactattagtaaccacaagttcaagggtcaaagggaccctctgtgccttcttctttgttttgtgataaacataacttgccaacagtctctatgcttatttacatcttctactgttcaaactaagagatttttaaattctgaaaaactgcttacaattcatgttttctagccactccacaaaccactaaaattttagttttagcctatcactcatgtcaatcatatctatgagacaaatgtctccgatgctcttctgcgtaaattaaattgtgtactgaagggaaaagtttgatcataccaaacatttcctaaactctctagttagatatctgacttgggagtattaaaaattgggtctatgacataytgtccaaaaggaatgctgttcttaaagcattatttacagtaggaactggggagtaaatctgttcccggcccagtgaacttttccagtaaatgaagcaagcactgaataaaaacctcctgaactgggaacaaagggattagagttcctgctctaccttacccacagataacacatgytgtttctacttgtaaatgt

SEQ ID NO: 6827 - DNA, 1172 bp, Homo sapiens
atggtacatggtatgtactatgaaacatcctggaagtctattaaagcgtcatacagacccacatccaggaacagagccctttgctcctccctcagaatgaatgagacgagaaatcagatgtttatgcccaagaaaagtaggaatttgtacagcacttctcccagattgttagggtgctgactaaggatgagatggggtacccagagacaggagatgctattgcccagctcaaggaggtttgatgccattgaaggcaagtatcactgaggtttgatggtgctagtagcgttccagragctggtggagccaaggaaacaggttgctcatagtctccaatgggccctgactgtgggctcgtgtgtggaactgctgcaagctttcttcctggtggcagatgacatcatggattcatccttcacctgccggggacagatctgctggtatcagaagccaggcatggatttagatgccatcaatgatgttatcyttctggaagcatgtatctaccacctgctgaagatctattgcatctaccacctgctgaagatctattgccgggagcagccctattacctgaacctgactgtgctcttcctgcagagttcctatcagactgagattaggcagaccctggacctcatcacagcmccccagggcaatgtggatcttggcagattcactgaaaagaggcacaaatctattgtcaagtacaagacagctttctactccttctaccttcctgtagctgcagccatgtacatggcaggaattgatggcaagaaggmgcacgccaatgccaagaagatcctgctggggatgggagagttccttcaggttcaggatgattaccttgacctctytggggaccccagtgtgaccggcaaagttggcactgacatccaggacaacaaatgcagctggctggtggttcagtgtctgcaacaggccactccgtaacagtaccagatcctgaaggaaaattcaggcagaaggaagccgagaaggtggcctgggtgaaggcactrtatgaggagctggatctaccagcygttttcttgcaatatgaggaagacacttacagtcacatcatgggtctcatcgaacagtatgcagcgctcctgcccccagccatctttctggggcttgcacrcaaaatctacaagcggaaaaag

SEQ ID NO: 6828 - DNA, 4513 bp, Homo sapiens
caattgtcakacgacttgcagtgagcgtcaggagcacgtccaggaactcctcagcagcgcctccttcagctccacagccagacgccctcagacagcaaagcctacccccgcgccgcgccctgcccgccgctssgatrctcgcccgcgccctgctgctgtgcgcggtcctggcgctcagccatacagcaaatccttgctgttcccacccatgtcaaaaccgaggtgtatgtatgagtgtgggatttgaccagtataagtgcgattgtacccggacaggattctatggagaaaactgctcaacaccggaatttttgacaagaataaaattatttctgaaacccactccaaacacagtgcactacatacttacccacttcaagggattttggaacgttgtgaataacattcccttccttcgaaatgcaattatgagttatgtsttgacatccagatcacatttgattgacagtccaccaacttacaatgctgactatggctacaaaagctgggaagccttctctaayctctcctattatactagagcccttcctcctgtgcctgatgattgcccgactcccttgggtgtcaaaggtaaaaagcagcttcctgattcaaatgagattgtggaaaaattgcttctaagaagaaagttcatccctgatccccagggctcaaacatgatgtttgcattctttgcccagcacttcacgcatcagtttttcaagacagatcataagcgagggccagctttcaccaacgggctgggccatggggtggacttaaatcatatttacggtgaaactctggctagacagcrtaaactgcgccttttcaaggatggaaaaatgaaatatcagataattgatggagagatgtatcctcccacagtcaaagatactcaggcagagatgatctaccctcctcaagtccctgagcatctacggtttgctgtggggcaggaggtctttggtctggtgcctggtctgatgatgtatgccacaatctggctgcgggaacacaacagagtatgcgaygtgcttaaacaggagcatcctgaatggggtgatgagcagttgttccagacaagcaggctaatactgataggagagactattaagattgtgattgaagattatgtrcaacacttgagtggctatcacttcaaactgaaatttgacccagaactacttttcaacaaacaattccagtaccaaaatcgtattgctgctgaatttaacaccctctatcactggcatccccttctgcctgacacctttcaaattcatgaccagaaatacaactatcaacagtttatctacaacaactctatattrctggaacayggaattacccagtttgttgaatcattcaccaggcaaattgctggcagggttgctggtggtaggaatgttccacccgcagtacagaaagtatcacaggcttccattgaccagagcaggcagatgaaataccagtcttttaatgagtaccgcaaacgctttatgctgaagccctatgaatcatttgaagaacttacaggagaaaaggaaatgtctgcagagttggaagcactctatggtgacatcgatgctgtggrgctgtatcctgcccttctggtagaaaagcctcggccagatgccatctttggtgaaaccatggtagaagytggagcaccattctccttgaaaggacttatgggtaatgttatatgttctcctgcctactggaagccaagcacttttggtggagaagtgggttttcaaatcatcaacactgcctcaattcagtctctcatctgcaataacgtgaagggctgtccctttacttcattcagtgttccagatccagagctcattaaaacagtcaccatcaatgcaagttcttcccgmtccrgactagatgatatcaatcccacagtactactaaaagaacgttcgactgaactgtagaagtctaatgatcatatttatttatttatatgaaccatgtctattaatttaattatttaataatatttatattaaactccttatgttacttaacatcttctgtaacagaagtcagtactcctgttgcggagaaaggagtcatacttgtgaagacttttatgtcactactctaaagattttgctgttgctgttaagtttggaaaacagtttttattctgttttataaaccagagagaaatgagttttgacgtctttttacttgaatttcaacttatattataagaacgaaagtaaagatgtttgaatacttaaacactrtcacaagatggcaaaatgctgaaagtttttacactgtcgatgtttccaatgcatcttccatgatgcattagaagtaactaatgtttgaaattttaaagtacttttggtyatttttctgtcatcaaacaaaaacaggtatcagtgcattattaaatgaatatttaaattagacattaccartaatttcatgtctactttttaaaatcagcaatgaaacaataatttgaaatttctaaattcatagggtagaatcacctgtaaaagcttgtttgatttcttaaagttattaaacttgtacatataccaaaaagaagctgtcttggatttaaatctgtaaaatcagwwgaaattttactacaattgcttgttaaaatattttataagtgatgttcctttttcaccaagagtataaacctttttagtgtgactgttaaaacttccttttaaatcaaaatgccaaatttattaaggtggtggagccactgcagtgttatctyaaaataagaatattttgttgagatattccagaatttgtttatatggctggtaacatgtaaaatctatatcagcaaaagggtctacctttaaaataagcaataacaaagaagaaaaccaaattattgttcaaatttaggtttaaacttttgaagcaaacttttttttatccttgtgcactgcaggcctggtactcagattttgctatgaggttaatgaagtaccaagctgtgcttgaataaygatatgttttctcagatttyctgttgtacagtttaatttagcagtccatatcacattgcaaaagtagcaatgacctcataaaatacctcttcaaaatgcttaaattcatttcacacattaattttatctcagtcttgaagccaattcagtaggtgcattggaatcaagcctggctacctgcatgctgttccttttcttttcttcttttagccattttgctaagagacacagtcttctcatcacttcgtttctcctattttgttttactagttttaagatcagagttcactttctttggactctgcctatattttcttacctgaacttttgcaagttttcaggtaaacctcagctcaggactgctatttagctcctcttaagaagattaaaagagaaaaaaaaaggcccttttaaaaatagtatacacttattttaagtgaaaagcagagaattttatttatagctaattttagctatctgtaaccaagatggatgcaaagaggctagtgcctcagagagaactgtacggggtttgtgactggaaaaagttacgttcccattctaattaatgccctttcttatttaaaaacaaaaccaaatgatatctaagtagttctcagcaataataataatgacgataatacttcttttccacatctcattgtcactgacatttaatggtactgtatattacttaatttattgaagattattatttatgtcttattaggacactatggttataaactgtgtttaagcctacaatcattgatttttttttgttatgtcacaatcagtatatyttctttggggttacctctctgaatattatgtaamcaatccaaagaaatgattgtattaagatttgtgaataaatttttagaaatctgattggcatattgagatatttaaggttgaatgtttgtccttaggataggcctatgtgctagcccacaaagaatattgtctcattagcctgaatgtgccataagactgaccttttaaaatgttttgagggatctgtggatgcttcgttaatttgttcagccacaatttattgagaaaatattctgtgtcaagcactgtgggttttaatatttttaaatcaaacgctgattacagataatagtatttatataaataattgaaaaaaatkttcttttrggaagagggagaaaatgaaataaatatcattaaagataactcaggagaatcttctttacaattttacrtttagaatgtttaaggttaagaaagaaatagtcaatatgcttgtataaaacactgttcactgttttttttaaaaaaaaaacttgatttgttattaacattgatctgctgacaaaacctgggaatttgggttgtgtatgygaatgtttcagtgcctcagacaaatgtgtatttaacttatgtaaaagataagtctggaaataaatgtctgtttatttttgtactatttaaaaattgacagatcttttctgaagataaactttgattgtttctataca

SEQ ID NO: 6829 - DNA, 3061 bp, Homo sapiens
gggaagcgcttcctggttcgagccgagaggggcgaatccggcttcgctccgcgccgccgggaggagctgtctgcagccccctcctcccgccctcgcctctccctcctccttctcccgccctcctcgccgatccgggcggtgctggcagccggagcggcggcgggcgggccgagcagccggggcagccgcgcgtgggcatccacgggcgccgagcctccgtccgtgtctctatccctcccgggcctttgtcagcgcgcccgctgggagcggggccgagagcgccggttccagtcagacagccccgcaggtcagcggccgggccgagggcgccagagggggccatgtcgtaccagggcaagaagagcatcccgcacatcacgagtgaccgactcctcatcaaaggtggacggatcatcaacgatgaccaatccctttatgctgacgtctacctggaggatggacttatcaaacaaataggagagaacttaatcgttcctggtggagtgaagaccattgaagccaacgggcggatggttattcccggaggtattgatgtcaacacgtacctgcagaagccctcccaggggatgactgcggctgatgacttcttccaagggaccagggcggcactggtgggcgggaccacgatgatcattgaccatgttgttcctgaacctgggtccagcctactgacctctttcgagaagtggcacgaagcagctgacaccaaatcctgctgtgattactccctccacgtggacatcacaagctggtacgatggcgttcgggaggagctggaggtgctggtgcaggacaaaggcgtcaattccttccaagtctacatggcctataaggatgtctaccaaatgtccgacagccagctctatgaagcctttaccttccttaagggcctgggagctgtgatcttggtccatgcagaaaatggagatttgatagctcaggaacaaaagcggatcctggagatgggcatcacgggtcccgagggccatgccctgagcagacctgaagagctggaggccgaggcggtgttccgggccatcaccattgcgggccggatcaactgccctgtgtacatcaccaaggtcatgagcaagagtgcagccgacatcatcgctctggccaggaagaaagggcccctagtttttggagagcccattgccgccagcctggggaccgatggcacccaytactggagcaagaactgggccaaggctgcggcgttcgtgacttcccctcccctgagcccggaccctaccacgcccgactacttgacctccctactggcctgtggggacttgcaggtcacaggcagcggccactgtccctacagcactgcccagaaggcggtgggcaaggacaactttaccctgatccccgagggtgtcaacgggatagaggagcggatgacsgtcgtctgggacaaggcggtggctactggcaaaatggatgagaaccagtttgtcgctgtcaccagcaccaatgcagccaagatctttaacctgtacccaaggaaagggcggattgccgtgggctcggatgccgacgtggtcatctgggaccccgacaagttgaagaccataacagccaaaagtcacaagtcggcrgtggagtacaacatcttcgagggtatggagtgccacggctccccactagtggtcatcagccagggcaagatcgtctttgaagacggaaacatcaacrtcaacaagggcatgggccgcttcattccgcggaaggcgttcccggagcacctgtaccagcgcgtcaaaatcaggaataaggtttttggattgcaaggggtttccaggggcatgtatgacggtcctgtgtacgaggtaccagctacacccaaatatgcaactcccgctccttcagccaaatcttcgccttctaaacaccagcccccacccatcagaaacctccaccagtccaacttcagcttatcaggtgcccagatagatgacaacaatcccaggcgcaccggccaccgcatcgtggcgccccctggtggccgctccaacatcaccagcctcggttgaacgtggatgcgcggaggagctagcctgaaggattctgggaatcatgtccatcccttttcctgtcagtgtttttgaaacccacagttttagttggtgctgatggagggagggggaagtcgaaggatgctctttcccttttctgtttaggaagaagtggtactagtgtggtgtgtttgcttggaaattccttgccccacagttgtgttcatgctgaatccacctcggagcatggtgttttcattcccccttcctagtgaaccacaggttttagcattgtcttgttctgtcccttccacttctaactccactggctccatgattctctgagtggtggttcctttgcaccctgtagatgttctaggatagttgatgcatgttactaaattacgtatgcaagtctgtgagtgcgtctgaggggacatcgccaaggactgactgagacacgatgccgagacctcaagccctgaggggcagtcccaaaacccttacagtgaagatgtttactcattgcccccacctctggtccacactagaaagaagctcgccccacctccacctgtgagatccgtgaattctcggaatggcaggggaagccttgcactaggttgcagagaagcatcctccacatcctgtgtcagaaaccctggtctccgtggcacttgtaactcaccgtgctgtcttctggtctgtgtgtgttcttcaagccagctctaggcttcaggccgagccaggttcacactcagaaagakgtctccccatccccattcggggctgacgatggggggctgatggctgcccctgcgtggcctgagtcctggtccctctgaggcagttgacggggcagtcagatttttaaagttttgtacaaagttttcctttgtaatcactcccatttttacttaacaaccaacttgttgtggctcttatttctgaattcaaagcttgtgaaaaaataaagaaaatgaactgcccactgacctgactagggcactttcatttca

SEQ ID NO: 6830 - DNA, 2734 bp, Homo sapiens
agcggccgccgacgctgcgcatccgccgccccgcgccccgcgacctgcccctcggccgggacaatggccagagtgaccgactcctcatcaaaggtggacggatcatcaacgatgaccaatccctttatgctgacgtctacctggaggatggacttatcaaacaaataggagagaacttaatcgttcctggtggagtgaagaccattgaagccaacgggcggatggttattcccggaggtattgatgtcaacacgtacctgcagaagccctcccaggggatgactgcggctgatgacttcttccaagggaccagggcggcactggtgggcgggaccacgatgatcattgaccatgttgttcctgaacctgggtccagcctactgacctctttcgagaagtggcacgaagcagctgacaccaaatcctgctgtgattactccctccacgtggacatcacaagctggtacgatggcgttcgggaggagctggaggtgctggtgcaggacaaaggcgtcaattccttccaagtctacatggcctataaggatgtctaccaaatgtccgacagccagctctatgaagcctttaccttccttaagggcctgggagctgtgatcttggtccatgcagaaaatggagatttgatagctcaggaacaaaagcggatcctggagatgggcatcacgggtcccgagggccatgccctgagcagacctgaagagctggaggccgaggcggtgttccgggccatcaccattgcgggccggatcaactgccctgtgtacatcaccaaggtcatgagcaagagtgcagccgacatcatcgctctggccaggaagaaagagcccattgccgccagcctggggaccgatggcacccaytactggagcaagaactgggccaaggctgcggcgttcgtgacttcccctcccctgagcccggaccctaccacgcccgactacttgacctccctactggcctgtggggacttgcaggtcacaggcagcggccactgtccctacagcactgcccagaaggcggtgggcaaggacaactttaccctgatccccgagggtgtcaacgggatagaggagcggatgacsgtcgtctgggacaaggcggtggctactggcaaaatggatgagaaccagtttgtcgctgtcaccagcaccaatgcagccaagatctttaacctgtacccaaggaaagggcggattgccgtgggctcggatgccgacgtggtcatctgggaccccgacaagttgaagaccataacagccaaaagtcacaagtcggcrgtggagtacaacatcttcgagggtatggagtgccacggctccccactagtggtcatcagccagggcaagatcgtctttgaagacggaaacatcaacrtcaacaagggcatgggccgcttcattccgcggaaggcgttcccggagcacctgtaccagcgcgtcaaaatcaggaataaggtttttggattgcaaggggtttccaggggcatgtatgacggtcctgtgtacgaggtaccagctacacccaaatatgcaactcccgctccttcagccaaatcttcgccttctaaacaccagcccccacccatcagaaacctccaccagtccaacttcagcttatcaggtgcccagatagatgacaacaatcccaggcgcaccggccaccgcatcgtggcgccccctggtggccgctccaacatcaccagcctcggttgaacgtggatgcgcggaggagctagcctgaaggattctgggaatcatgtccatcccttttcctgtcagtgtttttgaaacccacagttttagttggtgctgatggagggagggggaagtcgaaggatgctctttcccttttctgtttaggaagaagtggtactagtgtggtgtgtttgcttggaaattccttgccccacagttgtgttcatgctgaatccacctcggagcatggtgttttcattcccccttcctagtgaaccacaggttttagcattgtcttgttctgtcccttccacttctaactccactggctccatgattctctgagtggtggttcctttgcaccctgtagatgttctaggatagttgatgcatgttactaaattacgtatgcaagtctgtgagtgcgtctgaggggacatcgccaaggactgactgagacacgatgccgagacctcaagccctgaggggcagtcccaaaacccttacagtgaagatgtttactcattgcccccacctctggtccacactagaaagaagctcgccccacctccacctgtgagatccgtgaattctcggaatggcaggggaagccttgcactaggttgcagagaagcatcctccacatcctgtgtcagaaaccctggtctccgtggcacttgtaactcaccgtgctgtcttctggtctgtgtgtgttcttcaagccagctctaggcttcaggccgagccaggttcacactcagaaagakgtctccccatccccattcggggctgacgatggggggctgatggctgcccctgcgtggcctgagtcctggtccctctgaggcagttgacggggcagtcagatttttaaagttttgtacaaagttttcctttgtaatcactcccatttttacttaacaaccaacttgttgtggctcttatttctgaattcaaagcttgtgaaaaaataaagaaaatgaactgcccactgacctgactagggcactttcatttca

SEQ ID NO: 6831 - DNA, 7601 bp, Homo sapiens
  misc_feature (1)...(7601): n = A,T,C or G
ccctccggctcggcgaagcagggaaggggagagaagcaggagtcgggagactgcacaggccagaaagtctgcggagcgggccgcgcccctggcccgcccgggctccaagtcccgcgtcgccgccctggcggggacggtgcagcaggcggcgggatgcggcggggcggcagcctgagcgccccggatggcccgcggcggggcggcctgcaagagcgacgcgcggctgctgctggggcgggacgcgctgcggccggcgcccgccctgctggcccccgccgtgctgctgggcgccgcgctcggcctcggcctcggcctttggcttggctgccgcgcgggccgccagcgcacgcgacaccagaaagacgacactcaaaatctgctcaagaatttggagtctaatgcgcmgaccccctcggaaactggctccccatcraggaggaggaagagagaagtgcagatgtcgaaggacaaggaagctgttgatgaatgtgagccgccttccaacagcaatatcacagcattcgycctgaaggccaaagtcatctaccccatcaatcagaagttccggcctctggccgatggctcctccaacccgtctctgcatgaaaacttaaagcaggctgttttgccacaccagccggtagaggcctctccttccagcagtctggggagcctgagccagggtgagaaggacgactgcagctcctcatccagcgtccactcggccaccagcgatgacaggtttctcagccgcaccttcctccgggtgaacgccttccctgaagtgctggcctgcgagagtgtagacgttgacctgtgtatctacagccttcacttaaaagacctgctgcatttggacacggcactgaggcaggaaaagcatatgatgtttattcagatttttaaaatgtgcctccttgaccttcttcctaaaaagaagtcagatgatgaattanaccagaagatcctttcaaaacaagaaaaagatttggaggaactagaaaagggacttcaggtcaaactgtcaaacacagaaatgtcgggggctggtgactctgagtacatcaccctggctgatgtggaaaagaaggagagagaatacyctgaacagctaatcgataatatggaagctttctggaaacagatggcaaayatccagcactttcttgtggaccagtttaagtgttccagctccaaagccygacagctsatgatgactctgayggaaagaatgattgcagccgaagggctrttgtgcgattctcaggagctgcaggctytggacgccctggagaggaygatggggcgggcgcacatggcaaaagtgattgagtttctgaagctgcaagtccaggaggagaccaggtgccggctggctgccatctcccacggcctggagctgctggctggtgaggggaagctgtccgggcggcagaaggaggagctgctcacgcagcagcacaaggccttctggcaggaggcagagcgcttcagccgggagtttgtccagcraggcaaagacctggtcamggcgtctctggctcaccaggtggagggaacggcaaaactcacgctggcccaagaggaggaacagagaagcttcctggctgaggcccagccgactgctgacccggaaaagtttctcgaggcttttcatgaggtcctggagaggcagaggctgatgcagtgtgacctggaggaagaggagaatgtcagagccaccgaggctgtggttgcactctgccaggagctgtacttcagcaccgtggacactttccagaagttcgtggatgccctgttccttcagacgctccctggcatgactggcctccccccggaagagtgtgactacttgaggcaggaagtccaggagaacgctgcctggcagctggggaagtcaaatcgcttccrgaggcagcagtggaaactcttccaggagctcctagagcaagaccagcaggtgtggatggaggagtgtgcgctgtccagcgtgctgcagacacacctgcgggaggaccacgagggcaccatccgcggygtcttgggccgactgggcggcctcactgaagagtccacgcggtgtgtcctgcaggggcatgacctgctgttgcgctcagccctccrgaggctggcactccgcggcaacgccctggccaccctgacgcagatgcggctatcggggaagaagcacctcctgcaggagctgcgggaacagcgtgcactggagcaggggtcctcccagtgcctggacgagcatcagtggcagctgctcagggccctggaggcgcgtgtgctggaggaggccagccggctagaggaggaagcacagcagacacggctgcagctccagcagcggctcctggccgaggcccaggaggtggggcagcttctgcagcagcacatggagtgcgccattgggcaggcgctgctggtgcatgcacggaatgcagccaccaagagccrggccaaggacagggatgacttcaagaggacactgatggaggcggcagtggagagcgtctacgtgaccagcgctggtgtcagccgcctggtgcaggcgtattaccagcaaatcggaaggatcatggaggaccacgaggagagaaaactgcagcacctgaagaccctgcagggtgagaggatggaaaattacaaactgcggaaaaagcaagaactcagcaacccttcgtcgggcagcaggacggcaggtggcgctcatgagacctcccaggcggtccaccagaggatgctgtcccagcagaagaggttcctggcccagttcccagtgcaccagcagatgcgtctgcacgcccagcagyagcaggcaggagtcatggaccttctggaagcccagctggagacccagctacaggaagctgaacagaacttcatctccgagctggcagccttggcccgagtgccccttgctgaaagcaaactgttgcctgctaagcgtgggctgctagagaagcccctaaggactaaaaggaagaagcccctgccccaggaaagaggggacctgggggtgcccaacaatgaggaccttgcctccrggraccagacctcaggctcactcagcagcaaaaggctgagtcagcaagaaagtgaagctggggacagtgggaactcaaagaagatgctaaagagaagaagcaacttgtagtttaagaccagtcrgtgggacaagacctgaagccctgggtctgggtgtgaatyccaccttccctcctgcagtgctgagaggcagcgaggacggagaggacagcggcatctctaggctcttctgagagggacagagaaagaatagaaatgtgccctaaaagcataaatgagtatcacctgagaaaattaggcattcccgtcttggaaacamgtctctgtgagtttgcatttcatttggcttggagccctggctcgatgcctcatggatctttctccccaaggagggacgtcttgaggggtccgagcctcaggccaaggacccctgatgcagactctggaatccctggcccaaaggcctgtctgggcccatctggggctgaggacacacagatacataatgacacctgcagaaatgtattctctgaggacacttagaatatgaggaagagggtgtggcccaaccctcacttcacctggggaggggcttcttccggacagtagacaccctgcccgtgcagagagatgtcatgggggcacctgctctccctgatagatgctgagagcatccagaaacttccagaccagccctctcaccacacccagaagaggcctttcccatctggagagaagcttccagaccagcccttcacacaccacagccaggaggggcctttcccacctggagagaaacttccagaccagcccctcataccacagccaagaggggcctttctcacctggagagaaatttccagaccatcccctctcaccacagccaggagaggcctttcccaccggtagagaaacttccagaccagcccctcacaccacagccaagagaagcctttccagcctggagagaaacttccagaccagccctctcactacagccaggagaggcctttcccgcctggaaacttccggacaagcctctcacacaccacagccaggagaggcctttcccacctggacagaaacttccagaccagcccctctcaccacagccaggagaggcctttaccacctggagagaagcttccagaccagcccctcacaccacagccaggagaggcctttcccacctggagagaaacttccagaccagcccctcataccacagccaagaggggcctttctcacctggagagaaacttccagaccagcccctcacaccaccgccaggagaggcctttcccaccgggagagaaacttccagacyagcccctcacaccacagccaggagaggcctttcccaccgggagagaaacttccagaccagccctctcactacagccagaagaggcctttcccaccgggagaggaacttccagaccagcccctcacaccacagccaggagaggcctttcccgcctggagagaagcttcaggccagctcctcacaccacagccaggagagaccttttctgcctggagagaaactttcagaccagccccacacaccacagccaggagaggccgttcctgcctggagagaagcttccagaccagcccttcacaccacagccaggagaggcctttcccacctggagagaaacttccagaccagcccctctcaccacagccaggagaggccgttcccacctggagggaaaattgctcctttgatggaggttagggactgtcaccctcagcactgtgaacataccgggcgagatcattcttcaggggaaggagctgcccagagcatcacaggatgttccagtgtccctggtctctgcccaccagatgccagcactcccaccattcgtggcaaccaaggatgtctccagacactgccccgtgtccatggggttatcacccactgtgctgagtcaaagggtgccttgccctggtctaatccaggacatagccgtggatacgtccaaaaatccccagaacctagtgagccctctggctctgggagcccctatctcaggaattttcagggtcatttgtgacttttcatttcttaaaacctgaaatagactctcttagaaacaagtgactccttcccagtggccaaaacttaatcatcagagcgcttccttcagttcctcacccatcagccagtgggctctccaaagttaaccaacagctccctcttgtggttcactaaaaaacttggttattccrtggagttgtgcaaagctatggcttccttggtgcaatattcttaaaacctgctttgcatagaaatcacttttgcccaggctggagtgcagtggcgtgatctcggctcatggcaatctccatctcccgggttcaagcrattttcctgcctcagcctccccagtagctgggactacagacgtgtgccaccacgcctggctaaatcttttttgtattttattttagtagagacggggtttcaccatactggccaggctgctctcgaactcctgacctcatcgtccacccgcctcggcctccccaaagtgctgagattaggcgttagccaccgcgcccggccagaaatcacttttatattgtcacatgggccctctgcacagagtccgatggctcctcccggggaagcctgattttgtgacgtgtgtatagtaaatgcaggccctctggcagcaccataattggtcggttaccctgagcccagagctctraaagcatctgtggaatgatcacgggacccttctcctctgagaaggctcccggctgcctccccrccaccgagcttgtagcctgaatgcctggctgtygcatggagcattttgcttctggggtgtcttccttagccaaagggaacgtgtcatttgctcgaccctggcccacccttgccgcccagctgttgtgctgggcacagtctggggcacaggcctccatgatgaagacgcgtgggctgtcggtgctttcatcygtcacaaactggcacctgtacctgccagcaggagcatgatggggacttccatgctggaattgctccctgattaaaatgagatatggctatttggaagacactgcattttagccagtgtacctgggcacagactcggggctgccctgaagctgatgaaggcttgaaggacggaagggctgagccacatgaaggcagcactcagggccaggggagagagaagaggatcagcagtgcagccccaggatgcctcgcagacgtgccttctgccatgattgtgaagttccagccacgtggaactctctcggaagaactggttgttaaagagcacctctgccttcttcctctgttgccatgtgatctctgcacacgctagctctccttcgccttctgccatgctggaagtagcctgaggccctcaccagaagcagacgctggcaccgtgctgcttgtacagcctgcagagccgtgagccaagtaaacctctttaattacccagcctcaggtgctccgggaacgccttccgcggaatgaagcggcccatgcccttgttgaygttgatgtttccgtcttcaaagacgatcttgccctggctgatgaccactagtggggagccgtggcactccataccctcgaagatgttgtactccacygcctgcaccaacagcctcagygttacttcccaggatttgctctgccccaaacgagctgttcataacagcgattttgcctaacattatatcataagcgtgttccaatgtttttttttctctctaaaaataccttttattgactgtaatattccactgtatggtccacagtgtatataaccaacaactcaccgttgcgcatgtaggctgccggtggctttctataatcaaatcaatattgttctggggcatcacaaagaggaagggggtccccyggggttatgcaatgtggctgctttgactgtactggacataaaaataagtaaaatgttcttcattttacttaaaatgtgtctttaaataaaatttttttctctaggtttctaaaatcaaattactgggtgaaagaatagagctgttttaaagcacgtgtgccatatggccaaattattttcccaagggttcagatcaattgacacgatatcggcacttaccccctccagcattgggtaatgccatttttttctttctctgctaatttgaaagacaaaataacatttcctttaaaacacacattcggccgggcacggtggctcatgcctgtacccccaactactcgggaggctgaggtatgagaactgcttgaatctgggaggtggaggttgcagtgagccgagatcgtgccactgcactccagcctgggggacagagcgagactctgtctccagaaaaaaacaaaacaaaaaactcaccttctttccattattcttcaagtgaatacttgacagttgtgtgtcaactgtcaccagccaactgctttttattattttaaaagtaggtcacatacatggttgaaaacaatcaactggtaaaaaagatattggatagaaaggtaagtctgtgttctacttgagtctgag

SEQ ID NO: 6832 - DNA, 3174 bp, Homo sapiens
ccggtcccttggcgacgggtcttgcatgtgacactcttgccctctagtgcctcaccagcttggtagcagtttgatggctaatattaataagatgttacataacatgagagtactgggccaggactggtgttgctaccacttgtaaagtcaaaaagcctgagccgatggtaacgagtggtactgtttccgtttcttttccatctattgcaactttctcaagcattttcagctctgaactttaattccagactgtattttctgtgagtcctgatcaagtgatacaaatgagctgcaatggtgacataaactcttgacagagattggaaaagtagctggaacaccatcttttcttttaactttttatggtgcttctgttggcatagttggggaaagcacctacaasatgagttttatcatgaagcttcacagacactttcaaagaacagtcattctgcttgccactttttgtatggtgagcattatyatttctgcttactacctgtacagtggctacaaacaggaaaatgaactctctgagacggcttcagaagttgactgtggcgacctccaacacctaccrtatcaactaatggaagtgaaagcaatgaagctttttgatgcctcaaggacagaccccacagtcctagtatttgtagagagccagtactcatctcttggtcaagacatcattatgattctagaatcaagtagattccagtatcacattgaaattgcccctggaaagggagatctcccagtgcttatagacaaaatgaaaggcaaatacattctcattatttatgagaatattttaaagtatataaatatggattcctggaatcgaagccttctagataaatactgtgtagaatatggtgtgggtgtcattggattccacaaaactagtgagaagagtgtacagagctttcagttaaaaggtttccctttttccatatatggaaatcttgcagtaaaagattgttgtattaatcctcattctccattgattcgtgtgaccaaatcttccaagcttgaaaaaggttctttacctggaactgactggacagtttttcagattaatcattcagcctatcaaccagtaatatttgccaaagtaaagaccccagaaaacctttctccttccatctctaaaggtgctttttatgccactattatacatgacctggggcttcatgatggaattcaaagggttctttttggcaacaacttgaacttttggctgcacaagctcatcttcatagatgccatctccttcttatcagggaagaggctgacattgtccttggacaggtacattcttgtggatattgatgatatatttgtgggaaaagagggaacaagaatgaacaccaatgatgtaaaggccctgcttgatactcagaatcttttgcgtgcwcaaatcacaaattttacattcaacctgggattttcagggaaattttaccatacaggaactgaagaggaagatgaaggagatgactgtctgttggggtctgtggatgagttctggtggtttcctcacatgtggagccatatgcagccccacctcttccacaatgagtcatctttggtggagcagatgattctcaacaaaaaatttgccttagagcacggcattccaacggacatgggctacgctgtggcccctcaccattcgggcgtctaccctgtacatgttcagctttaygaggcctggaagaaggtctggaatattaaaatcaccagcactgaagaatatccacatctgaagccagctagataccggaggggttttatccacaaaaacatcatggttctcccaagacaaacctgtgggcttttcactcacaccattttctacaaagaatatccagggggtcctaaagagctggataagagtatccaaggaggagaacttttcttcactgtcgtcctcaaccctatcagcattttcatgacccatttgtccaactaygggaatgaccgactgggattatatacatttgttaatctggccaactttgtgaagagctggaccaacctgcgacttcagactctgcctccagtacaactggcccacaagtattttgagctgtttcctgatcagaaagaccctctctggcagaatccttgcgatgacaaacgccacagagacatttggtctaaagaaaaaacttgtgatcgcttaccaaaattcttggtaataggaccccagaaaactggtaccactgctttgtatttgttcctggttatgcayccttccatccttagtaactcccccagcccaaaaacctttgaggaggtacagttctttaatagaaataactaccacagggggattgattggtatatggatttcttcccagtcccatctaatgtcactaccgactttttgtttgagaagagtgccaattacttccactcagaggaagcccctaaaagagctgcttctctggttcccaaagccaagattatcaccattctcattgacccttcagaccgagcatactcctggtaccagcatcagcgatcacatgaagaycctgcagctctgaagtttagcttctacgaagtgatctcagcagggccccgtgcaccctcggagctcagagccttgcagaagagatgtttggtcccrgggtggtatgccagccacatcgagagatggcttgtttatttccccccatttcagttgctaattattgatgggcaacaactaagaactgatcctgctacagtgatggatgaagtacagaagtttctaggagtcttgcctcattataattactcagaagctttaacgtttgattctcataaaggtttctggtgtcagttactggaagaaggtaaaacaaaatgccttggaaagagcaaaggaagaaaataccctccaatggattctgatagcaggacatttctgtcaagctactatcgagatcacaacgtggaactctcaaagctgctgcacaaactgggtcagcctctgccatcctggctgagacaggagctgcagaaagtaagatagcactgagagaaaacttgagacttcatcgtccatgtagaacacaccttttccaaagcttccagaagctaccaaaaggcagttgaaaaatatacctcttcaaatgagaaaaaagaacagtttcttccatgtgctggcacgtggatgattag

SEQ ID NO: 6833 - DNA, 2541 bp, Homo sapiens
ggtcagcgcgccggcgcagtgcggcggtcacaggctgagtgctgcggcgcgatccttgcttccctgagcgttggcccgggaggaaagaagatggtgctggatctggatttgtttcgggtggataaaggaggggacccagccctcatccgagagacgcaggagaagcgcttcaaggacccgggactagtggaccagctggtgaaggcagacagcgagtggcgacgatgtagatttcgggcagacaacttgaacaagctgaagaacctatgcagcaagacaatcggagagaaaatgaagaaaaaagagccagtgggagatgatgagtctgtcccagagaatgtgctgagtttcgatgaccttactgcagacgctttagctaacctgaaagtctcacaaatcaaaaaagtccgactcctcattgatgaagccatcctgaagtgtgacgcggagcggataaagttggaagcagagcggtttgagaacctccgagagattgggaaccttctgcacccttctgtacccatcagtaacgatgarggggtcctggtgttcctggaacaggctctcatccagtatgcccttcgcaccttgggaagtcggggctacattcccatttataccccctttttcatgaggaaggaggtcatgcaggaggtggcacagctcagccagtttgatgaagaactttataaggtgattggcaaaggcagtgaaaagtctgatgacaactcctatgatgagaagtacctgattgccacctcagagcagcccattgctgccctgcaccgggatgagtggctccggccggaggacctgcccatcaagtatgctggcctgtctacctgcttccgtcaggaggtgggctcccatggccgtgacacccgtggcatcttccgagtccatcagtttgagaagattgaacagtttgtgtactcatcaccccatgacaacaagtcatgggagatgtttgaagagatgattaccaccgcagaggagttctaccagtccctggggattccttaccacattgtgaatattgtctcaggttctttgaatcatgctgccagtaagaagcttgacctggaggcctggtttccgggctcaggagccttccgtgagttggtctcctgttctaattgcacggattaccaggctcgccggcttcgaatccgatatgggcaaaccaagaagatgatggacaaggtggagtttgtccatatgctcaatgctaccatgtgcgccactacccgtaccatctgcgccatcctggagaactaccagacagagaagggcatcactgtgcctgagaaattgaaggagttcatgccgccaggactgcaagaactgatcccctttgtgaagcctgcgcccattgagcaggagccatcaaagaagcagaagaagcaacatgagggcagcaaaaagaaagcagcagcaagagacgtcaccctagaaaacaggctgcagaacatggaggtcaccgatgcttgaacattcctgcctccctatttgccaggctttcatttctgtctgctgagatctcagagcctgcccaacagcagggaagccaagcacccattcatccccctgccsccatctgactgcgtagctgagaggggaacagtgccatgtaccacacagatgttcctgtctcctcgcatgggcatagggacccatcattgatgactgatgaaaccatgtaataaagcatctctggggagggcttaggactcttcctcagtcttcttccccgggcttgaaccccgcctctgaggttctccctgatatacacttctgcttttccttccaaattaggctgctccctccagttagcaagtcacagagcctttgaacaggtaagcgaagggaggggtacacttagaaaaagctcaaggggaaggtggaagatggagtctgaatcacaaaagcttgcagggcaagggccaggatcctcctttacaaatatattcctgcttgaaatcattgaggtaggactagcttagagaccagaactgttttaaaagcctcttagcacttctgttccctacaaaggactctgtggaaagcgagaggctgtatttaatccagaagagcccctagcttctatgcctagcatgggttggggacttattaacagcagtttctctcgttacagccatccccacatggggagaccaactgcataccaacttgctgctgcacctccaaaggattgggatagccagcagggcagaggagaggagaaaatgttgtagcccctttgtggagctcccactgttgccctaatagccagttcctttctcaggggaggctgatgttcaggctgtttatttacctgctgcctttcatctgcaatctacaaaccctttactttaataacagcttctgttagtttagtgcctctctcctaggaggttaaaatactccctatagatgatctcttttatctttgtgatggtcccagaaggtagggtggggacatgattatatgattatgcttattccatcctttggaagacagaaatacaaggacggtaaggg

SEQ ID NO: 6834 - DNA, 2406 bp, Homo sapiens
ggtcagcgcgccggcgcagtgcggcggtcacaggctgagtgctgcggcgcgatccttgcttccctgagcgttggcccgggaggaaagaagatggtgctggatctggatttgtttcgggtggataaaggaggggacccagccctcatccgagagacgcaggagaagcgcttcaaggacccgggactagtggaccagctggtgaaggcagacagcgagtggcgacgattcttggattctttattcctaggtagatttcgggcagacaacttgaacaagctgaagaacctatgcagcaagacaatcggagagaaaatgaagaaaaaagagccagtgggagatgatgagtctgtcccagagaatgtgctgagtttcgatgaccttactgcagacgctttagctaacctgaaagtctcacaaatcaaaaaagtccgactcctcattgatgaagccatcctgaagtgtgacgcggagcggataaagttggaagcagagcggtttgagaacctccgagagattgggaaccttctgcacccttctgtacccatcagtaacgatgargtgattggcaaaggcagtgaaaagtctgatgacaactcctatgatgagaagtacctgattgccacctcagagcagcccattgctgccctgcaccgggatgagtggctccggccggaggacctgcccatcaagtatgctggcctgtctacctgcttccgtcaggaggtgggctcccatggccgtgacacccgtggcatcttccgagtccatcagtttgagaagattgaacagtttgtgtactcatcaccccatgacaacaagtcatgggagatgtttgaagagatgattaccaccgcagaggagttctaccagtccctggggattccttaccacattgtgaatattgtctcaggttctttgaatcatgctgccagtaagaagcttgacctggaggcctggtttccgggctcaggagccttccgtgagttggtctcctgttctaattgcacggattaccaggctcgccggcttcgaatccgatatgggcaaaccaagaagatgatggacaaggtggagtttgtccatatgctcaatgctaccatgtgcgccactacccgtaccatctgcgccatcctggagaactaccagacagagaagggcatcactgtgcctgagaaattgaaggagttcatgccgccaggactgcaagaactgatcccctttgtgaagcctgcgcccattgagcaggagccatcaaagaagcagaagaagcaacatgagggcagcaaaaagaaagcagcagcaagagacgtcaccctagaaaacaggctgcagaacatggaggtcaccgatgcttgaacattcctgcctccctatttgccaggctttcatttctgtctgctgagatctcagagcctgcccaacagcagggaagccaagcacccattcatccccctgccsccatctgactgcgtagctgagaggggaacagtgccatgtaccacacagatgttcctgtctcctcgcatgggcatagggacccatcattgatgactgatgaaaccatgtaataaagcatctctggggagggcttaggactcttcctcagtcttcttccccgggcttgaaccccgcctctgaggttctccctgatatacacttctgcttttccttccaaattaggctgctccctccagttagcaagtcacagagcctttgaacaggtaagcgaagggaggggtacacttagaaaaagctcaaggggaaggtggaagatggagtctgaatcacaaaagcttgcagggcaagggccaggatcctcctttacaaatatattcctgcttgaaatcattgaggtaggactagcttagagaccagaactgttttaaaagcctcttagcacttctgttccctacaaaggactctgtggaaagcgagaggctgtatttaatccagaagagcccctagcttctatgcctagcatgggttggggacttattaacagcagtttctctcgttacagccatccccacatggggagaccaactgcataccaacttgctgctgcacctccaaaggattgggatagccagcagggcagaggagaggagaaaatgttgtagcccctttgtggagctcccactgttgccctaatagccagttcctttctcaggggaggctgatgttcaggctgtttatttacctgctgcctttcatctgcaatctacaaaccctttactttaataacagcttctgttagtttagtgcctctctcctaggaggttaaaatactccctatagatgatctcttttatctttgtgatggtcccagaaggtagggtggggacatgattatatgattatgcttattccatcctttggaagacagaaatacaaggacggtaaggg

SEQ ID NO: 6835 - DNA, 2760 bp, Homo sapiens
ggtcagcgcgccggcgcagtgcggcggtcacaggctgagtgctgcggcgcgatccttgcttccctgagcgttggcccgggaggaaagaagatggtgctggatctggatttgtttcgggtggataaaggaggggacccagccctcatccgagagacgcaggagaagcgcttcaaggacccgggactagtggaccagctggtgaaggcagacagcgagtggcgacgatgtagatttcgggcagacaacttgaacaagctgaagaacctatgcagcaagacaatcggagagaaaatgaagaaaaaagagccagtgggagatgatgagtctgtcccagagaatgtgctgagtttcgatgaccttactgcagacgctttagctaacctgaaagtctcacaaatcaaaaaagtccgactcctcattgatgaagccatcctgaagtgtgacgcggagcggataaagttggaagcagagcggtttgagaacctccgagagattgggaaccttctgcacccttctgtacccatcagtaacgatgargatgtggacaacaaagtagagaggatttggggtgattgtacagtcaggaagaagtactctcatgtggacctggtggtgatggtagatggctttgaaggcgaaaagggggccgtggtggctgggagtcgagggtacttcttgaagggggtcctggtgttcctggaacaggctctcatccagtatgcccttcgcaccttgggaagtcggggctacattcccatttataccccctttttcatgaggaaggaggtcatgcaggaggtggcacagctcagccagtttgatgaagaactttataaggtgattggcaaaggcagtgaaaagtctgatgacaactcctatgatgagaagtacctgattgccacctcagagcagcccattgctgccctgcaccgggatgagtggctccggccggaggacctgcccatcaagtatgctggcctgtctacctgcttccgtcaggaggtgggctcccatggccgtgacacccgtggcatcttccgagtccatcagtttgagaagattgaacagtttgtgtactcatcaccccatgacaacaagtcatgggagatgtttgaagagatgattaccaccgcagaggagttctaccagtccctggggattccttaccacattgtgaatattgtctcaggttctttgaatcatgctgccagtaagaagcttgacctggaggcctggtttccgggctcaggagccttccgtgagttggtctcctgttctaattgcacggattaccaggctcgccggcttcgaatccgatatgggcaaaccaagaagatgatggacaagagaaagaataatctccatttatctacacagaacaagttggaggcttccctcttctcacccaagaaggtctgggttgtggagtttgtccatatgctcaatgctaccatgtgcgccactacccgtaccatctgcgccatcctggagaactaccagacagagaagggcatcactgtgcctgagaaattgaaggagttcatgccgccaggactgcaagaactgatcccctttgtgaagcctgcgcccattgagcaggagccatcaaagaagcagaagaagcaacatgagggcagcaaaaagaaagcagcagcaagagacgtcaccctagaaaacaggctgcagaacatggaggtcaccgatgcttgaacattcctgcctccctatttgccaggctttcatttctgtctgctgagatctcagagcctgcccaacagcagggaagccaagcacccattcatccccctgccsccatctgactgcgtagctgagaggggaacagtgccatgtaccacacagatgttcctgtctcctcgcatgggcatagggacccatcattgatgactgatgaaaccatgtaataaagcatctctggggagggcttaggactcttcctcagtcttcttccccgggcttgaaccccgcctctgaggttctccctgatatacacttctgcttttccttccaaattaggctgctccctccagttagcaagtcacagagcctttgaacaggtaagcgaagggaggggtacacttagaaaaagctcaaggggaaggtggaagatggagtctgaatcacaaaagcttgcagggcaagggccaggatcctcctttacaaatatattcctgcttgaaatcattgaggtaggactagcttagagaccagaactgttttaaaagcctcttagcacttctgttccctacaaaggactctgtggaaagcgagaggctgtatttaatccagaagagcccctagcttctatgcctagcatgggttggggacttattaacagcagtttctctcgttacagccatccccacatggggagaccaactgcataccaacttgctgctgcacctccaaaggattgggatagccagcagggcagaggagaggagaaaatgttgtagcccctttgtggagctcccactgttgccctaatagccagttcctttctcaggggaggctgatgttcaggctgtttatttacctgctgcctttcatctgcaatctacaaaccctttactttaataacagcttctgttagtttagtgcctctctcctaggaggttaaaatactccctatagatgatctcttttatctttgtgatggtcccagaaggtagggtggggacatgattatatgattatgcttattccatcctttggaagacagaaatacaaggacggtaaggg

SEQ ID NO: 6836 - DNA, 2802 bp, Homo sapiens
ggtcagcgcgccggcgcagtgcggcggtcacaggctgagtgctgcggcgcgatccttgcttccctgagcgttggcccgggaggaaagaagatggtgctggatctggatttgtttcgggtggataaaggaggggacccagccctcatccgagagacgcaggagaagcgcttcaaggacccgggactagtggaccagctggtgaaggcagacagcgagtggcgacgatagtctcattctgttaccaggctggaatgcagtggcgtgacctcagctcactgcaacctccacctcccaggttcaagcgattctcctgcctcagcctcctgagtagctgggactacaggtagatttcgggcagacaacttgaacaagctgaagaacctatgcagcaagacaatcggagagaaaatgaagaaaaaagagccagtgggagatgatgagtctgtcccagagaatgtgctgagtttcgatgaccttactgcagacgctttagctaacctgaaagtctcacaaatcaaaaaagtccgactcctcattgatgaagccatcctgaagtgtgacgcggagcggataaagttggaagcagagcggtttgagaacctccgagagattgggaaccttctgcacccttctgtacccatcagtaacgatgargatgtggacaacaaagtagagaggatttggggtgattgtacagtcaggaagaagtactctcatgtggacctggtggtgatggtagatggctttgaaggcgaaaagggggccgtggtggctgggagtcgagggtacttcttgaagggggtcctggtgttcctggaacaggctctcatccagtatgcccttcgcaccttgggaagtcggggctacattcccatttataccccctttttcatgaggaaggaggtcatgcaggaggtggcacagctcagccagtttgatgaagaactttataaggtgattggcaaaggcagtgaaaagtctgatgacaactcctatgatgagaagtacctgattgccacctcagagcagcccattgctgccctgcaccgggatgagtggctccggccggaggacctgcccatcaagtatgctggcctgtctacctgcttccgtcaggaggtgggctcccatggccgtgacacccgtggcatcttccgagtccatcagtttgagaagattgaacagtttgtgtactcatcaccccatgacaacaagtcatgggagatgtttgaagagatgattaccaccgcagaggagttctaccagtccctggggattccttaccacattgtgaatattgtctcaggttctttgaatcatgctgccagtaagaagcttgacctggaggcctggtttccgggctcaggagccttccgtgagttggtctcctgttctaattgcacggattaccaggctcgccggcttcgaatccgatatgggcaaaccaagaagatgatggacaaggtggagtttgtccatatgctcaatgctaccatgtgcgccactacccgtaccatctgcgccatcctggagaactaccagacagagaagggcatcactgtgcctgagaaattgaaggagttcatgccgccaggactgcaagaactgatcccctttgtgaagcctgcgcccattgagcaggagccatcaaagaagcagaagaagcaacatgagggcagcaaaaagaaagcagcagcaagagacgtcaccctagaaaacaggctgcagaacatggaggtcaccgatgcttgaacattcctgcctccctatttgccaggctttcatttctgtctgctgagatctcagagcctgcccaacagcagggaagccaagcacccattcatccccctgccsccatctgactgcgtagctgagaggggaacagtgccatgtaccacacagatgttcctgtctcctcgcatgggcatagggacccatcattgatgactgatgaaaccatgtaataaagcatctctggggagggcttaggactcttcctcagtcttcttccccgggcttgaaccccgcctctgaggttctccctgatatacacttctgcttttccttccaaattaggctgctccctccagttagcaagtcacagagcctttgaacaggtaagcgaagggaggggtacacttagaaaaagctcaaggggaaggtggaagatggagtctgaatcacaaaagcttgcagggcaagggccaggatcctcctttacaaatatattcctgcttgaaatcattgaggtaggactagcttagagaccagaactgttttaaaagcctcttagcacttctgttccctacaaaggactctgtggaaagcgagaggctgtatttaatccagaagagcccctagcttctatgcctagcatgggttggggacttattaacagcagtttctctcgttacagccatccccacatggggagaccaactgcataccaacttgctgctgcacctccaaaggattgggatagccagcagggcagaggagaggagaaaatgttgtagcccctttgtggagctcccactgttgccctaatagccagttcctttctcaggggaggctgatgttcaggctgtttatttacctgctgcctttcatctgcaatctacaaaccctttactttaataacagcttctgttagtttagtgcctctctcctaggaggttaaaatactccctatagatgatctcttttatctttgtgatggtcccagaaggtagggtggggacatgattatatgattatgcttattccatcctttggaagacagaaatacaaggacggtaaggg

SEQ ID NO: 6837 - DNA, 952 bp, Homo sapiens
ggtcagcgcgccggcgcagtgcggcggtcacaggctgagtgctgcggcgcgatccttgcttccctgagcgttggcccgggaggaaagaagatggtgctggatctggatttgtttcgggtggataaaggaggggacccagccctcatccgagagacgcaggagaagcgcttcaaggacccgggactagtggaccagctggtgaaggcagacagcgagtggcgacgatgtagatttcgggcagacaacttgaacaagctgaagaacctatgcagcaagacaatcggagagaaaatgaagaaaaaagagccagtgggagatgatgagtctgtcccagagaatgtgctgagtttcgatgaccttactgcagacgctttagctaacctgaaagtctcacaaatcaaaaaagtccgactcctcattgatgaagccatcctgaagtgtgacgcggagcggataaagttggaagcagagcggtttgagaacctccgagagattgggaaccttctgcacccttctgtacccatcagtaacgatgaraaattgaaggagttcatgccgccaggactgcaagaactgatcccctttgtgaagcctgcgcccattgagcaggagccatcaaagaagcagaagaagcaacatgagggcagcaaaaagaaagcagcagcaagagacgtcaccctagaaaacaggctgcagaacatggaggtcaccgatgcttgaacattcctgcctccctatttgccaggctttcatttctgtctgctgagatctcagagcctgcccaacagcagggaagccaagcacccattcatccccctgccsccatctgactgcgtagctgagaggggaacagtgccatgtaccacacagatgttcctgtctcctcgcatgggcatagggacccatcattgatgactgatgaaaccatgtaataaagcatctctggggaggg

SEQ ID NO: 6838 - DNA, 1163 bp, Homo sapiens
gccctgaaaagccataatggagatatcaatgcctccacctcagatatatgtagaaaaaactctggccawtatcaaaccagatattgttgacaaagaggaggagatacaagatattattcttagatccggattcaccattgttcagagaagaaaactacgcctcagccctgagcaatgtagtaacttttatgtggaaaagtatggaaaaatgtttttccccaacttaacagcttacatgagttctggaccacttgtcgccatgatattagctagacataaagccatctcttattggttagaacttttgggaccaaataatagcttagtagcgaaggagacacatccagacagtctgagggcaatttatggcacagatgacctaaggaatgcacttcatgggagtaatgactttgctgctgcggaaagagaaatacgttttatgtttcctgaagtgattgttgagcccattccaattggacaagctgctaaggactatttaaatttacatataatgccaactctgcttgaaggactcacagagctttgtaagcaaaaaccagcagatcctttgatttggctagctgattggctgctgaaaaataatcctaacaaacccaaactttgtcaccatccaattgtagaagaaccttattaaaaaaaaaatcctcgaaagaacaaatcatgaacwatcttattataaaaggctgtacttctactgtttgaaaaaattatttctagggtttaagtaactacmagtaaaataaatttatttcttaaaaataagtgttaaaggaataactattctatgaagcagataacattaaggtaaaatataggcttagagtatgattttaacaatgatgtaacactaggtaatggaaaactcatgtaagatgttgctagatgtttttgtttttcttaagtttgagaagtaagacataaagtttagttatacattttcccaagcacatatcctatatctaaatacataattaatgcacagttgagacagtctagtttaaaaggcttaggtccttttgtagtccataagcatggtgatttggtttcatgctcatgtgtcagatatgcttccctcaaaccttgttacagcatcatcacattacctgtttgatgtaaaaaataaaaaatagaaaggtgtaagt

SEQ ID NO: 6839 - DNA, 1242 bp, Homo sapiens
ggcttcaggtctcctagcaacaagttgtaccatatgaggacggccgctgagccataatggagatatcaatgcctccacctcagatatatgtagaaaaaactctggccawtatcaaaccagatattgttgacaaagaggaggagatacaagatattattcttagatccggattcaccattgttcagagaagaaaactacgcctcagccctgagcaatgtagtaacttttatgtggaaaagtatggaaaaatgtttttccccaacttaacagcttacatgagttctggaccacttgtcgccatgatattagctagacataaagccatctcttattggttagaacttttgggaccaaataatagcttagtagcgaaggagacacatccagacagtctgagggcaatttatggcacagatgacctaaggaatgcacttcatgggagtaatgactttgctgctgcggaaagagaaatacgttttatgtttcctgaagtgattgttgagcccattccaattggacaagctgctaaggactatttaaatttacatataatgccaactctgcttgaaggactcacagagctttgtaagcaaaaaccagcagatcctttgttttggtatatgtgctgccgaagagagcactggactctcaggtccattctattggtctgcatgtctggcataaggatgtcattaccacactgtgctgactactgtagctttgtagaaggttttgaaatttggctagctgattggctgctgaaaaataatcctaacaaacccaaactttgtcaccatccaattgtagaagaaccttattaaaaaaaaaatcctcgaaagaacaaatcatgaacwatcttattataaaaggctgtacttctactgtttgaaaaaattatttctagggtttaagtaactacmagtaaaataaatttatttcttaaaaataagtgttaaaggaataactattctatgaagcagataacattaaggtaaaatataggcttagagtatgattttaacaatgatgtaacactaggtaatggaaaactcatgtaagatgttgctagatgtttttgtttttcttaagtttgagaagtaagacataaagtttagttatacattttcccaagcacatatcctatatctaaatacataattaatgcacagttgagacagtctagtttaaaaggcttaggtccttttgtagtccataagcatggtgatttggtttcatgctcat

SEQ ID NO: 6840 - DNA, 1203 bp, Homo sapiens
ggcttcaggtctcctagcaacaagttgtaccatatgaggacggccgctgagccataatggagatatcaatgcctccacctcagatatatgtagaaaaaactctggccawtatcaaaccagatattgttgacaaagaggaggagatacaagatattattcttagatccggattcaccattgttcagagaagaaaactacgcctcagccctgagcaatgtagtaacttttatgtggaaaagtatggaaaaatgtttttccccaacttaacagcttacatgagttctggaccacttgtcgccatgatattagctagacataaagccatctcttattggttagaacttttgggaccaaataatagcttagtagcgaaggagacacatccagacagtctgagggcaatttatggcacagatgacctaaggaatgcacttcatgggagtaatgactttgctgctgcggaaagagaaatacgttttatgtttcctgaagtgattgttgagcccattccaattggacaagctgctaaggactatttaaatttacatataatgccaactctgcttgaaggactcacagagctttgtaagcaaaaaccagcagatcctttgatttggctagctgattggctgctgaaaaataatcctaacaaacccaaactttgtcaccatccaattgtagaagaaccttattaaaaaaaaaatcctcgaaagaacaaatcatgaacwatcttattataaaaggctgtacttctactgtttgaaaaaattatttctagggtttaagtaactacmagtaaaataaatttatttcttaaaaataagtgttaaaggaataactattctatgaagcagataacattaaggtaaaatataggcttagagtatgattttaacaatgatgtaacactaggtaatggaaaactcatgtaagatgttgctagatgtttttgtttttcttaagtttgagaagtaagacataaagtttagttatacattttcccaagcacatatcctatatctaaatacataattaatgcacagttgagacagtctagtttaaaaggcttaggtccttttgtagtccataagcatggtgatttggtttcatgctcatgtgtcagatatgcttccctcaaaccttgttacagcatcatcacattacctgtttgatgtaaaaaataaaaaatagaaaggtgtaagt

SEQ ID NO: 6841 - DNA, 894 bp, Homo sapiens
gactccctctggtttccggtcaggtcggtcggtccccactatgggcctggagctgtacctggacctgctgtcccagccctgccgcgctgtttacatctttrccaagaagaacgacattcccttcgagctgcgcatcgtggatctgattaaaggtcagcacttaagcgatgcctttgcccaggtgaaccccctcaagaaggtgccagccttgaaggacggggacttcaccttgacggagaggtratgttccctgttttcctgggtgagccagtatctccccagacactggcagccaccctggcagagttgratgtgaccctgcagttgctcgaggacaagttcctccagaacaaggccttccttactggtcctcacatctccttagctgacctcrtagccatcacgragctgatgcatcccgtgggtgctggctgccaagtcttcgaaggccgacccaagctggccacatggcggcagcgcgtggaggcagcagtgggggaggacctcttccaggaggcccatgaggtcattctgaaggccaaggacttcccacctgcagaccccaccataaagcagaagctgatgccctgggtgctggccatgatccggtgagctgggaaacctcacccttgcaccgtcctcagcagtccacaaagcattttcatttctaatggcccatgggagccaggcccagaaagcaggaatggcttgcytaagacttgcccaagtcccagagcacctcacctcccgaagccaccatccccaccctgtcttccacagccgcctgaaagccacaatgagaatgatgcacactgaggccttgtgtcctttaatcactgcatttcattttgattttggataataaacctgggctcagcctgagcctctgcttct

SEQ ID NO: 6842 - DNA, 808 bp, Homo sapiens
gactccctctggtttccggtcaggtcggtcggtccccactatgggcctggagctgtacctggacctgctgtcccagccctgccgcgctgtttacatctttrccaagaagaacgacattcccttcgagctgcgcatcgtggatctgattaaaggtratgttccctgttttcctgggtgagccagtatctccccagacactggcagccaccctggcagagttgratgtgaccctgcagttgctcgaggacaagttcctccagaacaaggccttccttactggtcctcacatctccttagctgacctcrtagccatcacgragctgatgcatcccgtgggtgctggctgccaagtcttcgaaggccgacccaagctggccacatggcggcagcgcgtggaggcagcagtgggggaggacctcttccaggaggcccatgaggtcattctgaaggccaaggacttcccacctgcagaccccaccataaagcagaagctgatgccctgggtgctggccatgatccggtgagctgggaaacctcacccttgcaccgtcctcagcagtccacaaagcattttcatttctaatggcccatgggagccaggcccagaaagcaggaatggcttgcytaagacttgcccaagtcccagagcacctcacctcccgaagccaccatccccaccctgtcttccacagccgcctgaaagccacaatgagaatgatgcacactgaggccttgtgtcctttaatcactgcatttcattttgattttggataataaacctgggctcagcctgagcctctgcttctaa

SEQ ID NO: 6843 - DNA, 957 bp, Homo sapiens
gactccctctggtttccggtcaggtcggtcggtccccactatgggcctggagctgtacctggacctgctgtcccagccctgccgcgctgtttacatctttrccaagaagaacgacattcccttcgagctgcgcatcgtggatctgattaaagtgtggccatcctgctctacctgacgcgcaaatataaggtccctgactactggtaccctcaggacctgcaggcccgtgcccgtgtggatgagtacctggcatggcagcacacgactctgcggagaagctgcctccgggccttgtggcataaggtratgttccctgttttcctgggtgagccagtatctccccagacactggcagccaccctggcagagttgratgtgaccctgcagttgctcgaggacaagttcctccagaacaaggccttccttactggtcctcacatctccttagctgacctcrtagccatcacgragctgatgcatcccgtgggtgctggctgccaagtcttcgaaggccgacccaagctggccacatggcggcagcgcgtggaggcagcagtgggggaggacctcttccaggaggcccatgaggtcattctgaaggccaaggacttcccacctgcagaccccaccataaagcagaagctgatgccctgggtgctggccatgatccggtgagctgggaaacctcacccttgcaccgtcctcagcagtccacaaagcattttcatttctaatggcccatgggagccaggcccagaaagcaggaatggcttgcytaagacttgcccaagtcccagagcacctcacctcccgaagccaccatccccaccctgtcttccacagccgcctgaaagccacaatgagaatgatgcacactgaggccttgtgtcctttaatcactgcatttcattttgattttggataataaacctgggctcagcctgagcctctgcttct

SEQ ID NO: 6844 - DNA, 984 bp, Homo sapiens
gactccctctggtttccggtcaggtcggtcggtccccactatgggcctggagctgtacctggacctgctgtcccagccctgccgcgctgtttacatctttrccaagaagaacgacattcccttcgagctgcgcatcgtggatctgattaaaggtcagcacttaagcgatgcctttgcccaggtgaaccccctcaagaaggtgccagccttgaaggacggggacttcaccttgacggagaggacctgcaggcccgtgcccgtgtggatgagtacctggcatggcagcacacgactctgcggagaagctgcctccgggccttgtggcataaggtratgttccctgttttcctgggtgagccagtatctccccagacactggcagccaccctggcagagttgratgtgaccctgcagttgctcgaggacaagttcctccagaacaaggccttccttactggtcctcacatctccttagctgacctcrtagccatcacgragctgatgcatcccgtgggtgctggctgccaagtcttcgaaggccgacccaagctggccacatggcggcagcgcgtggaggcagcagtgggggaggacctcttccaggaggcccatgaggtcattctgaaggccaaggacttcccacctgcagaccccaccataaagcagaagctgatgccctgggtgctggccatgatccggtgagctgggaaacctcacccttgcaccgtcctcagcagtccacaaagcattttcatttctaatggcccatgggagccaggcccagaaagcaggaatggcttgcytaagacttgcccaagtcccagagcacctcacctcccgaagccaccatccccaccctgtcttccacagccgcctgaaagccacaatgagaatgatgcacactgaggccttgtgtcctttaatcactgcatttcattttgattttggataataaacctgggctcagcctgagcctctgcttct

SEQ ID NO: 6845 - DNA, 1045 bp, Homo sapiens
gactccctctggtttccggtcaggtcggtcggtccccactatgggcctggagctgtacctggacctgctgtcccagccctgccgcgctgtttacatctttrccaagaagaacgacattcccttcgagctgcgcatcgtggatctgattaaaggtcagcacttaagcgatgcctttgcccaggtgaaccccctcaagaaggtgccagccttgaaggacggggacttcaccttgacggagagtgtggccatcctgctctacctgacgcgcaaatataaggtccctgactactggtaccctcaggacctgcaggcccgtgcccgtgtggatgagtacctggcatggcagcacacgactctgcggagaagctgcctccgggccttgtggcataaggtratgttccctgttttcctgggtgagccagtatctccccagacactggcagccaccctggcagagttgratgtgaccctgcagttgctcgaggacaagttcctccagaacaaggccttccttactggtcctcacatctccttagctgacctcrtagccatcacgragctgatgcatcccgtgggtgctggctgccaagtcttcgaaggccgacccaagctggccacatggcggcagcgcgtggaggcagcagtgggggaggacctcttccaggaggcccatgaggtcattctgaaggccaaggacttcccacctgcagaccccaccataaagcagaagctgatgccctgggtgctggccatgatccggtgagctgggaaacctcacccttgcaccgtcctcagcagtccacaaagcattttcatttctaatggcccatgggagccaggcccagaaagcaggaatggcttgcytaagacttgcccaagtcccagagcacctcacctcccgaagccaccatccccaccctgtcttccacagccgcctgaaagccacaatgagaatgatgcacactgaggccttgtgtcctttaatcactgcatttcattttgattttggataataaacctgggctcagcctgagcctctgcttct

SEQ ID NO: 6846 - DNA, 1154 bp, Homo sapiens
gactccctctggtttccggtcaggtcggtcggtccccactatgggcctggagctgtacctggacctgctgtcccagccctgccgcgctgtttacatctttrccaagaagaacgacattcccttcgagctgcgcatcgtggatctgattaaagacggagtctcgctctgtcgcccaggctggagtgcagtggcaggatcacagctcactgcaacctctgccgcccgaaaccttgtcctctgcctcttgttcctgctggggaggtcagcacttaagcgatgcctttgcccaggtgaaccccctcaagaaggtgccagccttgaaggacggggacttcaccttgacggagagtgtggccatcctgctctacctgacgcgcaaatataaggtccctgactactggtaccctcaggacctgcaggcccgtgcccgtgtggatgagtacctggcatggcagcacacgactctgcggagaagctgcctccgggccttgtggcataaggtratgttccctgttttcctgggtgagccagtatctccccagacactggcagccaccctggcagagttgratgtgaccctgcagttgctcgaggacaagttcctccagaacaaggccttccttactggtcctcacatctccttagctgacctcrtagccatcacgragctgatgcatcccgtgggtgctggctgccaagtcttcgaaggccgacccaagctggccacatggcggcagcgcgtggaggcagcagtgggggaggacctcttccaggaggcccatgaggtcattctgaaggccaaggacttcccacctgcagaccccaccataaagcagaagctgatgccctgggtgctggccatgatccggtgagctgggaaacctcacccttgcaccgtcctcagcagtccacaaagcattttcatttctaatggcccatgggagccaggcccagaaagcaggaatggcttgcytaagacttgcccaagtcccagagcacctcacctcccgaagccaccatccccaccctgtcttccacagccgcctgaaagccacaatgagaatgatgcacactgaggccttgtgtcctttaatcactgcatttcattttgattttggataataaacctgggctcagcctgagcctctgcttct

SEQ ID NO: 6847 - DNA, 717 bp, Homo sapiens
gactccctctggtttccggtcaggtcggtcggtccccactatgggcctggagctgtacctggacctgctgtcccagccctgccgcgctgtttacatctttrccaagaagaacgacattcccttcgagctgcgcatcgtggatctgattaaaggtcagcacttaagcgatgcctttgcccaggtgaaccccctcaagaaggtgccagccttgaaggacggggacttcaccttgacggagagcccgtgggtgctggctgccaagtcttcgaaggccgacccaagctggccacatggcggcagcgcgtggaggcagcagtgggggaggacctcttccaggaggcccatgaggtcattctgaaggccaaggacttcccacctgcagaccccaccataaagcagaagctgatgccctgggtgctggccatgatccggtgagctgggaaacctcacccttgcaccgtcctcagcagtccacaaagcattttcatttctaatggcccatgggagccaggcccagaaagcaggaatggcttgcytaagacttgcccaagtcccagagcacctcacctcccgaagccaccatccccaccctgtcttccacagccgcctgaaagccacaatgagaatgatgcacactgaggccttgtgtcctttaatcactgcatttcattttgattttggataataaacctgggctcagcctgagcctctgcttct

SEQ ID NO: 6848 - DNA, 3379 bp, Homo sapiens
agtcggctggagtcggaggcgatatttctaggggtgtacttgttggggtcaggtcatgctacttgattacttataattgttatctctaatcttttctaaatgaaatacaaatacttcagggattaaactcaaggtcctttrttagcagtcatcacttaacccacttttactttttttccttctacttcctcagttcatcaggacactctgctaatacatatatactgtcttaaagttaatttttttcattgttgtatatctccaccgagaataccgtctatattcgtttttaccaataagaagttttgtcttttggtttaatttaaacagaaaccctgtgtttgtttgaatactacttggtttagtttaaacagaaaacctgtgtttgtttgaatgtaagcaccagccacaaaaacctacaaaagaagggaaattactgtctttaaatattaaaaaaaaacaagatccatgagtgggcatcgatcaacaaggaaaagatgtggagattctcacccggagtccccagtgggcttcgggcatatgagtactacaggatgtgtattaaataaattgtttcagttaccaacaccaccattgtcaagacaccaactaaagcggctagaagaacacagatatcaaagtgctggacggtccctgcttgagcccttaatgcaagggtattgggaatggctcgttagaagagttccctcctggattgccccaaatctcatcaccatcattggactgtcaataaacatctgtacaactattttattagtcttctactgccctacagctacagagcaggcacctctgtgggcatatattgcttgtgcctgtggccttttcatttaccagtctttggatgctattgatgggaaacaggcaagaagaaccaatagtagttctcctctgggagaactttttgatcatggctgtgattcactatcaacagtttttgtggttcttggaacttgtattgcagtgcagctggggacaaaccctgattggatgtttttttgttkttttgcggggacatttatgttctattgtgcgcactggcaaacgtatgtttctggaacattgcgatttggaataattgatgtgactgaagtgcaaatcttcataataatcatgcatttgctggcagtgattggaggaccacctttttggcaatctatgattccagtgctgaatattcaaatgaaaatttttcctgcactttgtactgtagcagggaccatattttcctgtacaaattacttccgtgtaatcttcacaggtggtgttggcaaaaatggatcaacaatagcaggaacaagtgtcctttctccttttctccatattggatcagtgattacattagctgcaatgatctacaagaaatctgcagttcagctttttgaaaagcatccctgtctttatatactgacatttggttttgtgtctgctaaaatcactaataagcttgtggttgcacacatgacgaaaagtgaaatgcatttgcatgacacagcattcataggtccggcacttttgtttctggaccagtattttaacagctttattgatgaatatattgtactttggattgccctggttttctctttctttgatttgatccgctactgtgtcagtgtttgcaatcagattgcrtctcacctgcacatacatgtcttcagaatcaaggtctctacagctcattctaatcatcattaatgatgtaattggtatataggaacatcatgttttctgcaggaaagaaagtaacatattaaggagaatgggggtggataagaacaaatataatttataataatcaatgttgtataacttttattctttattattggtaacacgccctaactatcctgtgtgagaatgggaatttcaagtcccatcttgtaaattgtmtatgttgtcatgcagggtttgggccaagaaagcatgcagaaaaaaatgccatgtgattgtaattatcctggattcagaataatactgtgatggggagccagatccgcagtggtggagagttctaatgttgactgtttgcaggccaaaagatgattgctttataattttaacaaatcattgtcttttagtaacatccttgtttagtgtcttctcaagctttctttactgaggaattcagcttgtgacacagatacatcccactagcttgtgaggtggaactagtaataaagaccttgaatttggattgaaaagtttcctatctttacattgttgaggaagtccttttttttttttttttttttttaattgctcaagaaatgattctctcacaggcttgggaaatcctgttagcatgcagaataatgtggtaactttgtcaatttcccattttatttttttaaataaatatatgatctaaaagccaactttttctcagttttactcagtggaaagataaactaagttttaatgttatttttttaaatttaagcaaaatttatttctgttctttaataaataagaaaatgtggtccactgcattgttgtgatgtgtcttgtgacatttctattttgtagaaactttaaaaaggagaactatgttcatttttcctgtcaatggtttttttgtgttgtagttgtcacctgtgtgattatcaatcatttagaaatctcatacccttcccctaaattttcagcaagtgcctgggcctctctaagaggtcactttgtactctccttttctggcagtctcctctttggtatctgtactatcgtttgaaatgggaaccagatatgtttccattttatacagataattcagttgcttgaagaagagggacacaggagaaaagatttaaactattggctaaaatgaggtgtcttattattgattttcatctatatcttgtcccataatcaggaataaacagtagctacactgccttgtatggcagccagagcgctgcttgcttgcacttttaatgattccatcaataccatgtagattgaattagcaaggagaagtaaacctttcatttctttgccagactatattgggaaatgaaaatccgtcattacttttccttgctagcaattgtycgaatatctgggataaagaaatacatacaggaaaatgttagggcagaccaagtattaaaagctaggacagagcaggacaaaggaggaaggataattctacttgtttggcaaagttacatcagttgtcttactgacacatcaggtactatctatagtggaaattgaggcccggagaggttaaatggcatgccagtgtcacttgctatttttcagaacaaaaattagaatccagatctgaatcctggtgcagtgttctctcctatgccctactgggctttagtgggctaaagttctgaagcaagatgtt

SEQ ID NO: 6849 - DNA, 3119 bp, Homo sapiens
cgaagcactaggccgtttgaggatctccgctccgctttgcctgggaccaggaaaagacscgagagacggaactcggcatcaggcactgcttggggcaggaggagagtaggggaaaccaaggaagagaacagaaaggtaagcaccagccacaaaaacctacaaaagaagggaaattactgtctttaaatattaaaaaaaaacaagatccatgagtgggcatcgatcaacaaggaaaagatgtggagattctcacccggagtccccagtgggcttcgggcatatgagtactacaggatgtgtattaaataaattgtttcagttaccaacaccaccattgtcaagacaccaactaaagcggctagaagaacacagatatcaaagtgctggacggtccctgcttgagcccttaatgcaagggtattgggaatggctcgttagaagagttccctcctggattgccccaaatctcatcaccatcattggactgtcaataaacatctgtacaactattttattagtcttctactgccctacagctacagagcaggcacctctgtgggcatatattgcttgtgcctgtggccttttcatttaccagtctttggatgctattgatgggaaacaggcaagaagaaccaatagtagttctcctctgggagaactttttgatcatggctgtgattcactatcaacagtttttgtggttcttggaacttgtattgcagtgcagctggggacaaaccctgattggatgtttttttgttkttttgcggggacatttatgttctattgtgcgcactggcaaacgtatgtttctggaacattgcgatttggaatattcgatgttacagagtcccagatcataattataatatgccagcttctcacaggaaccctggggccttggttctggaacttcacgattccagtgctgaatattcaaatgaaaatttttcctgcactttgtactgtagcagggaccatattttcctgtacaaattacttccgtgtaatcttcacaggtggtgttggcaaaaatggatcaacaatagcaggaacaagtgtcctttctccttttctccatattggatcagtgattacattagctgcaatgatctacaagaaatctgcagttcagctttttgaaaagcatccctgtctttatatactgacatttggttttgtgtctgctaaaatcactaataagcttgtggttgcacacatgacgaaaagtgaaatgcatttgcatgacacagcattcataggtccggcacttttgtttctggaccagtattttaacagctttattgatgaatatattgtactttggattgccctggttttctctttctttgatttgatccgctactgtgtcagtgtttgcaatcagattgcrtctcacctgcacatacatgtcttcagaatcaaggtctctacagctcattctaatcatcattaatgatgtaattggtatataggaacatcatgttttctgcaggaaagaaagtaacatattaaggagaatgggggtggataagaacaaatataatttataataatcaatgttgtataacttttattctttattattggtaacacgccctaactatcctgtgtgagaatgggaatttcaagtcccatcttgtaaattgtmtatgttgtcatgcagggtttgggccaagaaagcatgcagaaaaaaatgccatgtgattgtaattatcctggattcagaataatactgtgatggggagccagatccgcagtggtggagagttctaatgttgactgtttgcaggccaaaagatgattgctttataattttaacaaatcattgtcttttagtaacatccttgtttagtgtcttctcaagctttctttactgaggaattcagcttgtgacacagatacatcccactagcttgtgaggtggaactagtaataaagaccttgaatttggattgaaaagtttcctatctttacattgttgaggaagtccttttttttttttttttttttttaattgctcaagaaatgattctctcacaggcttgggaaatcctgttagcatgcagaataatgtggtaactttgtcaatttcccattttatttttttaaataaatatatgatctaaaagccaactttttctcagttttactcagtggaaagataaactaagttttaatgttatttttttaaatttaagcaaaatttatttctgttctttaataaataagaaaatgtggtccactgcattgttgtgatgtgtcttgtgacatttctattttgtagaaactttaaaaaggagaactatgttcatttttcctgtcaatggtttttttgtgttgtagttgtcacctgtgtgattatcaatcatttagaaatctcatacccttcccctaaattttcagcaagtgcctgggcctctctaagaggtcactttgtactctccttttctggcagtctcctctttggtatctgtactatcgtttgaaatgggaaccagatatgtttccattttatacagataattcagttgcttgaagaagagggacacaggagaaaagatttaaactattggctaaaatgaggtgtcttattattgattttcatctatatcttgtcccataatcaggaataaacagtagctacactgccttgtatggcagccagagcgctgcttgcttgcacttttaatgattccatcaataccatgtagattgaattagcaaggagaagtaaacctttcatttctttgccagactatattgggaaatgaaaatccgtcattacttttccttgctagcaattgtycgaatatctgggataaagaaatacatacaggaaaatgttagggcagaccaagtattaaaagctaggacagagcaggacaaaggaggaaggataattctacttgtttggcaaagttacatcagttgtcttactgacacatcaggtactatctatagtggaaattgaggcccggagaggttaaatggcatgccagtgtcacttgctatttttcagaacaaaaattagaatccagatctgaatcctggtgcagtgttctctcctatgccctactgggctttagtgggctaaagttctgaagcaagatgtt

SEQ ID NO: 6850 - DNA, 3095 bp, Homo sapiens
ttcccctttacggcaatcgcgaaagtgtcgtgaacgtgctgccgccgatcagtcacccagtcggctggagtcggaggcgatatttctaggggtgtacttgttggggtcagggtaagcaccagccacaaaaacctacaaaagaagggaaattactgtctttaaatattaaaaaaaaacaagatccatgagtgggcatcgatcaacaaggaaaagatgtggagattctcacccggagtccccagtgggcttcgggcatatgagtactacaggatgtgtattaaataaattgtttcagttaccaacaccaccattgtcaagacaccaactaaagcggctagaagaacacagatatcaaagtgctggacggtccctgcttgagcccttaatgcaagggtattgggaatggctcgttagaagagttccctcctggattgccccaaatctcatcaccatcattggactgtcaataaacatctgtacaactattttattagtcttctactgccctacagctacagagcaggcacctctgtgggcatatattgcttgtgcctgtggccttttcatttaccagtctttggatgctattgatgggaaacaggcaagaagaaccaatagtagttctcctctgggagaactttttgatcatggctgtgattcactatcaacagtttttgtggttcttggaacttgtattgcagtgcagctggggacaaaccctgattggatgtttttttgttkttttgcggggacatttatgttctattgtgcgcactggcaaacgtatgtttctggaacattgcgatttggaataattgatgtgactgaagtgcaaatcttcataataatcatgcatttgctggcagtgattggaggaccacctttttggcaatctatgattccagtgctgaatattcaaatgaaaatttttcctgcactttgtactgtagcagggaccatattttcctgtacaaattacttccgtgtaatcttcacaggtggtgttggcaaaaatggatcaacaatagcaggaacaagtgtcctttctccttttctccatattggatcagtgattacattagctgcaatgatctacaagaaatctgcagttcagctttttgaaaagcatccctgtctttatatactgacatttggttttgtgtctgctaaaatcactaataagcttgtggttgcacacatgacgaaaagtgaaatgcatttgcatgacacagcattcataggtccggcacttttgtttctggaccagtattttaacagctttattgatgaatatattgtactttggattgccctggttttctctttctttgatttgatccgctactgtgtcagtgtttgcaatcagattgcrtctcacctgcacatacatgtcttcagaatcaaggtctctacagctcattctaatcatcattaatgatgtaattggtatataggaacatcatgttttctgcaggaaagaaagtaacatattaaggagaatgggggtggataagaacaaatataatttataataatcaatgttgtataacttttattctttattattggtaacacgccctaactatcctgtgtgagaatgggaatttcaagtcccatcttgtaaattgtmtatgttgtcatgcagggtttgggccaagaaagcatgcagaaaaaaatgccatgtgattgtaattatcctggattcagaataatactgtgatggggagccagatccgcagtggtggagagttctaatgttgactgtttgcaggccaaaagatgattgctttataattttaacaaatcattgtcttttagtaacatccttgtttagtgtcttctcaagctttctttactgaggaattcagcttgtgacacagatacatcccactagcttgtgaggtggaactagtaataaagaccttgaatttggattgaaaagtttcctatctttacattgttgaggaagtccttttttttttttttttttttttaattgctcaagaaatgattctctcacaggcttgggaaatcctgttagcatgcagaataatgtggtaactttgtcaatttcccattttatttttttaaataaatatatgatctaaaagccaactttttctcagttttactcagtggaaagataaactaagttttaatgttatttttttaaatttaagcaaaatttatttctgttctttaataaataagaaaatgtggtccactgcattgttgtgatgtgtcttgtgacatttctattttgtagaaactttaaaaaggagaactatgttcatttttcctgtcaatggtttttttgtgttgtagttgtcacctgtgtgattatcaatcatttagaaatctcatacccttcccctaaattttcagcaagtgcctgggcctctctaagaggtcactttgtactctccttttctggcagtctcctctttggtatctgtactatcgtttgaaatgggaaccagatatgtttccattttatacagataattcagttgcttgaagaagagggacacaggagaaaagatttaaactattggctaaaatgaggtgtcttattattgattttcatctatatcttgtcccataatcaggaataaacagtagctacactgccttgtatggcagccagagcgctgcttgcttgcacttttaatgattccatcaataccatgtagattgaattagcaaggagaagtaaacctttcatttctttgccagactatattgggaaatgaaaatccgtcattacttttccttgctagcaattgtycgaatatctgggataaagaaatacatacaggaaaatgttagggcagaccaagtattaaaagctaggacagagcaggacaaaggaggaaggataattctacttgtttggcaaagttacatcagttgtcttactgacacatcaggtactatctatagtggaaattgaggcccggagaggttaaatggcatgccagtgtcacttgctatttttcagaacaaaaattagaatccagatctgaatcctggtgcagtgttctctcctatgccctactgggctttagtgggctaaagttctgaagcaagatgtt

SEQ ID NO: 6851 - DNA, 3139 bp, Homo sapiens
cccttctagagggagcgggctgcaagcgctggggcctgtcccttttcccctttacggcaatcgcgaaagtgtcgtgaacgtgctgccgccgatcagtcacccagtcggctggagtcggaggcgatatttctaggggtgtacttgttggggtcagggtaagcaccagccacaaaaacctacaaaagaagggaaattactgtctttaaatattaaaaaaaaacaagatccatgagtgggcatcgatcaacaaggaaaagatgtggagattctcacccggagtccccagtgggcttcgggcatatgagtactacaggatgtgtattaaataaattgtttcagttaccaacaccaccattgtcaagacaccaactaaagcggctagaagaacacagatatcaaagtgctggacggtccctgcttgagcccttaatgcaagggtattgggaatggctcgttagaagagttccctcctggattgccccaaatctcatcaccatcattggactgtcaataaacatctgtacaactattttattagtcttctactgccctacagctacagagcaggcacctctgtgggcatatattgcttgtgcctgtggccttttcatttaccagtctttggatgctattgatgggaaacaggcaagaagaaccaatagtagttctcctctgggagaactttttgatcatggctgtgattcactatcaacagtttttgtggttcttggaacttgtattgcagtgcagctggggacaaaccctgattggatgtttttttgttkttttgcggggacatttatgttctattgtgcgcactggcaaacgtatgtttctggaacattgcgatttggaataattgatgtgactgaagtgcaaatcttcataataatcatgcatttgctggcagtgattggaggaccacctttttggcaatctatgattccagtgctgaatattcaaatgaaaatttttcctgcactttgtactgtagcagggaccatattttcctgtacaaattacttccgtgtaatcttcacaggtggtgttggcaaaaatggatcaacaatagcaggaacaagtgtcctttctccttttctccatattggatcagtgattacattagctgcaatgatctacaagaaatctgcagttcagctttttgaaaagcatccctgtctttatatactgacatttggttttgtgtctgctaaaatcactaataagcttgtggttgcacacatgacgaaaagtgaaatgcatttgcatgacacagcattcataggtccggcacttttgtttctggaccagtattttaacagctttattgatgaatatattgtactttggattgccctggttttctctttctttgatttgatccgctactgtgtcagtgtttgcaatcagattgcrtctcacctgcacatacatgtcttcagaatcaaggtctctacagctcattctaatcatcattaatgatgtaattggtatataggaacatcatgttttctgcaggaaagaaagtaacatattaaggagaatgggggtggataagaacaaatataatttataataatcaatgttgtataacttttattctttattattggtaacacgccctaactatcctgtgtgagaatgggaatttcaagtcccatcttgtaaattgtmtatgttgtcatgcagggtttgggccaagaaagcatgcagaaaaaaatgccatgtgattgtaattatcctggattcagaataatactgtgatggggagccagatccgcagtggtggagagttctaatgttgactgtttgcaggccaaaagatgattgctttataattttaacaaatcattgtcttttagtaacatccttgtttagtgtcttctcaagctttctttactgaggaattcagcttgtgacacagatacatcccactagcttgtgaggtggaactagtaataaagaccttgaatttggattgaaaagtttcctatctttacattgttgaggaagtccttttttttttttttttttttttaattgctcaagaaatgattctctcacaggcttgggaaatcctgttagcatgcagaataatgtggtaactttgtcaatttcccattttatttttttaaataaatatatgatctaaaagccaactttttctcagttttactcagtggaaagataaactaagttttaatgttatttttttaaatttaagcaaaatttatttctgttctttaataaataagaaaatgtggtccactgcattgttgtgatgtgtcttgtgacatttctattttgtagaaactttaaaaaggagaactatgttcatttttcctgtcaatggtttttttgtgttgtagttgtcacctgtgtgattatcaatcatttagaaatctcatacccttcccctaaattttcagcaagtgcctgggcctctctaagaggtcactttgtactctccttttctggcagtctcctctttggtatctgtactatcgtttgaaatgggaaccagatatgtttccattttatacagataattcagttgcttgaagaagagggacacaggagaaaagatttaaactattggctaaaatgaggtgtcttattattgattttcatctatatcttgtcccataatcaggaataaacagtagctacactgccttgtatggcagccagagcgctgcttgcttgcacttttaatgattccatcaataccatgtagattgaattagcaaggagaagtaaacctttcatttctttgccagactatattgggaaatgaaaatccgtcattacttttccttgctagcaattgtycgaatatctgggataaagaaatacatacaggaaaatgttagggcagaccaagtattaaaagctaggacagagcaggacaaaggaggaaggataattctacttgtttggcaaagttacatcagttgtcttactgacacatcaggtactatctatagtggaaattgaggcccggagaggttaaatggcatgccagtgtcacttgctatttttcagaacaaaaattagaatccagatctgaatcctggtgcagtgttctctcctatgccctactgggctttagtgggctaaagttctgaagcaagatgtt

SEQ ID NO: 6852 - DNA, 3119 bp, Homo sapiens
cgaagcactaggccgtttgaggatctccgctccgctttgcctgggaccaggaaaagacscgagagacggaactcggcatcaggcactgcttggggcaggaggagagtaggggaaaccaaggaagagaacagaaaggtaagcaccagccacaaaaacctacaaaagaagggaaattactgtctttaaatattaaaaaaaaacaagatccatgagtgggcatcgatcaacaaggaaaagatgtggagattctcacccggagtccccagtgggcttcgggcatatgagtactacaggatgtgtattaaataaattgtttcagttaccaacaccaccattgtcaagacaccaactaaagcggctagaagaacacagatatcaaagtgctggacggtccctgcttgagcccttaatgcaagggtattgggaatggctcgttagaagagttccctcctggattgccccaaatctcatcaccatcattggactgtcaataaacatctgtacaactattttattagtcttctactgccctacagctacagagcaggcacctctgtgggcatatattgcttgtgcctgtggccttttcatttaccagtctttggatgctattgatgggaaacaggcaagaagaaccaatagtagttctcctctgggagaactttttgatcatggctgtgattcactatcaacagtttttgtggttcttggaacttgtattgcagtgcagctggggacaaaccctgattggatgtttttttgttkttttgcggggacatttatgttctattgtgcgcactggcaaacgtatgtttctggaacattgcgatttggaataattgatgtgactgaagtgcaaatcttcataataatcatgcatttgctggcagtgattggaggaccacctttttggcaatctatgattccagtgctgaatattcaaatgaaaatttttcctgcactttgtactgtagcagggaccatattttcctgtacaaattacttccgtgtaatcttcacaggtggtgttggcaaaaatggatcaacaatagcaggaacaagtgtcctttctccttttctccatattggatcagtgattacattagctgcaatgatctacaagaaatctgcagttcagctttttgaaaagcatccctgtctttatatactgacatttggttttgtgtctgctaaaatcactaataagcttgtggttgcacacatgacgaaaagtgaaatgcatttgcatgacacagcattcataggtccggcacttttgtttctggaccagtattttaacagctttattgatgaatatattgtactttggattgccctggttttctctttctttgatttgatccgctactgtgtcagtgtttgcaatcagattgcrtctcacctgcacatacatgtcttcagaatcaaggtctctacagctcattctaatcatcattaatgatgtaattggtatataggaacatcatgttttctgcaggaaagaaagtaacatattaaggagaatgggggtggataagaacaaatataatttataataatcaatgttgtataacttttattctttattattggtaacacgccctaactatcctgtgtgagaatgggaatttcaagtcccatcttgtaaattgtmtatgttgtcatgcagggtttgggccaagaaagcatgcagaaaaaaatgccatgtgattgtaattatcctggattcagaataatactgtgatggggagccagatccgcagtggtggagagttctaatgttgactgtttgcaggccaaaagatgattgctttataattttaacaaatcattgtcttttagtaacatccttgtttagtgtcttctcaagctttctttactgaggaattcagcttgtgacacagatacatcccactagcttgtgaggtggaactagtaataaagaccttgaatttggattgaaaagtttcctatctttacattgttgaggaagtccttttttttttttttttttttttaattgctcaagaaatgattctctcacaggcttgggaaatcctgttagcatgcagaataatgtggtaactttgtcaatttcccattttatttttttaaataaatatatgatctaaaagccaactttttctcagttttactcagtggaaagataaactaagttttaatgttatttttttaaatttaagcaaaatttatttctgttctttaataaataagaaaatgtggtccactgcattgttgtgatgtgtcttgtgacatttctattttgtagaaactttaaaaaggagaactatgttcatttttcctgtcaatggtttttttgtgttgtagttgtcacctgtgtgattatcaatcatttagaaatctcatacccttcccctaaattttcagcaagtgcctgggcctctctaagaggtcactttgtactctccttttctggcagtctcctctttggtatctgtactatcgtttgaaatgggaaccagatatgtttccattttatacagataattcagttgcttgaagaagagggacacaggagaaaagatttaaactattggctaaaatgaggtgtcttattattgattttcatctatatcttgtcccataatcaggaataaacagtagctacactgccttgtatggcagccagagcgctgcttgcttgcacttttaatgattccatcaataccatgtagattgaattagcaaggagaagtaaacctttcatttctttgccagactatattgggaaatgaaaatccgtcattacttttccttgctagcaattgtycgaatatctgggataaagaaatacatacaggaaaatgttagggcagaccaagtattaaaagctaggacagagcaggacaaaggaggaaggataattctacttgtttggcaaagttacatcagttgtcttactgacacatcaggtactatctatagtggaaattgaggcccggagaggttaaatggcatgccagtgtcacttgctatttttcagaacaaaaattagaatccagatctgaatcctggtgcagtgttctctcctatgccctactgggctttagtgggctaaagttctgaagcaagatgtt

SEQ ID NO: 6853 - DNA, 384 bp, Homo sapiens
atgactataacccctagaggtacaactgtgacccctacaaaggaaactgtatcccttggaaagcacactgtgactgtcccctccagaaacatatcagtcacccctgaagggcagactatgcctttaagaggggagaatttgacttctgaggtgggcactcascccaggatgggtaacttgggtcttcagatggaagcygaaaacaggatgatgctgtcctccagcccygtcatccagctcccggaacaaactcctctrgcttttgacaaccgctttgttcccatctatggaaaccattcctctgtcaactcagtaacccctcaaacaagtcctctttctctaaaaaaagaaatcccagaaaactctgctgtggatsaagaagcc

SEQ ID NO: 6854 - DNA, 3630 bp, Homo sapiens
ctgagctgtcatctccattttacaagcatggaaactgacctcacagaggcaggtaatttgtgcaagattacaaaacttctaagtggtgacactgagattcaaactttgaattcaaaccttggattcaaagcctaaatccaaagctatggtttaaacttttttwaaaaattacrctrcttcccagccaataatcttttaataatagaattgctgctaccatatggggtttctcccccatattcagtccctgtggtactgaataccaggaagaccctcttcctggtattcagtgccaacctggtgctgttgctttgttggagagggaggccaggtcgttctggggtcactgtgactctcataaattactgatcctggcactggggtgtgtgtgtgtgtgtgtgtgtgtgtgtgtgtgtgtgtgtgtgtgtgtgkatgtgtagctgggctgtcccagcgctatccacagggaagctcctataaarggctgcatctctggactcacagctatcagaccattgagatgtggaagctgttgctgtgggttgggctggttcttgtgctgaaacaccacgatggtgctgcccataaactcgtgtgttatttcaccaactgggcacacagtcggccaggccctgcctcgatcttgccccatgacctggacccctttctctgcacccacctgatatttgcctttgcctcaatgaacaacaatcagattgttgctaaggatctccaggatgagaaaattctctacccagagttcaacaaactaaaggagaggaacagagagctgaaaacactactgtccatcggcgggtggaactttggcacctcaagattcaccactatgttgtccacatttgccaaccgtgaaaartttattgcttcagttatatcccttctgaggacacatgactttgatggtcttgaccttttcttcttatatcctggactaagaggcagccccatgcatgaccggtggacttttctcttcttaattgaagagctcctgtttgccttccggaaggaggcactgctcaccatgcgcccgaggctgctgctgtctgctgctgtttctggggtcccacacatcgtccaaacatcctatgatgtgcgctttctaggaagactcctggatttcatcaatgtcttgtcttatgayttacatggaagttgggaaaggttcacaggacataatagccccctcttctctctgcctgaagaccccaaatcttcggcatatgctatgaattattggagaaagcttggggcaccctcagagaagctcatcatggggatccccacctatggacgtacctttcgcctcctcaaagcctctaagaatgggttgcaggccagagcgatcggaccagcatctccagggaagtacaccaagcaagaaggcttcttggcttattttgagatttgttcctttgtctggggagcgaagaagcactggattgattaccagtatgtcccgtatgccaacaaggggaaagagtgggttggctatgamaatgccatcagcttcagttacaaggcatggtttataaggcgagagcattttgggggggccatggtgtggacattggacatggatgacgtcaggggcacgttctgtggcactggccctttcccccttgtctacgtattgaatgatatcctggtgcgggctgagttcagttcaacttctttaccacaattttggctgtcatctgctgtgaattcttcaagcactgaccctgaaaggctggctgtgaccayggcatggaccactgatagtaagattttgcccccaggaggagaggctggggtcactgagatccacggaaagtgtgaaaatatgactataacccctagaggtacaactgtgacccctacaaaggaaactgtatcccttggaaagcacactgtagctctaggagagaagactgagatcactggggcaaygaccrtgacttctgtgggtcatcagtccatgacccctggagagaaggccctgacccctgtgggtcatcaatctgtgaccactggacagaagaccctgaccyctgtgggtyatcagtctgtgacccctggggaaaagaccctgaccyctgtgggtcatcagtctgtgascyctgtgrgtyatcagtctgtgasccctggaggaacgactatgacccctgtccattttcagactgagacccttagacagaatacagtggcccctagaaggaaggctgtggcccgtgaaaaggtgactgtcccctccagaaacatatcagtcacccctgaagggcagactatgcctttaagaggggagaatttgacttctgaggtgggcactcascccaggatgggtaacttgggtcttcagatggaagcygaaaacaggatgatgctgtcctccagcccygtcatccagctcccggaacaaactcctctrgcttttgacaaccgctttgttcccatctatggaaaccattcctctgtcaactcagtaacccctcaaacaagtcctctttctctaaaaaaagaaatcccagaaaactctgctgtggatsaagaagcctaagcccctctggtgtcagaaaccagggaaaacccttgtcttttcttctaagtgacatgttggaagccttctcatcccggggcaaagcaggcatcaaaaccagaataggccaatctcttttccattaaataaactgtaaacacaagaacccaccgagttctctgagattcttttcttgaattgaactctgcaactcagttgtcagcttcttcctttcaaggtcattttccccactgctatttttggaaagagggagtttgtgtctagtctacaatgatgctatcctgtgtggattatgtgcttccttctttgctgtgagcaactgctcacttcactgttggttggagccagaatctcttctagaacagtttccaccatcctcaaggggagctgagatggggagggggaagttgagtcttccaattacattctctccttggtaaaatccttgttttccctgaaaaaacaaccccatctattctctcctcaagaagtgtttgaggaaaaggtataaaaaaggtactttaaaaattattttcttatagtattaccttcacacttctgctaggtctcctctagaaacaccagttctcacacattaaaactttaatccacycagggaacattttcctaggcatgactgtccctcataagttgctatagacaccagatcaatttctagccctccaattctaggagctagtgctacacagagtgggtgccatacctattattatgttactttttcttttggaagtgtagcctccaagkctttaagccagagtctgaaattaaaatgtccataggaccaggcacctgccataaagattgaagcacgtgaaagcacatggccatttgcttaacagaacctaggtcacatatraaacccttttgccttgacaaaaaaattagctgggcatgatggctcacgcctgtagtctcagctacttgggaggctaaagtgggaggatcacctgagccctggagattgaggctgcattgagccacgatggtgccactgcactccagcctgggtgacaaagcaagaccctgtctcaaaataaataaataaawaa

SEQ ID NO: 6855 - DNA, 1646 bp, Homo sapiens
actcaaactggacgccggccggagactcmgctccggcagcaaaccccacgtggtgcacctctgagcctccgcccctctcccgagggaaccgcaactctacttctcgcgagaattgcttctatggctccatcctgctttccggctgtcgccctcatgcrataggctctcagcgttacttgactcttctcgcgataatttttttwaaaaatctcccaaggaaagttgaaggaagagtacaaaattttcatctcgcgagacttgtgagcggccatcttggtyctgccctgacagattctcctatcggggtcacagggacgctaagattgstacctggactttcgttgaccatgctgtcccgggtggtactttccgccgccgccacagcggccccctctctgaagaatgcagccttcctaggtccaggggtattgcaggcaacaaggacctttcatacagggcagccacaccttgtccctgtaccacctcttcctgaatacggaggaaaagttcgttatggactgatccctgaggaattcttccagtttctttatcctaaaactggtgtaacaggaccctatrtactyggaactgggcttatcttgtacgctttatccaaagaaatatatgtgattagcgcagagaccttcactgccctatcagtactaggtgtaatggtctatggaattaaaaaatatggtccctttgttgcagactttgctgataaactcaatgagcaaaaacttgcccaactagaagaggcgaagcaggcttccatccaacacatccagaatgcaattgatayggagaagtcacaacaggcactggttcagaagcgccattacctttttgatgtgcaaaggaataacattgctatggctttggaagttacttaccgggaacgactgtatagagtatataaggaagtaaagaatcgcctggactatcatatatctgtgcagaacatgatgcgtcgaaaggaacaagaacayatgataaattgggtggagaagcacgtggtgcaaagcatctccacacagcaggaaaaggagacaattgccaagtgcattgcggacctaaagctgctggcaaagaaggctcaagcacagccagttatgtaaatgtatctatcccaattgagacagctagaaacagttgactgactaaatggaaactagtctatttgacaaagtctttctgtgttggtgtctactgaagttatagtttacccttcctaaaaatgaaaagtttgtttcatatagtgagagaacgaaatctctatcggccagtcagatgtttctcatccttcttgctctgcctttgagttgttccgtgatcacttctgaataagcagtttgcctttataaaaacttgctgcctgactaaagattaacaggttatagtttaaatttgtaattaattctaccatcttgcaataaagtgacaattgaatgaaacagggtttttcaagttgtataattctctgaaatactcagcttttgtcatatgggtaaaaattaaagatgtcattgaactactgtcttgtttatgagaccattcagtggtgaactgtttctggctgataggttatgagatatgtaaagctttctagtactcttaaaataactaaatggagtattatatatcaa

SEQ ID NO: 6856 - DNA, 1734 bp, Homo sapiens
accgcacagaacagcgttccggccgggtctggatctgagctcaggaacgcggggcagggctggggacagctcggtgacgcgacccaggactcaaactggacgccggccggagactcmgctccggcagcaaaccccacgtggtgcacctctgagcctccgcccctctcccgagggaaccgcaactctacttctcgcgagaattgcttctatggctccatcctgctttccggctgtcgccctcatgcrataggctctcagcgttacttgactcttctcgcgataatttttttwaaaaatctcccaaggaaagttgaaggaagagtacaaaattttcatctcgcgagacttgtgagcggccatcttggtyctgccctgacagattctcctatcggggtcacagggacgctaagattgstacctggactttcgttgaccatgctgtcccgggtggtactttccgccgccgccacagcggccccctctctgaagaatgcagccttcctaggtccaggggtattgcaggcaacaaggacctttcatacagggcagccacaccttgtccctgtaccacctcttcctgaatacggaggaaaagttcgttatggactgatccctgaggaattcttccagtttctttatcctaaaactggtgtaacaggaccctatrtactyggaactgggcttatcttgtacgctttatccaaagaaatatatgtgattagcgcagagaccttcactgccctatcagtactaggtgtaatggtctatggaattaaaaaatatggtccctttgttgcagactttgctgataaactcaatgagcaaaaacttgcccaactagaagaggcgaagcaggcttccatccaacacatccagaatgcaattgatayggagaagtcacaacaggcactggttcagaagcgccattacctttttgatgtgcaaaggaataacattgctatggctttggaagttacttaccgggaacgactgtatagagtatataaggaagtaaagaatcgcctggactatcatatatctgtgcagaacatgatgcgtcgaaaggaacaagaacayatgataaattgggtggagaagcacgtggtgcaaagcatctccacacagcaggaaaaggagacaattgccaagtgcattgcggacctaaagctgctggcaaagaaggctcaagcacagccagttatgtaaatgtatctatcccaattgagacagctagaaacagttgactgactaaatggaaactagtctatttgacaaagtctttctgtgttggtgtctactgaagttatagtttacccttcctaaaaatgaaaagtttgtttcatatagtgagagaacgaaatctctatcggccagtcagatgtttctcatccttcttgctctgcctttgagttgttccgtgatcacttctgaataagcagtttgcctttataaaaacttgctgcctgactaaagattaacaggttatagtttaaatttgtaattaattctaccatcttgcaataaagtgacaattgaatgaaacagggtttttcaagttgtataattctctgaaatactcagcttttgtcatatgggtaaaaattaaagatgtcattgaactactgtcttgtttatgagaccattcagtggtgaactgtttctggctgataggttatgagatatgtaaagctttctagtactcttaaaataactaaatggagtattatatatcaa

SEQ ID NO: 6857 - DNA, 2013 bp, Homo sapiens
accgcacagaacagcgttccggccgggtctggatctgagctcaggaacgcggggcagggctggggacagctcggtgacgcgacccaggactcaaactggacgccggccggagactcmgctccggcagcaaaccccacgtggtgcacctctgagcctccgcccctctcccgagggaaccgcaactctacttctcgcgagaattgcttctatggctccatcctgctttccggctgtcgccctcatgcrataggctctcagcgttacttgactcttctcgcgataatttttttwaaaaatctcccaaggaaagttgaaggaagagtacaaaattttcatctcgcgagacttgtgagcggccatcttggtyctgccctgacagattctcctatcggggtcacagggacgctaagattgstacctggactttcgttgaccatgctgtcccgggtggtactttccgccgccgccacagcggccccctctctgaagaatgcagccttcctaggtccaggggtattgcaggcaacaaggacctttcatacagggcagccacaccttgtccctgtaccacctcttcctgaatacggaggaaaagttcgttatggactgatccctgaggaattcttccagtttctttatcctaaaactggtgtaacaggaccctatrtactyggaactgggcttatcttgtacgctttatccaaagaaatatatgtgattagcgcagagaccttcactgccctatcagtactaggtgtaatggtctatggaattaaaaaatatggtccctttgttgcagactttgctgataaactcaatgagcaaaaacttgcccaactagaagaggcgaagcaggcttccatccaacacatccagaatgcaattgatayggagaagtcacaacaggcactggttcagaagcgccattacctttttgatgtgcaaaggaataacattgctatggctttggaagttacttaccgggaacgactgtatagagtatataaggaagtaaagaatcgcctggactatcatatatctgtgcagaacatgatgcgtcgaaaggaacaagaacayatgataaattgggtggagaagcacgtggtgcaaagcatctccacacagcaggaaaaggagacaattgccaagtgcattgcggacctaaagctgctggcaaagaaggctcaagcacagccagttatgtaaatgtatctatcccaattgagacagctagaaacagttgactgactaaatggaaactagtctatttgacaaagtctttctgtgttggtgtctactgaagttatagtttacccttcctaaaaatgaaaagtttgtttcatatagtgagagaacgaaatctctatcggccagtcagatgtttctcatccttcttgctctgcctttgagttgttccgtgatcacttctgaataagcagtttgcctttataaaaacttgctgcctgactaaagattaacaggttatagtttaaatttgtaattaattctaccatcttgcaataaagtgacaattgaatgaaacaggctgttagtgttctttctgatgctggagcttagagtccacacggcagtcagttaagggaagacgggtgtaaaatgggaggcagttaagaacaagtggaagtaacaagcacagacaaacccatgtccgtttttatcatctctggccttgatagtggttgtcctgtgtaaccccatatccaacacaaacatgtggtttagagaaacctggttagagaaatgagttcatccaacaaccagagggaatttggaagtatatcttctcctagtcaagcctctgataagaacacaaccccagccaatacctggattacagcctggtgagaccttgaagcagagaaccttgataaaacatgtccaagcttttaacccatagaaackataagataaatgtgtattgttttaagcctctaaatgtgtgatatgttaggcagcaatagaaaactaatacagcaaaggtctccaccatct

SEQ ID NO: 6858 - DNA, 1356 bp, Homo sapiens
gaaacctctcctcgtctgtgcacgaacaggtggccaactctggagcccaggctgttgctttccagtctggtggtgaatcctccatagtctggaacagccagctgaaaactctcctggccattggaggctggaacttcrggactgcccctttcactgccatggtttctactcctgagaaccgccagactttcatcacctcagtcatcarattcctgcgccagtatgagtttgacgggctggactttgactgggagtaccctggctctcgtgggagccctcctcaggacaagcatctcttcactgtcctggtgcaggaaatgcgtgaagcttttgagcaggaggccaagcagatcaacaagcccaggctgatggtcactgctgcagtagctgctggcatctccaatatccagtctggctatgagatcccccaactgtcacagtacctggactacatccatgtcatgacctacgacctccatggctcctgggagggctacactggagagaacagccccctctacaaatacccgactgacaccggcagcaacgcctacctcaatgtggattatgtcatgaactactggaaggacaatggagcaccagctgagaagctcatcgttggattccctacctatggacacaacttcatcctgagcaacccctccaacactggaattggtgcccccacctctggtgytggtcctgckgggccctatgccaaggagtctgggatctgggcttactacgagatctgtaccttcctgaaaaatggagccactcagggatgggatgcccctcaggaagtgccttatgcctatcagggcaatgtrtgggttggctatgacaacrtcaagagcttcgatattaaggctcaatggcttaagcacaacaaatytggaggcgccatggtctgggccattgatctggatgacttcactggcactttctgcaaccagggcaagyttcccctaatctccaccctgaagaaggccctyggcytgcagagtgcaagttgcacggctccagctcagcccattgagccaataactgctgctcccagtggcagcgggaacgggagcgggagtagcagctctggaggcagctcrggaggcagtggattctgtgctgkcagagccaacggcctctaccccgtggcaaataacagaaatgccttctggcactgcgtgaatggagtcacgtaccagcagaactgccaggccgggcttgtcttcgacaccagctgtgattgctgcaactgggcataaacctgacctggtctatattccctagagttccagtctcttttgcttaggacatgttgcccctacctaaagtcctgcaataaaatcagcagtr

SEQ ID NO: 6859 - DNA, 1882 bp, Homo sapiens
gccagacacaaaatgtccacaatagaaaatctgaccacagtatctaaacagttgcttatcagyccttggaactgccaaaaaagctattaaactgrtgttttccatggtgatggtctccaccaccctgttagragccatgacattgttctgtccttgttgggcagagaaggtggtgatgctggtggtgggagggtgtaggttgaaggtcttgggagggtgtttgtagaagagaaggtccgttgatttactgattaactacatacacatctgggtcaaattgttctctatttagaagcctttgtgataaccacagaatcagaacatataaaaagctctgcgggactggtgctgactgcaaccatgacaaagcttattctcctcacaggtcttgtccttatactgaatttgcagctcggctctgcctaccagctgacatgctacttcaccaactgggcccagtacyggccaggcctggggcgcttcatgcctgacracatcracccctgcctctgtacccacctsatctacgcctttgctgggakgcagaacaacgagatcaccaccatcgaatggaatgatgtgactctctaccaagctttcaatggcctgaaaaataagaacagccagctgaaaactctcctggccattggaggctggaacttcrggactgcccrtttcactgccatggtttctactcctgagaaccgccagactttcatcacctcagtcatcarattcctgcgccagtatgagtttgacgggctggactttgactgggagtaccctggctctcgtgggagccctcctcaggacaagcatctcttcactgtcctggtgcaggaaatgcgtgaagcttttgagcaggaggccaagcagatcaacaagcccaggctgatggtcactgctgcagtagctgctggcatctccaatatccagtctggctatgagatcccccaactgtcacagtacctggactacatccatgtcatgacctacgacctccatggctcctgggagggctacactggagagaacagccccctctacaaatacccgactgacaccggcagcaacgcctacctcaatgtggattatgtcatgaactactggaaggacaatggagcaccagctgagaagctcatcgttggattccctacctatggacacaacttcatcctgagcaacccctccaacactggaattggtgcccccacctctggtgytggtcctgckgggccctatgccaaggagtctgggatctgggcttactacgagatctgtaccttcctgaaaaatggagccactcagggatgggatgcccctcaggaagtgccttatgcctatcagggcaatgtrtgggttggctatgacaacrtcaagagcttcgatattaaggctcaatggcttaagcacaacaaatytggaggcgccatggtctgggccattgatctggatgacttcactggcactttctgcaaccagggcaagyttcccctaatctccaccctgaagaaggccctyggcytgcagagtgcaagttgcacggctccagctcagcccattgagccaataactgctgctcccagtggcagcgggaacgggagcgggagtagcagctctggaggcagctcrggaggcagtggattctgtgctgkcagagccaacggcctctaccccgtggcaaataacagaaatgccttctggcactgcgtgaatggagtcacgtaccagcagaactgccaggccgggcttgtcttcgacaccagctgtgattgctgcaactgggcataaacctgacctggtctatattccctagagttccagtctcttttgcttaggacatgttgcccctacctaaagtcctgcaataaaatcagcagtc

SEQ ID NO: 6860 - DNA, 2606 bp, Homo sapiens
ggagatttttwaaaaaaattatcgcgagaagagtcaagtaacgctgagagcctatygcatgagggcgacagccggaaagcaggatggagccatagaagcaattctcgcgagaagtagagttgcggttccctcgggagaggggcggaggctcagaggtgcaccacgtggggtttgctgccggagckgagtctccggccggcgtccagtttgagtctaggttggagttggaaccgtggagatgcggaaggaaaccccaccccccctagtgcccccggcggcccgggagtggaatcttcccccaaatgcgcccgcctgcatggaacggcagttggaggctgcgcggtaccggtccgatggggcgcttctcctcggggcctccagcctgagtgggcgctgctgggccggctccctctggctttttaaggacccctgtgccgcccccaacgaaggcttctgctccgccggagtccaaacggaggctggagtggctgacctcacttgggttggggagagaggtattctagtggcctccgattcaggtgctgttgaattgtgggaactagatgagaatgagacacttattgtcagcaagttctgcaagtatgagcatgatgacattgtgtctacagtcagtgtcttgagctctggcacacaagctgtcagtggtagcaaagacatctgcatcaaggtttgggaccttgctcagcaggtggtactgagttcataccgagctcatgctgctcaggtcacttgtgttgctgcctctcctcacaaggactctgtgtttctttcatgcagcgaggacaatagaattttactctgggatacccgctgtcccaagccagcatcacagattggctgcagtgcgcctggctaccttcctacctcgctggcttggcatcctcagcaaagtgaagtctttgtctttggtgatgagaatgggacagtctcccttgtggacaccaagagtacaagctgtgtcctgagctcagctgtacactcccagtgtgtcactgggctggtgttctccccacacagtgttcccttcctggcctctctcagtgaagactgctcacttgctgtgctggactcaagcctttctgagttgtttagaagccaagcccacagagactttgtgagagatgcgacttggtccccgctcaatcactccctgcttaccacagtgggctgggaccatcaggtcgtccaccacgttgtgcccacagaacctctcccagcccctggacctgcaagtgttactgagtagattggatttaagacaaaaagcaagtcccccatgagtgtccacttctttgccctgccctctcagcttgtgagacaacacaggagccttctatagtatgttgatatgctagatctgtgccgttaataggcatcgtctctcagcctgagggaggctggattytgggttcctgtagtcacagggaggaaaagctttyttaaaaatggacatgtatgtgcgtgtgagtgtgtgtgtagatttatagtttttggtagtggcaggaataaaaaaaatccatcctacatcttccctaagcactgcctctctctcaccccccaaaacaagttgacgaaagggttttatgtagctgtctatgaggaattggccgtgtctgggtgggttatgggatgtgggcatccctgggttcttggaagcagctcttatgctactcatagagatgggattgactttatttttttatagtgcttaattcaccattatgagaaatgcttccagtcacaaaaatgcagcccagctcactctgaggaagaagcaggacttggtacggttttacacaactccttaccattaaactgaatcagaaatccattttctggctgaataaaaagtttggcttgcctgtgtaatgcccactcccttccccctggctccctagtgatgggacatatatgagagaraagtgtttttctatcatagacaccayagggraaagtttggggatgaaggagagcttaaaggtgtttcaattaagttagaaaactgacacaggctgttgagaattctttgccacttttccmaccccaaaacagcatggggcctgacatyttytgccctggtcccctttctcttgatgtggaaagtctgaatgcagtatttatagacttytaaggttttaaaatccagtatcaagaagaaaatcagaaatactggttggtgaaataaagagtttaggcattgttggcctgtcttttttgaagcatgtgtgttatgtgtagttagatatatttcacttatgtgagtcatcatggtgttggtcttgtagcccattatttttcctgtgcttccccagcttcccaaagtagctagttagaacttaaggtaaatatttattcttgggttggtggagtggatattgccagttaggagtcatggatcaattactgattatattgaaagtaaatataatcaattatgtacttttgagctttgcaggttcaatttaggtaaaaatcacattatgaaactgggaawgtctgaaggaatatgggcaaaatatttctcagtaaagcttccatgcttcacccttgacatgattacccttgagtaaaacatgggaatttgt

SEQ ID NO: 6861 - DNA, 1999 bp, Homo sapiens
ggagatttttwaaaaaaattatcgcgagaagagtcaagtaacgctgagagcctatygcatgagggcgacagccggaaagcaggatggagccatagaagcaattctcgcgagaagtagagttgcggttccctcgggagaggggcggaggctcagaggtgcaccacgtggggtttgctgccggagckgagtctccggccggcgtccagtttgagtctaggttggagttggaaccgtggagatgcggaaggaaaccccaccccccctagtgcccccggcggcccgggagtggaatcttcccccaaatgcgcccgcctgcatggaacggcagttggaggctgcgcggtaccggtccgatggggcgcttctcctcggggcctccagcctgagtgggcgctgctgggccggctccctctggctttttaaggacccctgtgccgcccccaacgaaggcttctgctccgccggagtccaaacggaggctggagtggctgacctcacttgggttggggagagaggtattctagtggcctccgattcaggtgctgttgaattgtgggaactagatgagaatgagacacttattgtcagcaagttctgcaagtatgagcatgatgacattgtgtctacagtcagtgtcttgagctctggcacacaagctgtcagtggtagcaaagacatctgcatcaaggtttgggaccttgctcagcaggtggtactgagttcataccgagctcatgctgctcaggtcacttgtgttgctgcctctcctcacaaggactctgtgtttctttcatgcagcgaggacaatagaattttactctgggatacccgctgtcccaagccagcatcacagattggctgcagtgcgcctggctaccttcctacctcgctggcttggcatcctcagcaaagtgaagtctttgtctttggtgatgagaatgggacagtctcccttgtggacaccaagagtacaagctgtgtcctgagctcagctgtacactcccagtgtgtcactgggctggtgttctccccacacagtgttcccttcctggcctctctcagtgaagactgctcacttgctgtgctggactcaagcctttctgagttgtttagaagccaagcccacagagactttgtgagagatgcgacttggtccccgctcaatcactccctgcttaccacagtgggctgggaccatcaggtcgtccaccacgttgtgcccacagaacctctcccagcccctggacctgcaagtgttactgagtagattggatttaagacaaaaagcaagtcccccatgagtgtccacttctttgccctgccctctcagcttgtgagacaacacaggagccttctatactgttctctggtccaccaagggctatgaggctcaccccttggatggtgctcagaaccacaaggaatactgaagaagccttgcctatgatttcaggtggcatcagacattgggctaattttcaaggtgtctctccttcccaacaggacagtcggagtctggttctttaataaatagctatatggatcttacttactggttcacaatcatattacagcagcaaaaacacccaagctctaactgctctgggcctccagccatgtttcctccagatagcatgttagaaaggacaggagattttaaaaatcagattggacttcagagggctccaaattttcttgccacatctagacctgaaagtaaagagctctgattattaagaggcagattctcgttgcatttggacagcgtgagtaatggtcacactgaacacattagaatcagttgtgaaattgattttgtttcaaaaaaggataagcaagctgtagtctcaattttgrgttaattgaaatttctcaagaacttcatcagcagctcacatgatacagttttggaagagtaaacaaggtaagcagacaaccctgggaccccaaacacattttcttttttagttctccatcaaaaataggcatttctggagtt

SEQ ID NO: 6862 - DNA, 1527 bp, Homo sapiens
atggaagctcagaggagggagcccctaaattactctgggaaattcaaagaagatttcatcagtgcatttaactatgatggtactcctgctgtgagacaagaatggcagaatgactcccatgccctgacagttggamgagatcaagctcccaaggcgccgtctgctttcatgggtttggcctgccagggaagagctcagcaaatccagctgaaagaggtgatgaagtcagacctactggttacttggctgcagaaagctctgggtgtgcggcagtaccatgtggcatcagtcctgtgccaacgggccaaggtggcgatgagaccctttgagcctaagtacatccactatgacctgctagagaagaacattaacattcctggggggcatctgcattggagttgggggtgccgagctgtggatgtcatgactgggatcccctgggagytgaagtgccccaaggtgattggcgtgaagctgatgggctccctctctggttggacctcacccaaagatgtgatcctgaaggtggcaggcatcctcaccatgaaaggtggcacaggtgcaatcgtggaataccacgggcytgttgtagactccatctcctgcactggcatggtgacagtctgcaacatgggcttagaaattgggacmaccacttccgtgttccattacaacctcaggatgaagaagtacatgagcaagacctgccaggcagacattgccaatctagctgatgaattcaaagatcacttggtgcctgaccctgggtgccattatgaccaactaattgaagttaaccccagtgaactgaagctgcacatcaatgggcccttcacccctgacctggctcaccctgtggcagaagtgggcaagatccgtgcctccattgagcaggatggctatgcacagaccttgagggatgtgggtggcatcgtcctggccaatgcttgtggcccctgcattggtcagttgcacagaaaggacatcaacaagcaggagaagaacataattgtcacctcctacaacaggaacttcatgggccacaatgacacgaaccccgagacccatgccttcatcacatccccagagactgtcacagccctggccattgtgggaaccctcaagttcaacccagagaccaactacctgacaggcaaggatggcaagaagttcaagctggaggctscggatgcagatgagcttccccaagcagagtttggcccagggcaggacacctaccagcacccccgcatgggtggtgccatcaacattgaaaatggcaaggccaactctgtgcacgatgctgtcacccacgagtttggccccttccctgacactgcccgctacaagaaatatggcatcaggggccgggccatcatcaccaagagctttgccaggattcacgagaccaacctgaggaggcagggcctgctgcccctgaccttcgctgacccagctgacaacaagattcaccttgtggacaagctgaccattcagagcctgaaggacttgacgctggcaagcccc

SEQ ID NO: 6863 - DNA, 2193 bp, Homo sapiens
atggtgccctacagcctactggttacttggctgcagaaagctctgggtgtgcggcagtaccatgtggcatcagtcctgtgccaacgggccaaggtggcgatgagaccctttgagcctaagtacatccactatgacctgctagagaagaacattaacattgtttgcaaatgattgaaccggcctctgaccctctcagagaagatcgtgtacagacacccggatgaccccaccagccaggaaattgagcggggcgggacgtacctgcagcagtggcyrgacagcgtgaccatgcaggatggacggcccagatggccatgctgcagttcatcagcagcaggctcccaaggtgaccatgccatccaccatccactgtgaccatctgattgaggcccagctcgggagtgagaaagacctgcaccaggccaaggacatcaaccacgaagtttataatttcctggcaactggaagtgtcaaatatggcttgagcttctggaagcctggatctggaatcattcaccagattattctggaaaactatgaatatcctggggttcttctgattggcactgactcccacacccccaatggtggcagcctggggggcatctgcattggagttgggggtgccgagctgtggatgtcatgactgggatcccctgggagytgaagtgccccaaggtgattggcgtgaagctgatgggctccctctctggttggacctcacccaaagatgtgatcctgaaggtggcaggcatcctcaccatgaaaggtggcacaggtgcaatcgtggaataccacgggcytgttgtagactccatctcctgcactggcatggtgacagtctgcaacatgggcttagaaattgggacmaccacttccgtgttccattacaacctcaggatgaagaagtacatgagcaagacctgccaggcagacattgccaatctagctgatgaattcaaagatcacttggtgcctgaccctgggtgccattatgaccaactaattgaagttaaccccagtgaactgaagctgcacatcaatgggcccttcacccctgacctggctcaccctgtggcagaagtgggcaaggtggcagagaaggaagaatggcctctggacatctgagtgggtctgtggggcagctgcaccaattcaagctatgaagatatggggtgctcagcaggtgtggccaagcaggcactggcccatggcctcaagtgcaagtcccagttcactattactccatgctccgagcagatccgtgcctccattgagcaggatggctatgcacagaccttgagggatgtgggtggcatcgtcctggccaatgcttgtggcccctgcattggtcagttgcacagaaaggacatcaacaagcaggagaagaacataattgtcacctcctacaacaggaacttcatgggccacaatgacacgaaccccgagacccatgccttcatcacatccccagagactgtcacagccctggccattgtgggaaccctcaagttcaacccagagaccaactacctgacaggcaaggatggcaagaagttcaagctggaggctscggatgcagatgagcttccccaagcagagtttggcccagggcaggacacctaccagcacccccgcatggggtaccactgaccacatctcagctgccggcccctgactcaagttccgtgggcacttggacaccatctccaacaacttgctcagtggtgccatcaacattgaaaatggcaaggccaactctgtgcacgatgctgtcacccacgagtttggccccttccctgacactgcccgctacaagaaatatggcatcagttgggtggtgattggggactagaactatggcaagggctcaagctgggagcacgccgcgctggagcctcgccacctcagggggccgggccatcatcaccaagagctttgccaggattcacgagaccaacctgaggaggcagggcctgctgcccctgaccttcgctgacccagctgacaacaagattcaccttgtggacaagctgaccattcagagcctgaaggacttgacgctggcaagcccctgaagtacatcgtcaagcaccccaggaaatcaacctcctgaaccacaccttcaacgagacggagatcgagtggttcagggccggcagtgccctctacagaacgaaggagcagcagcaa

SEQ ID NO: 6864 - DNA, 1843 bp, Homo sapiens
cggggacttagtctcctccctgggtttggacactggcatcctgctttatgtgtgacaccactgcacccctctgagcctcggtttccccatctgtaaaatagaagcgatctaccctcacagggtcatatgactgctcctctccaccccacactggcccggggcgggctgggcgcgggcccctgcgggtgttgcaacgcccggccagaaagtgggcatcagctgttccgcctggcccacgtgacccgccgagcataaatgtgaccggccgcggctccggcagtcaacgcctgcctcctctcgagcgtcctcagcgcagccgccgcccgcggagccagcacgaacgagcccagcaccggccggatggagcgtccgcaacccsacagcatgccccaggatttgtcagaggccctgaaggaggccaccaaggaggtgcacacccaggcagagaatgctgagttcatgaggaactttcagaagggccaggtgacccgagacggcttcaagctggtgatggcctccctgtaccacatctatgtggccctggaggaggagattgagcgcaacaaggagagcccagtcttcgcccctgtctacttcccagaagagctgcaccgcaaggctgccctggagcaggacctggccttctggtacgggccccgctggcaggaggtcatcccctacacaccagccatgcagcgctatgtgaagcggctccacgaggtggggcgcacagagcccgagctgctggtggcccacgcctacacccgctacctgggtgacctgtctgggggccaggtgctcaaaaagattgcccagaaagccctggacctgcccagctctggcgagggcctggccttcttcaccttccccaacattgccagtgccaccaagttcaagcagctctaccgctcccgcatgaactccctggagatgactcccgcagtcaggcagagggtgatagargaggccaagactgcgttcctgctcaacatccagctctttgaggagttgcaggagctgctgacccatgacaccaaggaccagagcccctcacgggcaccagggcttcgccagcgggccagcaacaaagtgcaagattctgcccccgtggagactcccagagggaagcccccactcaacacccgctcccaggctcygcttctccgatgggtccttacactcagctttctggtggcgacagttgctgtagggctttatgccatgtgaatgcaggcatgctggctcccagggccatgaactttgtccggtggaaggccttctttctagagagggaattctcttggctggcttccttaccgtgggcactgaaggctttcagggcctccagccctctcactgtgtccctctctctggaaaggaggaaggagcctatggcatcttccccaacgaaaagcacatccaggcaatggcctaaacttcagagggggcgaagggatcagccctgcccttcagcatcctcagttcctgcagcagagcctggaagacaccctaatgtggcagctgtctcaaacctccaaaagccctgagtttcaagtatccttgttgacacggccatgaccactttccccgtgggccatggcaatttttacacaaacctgaaaagatgttgtgtcttgtgtttttgtcttatttttgttggagccactctgttcctggctcagcctcaaatgcagtatttttgttgtgttctgttgtttttatagcagggttggggtggtttttgagccatgcgtgggtggggagggaggtgtttaacggcactgtggccttggtctaacttttgtgtgaaataataaacaacattgtctgatagtagcttgaa

SEQ ID NO: 6865 - DNA, 1723 bp, Homo sapiens
ggtcatatgactgctcctctccaccccacactggcccggggcgggctgggcgcgggcccctgcgggtgttgcaacgcccggccagaaagtgggcatcagctgttccgcctggcccacgtgacccgccgagcataaatgtgaccggccgcggctccggcagtcaacgcctgcctcctctcgagcgtcctcagcgcagccgccgcccgcggagccagcacgaacgagcccagcaccggccggatggagcgtccgcaacccsacagcatgccccaggatttgtcagaggccctgaaggaggccaccaaggaggtgcacacccaggcagagaatgctgagttcatgaggaactttcagaagggccaggtgacccgagacggcttcaagctggtgatggcctccctgtaccacatctatgtggccctggaggaggagattgagcgcaacaaggagagcccagtcttcgcccctgtctacttcccagaagagctgcaccgcaaggctgccctggagcaggacctggccttctggtacgggccccgctggcaggaggtcatcccctacacaccagccatgcagcgctatgtgaagcggctccacgaggtggggcgcacagagcccgagctgctggtggcccacgcctacacccgctacctgggtgacctgtctgggggccaggtgctcaaaaagattgcccagaaagccctggacctgcccagctctggcgagggcctggccttcttcaccttccccaacattgccagtgccaccaagttcaagcagctctaccgctcccgcatgaactccctggagatgactcccgcagtcaggcagagggtgatagargaggccaagactgcgttcctgctcaacatccagctctttgaggagttgcaggagctgctgacccatgacaccaaggaccagagcccctcacgggcaccagggcttcgccagcgggccagcaacaaagtgcaagattctgcccccgtggagactcccagagggaagcccccactcaacacccgctcccaggctcygcttctccgatgggtccttacactcagctttctggtggcgacagttgctgtagggctttatgccatgtgaatgcaggcatgctggctcccagggccatgaactttgtccggtggaaggccttctttctagagagggaattctcttggctggcttccttaccgtgggcactgaaggctttcagggcctccagccctctcactgtgtccctctctctggaaaggaggaaggagcctatggcatcttccccaacgaaaagcacatccaggcaatggcctaaacttcagagggggcgaagggatcagccctgcccttcagcatcctcagttcctgcagcagagcctggaagacaccctaatgtggcagctgtctcaaacctccaaaagccctgagtttcaagtatccttgttgacacggccatgaccactttccccgtgggccatggcaatttttacacaaacctgaaaagatgttgtgtcttgtgtttttgtcttatttttgttggagccactctgttcctggctcagcctcaaatgcagtatttttgttgtgttctgttgtttttatagcagggttggggtggtttttgagccatgcgtgggtggggagggaggtgtttaacggcactgtggccttggtctaacttttgtgtgaaataataaacaacattgtctgatagtagcttgaa

SEQ ID NO: 6866 - DNA, 2708 bp, Homo sapiens
cgctaccgcctgctcccctccagagaccgggggccttccagcagttttcggacccccgagcacagagaccgccaagccaaaggcgagtagcaatccctcggttcggaaacggcgaaaggaaaccgcaaggaggccaccacgtcgggtgggagctacgaagttgcccgttcccggttacttccgggcttgcgagcgacgactgctctcaaaggccaaacttaatggatggacgagcagcgcgctactgcagctttcttccgccttaggaaggtggcggccagggatgaggaggcccctaagcaagtgcggaatggagccggggggcggagatgccagcctcactttgcatggtctccagaaccgctcccacggcaagataaagctgcgaaagagaaagtctaccttgtacttcaacacccaggagaagagcgccaggcgccgcggggatcttcttggagaaaatatttatctgctcttgtttaccwtagctttacgaatattaaactgctttttagtgcagacaagttttgttccagatgaatactggcagtctcttgaagtttcacatcacatggttttcaattatggttatttgacttgggaatggacagagagactgaggagttacacttatcccttaatctttgcaagcatttacaagattcttcatcttttagggaaagatagtgttcagttgctgatttggattcctagacttgcccaagcacttctgtcygctgtagcagatgtgagactttactcattaaygaagcaactagaaaatcaggaagtggcaagatgggtgtttttttgccagttgtgctcctggttcacatggtattgctgtaccagaacccttacaaacaccatggaaactgttctcactataattgctcttttctactatcctttggaaggttcaaagtctatgaacagtgtcaaatactcatccctggtggcacttgccttcataattcgtcccacagctgtcattctgtggacacctttgctcttcagacatttctgtcaagaaccaagaaagcttgatcttattctacatcattttttacctgtaggctttgttactttgagtttgtctctgatgattgatcgtattttttttggccaatggactctggttcaatttaattttttgaaatttaacgtgctgcagaactkgggaacattttatggttctcatccatggcactggtacttcagtcaaggatttccagttatcttgggtactcacttacccttctttattcatggctgctatctagcaccaaagagataccggatacttttggtgactgtgctgtggacactgcttgtttatagcatgttgagccacaaagaattcaggtttatttatccagttttaccattctgtatggtgttctgtggatactcattaacccacctgaaaacatggaagaaaccagctctaagtttcctgtttttatcaaatttgttcctcgccctttatactggtttagttcatcaacgaggtactcttgatgtcatgagtcatattcaaaaagtttgttacaacaatcccaataaatcttcagcttcaatatttataatgatgccttgccactctactccttattacagccatgttcactgcccacttcccatgagatttctccagtgcccgccagacctgactggaaaaagtcattatcttgatgaagcagatgtattttacctaaatcccttaaactggttacatagagagtttcatgatgatgcatcattgcctactcacttgatcaccttcrgcattttggaagaggaaataagygctttcctaatttcaagcaattataaaagaactgctgttttcttccacactcacttgccagagggtcgaattggaagtcacatatatgtctatgaacggaagttaaaagggaaattcaacatgamgatgaaattctgaactttcctagataaattaacattgctgggtggaaatattcagatgctgcttaaatacttcggtaaacactgggtaagattcatggaacttagaaaaaagctgtatgaactgctttaccaaatatcactactgaggaaatgtataaaataccacatrgtataaaattacatgttaatacaatgccagattttaaataaagacctttagttttcctcatggtgtagttttattgtttcttccacgatattcagatgtgcaaaaaatttcacaagaaaacaagtcagcaagctcttaagagggcagcaaattcttcacaagtcagagggctcttgaacccacaaaaagacaagaagtgagtgtaagattataaaatgttaatgatgaaattccagaacaatgtacttttctcaagctctgctgcaaatttaacacaaacatcagtgttaattacactttgtcatgtatgactgagcttgctttaagctcttacactgaaaggaagtctcatttcatgcacaaaatctgttgcatgcctggcttccttaataaaactacagttgaacatttccagtgtcaaaaaaaattcaacgaagctaaactacaggaaaatgcaggttagtagacttttaactaatgcttctgaggaataatataaagttatcaaactgatacttagaaacaaaagaaaagacattgtcatcttggtaatttcattagtttcaataccaaacattatacaaagcataaatttttctcttac

SEQ ID NO: 6867 - DNA, 5712 bp, Homo sapiens
tcccgcttctcctcctcctcctccacagttgcctgccctgggcgggggcgagcgcgtccggtttgctggaagcgttcggaaatggcaacttgcgcggtggaggtgttcgggctcctggaggacgaggaaaattcacgaattgtgagagtaagagttatagccggaataggccttgccaagaaggatatattgggagctagtgatccttacgtgagagtgacrttatatgacccaatgaatggagttcttacaagtgtgcaaacaaaaaccattaaaaagagtttgaatccaaagtggaatgaagaaatattattcagagttcatcctcagcagcaccggcttctttttgaagtgtttgacgaaaaccgattgacaagagatgatttcctaggtcaagtggatgttccactttatccattaccggttgaaaatccaagattggagagaccatatacatttaaggattttgttcttcatccaagaagtcacaaatcaagagttaaaggttatctgagactaaaaatgacttatttacctaaaaccagtggctcagaagatgataatgcagaacaggctgaggaattagagcctggctgggttgttttggaccaaccagatgctgcttgccatttgcagcaacaacaagaaccttctcctctacctccagggtgggaagagaggcaggatatccttggaaggacctattatgtaaaccatgaatctagaagaacacagtggaaaagaccaacccctcaggacaacctaacagatgctgagaatggcaacattcaactgcaagcacaacgtgcatttaccaccaggcggcagatatccgaggaaacagaaagtgttgacaaccragagtcttccgagaactgggaaattataagagaagatgaagccaccatgtatagcarccaggccttcccatcacctccaccgtcaagtaacttggatgttccaactcatcttgcagaagaattgaatgccagactcaccatttttggaaattcagccgtgagccagccagcatcgagctcaaatcattccagcagaagaggcagcttacaagcctatacttttgaggaacaacctacacttcctgtgcttttgcctacttcatctggattaccaccaggttgggaagaaaaacaagatgaaagaggaagatcatattatgtagatcacaattccagaacgactacttggacaaagcccactgtacaggccacagtggagaccagtcagctgacctcaagccagagttctgcaggccctcaatcacaagcctccaccagtgattcaggccagcaggtgacccagccatctgaaattgagcaaggattccttcctaaaggctgggaagtccggcatgcaccaaatgggaggcctttctttattgaccacaacactaaaaccaccacctgggaagatccaagattgaaaattccagcccatctgagaggaaagacatcacttgatacttccaatgatctagggcctttacctccaggatgggaagagagaactcacacagatggaagaatcttctacataaatcacaatataaaaagaacacaatgggaagatcctcggttggagaatgtagcaataactggaccagcagtgccctactccagggattacaaaagaaagtatgagttcttccgaagaaagttgaagaagcagaatgacattccaaacaaatttgaaatgaaacttcgccgagcaactgttcttgaagactcttaccggagaattatgggtgtcaagagagmagacttcctgaaggctcgactgtggattgagtttgatggtgaaaagggattggattatggaggagttgccagagaatggttcttcctgatctcaaaggaaatgtttaacccttattatgggttgtttgaatattctgctacggacaattataccctacagataaatccaaactctggattgtgtaacgaagatcacctctcttacttcaagtttattggtcgggtagctggaatggcagtttatcatggcaaactgttggatggttttttcatccgcccattttacaagatgatgcttcacaaaccaataacccttcatgatatggaatctgtggatagtgaatattacaattccctaagatggattcttgaaaatgacccaacagaattggacctcaggtttatcatagatgaagaactttttggacagacacatcaacatgagctgaaaaatggtggatcagaaatagttgtcaccaataagaacaaaaaggaatatatttatcttgtaatacaatggcgatttgtaaaccgaatccagaagcaaatggctgcttttaaagagggattctttgaactaataccacaggatctcatcaaaatttttgatgaaaatgaactagagcttcttatgtgtggactgggagatgttgatgtgaatgactggagggaacatacaaagtataaaaatggctacagtgcaaatcatcaggttatacagtggttttggaaggctgttttaatgatggattcagaaaaaagaataagattacttcagtttgtcactggcacatctcgggtgcctatgaatggatttgctgaactatacggttcaaatggaccacagtcatttacagttgaacagtggggtactcctgaaaagctgccaagagctcatacctgttttaatcgcctggacttgccaccttatgaatcatttgaagaattatgggataaacttcagatggcaattgaaaacacccagggctttgatggagttgattagattacaaataacaatctgtagtgtttttactgccatagttttataaccaaaatcttgacttaaaattttccggggaactactaaaatgtggccactgagtcttcccagatcttgaagaaaatcatataaaaagcatttgaagaaatagtacgacaacttatttttaatcacttttaaataatgtgttgcatttacacagttgtttcatkctgtctttagagttaggtgcctgcctaaagccaggcaccaccacacctggctttagagttcacacaataggatataagtcctgtatgacttaaatagtgaattttgtccttaacatttacctcttgtatagtatctgccaggcagttttttcttaaactactgagatgataactgtgaaatatttgtgatacgtgtcatgtgtgaaaagtttgatgcattttgagatggaaaactgaaatttggaaaaagaaatactttactattgagtaaactacaatatatttagtgctactcgcagctatttattattttgtagacctgccttatgcaccttactgcctagatttttgggaaaaaactttggaaagtgtgttacctatatttctagccaactaactcacagaaaaactgtttacttcttcactttcgaagtatttggcttttgttaatatgcagttttactaaacagatggttcataagacatgtgaagcaaattcatatttgcaatgggtaaaaagtattaaagcctktctcttgcctgcatatcctattgaccattggtatagtcatcactttttcatattttagtgtagttagaagaattccttcttcaaacattaaagatccacaaagcagtatttctaaatatgccttgaagaactaaatgaagtgtatagcacttgcctttactagatattctttacacttgtacaattatgtagtaaatgtatgtttacagggtttatcatgtttacagattaagctaatttctgtagtcgcatttttatatttttagtatcactctagtaaaaaaaccaaataakttgtttaaaataaccaaagagttgttataatgcataatttgtattaaatttattactatttcttatgccttttaaaatactgtttactatgaagacaatgtttttaattacaaatccagaattctgtaggcaaaatgctacagttcatatcttcctttaaccaaactgaagtacataaagaccatgtacatgtattcatcaaacgtttattgaatgctgcgtgcctagcgctgtgctatgctctggggtaagagttgtcagcttcagagaagctgagtcctgatcctcaaggaacttgcaaatgtgtctatgaatttgtaaaacaatcaaaagtaggcrtaagcagaataaggcaaaagggaaagtgttctaggttccagcacacctgcaaagataaagtgtgccaagactgtatttatatttcatacttatattgtttcatccttatattggaatgattatatagaaaatgctcttaaaaagattaaacctatttctcagtatggtatcttggtgatttaggaataattgtaaatatatgttacgaatcttcttaaatatatatatatacacaccctgtgagaactgtaaaaagtacctctggttcttggtttaagtttgttggggtataacatgatgagtactcattagcacctgatagaaatctgaaatgtgacagggaagcaattcacagattaatgtaccctgcgttttgtcttcaccattgtcaaccagcagtcaaggatgagcaccaggtatagtcctggtttgatatctcaccagccatgtgaactgaagcagcttacttaacctctctggattcatatttcttcatctgtcaaatgagagtaatcatgcccaccctcattgtcatgccagattgtcagaagttccagacagatgagaaagcaaaaagtactttgtaaagtgttatacaatcagaaggtgctttgtgctgaccgtcagattgtgtcaagtcaggtgtgcaaattgaccacactcccaaagaatcatttaaaagtaaagtgacttctaagagacaaggaagtaggaacatttctgatattaaatatataaataatatggatacacatgtgtatatctgtatatggatcttaccatcataattcattttcttcatatcagcaaagtaatagtaatgtgggccaatgcattttggaaatgtcctcattatgtagaatggaatgtgaaaattatttttgttaaaacaggattttgccacaattatttaaatattatgtttgtgaactatctaagcatgagaaaatacaaagctttctttgtatctggctgatactcatttggatgattctgtgactcatagaacatgatgttaaatgagaccagactcaactgccaccagtccccagctgcagaccttcatccccttcatctcccactaggggctcrtggtctggaagaaacatgtatcaagcaacacagccccttatcccagatagaaaagtgtctcaaatgcattctactgcgggacagtcagtaggatcattttcataaagcaaggacatcatatgtttctagaaattacaagcatataactttagcctacaatctcttattaaaaatttttaacaaaattgtattacaaatgcatttcatcagaactcaaatttaaatggtgtttgttttgggtttttatttataatgctgaagttattccatataagtatcaagttaaacacaattcattttgattataaactatttgactttttaaaatcttctgacmcagtaaatatatatatcaagattgatgtatcaaaatttattgcacmctttaaagtgtaaaatcattttttaaaatcttgaatccacaaataaagttctattctgattttaaaaaacaaaacaaaa

SEQ ID NO: 6868 - DNA, 5452 bp, Homo sapiens
tcccgcttctcctcctcctcctccacagttgcctgccctgggcgggggcgagcgcgtccggtttgctggaagcgttcggaaatggcaacttgcgcggtggaggtgttcgggctcctggaggacgaggaaaattcacgaattgtgagagtaagagttatagccggaataggccttgccaagaaggatatattgggagctagtgatccttacgtgagagtgacrttatatgacccaatgaatggagttcttacaagtgtgcaaacaaaaaccattaaaaagagtttgaatccaaagtggaatgaagaaatattattcagagttcatcctcagcagcaccggcttctttttgaagtgtttgacgaaaaccgattgacaagagatgatttcctaggtcaagtggatgttccactttatccattaccggttgaaaatccaagattggagagaccatatacatttaaggattttgttcttcatccaagaagtcacaaatcaagagttaaaggttatctgagactaaaaatgacttatttacctaaaaccagtggctcagaagatgataatgcagaacaggctgaggaattagagcctggctgggttgttttggaccaaccagatgctgcttgccatttgcagcaacaacaagaaccttctcctctacctccagggtgggaagagaggcaggatatccttggaaggacctattatgtaaaccatgaatctagaagaacacagtggaaaagaccaacccctcaggacaacctaacagatgctgagaatggcaacattcaactgcaagcacaacgtgcatttaccaccaggcggcagatatccgaggaaacagaaagtgttgacaaccragagtcttccgagaactgggaaattataagagaagatgaagccaccatgtatagcarccaggccttcccatcacctccaccgtcaagtaacttggatgttccaactcatcttgcagaagaattgaatgccagactcaccatttttggaaattcagccgtgagccagccagcatcgagctcaaatcattccagcagaagaggcagcttacaagcctatacttttgaggaacaacctacacttcctgtgcttttgcctacttcatctggattaccaccaggttgggaagaaaaacaagatgaaagaggaagatcatattatgtagatcacaattccagaacgactacttggacaaagcccactgtacaggccacagtggagaccagtcagctgacctcaagccagagttctgcaggccctcaatcacaagcctccaccagtgattcaggccagcaggtgacccagccatctgaaattgagcaaggattccttcctaaaggctgggaagtccggcatgcaccaaatgggaggcctttctttattgaccacaacactaaaaccaccacctgggaagatccaagattgaaaattccagcccatctgagaggaaagacatcacttgatacttccaatgatctagggcctttacctccaggatgggaagagagaactcacacagatggaagaatcttctacataaatcacaatataaaaagaacacaatgggaagatcctcggttggagaatgtagcaataactggaccagcagtgccctactccagggattacaaaagaaagtatgagttcttccgaagaaagttgaagaagcagaatgacattccaaacaaatttgaaatgaaacttcgccgagcaactgttcttgaagactcttaccggagaattatgggtgtcaagagagmagacttcctgaaggctcgactgtggattgagtttgatggtgaaaagggattggattatggaggagttgccagagaatggttcttcctgatctcaaaggaaatgtttaacccttattatgggttgtttgaatattctgctacggacaattataccctacagataaatccaaactctggattgtgtaacgaagatcacctctcttacttcaagtttattggtcgggtagctggaatggcagtttatcatggcaaactgttggatggttttttcatccgcccattttacaagatgatgcttcacaaaccaataacccttcatgatatggaatctgtggatagtgaatattacaattccctaagatggattcttgaaaatgacccaacagaattggacctcaggtttatcatagatgaagaactttttggacagacacatcaacatgagctgaaaaatggtggatcagaaatagttgtcaccaataagaacaaaaaggaatatatttatcttgtaatacaatggcgatttgtaaaccgaatccagaagcaaatggctgcttttaaagagggattctttgaactaataccacaggatctcatcaaaatttttgatgaaaatgaactagagcttcttatgtgtggactgggagatgttgatgtgaatgactggagggaacatacaaagtataaaaatggctacagtgcaaatcatcaggttatacagtggttttggaaggctgttttaatgatggattcagaaaaaagaataagattacttcagtttgtcactggcacatctcgggtgcctatgaatggatttgctgaactatacggttcaaatggaccacagtcatttacagttgaacagtggggtactcctgaaaagctgccaagagctcatacctgttttaatcgcctggacttgccaccttatgaatcatttgaagaattatgggataaacttcagatggcaattgaaaacacccagggctttgatggagttgattagattacaaataacaatctgtagtgtttttactgccatagttttataaccaaaatcttgacttaaaattttccggggaactactaaaatgtggccactgagtcttcccagatcttgaagaaaatcatataaaaagcatttgaagaaatagtacgacaacttatttttaatcacttttaaataatgtgttgcatttacacagttgtttcatkctgtctttagagttaggtgcctgcctaaagccaggcaccaccacacctggctttagagttcacacaataggatataagtcctgtatgacttaaatagtgaattttgtccttaacatttacctcttgtatagtatctgccaggcagttttttcttaaactactgagatgataactgtgaaatatttgtgatacgtgtcatgtgtgaaaagtttgatgcattttgagatggaaaactgaaatttggaaaaagaaatactttactattgagtaaactacaatatatttagtgctactcgcagctatttattattttgtagacctgccttatgcaccttactgcctagatttttgggaaaaaactttggaaagtgtgttacctatatttctagccaactaactcacagaaaaactgtttacttcttcactttcgaagtatttggcttttgttaatatgcagttttactaaacagatggttcataagacatgtgaagcaaattcatatttgcaatgggtaaaaagtattaaagcctktctcttgcctgcatatcctattgaccattggtatagtcatcactttttcatattttagtgtagttagaagaattccttcttcaaacattaaagatccacaaagcagtatttctaaatatgccttgaagaactaaatgaagtgtatagcacttgcctttactagatattctttacacttgtacaattatgtagtaaatgtatgtttacagggtttatcatgtttacagattaagctaatttctgtagtcgcatttttatatttttagtatcactctagtaaaaaaaccaaataakttgtttaaaataaccaaagagttgttataatgcataatttgtattaaatttattactatttcttatgccttttaaaatactgtttactatgaagacaatgtttttaattacaaatccagaattctgtaggcaaaatgctacagttcatatcttcctttaaccaaactgaagtacataaagaccatgtacatgtattcatcaaacgtttattgaatgctgcgtgcctagcgctgtgctatgctctggggtaagagttgtcagcttcagagaagctgagtcctgatcctcaaggaacttgcaaatgtgtctatgaatttgtaaaacaatcaaaagtaggcrtaagcagaataaggcaaaagggaaagtgttctaggttccagcacacctgcaaagataaagtgtgccaagactgtatttatatttcatacttatattgtttcatccttatattggaatgattatatagaaaatgctcttaaaaagattaaacctatttctcagtatggtatcttggtgatttaggaataattgtaaatatatgttacgaatcttcttaaatatatatatatacacaccctgtgagaactgtaaaaagtacctctggttcttggtttaagtttgttggggtataacatgatgagtactcattagcacctgatagaaatctgaaatgtgacagtagcaaaaccactttctactttccaaacaccacagcatcagcatggtttaggggaagcaattcacagattaatgtaccctgcgttttgtcttcaccattgtcaaccagcagtcaaggatgagcaccaggtatagtcctggtttgatatctcaccagccatgtgaactgaagcagcttacttaacctctctggattcatatttcttcatctgtcaaatgagagtaatcatgcccaccctcattgtcatgccagattgtcagaagttccagacagatgagaaagcaaaaagtactttgtaaagtgttatacaatcagaaggtgctttgtgctgaccgtcagattgtgtcaagtcaggtgtgcaaattgaccacactcccaaagaatcatttaaaagtaaagtgacttctaagagacaaggaagtaggaacatttctgatattaaatatataaataatatggatacacatgtgtatatctgtatatggatcttaccatcataattcattttcttcatatcagcaaagtaatagtaatgtgggccaatgcattttggaaatgtcctcattatgtagaatggaatgtgaaaattatttttgttaaaacaggattttgccacaattatttaaatattatgtttgtgaactatctaagcatgagaaaatacaaagctttctttgtatctggctgatactcatttggatgattctgtgactcatagaacatgatgttaaatgagaccagactcaactgccaccagtccccagctgcagaccttcatccccttcatctcccactaggggctcrtggtctggaagaaacatgtatcaagcaacacagccccttatcccagatagaaaagtgtctcaaatgcattctactgcgggacagtcagtaggatcattttcataaagcaaggacatcatatgtttctagaaattacaagcatataacttt

SEQ ID NO: 6869 - DNA, 811 bp, Homo sapiens
tcttgagctaggaaaggattactcgcgcctcgttagaatcagacatggcttcaggggatgcaggacgctcccctgagctgcctgtcaccgactargtggagcagtgtttcttccgcagactcaactgagaagtcagcctctggggcaggcaccaggaatctgccttttcagttctgtctccggcaggctttgaggatgaaggctgcgggcattctgaccctcattggctgcctggtcacaggcgccgagtccaaaatctacactcgttgcaaactggcaaaaatattctcgagggctggcctggacaattactggggcttcagccttggaaactggatctgcatggcatattatgagagcggctacaacaccacagcccagacggtcctggatgacggcagcatcgactatggcatcttccagatcaacagcttcgcgtggtgcagacgcggaaagctgaaggagaacaaccactgccatgtcgcctgctcagccttgatcactgatgacctcacagatgcaattatctgtgccaggaaaattgttaaagagacacaaggaatgaactattggcaaggctggaagaaacattgtgagggcagagacctgtccgagtggaaaaaagrctgtgaggtttcctaaactggaactggacccaggatgctttgcagcaacgccctaggatttgcagtgaatgtccaaatgcctgtgtcatcttgtcccrtttcctcccartattccttctcaaacttggagagggaaaattaagctatacttttaagaaaataaatatttccatttaaatgtcttc

SEQ ID NO: 6870 - DNA, 1796 bp, Homo sapiens
ccaggtttccgcttccgctcttccctggtccagtccaccctggcggggtcgcagggttgggatggyggytggaggcgatcatggttcgcccgacagctaccgctcacctcttgcctcccgctatgccagcccggagwtgtgcttcgtgtttagcgacaggtataaattccggacatggcggcagytgtggctgtggctggcggaggccgagcagacattgggtttgcctatcacagatgaacaaatccaggagatgaaatcaaacctggagaacrtcgacttcaagatggcagctgaggaagagaaacgtttacgacatgatgtgatggctcacgtgcacacatttggccactgctgtscaaaagctgcaggcattattcaccttggtgctacttcttgcyatgttggagacaatactgacttgattattcttagaaatgcacttgacctgcttttgccaaagcttgccagagtgatctctyggcttgccgactttgctawggaacgagccagtctacccacattaggtttcacacatttccagcctgcacagctgaccacagttgggaaacgttgctgtctttggattcaggatctttgcatggatctccagaacttgaagcgtgtccragatgacctgygcttccggggagtaaagggtaccactggcactcaggccagtttcctgcagctctttgagggagatgaccataaggtagagcagcttgacaagatggtgacagaaaaggcaggatttaagagagctttcatcatcacagggcagacatatacacgaaaagtggatattgaagtactgtctgtgctggctagcttgggggcatcagtgcacaagatttgcaccracatacgcctcctggcaaacctcaaggagatkgaggaaccctttgaaaaacagcagattggctcaagtgcgatgccatataagcggaatcccrtgcgttcagaaygttgctgcagtcttgcccgccacctgatgacccttgtcatggacccgctacagacagcatctgtccagtggtttgaacgcacactggatgatagtgccaacygacggatctgtttggccgaggcatttcttaccgcagatactatattgaatacgctgcagaacatttctgaaggattggtcgtgtaccccaaagtaattgaacggcgcattyggcaagagctgcctttcatggccacagagaacatcatcatggccatggtcaaagctggaggtagmcgccaggtgcagagattcttagaagaggaggtgtatcccctgttaaaaccatatgaaagcgtgatgaaggtgaaagcagaattatgtctgtagagttggaagagaattaaacgaaaatcattgttaattgctgaggcatgaaaattgtgttactataatgccttattttacctcgagaattgttaccttaaattagtacagcactttcttcttcccatggtgctttcctgtttctcagtctcacatttctcaacaaggcaaaaacaaagagcgttgaagttgactctgctcttgcatagtaaatgtagttcatacttgatctctgttctttcaaggcatattttccagctgcctcaagtttagtccttttcacgtgttcatttgcttgtaaagtagcaagaaatttctggtcctgtcttctaaaagtgaatttgatctaggtctagcaaaataacctggactcagtgattgagtcaatggtcagataccttttatttcggttatttttggctagtataagtgatgaagtttggaactacagtaaatactt

SEQ ID NO: 6871 - DNA, 1973 bp, Homo sapiens
ccaggtttccgcttccgctcttccctggtccagtccaccctggcggggtcgcagggttgggatggyggytggaggcgatcatggttcgcccgacagctaccgctcacctcttgcctcccgctatgccagcccggagwtgtgcttcgtgtttagcgacaggtataaattccggacatggcggcagytgtggctgtggctggcggaggccgagcagacattgggtttgcctatcacagatgaacaaatccaggagatgaaatcaaacctggagaacrtcgacttcaagatggcagctgaggaagagaaacgtttacgacatgatgtgatggctcacgtgcacacatttggccactgctgtscaaaagctgcaggcattattcaccttggtgctacttcttgcyatgttggagacaatactgacttgattattcttagaaatgcacttgacctgcttttgccaaagcttgccagagtgatctctyggcttgccgactttgctawggaacgagccagtctacccacattaggtttcacacatttccagcctgcacagctgaccacagttgggaaacgttgctgtctttggattcaggatctttgcatggatctccagaacttgaagcgtgtccragatgacctgygcttccggggagtaaagggtaccactggcactcaggccagtttcctgcagctctttgagggagatgaccataaggtagagcagcttgacaagatggtgacagaaaaggcaggatttaagagagctttcatcatcacagggcagacatatacacgaaaagtggatattgaagtactgtctgtgctggctagcttgggggcatcagtgcacaagatttgcaccracatacgcctcctggcaaacctcaaggagatkgaggaaccctttgaaaaacagcagattggctcaagtgcgatgccatataagcggaatcccrtgcgttcagaaygttgctgcagtcttgcccgccacctgatgacccttgtcatggacccgctacagacagcatctgtccagtggtttgaacgcacactggatgatagtgccaacygacggatctgtttggccgaggcatttcttaccgcagatactatattgaatacgctgcagaacatttctgaaggattggtcgtgtaccccaaagtaattgaacggcgcattyggcaagagctgcctttcatggccacagagaacatcatcatggccatggtcaaagctggaggtagmcgccaggattgccatgagaaaatcagagtgctttctcagcaggcagcttctgtggttaagcaggaagggggtgacaatkacctcatagagcrtatccaggttratgcctacttcagtcccattcacycccagttggatcatttactggatccttcttctttcastggtcgtgcctcccagcaggtgcagagattcttagaagaggaggtgtatcccctgttaaaaccatatgaaagcgtgatgaaggtgaaagcagaattatgtctgtagagttggaagagaattaaacgaaaatcattgttaattgctgaggcatgaaaattgtgttactataatgccttattttacctcgagaattgttaccttaaattagtacagcactttcttcttcccatggtgctttcctgtttctcagtctcacatttctcaacaaggcaaaaacaaagagcgttgaagttgactctgctcttgcatagtaaatgtagttcatacttgatctctgttctttcaaggcatattttccagctgcctcaagtttagtccttttcacgtgttcatttgcttgtaaagtagcaagaaatttctggtcctgtcttctaaaagtgaatttgatctaggtctagcaaaataacctggactcagtgattgagtcaatggtcagataccttttatttcggttatttttggctagtataagtgatgaagtttggaactacagtaaatactt

SEQ ID NO: 6872 - DNA, 1751 bp, Homo sapiens
ccaggtttccgcttccgctcttccctggtccagtccaccctggcggggtcgcagggttgggatggyggytggaggcgatcatggttcgcccgacagctaccgctcacctcttgcctcccgctatgccagcccggagwtgtgcttcgtgtttagcgacaggtataaattccggacatggcggcagytgtggctgtggctggcggaggccgagcagacattgggtttgcctatcacagatgaacaaatccaggagatgaaatcaaacctggagaacrtcgacttcaagatggcagctgaggaagagaaacgtttacgacatgatgtgatggctcacgtgcacacatttggccactgctgtscaaaagctgcaggcattattcaccttggtgctacttcttgcyatgttggagacaatactcttgccagagtgatctctyggcttgccgactttgctawggaacgagccagtctacccacattaggtttcacacatttccagcctgcacagctgaccacagttgggaaacgttgctgtctttggattcaggatctttgcatggatctccagaacttgaagcgtgtccragatgacctgygcttccggggagtaaagggtaccactggcactcaggccagtttcctgcagctctttgagggagatgaccataaggtagagcagcttgacaagatggtgacagaaaaggcaggatttaagagagctttcatcatcacagggcagacatatacacgaaaagtggatattgaagtactgtctgtgctggctagcttgggggcatcagtgcacaagatttgcaccracatacgcctcctggcaaacctcaaggagatkgaggaaccctttgaaaaacagcagattggctcaagtgcgatgccatataagcggaatcccrtgcgttcagaaygttgctgcagtcttgcccgccacctgatgacccttgtcatggacccgctacagacagcatctgtccagtggtttgaacgcacactggatgatagtgccaacygacggatctgtttggccgaggcatttcttaccgcagatactatattgaatacgctgcagaacatttctgaaggattggtcgtgtaccccaaagtaattgaacggcgcattyggcaagagctgcctttcatggccacagagaacatcatcatggccatggtcaaagctggaggtagmcgccaggtgcagagattcttagaagaggaggtgtatcccctgttaaaaccatatgaaagcgtgatgaaggtgaaagcagaattatgtctgtagagttggaagagaattaaacgaaaatcattgttaattgctgaggcatgaaaattgtgttactataatgccttattttacctcgagaattgttaccttaaattagtacagcactttcttcttcccatggtgctttcctgtttctcagtctcacatttctcaacaaggcaaaaacaaagagcgttgaagttgactctgctcttgcatagtaaatgtagttcatacttgatctctgttctttcaaggcatattttccagctgcctcaagtttagtccttttcacgtgttcatttgcttgtaaagtagcaagaaatttctggtcctgtcttctaaaagtgaatttgatctaggtctagcaaaataacctggactcagtgattgagtcaatggtcagataccttttatttcggttatttttggctagtataagtgatgaagtttggaactacagtaaatactt

SEQ ID NO: 6873 - DNA, 3625 bp, Homo sapiens
attaaatgagtgacttaatactttatttaaaaaaataccactgctttttggttcacactaattttcttccttcttttggaaaggcatttccgtccatctcctggatattttccaataccacgatagaaaggttattagtacagcacccagaggtcttcggagcaaagctgttaaagaagtggggtccatttgagccccaactttgccttccttaggtccccttgggcttgtctagccctaggagttccaacaagtaagctgggcatgctcagtgggcagggtcgttttttttttttgggtggcggggggttgcaagtgggaagcctgctgttcagctgccggggctctccgcctccccccacctgtatgaggctgggtctggggaacctgtgctcagcattccaccccctggagcttgggcttggtcttccctgcgggtccctgcgctgacattcaggcggggagccaggaggcctggcgcgcctccagagcccgccgggggagccgggcgagggttctgggctctgacggcggggtcgcagggtcgcccgcctcctggacacgtctgtaggcctagggaagcctgccggccgggaggtacagagtaggagaagccagatcccagggcggacaacgagaagtcgtcaggctaagaaatggcatttcaaaaggcagtgaaagggacgattcttgttggaggaggtgctcttgcaactgttttaggactttctcagtttgctcattacagaaggaaacaaatgaacctggcctatgttaaagcagcagactgcatttcagaaccagttaacagggagcctccttccagagaagctcagctactgactttgcaaaacacatctgaatttgatatccttgttattggaggaggagcaacaggaagtggctgtgcgctagatgctgtcaccagaggactaaaaacagcccttgtagaaagagatgatttctcatcagggaccagcagcagaagcactaaattgatccatggtggtgtgagatatctgcagaaggccatcatgaagttggatattgagcagtataggatggtaaaagaagcccttcatgagcgtgccaacctgctagaaattgctccccatttatcagctccattgcctataatgcttccagtttacaagtggtggcagttaccttactactgggtaggaatcaagctgtatgatttggttgcaggaagcaattgcctaaaaagcagttatgtcctcagcaaatcaagagcccttgaacatttcccaatgctccagaaggacaaactggtaggagcaattgtctactatgacggacaacataacgatgcacggatgaaccttgccattgctctgactgctgccaggtatggggctgccacagccaattacatggaggtagtgagcttgctcaagaagacagacccccagacagggaaagtgcrtgtgagcggcgcacggtgcaaggatgtcctcacagggcaggaatttgacgtgagagccaaatgtgttatcaatgccacgggacctttcacggactctgtgcgcaaaatggatgataaagacgcagcagctatctgccagccaagtgctggtgtccatattgtgatgcctggttattacagcccagagagcatgggacttcttgacccagcgaccagtgatgggcgagttattttcttcttaccctggcaaaagatgacgatcgctggcactactgatactccaactgatgttacacaccatccaattccttcagaagaagatatcaacttcattttgaatgaagtgcgtaattacctgagttgtgatgttgaagtgagaagaggggatgtcctggcagcatggagtggaatccgtcctcttgttacagaccccaaatctgcagatactcagtctatctcccgaaatcatgttgttgatatcagtgagagtggccttattactatagcaggtggaaagtggacaacttatcggtctatggcagaagataccataaatgctgctgtcmaaactcataatttaaaagcaggaccaagtagaacagttggrcttttccttcaagggggtaaagattggagccccacactctacattaggcttgtgcaggattatggacttgaaagcgaggtggcacagcatcttgccgccacctatggtgataaggcctttgaggtggccaaaatggcaagtgtgactggcaaaaggtggcctattgttggagtacgtcttgtgtcagaatttccatatattgaagcagaggtgaaatatgggattaaggagtatgcctgcactgctgtggatatgatttcacgtcgtactcgcctggcctttctaaatgtccaggcagcagaggaagccctacccaggattgttgaactgatgggcagggaactgaattgggatgattataagaagcaggaacaacttgaaacagccaggaaktttctatattatgaaatgggctataaatctcgatcagaacagttaacagatcgctctgaaattagcctactgccttcagacattgacaggtataagaagagatttcataagtytgatgcagaccagaaaggctttattaccattgttgatgttcagcgtgtattagagagtatcaatgtccaaatggatgaaaatacactccatgaaattctaaatgaagttgatttgaataaaaatggacaggttgaactcaatgaatttttgcagctgatgagtgctattcaaaaaggaagggtatctggaagccggcttgctatactaatttgtggaggattgtgagtctgggcagtaaatccacagccaacaaacatagaaacgacaaatcaccatgtaacaaccagagatgactgaaaccactctgaaataatgaatgtggatagctgccttttttaacactagaaaacattccaaaactttaaggtgttggtgtatttgccasctttatttgctgtactttatttgtatttgccattcagtctagcttttaagtatatttttttctttttctcattttcaatgcacattagttttgcatctgttttgtgacctgttagatgtgacacattctctttttgtttattcccttattctaaatgagttctaaaaacataatattttggcaaaaattgaaaaaagctggagacattttgtgacatgcatacagatagcatgtgttattaaaaagagttgcctattgaaatgatcrtgtttctggagaaattaagcttatagacagcatgtgttattaaaaagagttacctattgaaatgatagtgtttctggagatttctcagccccatcttcctccagcttgtctaccttcctcatgcaaacaatattccacatttttatatctagagcatgactggctaactggagagggaaggaaaagtttagatctggttactggagcaagtctcaaagagaaactctgaaagcttccagaatcacaggtataagataaggatagcattgacatttgctgggagttacagtgatagtttcatctcagcagttcatttttttcttcagtcactgctggttttctttgactattatagttgccaggaagatccttgctcttcttactttaaaaccagcatttaagtggcaatttg

SEQ ID NO: 6874 - DNA, 6646 bp, Homo sapiens
attaaatgagtgacttaatactttatttaaaaaaataccactgctttttggttcacactaattttcttccttcttttggaaaggcatttccgtccatctcctggatattttccaataccacgatagaaaggttattagtacagcacccagaggtcttcggagcaaagctgttaaagaagtggggtccatttgagccccaactttgccttccttaggtccccttgggcttgtctagccctaggagttccaacaagtaagctgggcatgctcagtgggcagggtcgttttttttttttgggtggcggggggttgcaagtgggaagcctgctgttcagctgccggggctctccgcctccccccacctgtatgaggctgggtctggggaacctgtgctcagcattccaccccctggagcttgggcttggtcttccctgcgggtccctgcgctgacattcaggcggggagccaggaggcctggcgcgcctccagagcccgccgggggagccgggcgagggttctgggctctgacggcggggtcgcagggtcgcccgcctcctggacacgtctgtaggcctagggaagcctgccggccgggaggtacagagtaggagaagccagatcccagggcggacaacgagaagtcgtcaggctaagaaatggcatttcaaaaggcagtgaaagggacgattcttgttggaggaggtgctcttgcaactgttttaggactttctcagtttgctcattacagaaggaaacaaatgaacctggcctatgttaaagcagcagactgcatttcagaaccagttaacagggagcctccttccagagaagctcagctactgactttgcaaaacacatctgaatttgatatccttgttattggaggaggagcaacaggaagtggctgtgcgctagatgctgtcaccagaggactaaaaacagcccttgtagaaagagatgatttctcatcagggaccagcagcagaagcactaaattgatccatggtggtgtgagatatctgcagaaggccatcatgaagttggatattgagcagtataggatggtaaaagaagcccttcatgagcgtgccaacctgctagaaattgctccccatttatcagctccattgcctataatgcttccagtttacaagtggtggcagttaccttactactgggtaggaatcaagctgtatgatttggttgcaggaagcaattgcctaaaaagcagttatgtcctcagcaaatcaagagcccttgaacatttcccaatgctccagaaggacaaactggtaggagcaattgtctactatgacggacaacataacgatgcacggatgaaccttgccattgctctgactgctgccaggtatggggctgccacagccaattacatggaggtagtgagcttgctcaagaagacagacccccagacagggaaagtgcrtgtgagcggcgcacggtgcaaggatgtcctcacagggcaggaatttgacgtgagagccaaatgtgttatcaatgccacgggacctttcacggactctgtgcgcaaaatggatgataaagacgcagcagctatctgccagccaagtgctggtgtccatattgtgatgcctggttattacagcccagagagcatgggacttcttgacccagcgaccagtgatgggcgagttattttcttcttaccctggcaaaagatgacgatcgctggcactactgatactccaactgatgttacacaccatccaattccttcagaagaagatatcaacttcattttgaatgaagtgcgtaattacctgagttgtgatgttgaagtgagaagaggggatgtcctggcagcatggagtggaatccgtcctcttgttacagaccccaaatctgcagatactcagtctatctcccgaaatcatgttgttgatatcagtgagagtggccttattactatagcaggtggaaagtggacaacttatcggtctatggcagaagataccataaatgctgctgtcmaaactcataatttaaaagcaggaccaagtagaacagttggrcttttccttcaagggggtaaagattggagccccacactctacattaggcttgtgcaggattatggacttgaaagcgaggtggcacagcatcttgccgccacctatggtgataaggcctttgaggtggccaaaatggcaagtgtgactggcaaaaggtggcctattgttggagtacgtcttgtgtcagaatttccatatattgaagcagaggtgaaatatgggattaaggagtatgcctgcactgctgtggatatgatttcacgtcgtactcgcctggcctttctaaatgtccaggcagcagaggaagccctacccaggattgttgaactgatgggcagggaactgaattgggatgattataagaagcaggaacaacttgaaacagccaggaaktttctatattatgaaatgggctataaatctcgatcagaacagttaacagatcgctctgaaattagcctactgccttcagacattgacaggtataagaagagatttcataagtytgatgcagaccagaaaggctttattaccattgttgatgttcagcgtgtattagagagtatcaatgtccaaatggatgaaaatacactccatgaaattctaaatgaagttgatttgaataaaaatggacaggttgaactcaatgaatttttgcagctgatgagtgctattcaaaaaggaagggtatctggaagccggcttgctatactaatgaaaactgcagaagagaacctcgacagaagagttccaattccagtggaccgtagttgtggaggattgtgagtctgggcagtaaatccacagccaacaaacatagaaacgacaaatcaccatgtaacaaccagagatgactgaaaccactctgaaataatgaatgtggatagctgccttttttaacactagaaaacattccaaaactttaaggtgttggtgtatttgccasctttatttgctgtactttatttgtatttgccattcagtctagcttttaagtatatttttttctttttctcattttcaatgcacattagttttgcatctgttttgtgacctgttagatgtgacacattctctttttgtttattcccttattctaaatgagttctaaaaacataatattttggcaaaaattgaaaaaagctggagacattttgtgacatgcatacagatagcatgtgttattaaaaagagttgcctattgaaatgatcrtgtttctggagaaattaagcttatagacagcatgtgttattaaaaagagttacctattgaaatgatagtgtttctggagatttctcagccccatcttcctccagcttgtctaccttcctcatgcaaacaatattccacatttttatatctagagcatgactggctaactggagagggaaggaaaagtttagatctggttactggagcaagtctcaaagagaaactctgaaagcttccagaatcacaggtataagataaggatagcattgacatttgctgggagttacagtgatagtttcatctcagcagttcatttttttcttcagtcactgctggttttctttgactattatagttgccaggaagatccttgctcttcttactttaaaaccagcatttaagtggcaatttggatgtaataggatgagaccaaatttatctaattattacagtagtaatacatttaagagttaaaaatgtgtttttatatatccacatatgataacaaaagattcaattcccaagcctaaattttgaagcatgtggtattgtcaaatctagcttaccatcttttttgggggtacttgcaaccatagtaaaggaagatggaatagactttagttaactttaattataattatatgttaaataaggcacataaccagtttccaaggtcatcatggttgcttaaagtctttccccttctgtactccatggaaatattctcagtaaaccaaaaacaaaaatggaaaaataatcaccaacccccatcccgacacacacacasagtccaaagcaaaagtcagtgtgtattgaatttaacaagtaatgcagtttgggatgcttttgctacattttggtggcattttaactagttatctgaatatttattaatcgtacttcctcttgtaaagttaactacttacttttttgttgttgtttttttaacatcaggttctgtatctaataggagatgtaacactttatttcatggcaggtttttattgcagagacttgaagtcttagttttttaaactggcacataaaacactttttgctgttatttttatttatgtcaatactgcagagtatctttatgccttattcaagtggattctgagcctgtatgtcacaatgtaaacactggaggttcactcacctacgcactcacccaccacctctgaaagaaacagaaactgcagagaaagacagcatcttagctcattttgtttttaaatgaggttttagacgcttgccacttcctaagggaaatcctaaaacagagcaagtgatgctcccaggtatcactgtgaacttttttctttcaaagtgtgaatttttacactggctttttcatttttttaaagtaattgaagcttgtggctttacaacttagtgttttttgctatccagataacaagtttcattgtttagaacccagtgacacttaataggtagataaattgtcctttaaaatatcccagatgatatacacaatatggtacatttgtgctctctctctctgtttttctctctttctctttctagttagatcaagataacgatgacttgtaccctccctgattctgttacagtagggcccgggcagatctgtgtttgttaaacaggccttgtttgtgcatgctttgctatgaatgaagttcctttaaggacaaagaaaagcacacttttcttcttttgagcatatctgcttttactttaaatctgctaatttctaaaatgtagagtccttcaccaatcccagagactcaatttggaaatgaactgatttcaagccgttactgtsaataaagcaccccagcattttgtataagctcttaattaaacctgtacagcttctttacctgatttaagaaagggagacaagcaataggggggaataagcttcttcaaaattcattccaagcacaaaagaaattttttccctttgcatataaacttgacatcagttgattctgttggggtcggggtgggtatgcagggattgccttttattatcaagtgatttatttcaagagcctttgaggggattcaggtgaaggaacccccatctgtgctggagagttggatactcctttaaatagcccccaccacagtcataacaataatgataatgctggattatttgttaagccaaggttgtctgcctcatatccatcatgctgtttgcaatattcttgctttcaatcaatttatactgagtgtaactttaggatttctgctattaaatgcatgctctctatcctgcttcagtttctggctttgctttgtctgtttcaaaatatgtagcttcctcttttgtacaacaaaaaactcattctcacttttactaaatatactgtaggagtcatcattgatgttatttttctcttatrtatctgtaaagatttttggcatatgaatgtaatattaaagtcaatgatgctataacttgcgatgtttgcatcatgtcaacctttttgaaggagtgaaaaagccctactatgtttttaaatagcaagtgtaagctcagtgctagagtggatatacacaccgcatgttttcatatgtggcacttttatgtatcatgttgggttattgttctagactggactgttaaatactatgttygaggctgggttgtcatttttataactgtcttggtgttttatggccattatttattacttttgatacacagaatgagctgcatgcatttatagagcaataagaggatgtatttaatgtgccttgtttttaactgaataagaactggaagcatgaatcaataaaactgattaaaatggtctatttgctagcattttgatgttacttgcagtcagataactttgattactgttgaagtttaaaaaaagtttgaaaatatttttacaaactgtktttttgatgacacaaaagtgaaatatctacagagatagatgtaattttataagactgccagaattatttgtattaatttgttgctgtagcctttagggcatgacttctgtatttgtgcaatcctattctacaattacattcatcctattacaactcagttgaattcttttttccttttatttccttatttatttatttatttttttaaatctaccagagcctttcagcctaagcgttcccaggcacactgatgaattttatcataactaaaatcaatagaaatgaatgggaaagattacataatccattttgatcatcttacatgtcaagttagtgcagggttgccaagtgttgataaatgctctgacagaaaaaaatgctatatattttcattgtcagtaaatcagtaaagctgttatcagttttaacacaaattttataatgcccatgttattttatggggtttaatttacacacg

SEQ ID NO: 6875 - DNA, 5998 bp, Homo sapiens
gctaagaaatggcatttcaaaaggcagtgaaagggacgattcttgttggaggaggtgctcttgcaactgttttaggactttctcagtttgctcattacagaaggaaacaaatgaacctggcctatgttaaagcagcagactgcatttcagaaccagttaacagggagcctccttccagagaagctcagctactgactttgcaaaacacatctgaatttgatatccttgttattggaggaggagcaacaggaagtggctgtgcgctagatgctgtcaccagaggactaaaaacagcccttgtagaaagagatgatttctcatcagggaccagcagcagaagcactaaattgatccatggtggtgtgagatatctgcagaaggccatcatgaagttggatattgagcagtataggatggtaaaagaagcccttcatgagcgtgccaacctgctagaaattgctccccatttatcagctccattgcctataatgcttccagtttacaagtggtggcagttaccttactactgggtaggaatcaagctgtatgatttggttgcaggaagcaattgcctaaaaagcagttatgtcctcagcaaatcaagagcccttgaacatttcccaatgctccagaaggacaaactggtaggagcaattgtctactatgacggacaacataacgatgcacggatgaaccttgccattgctctgactgctgccaggtatggggctgccacagccaattacatggaggtagtgagcttgctcaagaagacagacccccagacagggaaagtgcrtgtgagcggcgcacggtgcaaggatgtcctcacagggcaggaatttgacgtgagagccaaatgtgttatcaatgccacgggacctttcacggactctgtgcgcaaaatggatgataaagacgcagcagctatctgccagccaagtgctggtgtccatattgtgatgcctggttattacagcccagagagcatgggacttcttgacccagcgaccagtgatgggcgagttattttcttcttaccctggcaaaagatgacgatcgctggcactactgatactccaactgatgttacacaccatccaattccttcagaagaagatatcaacttcattttgaatgaagtgcgtaattacctgagttgtgatgttgaagtgagaagaggggatgtcctggcagcatggagtggaatccgtcctcttgttacagaccccaaatctgcagatactcagtctatctcccgaaatcatgttgttgatatcagtgagagtggccttattactatagcaggtggaaagtggacaacttatcggtctatggcagaagataccataaatgctgctgtcmaaactcataatttaaaagcaggaccaagtagaacagttggrcttttccttcaagggggtaaagattggagccccacactctacattaggcttgtgcaggattatggacttgaaagcgaggtggcacagcatcttgccgccacctatggtgataaggcctttgaggtggccaaaatggcaagtgtgactggcaaaaggtggcctattgttggagtacgtcttgtgtcagaatttccatatattgaagcagaggtgaaatatgggattaaggagtatgcctgcactgctgtggatatgatttcacgtcgtactcgcctggcctttctaaatgtccaggcagcagaggaagccctacccaggattgttgaactgatgggcagggaactgaattgggatgattataagaagcaggaacaacttgaaacagccaggaaktttctatattatgaaatgggctataaatctcgatcagaacagttaacagatcgctctgaaattagcctactgccttcagacattgacaggtataagaagagatttcataagtytgatgcagaccagaaaggctttattaccattgttgatgttcagcgtgtattagagagtatcaatgtccaaatggatgaaaatacactccatgaaattctaaatgaagttgatttgaataaaaatggacaggttgaactcaatgaatttttgcagctgatgagtgctattcaaaaaggaagggtatctggaagccggcttgctatactaatgaaaactgcagaagagaacctcgacagaagagttccaattccagtggaccgtagttgtggaggattgtgagtctgggcagtaaatccacagccaacaaacatagaaacgacaaatcaccatgtaacaaccagagatgactgaaaccactctgaaataatgaatgtggatagctgccttttttaacactagaaaacattccaaaactttaaggtgttggtgtatttgccasctttatttgctgtactttatttgtatttgccattcagtctagcttttaagtatatttttttctttttctcattttcaatgcacattagttttgcatctgttttgtgacctgttagatgtgacacattctctttttgtttattcccttattctaaatgagttctaaaaacataatattttggcaaaaattgaaaaaagctggagacattttgtgacatgcatacagatagcatgtgttattaaaaagagttgcctattgaaatgatcrtgtttctggagaaattaagcttatagacagcatgtgttattaaaaagagttacctattgaaatgatagtgtttctggagatttctcagccccatcttcctccagcttgtctaccttcctcatgcaaacaatattccacatttttatatctagagcatgactggctaactggagagggaaggaaaagtttagatctggttactggagcaagtctcaaagagaaactctgaaagcttccagaatcacaggtataagataaggatagcattgacatttgctgggagttacagtgatagtttcatctcagcagttcatttttttcttcagtcactgctggttttctttgactattatagttgccaggaagatccttgctcttcttactttaaaaccagcatttaagtggcaatttggatgtaataggatgagaccaaatttatctaattattacagtagtaatacatttaagagttaaaaatgtgtttttatatatccacatatgataacaaaagattcaattcccaagcctaaattttgaagcatgtggtattgtcaaatctagcttaccatcttttttgggggtacttgcaaccatagtaaaggaagatggaatagactttagttaactttaattataattatatgttaaataaggcacataaccagtttccaaggtcatcatggttgcttaaagtctttccccttctgtactccatggaaatattctcagtaaaccaaaaacaaaaatggaaaaataatcaccaacccccatcccgacacacacacasagtccaaagcaaaagtcagtgtgtattgaatttaacaagtaatgcagtttgggatgcttttgctacattttggtggcattttaactagttatctgaatatttattaatcgtacttcctcttgtaaagttaactacttacttttttgttgttgtttttttaacatcaggttctgtatctaataggagatgtaacactttatttcatggcaggtttttattgcagagacttgaagtcttagttttttaaactggcacataaaacactttttgctgttatttttatttatgtcaatactgcagagtatctttatgccttattcaagtggattctgagcctgtatgtcacaatgtaaacactggaggttcactcacctacgcactcacccaccacctctgaaagaaacagaaactgcagagaaagacagcatcttagctcattttgtttttaaatgaggttttagacgcttgccacttcctaagggaaatcctaaaacagagcaagtgatgctcccaggtatcactgtgaacttttttctttcaaagtgtgaatttttacactggctttttcatttttttaaagtaattgaagcttgtggctttacaacttagtgttttttgctatccagataacaagtttcattgtttagaacccagtgacacttaataggtagataaattgtcctttaaaatatcccagatgatatacacaatatggtacatttgtgctctctctctctgtttttctctctttctctttctagttagatcaagataacgatgacttgtaccctccctgattctgttacagtagggcccgggcagatctgtgtttgttaaacaggccttgtttgtgcatgctttgctatgaatgaagttcctttaaggacaaagaaaagcacacttttcttcttttgagcatatctgcttttactttaaatctgctaatttctaaaatgtagagtccttcaccaatcccagagactcaatttggaaatgaactgatttcaagccgttactgtsaataaagcaccccagcattttgtataagctcttaattaaacctgtacagcttctttacctgatttaagaaagggagacaagcaataggggggaataagcttcttcaaaattcattccaagcacaaaagaaattttttccctttgcatataaacttgacatcagttgattctgttggggtcggggtgggtatgcagggattgccttttattatcaagtgatttatttcaagagcctttgaggggattcaggtgaaggaacccccatctgtgctggagagttggatactcctttaaatagcccccaccacagtcataacaataatgataatgctggattatttgttaagccaaggttgtctgcctcatatccatcatgctgtttgcaatattcttgctttcaatcaatttatactgagtgtaactttaggatttctgctattaaatgcatgctctctatcctgcttcagtttctggctttgctttgtctgtttcaaaatatgtagcttcctcttttgtacaacaaaaaactcattctcacttttactaaatatactgtaggagtcatcattgatgttatttttctcttatrtatctgtaaagatttttggcatatgaatgtaatattaaagtcaatgatgctataacttgcgatgtttgcatcatgtcaacctttttgaaggagtgaaaaagccctactatgtttttaaatagcaagtgtaagctcagtgctagagtggatatacacaccgcatgttttcatatgtggcacttttatgtatcatgttgggttattgttctagactggactgttaaatactatgttygaggctgggttgtcatttttataactgtcttggtgttttatggccattatttattacttttgatacacagaatgagctgcatgcatttatagagcaataagaggatgtatttaatgtgccttgtttttaactgaataagaactggaagcatgaatcaataaaactgattaaaatggtctatttgctagcattttgatgttacttgcagtcagataactttgattactgttgaagtttaaaaaaagtttgaaaatatttttacaaactgtktttttgatgacacaaaagtgaaatatctacagagatagatgtaattttataagactgccagaattatttgtattaatttgttgctgtagcctttagggcatgacttctgtatttgtgcaatcctattctacaattacattcatcctattacaactcagttgaattcttttttccttttatttccttatttatttatttatttttttaaatctaccagagcctttcagcctaagcgttcccaggcacactgatgaattttatcataactaaaatcaatagaaatgaatgggaaagattacataatccattttgatcatcttacatgtcaagttagtgcagggttgccaagtgttgataaatgctctgacagaaaaaaatgctatatattttcattgtcagtaaatcagtaaagctgttatcagttttaacacaaattttataatgcccatgttattttatggggtttaatttacacacg

SEQ ID NO: 6876 - DNA, 6111 bp, Homo sapiens
gctgggagcacccgggccgaggctctgattctggggggaggccgactccaccctggctggaggaactgggtgctcctgcccgctggcccctcgcgcgtgaggatctatctcaggctaagaaatggcatttcaaaaggcagtgaaagggacgattcttgttggaggaggtgctcttgcaactgttttaggactttctcagtttgctcattacagaaggaaacaaatgaacctggcctatgttaaagcagcagactgcatttcagaaccagttaacagggagcctccttccagagaagctcagctactgactttgcaaaacacatctgaatttgatatccttgttattggaggaggagcaacaggaagtggctgtgcgctagatgctgtcaccagaggactaaaaacagcccttgtagaaagagatgatttctcatcagggaccagcagcagaagcactaaattgatccatggtggtgtgagatatctgcagaaggccatcatgaagttggatattgagcagtataggatggtaaaagaagcccttcatgagcgtgccaacctgctagaaattgctccccatttatcagctccattgcctataatgcttccagtttacaagtggtggcagttaccttactactgggtaggaatcaagctgtatgatttggttgcaggaagcaattgcctaaaaagcagttatgtcctcagcaaatcaagagcccttgaacatttcccaatgctccagaaggacaaactggtaggagcaattgtctactatgacggacaacataacgatgcacggatgaaccttgccattgctctgactgctgccaggtatggggctgccacagccaattacatggaggtagtgagcttgctcaagaagacagacccccagacagggaaagtgcrtgtgagcggcgcacggtgcaaggatgtcctcacagggcaggaatttgacgtgagagccaaatgtgttatcaatgccacgggacctttcacggactctgtgcgcaaaatggatgataaagacgcagcagctatctgccagccaagtgctggtgtccatattgtgatgcctggttattacagcccagagagcatgggacttcttgacccagcgaccagtgatgggcgagttattttcttcttaccctggcaaaagatgacgatcgctggcactactgatactccaactgatgttacacaccatccaattccttcagaagaagatatcaacttcattttgaatgaagtgcgtaattacctgagttgtgatgttgaagtgagaagaggggatgtcctggcagcatggagtggaatccgtcctcttgttacagaccccaaatctgcagatactcagtctatctcccgaaatcatgttgttgatatcagtgagagtggccttattactatagcaggtggaaagtggacaacttatcggtctatggcagaagataccataaatgctgctgtcmaaactcataatttaaaagcaggaccaagtagaacagttggrcttttccttcaagggggtaaagattggagccccacactctacattaggcttgtgcaggattatggacttgaaagcgaggtggcacagcatcttgccgccacctatggtgataaggcctttgaggtggccaaaatggcaagtgtgactggcaaaaggtggcctattgttggagtacgtcttgtgtcagaatttccatatattgaagcagaggtgaaatatgggattaaggagtatgcctgcactgctgtggatatgatttcacgtcgtactcgcctggcctttctaaatgtccaggcagcagaggaagccctacccaggattgttgaactgatgggcagggaactgaattgggatgattataagaagcaggaacaacttgaaacagccaggaaktttctatattatgaaatgggctataaatctcgatcagaacagttaacagatcgctctgaaattagcctactgccttcagacattgacaggtataagaagagatttcataagtytgatgcagaccagaaaggctttattaccattgttgatgttcagcgtgtattagagagtatcaatgtccaaatggatgaaaatacactccatgaaattctaaatgaagttgatttgaataaaaatggacaggttgaactcaatgaatttttgcagctgatgagtgctattcaaaaaggaagggtatctggaagccggcttgctatactaatgaaaactgcagaagagaacctcgacagaagagttccaattccagtggaccgtagttgtggaggattgtgagtctgggcagtaaatccacagccaacaaacatagaaacgacaaatcaccatgtaacaaccagagatgactgaaaccactctgaaataatgaatgtggatagctgccttttttaacactagaaaacattccaaaactttaaggtgttggtgtatttgccasctttatttgctgtactttatttgtatttgccattcagtctagcttttaagtatatttttttctttttctcattttcaatgcacattagttttgcatctgttttgtgacctgttagatgtgacacattctctttttgtttattcccttattctaaatgagttctaaaaacataatattttggcaaaaattgaaaaaagctggagacattttgtgacatgcatacagatagcatgtgttattaaaaagagttgcctattgaaatgatcrtgtttctggagaaattaagcttatagacagcatgtgttattaaaaagagttacctattgaaatgatagtgtttctggagatttctcagccccatcttcctccagcttgtctaccttcctcatgcaaacaatattccacatttttatatctagagcatgactggctaactggagagggaaggaaaagtttagatctggttactggagcaagtctcaaagagaaactctgaaagcttccagaatcacaggtataagataaggatagcattgacatttgctgggagttacagtgatagtttcatctcagcagttcatttttttcttcagtcactgctggttttctttgactattatagttgccaggaagatccttgctcttcttactttaaaaccagcatttaagtggcaatttggatgtaataggatgagaccaaatttatctaattattacagtagtaatacatttaagagttaaaaatgtgtttttatatatccacatatgataacaaaagattcaattcccaagcctaaattttgaagcatgtggtattgtcaaatctagcttaccatcttttttgggggtacttgcaaccatagtaaaggaagatggaatagactttagttaactttaattataattatatgttaaataaggcacataaccagtttccaaggtcatcatggttgcttaaagtctttccccttctgtactccatggaaatattctcagtaaaccaaaaacaaaaatggaaaaataatcaccaacccccatcccgacacacacacasagtccaaagcaaaagtcagtgtgtattgaatttaacaagtaatgcagtttgggatgcttttgctacattttggtggcattttaactagttatctgaatatttattaatcgtacttcctcttgtaaagttaactacttacttttttgttgttgtttttttaacatcaggttctgtatctaataggagatgtaacactttatttcatggcaggtttttattgcagagacttgaagtcttagttttttaaactggcacataaaacactttttgctgttatttttatttatgtcaatactgcagagtatctttatgccttattcaagtggattctgagcctgtatgtcacaatgtaaacactggaggttcactcacctacgcactcacccaccacctctgaaagaaacagaaactgcagagaaagacagcatcttagctcattttgtttttaaatgaggttttagacgcttgccacttcctaagggaaatcctaaaacagagcaagtgatgctcccaggtatcactgtgaacttttttctttcaaagtgtgaatttttacactggctttttcatttttttaaagtaattgaagcttgtggctttacaacttagtgttttttgctatccagataacaagtttcattgtttagaacccagtgacacttaataggtagataaattgtcctttaaaatatcccagatgatatacacaatatggtacatttgtgctctctctctctgtttttctctctttctctttctagttagatcaagataacgatgacttgtaccctccctgattctgttacagtagggcccgggcagatctgtgtttgttaaacaggccttgtttgtgcatgctttgctatgaatgaagttcctttaaggacaaagaaaagcacacttttcttcttttgagcatatctgcttttactttaaatctgctaatttctaaaatgtagagtccttcaccaatcccagagactcaatttggaaatgaactgatttcaagccgttactgtsaataaagcaccccagcattttgtataagctcttaattaaacctgtacagcttctttacctgatttaagaaagggagacaagcaataggggggaataagcttcttcaaaattcattccaagcacaaaagaaattttttccctttgcatataaacttgacatcagttgattctgttggggtcggggtgggtatgcagggattgccttttattatcaagtgatttatttcaagagcctttgaggggattcaggtgaaggaacccccatctgtgctggagagttggatactcctttaaatagcccccaccacagtcataacaataatgataatgctggattatttgttaagccaaggttgtctgcctcatatccatcatgctgtttgcaatattcttgctttcaatcaatttatactgagtgtaactttaggatttctgctattaaatgcatgctctctatcctgcttcagtttctggctttgctttgtctgtttcaaaatatgtagcttcctcttttgtacaacaaaaaactcattctcacttttactaaatatactgtaggagtcatcattgatgttatttttctcttatrtatctgtaaagatttttggcatatgaatgtaatattaaagtcaatgatgctataacttgcgatgtttgcatcatgtcaacctttttgaaggagtgaaaaagccctactatgtttttaaatagcaagtgtaagctcagtgctagagtggatatacacaccgcatgttttcatatgtggcacttttatgtatcatgttgggttattgttctagactggactgttaaatactatgttygaggctgggttgtcatttttataactgtcttggtgttttatggccattatttattacttttgatacacagaatgagctgcatgcatttatagagcaataagaggatgtatttaatgtgccttgtttttaactgaataagaactggaagcatgaatcaataaaactgattaaaatggtctatttgctagcattttgatgttacttgcagtcagataactttgattactgttgaagtttaaaaaaagtttgaaaatatttttacaaactgtktttttgatgacacaaaagtgaaatatctacagagatagatgtaattttataagactgccagaattatttgtattaatttgttgctgtagcctttagggcatgacttctgtatttgtgcaatcctattctacaattacattcatcctattacaactcagttgaattcttttttccttttatttccttatttatttatttatttttttaaatctaccagagcctttcagcctaagcgttcccaggcacactgatgaattttatcataactaaaatcaatagaaatgaatgggaaagattacataatccattttgatcatcttacatgtcaagttagtgcagggttgccaagtgttgataaatgctctgacagaaaaaaatgctatatattttcattgtcagtaaatcagtaaagctgttatcagttttaacacaaattttataatgcccatgttattttatggggtttaatttacacacg

SEQ ID NO: 6877 - DNA, 1826 bp, Homo sapiens
ggcgtgggcacgccggccgctcagaaagcgcgggaaaggcacgcagccacgccccaagggcgcagcctaggacaggggcttctggagcttctggcagccgtctgccctcatggcctttgcacctatggggcccgaggcctcgttcttcgacgttttggaccgacacagggagtccctgctggctgccctgaggagaggtggcagggagcccccaactgggggaagccgcctggcctccagttctgaggttcttgcatctatagaaaatattatccaagacataatcacaagcttggcaagaaatgaagcacctgcattcacgatagacaacagatcaagctgggaaaacataaagtttgaagattctgtgggtcttcagrtggtatcccattgcaccaccagaaagatcaaaagtgattcaccaaaatcagctcaaaaattttctctaatccttaaaatattgtccatgatttataaattagtacagagcaacasttatgcaaccaaaagggacatatattacactgacagtcaactctttggtaaccagactgtcgtcgacaatattatcaatgacatttcttgcatgttaaaagtgtcaaggaggagtctacatatattatctacatcaaaaggtttaattgctggcaacttaagatacatcgaggaagatggcaccaaagtgaattgtacctgtggtgcaacggctgttgctgtgccatcgaatattcaaggaattcggaatttagttacagatgcaaagtttgtattaattgtagaaaaagatgcaacatttcagcggctcctagatgacaacttttgcaacaaattgtctccttgcatcatgattacgggaaagggagttcctgatctaaacacaagacttttagtcaagaaactgtgggatacatttcatgttcctgttttcactcttgtagatgctgatccacatggcatagaaataatgtgcatctataagtatggatctatgtctatgtcttttgaagctcatcatctcacagttccagctattagatggcttggtcttctcccttctgatcttaaaagattaaatgtacctaaagatagtttgattccactgacaaaaagggaccaaatgaaacttgacagtatcctgaggagaccttatgttacctgccaaccattttggagaaaagaaatggaaataatggcagactctaaaatgaaggcagaaattcaagctttgactttcctatcatcagattatctttccagagtgtacttacctaacaaattaaaatttggaggatggatataaaaataaatcagaagaacttctgattgccagaggcttttcattagttttgttttgattggcaaatactattgtggaaagaacatatattatattcttaattctgtaaaagtgaaataaaataactttccgttaattatatwtttttgtcaaaacaaatgctgtactccaattttctttgcaaggccttattcttgcctctatagagacagatttctgtcctatcttctaaagcaaattataaaagaatatgttattttgacctttaaattatttttgaaaaaataatattttatacatgtcatcaaagtctacaaaatatttaccttctacgatacaactaatgttaacgcataaagtatcttactggtaacaaaaatcataatgatctgaatttgagatgttgcaaatgaattgtggkgtccggtagtttcttcttacattttcctttgcctttatactttaggggtcttrctccattaattcatttgttacattagtaaaattcagtatgaataaatatttggat

SEQ ID NO: 6878 - DNA, 1658 bp, Homo sapiens
caagggcgcagcctaggacaggggcttctggagcttctggcagccgtctgccctcatggcctttgcacctatggggcccgaggcctcgttcttcgacgttttggaccgacacagggagtccctgctggctgccctgaggagaggtggcagggagcccccaactgggggaagccgcctggcctccaggtttgaagattctgtgggtcttcagrtggtatcccattgcaccaccagaaagatcaaaagtgattcaccaaaatcagctcaaaaattttctctaatccttaaaatattgtccatgatttataaattagtacagagcaacasttatgcaaccaaaagggacatatattacactgacagtcaactctttggtaaccagactgtcgtcgacaatattatcaatgacatttcttgcatgttaaaagtgtcaaggaggagtctacatatattatctacatcaaaaggtttaattgctggcaacttaagatacatcgaggaagatggcaccaaagtgaattgtacctgtggtgcaacggctgttgctgtgccatcgaatattcaaggaattcggaatttagttacagatgcaaagtttgtattaattgtagaaaaagatgcaacatttcagcggctcctagatgacaacttttgcaacaaattgtctccttgcatcatgattacgggaaagggagttcctgatctaaacacaagacttttagtcaagaaactgtgggatacatttcatgttcctgttttcactcttgtagatgctgatccacatggcatagaaataatgtgcatctataagtatggatctatgtctatgtcttttgaagctcatcatctcacagttccagctattagatggcttggtcttctcccttctgatcttaaaagattaaatgtacctaaagatagtttgattccactgacaaaaagggaccaaatgaaacttgacagtatcctgaggagaccttatgttacctgccaaccattttggagaaaagaaatggaaataatggcagactctaaaatgaaggcagaaattcaagctttgactttcctatcatcagattatctttccagagtgtacttacctaacaaattaaaatttggaggatggatataaaaataaatcagaagaacttctgattgccagaggcttttcattagttttgttttgattggcaaatactattgtggaaagaacatatattatattcttaattctgtaaaagtgaaataaaataactttccgttaattatatwtttttgtcaaaacaaatgctgtactccaattttctttgcaaggccttattcttgcctctatagagacagatttctgtcctatcttctaaagcaaattataaaagaatatgttattttgacctttaaattatttttgaaaaaataatattttatacatgtcatcaaagtctacaaaatatttaccttctacgatacaactaatgttaacgcataaagtatcttactggtaacaaaaatcataatgatctgaatttgagatgttgcaaatgaattgtggkgtccggtagtttcttcttacattttcctttgcctttatactttaggggtcttrctccattaattcatttgttacattagtaaaattcagtatgaataaatatttggat

SEQ ID NO: 6879 - DNA, 2506 bp, Homo sapiens
tggtggcgggcgcctgtagtcccagccacccgggaggctgaggcaggagaatggtgtgaacccgggaggcggagcttgcagtgagctgagatcgtgccactgcactccacgcactgctcttcccggtcatggaggcgccagccgccggcttgtttctgctcctgttgcttgggacttgggccccggcgccgggcagcgcctcctccgaggcaccgccgctgatcaatgaggacgtgaagcgcacagtggacctaagcagccacctggctaaggtgacggccgaggtggtcctggcgcacctgggcggcggctccacgtcccgagctacctctttcctgctggctttggagcctgagctcgaggcccggctggcgcacctgggcgtgcaggtaaagggagaagatgaggaagagaacaatttggaagtacgtgaaaccaaaattaagggtaaaagtgggagattcttcacagtcaagctcccagttgctcttgatcctggggccaagatttcagtcattgtggaaacagtctacacccatgtgcttcatccrtatccaacccagatcacccagtcagagaaacagtttgtggtgtttgaggggaaccattatttctactctccctatccaacgaagacacaaaccatgcgtgtgaagcttgcctctcgaaatgtggagagctacaccaagctggggaaccccacgcgctctgaggacctactggattatgggcctttcagagatgtgcctgcctatagtcaggatacttttaaagtacattatgagaacaacagccctttcctgaccatcaccagcatgacccgagtcattgaagtctctcactggggtaatattgctgtggaagaaaatgtggacttaaagcacacaggagctgtgcttaaggggcctttctcacgctatgattaccagagacagccagatagtggaatatcctccatccgttcttttaagaccatccttcctgctgctgcccaggatgtttattaccgggatgagattggcaatgtttctaccagccacctccttattttggatgactctgtagagatggaaatccggcctcgcttccctctctttggcgggtggaagacccattacatcgttggctacaacctcccaagctatgagtacctctataatttgggtgaccagtatgcactgaagatgaggtttgtggaccatgtgtttgatgaacaagtgatagattctctgactgtgaagatcatcctgcctgaaggagccaagaacattgaaattgatagtccctatgaaatcagccgtgccccagatgagctgcactacacctatctggayacatttggccgccctgtgattgttgcctacaagaaaaatctggtagaacagcacattcaggacattgtggtccactacacgttcaacaaggtgctcatgctgcaggagcccctgctggtggtggcggccttctacatcctgttcttcaccgttatcatctatgttcggctggacttctccatcaccaaggatccagccgcagaagccaggatgaaggtagcctgcatcacagagcaggtcttgaccctggtcaacaagagaataggcctttaccgtcactttgacgagaccgtcaataggtacaagcaatcccgggacatctccaccctcaacagtggcaagaagagcctggagactgaacacaaggccttgaccagtgagattgcactgctgcagtccaggctgaagacagagggctctgatctgtgcgacagagtgagygaaatgcagaagctggatgcacaggtcaaggagctggtgctgaagtcggcggtggaggctgagcgcctggtggctggcaagctcaagaaagacacgtacattgagaatgagaagctcatctcaggaaagcgccaggagctggtcaccaagatcgaccacatcctggatgccctgtagcccctgcccgcatcctccagggggccyagggtgcctgcactttgctgtggcaggcagattgggtggtagtgggaggttgtgcatggaggccagtgaaagctgacatctgtaaaaggccttcaaggaaragaaaccaggccctgcgtcaggcagtgtgagtttgccgtttgtccttaactttcttttttttttttttwwaaaaaagaaaactttaaaaaaactcccattaaaaacaaaacatctttgtgttttgaacaaaggaattttcaatatttgattggtattctgttctgaagtctargatatttttcagcctataaagccccctgttttatgcccttctaattytgatgtttgggtattgtgtgagtgcatgtgtttttttttttttttttaaagcgtgtgtgaacaaatggaaataaagcagggactgtgaacatttgtttttggtctgttgaagatctctcataatttaattcttaattttgggaatagtgcttttatcragtgctttttattcattaaataatggatttgcttctcagcaggtttgc

SEQ ID NO: 6880 - DNA, 2275 bp, Homo sapiens
tggtggcgggcgcctgtagtcccagccacccgggaggctgaggcaggagaatggtgtgaacccgggaggcggagcttgcagtgagctgagatcgtgccactgcactccacgcactgctcttcccggtcatggaggcgccagccgccggcttgtttctgctcctgttgcttgggacttgggccccggcgccgggcagcgcctcctccgaggcaccgccgctgatcaatgaggacgtgaagcgcacagtggacctaagcagccacctggctaaggtgacggccgaggtggtcctggcgcacctgggcggcggctccacgtcccgagctacctctttcctgctggctttggagcctgagctcgaggcccggctggcgcacctgggcgtgcaggtaaagggagaagatgaggaagagaacaatttggaagtacgtgaaaccaaaattaagggtaaaagtgggagattcttcacagtcaagctcccagttgctcttgatcctggggccaagatttcagtcattgtggaaacagtctacacccatgtgcttcatccrtatccaacccagatcacccagtcagagaaacagtttgtggtgtttgaggggaaccattatttctactctccctatccaacgaagacacaaaccatgcgtgtgaagcttgcctctcgaaatgtggagagctacaccaagctggggaaccccacgcgctctgaggacctactggattatgggcctttcagagatgtgcctgcctatagtcaggatacttttaaagtacattatgagaacaacagccctttcctgaccatcaccagcatgacccgagtcattgaagtctctcactggggtaatattgctgtggaagaaaatgtggacttaaagcacacaggagctgtgcttaaggggcctttctcacgctatgattaccagagacagccagatagtggaatatcctccatccgttcttttaagaccatccttcctgctgctgcccaggatgtttattaccgggatgagattggcaatgtttctaccagccacctccttattttggatgactctgtagagatggaaatccggcctcgcttccctctctttggcgggtggaagacccattacatcgttggctacaacctcccaagctatgagtacctctataatttgggtgaccagtatgcactgaagatgaggtttgtggaccatgtgtttgatgaacaagtgatagattctctgactgtgaagatcatcctgcctgaaggagccaagaacattgaaattgatagtccctatgaaatcagccgtgccccagatgagctgcactacacctatctggayacatttggccgccctgtgattgttgcctacaagaaaaatctggtagaacagcacattcaggacattgtggtccactacacgttcaacaaggtgctcatgctgcaggagcccctgctggtggtggcggccttctacatcctgttcttcaccgttatcatctatgttcggctggacttctccatcaccaaggatccagccgcagaagccaggatgaaggtagcctgcatcacagagcaggtcttgaccctggtcaacaagagaataggcctttaccgtcactttgacgagaccgtcaataggtacaagcaatcccgggacatctccaccctcaacagtggcaagaagagcctggagactgaacacaaggccttgaccagtgagattgcactgctgcagtccaggctgaagacagagggctctgatctgtgcgacagagtgagygaaatgcagaagctggatgcacaggtcaaggagctggtgctgaagtcggcggtggaggctgagcgcctggtggctggcaagctcaagaaagacacgtacattgagaatgagaagctcatctcaggaaagcgccaggagctggtcaccaagatcgaccacatcctggatgccctgtagcccctgcccgcatcctccagggggccyagggtgcctgcactttgctgtggcaggcagattgggtggtagtgggaggttgtgcatggaggccagtgaaagctgacatctgtaaaaggccttcaaggaaragaaaccaggccctgcgtcaggcagtgtgagtttgccgtttgtccttaactttctttaagaaaactttaaaaaaactcccattaaaaacaaaacatctttgtgttttgaacaaaggaattttcaatatttgattggtattctgttctgaagtctargatatttttcagcctataaagccccctgttttatgccct

SEQ ID NO: 6881 - DNA, 1960 bp, Homo sapiens
tggagagcggaggtgttyccgcttccaccaatggaaagccggtctaggcgggcctttgcaaattgccctagtaacggccgcatggtaactcaggcgccgggcgcactgtcctagctgctggttttccacgctggttttagctcccggcgtctgcaaaatgaagattgaggaggtgaagagcactacgaagacgcagcgcatcgcctcccacagccacgtgaaagggctggggctggacgagagcggcttggccaagcaggcggcctcagggcttgtgggccaggagaacgcgcgagaggcatgtggcgtcatagtagaattaatcaaaagcaagaaaatggctggaagagctgtcttgttggcaggacctcctggaactggcaagacagctctggctctggctattgctcaggagctgggtagtaaggtccccttctgcccaatggtggggagtgaagtttactcaactgagatcaagaagacagaggtgctgatggagaacttccgcagggccattgggctgcgaataaaggagaccaaggaagtttatgaaggtgaagtcacagagctaactccgtgtgagacagagaatcccatgggaggatatggcaaaaccattagccatgtgatcataggactcaaaacagccaaaggaaccaaacagttgaaactggaccccagcatttttgaaagtttgcagaaagagcgagtagaagctggagatgtgatttacattgaagccaacagtggggccgtgaagaggcagggcaggtgtgatacctatgccacagaattcgaccttgaagctgaagagtatgtccccttgccaaaaggggatgtgcacaaaaagaaagaaatcatccaagatgtgaccttgcatgacttggatgtggctaatgcgcggccccaggggggacaagatatcctgtccatgatgggccagctaatgaagccaaagaagacagaaatcacagacaaacttcgaggggagattaataaggtggtgaacaagtacatcgaccagggcattgctgagctggtcccgggtgtgctgtttgttgatgaggtccacatgctggacattgagtgcttcacctacctgcaccgcgccctggagtcttctatcgctcccatcgtcatytttgcatccaaccgaggcaactgtgtcatcagaggcactgaggacatcacatcccctcacggcatccctcttgaccttctggaccgagtgatgataatccggaccatgctgtatactccacaggaaatgaaacagatcattaaaatccgtgcccagacggaaggaatcaacatcagtgaggaggcactgaaccacctgggggagattggcaccaagaccacactgaggtaaggcccataggacaacctggtctgcagctgactttgtagccagctttgtaggaacacggccatgctcatttgtctgttgtctgtctgtggctgcttctgagtgacgatggaagagatgagtagttgtactgaggactgtgcagactgaagagtgctgtggcagcatctaaggtcacctggactttgcccttccttacctaactgctccatctccaagggtacagctgtatctggcaccatcacctctggcccaaactctcaccacagcctggcaggtcccatgactcaatgaacatgcttgtccagctcatctggaaacctgctgccttcaaataccatctcatcgtttcaacacaatatgatgacagtgcaccccacagagtgggggactgcacacaaggcattctgaaacttaaatccagaccatggaaactccctggggttggatctggacacacctggaaatagatgaccactgcaaagacaaagatggtggcgatgagattcatgaggttgggaagattctggcggtagaacgcctcccgaagggctcggaccttgtctgtgcgtgtggccagcagatggaaaa

SEQ ID NO: 6882 - DNA, 1368 bp, Homo sapiens
tggagagcggaggtgttyccgcttccaccaatggaaagccggtctaggcgggcctttgcaaattgccctagtaacggccgcatggtaactcaggcgccgggcgcactgtcctagctgctggttttccacgctggttttagctcccggcgtctgcaaaatgaagattgaggaggtgaagagcactacgaagacgcagcgcatcgcctcccacagccacgtgaaagggctggggctggacgagagcggcttggccaagcaggcggcctcagggcttgtgggccaggagaacgcgcgagaggcatgtggcgtcatagtagaattaatcaaaagcaagaaaatggctggaagagctgtcttgttggcaggacctcctggaactggcaagacagctctggctctggctattgctcaggagctgggtagtaaggtccccttctgcccaatggtggggagtgaagtttactcaactgagatcaagaagacagaggtgctgatggagaacttccgcagggccattgggctgcgaataaaggagaccaaggaagtttatgaaggtgaagtcacagagctaactccgtgtgagacagagaatcccatgggaggatatggcaaaaccattagccatgtgatcataggactcaaaacagccaaaggaaccaaacagttgaaactggaccccagcatttttgaaagtttgcagaaagagcgagtagaagctggagatgtgatttacattgaagccaacagtggggccgtgaagaggcagggcaggtgtgatacctatgccacagaattcgaccttgaagctgaagagtatgtccccttgccaaaaggggatgtgcacaaaaagaaagaaatcatccaagatgtgaccttgcatgacttggatgtggctaatgcgcggccccaggggggacaagatatcctgtccatgatgggccagctaatgaagccaaagaagacagaaatcacagacaaacttcgaggggagattaataaggtggtgaacaagtacatcgaccagggcattgctgagctggtcccgggtgtgctgtttgttgatgaggtccacatgctggacattgagtgcttcacctacctgcaccgcgccctggagtcttctatcgctcccatcgtcatytttgcatccaaccgaggcaactgtgtcatcagaggcactgaggacatcacatcccctcacggcatccctcttgaccttctggaccgagtgatgataatccggaccatgctgtatactccacaggaaatgaaacagatcattaaaatccgtgcccagacggaaggaatcaacatcagtgaggaggcactgaaccacctgggggagattggcaccaagaccacactgag

SEQ ID NO: 6883 - DNA, 1522 bp, Homo sapiens
ctcacagcccgaaactgcaaggagctcctctgcccggcctctctttactcctcctctctgcccctcagctcgctcatctttcttcccgccccctctcttttccttctttggttctttgaartgatgagctagcgcaaccacaaaccatacattccttttgtagaaaaacccgtgcctcgaatgaggcgagactcagagaggacccasgcgcggggcggacccctccaattccttcctcgcgcccccgaaagagcggcgcaccagcagccgaactgccggcgcccaggctccctggtccggccgggatgcggccggtacccgctccccgccgggaacaacctctccactcttcctgcagggagctggtgccagccgacagccgcgccagggccgctccgggtaccagggtcggatcgggtgacgtcgcgaacttgcgcctggccgccaagccggcctccaggctgaagaaggacccgccccggccttgacccgggccccgcccctccagccggggcaccgagccccggccctagctgctcgcccctactcgccggcactcgcccggctcgcccgctttcgcacccagttcacgcgccacagctatgtgtccccgagccgcgcgggcgcccgcgacgctactcctcgccctgggcgcggtgctgtggcctgcggctggcgcctgggagcttacgattttgcacaccaacgacgtgcacagccggctggagcagaccagcgaggactccagcaagtgcgtcaacgccagccgctgcatgggtggcgtggctcggctcttcaccaaggttcagcagatccgccgcgccgaacccaacgtgctgctgctggacgccggcgaccagtaccagggcactatctggttcaccgtgtacaagggcgccgaggtggcgcacttcatgaacgccctgcgctacgatgccatggcrctgggaaatcatgaatttgataatggtgtggaaggactgatcgagccactcctcaaagaggccaaatttccaattctgagtgcaaacattaaagcaaaggggccactagcatctcaaatatcaggactttatttgccatataaagttcttcctgttggtgatgaagttgtgggaatcgttggatacacttccaaagaaaccccttttctctcaaatccagggacaaatttagtgtttgaagatgaaatcactgcattacaacctgaagtagataagttaaaaactctaaatgtgaacaaaattattgcactgggacattcgggttttgaaatggataaactcatcgctcagaaagtgaggggtgtggacgtcgtggtgggaggacactccaacacatttctttacacaggtaattgtttcaaaaggattgcatgggccaggatgtccagataagcactgtgtctcttttgcctttgtaactgttattactctttttactgctatttaatatgtaatgtatattatatgatctataatatatatgtaatatacattaaatgggaacatgtgcaaatctt

SEQ ID NO: 6884 - DNA, 4103 bp, Homo sapiens
ctcacagcccgaaactgcaaggagctcctctgcccggcctctctttactcctcctctctgcccctcagctcgctcatctttcttcccgccccctctcttttccttctttggttctttgaartgatgagctagcgcaaccacaaaccatacattccttttgtagaaaaacccgtgcctcgaatgaggcgagactcagagaggacccasgcgcggggcggacccctccaattccttcctcgcgcccccgaaagagcggcgcaccagcagccgaactgccggcgcccaggctccctggtccggccgggatgcggccggtacccgctccccgccgggaacaacctctccactcttcctgcagggagctggtgccagccgacagccgcgccagggccgctccgggtaccagggtcggatcgggtgacgtcgcgaacttgcgcctggccgccaagccggcctccaggctgaagaaggacccgccccggccttgacccgggccccgcccctccagccggggcaccgagccccggccctagctgctcgcccctactcgccggcactcgcccggctcgcccgctttcgcacccagttcacgcgccacagctatgtgtccccgagccgcgcgggcgcccgcgacgctactcctcgccctgggcgcggtgctgtggcctgcggctggcgcctgggagcttacgattttgcacaccaacgacgtgcacagccggctggagcagaccagcgaggactccagcaagtgcgtcaacgccagccgctgcatgggtggcgtggctcggctcttcaccaaggttcagcagatccgccgcgccgaacccaacgtgctgctgctggacgccggcgaccagtaccagggcactatctggttcaccgtgtacaagggcgccgaggtggcgcacttcatgaacgccctgcgctacgatgccatggcrctgggaaatcatgaatttgataatggtgtggaaggactgatcgagccactcctcaaagaggccaaatttccaattctgagtgcaaacattaaagcaaaggggccactagcatctcaaatatcaggactttatttgccatataaagttcttcctgttggtgatgaagttgtgggaatcgttggatacacttccaaagaaaccccttttctctcaaatccagggacaaatttagtgtttgaagatgaaatcactgcattacaacctgaagtagataagttaaaaactctaaatgtgaacaaaattattgcactgggacattcgggttttgaaatggataaactcatcgctcagaaagtgaggggtgtggacgtcgtggtgggaggacactccaacacatttctttacacaggcaatccaccttccaaagaggtgcctgctgggaagtacccattcatagtcacttctgatgatgggcggaaggttcctgtagtccaggcctatgcttttggcaaatacctaggctatctgaagatcgagtttgatgaaagaggaaaygtcatctcttcccatggaaatcccattcttctaaacagcagcattcctgaagatccaagcataaaagcagacattaacaaatggaggataaaattggataattattctacccaggaattagggaaaacaattgtctatctggatggctcctctcaatcatgccgctttagagaatgcaacatgggcaacctgatttgtgatgcaatgattaacaacaacctgagacacrcggatgaaaygttctggaaccacgtatccatgtgcattttaaatggaggtggtatccggtcgcccattgatgaacgcaacaatggcacaattacctgggagaacctggctgctgtattgccctttggaggcacatttgacctagtccagttaaaaggttccaccctgaagaaggcctttgagcatagcgtgcaccgctacggccagtccactggagagttcctgcaggtgggcggaatccatgtggtgtatgatctttcccgaaaacctggagacagagtagtcaaattagatgttctttgcaccaagtgtcgagtgcccagttatgaccctctcaaaatggacgaggtatataaggtgatcctcccaaacttcctggccaatggtggagatgggttccagatgataaaagatgaattattaagacatgactctggtgaccaagatatcaacgtggtttctrcatatatctccaaaatgaaagtaatttatccagcagttgaaggtcggatcaagttttccacaggaagtcactgccatggaagcttttctttaatatttctttcactttgggcagtgatctttgttttataccaatagccaaaaattctccttgcctttaatgtgtgaaactgcattttttcaagtgagattcaaatctgccttttaggacctggctttgtgacagcaaaaaccatctttacaggctcctagaagctgaaggttagagcattataaaatgaagagacagacatgattactcagggtcagcaacctagtgagttagaaaaaaaattaacatagggccctataaggagaaagccaactatgttaagtttacgtgtccaaattttaatgaaattttactaacaattttaaaccatatttttcttcttcatatccatttctaatccatcaaacagcttatgtttacataaaattttatcattcacaaggaagttttaagcacactgtctcatttgatatccacaacttatttttggtaggaaagagagatgtttttcccacctgtcagatgaaaaaactgaagctcaaaaagggttgacttgaccatacagctaatgctgacagatccaagacctagacctaggtcttttgaactcaagtccagcattctcaactatatcaagttactgttcagaatacttaatatctcctctcttcataattatcaatagccccaagctcatggatgacaaatctctgctttatttcttgtctctattttttcactttatagctcctgttataatagcaagtttaatggtataaacacaggataccatcctctcttgcaacacccatgtgcctttgatgagtcaggtagcaagctgtagtagataatgagaaaggccagaggctgcaaaagacagtcaaaggacacgagagaaaggaaggggaagaacaggactccaggactgttttatattatagaaaagcaagagctaaagagcatttacacatgttaaacagatacttgttaagcatagtgcctgacacacggcattagctgttattttatgagattccatcagctctgcctctgtcctctttcttctaacatgaaggtatcatgagaagagaaccttctaacataagctgtaattctaaacctgcacttgtccctctccagcaagaggctagcactgaattcattctactcatactacacacccagttatggaatgtccagagttctcgaagaaaataaatgactttaggaagaggtatacattttttaagtcgctctgcctccaaatctgaacagtcactgtaaatcattcttaagcccagatatgagaacttctgctggaaagtgggaccctctgagtgggtggtcagaaaatacccatgctgatgaaatgacctatgcccaaagaacaaatacttaacgtgggagtggaaccacatgagcctgctcagctctgcataagtaattcaagaaatgggaggcttcaccttaaaaacagtgtgcaaatggcagctagaggttttgataggaagtatgtttgtttcttagtgtttacaaatattaagtactcttgatacaaaatatacttttaaacttcataacctttttataaaagttgttgcagcaaaataatagcctcggttctatgcatatatggattagctataaaaaatgtcaataagattgtacaaggaaaattagagaaagkcacatttagggtttattttttacacttggccagtaaaatagggtaaatcctattagaattttttaaagaactttttttaagtttcctaaatctgtgtgtgtattgtgaagtggtataagaaatgactttgaaccactttgcaattgtagattcccaacaataaaattgaagataa

SEQ ID NO: 6885 - DNA, 4843 bp, Homo sapiens
aagccacgcagggccacgtctgcggttctgaggactgggtttgggtgcagacgttgttgcttgggcgcttctccgctgcgtgtaggtgaagggggcttcctgaccgagacatggatttaggtgctattacaaaatactcagcattacacgccaagcccaatggactgatccttcaatacgggactgctggatttcgaacgaaggcagaacatcttgatcatgtcatgtttcgcatgggattattagctgtcctgaggtcaaaacagacaaaatccactataggagtcatggtaacagcgtcccacaatcctgaggaagacaatggtgtaaaattggttgatcctttgggtgaaatgttggcaccatcctgggaggaacatgccacctgtttagcaaatgctgaggaacaagatatgcagagagtgcttattgacatcagcgagaaagaagctgtgaatctgcaacaagatgcctttgtagttattggtagagataccaggcccagcagtgagaaactttcmcaatctgtaatagatggtgtgactgttctaggaggtcaattccatgattatggcttgttaacaacaccccagctgcactacatggtgtattgtcgaaacacgggtggccgatatggaaaggcaactatagaaggttactaccaraaactctctaaggcttttgtggaactcaccaaacaggcttcttgcagtggagatgaatacagatcacttaaggttgactgtgcaaatggcataggggccctgaagctaagggaaatggaacactacttctcacagggcctgtcagttcagctgtttaatgatgggtccaagggcaaactcaatcatttatgtggagctgactttgtgaaaagtcatcagaaacctccacagggaatggaaattaagtccaatgaaagatgctgttcttttgatggagatgcagacagaattgtttattactaccatgatgcagatggccactttcatctcatagatggagacaagatagcaacgttaattagcagtttccttaaagagctcctggtggagattggagaaagtttgaatattggtgttgtacaaactgcatatgcaaatggaagttcaacacggtatcttgaagaagttatgaaggtrcctgtctattgcactaagactggtgtaaaacatttgcaccacaaggctcaagwgtttgacattggagtttattttgaagcaaatgggcatggcactgcactgtttagtacagctgttgaaatgaagataaaacaatcagcagaacaactggaagataagaaaagaaaagctgctaagatgcttgaaaacattattgacttgtttaaccaggcagctggtgatgctatttctgacatgctggtgattgargcaatcttggctctgaagggcttgactgtacaacagtgggatgctctctatacagatcttccaaacagacaacttaaagttcaggttgcagacaggagagttattagcactaccratgctgaaagacaagcagttacacccccaggattacaggaggcaatcaatgacctggtgaagaagtayaagctttctcgagcttttgtccggccctctggtacagaagatgtcgtccgagtatatgcagaagcagactcacaagaaagtgcagatcaccttgcacatgaagtgagcttggcagtatttcagctggctggaggaattggagaaaggccccaaccaggtttctgaagataattttcatattcctgagaaactggactttttacaagtctttacaaaactgtcaataataatggcagtactaagagatttataatcataatgtttacaatgcagcctactggattgtctctagatctgtttttcttaaacactaacagaataattctttataaataggtaagccttacacttgttaaagaaatttacctctaatttcagtctcactaatgtaaaatactgggacttaagtatacaattcagtcactaactgtacagttttatgtggggaacaattcatgcaggctactggaaaattaaatcttattaccaactccttgtgatatctttgccatyaccatcacatgagcaagatgatgttttgcagcattccccattgctgatacaaatggagagggcagagaagactttatacaaccagtttttccattgcagagtcttaagaaagattattagatgacttacctatatgactaatgccatcaggaactcagaggtatgaatagggggttgtccatccctcttccatactgaggtggagatgctcatgcaatacttttaaggatgcatggtccagccttcagttattcttcactgctcttggtgaaggtatgtgggagaaaaactaattataatacgtttcccagcctctgatggagaaggaacaccattctgataccagaacatggttaataaggaaaagagaaaaatccccaaccaatcttaattgaaccaagtctgaaaccaatggaaaaaaaaaatgggtagtgtatattttgcaggtttaagacaactcaggacaataaaaacaatggactttacatgtgtatatatatagctctcttaggcaccataatcagtatgagccaacaatatttaaacttgattcaggccacattcagacatttgctcttatatacaartatttaaattaaatacaatctgaaatgtgttctgttacatacaaaaaaggaaaaactatacaacgcagagcagtgtgtgtgttttaaataattacatttacatgtaagctaaatggaaccagcaatggtgctcaagtttttatcatcccttccagaaaatctttttctaccatctcttctattttttgcctggctttgctggaacatggtttgtggttctccagtttcatgtccttattagggaaggcatttgagtagaggataggactccctgagtgtcctccacatcggcttgtgactttgctgttgaagacttgactgagcacattgaagaacggcaggagctgctccatactgcgcacggtgcagatggtgagcagcaagtgccctggctcccaacccaatgttctccctgagttgtcttcctctggatttttctgcagaaaacaaaaagtgaactggtattaatacaacagacaatgtggtatgttagaaaaattaaaaatatataaactttggcarttggtcaagaaatgaatacaaatgacattaagtttctaactcctgacctgatcaaaacccttggtgcttctgagaccttttactgccatttattagttttacatggagcagtctaacattgtagtaatagttcccaactagaatgcgcagataagcttagttaacagaaatagctttgaacaggaatagagtcaaacataaaagttttatgttgtgctttgtatttactcaaaaagctcccaggtttctgaaccctcactactgtaaccaaggactaggtcacaaaattactacagaaaaaaggaacaaagtgctttatacatttcataatatatccccttttattataattagttaattcccttttatctaaatggcctaaatttgccatgatggtagcagtgtccaaagtgaataattactgtcagtactgcatcacagagaaaggaagggatccctcaggagacactgctgtctccttctgggttgtgctaaacaacatagggaggaaagctggacctggagtcaaaggaattgagttagtgtgctggctctgccatacttacggcacccttgggcaggatatacaaaggttcctcacttataaaatgggacagtctaaaactaccttttagtagagaagtcaaatgagaaggtatgtgaaaactctgtcaactaaatataaagactaataatttgggtattaagaggctagtttgagaagccacctgaattacacaaacacagctacagacatcattctgtctagagaaagataagagagaacaggttggttgaacttgggcagaatcacagatacaattccacactaaagaatgaaaataagcaatgaactagacagaaggaagaaatcatgaagacttaggaagcagaattacaatctgtcatattaacaaatggagtttgccttctaagatcagatgttgctcagaaactttcattgtttacctaataatttaatatcactagtttcctagtgggtcaagcagatgcaaaatccagcttattttcttctatgtgctctcaagcttattgcttattttaaagtaaaatcctgaaaaaggaaaatattaggttggtgcaaacgtaattgcggtttttgcattgttgaaatttgccgttttatattggagtacattcttaaataaatgtggttatgttatacatcattttaagcatatttctcactttttttttgctaatgacttattgctgtttatatttattttagactatggaaatgatgttagacaaaaatcaaatttagcgattttctgagttcaaaataggttataaagcagcagagacaacacacaacatcaacaatgcatttggcccaggaactgctaatgaacatacagtgccgtgatggctcaagaagttttgcaaaggagactagagccttgaagatgaggagtgcagtggccagtcatcggaaattgataatgaccaattgagaacatcatcgaagctgatcctcttacaactataagagagctgcccaagaactcaatgttgaccattttatggtcgttcggcatttgaagcaaattgaaaaggtgaaaaagctcaataaatgggtgcctcatgagctgagtgaaaaataaaaaaattcgttgttttgaa

SEQ ID NO: 6886 - DNA, 3450 bp, Homo sapiens
aagccacgcagggccacgtctgcggttctgaggactgggtttgggtgcagacgttgttgcttgggcgcttctccgctgcgtgtaggtgaagggggcttcctgaccgagacatggatttaggtgctattacaaaatactcagcattacacgccaagcccaatggactgatccttcaatacgggactgctggatttcgaacgaaggcagaacatcttgatcatgtcatgtttcgcatgggattattagctgtcctgaggtcaaaacagacaaaatccactataggagtcatggtaacagcgtcccacaatcctgaggaagacaatggtgtaaaattggttgatcctttgggtgaaatgttggcaccatcctgggaggaacatgccacctgtttagcaaatgctgaggaacaagatatgcagagagtgcttattgacatcagcgagaaagaagctgtgaatctgcaacaagatgcctttgtagttattggtagagataccaggcccagcagtgagaaactttcmcaatctgtaatagatggtgtgactgttctaggaggtcaattccatgattatggcttgttaacaacaccccagctgcactacatggtgtattgtcgaaacacgggtggccgatatggaaaggcaactatagaaggttactaccaraaactctctaaggcttttgtggaactcaccaaacaggcttcttgcagtggagatgaatacagatcacttaaggttgactgtgcaaatggcataggggccctgaagctaagggaaatggaacactacttctcacagggcctgtcagttcagctgtttaatgatgggtccaagggcaaactcaatcatttatgtggagctgactttgtgaaaagtcatcagaaacctccacagggaatggaaattaagtccaatgaaagatgctgttcttttgatggagatgcagacagaattgtttattactaccatgatgcagatggccactttcatctcatagatggagacaagatagcaacgttaattagcagtttccttaaagagctcctggtggagattggagaaagtttgaatattggtgttgtacaaactgcatatgcaaatggaagttcaacacggtatcttgaagaagttatgaaggtrcctgtctattgcactaagactggtgtaaaacatttgcaccacaaggctcaagwgtttgacattggagtttattttgaagcaaatgggcatggcactgcactgtttagtacagctgttgaaatgaagataaaacaatcagcagaacaactggaagataagaaaagaaaagctgctaagatgcttgaaaacattattgacttgtttaaccaggtcagaactgatggggcagtggactcttggttacctttacattattcagaagatggacagaacagagtgtgggtgcatacaaaattaaagtggagacgtcctggcctggtggcttccttctaatagtggcagctggtgatgctatttctgacatgctggtgattgargcaatcttggctctgaagggcttgactgtacaacagtgggatgctctctatacagatcttccaaacagacaacttaaagttcaggttgcagacaggagagttattagcactaccratgctgaaagacaagcagttacacccccaggattacaggaggcaatcaatgacctggtgaagaagtayaagctttctcgagcttttgtccggccctctggtacagaagatgtcgtccgagtatatgcagaagcagactcacaagaaagtgcagatcaccttgcacatgaagtgagcttggcagtatttcagctggctggaggaattggagaaaggccccaaccaggttataaagcagcagagacaacacacaacatcaacaatgcatttggcccaggaactgctaatgaacatacagtgccgtgatggctcaagaagttttgcaaaggagactagagccttgaagatgaggagtgcagtggccagtcatcggaaattgataatgaccaattgagaacatcatcgaagctgatcctcttacaactataagagagctgcccaagaactcaatgttgaccattttatggtcgttcggcatttgaagcaaattgaaaaggtgaaaaagctcaataaatgggtgcctcatgagctgagtgaaaaataaaaaaattcgttgttttgaagtgtcattttctctattctatgcaacaataatgaatcatttctctatcggattgtgatgtgtgccaaaaggtggattttatacgacaactggcgatgaccagctcagtggctggactgaaagaagctccaaagcacttcccaaagccaaacttgctccaaaaaatggtcatggtcattgtttggtggtttgctgccagtctgatccactacagctttctgaatccaggtgaaaccattacatctgataagtatgctcagcaaatcaatgagatgcaccaaaaactgcaatgcctgcagccggcattggccaccagaaagggcccaattcttttcacgacaacactgggccgcacgttgcacaaccaacgcttcgaaaattgaactaattgggctatgaagttttgcctcatctgccatattcacctgacctcttgccaacaaactaccacttctttaggcatctcagcaacgttttgcagggaaattgcttccacaactagcaggacacagaaaatgctttccaagagttcgtcaaatttggaagcatggatttttrtgctacaggagtaaacaaacttatttctcattggcaaaaatgtgttgattgtaatggttcctattttaattaataaagatttgtgtgaacctagttataatgacttaaaattcatggtcccaaacagcaattacttttgcaccaaactaaaaatataagttaaaatggaagagtctaggagcaaaccaagaaaagatcacctacttcatcatctctggtcaaaaacaaaccaaaaaacttaacagctatcacttaagtttgcttcctagcaattatttagcttccagtctagattacaggatatataaaactttctttctttctttcttaactatgacactggcaccaatgrgagtcctgtgactgactttcacatttccaccattactcaattactggtaccataccacctctaatcccctaaatcaaactgcaattcaacaataaagggcgtacagagatgactttgtcctgaaggaaaatgaatatccttgtaccctctatatagctaacttccaaatgtaagagaactatggggtaaccttttgtttctattcctatcaagatgagcctttaagagagggacttttattaagctcttgaccaagaagaatacacttgattcagagtttctgatgctcttaatcagaactatatgtattgtctcaatattaaataaagtcaaatgtttccatac

SEQ ID NO: 6887 - DNA, 2759 bp, Homo sapiens
aagccacgcagggccacgtctgcggttctgaggactgggtttgggtgcagacgttgttgcttgggcgcttctccgctgcgtgtaggtgaagggggcttcctgaccgagacatggatttaggtgctattacaaaatactcagcattacacgccaagcccaatggactgatccttcaatacgggactgctggatttcgaacgaaggcagaacatcttgatcatgtcatgtttcgcatgggattattagctgtcctgaggtcaaaacagacaaaatccactataggagtcatggtaacagcgtcccacaatcctgagacaatggtgtaaaattggttgatcctttgggtgaaatgttggcaccatcctgggaggaacatgccacctgtttagcaaatgctgaggaacaagatatgcagagagtgcttattgacatcagcgagaaagaagctgtgaatctgcaacaagatgcctttgtagttattggtagagataccaggcccagcagtgagaaactttcmcaatctgtaatagatggtgtgactgttctaggaggtcaattccatgattatggcttgttaacaacaccccagctgcactacatggtgtattgtcgaaacacgggtggccgatatggaaaggcaactatagaaggttactaccaraaactctctaaggcttttgtggaactcaccaaacaggcttcttgcagtggagatgaatacagatcacttaaggttgactgtgcaaatggcataggggccctgaagctaagggaaatggaacactacttctcacagggcctgtcagttcagctgtttaatgatgggtccaagggcaaactcaatcatttatgtggagctgactttgtgaaaagtcatcagaaacctccacagggaatggaaattaagtccaatgaaagatgctgttcttttgatggagatgcagacagaattgtttattactaccatgatgcagatggccactttcatctcatagatggagacaagatagcaacgttaattagcagtttccttaaagagctcctggtggagattggagaaagtttgaatattggtgttgtacaaactgcatatgcaaatggaagttcaacacggtatcttgaagaagttatgaaggtrcctgtctattgcactaagactggtgtaaaacatttgcaccacaaggctcaagwgtttgacattggagtttattttgaagcaaatgggcatggcactgcagctggtgatgctatttctgacatgctggtgattgargcaatcttggctctgaagggcttgactgtacaacagtgggatgctctctatacagatcttccaaacagacaacttaaagttcaggttgcagacaggagagttattagcactaccratgctgaaagacaagcagttacacccccaggattacaggaggcaatcaatgacctggtgaagaagtayaagctttctcgagcttttgtccggccctctggtacagaagatgtcgtccgagtatatgcagaagcagactcacaagaaagtgcagatcaccttgcacatgaagtgagcttggcagtatttcagctggctggaggaattggagaaaggccccaaccaggtttctgaagataattttcatattcctgagaaactggactttttacaagtctttacaaaactgtcaataataatggcagtactaagagatttataatcataatgtttacaatgcagcctactggattgtctctagatctgtttttcttaaacactaacagaataattctttataaataggtaagccttacacttgttaaagaaatttacctctaatttcagtctcactaatgtaaaatactgggacttaagtatacaattcagtcactaactgtacagttttatgtggggaacaattcatgcaggctaatgagcaagatgatgttttgcagcattccccattgctgatacaaatggagagggcagagaagactttatacaaccagtttttccattgcagagtcttaagaaagattattagatgacttacctatatgactaatgccatcaggaactcagaggtatgaatagggggttgtccatccctcttccatactgaggtggagatgctcatgcaatacttttaaggatgcatggtccagccttcagttattcttcactgctcttggtgaaggtatgtgggagaaaaactaattataatacgtttcccagcctctgatggagaaggaacaccattctgataccagaacatggttaataaggaaaagagaaaaatccccaaccaatcttaattgaaccaagtctgaaaccaatggaaaaaaaaaatgggtagtgtatattttgcaggtttaagacaactcaggacaataaaaacaatggactttacatgtgtatatatatagctctcttaggcaccataatcagtatgagccaacaatatttaaacttgattcaggccacattcagacatttgctcttatatacaartatttaaattaaatacaatctgaaatgtgttctgttacatacaaaaaaggaaaaactatacaacgcagagcagtgtgtgtgttttaaataattacatttacatgtaagctaaatggaaccagcaatggtgctcaagtttttatcatcccttccagaaaatctttttctaccatctcttctattttttgcctggctttgctggaacatggtttgtggttctccagtttcatgtccttattagggaaggcatttgagtaga

SEQ ID NO: 6888 - DNA, 2877 bp, Homo sapiens
aagccacgcagggccacgtctgcggttctgaggactgggtttgggtgcagacgttgttgcttgggcgcttctccgctgcgtgtaggtgaagggggcttcctgaccgagacatggatttaggtgctattacaaaatactcagcattacacgccaagcccaatggactgatccttcaatacgggactgctggatttcgaacgaaggcagaacatcttgatcatgtcatgtttcgcatgggattattagctgtcctgaggtcaaaacagacaaaatccactataggagtcatggtaacagcgtcccacaatcctgaggaagacaatggtgtaaaattggttgatcctttgggtgaaatgttggcaccatcctgggaggaacatgccacctgtttagcaaatgctgaggaacaagatatgcagagagtgcttattgacatcagcgagaaagaagctgtgaatctgcaacaagatgcctttgtagttattggtagagataccaggcccagcagtgagaaactttcmcaatctgtaatagatggtgtgactgttctaggaggtcaattccatgattatggcttgttaacaacaccccagctgcactacatggtgtattgtcgaaacacgggtggccgatatggaaaggcaactatagaaggttactaccaraaactctctaaggcttttgtggaactcaccaaacaggcttcttgcagtggagatgaatacagatcacttaaggttgactgtgcaaatggcataggggccctgaagctaagggaaatggaacactacttctcacagggcctgtcagttcagctgtttaatgatgggtccaagggcaaactcaatcatttatgtggagctgactttgtgaaaagtcatcagaaacctccacagggaatggaaattaagtccaatgaaagatgctgttcttttgatggagatgcagacagaattgtttattactaccatgatgcagatggccactttcatctcatagatggagacaagatagcaacgttaattagcagtttccttaaagagctcctggtggagattggagaaagtttgaatattggtgttgtacaaactgcatatgcaaatggaagttcaacacggtatcttgaagaagttatgaaggtrcctgtctattgcactaagactggtgtaaaacatttgcaccacaaggctcaagwgtttgacattggagtttattttgaagcaaatgggcatggcactgcactgtttagtacagctgttgaaatgaagataaaacaatcagcagaacaactggaagataagaaaagaaaagctgctaagatgcttgaaaacattattgacttgtttaaccaggcagctggtgatgctatttctgacatgctggtgattgargcaatcttggctctgaagggcttgactgtacaacagtgggatgctctctatacagatcttccaaacagacaacttaaagttcaggttgcagacaggagagttattagcactaccratgctgaaagacaagcagttacacccccaggattacaggaggcaatcaatgacctggtgaagaagtayaagctttctcgagcttttgtccggccctctggtacagaagatgtcgtccgagtatatgcagaagcagactcacaagaaagtgcagatcaccttgcacatgaagtgagcttggcagtatttcagctggctggaggaattggagaaaggccccaaccaggtttctgaagataattttcatattcctgagaaactggactttttacaagtctttacaaaactgtcaataataatggcagtactaagagatttataatcataatgtttacaatgcagcctactggattgtctctagatctgtttttcttaaacactaacagaataattctttataaataggtaagccttacacttgttaaagaaatttacctctaatttcagtctcactaatgtaaaatactgggacttaagtatacaattcagtcactaactgtacagttttatgtggggaacaattcatgcaggctaatgagcaagatgatgttttgcagcattccccattgctgatacaaatggagagggcagagaagactttatacaaccagtttttccattgcagagtcttaagaaagattattagatgacttacctatatgactaatgccatcaggaactcagaggtatgaatagggggttgtccatccctcttccatactgaggtggagatgctcatgcaatacttttaaggatgcatggtccagccttcagttattcttcactgctcttggtgaaggtatgtgggagaaaaactaattataatacgtttcccagcctctgatggagaaggaacaccattctgataccagaacatggttaataaggaaaagagaaaaatccccaaccaatcttaattgaaccaagtctgaaaccaatggaaaaaaaaaatgggtagtgtatattttgcaggtttaagacaactcaggacaataaaaacaatggactttacatgtgtatatatatagctctcttaggcaccataatcagtatgagccaacaatatttaaacttgattcaggccacattcagacatttgctcttatatacaartatttaaattaaatacaatctgaaatgtgttctgttacatacaaaaaaggaaaaactatacaacgcagagcagtgtgtgtgttttaaataattacatttacatgtaagctaaatggaaccagcaatggtgctcaagtttttatcatcccttccagaaaatctttttctaccatctcttctattttttgcctggctttgctggaacatggtttgtggttctccagtttcatgtccttattagggaaggcatttgagtaga

SEQ ID NO: 6889 - DNA, 8059 bp, Homo sapiens
aggatgaacacagaagagctggagttattgagtgactccaaatacagaaactatgtagcagcaattgacaaagcactaaagaattttgaatactccagtgaatgggcagatttgatatcagcacttggaaaacttaataaggttttacaaaataatgcaaagtaccaagtagtacccaaaaagctgaccataggcaaacgcctagctcaatgtctacatccagcattaccaggtggagttcatcggaaggcgcttgaaacatatgaaattatcttcaaaataattggacctaagcgacttgccaaagatctttttttatatagttctggattatttcctcttcttgcaaatgctgccatgtctgtgaaaccaacattgctcagtttgtatgagatatattatctgcctttgggtaaaacactgaaacctggtctacagggattgcttactggtattcttcctggcttagaagaaggatcagagtactatgagagaacaaatatgttgttggaaaaggttgctgctgctgtggaccagtcagcattctacagtgccctgtggggtagtcttctcaccagtcctgctgtgcgtttacctggaatcacgtatgttcttgcccatttaaacaggaagctttctatggaagatcaactttatataattggcagtgatattgagctaatggcaatggtgggaatcttacaagtgaatggatttggagaagagaacactctaatgcaggatctaaagccttttcgcattttaatcagtttactggacaaacctgagctaggacctgtaattctagaagatgtcctgattgaagtgtttagaacattatattctcaatgcaaagcagagttggatcttcaaactgaaccacccttcagcaaggatcatgctcagttaagcagtaaattaagagaaaataagaaaacagcagagctgattaaaactgctaaccttctctttaattccttcgaaccttattatatgtgggattatgttgcacgctggtttgaagaatgttgtaggaggacactgcatgtgagacttcagattggacctggagatagtaatgactcatctgaattacagctgaccaatttctgcttactggtggattttttgttggacatagtttctttggagacttacattgaaatccagacagaacacttgccccagttgctgctcagaatgatttctgccttgacaagccatctccagacattgcacttatctgaactcacagattctctcagactctgctcaaagatccttagcaaggttcagcctccactgttatctgctagcactggaggtgttttgcagtttccaagtgggcagaacaattcagtcaaagagtgggaagacaaaaaggtaattttaactattatttttgtttctcatgaaaatcctactgaagtgtttgaagatggagaaaatccaccaagtagtcratcatcagagagtggattcactgagtttatacaatatcaagcagaccgaactgatgatattgacagagaactgagtgagggccagggggcagctgccatcccaattggtagcacatcctctgagacagaaacagcatccactgtgggatctgaagaaaccatcatccagaccccttccgtagtcactcaggggacagcaacccgaagtaggaagacagcccaaaagactgcaatgcagtgctgcttggagtatgtccaacagtttcttaccagacttatcaacctctacatcattcagaataactctttttctcagtctttggctacagaacatcaaggggatcttggtcgagaacaaggagagacttcaaaatgggacagaaattcacaaggagatgtaaaagagaaaaacataagtaaacaaaaaacttctaaagaatacctgtctgccttccttgctgcctgtcagctcttcctagagtgctcaagtttcccagtttacattgctgaggggaaccatacatcagagttacgttctgaaaaattggagactgactgtgagcatgtgcagcctccacagtggctccagactctgatgaatgcttgcagccaagcaagtgatttcagtgttcagagtgttgctatttcactagttatggacctggtgggactgacacagtctgtggccatggtcactggggaaaacatcaacagtgtagagcctgcacaacccttaagtccaaaccagggaagagtagctgtggttattagacctcccctcactcagggcaatctgaggtacatagctgagaagactgaatttttcaagcatgtagctttaacattgtgggaccagttgggagatgggacacctcagcatcaccagaagagtgtggaactattttatcaattacataacttagttccttcttctagcatctgtgaggatgttataagtcagcagttaacccataaagataagaaaataaggatggaagcacatgccaagtttgcagttctttggcatctaacgagagatctccatataaataaatcttcatcttttgtacgttcttttgacaggtcactgttcatcatgttagatagccttaacagtctcgatggttctactagctctgtgggacaagcctggctgaaccaagtcctacaaagacatgatattgcacgagttttggaaccattgctattgctcctgcttcatccaaaaactcagagggtttcagtacagcgtgtacaagcagaacgttattggaataagtctccctgttatccaggagaggagagtgacaagcatttcatgcaaaattttgcctgcagcaatgtgagccaagtacaactcatcacatcaaaaggaaatggtgaaaagccacttaccatggatgaaatagagaactttagtctcactgtgaatccattaagtgacagactttccctcctaagtaccagcagtgagacaattccaatggttgtgtctgattttgatcttccagaccaacagatagaaatacttcagagttctgactcgggatgttcacagtcctctgctggggacaacttgagttacgaagttgatcctgaaaccgtgaatgcccaagaggattctcaaatgcccaaggaaagctccccagatgatgatgttcaacaggtagtatttgacctgatatgtaaagttgtaagtggcctcgaagtggaatctgcatcagttacatctcaattagaaattgaagctatgcccccaaagtgcagtgatatagatccagatgaagagacgattaaaattgaagatgactccattcaacagagtcagaatgctttgctgagtaatgaaagttctcagtttctgtctgtgtctgcagagggaggccatgagtgtgtggcaaatggaatctccaggaatagctcctcaccttgtatttcaggaaccacacacactcttcatgactcttctgttgcttccatagaaaccaaatctagacaaaggagtcacagtagtattcaattcagcttcaaagaaaaattatcagaaaaagtttcggagaaggaaacaatagttaaggagtcaggtaaacaaccaggagcaaaacctaaagtaaaacttgccagaaaaaaggatgatgacaagaaaaaatcttcaaatgaaaaactcaaacaaaccagtgtattcttcagtgatggtctggatttagagaactggtatagctgtggagagggagacatttctgaaattgagagtgacatgggttctccaggatctcgaaaatctcccaatttcaacattcatcctctctatcaacatgtgctcctgtatctccagttgtatgattcatccaggactttgtatgctttctctgccatcaaagccatcttgaaaactaaccctatagcttttgtaaatgccatttcaactactagtgtaaataatgcatatactcctcagttgtctctccttcagaatctattggccagacaccggatttctgttatgggcaaagatttttatagtcacattccagtggactcaaatcataacttccggagttctatgtacatagaaattcttatttctctctgcttatattacatgcgtagccattacccaactcatgtcaaggttactgcacaagatttaataggcaatcgaaacatgcaaatgatgagcatagaaattctgacactactcttcactgagctggcaaaagtaatagaaagctcagcgaagggtttccctagttttatttctgatatgttatctaagtgcaaagttcagaaagtgattcttcattgtttgctgtcatctatctttagtgctcagaaatggcatagtgaaaaaatggcaggtaagaacctggttgctgtggaagaaggtttctcagaggacagccttattaatttctcagaggatgaatttgacaatggcagcacgttgcagtcacaacttcttaaggtgcttcagaggctgattgttctagaacacagagtaatgactattcctgaagagaatgaaacaggttttgattttgttgtatctgacttagaacacatcagtccccatcaacccatgacttctcttcagtatttgcatgctcagccaatcacatgtcaaggcatgttcctctgtgcagtgatacgagctttgcatcagcactgtgcatgtaagatgcacccacaatggattggtttaatcacatctactctgccttacatgggaaaagttctgcagagagtggttgtttctgtgacactacaactgtgcagaaatttagataatctaattcagcagtacaaatacgaaacaggattatctgatagtaggcctctgtggatggcatcaattattccaccagatatgattcttactcttttggaagggattacagccattatccattactgtttgttggatccaactacacagtatcaccaacttttggtcagtgtagaccagaaacacttgtttgaagcacgcagtggaatcctctcaatccttcatatgatcatgtcctctgtgacactgctttggagcatactgcatcaagctgattcttcagaaaagatgactattgccgcatccgcatctcttaccactattaatcttggagctacaaagaacttgagacaacagattcttgaattgttgggccccatttcaatgaatcatggtgttcactttatggctgccattgcatttgtgtggaatgaaagaagacagaataaaacaaccaccaggaccaaggtcattcctgcagccagtgaagaacagcttttattagtggaattggttcgttcaatcagtgtcatgagagcagaaactgttatccagactgtaaaagaagttttaaagcagccaccagccatagccaaggacaagaaacatctttctttggaagtctgcatgcttcagtttttctatgcttatattcaaagaattccagtgcccaatttagtggatagctgggcgtcactgttgatacttctgaaagactctatacaactgagtcttccagctccagggcagtttcttatacttggggttctgaatgagtttattatgaaaaaccctagtttggaaaataaaaaagaccaaagagaccttcaggatgtaactcacaaaatagtggatgcaattggtgcaattgctggttcttctctggaacagacaacatggctgcgacgaaatcttgaagttaagccttctcccaaaataatggtagatggaaccaatttggaatctgatgttgaagatatgttatcacctgcaatggaaaccgcaaacataactccttctgtatatagtgtccatgcattgacattactctctgaggttttggctcatcttttggatatggttttctatagtgatgaaaaggagcgggttattcctttacttgtaaatattatgcattatgttgtgccctacctcagaaatcacagtgcacataatgcccctagttatcgagcttgtgtccagctgctcagcagtcttagtgggtatcagtacacacggagagcttggaaaaaagaagcttttgacctctttatggatcccagtttctttcagatggatgcctcttgtgttaatcattggagagcaattatggacaatctgatgacacatgataaaacaacatttagagatttgatgactcgtgtagcagtggctcaaagcagttcacttaatctctttgcaaaccgtgatgtggagctagaacagagagctatgcttcttaaaagattagcatttgctatttttagcagtgaaattgaccagtaccagaaatatcttccagatatacaagagagattggttgagagtctccgtttgccacaggtgccaactctccattctcaagtgttcctgtttttcagagtgttacttttaagaatgtctccccaacatcttacctcactctggcctaccatgattacagaacttgtacaagtatttttactgatggagcaggaactcactgctgatgaagatatttcacggacttcagggccctctgtggctggtctggagacaacgtacacaggaggtaatggcttctctacttcatataacagccagcggtggttaaacctctatctctctgcttgcaaatttttggatttggctctcgcattgccctctgaaaaccttcctcagtttcagatgtaccgatgggcctttattccagaagcctcagatgattcaggtttggaagtcagaaggcagggtatacatcaacgagaatttaaaccttacgtggtacgactagcaaaacttcttcggaaaagagcaaagaaaaatccagaggaagacaactcagggagaacattgggttgggagccagggcacttgctgctcaccatctgcaccgtgcgcagtatggagcagctcctgccgttcttcaatgtgctcagtcaagtcttcaacagcaaagtcacaagccgatgtggaggacactcagggagtcctatcctctactcaaatgccttccctaataaggacatgaaactggagaaccacaaaccatgttccagcaaagccaggcaaaaaatagaagagatggtagaaaaagattttctggaagggatgataaaaacttgagcaccattgctggttccatttagcttacatgtaaatgtaattatttaaaacacacacactgctctgcgttgtatagtttttccttttttgtatgtaacagaacacatttcagattgtatttaatttaaatayttgtatataagagcaaatgtctgaatgtggcctgaatcaagtttaaatattgttggctcatactgattatggtgcctaagagagctatatatatacacatgtaaagtccattgtttttattgtcctgagttgtcttaaacctgcaaaatatacactacccattttttttttccattggtttcagacttggttcaattaagattggttggggatttttctcttttccttattaaccatgttctggtatcagaatggtgttccttctccatcagaggctgggaaacgtattataattagtttttctcccacataccttcaccaagagcagtgaagaataactgaaggctggaccatgcatccttaaaagtattgcatgagcatctccacctcagtatggaagagggatggacaaccccctattcatacctctgagttcctgatggcattagtcatataggtaagtcatctaataatctttcttaagactctgcaatggaaaaactggttgtataaagtcttctctgccctctccatttgtatcagcaatggggaatgctgcaaaacatcatcttgctcatgtgatggtratggcaaagatatcacaaggagttggtaataagatttaattttccagtagcctgcatgaattgttccccacataaaactgtacagttagtgactgaattgtatacttaagtcccagtattttacattagtgagactgaaattagaggtaaatttctttaacaagtgtaaggcttacctatttataaagaattattctgttagtgtttaagaaaaacagatctagagacaatccagtaggctgcattgtaaacattatgattataaa

SEQ ID NO: 6890 - DNA, 7680 bp, Homo sapiens
atgaacacagaagagctggagttattgagtgactccaaatacagaaactatgtagcagcaattgacaaagcactaaagaattttgaatactccagtgaatgggcagatttgatatcagcacttggaaaacttaataaggttttacaaaataatgcaaagtaccaagtagtacccaaaaagctgaccataggcaaacgcctagctcaatgtctacatccagcattaccaggtggagttcatcggaaggcgcttgaaacatatgaaattatcttcaaaataattggacctaagcgacttgccaaagatctttttttatatagttctggattatttcctcttcttgcaaatgctgccatgtctgtgaaaccaacattgctcagtttgtatgagatatattatctgcctttgggtaaaacactgaaacctggtctacagggattgcttactggtattcttcctggcttagaagaaggatcagagtactatgagagaacaaatatgttgttggaaaaggttgctgctgctgtggaccagtcagcattctacagtgccctgtggggtagtcttctcaccagtcctgctgtgcgtttacctggaatcacgtatgttcttgcccatttaaacaggaagctttctatggaagatcaactttatataattggcagtgatattgagctaatggcaatggtgggaatcttacaagtgaatggatttggagaagagaacactctaatgcaggatctaaagccttttcgcattttaatcagtttactggacaaacctgagctaggacctgtaattctagaagatgtcctgattgaagtgtttagaacattatattctcaatgcaaagcagagttggatcttcaaactgaaccacccttcagcaaggatcatgctcagttaagcagtaaattaagagaaaataagaaaacagcagagctgattaaaactgctaaccttctctttaattccttcgaaccttattatatgtgggattatgttgcacgctggtttgaagaatgttgtaggaggacactgcatgtgagacttcagattggacctggagatagtaatgactcatctgaattacagctgaccaatttctgcttactggtggattttttgttggacatagtttctttggagacttacattgaaatccagacagaacacttgccccagttgctgctcagaatgatttctgccttgacaagccatctccagacattgcacttatctgaactcacagattctctcagactctgctcaaagatccttagcaaggttcagcctccactgttatctgctagcactggaggtgttttgcagtttccaagtgggcagaacaattcagtcaaagagtgggaagacaaaaaggtatcatcagtttctcatgaaaatcctactgaagtgtttgaagatggagaaaatccaccaagtagtcratcatcagagagtggattcactgagtttatacaatatcaagcagaccgaactgatgatattgacagagaactgagtgagggccagggggcagctgccatcccaattggtagcacatcctctgagacagaaacagcatccactgtgggatctgaagaaaccatcatccagaccccttccgtagtcactcaggggacagcaacccgaagtaggaagacagcccaaaagactgcaatgcagtgctgcttggagtatgtccaacagtttcttaccagacttatcaacctctacatcattcagaataactctttttctcagtctttggctacagaacatcaaggggatcttggtcgagaacaaggagagacttcaaaatgggacagaaattcacaaggagatgtaaaagagaaaaacataagtaaacaaaaaacttctaaagaatacctgtctgccttccttgctgcctgtcagctcttcctagagtgctcaagtttcccagtttacattgctgaggggaaccatacatcagagttacgttctgaaaaattggagactgactgtgagcatgtgcagcctccacagtggctccagactctgatgaatgcttgcagccaagcaagtgatttcagtgttcagagtgttgctatttcactagttatggacctggtgggactgacacagtctgtggccatggtcactggggaaaacatcaacagtgtagagcctgcacaacccttaagtccaaaccagggaagagtagctgtggttattagacctcccctcactcagggcaatctgaggtacatagctgagaagactgaatttttcaagcatgtagctttaacattgtgggaccagttgggagatgggacacctcagcatcaccagaagagtgtggaactattttatcaattacataacttagttccttcttctagcatctgtgaggatgttataagtcagcagttaacccataaagataagaaaataaggatggaagcacatgccaagtttgcagttctttggcatctaacgagagatctccatataaataaatcttcatcttttgtacgttcttttgacaggtcactgttcatcatgttagatagccttaacagtctcgatggttctactagctctgtgggacaagcctggctgaaccaagtcctacaaagacatgatattgcacgagttttggaaccattgctattgctcctgcttcatccaaaaactcagagggtttcagtacagcgtgtacaagcagaacgttattggaataagtctccctgttatccaggagaggagagtgacaagcatttcatgcaaaattttgcctgcagcaatgtgagccaagtacaactcatcacatcaaaaggaaatggtgaaaagccacttaccatggatgaaatagagaactttagtctcactgtgaatccattaagtgacagactttccctcctaagtaccagcagtgagacaattccaatggttgtgtctgattttgatcttccagaccaacagatagaaatacttcagagttctgactcgggatgttcacagtcctctgctggggacaacttgagttacgaagttgatcctgaaaccgtgaatgcccaagaggattctcaaatgcccaaggaaagctccccagatgatgatgttcaacaggtagtatttgacctgatatgtaaagttgtaagtggcctcgaagtggaatctgcatcagttacatctcaattagaaattgaagctatgcccccaaagtgcagtgatatagatccagatgaagagacgattaaaattgaagatgactccattcaacagagtcagaatgctttgctgagtaatgaaagttctcagtttctgtctgtgtctgcagagggaggccatgagtgtgtggcaaatggaatctccaggaatagctcctcaccttgtatttcaggaaccacacacactcttcatgactcttctgttgcttccatagaaaccaaatctagacaaaggagtcacagtagtattcaattcagcttcaaagaaaaattatcagaaaaagtttcggagaaggaaacaatagttaaggagtcaggtaaacaaccaggagcaaaacctaaagtaaaacttgccagaaaaaaggatgatgacaagaaaaaatcttcaaatgaaaaactcaaacaaaccagtgtattcttcagtgatggtctggatttagagaactggtatagctgtggagagggagacatttctgaaattgagagtgacatgggttctccaggatctcgaaaatctcccaatttcaacattcatcctctctatcaacatgtgctcctgtatctccagttgtatgattcatccaggactttgtatgctttctctgccatcaaagccatcttgaaaactaaccctatagcttttgtaaatgccatttcaactactagtgtaaataatgcatatactcctcagttgtctctccttcagaatctattggccagacaccggatttctgttatgggcaaagatttttatagtcacattccagtggactcaaatcataacttccggagttctatgtacatagaaattcttatttctctctgcttatattacatgcgtagccattacccaactcatgtcaaggttactgcacaagatttaataggcaatcgaaacatgcaaatgatgagcatagaaattctgacactactcttcactgagctggcaaaagtaatagaaagctcagcgaagggtttccctagttttatttctgatatgttatctaagtgcaaagttcagaaagtgattcttcattgtttgctgtcatctatctttagtgctcagaaatggcatagtgaaaaaatggcaggtaagaacctggttgctgtggaagaaggtttctcagaggacagccttattaatttctcagaggatgaatttgacaatggcagcacgttgcagtcacaacttcttaaggtgcttcagaggctgattgttctagaacacagagtaatgactattcctgaagagaatgaaacaggttttgattttgttgtatctgacttagaacacatcagtccccatcaacccatgacttctcttcagtatttgcatgctcagccaatcacatgtcaaggcatgttcctctgtgcagtgatacgagctttgcatcagcactgtgcatgtaagatgcacccacaatggattggtttaatcacatctactctgccttacatgggaaaagttctgcagagagtggttgtttctgtgacactacaactgtgcagaaatttagataatctaattcagcagtacaaatacgaaacaggattatctgatagtaggcctctgtggatggcatcaattattccaccagatatgattcttactcttttggaagggattacagccattatccattactgtttgttggatccaactacacagtatcaccaacttttggtcagtgtagaccagaaacacttgtttgaagcacgcagtggaatcctctcaatccttcatatgatcatgtcctctgtgacactgctttggagcatactgcatcaagctgattcttcagaaaagatgactattgccgcatccgcatctcttaccactattaatcttggagctacaaagaacttgagacaacagattcttgaattgttgggccccatttcaatgaatcatggtgttcactttatggctgccattgcatttgtgtggaatgaaagaagacagaataaaacaaccaccaggaccaaggtcattcctgcagccagtgaagaacagcttttattagtggaattggttcgttcaatcagtgtcatgagagcagaaactgttatccagactgtaaaagaagttttaaagcagccaccagccatagccaaggacaagaaacatctttctttggaagtctgcatgcttcagtttttctatgcttatattcaaagggttctgaatgagtttattatgaaaaaccctagtttggaaaataaaaaagaccaaagagaccttcaggatgtaactcacaaaatagtggatgcaattggtgcaattgctggttcttctctggaacagacaacatggctgcgacgaaatcttgaagttaagccttctcccaaaataatggtagatggaaccaatttggaatctgatgttgaaggtattcttgtcaaacatttaggtttattatctgttttggctcatcttttggatatggttttctatagtgatgaaaaggagcgggttattcctttacttgtaaatattatgcattatgttgtgccctacctcagaaatcacagtgcacataatgcccctagttatcgagcttgtgtccagctgctcagcagtcttagtgggtatcagtacacacggagagcttggaaaaaagaagcttttgacctctttatggatcccagtttctttcagatggatgcctcttgtgttaatcattggagagcaattatggacaatctgatgacacatgataaaacaacatttagagatttgatgactcgtgtagcagtggctcaaagcagttcacttaatctctttgcaaaccgtgatgtggagctagaacagagagctatgcttcttaaaagattagcatttgctatttttagcagtgaaattgaccagtaccagaaatatcttccagatatacaaggaattcctgtgagtaaatgggtccagctgctgacagcactgtctcctgcttacaggacttcagggccctctgtggctggtctggagacaacgtacacaggaggtaatggcttctctacttcatataacagccagcggtggttaaacctctatctctctgcttgcaaatttttggatttggctctcgcattgccctctgaaaaccttcctcagtttcagatgtaccgatgggcctttattccagaagcctcagatgattcaggtttggaagtcagaaggcagggtatacatcaacgagaatttaaaccttacgtggtacgactagcaaaacttcttcggaaaagagcaaaggacaaggaggaggactttaagacagtgattttggagggattggagatggccaagcatcagaaaaatccagaggaagacaactcagggagaacattgggttgggagccagggcacttgctgctcaccatctgcaccgtgcgcagtatggagcagctcctgccgttcttcaatgtgctcagtcaagtcttcaacagcaaagtcacaagccgatgtggaggacactcagggagtcctatcctctactcaaatgccttccctaataaggacatgaaactggagaaccacaaaccatgttccagcaaagccaggcaaaaaatagaagagatggtagaaaaagattttctggaagggatgataaaaacttgagcaccattgctggttccatttagcttacatgtaaatgtaattatttaaaacacacacactgctctgcgttgtatagtttttccttttttgtatgtaacagaacacatttcagattgtatttaatttaaatayttgtatataagagcaaatgtctgaatgtggcctgaatcaagtttaaatattgttggctcatactgattatggtgcctaagagagctatatatatacacatgtaaagtccattgtttttattgtcctgagttgtcttaaacctgcaaaatatacactacccattttttttttccattggtttcagacttggttcaattaagattggttggggatttttctcttttccttattaaccatgttctggtatcagaatggtgttccttctccatcagaggctgggaaacgtattataattagtttttctcccacataccttcaccaagagcagtgaagaataactgaaggctggaccatgcatccttaaaagtattgcatgagcatctccacctcagtatggaagagggatggacaaccccctattcatacctctgagttcctgatggcattagtcatatagtaacaaattccaaagcccttaaataaacggaaaacagaccaaattcttctaaataagaactatcccagcttacttgtgagtctgcttctgcatatactcggacgacatcttctgtaccagagggccggacaaaagctcgagaaagcttrtacttcttcaccaggtcattgattgcctcctgtaatcctgggggtgtaactgcttgtctttcagcatyggtagtgctaataactctcctgtctgcaacctaagtgcaagcattt

SEQ ID NO: 6891 - DNA, 7911 bp, Homo sapiens
atgaacacagaagagctggagttattgagtgactccaaatacagaaactatgtagcagcaattgacaaagcactaaagaattttgaatactccagtgaatgggcagatttgatatcagcacttggaaaacttaataaggttttacaaaataatgcaaagtaccaagtagtacccaaaaagctgaccataggcaaacgcctagctcaatgtctacatccagcattaccaggtggagttcatcggaaggcgcttgaaacatatgaaattatcttcaaaataattggacctaagcgacttgccaaagatctttttttatatagttctggattatttcctcttcttgcaaatgctgccatgtctgtgaaaccaacattgctcagtttgtatgagatatattatctgcctttgggtaaaacactgaaacctggtctacagggattgcttactggtattcttcctggcttagaagaaggatcagagtactatgagagaacaaatatgttgttggaaaaggttgctgctgctgtggaccagtcagcattctacagtgccctgtggggtagtcttctcaccagtcctgctgtgcgtttacctggaatcacgtatgttcttgcccatttaaacaggaagctttctatggaagatcaactttatataattggcagtgatattgagctaatggcaatggtgggaatcttacaagtgaatggatttggagaagagaacactctaatgcaggatctaaagccttttcgcattttaatcagtttactggacaaacctgagctaggacctgtaattctagaagatgtcctgattgaagtgtttagaacattatattctcaatgcaaagcagagttggatcttcaaactgaaccacccttcagcaaggatcatgctcagttaagcagtaaattaagagaaaataagaaaacagcagagctgattaaaactgctaaccttctctttaattccttcgaaccttattatatgtgggattatgttgcacgctggtttgaagaatgttgtaggaggacactgcatgtgagacttcagattggacctggagatagtaatgactcatctgaattacagctgaccaatttctgcttactggtggattttttgttggacatagtttctttggagacttacattgaaatccagacagaacacttgccccagttgctgctcagaatgatttctgccttgacaagccatctccagacattgcacttatctgaactcacagattctctcagactctgctcaaagatccttagcaaggttcagcctccactgttatctgctagcactggaggtgttttgcagtttccaagtgggcagaacaattcagtcaaagagtgggaagacaaaaaggtatcatcagtttctcatgaaaatcctactgaagtgtttgaagatggagaaaatccaccaagtagtcratcatcagagagtggattcactgagtttatacaatatcaagcagaccgaactgatgatattgacagagaactgagtgagggccagggggcagctgccatcccaattggtagcacatcctctgagacagaaacagcatccactgtgggatctgaagaaaccatcatccagaccccttccgtagtcactcaggggacagcaacccgaagtaggaagacagcccaaaagactgcaatgcagtgctgcttggagtatgtccaacagtttcttaccagacttatcaacctctacatcattcagaataactctttttctcagtctttggctacagaacatcaaggggatcttggtcgagaacaaggagagacttcaaaatgggacagaaattcacaaggagatgtaaaagagaaaaacataagtaaacaaaaaacttctaaagaatacctgtctgccttccttgctgcctgtcagctcttcctagagtgctcaagtttcccagtttacattgctgaggggaaccatacatcagagttacgttctgaaaaattggagactgactgtgagcatgtgcagcctccacagtggctccagactctgatgaatgcttgcagccaagcaagtgatttcagtgttcagagtgttgctatttcactagttatggacctggtgggactgacacagtctgtggccatggtcactggggaaaacatcaacagtgtagagcctgcacaacccttaagtccaaaccagggaagagtagctgtggttattagacctcccctcactcagggcaatctgaggtacatagctgagaagactgaatttttcaagcatgtagctttaacattgtgggaccagttgggagatgggacacctcagcatcaccagaagagtgtggaactattttatcaattacataacttagttccttcttctagcatctgtgaggatgttataagtcagcagttaacccataaagataagaaaataaggatggaagcacatgccaagtttgcagttctttggcatctaacgagagatctccatataaataaatcttcatcttttgtacgttcttttgacaggtcactgttcatcatgttagatagccttaacagtctcgatggttctactagctctgtgggacaagcctggctgaaccaagtcctacaaagacatgatattgcacgagttttggaaccattgctattgctcctgcttcatccaaaaactcagagggtttcagtacagcgtgtacaagcagaacgttattggaataagtctccctgttatccaggagaggagagtgacaagcatttcatgcaaaattttgcctgcagcaatgtgagccaagtacaactcatcacatcaaaaggaaatggtgaaaagccacttaccatggatgaaatagagaactttagtctcactgtgaatccattaagtgacagactttccctcctaagtaccagcagtgagacaattccaatggttgtgtctgattttgatcttccagaccaacagatagaaatacttcagagttctgactcgggatgttcacagtcctctgctggggacaacttgagttacgaagttgatcctgaaaccgtgaatgcccaagaggattctcaaatgcccaaggaaagctccccagatgatgatgttcaacaggtagtatttgacctgatatgtaaagttgtaagtggcctcgaagtggaatctgcatcagttacatctcaattagaaattgaagctatgcccccaaagtgcagtgatatagatccagatgaagagacgattaaaattgaagatgactccattcaacagagtcagaatgctttgctgagtaatgaaagttctcagtttctgtctgtgtctgcagagggaggccatgagtgtgtggcaaatggaatctccaggaatagctcctcaccttgtatttcaggaaccacacacactcttcatgactcttctgttgcttccatagaaaccaaatctagacaaaggagtcacagtagtattcaattcagcttcaaagaaaaattatcagaaaaagtttcggagaaggaaacaatagttaaggagtcaggtaaacaaccaggagcaaaacctaaagtaaaacttgccagaaaaaaggatgatgacaagaaaaaatcttcaaatgaaaaactcaaacaaaccagtgtattcttcagtgatggtctggatttagagaactggtatagctgtggagagggagacatttctgaaattgagagtgacatgggttctccaggatctcgaaaatctcccaatttcaacattcatcctctctatcaacatgtgctcctgtatctccagttgtatgattcatccaggactttgtatgctttctctgccatcaaagccatcttgaaaactaaccctatagcttttgtaaatgccatttcaactactagtgtaaataatgcatatactcctcagttgtctctccttcagaatctattggccagacaccggatttctgttatgggcaaagatttttatagtcacattccagtggactcaaatcataacttccggagttctatgtacatagaaattcttatttctctctgcttatattacatgcgtagccattacccaactcatgtcaaggttactgcacaagatttaataggcaatcgaaacatgcaaatgatgagcatagaaattctgacactactcttcactgagctggcaaaagtaatagaaagctcagcgaagggtttccctagttttatttctgatatgttatctaagtgcaaagttcagaaagtgattcttcattgtttgctgtcatctatctttagtgctcagaaatggcatagtgaaaaaatggcaggtaagaacctggttgctgtggaagaaggtttctcagaggacagccttattaatttctcagaggatgaatttgacaatggcagcacgttgcagtcacaacttcttaaggtgcttcagaggctgattgttctagaacacagagtaatgactattcctgaagagaatgaaacaggttttgattttgttgtatctgacttagaacacatcagtccccatcaacccatgacttctcttcagtatttgcatgctcagccaatcacatgtcaaggcatgttcctctgtgcagtgatacgagctttgcatcagcactgtgcatgtaagatgcacccacaatggattggtttaatcacatctactctgccttacatgggaaaagttctgcagagagtggttgtttctgtgacactacaactgtgcagaaatttagataatctaattcagcagtacaaatacgaaacaggattatctgatagtaggcctctgtggatggcatcaattattccaccagatatgattcttactcttttggaagggattacagccattatccattactgtttgttggatccaactacacagtatcaccaacttttggtcagtgtagaccagaaacacttgtttgaagcacgcagtggaatcctctcaatccttcatatgatcatgtcctctgtgacactgctttggagcatactgcatcaagctgattcttcagaaaagatgactattgccgcatccgcatctcttaccactattaatcttggagctacaaagaacttgagacaacagattcttgaattgttgggccccatttcaatgaatcatggtgttcactttatggctgccattgcatttgtgtggaatgaaagaagacagaataaaacaaccaccaggaccaaggtcattcctgcagccagtgaagaacagcttttattagtggaattggttcgttcaatcagtgtcatgagagcagaaactgttatccagactgtaaaagaagttttaaagcagccaccagccatagccaaggacaagaaacatctttctttggaagtctgcatgcttcagtttttctatgcttatattcaaagaattccagtgcccaatttagtggatagctgggcgtcactgttgatacttctgaaagactctatacaactgagtcttccagctccagggcagtttcttatacttggggttctgaatgagtttattatgaaaaaccctagtttggaaaataaaaaagaccaaagagaccttcaggatgtaactcacaaaatagtggatgcaattggtgcaattgctggttcttctctggaacagacaacatggctgcgacgaaatcttgaagttaagccttctcccaaaataatggtagatggaaccaatttggaatctgatgttgaagatatgttatcacctgcaatggaaaccgcaaacataactccttctgtatatagtgtccatgcattgacattactctctgaggttttggctcatcttttggatatggttttctatagtgatgaaaaggagcgggttattcctttacttgtaaatattatgcattatgttgtgccctacctcagaaatcacagtgcacataatgcccctagttatcgagcttgtgtccagctgctcagcagtcttagtgggtatcagtacacacggagagcttggaaaaaagaagcttttgacctctttatggatcccagtttctttcagatggatgcctcttgtgttaatcattggagagcaattatggacaatctgatgacacatgataaaacaacatttagagatttgatgactcgtgtagcagtggctcaaagcagttcacttaatctctttgcaaaccgtgatgtggagctagaacagagagctatgcttcttaaaagattagcatttgctatttttagcagtgaaattgaccagtaccagaaatatcttccagatatacaagagagattggttgagagtctccgtttgccacaggtgccaactctccattctcaagtgttcctgtttttcagagtgttacttttaagaatgtctccccaacatcttacctcactctggcctaccatgattacagaacttgtacaagtatttttactgatggagcaggaactcactgctgatgaagatatttcacggacttcagggccctctgtggctggtctggagacaacgtacacaggaggtaatggcttctctacttcatataacagccagcggtggttaaacctctatctctctgcttgcaaatttttggatttggctctcgcattgccctctgaaaaccttcctcagtttcagatgtaccgatgggcctttattccagaagcctcagatgattcaggtttggaagtcagaaggcagggtatacatcaacgagaatttaaaccttacgtggtacgactagcaaaacttcttcggaaaagagcaaagaaaaatccagaggaagacaactcagggagaacattgggttgggagccagggcacttgctgctcaccatctgcaccgtgcgcagtatggagcagctcctgccgttcttcaatgtgctcagtcaagtcttcaacagcaaagtcacaagccgatgtggaggacactcagggagtcctatcctctactcaaatgccttccctaataaggacatgaaactggagaaccacaaaccatgttccagcaaagccaggcaaaaaatagaagagatggtagaaaaagattttctggaagggatgataaaaacttgagcaccattgctggttccatttagcttacatgtaaatgtaattatttaaaacacacacactgctctgcgttgtatagtttttccttttttgtatgtaacagaacacatttcagattgtatttaatttaaatayttgtatataagagcaaatgtctgaatgtggcctgaatcaagtttaaatattgttggctcatactgattatggtgcctaagagagctatatatatacacatgtaaagtccattgtttttattgtcctgagttgtcttaaacctgcaaaatatacactacccattttttttttccattggtttcagacttggttcaattaagattggttggggatttttctcttttccttattaaccatgttctggtatcagaatggtgttccttctccatcagaggctgggaaacgtattataattagtttttctcccacataccttcaccaagagcagtgaagaataactgaaggctggaccatgcatccttaaaagtattgcatgagcatctccacctcagtatggaagagggatggacaaccccctattcatacctctgagttcctgatggcattagtcatatagtaacaaattccaaagcccttaaataaacggaaaacagaccaaattcttctaaataagaactatcccagcttacttgtgagtctgcttctgcatatactcggacgacatcttctgtaccagagggccggacaaaagctcgagaaagcttrtacttcttcaccaggtcattgattgcctcctgtaatcctgggggtgtaactgcttgtctttcagcatyggtagtgctaataactctcctgtctgcaacctaagtgcaagcattt

SEQ ID NO: 6892 - DNA, 7926 bp, Homo sapiens
aggatgaacacagaagagctggagttattgagtgactccaaatacagaaactatgtagcagcaattgacaaagcactaaagaattttgaatactccagtgaatgggcagatttgatatcagcacttggaaaacttaataaggttttacaaaataatgcaaagtaccaagtagtacccaaaaagctgaccataggcaaacgcctagctcaatgtctacatccagcattaccaggtggagttcatcggaaggcgcttgaaacatatgaaattatcttcaaaataattggacctaagcgacttgccaaagatctttttttatatagttctggattatttcctcttcttgcaaatgctgccatgtctgtgaaaccaacattgctcagtttgtatgagatatattatctgcctttgggtaaaacactgaaacctggtctacagggattgcttactggtattcttcctggcttagaagaaggatcagagtactatgagagaacaaatatgttgttggaaaaggttgctgctgctgtggaccagtcagcattctacagtgccctgtggggtagtcttctcaccagtcctgctgtgcgtttacctggaatcacgtatgttcttgcccatttaaacaggaagctttctatggaagatcaactttatataattggcagtgatattgagctaatggcaatggtgggaatcttacaagtgaatggatttggagaagagaacactctaatgcaggatctaaagccttttcgcattttaatcagtttactggacaaacctgagctaggacctgtaattctagaagatgtcctgattgaagtgtttagaacattatattctcaatgcaaagcagagttggatcttcaaactgaaccacccttcagcaaggatcatgctcagttaagcagtaaattaagagaaaataagaaaacagcagagctgattaaaactgctaaccttctctttaattccttcgaaccttattatatgtgggattatgttgcacgctggtttgaagaatgttgtaggaggacactgcatgtgagacttcagattggacctggagatagtaatgactcatctgaattacagctgaccaatttctgcttactggtggattttttgttggacatagtttctttggagacttacattgaaatccagacagaacacttgccccagttgctgctcagaatgatttctgccttgacaagccatctccagacattgcacttatctgaactcacagattctctcagactctgctcaaagatccttagcaaggttcagcctccactgttatctgctagcactggaggtgttttgcagtttccaagtgggcagaacaattcagtcaaagagtgggaagacaaaaaggtaattttaactattatttttgtttctcatgaaaatcctactgaagtgtttgaagatggagaaaatccaccaagtagtcratcatcagagagtggattcactgagtttatacaatatcaagcagaccgaactgatgatattgacagagaactgagtgagggccagggggcagctgccatcccaattggtagcacatcctctgagacagaaacagcatccactgtgggatctgaagaaaccatcatccagaccccttccgtagtcactcaggggacagcaacccgaagtaggaagacagcccaaaagactgcaatgcagtgctgcttggagtatgtccaacagtttcttaccagacttatcaacctctacatcattcagaataactctttttctcagtctttggctacagaacatcaaggggatcttggtcgagaacaaggagagacttcaaaatgggacagaaattcacaaggagatgtaaaagagaaaaacataagtaaacaaaaaacttctaaagaatacctgtctgccttccttgctgcctgtcagctcttcctagagtgctcaagtttcccagtttacattgctgaggggaaccatacatcagagttacgttctgaaaaattggagactgactgtgagcatgtgcagcctccacagtggctccagactctgatgaatgcttgcagccaagcaagtgatttcagtgttcagagtgttgctatttcactagttatggacctggtgggactgacacagtctgtggccatggtcactggggaaaacatcaacagtgtagagcctgcacaacccttaagtccaaaccagggaagagtagctgtggttattagacctcccctcactcagggcaatctgaggtacatagctgagaagactgaatttttcaagcatgtagctttaacattgtgggaccagttgggagatgggacacctcagcatcaccagaagagtgtggaactattttatcaattacataacttagttccttcttctagcatctgtgaggatgttataagtcagcagttaacccataaagataagaaaataaggatggaagcacatgccaagtttgcagttctttggcatctaacgagagatctccatataaataaatcttcatcttttgtacgttcttttgacaggtcactgttcatcatgttagatagccttaacagtctcgatggttctactagctctgtgggacaagcctggctgaaccaagtcctacaaagacatgatattgcacgagttttggaaccattgctattgctcctgcttcatccaaaaactcagagggtttcagtacagcgtgtacaagcagaacgttattggaataagtctccctgttatccaggagaggagagtgacaagcatttcatgcaaaattttgcctgcagcaatgtgagccaagtacaactcatcacatcaaaaggaaatggtgaaaagccacttaccatggatgaaatagagaactttagtctcactgtgaatccattaagtgacagactttccctcctaagtaccagcagtgagacaattccaatggttgtgtctgattttgatcttccagaccaacagatagaaatacttcagagttctgactcgggatgttcacagtcctctgctggggacaacttgagttacgaagttgatcctgaaaccgtgaatgcccaagaggattctcaaatgcccaaggaaagctccccagatgatgatgttcaacaggtagtatttgacctgatatgtaaagttgtaagtggcctcgaagtggaatctgcatcagttacatctcaattagaaattgaagctatgcccccaaagtgcagtgatatagatccagatgaagagacgattaaaattgaagatgactccattcaacagagtcagaatgctttgctgagtaatgaaagttctcagtttctgtctgtgtctgcagagggaggccatgagtgtgtggcaaatggaatctccaggaatagctcctcaccttgtatttcaggaaccacacacactcttcatgactcttctgttgcttccatagaaaccaaatctagacaaaggagtcacagtagtattcaattcagcttcaaagaaaaattatcagaaaaagtttcggagaaggaaacaatagttaaggagtcaggtaaacaaccaggagcaaaacctaaagtaaaacttgccagaaaaaaggatgatgacaagaaaaaatcttcaaatgaaaaactcaaacaaaccagtgtattcttcagtgatggtctggatttagagaactggtatagctgtggagagggagacatttctgaaattgagagtgacatgggttctccaggatctcgaaaatctcccaatttcaacattcatcctctctatcaacatgtgctcctgtatctccagttgtatgattcatccaggactttgtatgctttctctgccatcaaagccatcttgaaaactaaccctatagcttttgtaaatgccatttcaactactagtgtaaataatgcatatactcctcagttgtctctccttcagaatctattggccagacaccggatttctgttatgggcaaagatttttatagtcacattccagtggactcaaatcataacttccggagttctatgtacatagaaattcttatttctctctgcttatattacatgcgtagccattacccaactcatgtcaaggttactgcacaagatttaataggcaatcgaaacatgcaaatgatgagcatagaaattctgacactactcttcactgagctggcaaaagtaatagaaagctcagcgaagggtttccctagttttatttctgatatgttatctaagtgcaaagttcagaaagtgattcttcattgtttgctgtcatctatctttagtgctcagaaatggcatagtgaaaaaatggcaggtaagaacctggttgctgtggaagaaggtttctcagaggacagccttattaatttctcagaggatgaatttgacaatggcagcacgttgcagtcacaacttcttaaggtgcttcagaggctgattgttctagaacacagagtaatgactattcctgaagagaatgaaacaggttttgattttgttgtatctgacttagaacacatcagtccccatcaacccatgacttctcttcagtatttgcatgctcagccaatcacatgtcaaggcatgttcctctgtgcagtgatacgagctttgcatcagcactgtgcatgtaagatgcacccacaatggattggtttaatcacatctactctgccttacatgggaaaagttctgcagagagtggttgtttctgtgacactacaactgtgcagaaatttagataatctaattcagcagtacaaatacgaaacaggattatctgatagtaggcctctgtggatggcatcaattattccaccagatatgattcttactcttttggaagggattacagccattatccattactgtttgttggatccaactacacagtatcaccaacttttggtcagtgtagaccagaaacacttgtttgaagcacgcagtggaatcctctcaatccttcatatgatcatgtcctctgtgacactgctttggagcatactgcatcaagctgattcttcagaaaagatgactattgccgcatccgcatctcttaccactattaatcttggagctacaaagaacttgagacaacagattcttgaattgttgggccccatttcaatgaatcatggtgttcactttatggctgccattgcatttgtgtggaatgaaagaagacagaataaaacaaccaccaggaccaaggtcattcctgcagccagtgaagaacagcttttattagtggaattggttcgttcaatcagtgtcatgagagcagaaactgttatccagactgtaaaagaagttttaaagcagccaccagccatagccaaggacaagaaacatctttctttggaagtctgcatgcttcagtttttctatgcttatattcaaagaattccagtgcccaatttagtggatagctgggcgtcactgttgatacttctgaaagactctatacaactgagtcttccagctccagggcagtttcttatacttggggttctgaatgagtttattatgaaaaaccctagtttggaaaataaaaaagaccaaagagaccttcaggatgtaactcacaaaatagtggatgcaattggtgcaattgctggttcttctctggaacagacaacatggctgcgacgaaatcttgaagttaagccttctcccaaaataatggtagatggaaccaatttggaatctgatgttgaagatatgttatcacctgcaatggaaaccgcaaacataactccttctgtatatagtgtccatgcattgacattactctctgaggttttggctcatcttttggatatggttttctatagtgatgaaaaggagcgggttattcctttacttgtaaatattatgcattatgttgtgccctacctcagaaatcacagtgcacataatgcccctagttatcgagcttgtgtccagctgctcagcagtcttagtgggtatcagtacacacggagagcttggaaaaaagaagcttttgacctctttatggatcccagtttctttcagatggatgcctcttgtgttaatcattggagagcaattatggacaatctgatgacacatgataaaacaacatttagagatttgatgactcgtgtagcagtggctcaaagcagttcacttaatctctttgcaaaccgtgatgtggagctagaacagagagctatgcttcttaaaagattagcatttgctatttttagcagtgaaattgaccagtaccagaaatatcttccagatatacaagagagattggttgagagtctccgtttgccacaggtgccaactctccattctcaagtgttcctgtttttcagagtgttacttttaagaatgtctccccaacatcttacctcactctggcctaccatgattacagaacttgtacaagtatttttactgatggagcaggaactcactgctgatgaagatatttcacggacttcagggccctctgtggctggtctggagacaacgtacacaggaggtaatggcttctctacttcatataacagccagcggtggttaaacctctatctctctgcttgcaaatttttggatttggctctcgcattgccctctgaaaaccttcctcagtttcagatgtaccgatgggcctttattccagaagcctcagatgattcaggtttggaagtcagaaggcagggtatacatcaacgagaatttaaaccttacgtggtacgactagcaaaacttcttcggaaaagagcaaagaaaaatccagaggaagacaactcagggagaacattgggttgggagccagggcacttgctgctcaccatctgcaccgtgcgcagtatggagcagctcctgccgttcttcaatgtgctcagtcaagtcttcaacagcaaagtcacaagccgatgtggaggacactcagggagtcctatcctctactcaaatgccttccctaataaggacatgaaactggagaaccacaaaccatgttccagcaaagccaggcaaaaaatagaagagatggtagaaaaagattttctggaagggatgataaaaacttgagcaccattgctggttccatttagcttacatgtaaatgtaattatttaaaacacacacactgctctgcgttgtatagtttttccttttttgtatgtaacagaacacatttcagattgtatttaatttaaatayttgtatataagagcaaatgtctgaatgtggcctgaatcaagtttaaatattgttggctcatactgattatggtgcctaagagagctatatatatacacatgtaaagtccattgtttttattgtcctgagttgtcttaaacctgcaaaatatacactacccattttttttttccattggtttcagacttggttcaattaagattggttggggatttttctcttttccttattaaccatgttctggtatcagaatggtgttccttctccatcagaggctgggaaacgtattataattagtttttctcccacataccttcaccaagagcagtgaagaataactgaaggctggaccatgcatccttaaaagtattgcatgagcatctccacctcagtatggaagagggatggacaaccccctattcatacctctgagttcctgatggcattagtcatatagtaacaaattccaaagcccttaaataaacggaaaacagaccaaattcttctaaataagaactatcccagcttacttgtgagtctgcttctgcatatactcggacgacatcttctgtaccagagggccggacaaaagctcgagaaagcttrtacttcttcaccaggtcattgattgcctcctgtaatcctgggggtgtaactgcttgtctttcagcatyggtagtgctaataactctcctgtctgcaacctaagtgcaagcattt

SEQ ID NO: 6893 - DNA, 7816 bp, Homo sapiens
aggatgaacacagaagagctggagttattgagtgactccaaatacagaaactatgtagcagcaattgacaaagcactaaagaattttgaatactccagtgaatgggcagatttgatatcagcacttggaaaacttaataaggttttacaaaataatgcaaagtaccaagtagtacccaaaaagctgaccataggcaaacgcctagctcaatgtctacatccagcattaccaggtggagttcatcggaaggcgcttgaaacatatgaaattatcttcaaaataattggacctaagcgacttgccaaagatctttttttatatagttctggattatttcctcttcttgcaaatgctgccatgtctgtgaaaccaacattgctcagtttgtatgagatatattatctgcctttgggtaaaacactgaaacctggtctacagggattgcttactggtattcttcctggcttagaagaaggatcagagtactatgagagaacaaatatgttgttggaaaaggttgctgctgctgtggaccagtcagcattctacagtgccctgtggggtagtcttctcaccagtcctgctgtgcgtttacctggaatcacgtatgttcttgcccatttaaacaggaagctttctatggaagatcaactttatataattggcagtgatattgagctaatggcaatggtgggaatcttacaagtgaatggatttggagaagagaacactctaatgcaggatctaaagccttttcgcattttaatcagtttactggacaaacctgagctaggacctgtaattctagaagatgtcctgattgaagtgtttagaacattatattctcaatgcaaagcagagttggatcttcaaactgaaccacccttcagcaaggatcatgctcagttaagcagtaaattaagagaaaataagaaaacagcagagctgattaaaactgctaaccttctctttaattccttcgaaccttattatatgtgggattatgttgcacgctggtttgaagaatgttgtaggaggacactgcatgtgagacttcagattggacctggagatagtaatgactcatctgaattacagctgaccaatttctgcttactggtggattttttgttggacatagtttctttggagacttacattgaaatccagacagaacacttgccccagttgctgctcagaatgatttctgccttgacaagccatctccagacattgcacttatctgaactcacagattctctcagactctgctcaaagatccttagcaaggttcagcctccactgttatctgctagcactggaggtgttttgcagtttccaagtgggcagaacaattcagtcaaagagtgggaagacaaaaaggtatcatcagtttctcatgaaaatcctactgaagtgtttgaagatggagaaaatccaccaagtagtcratcatcagagagtggattcactgagtttatacaatatcaagcagaccgaactgatgatattgacagagaactgagtgagggccagggggcagctgccatcccaattggtagcacatcctctgagacagaaacagcatccactgtgggatctgaagaaaccatcatccagaccccttccgtagtcactcaggggacagcaacccgaagtaggaagacagcccaaaagactgcaatgcagtgctgcttggagtatgtccaacagtttcttaccagacttatcaacctctacatcattcagaataactctttttctcagtctttggctacagaacatcaaggggatcttggtcgagaacaaggagagacttcaaaatgggacagaaattcacaaggagatgtaaaagagaaaaacataagtaaacaaaaaacttctaaagaatacctgtctgccttccttgctgcctgtcagctcttcctagagtgctcaagtttcccagtttacattgctgaggggaaccatacatcagagttacgttctgaaaaattggagactgactgtgagcatgtgcagcctccacagtggctccagactctgatgaatgcttgcagccaagcaagtgatttcagtgttcagagtgttgctatttcactagttatggacctggtgggactgacacagtctgtggccatggtcactggggaaaacatcaacagtgtagagcctgcacaacccttaagtccaaaccagggaagagtagctgtggttattagacctcccctcactcagggcaatctgaggtacatagctgagaagactgaatttttcaagcatgtagctttaacattgtgggaccagttgggagatgggacacctcagcatcaccagaagagtgtggaactattttatcaattacataacttagttccttcttctagcatctgtgaggatgttataagtcagcagttaacccataaagataagaaaataaggatggaagcacatgccaagtttgcagttctttggcatctaacgagagatctccatataaataaatcttcatcttttgtacgttcttttgacaggtcactgttcatcatgttagatagccttaacagtctcgatggttctactagctctgtgggacaagcctggctgaaccaagtcctacaaagacatgatattgcacgagttttggaaccattgctattgctcctgcttcatccaaaaactcagagggtttcagtacagcgtgtacaagcagaacgttattggaataagtctccctgttatccaggagaggagagtgacaagcatttcatgcaaaattttgcctgcagcaatgtgagccaagtacaactcatcacatcaaaaggaaatggtgaaaagccacttaccatggatgaaatagagaactttagtctcactgtgaatccattaagtgacagactttccctcctaagtaccagcagtgagacaattccaatggttgtgtctgattttgatcttccagaccaacagatagaaatacttcagagttctgactcgggatgttcacagtcctctgctggggacaacttgagttacgaagttgatcctgaaaccgtgaatgcccaagaggattctcaaatgcccaaggaaagctccccagatgatgatgttcaacaggtagtatttgacctgatatgtaaagttgtaagtggcctcgaagtggaatctgcatcagttacatctcaattagaaattgaagctatgcccccaaagtgcagtgatatagatccagatgaagagacgattaaaattgaagatgactccattcaacagagtcagaatgctttgctgagtaatgaaagttctcagtttctgtctgtgtctgcagagggaggccatgagtgtgtggcaaatggaatctccaggaatagctcctcaccttgtatttcaggaaccacacacactcttcatgactcttctgttgcttccatagaaaccaaatctagacaaaggagtcacagtagtattcaattcagcttcaaagaaaaattatcagaaaaagtttcggagaaggaaacaatagttaaggagtcaggtaaacaaccaggagcaaaacctaaagtaaaacttgccagaaaaaaggatgatgacaagaaaaaatcttcaaatgaaaaactcaaacaaaccagtgtattcttcagtgatggtctggatttagagaactggtatagctgtggagagggagacatttctgaaattgagagtgacatgggttctccaggatctcgaaaatctcccaatttcaacattcatcctctctatcaacatgtgctcctgtatctccagttgtatgattcatccaggactttgtatgctttctctgccatcaaagccatcttgaaaactaaccctatagcttttgtaaatgccatttcaactactagtgtaaataatgcatatactcctcagttgtctctccttcagaatctattggccagacaccggatttctgttatgggcaaagatttttatagtcacattccagtggactcaaatcataacttccggagttctatgtacatagaaattcttatttctctctgcttatattacatgcgtagccattacccaactcatgtcaaggttactgcacaagatttaataggcaatcgaaacatgcaaatgatgagcatagaaattctgacactactcttcactgagctggcaaaagtaatagaaagctcagcgaagggtttccctagttttatttctgatatgttatctaagtgcaaagttcagaaagtgattcttcattgtttgctgtcatctatctttagtgctcagaaatggcatagtgaaaaaatggcaggtaagaacctggttgctgtggaagaaggtttctcagaggacagccttattaatttctcagaggatgaatttgacaatggcagcacgttgcagtcacaacttcttaaggtgcttcagaggctgattgttctagaacacagagtaatgactattcctgaagagaatgaaacaggttttgattttgttgtatctgacttagaacacatcagtccccatcaacccatgacttctcttcagtatttgcatgctcagccaatcacatgtcaaggcatgttcctctgtgcagtgatacgagctttgcatcagcactgtgcatgtaagatgcacccacaatggattggtttaatcacatctactctgccttacatgggaaaagttctgcagagagtggttgtttctgtgacactacaactgtgcagaaatttagataatctaattcagcagtacaaatacgaaacaggattatctgatagtaggcctctgtggatggcatcaattattccaccagatatgattcttactcttttggaagggattacagccattatccattactgtttgttggatccaactacacagtatcaccaacttttggtcagtgtagaccagaaacacttgtttgaagcacgcagtggaatcctctcaatccttcatatgatcatgtcctctgtgacactgctttggagcatactgcatcaagctgattcttcagaaaagatgactattgccgcatccgcatctcttaccactattaatcttggagctacaaagaacttgagacaacagattcttgaattgttgggccccatttcaatgaatcatggtgttcactttatggctgccattgcatttgtgtggaatgaaagaagacagaataaaacaaccaccaggaccaaggtcattcctgcagccagtgaagaacagcttttattagtggaattggttcgttcaatcagtgtcatgagagcagaaactgttatccagactgtaaaagaagttttaaagcagccaccagccatagccaaggacaagaaacatctttctttggaagtctgcatgcttcagtttttctatgcttatattcaaagggttctgaatgagtttattatgaaaaaccctagtttggaaaataaaaaagaccaaagagaccttcaggatgtaactcacaaaatagtggatgcaattggtgcaattgctggttcttctctggaacagacaacatggctgcgacgaaatcttgaagttaagccttctcccaaaataatggtagatggaaccaatttggaatctgatgttgaaggtattcttgtcaaacatttaggtttattatctgttttggctcatcttttggatatggttttctatagtgatgaaaaggagcgggttattcctttacttgtaaatattatgcattatgttgtgccctacctcagaaatcacagtgcacataatgcccctagttatcgagcttgtgtccagctgctcagcagtcttagtgggtatcagtacacacggagagcttggaaaaaagaagcttttgacctctttatggatcccagtttctttcagatggatgcctcttgtgttaatcattggagagcaattatggacaatctgatgacacatgataaaacaacatttagagatttgatgactcgtgtagcagtggctcaaagcagttcacttaatctctttgcaaaccgtgatgtggagctagaacagagagctatgcttcttaaaagattagcatttgctatttttagcagtgaaattgaccagtaccagaaatatcttccagatatacaaggaattcctgtgagtaaatgggtccagctgctgacagcactgtctcctgcttacaggacttcagggccctctgtggctggtctggagacaacgtacacaggaggtaatggcttctctacttcatataacagccagcggtggttaaacctctatctctctgcttgcaaatttttggatttggctctcgcattgccctctgaaaaccttcctcagtttcagatgtaccgatgggcctttattccagaagcctcagatgattcaggtttggaagtcagaaggcagggtatacatcaacgagaatttaaaccttacgtggtacgactagcaaaacttcttcggaaaagagcaaaggacaaggaggaggactttaagacagtgattttggagggattggagatggccaagcatcagaaaaatccagaggaagacaactcagggagaacattgggttgggagccagggcacttgctgctcaccatctgcaccgtgcgcagtatggagcagctcctgccgttcttcaatgtgctcagtcaagtcttcaacagcaaagtcacaagccgatgtggaggacactcagggagtcctatcctctactcaaatgccttccctaataaggacatgaaactggagaaccacaaaccatgttccagcaaagccaggcaaaaaatagaagagatggtagaaaaagattttctggaagggatgataaaaacttgagcaccattgctggttccatttagcttacatgtaaatgtaattatttaaaacacacacactgctctgcgttgtatagtttttccttttttgtatgtaacagaacacatttcagattgtatttaatttaaatayttgtatataagagcaaatgtctgaatgtggcctgaatcaagtttaaatattgttggctcatactgattatggtgcctaagagagctatatatatacacatgtaaagtccattgtttttattgtcctgagttgtcttaaacctgcaaaatatacactacccattttttttttccattggtttcagacttggttcaattaagattggttggggatttttctcttttccttattaaccatgttctggtatcagaatggtgttccttctccatcagaggctgggaaacgtattataattagtttttctcccacataccttcaccaagagcagtgaagaataactgaaggctggaccatgcatccttaaaagtattgcatgagcatctccacctcagtatggaagagggatggacaaccccctattcatacctctgagttcctgatggcattagtcatataggtaagtcatctaataatctttcttaagactctgcaatggaaaaactggttgtataaagtcttctctgccctctccatttgtatcagcaatggggaatgctgcaaaacatcatcttgctcatgtgatggtratggcaaagatatcacaaggagttggtaataagatttaattttccagtagcctgcatgaattgttccccacataaaactgtacagttagtgactgaattgtatacttaagtcccagtattttacattagtgagactgaaattagaggtaaatttctttaacaagtgtaaggcttacctatttataaagaattattctgttagtgtttaagaaaaacagatctagagacaatccagtaggctgcattgtaaacattatgattataaa

SEQ ID NO: 6894 - DNA, 972 bp, Homo sapiens
atggtgaaggtgaaggctggagtcaacagatttggttgtattggctgcctggtcaccagggctgctttaaactctggttaagtcgatattgtcgccatcaatgaccccttcattgacctcaacaacactgtctacatgttccagtataattccgcccatggcaaattccacggcaccgtcaaggctgagaacgggaagcttgttatcaatggaaatctcatcactattttccaggggcaagatctcaccaaaatcaaatggggcaatgctggcactgagtacatcatggagttcaccagcatcttcaccaccatggagaaggctggggctcacttggagggaggagccaaaacggtcatcatctctgcaccctctgctgatgcccccatgttcgtgatgggtgtgaaccatgagamatatgacaacagctcaagattatcagcaatgcctcctgcaccaccagctgcttaacgcccctggccaaggtcatccatgacaactttggtaccgtggaaggactcatgaccatcgctgccacccagaagactatggatggctcctatgggaaactgtggggtgacggccatggggctctccagaacatcctctctgcctctactggtgctgccaaggctgtgaggaaggtcatccctgagctaaacgggaagctcactggcatggccttccgtgtccccactgccaacatgtcagtggtggacctgacctgccgtctggaaaamcctamcaaatatgatgacaccaagaaggtggtgaagcaggcgtcagaggaccccctcaaaggcatcctgggctactctgagcaccaggtggtctcctccaacttcaacagacacccactcttccaccttcgatgctggggctggcattgccctcaacgaccactttgtcaagctcatttcctggtatgacaatgaatttggctgcagcaacagggtggtggacctctgccca

SEQ ID NO: 6895 - DNA, 2309 bp, Homo sapiens
gcctccccagctcctcccctccaactctccatcccccactgcccggtgccagcgctcggcttcggtggattctcccgggtctgggctcacgtctcctctgcgcgccttgtgctcccctatcccrcagatacgcaggcttctggagaccctgggtggacgccggaggcaagaaagaagaggagacgccgaaccacgccgcggaggcgatgcccgatggccctggaatgaccgcagcctcaggaaagctttaccaattcaggcacccagtcaggtacctttaaaacagggcagaagccttatggattggattcgactgaccaaaagtggaaaggatctaacgggattaaaaggcaggttaattgaagtaactgaagaagaacttaagaaacacaacaaaaaagatgattgttggatatgcataagaggtttcgtttataatgtcagcccttatatggagtatcatcctggtggagaagatgaactaatgagagcagcaggatcagatggtactgaactttttgatcaggttcatcgttgggtcaattatgaatccatgctgaaagaatgcctggttggcagaatggccattaaacctgctgttctgaaagactatcgtgaggaggaaaagaaagtcttaaatggcatgcttcccaagagccaagtgacagatacacttgccaaagaaggtcctagttatccaagctatgattggttccaaacagactctttagtcaccattgccatatatactaaacagaaggatatcaatttagactcaataatagttgatcatcagaatgattcctttagagcagaaacaattattaaggattgtttatatcttatacatattgggctaagccatgaggttcaggaagatttttctgtgcgggttgttgagagtgtgggaaaaatagagattgttctacaaaaaaaagagartacttcttgggactttcttggccatcccctgaagaatcataattcacttattccaaggaaagatacaggtttgtactacagaaagtgccagttaatttccaaggaagatgttactcatgatacgaggcttttctgtttgatgctgccaccaagcactcatcttcaagtgcccattgggcaacatgtttacctcaagctacctattacaggtacagaaatagtaaagccatatacacctgtatctggttccttactctcagagttcaaggaaccagttcttcccaacaataaatacatctactttttgataaaaatctatcccactggactcttcacaccagagcttgatcgtcttcagattggagattttgtttctgtaagcagtcctgagggcaattttaaaatatccaagttccaagaattagaagatctctttttgttggcagctggaacaggcttcacaccaatggttaaaatactgaattatgctttgactgatatacccagtctcaggaaagtgaagctgatgttcttcaataaaacagaagatgatataatttggagaagccaattggagaaattagcatttaaagataaaagactggatgttgaatttgttctctcagcacctatttctgaatggaatggcaaacagggacatatttcaccagctcttctttctgaatttttgaaaagaaatttggacaaatccaaagttctcgtctgcatttgtggaccagtgccatttacagaacaaggagtaagrttgctgcatgatctcaacttttccaaaaatgagatccatagttttacagcataatgaagagctgtcattgtcctttattcaactagtttatctaaatttgtgattgcttagggttttttaagagaacatttttgtacataacaaaaggttaactagaatccagccttcagtttcttaaatgaaatcaaatgttccttcagtacaggtaacttcttggctttcttttgtaccacaacttattttactactgatatttgacctggaaagttaatcatggcaacaaatacatacaggattctttgttatgaatcacaaatttccttgccatttaaattatatcactgttctacaataagcacttgtgttttatgacatgataaagtaaatgatcacttcgatcatgtttcyatgctgtaaaatgtcttattagcaatacagattaaattttaccttgcactgttaactcaggaaatgatcatttatgtccttgttattaatgttaaaacatagaatgttataacttattaagtgatccaaacatttttttgtgtgtgtatggcattgatgcagaatagaataaaattatacttaagttcttttt

SEQ ID NO: 6896 - DNA, 3489 bp, Homo sapiens
cctcctggcctcttcacacggaaattggctgctcgggcgaatgttgtttttctccgcagccatgtgtcgaagggcgattaacattcgctcgacaaaaccctgtcccgggccatttgggagttgcacgcgttcacacccggggctcagcccggtgcgccttcacgcgcagcctttttgtttatscggctagcagggagaggggcggagaggcagcgaacctctcaatgtgcagcaggccgcgagggctatataaagctcgggtctcggacctactggaactggycaagattgcccgcgagctggcagcggccttccgcccagctctgcggcgtcatggagaacgcgggaggcgcagagggtacagagagtggagctgcggcgtgcgcggccaccgacggccctacgcggcgcgcgggcgcggactccgggtaggcttccccgcgctgctctgcgcctcccagcttcccccgtctctccckcctgcgcctccccagctcctcccctccaactctccatcccccactgcccggtgccagcgctcggcttcggtggattctcccgggtctgggctcacgtctcctctgcgcgccttgtgctcccctatcccrcagatacgcaggcttctggagaccctgggtggacgccggaggcaagaaagaagaggagacgccgaaccacgccgcggaggcggtgagtgagccacgcgtctcaggccgcgcctcccacgggtgcagaagatcgaccagggctctcgggacgcagggcctgagagagacatgcgagacaccgggtcctgcctctcgcttaacatcccgcctgccggtggccataaaggtgccgacgcggcggatgtgtcctctggagcgatgggccacaggcacccagccgggagcgaggctgctgagagccctgggkttacattcccagcgggcacgaggaacactgggtcgtgcacgtttccactttctagaaggaggtgggtgataactrgattcacttcctttcctctccagatgcccgatggccctggaatgaccgcagcctcaggaaagctttaccaattcaggcacccagtcaggtgagtgacaggcctcgccgaaggtctcccgctcctccagccccagggaggagccaggggcatcgcgcagcccagctccgcagctggtcctgcagtctctctctctctctctgaaaatctggcttcaaggttacttatcttctcactcatcaaattgaaaaaggtaggggctcacggtcccacgtaaagggactrttgatgaatacatactcagtgaacttgatgaatatattacgaagagggaaaggggatgatatggtaaragagcggtgacatcttgtgctggcaaaacagtttttatttttaaatcctaaagggttcgaatgaaattgacttcgcatcaggcagagtgtgtatgctgcttttgtcttgcaatctggaaggaagaatgggattaacagttacagtcttacaagtttgccgagtaggaaaaaatagaaatgtaatgaaaatcctaaagattattgagaatggttatagaaagggtcaaaagtttatttaacttgcggagctagtttactgttcctagtcacaggaagtcagcctttatctaagattctgtgtcacttttattcaggtgaaatgttaagaattctgcagttttcctgcctccgagagctgttaaatgaagagctggatgatgtttgtaaagtgcccctggtcataaataacacatagaagtcattacatctaatttcctaccgtgtrctagcactggtgaaggacacaggaaaaagtagtcacagcacatggcaagtgttgtaatggaatttagtttggttagttttacaagtatgggcagggcacgaagtgcctaaatctgtcagtggtagggggaagggtcagggaagtgtatattataagttgtggttacctggctgagtcttggaaaagttagtcagatgaatgggaagtgggagcaaaagaaatagcattggaaaagagaagcaggatcatgaaacggtgtggctccttgcgggaactccaaggagtttaggtgtgtgaagttgtggtcattttagcagggtaatcagaggccaaatcttgcacactcttgtacagagttctgtcctgatcctgtatgtagtgttgggaacccatgggctttattccgaaggtagtcttgggggttatatgttaaataggcttagtcagggcatcaaaagtaaaactggaagttctgcaatttttcaggtaagaaataatgatgaaccattgtaagacagtggaagtgagggtgagactgggtgaatctaggaaatacttgaatgacaaaatagattaggctttataacgtattggatatgttaggtgaagaagaggtaaaaggccagaatggctcctaagtttgtggctggtgagcaggtgaatgctgtactaaaagaatgtaaattagggccgaaaacagatttgggaggtgagatcatgagtcaagttttccacttatcatatttaatgtgcctatggggcatccaaagagtgatatcctgtagagaactgcgtacgtaagttaggggcccagagtcaagatcttaagtggaaatacagacttgggagtccatggtaaatgtagggtggggaaatcatgacagtgggccaggtcatcctagtttgtttagagggagggctgatgttctcaatgaaaacctgagggaaggccagcatctaaccagtacacagagaaagagaggtccacaaggagacggagaagaatcagaacaggaagaaactcagaaaagtatgcgggccctgggagaaaaatggcccacagtgagaaattctggacagagtatcataatgactagcattctttgggtttgccagttccagttacgcattaggaaataaattgtttcttatataagaaattcctttcttttctgaagtacggttacaatttaattgttctcttatattttatttttattcatttatatcttgactaatatggtgtgttttattctttttattcagctgtcaactttttgagggtagggaccatgatttattcatctttaaattgtgaattatgttggcacaagggatcactaaaatatttattgaacgactgaataattgatagttacttgtttaagcatcaaaaatataaactttttttatgatttttgctggaaacatttataaactgcattgtttgtttttctgccttttaaagtggagcatactgaacataatgtaatcttccatttgttgggatgactccattgtatggatatatgggctgtttaccctgcactaaaatgactgcactgtacttggtgattcagccttatctctcctctttcttttccttgatgaagaccagaaggcaagattagtatttgtcagatttttgaaattctgaggtaataatacttacatgccagttatttgtataaaacatatataat

SEQ ID NO: 6897 - DNA, 2726 bp, Homo sapiens
gcctccccagctcctcccctccaactctccatcccccactgcccggtgccagcgctcggcttcggtggattctcccgggtctgggctcacgtctcctctgcgcgccttgtgctcccctatcccrcagatacgcaggcttctggagaccctgggtggacgccggaggcaagaaagaagaggagacgccgaaccacgccgcggaggcggtgagtgagccacgcgtctcaggccgcgcctcccacgggtgcagaagatcgaccagggctctcgggacgcagggcctgagagagacatgcgagacaccgggtcctgcctctcgcttaacatcccgcctgccggtggccataaaggtgccgacgcggcggatgtgtcctctggagcgatgggccacaggcacccagccgggagcgaggctgctgagagccctgggkttacattcccagcgggcacgaggaacactgggtcgtgcacgtttccactttctagaaggaggtacctttaaaacagggcagaagccttatggattggattcgactgaccaaaagtggaaaggatctaacgggattaaaaggcaggttaattgaagtaactgaagaagaacttaagaaacacaacaaaaaagatgattgttggatatgcataagaggtttcgtttataatgtcagcccttatatggagtatcatcctggtggagaagatgaactaatgagagcagcaggatcagatggtactgaactttttgatcaggttcatcgttgggtcaattatgaatccatgctgaaagaatgcctggttggcagaatggccattaaacctgctgttctgaaagactatcgtgaggaggaaaagaaagtcttaaatggcatgcttcccaagagccaagtgacagatacacttgccaaagaaggtcctagttatccaagctatgattggttccaaacagactctttagtcaccattgccatatatactaaacagaaggatatcaatttagactcaataatagttgatcatcagaatgattcctttagagcagaaacaattattaaggattgtttatatcttatacatattgggctaagccatgaggttcaggaagatttttctgtgcgggttgttgagagtgtgggaaaaatagagattgttctacaaaaaaaagagartacttcttgggactttcttggccatcccctgaagaatcataattcacttattccaaggaaagatacagggtgggactgtaaagctaattggaaactgtgcatgtgggtgtggcttgtcaacggttatattcactatatggctggaacatttctttgggaaaagtccaatgccaagagtccctagagtgaacaatctcctaccttgtacccagcatttcagaagccatgtggggaagaaggctgggcctagcttctggtatatctgtttgtactacagaaagtgccagttaatttccaaggaagatgttactcatgatacgaggcttttctgtttgatgctgccaccaagcactcatcttcaagtgcccattgggcaacatgtttacctcaagctacctattacaggtacagaaatagtaaagccatatacacctgtatctggttccttactctcagagttcaaggaaccagttcttcccaacaataaatacatctactttttgataaaaatctatcccactggactcttcacaccagagcttgatcgtcttcagattggagattttgtttctgtaagcagtcctgagggcaattttaaaatatccaagttccaagaattagaagatctctttttgttggcagctggaacaggcttcacaccaatggttaaaatactgaattatgctttgactgatatacccagtctcaggaaagtgaagctgatgttcttcaataaaacagaagatgatataatttggagaagccaattggagaaattagcatttaaagataaaagactggatgttgaatttgttctctcagcacctatttctgaatggaatggcaaacagggacatatttcaccagctcttctttctgaatttttgaaaagaaatttggacaaatccaaagttctcgtctgcatttgtggaccagtgccatttacagaacaaggagtaagrttgctgcatgatctcaacttttccaaaaatgagatccatagttttacagcataatgaagagctgtcattgtcctttattcaactagtttatctaaatttgtgattgcttagggttttttaagagaacatttttgtacataacaaaaggttaactagaatccagccttcagtttcttaaatgaaatcaaatgttccttcagtacaggtaacttcttggctttcttttgtaccacaacttattttactactgatatttgacctggaaagttaatcatggcaacaaatacatacaggattctttgttatgaatcacaaatttccttgccatttaaattatatcactgttctacaataagcacttgtgttttatgacatgataaagtaaatgatcacttcgatcatgtttcyatgctgtaaaatgtcttattagcaatacagattaaattttaccttgcactgttaactcaggaaatgatcatttatgtccttgttattaatgttaaaacatagaatgttataacttattaagtgatccaaacatttttttgtgtgtgtatggcattgatgcagaatagaataaaattatacttaagttcttttt

SEQ ID NO: 6898 - DNA, 663 bp, Homo sapiens
scggctagcagggagaggggcggagaggcagcgaacctctcaatgtgcagcaggccgcgagggctatataaagctcgggtctcggacctactggaactggycaagattgcccgcgagctggcagcggccttccgcccagctctgcggcgtcatggagaacgcgggaggcgcagagggtacagagagtggagctgcggcgtgcgcggccaccgacggccctacgcggcgcgcgggcgcggactccggatacgcaggcttctggagaccctgggtggacgccggaggcaagaaagaagaggagacgccgaaccacgccgcggaggcgatgcccgatggccctggaatgaccgcagcctcaggaaagctttaccaattcaggcacccagtcagactattttggccaaaatcaaaatgttatgattacttatatcaagaagcagaagctcttctgaaaaattttccaattcaagccacaatttcattttatgaagattctgatagcgaagatgaaattgaggatctgacctgtgaaaattaatctgattagctacttttgattatatccaaagcttgtggggtttaaatttagtgtacaaatgtatcataattattttaaactaatttatttgtatataaattattaataaaatgaaatattttgta

SEQ ID NO: 6899 - DNA, 2225 bp, Homo sapiens
accccggaagtgggtcgggggcttggcctctgcccggccacagagccggagctggaggtgctgtcccgtctggcggcgatccccgggcagggcccggggccggggtttgaagatgctgaacgtcccttcccagtctttcccggcccccaggtcgcagcagcgtgtcgcctccggggggcgtagcaaggtacctttaaaacagggcagaagccttatggattggattcgactgaccaaaagtggaaaggatctaacgggattaaaaggcaggttaattgaagtaactgaagaagaacttaagaaacacaacaaaaaagatgattgttggatatgcataagaggtttcgtttataatgtcagcccttatatggagtatcatcctggtggagaagatgaactaatgagagcagcaggatcagatggtactgaactttttgatcaggttcatcgttgggtcaattatgaatccatgctgaaagaatgcctggttggcagaatggccattaaacctgctgttctgaaagactatcgtgaggaggaaaagaaagtcttaaatggcatgcttcccaagagccaagtgacagatacacttgccaaagaaggtcctagttatccaagctatgattggttccaaacagactctttagtcaccattgccatatatactaaacagaaggatatcaatttagactcaataatagttgatcatcagaatgattcctttagagcagaaacaattattaaggattgtttatatcttatacatattgggctaagccatgaggttcaggaagatttttctgtgcgggttgttgagagtgtgggaaaaatagagattgttctacaaaaaaaagagartacttcttgggactttcttggccatcccctgaagaatcataattcacttattccaaggaaagatacaggtttgtactacagaaagtgccagttaatttccaaggaagatgttactcatgatacgaggcttttctgtttgatgctgccaccaagcactcatcttcaagtgcccattgggcaacatgtttacctcaagctacctattacaggtacagaaatagtaaagccatatacacctgtatctggttccttactctcagagttcaaggaaccagttcttcccaacaataaatacatctactttttgataaaaatctatcccactggactcttcacaccagagcttgatcgtcttcagattggagattttgtttctgtaagcagtcctgagggcaattttaaaatatccaagttccaagaattagaagatctctttttgttggcagctggaacaggcttcacaccaatggttaaaatactgaattatgctttgactgatatacccagtctcaggaaagtgaagctgatgttcttcaataaaacagaagatgatataatttggagaagccaattggagaaattagcatttaaagataaaagactggatgttgaatttgttctctcagcacctatttctgaatggaatggcaaacagggacatatttcaccagctcttctttctgaatttttgaaaagaaatttggacaaatccaaagttctcgtctgcatttgtggaccagtgccatttacagaacaaggagtaagrttgctgcatgatctcaacttttccaaaaatgagatccatagttttacagcataatgaagagctgtcattgtcctttattcaactagtttatctaaatttgtgattgcttagggttttttaagagaacatttttgtacataacaaaaggttaactagaatccagccttcagtttcttaaatgaaatcaaatgttccttcagtacaggtaacttcttggctttcttttgtaccacaacttattttactactgatatttgacctggaaagttaatcatggcaacaaatacatacaggattctttgttatgaatcacaaatttccttgccatttaaattatatcactgttctacaataagcacttgtgttttatgacatgataaagtaaatgatcacttcgatcatgtttcyatgctgtaaaatgtcttattagcaatacagattaaattttaccttgcactgttaactcaggaaatgatcatttatgtccttgttattaatgttaaaacatagaatgttataacttattaagtgatccaaacatttttttgtgtgtgtatggcattgatgcagaatagaataaaattatacttaagttcttttt

SEQ ID NO: 6900 - DNA, 2421 bp, Homo sapiens
accccggaagtgggtcgggggcttggcctctgcccggccacagagccggagctggaggtgctgtcccgtctggcggcgatccccgggcagggcccggggccggggtttgaagatgctgaacgtcccttcccagtctttcccggcccccaggtcgcagcagcgtgtcgcctccggggggcgtagcaaggtacctttaaaacagggcagaagccttatggattggattcgactgaccaaaagtggaaaggatctaacgggattaaaaggcaggttaattgaagtaactgaagaagaacttaagaaacacaacaaaaaagatgattgttggatatgcataagaggtttcgtttataatgtcagcccttatatggagtatcatcctggtggagaagatgaactaatgagagcagcaggatcagatggtactgaactttttgatcaggttcatcgttgggtcaattatgaatccatgctgaaagaatgcctggttggcagaatggccattaaacctgctgttctgaaagactatcgtgaggaggaaaagaaagtcttaaatggcatgcttcccaagagccaagtgacagatacacttgccaaagaaggtcctagttatccaagctatgattggttccaaacagactctttagtcaccattgccatatatactaaacagaaggatatcaatttagactcaataatagttgatcatcagaatgattcctttagagcagaaacaattattaaggattgtttatatcttatacatattgggctaagccatgaggttcaggaagatttttctgtgcgggttgttgagagtgtgggaaaaatagagattgttctacaaaaaaaagagartacttcttgggactttcttggccatcccctgaagaatcataattcacttattccaaggaaagatacagggtgggactgtaaagctaattggaaactgtgcatgtgggtgtggcttgtcaacggttatattcactatatggctggaacatttctttgggaaaagtccaatgccaagagtccctagagtgaacaatctcctaccttgtacccagcatttcagaagccatgtggggaagaaggctgggcctagcttctggtatatctgtttgtactacagaaagtgccagttaatttccaaggaagatgttactcatgatacgaggcttttctgtttgatgctgccaccaagcactcatcttcaagtgcccattgggcaacatgtttacctcaagctacctattacaggtacagaaatagtaaagccatatacacctgtatctggttccttactctcagagttcaaggaaccagttcttcccaacaataaatacatctactttttgataaaaatctatcccactggactcttcacaccagagcttgatcgtcttcagattggagattttgtttctgtaagcagtcctgagggcaattttaaaatatccaagttccaagaattagaagatctctttttgttggcagctggaacaggcttcacaccaatggttaaaatactgaattatgctttgactgatatacccagtctcaggaaagtgaagctgatgttcttcaataaaacagaagatgatataatttggagaagccaattggagaaattagcatttaaagataaaagactggatgttgaatttgttctctcagcacctatttctgaatggaatggcaaacagggacatatttcaccagctcttctttctgaatttttgaaaagaaatttggacaaatccaaagttctcgtctgcatttgtggaccagtgccatttacagaacaaggagtaaggttgctgcatgatctcaacttttccaaaaatgagatccatagttttacagcataatgaagagctgtcattgtcctttattcaactagtttatctaaatttgtgattgcttagggttttttaagagaacatttttgtacataacaaaaggttaactagaatccagccttcagtttcttaaatgaaatcaaatgttccttcagtacaggtaacttcttggctttcttttgtaccacaacttattttactactgatatttgacctggaaagttaatcatggcaacaaatacatacaggattctttgttatgaatcacaaatttccttgccatttaaattatatcactgttctacaataagcacttgtgttttatgacatgataaagtaaatgatcacttcgatcatgtttcyatgctgtaaaatgtcttattagcaatacagattaaattttaccttgcactgttaactcaggaaatgatcatttatgtccttgttattaatgttaaaacatagaatgttataacttattaagtgatccaaacatttttttgtgtgtgtatggcattgatgcagaatagaataaaattatacttaagttcttttr

SEQ ID NO: 6901 - DNA, 529 bp, Homo sapiens
atggaacaaggagacacgggttcagcctctgggcaacttctcggacagttgcgccctgtgtgctgctgggctagcggcggcggctgcccagtcggtgtaagccttttccgcgcgcccgctggccggcggggagcctgtgagcctgggctccctgcggggcaagrgactacttatcgagaatgtggcgtccctcggaggcaccacgtctgggcatcaggagaacgmcaagaacgaagagattctgaattccctcaagtacgtccaacctggtggtgggttcgagcccagcttcatgctcttggagaagtgcgaggtgaacgcccccagsgacgacgccactgagctcatgaccgaccccaagctcatcacctggtctccggtgtgtcgcaacgatgttgcctggaacttctttgagaagttcctggtgggccctgacggtgtgcctgtatgcaggtatagctgccgcttccagaccattgacatcgagcctgacatcgaagccctgctgtctcaagggcycagatgtgcc

SEQ ID NO: 6902 - DNA, 1177 bp, Homo sapiens
gcgcacgcgcatggaacgcagcgaaggactatggcaggggagaacytcgctacgccgttccacgggcacgtgggccgcggcgccttcagcgacgtgtacgagcccgcggaggacacgtttctgcttttgracgcgctsgaggcagcggctgccgaactggcaggagtggaaatatgcctggaagtagggtcagggtctggtgtagtatctkcattcctagcctctatgataggccctcaggctttgtacatgtgcactgatatcaaccctgaggcagcagcttgtaccctagagacagcacgctgtaacaaagttcacattcaaccagttattacagatttggtaggaagtcacggaatagaggcagcttgggctggtggcaraaatggtcgggaagtcatggacaggttttttcccctggttcyagatctcctttcaccaaraggattattctatttagttaccattaaagaaaacaacccagaagaaattttgaaaataatgaagacaaaaggtctgcaaggaaccactgcactttccagacaagcaggccaagaaactctttcagtcctcaagttcaccaagtcttagcatacagtgtgtgcccagaactactggaaactgaatgcatttagcatattttgaaactgaagtcattcattagatggatttacatcactggcttccctggttctcaagcctttggattcagactgaattataccacaggccttcctgggtctccagcttatagatgrcagatcatgggacctcttagcctccataatcatgtaagccactttcttgtagtactggtaaaagatatattaraccaatctataaaacagmtagctatgaaagagaarggtgacaggcacaagcctaggcaaatagagaagggttcctggagagcctctgacttgccyaggtcattgtgcacacgtggcttgcctgaatgaacatgcccactgtgaaagattccatttctcaacacatgtgcagtaagggaaataaatcaatgtggctcaractaascgcccacacatggggtggagccacraggagtttgctccttatgcaggggagaagccgtgcctcttcagctcgtgtgtggtggcctggcattcaatttgtgaggtgtaaaacctgcatgaaggacccctctttttgtggagar

SEQ ID NO: 6903 - DNA, 911 bp, Homo sapiens
gcgcacgcgcatggaacgcagcgaaggactatggcaggggagaacytcgctacgccgttccacgggcacgtgggccgcggcgccttcagcgacgtgtacgagcccgcggaggacacgtttctgcttttgracgcgctsgaggcagcggctgccgaactggcaggagtggaaatatgcctggaagtagggtcagggtctggtgtagtatctkcattcctagcctctatgataggccctcaggctttgtacatgtgcactgatatcaaccctgaggcagcagcttgtaccctagagacagcacgctgtaacaaagttcacattcaaccagttattacagatttggtcaaaggcttgctaccaagattgaccgaaaaagttgatcttctggtgtttaatcccccctatgtagtgactccacctcaagaggtaggaagtcacggaatagaggcagcttgggctggtggcaraaatggtcgggaagtcatggacaggttttttcccctggttcyagatctcctttcaccaaraggattattctatttagttaccattaaagaaaacaacccagaagaaattttgaaaataatgaagacaaaaggtctgcaaggaaccactgcactttccagacaagcaggccaagaaactctttcagtcctcaagttcaccaagtcttagcatacagtgtgtgcccagaactactggaaactgaatgcatttagcatattttgaaactgaagtcattcattaggtaacaaggaattttatcagaaatttgtcattaaaaaaaggtagaaaggtggaacattccctttcagtcaggcctatagaattatttgcacaagtacaagtaaatatgtgtattatatttatagtttgcattttaaatataaaaattatgtatgaaatattta

SEQ ID NO: 6904 - DNA, 1261 bp, Homo sapiens
gcgcacgcgcatggaacgcagcgaaggactatggcaggggagaacytcgctacgccgttccacgggcacgtgggccgcggcgccttcagcgacgtgtacgagcccgcggaggacacgtttctgcttttgracgcgctsgaggcagcggctgccgaactggcaggagtggaaatatgcctggaagtagggtcagggtctggtgtagtatctkcattcctagcctctatgataggccctcaggctttgtacatgtgcactgatatcaaccctgaggcagcagcttgtaccctagagacagcacgctgtaacaaagttcacattcaaccagttattacagatttggtcaaaggcttgctaccaagattgaccgaaaaagttgatcttctggtgtttaatcccccctatgtagtgactccacctcaagaggtaggaagtcacggaatagaggcagcttgggctggtggcaraaatggtcgggaagtcatggacaggttttttcccctggttcyagatctcctttcaccaaraggattattctatttagttaccattaaagaaaacaacccagaagaaattttgaaaataatgaagacaaaaggtctgcaaggaaccactgcactttccagacaagcaggccaagaaactctttcagtcctcaagttcaccaagtcttagcatacagtgtgtgcccagaactactggaaactgaatgcatttagcatattttgaaactgaagtcattcattagatggatttacatcactggcttccctggttctcaagcctttggattcagactgaattataccacaggccttcctgggtctccagcttatagatgrcagatcatgggacctcttagcctccataatcatgtaagccactttcttgtagtactggtaaaagatatattaraccaatctataaaacagmtagctatgaaagagaarggtgacaggcacaagcctaggcaaatagagaagggttcctggagagcctctgacttgccyaggtcattgtgcacacgtggcttgcctgaatgaacatgcccactgtgaaagattccatttctcaacacatgtgcagtaagggaaataaatcaatgtggctcaractaascgcccacacatggggtggagccacraggagtttgctccttatgcaggggagaagccgtgcctcttcagctcgtgtgtggtggcctggcattcaatttgtgaggtgtaaaacctgcatgaaggacccctctttttgtggagar

SEQ ID NO: 6905 - DNA, 3861 bp, Homo sapiens
cggtcccggtgggccgacttccggcgagcgggcaagcgggaaccaggtggccacccggtgtcggtttcattttcctttggaatttctgctttacagacagaacaatggcagcccgagtacttataattggcagtggaggaagggaacatacgctggcctggaaayttgcacagtctcatcatgtcaaacaagtgttggttgccccaggaaacgcaggcactgcctgctctgaaaagatttcaaataccgccatctcaatcagtgaccacactgcccttgctcaattctgcaaagagaagaaaattgaatttgtagttgttggaccagaagcacctctggctgctgggattgttgggaacctgaggtctgcaggagtgcaatgctttggcccaacagcagaagcggctcagttagagtccagcaaaaggtttgccaaagagtttatggacagacatggaatcccaaccgcacaatggaaggctttcaccaaacctgaagaagcctgcagcttcattttgagtgcagacttccctgctttggttgtgaaggccagtggtcttgcagctggaaaaggggtgattgttgsaaagagcaaagaagaggcctgcaaagctgtacaagagatcatgcagsagaaagcctttggggcagctggagaaacaattgtcattgaagaacttcttgacggagaagaggtgtcgtgtctgtgtttcactgatggcaagactgtggcccccatgcccccagcacaggaccataagcgattactggagggagatggtggccctaacacagggggaatgggagcctattgtccagcccctcaggtttctaatgatctattactaaaaattaaagatactgttcttcagaggacagtggatggcatgcagcaagagggtactccatatacaggtattctctatgctggaataatgctgaccaagaatggcccaaaagttctagagtttaattgccgttttggtgatccagagtgccaagtaatcctcccacttcttaaaagtgatctttatgaagtgattcagtccaccttagatggactgctctgcacatctctgcctgtttggctagaaaaccacaccgccctaactgttgtcatggcaagtaaaggttatcctggagactacaccaagggtgtagagataacagggtttcctgaggctcaagctctaggactggaggtgttccatgcaggcactgccctcaaaaatggcaaagtagtaactcatgggggtagagttcttgcagtcacagccatccgggaaaatctcatatcagcccttgaggaagccaagaaaggactagctgctataaagtttgagggagcaatttataggaaagacrtcggctttcgtgccatagctttcctccagcagcccaggagtttgacttacaaggaatctggagtagatatcgcagctggaaatatgctggtcaagaaaattcagcctttagcaaaagccacttccagatcaggctgtaaagttgatcttggaggttttgctggtctttttgatttaaaagcagctggtttcaaagatccccttctggcctctggaacagatggcgttggaactaaactaaagattgcccagctatgcaataaacatgrtaccattggtcaagatttggtagcaatgtgtgttaatgatattctggcacaaggagcagagcccctcttcttccttgattacttttcctgtggaaaacttgacctcagtgtaactgaagctgttgttgctggaattgctaaagcttgtggaaaagctggatgtgctctccttggaggtgaaacagcagaaatgcctgacatgtatccccctggagagtatgacctagctgggtttgccgttggtgccatggagcgagatcagaaactccctcacctggaaagaatcactgagggtgatgttgttgttggaatagcttcatctggtcttcatagcaatggatttagccttgtgaggaaaatcgtggyaaaatcttccctccagtactcctctscagcacctgatggttgtggtgaccagactttaggggacttacttctcacgcctaccagaatctacagccattcactgttacctgtcctacgttcaggacatgtcaaagcctttgcccatattactggtggaggattactagagaacatccccagagtcctccctgagaaacttggggtagatttagatgcccagacctggaggatccccagggtcttctcatggttgcagcaggaaggacacctctctgaggaagagatggccagaacatttaactgtggggttggcgctgtccttgtggtatcaaaggagcagacagagcagattctgagggrtatccagcagcacaaggaagaagcctgggtgattggcagtgtggttgcacgagctgaaggttccccacgtgtgaaagtcaagaatctgattgaaagcatgcaaataaatgggtcagtgttgaagaatggctccctgacaaatcatttctcttttgaaaaaaaaaaggccagagtggctgtcttaatatctggaacaggatcgaacctgcaagcacttatagacagtactcgggaaccaaatagctctgcacaaattgatattgttatctccaacaaagccgcagtagctgggttagataaagcggaaagagctggtattcccactagagtaattaatcataaactgtayaaaaatcgtgtagaatttgacagtgcaattgacctagtccttgaagagttctccatagacatagtctgtcttgcaggattcatgagaattctttctggcccctttgtccaaaagtggaatggaaaaatgctcaatatccacccatccttgctcccttcttttaagggttcaaatgcccatgagcaagccctggaaaccggagtcacagttactgggtgcactgtacactttgtagctgaagatgtggatgctggacagattattttgcaagawgctgttcccgtgaagaggggtgatactgtcgcaactctttctgaaagagtaaaattagcagaacataaaatatttcctgcagcccttcagctggtggccagtggaactgtacagcttggagaaaatggcaagatctgttgggttaaagaggaatgaagccttttaattcagaaatggggccagtttagaaagaattatttgctgtttgcatggtggttttttatcatggacttggcccaaaagaaaaactgctaaaagacaaaaaagacctcacccttacttcatctatttttttaataaatagagactcactaaaaacaagactagttagtgcagcatatctgagacatacagttttcttggtcttttttatgctctttttctaaccgtcaccccctctttttttttttrgtattgcctgacaacatgatgaatcacctccatgtttataagttttatgttttcagctgggcacagtggctcacgcctgtaatcccagcactttgggaggccgaggcaggcggatcatgaggtcaggagatcgagactatcctggctaacacagtgaaatcccatctctactaaaaatacaaaaaatagttagctgggtgtggtggtacgcacctgtaatcccagctactcgggtggctgaggcaggagaatcgcttgaacccaggaagtggaggttgcagtgagccaagatcatgccactgcactccagcctgggcaacagagcgagacttgtctcaaaaaataataatgggctgggtgcggtggctcacacctgtaatcccagtactttgggaggctgaggcgggcagatcacgaggtcaggagatcgagaccatcctggctaacacggtgaaaccccgtctctact

SEQ ID NO: 6906 - DNA, 4038 bp, Homo sapiens
agccgyctctcttgaggcgaccgtgtccgcataagttgtcagtccccagcagtgtttgggagccttaacaggcttgctaagtgcctgagattaaaggcgaagaggaagaagagcaagaagggcaacccggtgtttaacacacggctttcaggcgctctcaggtggcgccaagttcagtttcgacagggatatgcatccgggagagaatttttcagcccccgcccccactggcatgtgagaggaggarctcgctgttgccctgtgtcttccccaacagaacaatggcagcccgagtacttataattggcagtggaggaagggaacatacgctggcctggaaayttgcacagtctcatcatgtcaaacaagtgttggttgccccaggaaacgcaggcactgcctgctctgaaaagatttcaaataccgccatctcaatcagtgaccacactgcccttgctcaattctgcaaagagaagaaaattgaatttgtagttgttggaccagaagcacctctggctgctgggattgttgggaacctgaggtctgcaggagtgcaatgctttggcccaacagcagaagcggctcagttagagtccagcaaaaggtttgccaaagagtttatggacagacatggaatcccaaccgcacaatggaaggctttcaccaaacctgaagaagcctgcagcttcattttgagtgcagacttccctgctttggttgtgaaggccagtggtcttgcagctggaaaaggggtgattgttgsaaagagcaaagaagaggcctgcaaagctgtacaagagatcatgcagsagaaagcctttggggcagctggagaaacaattgtcattgaagaacttcttgacggagaagaggtgtcgtgtctgtgtttcactgatggcaagactgtggcccccatgcccccagcacaggaccataagcgattactggagggagatggtggccctaacacagggggaatgggagcctattgtccagcccctcaggtttctaatgatctattactaaaaattaaagatactgttcttcagaggacagtggatggcatgcagcaagagggtactccatatacaggtattctctatgctggaataatgctgaccaagaatggcccaaaagttctagagtttaattgccgttttggtgatccagagtgccaagtaatcctcccacttcttaaaagtgatctttatgaagtgattcagtccaccttagatggactgctctgcacatctctgcctgtttggctagaaaaccacaccgccctaactgttgtcatggcaagtaaaggttatcctggagactacaccaagggtgtagagataacagggtttcctgaggctcaagctctaggactggaggtgttccatgcaggcactgccctcaaaaatggcaaagtagtaactcatgggggtagagttcttgcagtcacagccatccgggaaaatctcatatcagcccttgaggaagccaagaaaggactagctgctataaagtttgagggagcaatttataggaaagacrtcggctttcgtgccatagctttcctccagcagcccaggagtttgacttacaaggaatctggagtagatatcgcagctggaaatatgctggtcaagaaaattcagcctttagcaaaagccacttccagatcaggctgtaaagttgatcttggaggttttgctggtctttttgatttaaaagcagctggtttcaaagatccccttctggcctctggaacagatggcgttggaactaaactaaagattgcccagctatgcaataaacatgrtaccattggtcaagatttggtagcaatgtgtgttaatgatattctggcacaaggagcagagcccctcttcttccttgattacttttcctgtggaaaacttgacctcagtgtaactgaagctgttgttgctggaattgctaaagcttgtggaaaagctggatgtgctctccttggaggtgaaacagcagaaatgcctgacatgtatccccctggagagtatgacctagctgggtttgccgttggtgccatggagcgagatcagaaactccctcacctggaaagaatcactgagggtgatgttgttgttggaatagcttcatctggtcttcatagcaatggatttagccttgtgaggaaaatcgtggyaaaatcttccctccagtactcctctscagcacctgatggttgtggtgaccagactttaggggacttacttctcacgcctaccagaatctacagccattcactgttacctgtcctacgttcaggacatgtcaaagcctttgcccatattactggtggaggattactagagaacatccccagagtcctccctgagaaacttggggtagatttagatgcccagacctggaggatccccagggtcttctcatggttgcagcaggaaggacacctctctgaggaagagatggccagaacatttaactgtggggttggcgctgtccttgtggtatcaaaggagcagacagagcagattctgagggrtatccagcagcacaaggaagaagcctgggtgattggcagtgtggttgcacgagctgaaggttccccacgtgtgaaagtcaagaatctgattgaaagcatgcaaataaatgggtcagtgttgaagaatggctccctgacaaatcatttctcttttgaaaaaaaaaaggccagagtggctgtcttaatatctggaacaggatcgaacctgcaagcacttatagacagtactcgggaaccaaatagctctgcacaaattgatattgttatctccaacaaagccgcagtagctgggttagataaagcggaaagagctggtattcccactagagtaattaatcataaactgtayaaaaatcgtgtagaatttgacagtgcaattgacctagtccttgaagagttctccatagacatagtctgtcttgcaggattcatgagaattctttctggcccctttgtccaaaagtggaatggaaaaatgctcaatatccacccatccttgctcccttcttttaagggttcaaatgcccatgagcaagccctggaaaccggagtcacagttactgggtgcactgtacactttgtagctgaagatgtggatgctggacagattattttgcaagawgctgttcccgtgaagaggggtgatactgtcgcaactctttctgaaagagtaaaattagcagaacataaaatatttcctgcagcccttcagctggtggccagtggaactgtacagcttggagaaaatggcaagatctgttgggttaaagaggaatgaagccttttaattcagaaatggggccagtttagaaagaattatttgctgtttgcatggtggttttttatcatggacttggcccaaaagaaaaactgctaaaagacaaaaaagacctcacccttacttcatctatttttttaataaatagagactcactaaaaacaagactagttagtgcagcatatctgagacatacagttttcttggtcttttttatgctctttttctaaccgtcaccccctctttttttttttrgtattgcctgacaacatgatgaatcacctccatgtttataagttttatgttttcagctgggcacagtggctcacgcctgtaatcccagcactttgggaggccgaggcaggcggatcatgaggtcaggagatcgagactatcctggctaacacagtgaaatcccatctctactaaaaatacaaaaaatagttagctgggtgtggtggtacgcacctgtaatcccagctactcgggtggctgaggcaggagaatcgcttgaacccaggaagtggaggttgcagtgagccaagatcatgccactgcactccagcctgggcaacagagcgagacttgtctcaaaaaataataatgggctgggtgcggtggctcacacctgtaatcccagtactttgggaggctgaggcgggcagatcacgaggtcaggagatcgagaccatcctggctaacacggtgaaaccccgtctctact

SEQ ID NO: 6907 - DNA, 2226 bp, Homo sapiens
ggagccgyctctcttgaggcgaccgtgtccgcataagttgtcagtccccagcagtgtttgggagccttaacaggcttgctaagtgcctgagattaaaggcgaagaggaagaagagcaagaagggcaacccggtgtttaacacacggctttcaggcgctctcagacagaacaatggcagcccgagtacttataattggcagtggaggaagggaacatacgctggcctggaaayttgcacagtctcatcatgtcaaacaagtgttggttgccccaggaaacgcaggcactgcctgctctgaaaagatttcaaataccgccatctcaatcagtgaccacactgcccttgctcaattctgcaaagagaagaaaattgaatttgtagttgttggaccagaagcacctctggctgctgggattgttgggaacctgaggtctgcaggagtgcaatgctttggcccaacagcagaagcggctcagttagagtccagcaaaaggtttgccaaagagtttatggacagacatggaatcccaaccgcacaatggaaggctttcaccaaacctgaagaagcctgcagcttcattttgagtgcagacttccctgctttggttgtgaaggccagtggtcttgcagctggaaaaggggtgattgttgsaaagagcaaagaagaggcctgcaaagctgtacaagagatcatgcagsagaaagcctttggggcagctggagaaacaattgtcattgaagaacttcttgacggagaagaggtgtcgtgtctgtgtttcactgatggcaagactgtggcccccatgcccccagcacaggaccataagcgattactggagggagatggtggccctaacacagggggaatgggagcctattgtccagcccctcaggtttctaatgatctattactaaaaattaaagatactgttcttcagaggacagtggatggcatgcagcaagagggtactccatatacaggtattctctatgctggaataatgctgaccaagaatggcccaaaagttctagagtttaattgccgttttggtgatccagagtgccaagtaatcctcccacttcttaaaagtgatctttatgaagtgattcagtccaccttagatggactgctctgcacatctctgcctgtttggctagaaaaccacaccgccctaactgttgtcatggcaagtaaaggttatcctggagactacaccaagggtgtagagataacagggtttcctgaggctcaagctctaggactggaggtgttccatgcaggcactgccctcaaaaatggcaaagtagtaactcatgggggtagagttcttgcagtcacagccatccgggaaaatctcatatcagcccttgaggaagccaagaaaggactagctgctataaagtttgagggagcaatttataggaaagacrtcggctttcgtgccatagctttcctccagcagcccaggtaaaactctaagcaagttagctgtagtgccatttcagaaactggcctaaatggctatgtagaacatttcattaaccctataagtcattcagtattcttttctctctgtgggastgatacagtcttggtttgtattttgtttgaatcaaaactggttatagcaatactcaaatggaaaaaacttcatgatagcgtaagtttggaaagtttagcaaaatcacagtggtactgatttttwtttgttttctattttttttwttttatatttttaatttttttaacagggtcttcctctctcgcccaagttctcatgcctcagcctcccaaatagctgggactacaggcacaggccaccacacctggctaatttttttgtattttttgtggagatggggtttcaccatgttgccaaggccagtctgaaatcctgggctcaagtgatcctcctgctttggcctcccaaaatgctgggattataggcatgagccgctgcacttggcctgatactgatttttattccttgcgttatcacatagtgttgtatttgaaacatagttcatggttttatcaaagaactgaagatgagaatactggtcatctaactttgtaatttgatttgattatactgtaaagtttgacagtctcattttawcactgcgtttgtatctattactaaaatgtattttttgacctcttactgattcattgttggtatgtacaaactgttgacttgtaaaatcaataaagtcttagttgg

SEQ ID NO: 6908 - DNA, 1847 bp, Homo sapiens
tggcggacaaccgggcctacgagtagctaaacggcaggggggacccaaacaggggagaagggtgaacatcttaactcggttctgaaacagggagtcttgggttacctcggaaaaggcgaagttcctcgagggaaaaggaagggagcggctgggggggcggttggggggggcccggaaaatggatcccaggcccaggcggggccctagcggggcctgagccggggaacgactgcgtctccgaagaaaggtgccaaagaaggctaggtttcattttcctttggaatttctgctttacagacagaacaatggcagcccgagtacttataattggcagtggaggaagggaacatacgctggcctggaaayttgcacagtctcatcatgtcaaacaagtgttggttgccccaggaaacgcaggcactgcctgctctgaaaagatttcaaataccgccatctcaatcagtgaccacactgcccttgctcaattctgcaaagagaagaaaattgaatttgtagttgttggaccagaagcacctctggctgctgggattgttgggaacctgaggtctgcaggagtgcaatgctttggcccaacagcagaagcggctcagttagagtccagcaaaaggtttgccaaagagtttatggacagacatggaatcccaaccgcacaatggaaggctttcaccaaacctgaagaagcctgcagcttcattttgagtgcagacttccctgctttggttgtgaaggccagtggtcttgcagctggaaaaggggtgattgttgsaaagagcaaagaagaggcctgcaaagctgtacaagagatcatgcagsagaaagcctttggggcagctggagaaacaattgtcattgaagaacttcttgacggagaagaggtgtcgtgtctgtgtttcactgatggcaagactgtggcccccatgcccccagcacaggaccataagcgattactggagggagatggtggccctaacacagggggaatgggagcctattgtccagcccctcaggtttctaatgatctattactaaaaattaaagatactgttcttcagaggacagtggatggcatgcagcaagagggtactccatatacaggtattctctatgctggaataatgctgaccaagaatggcccaaaagttctagagtttaattgccgttttggtgatccagagtgccaagtaatcctcccacttcttaaaagtgatctttatgaagtgattcagtccaccttagatggactgctctgcacatctctgcctgtttggctagaaaaccacaccgccctaactgttgtcatggcaagtaaaggttatcctggagactacaccaagggtgtagagataacagggtttcctgaggctcaagctctaggactggaggtgttccatgcaggcactgccctcaaaaatggcaaagtagtaactcatgggggtagagttcttgcagtcacagccatccgggaaaatctcatatcagcccttgaggaagccaagaaaggactagctgctataaagtttgagggagcaatttataggaaagacrtcggctttcgtgccatagctttcctccagcagcccaggagtttgacttacaaggaatctggagtagatatcgcagctggaaatatgctggtcaagaaaattcagcctttagcaaaagccacttccagatcaggctgtaaagttgatcttggaggttttgctggtctttttgatttaaaagcagctggtttcaaagatccccttctggcctctggaacagatggcgttggaactaaactaaaggtgttaagagcagctaatcaaatggataagatacaattt

SEQ ID NO: 6909 - DNA, 2159 bp, Homo sapiens
cggtcccggtgggccgacttccggcgagcgggcaagcgggaaccaggtggccacccggtgtcggtttcattttcctttggaatttctgctttacagacagaacaatggcagcccgagtacttataattggcagtggaggaagggaacatacgctggcctggaaayttgcacagtctcatcatgtcaaacaagtgttggttgccccaggaaacgcaggcactgcctgctctgaaaagatttcaaataccgccatctcaatcagtgaccacactgcccttgctcaattctgcaaagagaagaaaattgaatttgtagttgttggaccagaagcacctctggctgctgggattgttgggaacctgaggtctgcaggagtgcaatgctttggcccaacagcagaagcggctcagttagagtccagcaaaaggtttgccaaagagtttatggacagacatggaatcccaaccgcacaatggaaggctttcaccaaacctgaagaagcctgcagcttcattttgagtgcagacttccctgctttggttgtgaaggccagtggtcttgcagctggaaaaggggtgattgttgsaaagagcaaagaagaggcctgcaaagctgtacaagagatcatgcagsagaaagcctttggggcagctggagaaacaattgtcattgaagaacttcttgacggagaagaggtgtcgtgtctgtgtttcactgatggcaagactgtggcccccatgcccccagcacaggaccataagcgattactggagggagatggtggccctaacacagggggaatgggagcctattgtccagcccctcaggtttctaatgatctattactaaaaattaaagatactgttcttcagaggacagtggatggcatgcagcaagagggtactccatatacaggtattctctatgctggaataatgctgaccaagaatggcccaaaagttctagagtttaattgccgttttggtgatccagagtgccaagtaatcctcccacttcttaaaagtgatctttatgaagtgattcagtccaccttagatggactgctctgcacatctctgcctgtttggctagaaaaccacaccgccctaactgttgtcatggcaagtaaaggttatcctggagactacaccaagggtgtagagataacagggtttcctgaggctcaagctctaggactggaggtgttccatgcaggcactgccctcaaaaatggcaaagtagtaactcatgggggtagagttcttgcagtcacagccatccgggaaaatctcatatcagcccttgaggaagccaagaaaggactagctgctataaagtttgagggagcaatttataggaaagacrtcggctttcgtgccatagctttcctccagcagcccaggtaaaactctaagcaagttagctgtagtgccatttcagaaactggcctaaatggctatgtagaacatttcattaaccctataagtcattcagtattcttttctctctgtgggastgatacagtcttggtttgtattttgtttgaatcaaaactggttatagcaatactcaaatggaaaaaacttcatgatagcgtaagtttggaaagtttagcaaaatcacagtggtactgatttttwtttgttttctattttttttwttttatatttttaatttttttaacagggtcttcctctctcgcccaagttctcatgcctcagcctcccaaatagctgggactacaggcacaggccaccacacctggctaatttttttgtattttttgtggagatggggtttcaccatgttgccaaggccagtctgaaatcctgggctcaagtgatcctcctgctttggcctcccaaaatgctgggattataggcatgagccgctgcacttggcctgatactgatttttattccttgcgttatcacatagtgttgtatttgaaacatagttcatggttttatcaaagaactgaagatgagaatactggtcatctaactttgtaatttgatttgattatactgtaaagtttgacagtctcattttawcactgcgtttgtatctattactaaaatgtattttttgacctcttactgattcattgttggtatgtacaaactgttgacttgtaaaatcaataaagtcttagttgg

SEQ ID NO: 6910 - DNA, 4062 bp, Homo sapiens
tggcggacaaccgggcctacgagtagctaaacggcaggggggacccaaacaggggagaagggtgaacatcttaactcggttctgaaacagggagtcttgggttacctcggaaaaggcgaagttcctcgagggaaaaggaagggagcggctgggggggcggttggggggggcccggaaaatggatcccaggcccaggcggggccctagcggggcctgagccggggaacgactgcgtctccgaagaaaggtgccaaagaaggctaggtttcattttcctttggaatttctgctttacagacagaacaatggcagcccgagtacttataattggcagtggaggaagggaacatacgctggcctggaaayttgcacagtctcatcatgtcaaacaagtgttggttgccccaggaaacgcaggcactgcctgctctgaaaagatttcaaataccgccatctcaatcagtgaccacactgcccttgctcaattctgcaaagagaagaaaattgaatttgtagttgttggaccagaagcacctctggctgctgggattgttgggaacctgaggtctgcaggagtgcaatgctttggcccaacagcagaagcggctcagttagagtccagcaaaaggtttgccaaagagtttatggacagacatggaatcccaaccgcacaatggaaggctttcaccaaacctgaagaagcctgcagcttcattttgagtgcagacttccctgctttggttgtgaaggccagtggtcttgcagctggaaaaggggtgattgttgsaaagagcaaagaagaggcctgcaaagctgtacaagagatcatgcagsagaaagcctttggggcagctggagaaacaattgtcattgaagaacttcttgacggagaagaggtgtcgtgtctgtgtttcactgatggcaagactgtggcccccatgcccccagcacaggaccataagcgattactggagggagatggtggccctaacacagggggaatgggagcctattgtccagcccctcaggtttctaatgatctattactaaaaattaaagatactgttcttcagaggacagtggatggcatgcagcaagagggtactccatatacaggtattctctatgctggaataatgctgaccaagaatggcccaaaagttctagagtttaattgccgttttggtgatccagagtgccaagtaatcctcccacttcttaaaagtgatctttatgaagtgattcagtccaccttagatggactgctctgcacatctctgcctgtttggctagaaaaccacaccgccctaactgttgtcatggcaagtaaaggttatcctggagactacaccaagggtgtagagataacagggtttcctgaggctcaagctctaggactggaggtgttccatgcaggcactgccctcaaaaatggcaaagtagtaactcatgggggtagagttcttgcagtcacagccatccgggaaaatctcatatcagcccttgaggaagccaagaaaggactagctgctataaagtttgagggagcaatttataggaaagacrtcggctttcgtgccatagctttcctccagcagcccaggagtttgacttacaaggaatctggagtagatatcgcagctggaaatatgctggtcaagaaaattcagcctttagcaaaagccacttccagatcaggctgtaaagttgatcttggaggttttgctggtctttttgatttaaaagcagctggtttcaaagatccccttctggcctctggaacagatggcgttggaactaaactaaagattgcccagctatgcaataaacatgrtaccattggtcaagatttggtagcaatgtgtgttaatgatattctggcacaaggagcagagcccctcttcttccttgattacttttcctgtggaaaacttgacctcagtgtaactgaagctgttgttgctggaattgctaaagcttgtggaaaagctggatgtgctctccttggaggtgaaacagcagaaatgcctgacatgtatccccctggagagtatgacctagctgggtttgccgttggtgccatggagcgagatcagaaactccctcacctggaaagaatcactgagggtgatgttgttgttggaatagcttcatctggtcttcatagcaatggatttagccttgtgaggaaaatcgtggyaaaatcttccctccagtactcctctscagcacctgatggttgtggtgaccagactttaggggacttacttctcacgcctaccagaatctacagccattcactgttacctgtcctacgttcaggacatgtcaaagcctttgcccatattactggtggaggattactagagaacatccccagagtcctccctgagaaacttggggtagatttagatgcccagacctggaggatccccagggtcttctcatggttgcagcaggaaggacacctctctgaggaagagatggccagaacatttaactgtggggttggcgctgtccttgtggtatcaaaggagcagacagagcagattctgagggrtatccagcagcacaaggaagaagcctgggtgattggcagtgtggttgcacgagctgaaggttccccacgtgtgaaagtcaagaatctgattgaaagcatgcaaataaatgggtcagtgttgaagaatggctccctgacaaatcatttctcttttgaaaaaaaaaaggccagagtggctgtcttaatatctggaacaggatcgaacctgcaagcacttatagacagtactcgggaaccaaatagctctgcacaaattgatattgttatctccaacaaagccgcagtagctgggttagataaagcggaaagagctggtattcccactagagtaattaatcataaactgtayaaaaatcgtgtagaatttgacagtgcaattgacctagtccttgaagagttctccatagacatagtctgtcttgcaggattcatgagaattctttctggcccctttgtccaaaagtggaatggaaaaatgctcaatatccacccatccttgctcccttcttttaagggttcaaatgcccatgagcaagccctggaaaccggagtcacagttactgggtgcactgtacactttgtagctgaagatgtggatgctggacagattattttgcaagawgctgttcccgtgaagaggggtgatactgtcgcaactctttctgaaagagtaaaattagcagaacataaaatatttcctgcagcccttcagctggtggccagtggaactgtacagcttggagaaaatggcaagatctgttgggttaaagaggaatgaagccttttaattcagaaatggggccagtttagaaagaattatttgctgtttgcatggtggttttttatcatggacttggcccaaaagaaaaactgctaaaagacaaaaaagacctcacccttacttcatctatttttttaataaatagagactcactaaaaacaagactagttagtgcagcatatctgagacatacagttttcttggtcttttttatgctctttttctaaccgtcaccccctctttttttttttrgtattgcctgacaacatgatgaatcacctccatgtttataagttttatgttttcagctgggcacagtggctcacgcctgtaatcccagcactttgggaggccgaggcaggcggatcatgaggtcaggagatcgagactatcctggctaacacagtgaaatcccatctctactaaaaatacaaaaaatagttagctgggtgtggtggtacgcacctgtaatcccagctactcgggtggctgaggcaggagaatcgcttgaacccaggaagtggaggttgcagtgagccaagatcatgccactgcactccagcctgggcaacagagcgagacttgtctcaaaaaataataatgggctgggtgcggtggctcacacctgtaatcccagtactttgggaggctgaggcgggcagatcacgaggtcaggagatcgagaccatcctggctaacacggtgaaaccccgtctctact

SEQ ID NO: 6911 - DNA, 3798 bp, Homo sapiens
gtttcattttcctttggaatttctgctttacagacagaacaatggcagcccgagtacttataattggcagtggaggaagggaacatacgctggcctggaaayttgcacagtctcatcatgtcaaacaagtgttggttgccccaggaaacgcaggcactgcctgctctgaaaagatttcaaataccgccatctcaatcagtgaccacactgcccttgctcaattctgcaaagagaagaaaattgaatttgtagttgttggaccagaagcacctctggctgctgggattgttgggaacctgaggtctgcaggagtgcaatgctttggcccaacagcagaagcggctcagttagagtccagcaaaaggtttgccaaagagtttatggacagacatggaatcccaaccgcacaatggaaggctttcaccaaacctgaagaagcctgcagcttcattttgagtgcagacttccctgctttggttgtgaaggccagtggtcttgcagctggaaaaggggtgattgttgsaaagagcaaagaagaggcctgcaaagctgtacaagagatcatgcagsagaaagcctttggggcagctggagaaacaattgtcattgaagaacttcttgacggagaagaggtgtcgtgtctgtgtttcactgatggcaagactgtggcccccatgcccccagcacaggaccataagcgattactggagggagatggtggccctaacacagggggaatgggagcctattgtccagcccctcaggtttctaatgatctattactaaaaattaaagatactgttcttcagaggacagtggatggcatgcagcaagagggtactccatatacaggtattctctatgctggaataatgctgaccaagaatggcccaaaagttctagagtttaattgccgttttggtgatccagagtgccaagtaatcctcccacttcttaaaagtgatctttatgaagtgattcagtccaccttagatggactgctctgcacatctctgcctgtttggctagaaaaccacaccgccctaactgttgtcatggcaagtaaaggttatcctggagactacaccaagggtgtagagataacagggtttcctgaggctcaagctctaggactggaggtgttccatgcaggcactgccctcaaaaatggcaaagtagtaactcatgggggtagagttcttgcagtcacagccatccgggaaaatctcatatcagcccttgaggaagccaagaaaggactagctgctataaagtttgagggagcaatttataggaaagacrtcggctttcgtgccatagctttcctccagcagcccaggagtttgacttacaaggaatctggagtagatatcgcagctggaaatatgctggtcaagaaaattcagcctttagcaaaagccacttccagatcaggctgtaaagttgatcttggaggttttgctggtctttttgatttaaaagcagctggtttcaaagatccccttctggcctctggaacagatggcgttggaactaaactaaagattgcccagctatgcaataaacatgrtaccattggtcaagatttggtagcaatgtgtgttaatgatattctggcacaaggagcagagcccctcttcttccttgattacttttcctgtggaaaacttgacctcagtgtaactgaagctgttgttgctggaattgctaaagcttgtggaaaagctggatgtgctctccttggaggtgaaacagcagaaatgcctgacatgtatccccctggagagtatgacctagctgggtttgccgttggtgccatggagcgagatcagaaactccctcacctggaaagaatcactgagggtgatgttgttgttggaatagcttcatctggtcttcatagcaatggatttagccttgtgaggaaaatcgtggyaaaatcttccctccagtactcctctscagcacctgatggttgtggtgaccagactttaggggacttacttctcacgcctaccagaatctacagccattcactgttacctgtcctacgttcaggacatgtcaaagcctttgcccatattactggtggaggattactagagaacatccccagagtcctccctgagaaacttggggtagatttagatgcccagacctggaggatccccagggtcttctcatggttgcagcaggaaggacacctctctgaggaagagatggccagaacatttaactgtggggttggcgctgtccttgtggtatcaaaggagcagacagagcagattctgagggrtatccagcagcacaaggaagaagcctgggtgattggcagtgtggttgcacgagctgaaggttccccacgtgtgaaagtcaagaatctgattgaaagcatgcaaataaatgggtcagtgttgaagaatggctccctgacaaatcatttctcttttgaaaaaaaaaaggccagagtggctgtcttaatatctggaacaggatcgaacctgcaagcacttatagacagtactcgggaaccaaatagctctgcacaaattgatattgttatctccaacaaagccgcagtagctgggttagataaagcggaaagagctggtattcccactagagtaattaatcataaactgtayaaaaatcgtgtagaatttgacagtgcaattgacctagtccttgaagagttctccatagacatagtctgtcttgcaggattcatgagaattctttctggcccctttgtccaaaagtggaatggaaaaatgctcaatatccacccatccttgctcccttcttttaagggttcaaatgcccatgagcaagccctggaaaccggagtcacagttactgggtgcactgtacactttgtagctgaagatgtggatgctggacagattattttgcaagawgctgttcccgtgaagaggggtgatactgtcgcaactctttctgaaagagtaaaattagcagaacataaaatatttcctgcagcccttcagctggtggccagtggaactgtacagcttggagaaaatggcaagatctgttgggttaaagaggaatgaagccttttaattcagaaatggggccagtttagaaagaattatttgctgtttgcatggtggttttttatcatggacttggcccaaaagaaaaactgctaaaagacaaaaaagacctcacccttacttcatctatttttttaataaatagagactcactaaaaacaagactagttagtgcagcatatctgagacatacagttttcttggtcttttttatgctctttttctaaccgtcaccccctctttttttttttrgtattgcctgacaacatgatgaatcacctccatgtttataagttttatgttttcagctgggcacagtggctcacgcctgtaatcccagcactttgggaggccgaggcaggcggatcatgaggtcaggagatcgagactatcctggctaacacagtgaaatcccatctctactaaaaatacaaaaaatagttagctgggtgtggtggtacgcacctgtaatcccagctactcgggtggctgaggcaggagaatcgcttgaacccaggaagtggaggttgcagtgagccaagatcatgccactgcactccagcctgggcaacagagcgagacttgtctcaaaaaataataatgggctgggtgcggtggctcacacctgtaatcccagtactttgggaggctgaggcgggcagatcacgaggtcaggagatcgagaccatcctggctaacacggtgaaaccccgtctctact

SEQ ID NO: 6912 - DNA, 2194 bp, Homo sapiens
asgcggcggcggcggcggcggcggcgtgaagtcactgctgctctgggttcgggttggcgactgaaggcggtggaaatttaaaattgtttacagtcaacactgtttccagccatgggtttgtctccatctgctcctgctgttgcagttcaggcctcaaatgcttcagcgtccccaccttcaggatgcccgatgcatgaagggaaaatgaaaggctgtccagtgaatacagagccatctggcccaacctgtgagaagaaaacatactctgtgcctgcccaccaggaacgcgcctatgagtacgtggagtgtcccattaggggcactgyggctgagaataaggagaacctagatccttcaaatctgatgccaccaccaaatcaaacaccagctccagatcagccatttgcattgtctactgtcagagaagagtcatccattccgagagcagattcagagaaaaagtgggtttacccttctgagcagatgttctggaatgcaatgttaaagaaagggtggaagtggaaggatgaggatatcagtcagaaggatatgtataatatcattagaattcacaatcagaataacgagcaggcttggaaggagattttgaagtgggaagcccttcatgctgcagagtgtccttgtggtccatcattgatccggtttggagggaaagcaaaagagtattcaccaagggcacgaattcgttcctggatggggtatgagttgccttttgataggcacgattggatcataaaccgttgcgggacagaagttagatatgtgattgattattatgatggtggtgaagtcaacaaggactaccagttcaccatcctggacgtccgtcctgccttagattcactttcrgcagtatgggacagaatgaaagtcgcttggtggcgttggacctcgtaaagcactgtttcagatggaaaaatataaactatttttttctgagcgatacattaaactattttccccagattgaattgcactcatgatgtaatgggaacttcaagtgggtaatcacactttttccttcacttaacgaaggatactatgcactgttcacttttgacttgtgttgtaccttgcagtttatagcagatcattttgttttcttcctacttagcttaagtgggaagcagtctctcagtttttcctttacctgcagtattgtctgtatatttcatctcgaaaagcctgaacaacctctgaaaaagagcttttaaaaagtgatgaaagttgcttttttttcttactattttctcaggaatactccagagatgtaaagcctgagagtccatggtgatgctcaagagctttcatctggccaaatattttaactaaagctgttcattataaataagaggtgattataccttttttaaaaaaagttaccattatttctaaagcccctatggtatgattgtgacctttaacaaaatgcaaaggtatacactggaaaggtactcagcaaaattctctccaaattctgatttatatgaatttcttggactggatagagtactttcaactataccttcctttggaacataccttttaaaaaatgttccctttaaatcctgttattctaatatgtaactctgctcccaacaaacaggtctcctcattgtccttggcatttgacaagttatcccaacttcgaatctcatttcttcctttgctggcagcctccacccttccccacatcagtcggcctaatccaaaccttgaaagcctggcttaagtcccagtatcagtgatggtccccctctaaaacatgattttatatttggctgagtgttaaaattcacaagatgagcatttttttcccagatggagaacgcttcaactcagtctagattttttttgtttgttttaaggaagctctaagtttgccattgaaactttttgtaccagtaatccataaactggttgttctatttatagcagcatgttacaaatgactgctttttttttttaactgtctatactattaaatcctttaatttatcctgaatgctgtagtgttaaattagtggatgaaattggcagtctgtgggtgattaatttggtatggatttgtcagttttgtgtggagtttaagaaatagaacagccttaaactctacatttcaaaatacttgtatattttaaaataaagctgattagttcacaggttttgaaaa

SEQ ID NO: 6913 - DNA, 2343 bp, Homo sapiens
gtgcgtgagaacgccggcggtgaccgcagccacagcggtgaccgagtgagaggaasgcggcggcggcggcggcggcggcgtgaagtcactgctgctctgggttcgggttggcgactgaaggcggtaccggcctcccggaacagcccgggggagggcttaggtgcagaagggcaggctggccgcggccggtttggtctggggaccacgggctggagcaggtggaaatttaaaattgtttacagtcaacactgtttccagccatgggtttgtctccatctgctcctgctgttgcagttcaggcctcaaatgcttcagcgtccccaccttcaggatgcccgatgcatgaagggaaaatgaaaggctgtccagtgaatacagagccatctggcccaacctgtgagaagaaaacatactctgtgcctgcccaccaggaacgcgcctatgagtacgtggagtgtcccattaggggcactgyggctgagaataaggagaacctagatccttcaaatctgatgccaccaccaaatcaaacaccagctccagatcagccatttgcattgtctactgtcagagaagagtcatccattccgagagcagattcagagaaaaagtgggtttacccttctgagcagatgttctggaatgcaatgttaaagaaagggtggaagtggaaggatgaggatatcagtcagaaggatatgtataatatcattagaattcacaatcagaataacgagcaggcttggaaggagattttgaagtgggaagcccttcatgctgcagagtgtccttgtggtccatcattgatccggtttggagggaaagcaaaagagtattcaccaagggcacgaattcgttcctggatggggtatgagttgccttttgataggcacgattggatcataaaccgttgcgggacagaagttagatatgtgattgattattatgatggtggtgaagtcaacaaggactaccagttcaccatcctggacgtccgtcctgccttagattcactttcrgcagtatgggacagaatgaaagtcgcttggtggcgttggacctcgtaaagcactgtttcagatggaaaaatataaactatttttttctgagcgatacattaaactattttccccagattgaattgcactcatgatgtaatgggaacttcaagtgggtaatcacactttttccttcacttaacgaaggatactatgcactgttcacttttgacttgtgttgtaccttgcagtttatagcagatcattttgttttcttcctacttagcttaagtgggaagcagtctctcagtttttcctttacctgcagtattgtctgtatatttcatctcgaaaagcctgaacaacctctgaaaaagagcttttaaaaagtgatgaaagttgcttttttttcttactattttctcaggaatactccagagatgtaaagcctgagagtccatggtgatgctcaagagctttcatctggccaaatattttaactaaagctgttcattataaataagaggtgattataccttttttaaaaaaagttaccattatttctaaagcccctatggtatgattgtgacctttaacaaaatgcaaaggtatacactggaaaggtactcagcaaaattctctccaaattctgatttatatgaatttcttggactggatagagtactttcaactataccttcctttggaacataccttttaaaaaatgttccctttaaatcctgttattctaatatgtaactctgctcccaacaaacaggtctcctcattgtccttggcatttgacaagttatcccaacttcgaatctcatttcttcctttgctggcagcctccacccttccccacatcagtcggcctaatccaaaccttgaaagcctggcttaagtcccagtatcagtgatggtccccctctaaaacatgattttatatttggctgagtgttaaaattcacaagatgagcatttttttcccagatggagaacgcttcaactcagtctagattttttttgtttgttttaaggaagctctaagtttgccattgaaactttttgtaccagtaatccataaactggttgttctatttatagcagcatgttacaaatgactgctttttttttttaactgtctatactattaaatcctttaatttatcctgaatgctgtagtgttaaattagtggatgaaattggcagtctgtgggtgattaatttggtatggatttgtcagttttgtgtggagtttaagaaatagaacagccttaaactctacatttcaaaatacttgtatattttaaaataaagctgattagttcacaggttttgaaaa

SEQ ID NO: 6914 - DNA, 6978 bp, Homo sapiens
ggctgcctccgaagaaaggagaatggcgttcagtaaaggattccggatctatcacaaattggatcccccacctttcagcctcatagtggaaactaggcataaggaagaatgtctcatgttcgagtctggggctgtcgctgtgctctcatctgcagaaaaagaggcaatcaagggtacatactccaaagtactggatgcatatggactcttaggtgttctgcggttaaatcttggtgatactatgttacattatctggtcctagtcactggatgtatgtctgttggaaaaattcaagaatctgaagttttccgagttacttccactgagtttatatcactgcgaatcgattcttcagatgaggatcgcatttcagaagtgcggaaagttttgaattcaggaaacttttattttgcatggtctgcatctggcatcagtttagatttgagtcttaatgcgcatcgtagcatgcaagaacagacaactgataatagatttttctggaatcagtctttgcatttgcatctcaaacactatggcgtgaattgtgatgactggttattacgtcttatgtgtggaggagtagaaatcagaacratttatgctgctcataaacaggcgaaggcttgcctcatttcaagattaagctgtgaacgagctgggaccaggtttaatgtccggggaacaaatgatgatggtcatgttgccaattttgtagaaacagaacaggttgtgtacttagatgactcagtttcttccttcatacaaatccgaggatctgttccattgttctgggagcaaccagggttgcaagtgggatctcatcgtgtccgtatgtcaaggggatttgaagccaatgcacctgcttttgacaggcattttagaacacttaagaacttatatggtaracaaataatagtaaatttgcttggatctaaggaaggtgaacatatgctaagtaaagctttccagagtcatttgaaagcttctgaacatgctgctgatatccagatggtgaattttgactatcatcaaatggttaagggaggaaaggcagaaaaattacatagtgttcttaaacctcaagtccagaagtttctagattatggatttttttatttcaatggaagtgaagttcaaagatgccagagtggtacagttcgaacaaactgcttggattgtcttgatagaacaaatagtgtgcaggcatttcttggcttagagatgctagctaaacagttggaagctcttggtttagctgaaaagcctcagttggtgactcgctttcaagaagtttttcggtcaatgtggtccgtgaatggtgattcaatcagtaagatatatgcaggaactggagctcttgaagggaaagcgaagttaaaagatggtgctcgctctgttacccgaacaattcagaataacttctttgacagctccaagcaagaggccattgatgttttgctactgggaaatactctgaatagtgatttagctgacaaagctcgagcacttttaactactggaagtttgcgtgtttctgagcagacattacagtcagcatcttctaaagtactaaagagcatgtgtgagaatttctacaaatattcaaagcctaagaaaattcgagtatgtgtcggaacctggaatgtgaatggtgggaagcaatttcgcagcatagcttttaagaatcagacactcactgactggcttcttgatgcacccaagttagctggcatccaggagtttcaagataaaagaagtaagccaactgatatatttgcaattggttttgaagaaatggtagaattgaatgctggaaacattgtgagtgcaagcacaacaaatcagaagctctgggctgtagaacttcagaagacaatctccagagacaacaagtatgtgctgctggcttctgaacagttggtgggcgtctgtttgtttgtttttatcagaccacagcatgctccttttatcagggatgttgcagttgatactgtgaagactggaatgggaggtgcaactggaaataagggagcagttgcaatccgaatgctcttccatacaaccagcctttgcttcgtctgtagccactttgctgcagggcagtcacaagtcaaagaaagaaatgaasattttatagaaatagcacgaaaattgagttttcctatgggaaggatgctattttcccatgactatgtattttggtgtggtgatttcaactatcgaatcgatctccctaacgaagaagttaaagagctcataagacagcaaaattgggattctcttatagcaggagatcaacttatcaatcagaaaaatgctggacaggtttttagaggatttttagaaggaaaggtaacctttgctccracatataagtatgacttgttttctgacgactatgacaccagtgaaaagtgccgcacccctgcctggacagaccgtgtcctttggagaaggaggaaatggccttttgatagatcagctgaagatctagatcttctaaatgctagttttcaagatgaaagcaaaattctgtacacgtggactccaggcactttgctgcactatggaagagctgagctgaagacttctgaccacaggcctgtcgttgccctgattgatatagatatatttgaagttgaagctgaagagaggcaaaacatttataaagaagtaattgcagttcagggtccaccagatggtacagtattggtctcaatcaaaagttctttaccagaaaataatttttttgatgatgccttgattgatgagcttctgcagcagtttgcaagttttggtgaagttatacttataagatttgtagaagataaaatgtgggttacatttttggagggaagctctgccttgaatgttctgagcctaaatggtaaagagttattgaatcggactataactattgctttaaaaagtccagactggatcaaaaatttggaagaagaaatgagtttagagaaaattagcattgcattgccatcatcaacaagctctaccctgcttggtgaagatgcagaggttgcagcagattttgatatggaaggtgatgttgatgactatagtgctgaagtggaggaacttcttcctcagcatctccagccaycttcaagttccggccttggtacttcccccagctcttcaccccgaactagtccctgccagtcacctacaatatcagagggtcctgtaccttcccttcccatcagaccaagccgagcaccgtcaagaactcctgggcctcccagtgcacagagttctcctattgacgcgcagccagcaacgccgctgccgcagaaagaccccgcccagcccttggagcccaagcggccgccgccgccccgcccggtcgcccctcccacacgcccggctcccccacagagacctcctccgccttcaggggctaggagtcctgcacccactagaaaggaatttggaggtattggagcccctcccagtcctggggtagctaggagagagatggaagcacccaaaagccctggaacaacaaggaaagataatataggacgcagtcagccttcacctcaagcaggacttgcaggcccaggacctgctggatacagtacagccagacygacgattcctcctcgtgctggagttatcagtgccccacagagccacgcgcgggcatctgctggaagactgactcctgaaagccaaagcaaaacatcagaaacgtcgaaaggttcaactttccttcctgaaccaytgaagcctcaggctgcttttcctccgcagtcttctttgcccccgcctgctcaaaggttgcaagagcctcttgtccctgtggcagcacctatgcctcagtctggcccccagccaaatttggaaaccccaccacaaccaccacctcgaagcaggtcatcccatagcttgccttcagaagcttcctcacaaccgcaagtaaaaacaaatggaatctctgatggcaaaagagaatcaccattaaagattgacccatttgaagatctgtcatttaatctgcttgctgtatcaaaggctcagctatctgttcaaacgtcacctgttcccaccccagacccaaagaggttgattcagttgccttctgcaacgcaaagtaatgttttgagttctgtaagttgcatgccaacaatgcctccaattccagctcggagtcaatcccaggaaaatatgcgaagttctccaaacccatttattactggcttgaccaggacaaatcctttcagtgacaggactgctgctcctggaaacccatttagagccaagtctgaagaatcagaggcaacttcatggttctccaaagaagagcccgttactatcagtcctttcccttctctgcagcctcttggtcataacaaaagcagggcttcatcttcacttgatggctttaaggacagttttgatctacagggccagtctacattaaaaattagcaacccgaaaggatgggtaaccttcgaggaagaagaggattttggtgtgaaagggaagtcaaagtcagcttgttcagacttactgggtaatcagccaagttcattttctggctccaacctgacattgaatgatgactggaataaaggkacaaatgtctccttctgtgtgttgccgtcaagaagacctcctccacctcctgtccctctgctccygcccggcaccagccctccagtagatcctttcacgaccttggcctctaaggcttcacccacactggactttacagaaagataacgccatgcaatagaaaacagtgggtacttgcttttggcaggatagagctaagagaattgggcattagtatttcattatgtgcaataagtcattgtaagtgcactgatatcttcacaaaacaccactatttgatgtgtacagagttggactatgtgtatattggaaataaggaaaaacccttctcattgttaactggagttttgatgtatttctctttggatgaataggagacagtagtagccataaaaagtacttatactttagaaaacagtccttattcagaaacttttcggtcagtcttctgaagaatctcaaaaagcccacccaactttcagctgacatttccaccagccctctcatacttgttaacaattggtatctttgagtatttaccaaagagctgccaaggttacagtgaacagagttttgaaaggcattgctttaaaggaaaaaagtataggtatgtgtacatatataatacatacaaacacatgtacttctgtatacatttacatatttttacaattcatactttaatttctaggctataactcagaccaaattatacctaaaagttccaacaaagtccctttttcaatatcacattaccaaaaagatggctgcaaatgtaatttggacctttcattaattttgttttcaaaactagaataatctcaccacagaatcagaattttctaccgttccacacccaaccccttcaaatacacacaaccttgttacttttcactccagcaccttcatacgcttttctccaggaggaggttcttgcagctggaaacagcctattttgtggtcactgtcaagtggatggatattctagcgctcccaaaaaagcactatggccttatatgcagggaaggcacataccaccaagttcaatgagaaatattagagctaaccgtactctcttctctgcgtacgttcgagtatacgttgcccatatccctcccatattttctttttgctgcttttgctctggaactttgcttttagcagggaaagcagctgtcccctgagtgctttgaattgggaatatacccagtgtgtgttctcccccctcttacgaggctacataacacatctatgatgctgctttaagtttttagaggctatacctcaaagtagctgcggattttgtctcctgcactgccaatatgcaactgatcccgcttttattaattttttgaagaagtacacagaatttttacagaatgtagtattttgatatcattaagtaaaccaatcagaaaactccttgagcaatagttgtttctttgtcagtttcagttacaatcatctttacccattaagacttacattaacattccttttatataaagagttgtatatgtccacctaaattcctatgtccacacttaacctttaaagatgtacattgagggaatatcaaaaaatagcgttcatggctacgaatatgtagaatgttaaaagcacagcaaactgcactgcacttataaagcaaatctattagaaaaaaagcatttttctaaatgctcaaatgttatcaaaatactatatttatagaagtaatcttctctgttaacagccaagatttgctgttagaaataactcttgtgagttttatattgtgctttttggaggttctaatcatttcagcagtagcgtcttaaacagcagtattactataagcagttgcttcaaaatgtgaattaacttgttgaaactgtggctttaacatccatgtgactagtgtatatggtatttgctctccattagcaaaataattcattgttaggtaaacttcaytagtgcaaattgcagatctgtgagcaatgtttcctattgaatataaactactgtctaaaatatacatatcagcagcccagcctttatcaggaaaattatacttggcaagttgctgaaaatgcacaaagttatgaaagttaaaggtatgctgcaaataactagccattattctatgtattattaaatatttactagttctgttaaaagcagagcagaagttagacactaaggatctctttgtgaactctgtgttctctatattagattgctgtttatatgtaagaattttattgcttatgtggcatacaatatttataactataaactttatagaagtacagtattaaagtcagtggtacacagacattctgtacatatcctgtgaaacgtgctgtcatatgaaataaatatatctgtctttacca

SEQ ID NO: 6915 - DNA, 7063 bp, Homo sapiens
gagctgctgcggccagacccacgggcagccgggcgggcggacgcctccaagaccagtctctgcctccgcagcgtcagcgggagcgggctgcctccgaagaaaggagaatggcgttcagtaaaggattccggatctatcacaaattggatcccccacctttcagcctcatagtggaaactaggcataaggaagaatgtctcatgttcgagtctggggctgtcgctgtgctctcatctgcagaaaaagaggcaatcaagggtacatactccaaagtactggatgcatatggactcttaggtgttctgcggttaaatcttggtgatactatgttacattatctggtcctagtcactggatgtatgtctgttggaaaaattcaagaatctgaagttttccgagttacttccactgagtttatatcactgcgaatcgattcttcagatgaggatcgcatttcagaagtgcggaaagttttgaattcaggaaacttttattttgcatggtctgcatctggcatcagtttagatttgagtcttaatgcgcatcgtagcatgcaagaacagacaactgataatagatttttctggaatcagtctttgcatttgcatctcaaacactatggcgtgaattgtgatgactggttattacgtcttatgtgtggaggagtagaaatcagaacratttatgctgctcataaacaggcgaaggcttgcctcatttcaagattaagctgtgaacgagctgggaccaggtttaatgtccggggaacaaatgatgatggtcatgttgccaattttgtagaaacagaacaggttgtgtacttagatgactcagtttcttccttcatacaaatccgaggatctgttccattgttctgggagcaaccagggttgcaagtgggatctcatcgtgtccgtatgtcaaggggatttgaagccaatgcacctgcttttgacaggcattttagaacacttaagaacttatatggtaracaaataatagtaaatttgcttggatctaaggaaggtgaacatatgctaagtaaagctttccagagtcatttgaaagcttctgaacatgctgctgatatccagatggtgaattttgactatcatcaaatggttaagggaggaaaggcagaaaaattacatagtgttcttaaacctcaagtccagaagtttctagattatggatttttttatttcaatggaagtgaagttcaaagatgccagagtggtacagttcgaacaaactgcttggattgtcttgatagaacaaatagtgtgcaggcatttcttggcttagagatgctagctaaacagttggaagctcttggtttagctgaaaagcctcagttggtgactcgctttcaagaagtttttcggtcaatgtggtccgtgaatggtgattcaatcagtaagatatatgcaggaactggagctcttgaagggaaagcgaagttaaaagatggtgctcgctctgttacccgaacaattcagaataacttctttgacagctccaagcaagaggccattgatgttttgctactgggaaatactctgaatagtgatttagctgacaaagctcgagcacttttaactactggaagtttgcgtgtttctgagcagacattacagtcagcatcttctaaagtactaaagagcatgtgtgagaatttctacaaatattcaaagcctaagaaaattcgagtatgtgtcggaacctggaatgtgaatggtgggaagcaatttcgcagcatagcttttaagaatcagacactcactgactggcttcttgatgcacccaagttagctggcatccaggagtttcaagataaaagaagtaagccaactgatatatttgcaattggttttgaagaaatggtagaattgaatgctggaaacattgtgagtgcaagcacaacaaatcagaagctctgggctgtagaacttcagaagacaatctccagagacaacaagtatgtgctgctggcttctgaacagttggtgggcgtctgtttgtttgtttttatcagaccacagcatgctccttttatcagggatgttgcagttgatactgtgaagactggaatgggaggtgcaactggaaataagggagcagttgcaatccgaatgctcttccatacaaccagcctttgcttcgtctgtagccactttgctgcagggcagtcacaagtcaaagaaagaaatgaasattttatagaaatagcacgaaaattgagttttcctatgggaaggatgctattttcccatgactatgtattttggtgtggtgatttcaactatcgaatcgatctccctaacgaagaagttaaagagctcataagacagcaaaattgggattctcttatagcaggagatcaacttatcaatcagaaaaatgctggacaggtttttagaggatttttagaaggaaaggtaacctttgctccracatataagtatgacttgttttctgacgactatgacaccagtgaaaagtgccgcacccctgcctggacagaccgtgtcctttggagaaggaggaaatggccttttgatagatcagctgaagatctagatcttctaaatgctagttttcaagatgaaagcaaaattctgtacacgtggactccaggcactttgctgcactatggaagagctgagctgaagacttctgaccacaggcctgtcgttgccctgattgatatagatatatttgaagttgaagctgaagagaggcaaaacatttataaagaagtaattgcagttcagggtccaccagatggtacagtattggtctcaatcaaaagttctttaccagaaaataatttttttgatgatgccttgattgatgagcttctgcagcagtttgcaagttttggtgaagttatacttataagatttgtagaagataaaatgtgggttacatttttggagggaagctctgccttgaatgttctgagcctaaatggtaaagagttattgaatcggactataactattgctttaaaaagtccagactggatcaaaaatttggaagaagaaatgagtttagagaaaattagcattgcattgccatcatcaacaagctctaccctgcttggtgaagatgcagaggttgcagcagattttgatatggaaggtgatgttgatgactatagtgctgaagtggaggaacttcttcctcagcatctccagccaycttcaagttccggccttggtacttcccccagctcttcaccccgaactagtccctgccagtcacctacaatatcagagggtcctgtaccttcccttcccatcagaccaagccgagcaccgtcaagaactcctgggcctcccagtgcacagagttctcctattgacgcgcagccagcaacgccgctgccgcagaaagaccccgcccagcccttggagcccaagcggccgccgccgccccgcccggtcgcccctcccacacgcccggctcccccacagagacctcctccgccttcaggggctaggagtcctgcacccactagaaaggaatttggaggtattggagcccctcccagtcctggggtagctaggagagagatggaagcacccaaaagccctggaacaacaaggaaagataatataggacgcagtcagccttcacctcaagcaggacttgcaggcccaggacctgctggatacagtacagccagacygacgattcctcctcgtgctggagttatcagtgccccacagagccacgcgcgggcatctgctggaagactgactcctgaaagccaaagcaaaacatcagaaacgtcgaaaggttcaactttccttcctgaaccaytgaagcctcaggctgcttttcctccgcagtcttctttgcccccgcctgctcaaaggttgcaagagcctcttgtccctgtggcagcacctatgcctcagtctggcccccagccaaatttggaaaccccaccacaaccaccacctcgaagcaggtcatcccatagcttgccttcagaagcttcctcacaaccgcaagtaaaaacaaatggaatctctgatggcaaaagagaatcaccattaaagattgacccatttgaagatctgtcatttaatctgcttgctgtatcaaaggctcagctatctgttcaaacgtcacctgttcccaccccagacccaaagaggttgattcagttgccttctgcaacgcaaagtaatgttttgagttctgtaagttgcatgccaacaatgcctccaattccagctcggagtcaatcccaggaaaatatgcgaagttctccaaacccatttattactggcttgaccaggacaaatcctttcagtgacaggactgctgctcctggaaacccatttagagccaagtctgaagaatcagaggcaacttcatggttctccaaagaagagcccgttactatcagtcctttcccttctctgcagcctcttggtcataacaaaagcagggcttcatcttcacttgatggctttaaggacagttttgatctacagggccagtctacattaaaaattagcaacccgaaaggatgggtaaccttcgaggaagaagaggattttggtgtgaaagggaagtcaaagtcagcttgttcagacttactgggtaatcagccaagttcattttctggctccaacctgacattgaatgatgactggaataaaggkacaaatgtctccttctgtgtgttgccgtcaagaagacctcctccacctcctgtccctctgctccygcccggcaccagccctccagtagatcctttcacgaccttggcctctaaggcttcacccacactggactttacagaaagataacgccatgcaatagaaaacagtgggtacttgcttttggcaggatagagctaagagaattgggcattagtatttcattatgtgcaataagtcattgtaagtgcactgatatcttcacaaaacaccactatttgatgtgtacagagttggactatgtgtatattggaaataaggaaaaacccttctcattgttaactggagttttgatgtatttctctttggatgaataggagacagtagtagccataaaaagtacttatactttagaaaacagtccttattcagaaacttttcggtcagtcttctgaagaatctcaaaaagcccacccaactttcagctgacatttccaccagccctctcatacttgttaacaattggtatctttgagtatttaccaaagagctgccaaggttacagtgaacagagttttgaaaggcattgctttaaaggaaaaaagtataggtatgtgtacatatataatacatacaaacacatgtacttctgtatacatttacatatttttacaattcatactttaatttctaggctataactcagaccaaattatacctaaaagttccaacaaagtccctttttcaatatcacattaccaaaaagatggctgcaaatgtaatttggacctttcattaattttgttttcaaaactagaataatctcaccacagaatcagaattttctaccgttccacacccaaccccttcaaatacacacaaccttgttacttttcactccagcaccttcatacgcttttctccaggaggaggttcttgcagctggaaacagcctattttgtggtcactgtcaagtggatggatattctagcgctcccaaaaaagcactatggccttatatgcagggaaggcacataccaccaagttcaatgagaaatattagagctaaccgtactctcttctctgcgtacgttcgagtatacgttgcccatatccctcccatattttctttttgctgcttttgctctggaactttgcttttagcagggaaagcagctgtcccctgagtgctttgaattgggaatatacccagtgtgtgttctcccccctcttacgaggctacataacacatctatgatgctgctttaagtttttagaggctatacctcaaagtagctgcggattttgtctcctgcactgccaatatgcaactgatcccgcttttattaattttttgaagaagtacacagaatttttacagaatgtagtattttgatatcattaagtaaaccaatcagaaaactccttgagcaatagttgtttctttgtcagtttcagttacaatcatctttacccattaagacttacattaacattccttttatataaagagttgtatatgtccacctaaattcctatgtccacacttaacctttaaagatgtacattgagggaatatcaaaaaatagcgttcatggctacgaatatgtagaatgttaaaagcacagcaaactgcactgcacttataaagcaaatctattagaaaaaaagcatttttctaaatgctcaaatgttatcaaaatactatatttatagaagtaatcttctctgttaacagccaagatttgctgttagaaataactcttgtgagttttatattgtgctttttggaggttctaatcatttcagcagtagcgtcttaaacagcagtattactataagcagttgcttcaaaatgtgaattaacttgttgaaactgtggctttaacatccatgtgactagtgtatatggtatttgctctccattagcaaaataattcattgttaggtaaacttcaytagtgcaaattgcagatctgtgagcaatgtttcctattgaatataaactactgtctaaaatatacatatcagcagcccagcctttatcaggaaaattatacttggcaagttgctgaaaatgcacaaagttatgaaagttaaaggtatgctgcaaataactagccattattctatgtattattaaatatttactagttctgttaaaagcagagcagaagttagacactaaggatctctttgtgaactctgtgttctctatattagattgctgtttatatgtaagaattttattgcttatgtggcatacaatatttataactataaactttatagaagtacagtattaaagtcagtggtacacagacattctgtacatatcctgtgaaacgtgctgtcatatgaaataaatatatctgtctttacca

SEQ ID NO: 6916 - DNA, 7072 bp, Homo sapiens
gagctgctgcggccagacccacgggcagccgggcgggcggacgcctccaagaccagtctctgcctccgcagcgtcagcgggagcgggctgcctccgaagaaaggagaatggcgttcagtaaaggattccggatctatcacaaattggatcccccacctttcagcctcatagtggaaactaggcataaggaagaatgtctcatgttcgagtctggggctgtcgctgtgctctcatctgcagaaaaagaggcaatcaagggtacatactccaaagtactggatgcatatggactcttaggtgttctgcggttaaatcttggtgatactatgttacattatctggtcctagtcactggatgtatgtctgttggaaaaattcaagaatctgaagttttccgagttacttccactgagtttatatcactgcgaatcgattcttcagatgaggatcgcatttcagaagtgcggaaagttttgaattcaggaaacttttattttgcatggtctgcatctggcatcagtttagatttgagtcttaatgcgcatcgtagcatgcaagaacagacaactgataatagatttttctggaatcagtctttgcatttgcatctcaaacactatggcgtgaattgtgatgactggttattacgtcttatgtgtggaggagtagaaatcagaacratttatgctgctcataaacaggcgaaggcttgcctcatttcaagattaagctgtgaacgagctgggaccaggtttaatgtccggggaacaaatgatgatggtcatgttgccaattttgtagaaacagaacaggttgtgtacttagatgactcagtttcttccttcatacaaatccgaggatctgttccattgttctgggagcaaccagggttgcaagtgggatctcatcgtgtccgtatgtcaaggggatttgaagccaatgcacctgcttttgacaggcattttagaacacttaagaacttatatggtaracaaataatagtaaatttgcttggatctaaggaaggtgaacatatgctaagtaaagctttccagagtcatttgaaagcttctgaacatgctgctgatatccagatggtgaattttgactatcatcaaatggttaagggaggaaaggcagaaaaattacatagtgttcttaaacctcaagtccagaagtttctagattatggatttttttatttcaatggaagtgaagttcaaagatgccagagtggtacagttcgaacaaactgcttggattgtcttgatagaacaaatagtgtgcaggcatttcttggcttagagatgctagctaaacagttggaagctcttggtttagctgaaaagcctcagttggtgactcgctttcaagaagtttttcggtcaatgtggtccgtgaatggtgattcaatcagtaagatatatgcaggaactggagctcttgaagggaaagcgaaggctggaaagttaaaagatggtgctcgctctgttacccgaacaattcagaataacttctttgacagctccaagcaagaggccattgatgttttgctactgggaaatactctgaatagtgatttagctgacaaagctcgagcacttttaactactggaagtttgcgtgtttctgagcagacattacagtcagcatcttctaaagtactaaagagcatgtgtgagaatttctacaaatattcaaagcctaagaaaattcgagtatgtgtcggaacctggaatgtgaatggtgggaagcaatttcgcagcatagcttttaagaatcagacactcactgactggcttcttgatgcacccaagttagctggcatccaggagtttcaagataaaagaagtaagccaactgatatatttgcaattggttttgaagaaatggtagaattgaatgctggaaacattgtgagtgcaagcacaacaaatcagaagctctgggctgtagaacttcagaagacaatctccagagacaacaagtatgtgctgctggcttctgaacagttggtgggcgtctgtttgtttgtttttatcagaccacagcatgctccttttatcagggatgttgcagttgatactgtgaagactggaatgggaggtgcaactggaaataagggagcagttgcaatccgaatgctcttccatacaaccagcctttgcttcgtctgtagccactttgctgcagggcagtcacaagtcaaagaaagaaatgaasattttatagaaatagcacgaaaattgagttttcctatgggaaggatgctattttcccatgactatgtattttggtgtggtgatttcaactatcgaatcgatctccctaacgaagaagttaaagagctcataagacagcaaaattgggattctcttatagcaggagatcaacttatcaatcagaaaaatgctggacaggtttttagaggatttttagaaggaaaggtaacctttgctccracatataagtatgacttgttttctgacgactatgacaccagtgaaaagtgccgcacccctgcctggacagaccgtgtcctttggagaaggaggaaatggccttttgatagatcagctgaagatctagatcttctaaatgctagttttcaagatgaaagcaaaattctgtacacgtggactccaggcactttgctgcactatggaagagctgagctgaagacttctgaccacaggcctgtcgttgccctgattgatatagatatatttgaagttgaagctgaagagaggcaaaacatttataaagaagtaattgcagttcagggtccaccagatggtacagtattggtctcaatcaaaagttctttaccagaaaataatttttttgatgatgccttgattgatgagcttctgcagcagtttgcaagttttggtgaagttatacttataagatttgtagaagataaaatgtgggttacatttttggagggaagctctgccttgaatgttctgagcctaaatggtaaagagttattgaatcggactataactattgctttaaaaagtccagactggatcaaaaatttggaagaagaaatgagtttagagaaaattagcattgcattgccatcatcaacaagctctaccctgcttggtgaagatgcagaggttgcagcagattttgatatggaaggtgatgttgatgactatagtgctgaagtggaggaacttcttcctcagcatctccagccaycttcaagttccggccttggtacttcccccagctcttcaccccgaactagtccctgccagtcacctacaatatcagagggtcctgtaccttcccttcccatcagaccaagccgagcaccgtcaagaactcctgggcctcccagtgcacagagttctcctattgacgcgcagccagcaacgccgctgccgcagaaagaccccgcccagcccttggagcccaagcggccgccgccgccccgcccggtcgcccctcccacacgcccggctcccccacagagacctcctccgccttcaggggctaggagtcctgcacccactagaaaggaatttggaggtattggagcccctcccagtcctggggtagctaggagagagatggaagcacccaaaagccctggaacaacaaggaaagataatataggacgcagtcagccttcacctcaagcaggacttgcaggcccaggacctgctggatacagtacagccagacygacgattcctcctcgtgctggagttatcagtgccccacagagccacgcgcgggcatctgctggaagactgactcctgaaagccaaagcaaaacatcagaaacgtcgaaaggttcaactttccttcctgaaccaytgaagcctcaggctgcttttcctccgcagtcttctttgcccccgcctgctcaaaggttgcaagagcctcttgtccctgtggcagcacctatgcctcagtctggcccccagccaaatttggaaaccccaccacaaccaccacctcgaagcaggtcatcccatagcttgccttcagaagcttcctcacaaccgcaagtaaaaacaaatggaatctctgatggcaaaagagaatcaccattaaagattgacccatttgaagatctgtcatttaatctgcttgctgtatcaaaggctcagctatctgttcaaacgtcacctgttcccaccccagacccaaagaggttgattcagttgccttctgcaacgcaaagtaatgttttgagttctgtaagttgcatgccaacaatgcctccaattccagctcggagtcaatcccaggaaaatatgcgaagttctccaaacccatttattactggcttgaccaggacaaatcctttcagtgacaggactgctgctcctggaaacccatttagagccaagtctgaagaatcagaggcaacttcatggttctccaaagaagagcccgttactatcagtcctttcccttctctgcagcctcttggtcataacaaaagcagggcttcatcttcacttgatggctttaaggacagttttgatctacagggccagtctacattaaaaattagcaacccgaaaggatgggtaaccttcgaggaagaagaggattttggtgtgaaagggaagtcaaagtcagcttgttcagacttactgggtaatcagccaagttcattttctggctccaacctgacattgaatgatgactggaataaaggkacaaatgtctccttctgtgtgttgccgtcaagaagacctcctccacctcctgtccctctgctccygcccggcaccagccctccagtagatcctttcacgaccttggcctctaaggcttcacccacactggactttacagaaagataacgccatgcaatagaaaacagtgggtacttgcttttggcaggatagagctaagagaattgggcattagtatttcattatgtgcaataagtcattgtaagtgcactgatatcttcacaaaacaccactatttgatgtgtacagagttggactatgtgtatattggaaataaggaaaaacccttctcattgttaactggagttttgatgtatttctctttggatgaataggagacagtagtagccataaaaagtacttatactttagaaaacagtccttattcagaaacttttcggtcagtcttctgaagaatctcaaaaagcccacccaactttcagctgacatttccaccagccctctcatacttgttaacaattggtatctttgagtatttaccaaagagctgccaaggttacagtgaacagagttttgaaaggcattgctttaaaggaaaaaagtataggtatgtgtacatatataatacatacaaacacatgtacttctgtatacatttacatatttttacaattcatactttaatttctaggctataactcagaccaaattatacctaaaagttccaacaaagtccctttttcaatatcacattaccaaaaagatggctgcaaatgtaatttggacctttcattaattttgttttcaaaactagaataatctcaccacagaatcagaattttctaccgttccacacccaaccccttcaaatacacacaaccttgttacttttcactccagcaccttcatacgcttttctccaggaggaggttcttgcagctggaaacagcctattttgtggtcactgtcaagtggatggatattctagcgctcccaaaaaagcactatggccttatatgcagggaaggcacataccaccaagttcaatgagaaatattagagctaaccgtactctcttctctgcgtacgttcgagtatacgttgcccatatccctcccatattttctttttgctgcttttgctctggaactttgcttttagcagggaaagcagctgtcccctgagtgctttgaattgggaatatacccagtgtgtgttctcccccctcttacgaggctacataacacatctatgatgctgctttaagtttttagaggctatacctcaaagtagctgcggattttgtctcctgcactgccaatatgcaactgatcccgcttttattaattttttgaagaagtacacagaatttttacagaatgtagtattttgatatcattaagtaaaccaatcagaaaactccttgagcaatagttgtttctttgtcagtttcagttacaatcatctttacccattaagacttacattaacattccttttatataaagagttgtatatgtccacctaaattcctatgtccacacttaacctttaaagatgtacattgagggaatatcaaaaaatagcgttcatggctacgaatatgtagaatgttaaaagcacagcaaactgcactgcacttataaagcaaatctattagaaaaaaagcatttttctaaatgctcaaatgttatcaaaatactatatttatagaagtaatcttctctgttaacagccaagatttgctgttagaaataactcttgtgagttttatattgtgctttttggaggttctaatcatttcagcagtagcgtcttaaacagcagtattactataagcagttgcttcaaaatgtgaattaacttgttgaaactgtggctttaacatccatgtgactagtgtatatggtatttgctctccattagcaaaataattcattgttaggtaaacttcaytagtgcaaattgcagatctgtgagcaatgtttcctattgaatataaactactgtctaaaatatacatatcagcagcccagcctttatcaggaaaattatacttggcaagttgctgaaaatgcacaaagttatgaaagttaaaggtatgctgcaaataactagccattattctatgtattattaaatatttactagttctgttaaaagcagagcagaagttagacactaaggatctctttgtgaactctgtgttctctatattagattgctgtttatatgtaagaattttattgcttatgtggcatacaatatttataactataaactttatagaagtacagtattaaagtcagtggtacacagacattctgtacatatcctgtgaaacgtgctgtcatatgaaataaatatatctgtctttacca

SEQ ID NO: 6917 - DNA, 850 bp, Homo sapiens
atggggaaagtgaaggttggagtcaatggatttggttgtattgggcgcctggtcatcaggrctgcttgtaattctggtaaagtagatattatcgccatcaatgacccattcattgacctcagctacatggtctacatgttccagtatgatcccacccatggtaaattccatggcaccrtcaaggctgagaacgggaagcttgtcatcaatggaaatcccatcactatcttccaggagccagatccctccaaaatcaagtggggtgatgctggcactgagtatgtcatggagtccactggcatcttcaccaccatggagaatgctggggctcacttgcagtggggagccaaaaggccacagggctctccagaacatcatccctgccactactgggctgccaaggctgtgaggaaggtcatccctgagctgaatggtaagctcactggcatggccctccgtgtccccactgccaacgtgtcagtggtggacctcacctaccatctggaaaaacctgccaaatatgatgacatcaagaaggtggtgaagcaggcatcagagggccccctcaaaggcatcctgggctacactgggcaccaggtggtctcctccgacttcaacagtgacacccactcttccaccttcaatgctggggctggcactgccctcaacgaccactttgtcaagctcatttcctggtatgacaatgaatttggctacaacaacagggtggtggacctcatggcccacatggcctccaaggagtaagacccctggaccaccagcctcagcgagagcacaggaggaagaaagaggccctcactgttggggagtccctggcacactcattccc

SEQ ID NO: 6918 - DNA, 1127 bp, Homo sapiens
atggggaaagtgaaggttggagtcaatggatttggttgtattgggcgcctggtcatcaggrctgcttgtaattctggtaaagtagatattatcgccatcaatgacccattcattgacctcagctacatggtctacatgttccagtatgatcccacccatggtaaattccatggcaccrtcaaggctgagaacgggaagcttgtcatcaatggaaatcccatcactatcttccaggagccagatccctccaaaatcaagtggggtgatgctggcactgagtatgtcatggagtccactggcatcttcaccaccatggagaatgctggggctcacttgcagtggggagccaaaagggtcatcatctctgccccctctgctgayccccccatgttcacgatgggtgtgaaccatgagaagtaygacaacagcctcaagatcatcagcaatgccacctgaaccaccaactgcctagcgcccctggccaaagtcatcactgacaactttggtatcgtggaaggactcatgaccacagtccacgccatcactgccacccagaagactgtgaatggmccctccaggaaactgtggcgtgacagccacagggctctccagaacatcatccctgccactactgggctgccaaggctgtgaggaaggtcatccctgagctgaatggtaagctcactggcatggccctccgtgtccccactgccaacgtgtcagtggtggacctcacctaccatctggaaaaacctgccaaatatgatgacatcaagaaggtggtgaagcaggcatcagagggccccctcaaaggcatcctgggctacactgggcaccaggtggtctcctccgacttcaacagtgacacccactcttccaccttcaatgctggggctggcactgccctcaacgaccactttgtcaagctcatttcctggtatgacaatgaatttggctacaacaacagggtggtggacctcatggcccacatggcctccaaggagtaagacccctggaccaccagcctcagcgagagcacaggaggaagaaagaggccctcactgttggggagtccctggcacactcattccccaccacactgaatcttccctcctcacacattccat

SEQ ID NO: 6919 - DNA, 2762 bp, Homo sapiens
gggcccagatagaacaagaaggcagaagaaatgtgaattcctctttctctgctggagctgggatattcttcttctcctgcccttggacatcagagctgcaggctctctggcctttggacccgaggatttataccaagcaggtttctgggttctcaggcctttggccttggactgatagttacaccattggcatatctggttctgaggctcttggtcttggactgagccacactcctggcatcccagcgtctccagcttgcatggcctgtcacgtgattcctgtcagaatcaccatttttggtaaacaaaccaagcccagaacctgataattatggagcattctacactgacagttctttgagacaaatttcctcttggcatttacactgtggctttagctttcaaaccagaggttcctcttacccagcaaaaaatggctttcccgaagatgagattgatgtatatttgccttctggttctgggggctctttgtttgtattttagcatgtacagtctaaatcctttcaaagaacagtcctttgtttacaagaaagacgggaacttccttaagctcccagatacagactgcargcagacacctcccttcctcgtcctgctggtgacctcatcccacaaacagttggctgagcgcatggccatccggcagacgtgggggaaagagaggacggtgaagggaaagcagctgaagacattcttcctcctggggaccaccagcagtgcagcggaaacaaaagaggtggaccaggagagccagcgacacggggacattatccagaaggatttcctagacgtctattacaatctgaccctgaagaccatgatgggcatagaatgggtccatcgcttttgtcctcaggcggcgtttgtgatgaaaacagactcagacatgttcatcaatgttgactatctgactgaactgcttcygaagaaaaacagaacaaccaggtttttcactggcttcttgaaactcaatgagtttcccatcaggcagccattcagcaagtggtttgtcagtaaatctgaatatccgtgggacaggtacccaccattctgctccggcaccggctacgtgttttctggcgacgtggcgagtcaggtgtacaatgtctccaagagcgtcccatacattaaactggaagacgtgtttgtggggctctgcctcgaaaggctgaacatcagattggaggagctccactcccagccgaccttttttccagggggcttacgcttctccgtytgcctcttcaggaggatcgtggcctgccacttcatcaagcctcggactctcttggactactggcaggctctagagaattcccggggggaagattgtccgcctgtctgaggggagcccagaggcacatccggacaagtttcagataacccgtggggatagtttttgctagattttggaagagggggcgggacagaggatgctgttcttcagtgctgaaatccacgccagaatgtcggtgttcatgaagtcactgattagttcccacttggtgccccaggcaataataggcccgtctcttgggcacgcacactctrcatactaagtgtttgacatacacctggattrttgcatttcaggggtcagtatcctatgacatgatgggtgttaccatcctaattttacaggcaaggacacagcagctgcgagaggtacagaaacttgtcccaaggctcacagccagtaggcataggagcgggaatgaaaatcgagcactgtcagaatctggtgggcagcccctgacttgaaccactcccacgtgctgcctcccttaggaggggacactgatgatgaggtctcggagccggcatccttccatccctgtcgagtcccctccacctcagctcccagtccttgtgctttttggagctaagcctgggatgaccaaattcaccccagctccttcattcacagggctggatgtagctgggattgagtccatgttatcggctcggtactcaacacaarccaagtttcatccgaggaaatgtccccgcagtggatgcagctcacatgctgaggaacacccagctctggacagagttcttataaatgtataaattaggctcagaaaccactgcattctgacctgctgtacagactgcccacactgctgacctgcctagcaagcaggacatcccttctgagccatctgctgctctctcatttcatcaccccaactgtcccttgtttttgatcaatggggaccagccactgccccaggagcactttagggctctcagttcaaactgaaggacagttgaactcagatggggttcatgtgggattctgggagctttctgggaattcagttggagtcaagtcaggatgctctcaaggacccctcgggctcagagccctaaagtgggccctggtgaagcagggtggtcctgcgtccacttcccaagcctgagccaagctcatcttcattgaatgtctcatttggccgaggaacaactgaactttgtggtttgctgtttagccttcagtttgctccgctgcctcctacccagaggtttgtgcgagcctgtgttgcagggttgtataaaaccaaggtacttcgttagttttgcccattcagccatggtcacgtgacatgcaaagtaatcttgctcctaattatagaaatgatttttcttttaattttttactttaccagactttactttgtactcagagaagaggcctcacatggctgtgtcacatataaatgttggactaaactctt

SEQ ID NO: 6920 - DNA, 2871 bp, Homo sapiens
gggcccagatagaacaagaaggcagaagaaatgtgaattcctctttctctgctggagctgggatattcttcttctcctgcccttggacatcagagctgcaggctctctggcctttggacccgaggatttataccaagcaggtttctgggttctcaggcctttggccttggactgatagttacaccattggcatatctggttctgaggctcttggtcttggactgagccacactcctggcatcccagcgtctccagcttgcatggcctgtcacgagaaccctgactaatacacctggagtgcagaatctgctggagaaactgccattccgttattgactggctggtcaggccatacagcctggtggtctagatgtgtttggagtgattcctgtcagaatcaccatttttggtaaacaaaccaagcccagaacctgataattatggagcattctacactgacagttctttgagacaaatttcctcttggcatttacactgtggctttagctttcaaaccagaggttcctcttacccagcaaaaaatggctttcccgaagatgagattgatgtatatttgccttctggttctgggggctctttgtttgtattttagcatgtacagtctaaatcctttcaaagaacagtcctttgtttacaagaaagacgggaacttccttaagctcccagatacagactgcargcagacacctcccttcctcgtcctgctggtgacctcatcccacaaacagttggctgagcgcatggccatccggcagacgtgggggaaagagaggacggtgaagggaaagcagctgaagacattcttcctcctggggaccaccagcagtgcagcggaaacaaaagaggtggaccaggagagccagcgacacggggacattatccagaaggatttcctagacgtctattacaatctgaccctgaagaccatgatgggcatagaatgggtccatcgcttttgtcctcaggcggcgtttgtgatgaaaacagactcagacatgttcatcaatgttgactatctgactgaactgcttcygaagaaaaacagaacaaccaggtttttcactggcttcttgaaactcaatgagtttcccatcaggcagccattcagcaagtggtttgtcagtaaatctgaatatccgtgggacaggtacccaccattctgctccggcaccggctacgtgttttctggcgacgtggcgagtcaggtgtacaatgtctccaagagcgtcccatacattaaactggaagacgtgtttgtggggctctgcctcgaaaggctgaacatcagattggaggagctccactcccagccgaccttttttccagggggcttacgcttctccgtytgcctcttcaggaggatcgtggcctgccacttcatcaagcctcggactctcttggactactggcaggctctagagaattcccggggggaagattgtccgcctgtctgaggggagcccagaggcacatccggacaagtttcagataacccgtggggatagtttttgctagattttggaagagggggcgggacagaggatgctgttcttcagtgctgaaatccacgccagaatgtcggtgttcatgaagtcactgattagttcccacttggtgccccaggcaataataggcccgtctcttgggcacgcacactctrcatactaagtgtttgacatacacctggattrttgcatttcaggggtcagtatcctatgacatgatgggtgttaccatcctaattttacaggcaaggacacagcagctgcgagaggtacagaaacttgtcccaaggctcacagccagtaggcataggagcgggaatgaaaatcgagcactgtcagaatctggtgggcagcccctgacttgaaccactcccacgtgctgcctcccttaggaggggacactgatgatgaggtctcggagccggcatccttccatccctgtcgagtcccctccacctcagctcccagtccttgtgctttttggagctaagcctgggatgaccaaattcaccccagctccttcattcacagggctggatgtagctgggattgagtccatgttatcggctcggtactcaacacaarccaagtttcatccgaggaaatgtccccgcagtggatgcagctcacatgctgaggaacacccagctctggacagagttcttataaatgtataaattaggctcagaaaccactgcattctgacctgctgtacagactgcccacactgctgacctgcctagcaagcaggacatcccttctgagccatctgctgctctctcatttcatcaccccaactgtcccttgtttttgatcaatggggaccagccactgccccaggagcactttagggctctcagttcaaactgaaggacagttgaactcagatggggttcatgtgggattctgggagctttctgggaattcagttggagtcaagtcaggatgctctcaaggacccctcgggctcagagccctaaagtgggccctggtgaagcagggtggtcctgcgtccacttcccaagcctgagccaagctcatcttcattgaatgtctcatttggccgaggaacaactgaactttgtggtttgctgtttagccttcagtttgctccgctgcctcctacccagaggtttgtgcgagcctgtgttgcagggttgtataaaaccaaggtacttcgttagttttgcccattcagccatggtcacgtgacatgcaaagtaatcttgctcctaattatagaaatgatttttcttttaattttttactttaccagactttactttgtactcagagaagaggcctcacatggctgtgtcacatataaatgttggactaaactctt

SEQ ID NO: 6921 - DNA, 2711 bp, Homo sapiens
  misc_feature (1)...(2711): n = A,T,C or G
gggcccagatagaacaagaaggcagaagaaatgtgaattcctctttctctgctggagctgggatattcttcttctcctgcccttggacatcagagctgcaggctctctggcctttggacccgaggatttataccaagcaggtttctgggttctcaggcctttggccttggactgatagttacaccattggcatatctggttctgaggctcttggtcttggactgagccacactcctggcatcccagcgtctccagcttgcatggcctgtcacgagaaccctgactaatacacctggagtgcagaatctgctggagaaactgccattccgttattgactggctggtcaggccatacagcctggtggtctagatgtgtttggagatggctttcccgaagatgagattgatgtatatttgccttctggttctgggggctctttgtttgtattttagcatgtacagtctaaatcctttcaaagaacagtcctttgtttacaagaaagacgggaacttccttaagctcccagatacagactgcaggcagacacctcccttcctcgtcctgctggtgacctcatcccacaaacagttggctgagcgcatggccatccggcagacgtgggggaaagagagganggtgaagggaaagcagctgaagacattcttcctcctggggaccaccagcagtgcagcggaaacraaagaggtggaccaggagagccagcgacacggggacattatccagaaggatttcctagacgtctattacaatctgaccctgaagaccatgatgggcatagaatgggtccatcrcttttgtcctcaggcggcgtttgtgatgaaaacagactcagacatgttcatcaatgttgactatctgactgaactgcttctgaagaaaaacagaacaaccaggtttttcactggcttcttgaaactcaatgagtttcccatcagrcagccattcagcaagtggtttgtcagtaaatctgaatatccgtgggacaggtacccaccattctgctccggcaccggctacgtgttttctggcgaygtggcgagtcaggtgtacaatgtctccaagagcgtcccatacattaaactggaagacgtgtttgtggggctctgcctcgaaaggctgaacatcagattggaggagctccactcccagccgaccttttttccagggggcttacgcttctccgtatgcctcttcaggaggatcgtggcctgccacttcatcaagcctcggactctcttggactactggcaggctctagagaattcccggggggaagattgtccgcctgtctgaggggagcccagaggcacatccggacaagtttcagataacccgtggggatagyttttgctagattttggaagagggggcgggacagaggatgctgttcttcagtgctgaaatccacgccagaatgtcggtgttcatgaagtcactgattagttcccacttggtgccccaggcaataataggcccgtctcttgggcacgcacactcttcatactaagtgtttgacatacacctggatttttgcatttcaggggtcagtatcctatgacatgatgggtgttaccatcctaattttacaggcaaggacacagcagctgcgagaggtacagaaacttgtcccaaggctcacagccagtaggcataggagcrggaatgaaaatcgagcactgtcagaatctgrtgggcagcccctgacttgaaccactcccacgtgctgcctcccttaggaggggacactgatgatgaggtctcggagccggcatccttccatccctgtcgagtcccctccacctcagctcccagtccttgtgctttttggagctaagcctgggatgaccaaattcaccccagctccttcattcacagggctggatgtagctgggattgagtccatgttatcggctcggtactcaacacaacccaagtttcatccgaggaaatgtccccgcagtggatgcagctcacatgctgaggaacacccagctctggacagagttcttataaatgtataaattaggctcagaaaccactgcattctgacctgctgtacagactgcccacactgctgacctgcctagcragcaggacatcccttctgagccatctgctgctctctcatttcatcaccccaactgtcccttgtttttgatcaatggggaccagccactgccccaggagcactttagggctctcagttcaaactgaaggacagttgaactcagatggggttcatgtgggattctgggagctttctgggaattcagttggagtcaagtcaggatgctctcaaggacccctcgggctcagagccctaaagtgggccctggtgaagcagggtggtcctgcgtccacttcccaagcctgagccaagctcatcttcattgaatgtctcatttggccgaggaacaactgaactttgtggtttgctgtttagccttcagtttgctccgctgcctcctacccagaggtttgtgcgagcctgtgttgcagggttgtataaaaccaaggtacttcgttagttttgcccattcagccatggtcacgtgacatgcaaagtaatcttgctcctaattatagaaatgatttttcttttaattttttactttaccagactttactttgtactcagagaagaggcctcacatggctgtgtcacatataaatgttggactaaactctt

SEQ ID NO: 6922 - DNA, 2629 bp, Homo sapiens
gggcccagatagaacaagaaggcagaagaaatgtgaattcctctttctctgctggagctgggatattcttcttctcctgcccttggacatcagagctgcaggctctctggcctttggacccgaggatttataccaagcagtgattcctgtcagaatcaccatttttggtaaacaaaccaagcccagaacctgataattatggagcattctacactgacagttctttgagacaaatttcctcttggcatttacactgtggctttagctttcaaaccagaggttcctcttacccagcaaaaaatggctttcccgaagatgagattgatgtatatttgccttctggttctgggggctctttgtttgtattttagcatgtacagtctaaatcctttcaaagaacagtcctttgtttacaagaaagacgggaacttccttaagctcccagatacagactgcargcagacacctcccttcctcgtcctgctggtgacctcatcccacaaacagttggctgagcgcatggccatccggcagacgtgggggaaagagaggacggtgaagggaaagcagctgaagacattcttcctcctggggaccaccagcagtgcagcggaaacaaaagaggtggaccaggagagccagcgacacggggacattatccagaaggatttcctagacgtctattacaatctgaccctgaagaccatgatgggcatagaatgggtccatcgcttttgtcctcaggcggcgtttgtgatgaaaacagactcagacatgttcatcaatgttgactatctgactgaactgcttcygaagaaaaacagaacaaccaggtttttcactggcttcttgaaactcaatgagtttcccatcaggcagccattcagcaagtggtttgtcagtaaatctgaatatccgtgggacaggtacccaccattctgctccggcaccggctacgtgttttctggcgacgtggcgagtcaggtgtacaatgtctccaagagcgtcccatacattaaactggaagacgtgtttgtggggctctgcctcgaaaggctgaacatcagattggaggagctccactcccagccgaccttttttccagggggcttacgcttctccgtytgcctcttcaggaggatcgtggcctgccacttcatcaagcctcggactctcttggactactggcaggctctagagaattcccggggggaagattgtccgcctgtctgaggggagcccagaggcacatccggacaagtttcagataacccgtggggatagtttttgctagattttggaagagggggcgggacagaggatgctgttcttcagtgctgaaatccacgccagaatgtcggtgttcatgaagtcactgattagttcccacttggtgccccaggcaataataggcccgtctcttgggcacgcacactctrcatactaagtgtttgacatacacctggattrttgcatttcaggggtcagtatcctatgacatgatgggtgttaccatcctaattttacaggcaaggacacagcagctgcgagaggtacagaaacttgtcccaaggctcacagccagtaggcataggagcgggaatgaaaatcgagcactgtcagaatctggtgggcagcccctgacttgaaccactcccacgtgctgcctcccttaggaggggacactgatgatgaggtctcggagccggcatccttccatccctgtcgagtcccctccacctcagctcccagtccttgtgctttttggagctaagcctgggatgaccaaattcaccccagctccttcattcacagggctggatgtagctgggattgagtccatgttatcggctcggtactcaacacaarccaagtttcatccgaggaaatgtccccgcagtggatgcagctcacatgctgaggaacacccagctctggacagagttcttataaatgtataaattaggctcagaaaccactgcattctgacctgctgtacagactgcccacactgctgacctgcctagcaagcaggacatcccttctgagccatctgctgctctctcatttcatcaccccaactgtcccttgtttttgatcaatggggaccagccactgccccaggagcactttagggctctcagttcaaactgaaggacagttgaactcagatggggttcatgtgggattctgggagctttctgggaattcagttggagtcaagtcaggatgctctcaaggacccctcgggctcagagccctaaagtgggccctggtgaagcagggtggtcctgcgtccacttcccaagcctgagccaagctcatcttcattgaatgtctcatttggccgaggaacaactgaactttgtggtttgctgtttagccttcagtttgctccgctgcctcctacccagaggtttgtgcgagcctgtgttgcagggttgtataaaaccaaggtacttcgttagttttgcccattcagccatggtcacgtgacatgcaaagtaatcttgctcctaattatagaaatgatttttcttttaattttttactttaccagactttactttgtactcagagaagaggcctcacatggctgtgtcacatataaatgttggactaaactctt

SEQ ID NO: 6923 - DNA, 3409 bp, Homo sapiens
  misc_feature (1)...(3409): n = A,T,C or G
gggcccagatagaacaagaaggcagaagaaatgtgaattcctctttctctgctggagctgggatattcttcttctcctgcccttggacatcagagctgcaggctctctggcctttggacccgaggatttataccaagcaggtttctgggttctcaggcctttggccttggactgatagttacaccattggcatatctggttctgaggctcttggtcttggactgagccacactcctggcatcccagcgtctccagcttgcatggcctgtcacgtgattcctgtcagaatcaccatttttggtaaacaaaccaagcccagaacctgataattatggagcattctacactgacagttctttgagacaaatttcctcttggcatttacactgtggctttagctttcaaaccagaggttcctcttacccagcaaaaagtgagttatacgctttcttaatgttataacgttaccatggatgatcctgaacttgccgaggatagcagagacgggtgggcagaacaggaaagaatcagatcagagactgtaaaaagtaacttaaaaaaaaataattctggcagagacagaatttgaaggtacttgtgcacatcagaacactggacttgcttttttctgggagcaggaatgctgcttaattagatcagagaagaatgcaagtggtccatacatttagatctacaatgcgtggtttccagacctgcagcttgttttgctgcgcttcatcatggagtcatagaagggcagagctggaggaccgagtgagggacctggtgccatatccctacagacaggcaattggagactcccgtaggttaagggctgcagagcctggaccaatgcccagaatctctgagctttttatcttacaccatgaagtgacagatgctggcagatgttagacctttgtgcttaactgtttaaccacacagcacccgacttctgtatgcagcgaggttctagagtttccaaaacacgggtctcctctcccacctcagcctcctagcataaaactagacacatcctcatgcttttgaggtctaatcattggattttgttcctttcagatggctttcccgaagatgagattgatgtatatttgccttctggttctgggggctctttgtttgtattttagcatgtacagtctaaatcctttcaaagaacagtcctttgtttacaagaaagacgggaacttccttaagctcccagatacagactgcaggcagacacctcccttcctcgtcctgctggtgacctcatcccacaaacagttggctgagcgcatggccatccggcagacgtgggggaaagagagganggtgaagggaaagcagctgaagacattcttcctcctggggaccaccagcagtgcagcggaaacraaagaggtggaccaggagagccagcgacacggggacattatccagaaggatttcctagacgtctattacaatctgaccctgaagaccatgatgggcatagaatgggtccatcrcttttgtcctcaggcggcgtttgtgatgaaaacagactcagacatgttcatcaatgttgactatctgactgaactgcttctgaagaaaaacagaacaaccaggtttttcactggcttcttgaaactcaatgagtttcccatcagrcagccattcagcaagtggtttgtcagtaaatctgaatatccgtgggacaggtacccaccattctgctccggcaccggctacgtgttttctggcgaygtggcgagtcaggtgtacaatgtctccaagagcgtcccatacattaaactggaagacgtgtttgtggggctctgcctcgaaaggctgaacatcagattggaggagctccactcccagccgaccttttttccagggggcttacgcttctccgtatgcctcttcaggaggatcgtggcctgccacttcatcaagcctcggactctcttggactactggcaggctctagagaattcccggggggaagattgtccgcctgtctgaggggagcccagaggcacatccggacaagtttcagataacccgtggggatagyttttgctagattttggaagagggggcgggacagaggatgctgttcttcagtgctgaaatccacgccagaatgtcggtgttcatgaagtcactgattagttcccacttggtgccccaggcaataataggcccgtctcttgggcacgcacactcttcatactaagtgtttgacatacacctggatttttgcatttcaggggtcagtatcctatgacatgatgggtgttaccatcctaattttacaggcaaggacacagcagctgcgagaggtacagaaacttgtcccaaggctcacagccagtaggcataggagcrggaatgaaaatcgagcactgtcagaatctgrtgggcagcccctgacttgaaccactcccacgtgctgcctcccttaggaggggacactgatgatgaggtctcggagccggcatccttccatccctgtcgagtcccctccacctcagctcccagtccttgtgctttttggagctaagcctgggatgaccaaattcaccccagctccttcattcacagggctggatgtagctgggattgagtccatgttatcggctcggtactcaacacaacccaagtttcatccgaggaaatgtccccgcagtggatgcagctcacatgctgaggaacacccagctctggacagagttcttataaatgtataaattaggctcagaaaccactgcattctgacctgctgtacagactgcccacactgctgacctgcctagcragcaggacatcccttctgagccatctgctgctctctcatttcatcaccccaactgtcccttgtttttgatcaatggggaccagccactgccccaggagcactttagggctctcagttcaaactgaaggacagttgaactcagatggggttcatgtgggattctgggagctttctgggaattcagttggagtcaagtcaggatgctctcaaggacccctcgggctcagagccctaaagtgggccctggtgaagcagggtggtcctgcgtccacttcccaagcctgagccaagctcatcttcattgaatgtctcatttggccgaggaacaactgaactttgtggtttgctgtttagccttcagtttgctccgctgcctcctacccagaggtttgtgcgagcctgtgttgcagggttgtataaaaccaaggtacttcgttagttttgcccattcagccatggtcacgtgacatgcaaagtaatcttgctcctaattatagaaatgatttttcttttaattttttactttaccagactttactttgtactcagagaagaggcctcacatggctgtgtcacatataaatgttggactaaactctt

SEQ ID NO: 6924 - DNA, 4165 bp, Homo sapiens
gtgtctgcggcgccgagggggcccctacaagaccgagcccgccaccgacctcggccgctggcgactcaactgcgagaggggccggcagacgtggacctacctgcaggacgagcgcgccggccgcgagcagaccggcctggaagcctacgccctggggctggacaccaagaattactttaaggacttgcccaaagcccacaccgcctttgagggggctctgaacgggatgacattttacgtggggctgcaggctgaggatgggcactggacgggtgattatggtggcccacttttcctcctgccaggcctcctgatcacttgccacgtggcacgcatccctctgccagcyggatacagagaagagattgtgcggtacctgcggtcagtgcagctccctgacggtggctggggcctgcacattgaggataagtccaccgtgtttgggactgcgctcaactatgtgtctctcagaattctgggtgttgggcctgacgatcctgacctggtacragcccggaacattcttcacaagaaaggtggtgctgtggccatcccctcctgggggaagttctggctggctgtcctgaatgtttacagctgggaaggcctcaataccctgttcccagagatgtggctgtttcctgactgggcaccggcacacccctccacactctggtgccactgccggcaggtgtacctgcccatgagctactgctacgccgttcggctgagtgccgyggaagacccgctggtccagagcctccgccaggagctctatgtggaggacttcgccagcattgactggctggcgcagaggaacaacgtggcccccgacgagctgtacacgccscacagctggctgctccgcgtggtatatgcgctcctcaacctgtatgagcaccaccacagtgcccrcctgcggcagcgggccgtgcagaagctgtatgaacacattgtggccgacgaccgattcaccaagagcatcagcatcggcccgatctcgaaaaccatcaacatgcttgtgcgctggtatgtggacgggcccgcctccactgccttccaggagcatgtctccagaatcccggactatctctggatgggccttgacggcatgaaaatgcagggcaccaacggctcacagatctgggacaccgcattcgccatccaggctctgcttgaggcgggcgggcaccacaggcccgagttttcgtcctgcctgcagaaggctcatgagttcctgaggctctcacaggtcccagataaccctcccgactaccagaagtactaccgccagatgcgcaagggtggcttctccttcagtacgctggactgcggctggatcgtttctgactgcacggctgaggccttgaaggctgtgctgctcctgcaggagaagtgtccccatgtcaccgagcacatccccagagaacggctctgcgatgctgtggctgtgctgctgaacatgagaaatccagatggagggttcgccacctatgagaccaagcgtggggggcacttgctggagctgctgaacccctcggaggtcttcggggacatcatgattgactacacctatgtggagtgcacctcagccgtgatgcaggcgcttaagtatttccacaagcgtttcccggagcacagggcagcggagatccgggagaccctcacgcagggcttagagttctgtcggcggcagcagagggccgatggctcctgggaaggctcctggggagtttgcttcacctacggcacctggtttggcctggaggccttcgcctgtatggggcagacctaccgagatgggactgcctgtgcagaggtctccygggcctgtgacttcctgctgtcccrgcagatggcagacggaggctggggggaggactttgagtcctgcgaggagcggcgttatktgcagagtgcccagtcccagatccayaacacatgctgggccatgatggggctgatggccgttcggcatcctgacatcgaggcccaggagagaggagtccggtgtctacttgagaaacagctccccaatggcgactggccgcaggaaaacattgctggggtcttcaacaagtcctgtgccatctcctacacgagctacaggaacatcttccccatctgggccctcggccgcttctcccagctgtaccctgagagagcccttgctggccacccctgagaacatgcctacctgctgggtgccgtctgtgcgttccagtgaggccaaggggtcctggccgggttggggagccctcccataaccctgtcttgggctccaacccctcaacytctatctcatagatgtgaatctgggggccaggctggaggcagggatggggacagggtgggtggcttagactcttgatttttactgtaggttcatttctgaaagtagcttgtcgggcttgggtgaggaagggggcacaggagccgtgacccctgaggaggcacagcgccttctgccacctctgggcacggcctcaaggtagtgaggctaggaggttttttctgaccaatagctgagttcttgggagaggagcagctgtgcctgtgtgattccttagtgtcgagtgggctctgggctggggtcggccctgggcaggcttctcctgcaccttttgtctgctgggctgagggacacgagggcaaccctgtgacaatggcaggtagtgtgcatccgtgaatagcccagtgcgggggttgctcatggagcatcctgaggccgtgcagcagggagccccatgcccctgggtcgtgagcttgcctgcgtatggggtggtgtcatggagcctcatgcccctgggtcgtgagctcgcctgagtatggggtggtgtcatggagccgcatacccctgggttgtgagctcgcctgcatatgcagggtctgtcatggaacatcccaagtctgtgcagcagggagccccatgcccctgggacatgaacccacctgcgtggaatgctgtttgtgaggtgtctacagggtttatagtagtcttgtggacacagaaatgcacaggggacacttacggacacagaaatgcacaggggaggccgagcataaccaggggtgaggggcaggcagcagttgtagttactgccgcggggcactgctatgtgcagggacagccagcrcccagcccatcaccactccctgggctggctggcaggtatggcaccctgggagcccggcatatacccagggcacccctacggctgccgccagtctcatgcccaggtgggtgctctgggctggagcgagggccaggttttgggccgaggcttccccaggcaatcctgtgagctcccttctagcctctgacccagtctggtctggcttgcatggatgtagggcttggggtgggaagttcaggtcctggctttgcctttgcctgatgtggatgagcagctcacatgctcagggccacctgagactgtcactgctctcccctggctactgggaggagtcrctgagagcttcgttacccctgctgccttgcccagggcacaccctatacctcctyatctgctcttcccctccctgccgccttctgggcaggtagcagtccctggcctctccccctggctgatcactctccctcaggcagtggagatctgcgtctggacaccctcagatcctgtcattgcctgcccagagtccttcaggggcacccctctgccttggtgtgcrgtccagggctctcacccaggtgccgcaccctctggggtcttctgtccagctcccttgccccatgtgctgtcactgactctccttgggactcgcctgcctgctcagagccctgcagggcttggtcagctgcctgttcagtgtcaacacttccctgcacatcttaaaactgggctttattttcgctgaaggaactgtgttgggacccttgacatctgtcaggtttgcacatgctgtttttttttctcagcccacgtgttctcccccacgtggggtagcagcaggacagacagtgaatcacagagtctgccctgagcagaggctgctgtccctgggactcctagccatggtcagactgtacaaaacggttttccagaaatgaaatgtaaatccatttttatactgaaaatgttactgaaagtcacttttatgagcatctgccttaataaacagacattgattcccttatcagaag

SEQ ID NO: 6925 - DNA, 4253 bp, Homo sapiens
tgggcggcgtagagcactgcagcagcaatgacggagggcacgtgagtcccctcgccccgggctcctgacgaatgcrgggtggtcctaggtgtctgcggcgccgagggggcccctacaagaccgagcccgccaccgacctcggccgctggcgactcaactgcgagaggggccggcagacgtggacctacctgcaggacgagcgcgccggccgcgagcagaccggcctggaagcctacgccctggggctggacaccaagaattactttaaggacttgcccaaagcccacaccgcctttgagggggctctgaacgggatgacattttacgtggggctgcaggctgaggatgggcactggacgggtgattatggtggcccacttttcctcctgccaggcctcctgatcacttgccacgtggcacgcatccctctgccagcyggatacagagaagagattgtgcggtacctgcggtcagtgcagctccctgacggtggctggggcctgcacattgaggataagtccaccgtgtttgggactgcgctcaactatgtgtctctcagaattctgggtgttgggcctgacgatcctgacctggtacragcccggaacattcttcacaagaaaggtggtgctgtggccatcccctcctgggggaagttctggctggctgtcctgaatgtttacagctgggaaggcctcaataccctgttcccagagatgtggctgtttcctgactgggcaccggcacacccctccacactctggtgccactgccggcaggtgtacctgcccatgagctactgctacgccgttcggctgagtgccgyggaagacccgctggtccagagcctccgccaggagctctatgtggaggacttcgccagcattgactggctggcgcagaggaacaacgtggcccccgacgagctgtacacgccscacagctggctgctccgcgtggtatatgcgctcctcaacctgtatgagcaccaccacagtgcccrcctgcggcagcgggccgtgcagaagctgtatgaacacattgtggccgacgaccgattcaccaagagcatcagcatcggcccgatctcgaaaaccatcaacatgcttgtgcgctggtatgtggacgggcccgcctccactgccttccaggagcatgtctccagaatcccggactatctctggatgggccttgacggcatgaaaatgcagggcaccaacggctcacagatctgggacaccgcattcgccatccaggctctgcttgaggcgggcgggcaccacaggcccgagttttcgtcctgcctgcagaaggctcatgagttcctgaggctctcacaggtcccagataaccctcccgactaccagaagtactaccgccagatgcgcaagggtggcttctccttcagtacgctggactgcggctggatcgtttctgactgcacggctgaggccttgaaggctgtgctgctcctgcaggagaagtgtccccatgtcaccgagcacatccccagagaacggctctgcgatgctgtggctgtgctgctgaacatgagaaatccagatggagggttcgccacctatgagaccaagcgtggggggcacttgctggagctgctgaacccctcggaggtcttcggggacatcatgattgactacacctatgtggagtgcacctcagccgtgatgcaggcgcttaagtatttccacaagcgtttcccggagcacagggcagcggagatccgggagaccctcacgcagggcttagagttctgtcggcggcagcagagggccgatggctcctgggaaggctcctggggagtttgcttcacctacggcacctggtttggcctggaggccttcgcctgtatggggcagacctaccgagatgggactgcctgtgcagaggtctccygggcctgtgacttcctgctgtcccrgcagatggcagacggaggctggggggaggactttgagtcctgcgaggagcggcgttatktgcagagtgcccagtcccagatccayaacacatgctgggccatgatggggctgatggccgttcggcatcctgacatcgaggcccaggagagaggagtccggtgtctacttgagaaacagctccccaatggcgactggccgcaggaaaacattgctggggtcttcaacaagtcctgtgccatctcctacacgagctacaggaacatcttccccatctgggccctcggccgcttctcccagctgtaccctgagagagcccttgctggccacccctgagaacatgcctacctgctgggtgccgtctgtgcgttccagtgaggccaaggggtcctggccgggttggggagccctcccataaccctgtcttgggctccaacccctcaacytctatctcatagatgtgaatctgggggccaggctggaggcagggatggggacagggtgggtggcttagactcttgatttttactgtaggttcatttctgaaagtagcttgtcgggcttgggtgaggaagggggcacaggagccgtgacccctgaggaggcacagcgccttctgccacctctgggcacggcctcaaggtagtgaggctaggaggttttttctgaccaatagctgagttcttgggagaggagcagctgtgcctgtgtgattccttagtgtcgagtgggctctgggctggggtcggccctgggcaggcttctcctgcaccttttgtctgctgggctgagggacacgagggcaaccctgtgacaatggcaggtagtgtgcatccgtgaatagcccagtgcgggggttgctcatggagcatcctgaggccgtgcagcagggagccccatgcccctgggtcgtgagcttgcctgcgtatggggtggtgtcatggagcctcatgcccctgggtcgtgagctcgcctgagtatggggtggtgtcatggagccgcatacccctgggttgtgagctcgcctgcatatgcagggtctgtcatggaacatcccaagtctgtgcagcagggagccccatgcccctgggacatgaacccacctgcgtggaatgctgtttgtgaggtgtctacagggtttatagtagtcttgtggacacagaaatgcacaggggacacttacggacacagaaatgcacaggggaggccgagcataaccaggggtgaggggcaggcagcagttgtagttactgccgcggggcactgctatgtgcagggacagccagcrcccagcccatcaccactccctgggctggctggcaggtatggcaccctgggagcccggcatatacccagggcacccctacggctgccgccagtctcatgcccaggtgggtgctctgggctggagcgagggccaggttttgggccgaggcttccccaggcaatcctgtgagctcccttctagcctctgacccagtctggtctggcttgcatggatgtagggcttggggtgggaagttcaggtcctggctttgcctttgcctgatgtggatgagcagctcacatgctcagggccacctgagactgtcactgctctcccctggctactgggaggagtcrctgagagcttcgttacccctgctgccttgcccagggcacaccctatacctcctyatctgctcttcccctccctgccgccttctgggcaggtagcagtccctggcctctccccctggctgatcactctccctcaggcagtggagatctgcgtctggacaccctcagatcctgtcattgcctgcccagagtccttcaggggcacccctctgccttggtgtgcrgtccagggctctcacccaggtgccgcaccctctggggtcttctgtccagctcccttgccccatgtgctgtcactgactctccttgggactcgcctgcctgctcagagccctgcagggcttggtcagctgcctgttcagtgtcaacacttccctgcacatcttaaaactgggctttattttcgctgaaggaactgtgttgggacccttgacatctgtcaggtttgcacatgctgtttttttttctcagcccacgtgttctcccccacgtggggtagcagcaggacagacagtgaatcacagagtctgccctgagcagaggctgctgtccctgggactcctagccatggtcagactgtacaaaacggttttccagaaatgaaatgtaaatccatttttatactgaaaatgttactgaaagtcacttttatgagcatctgccttaataaacagacattgattcccttatcagaag

SEQ ID NO: 6926 - DNA, 3816 bp, Homo sapiens
gcggcaggtcccgggtgcggacatctggcagctggcagtgggcggcgtagagcactgcagcagcaatgacggagggcacgtgtctgcggcgccgagggggcccctacaagaccgagcccgccaccgacctcggccgctggcgactcaactgcgagaggggccggcagacgtggacctacctgcaggacgagcgcgccggccgcgagcagaccggcctggaagcctacgccctggggctggacaccaagaattactttaaggacttgcccaaagcccacaccgcctttgagggggctctgaacgggatgacattttacgtggggctgcaggctgaggatgggcactggacgggtgattatggtggcccacttttcctcctgccaggcctcctgatcacttgccacgtggcacgcatccctctgccagcyggatacagagaagagattgtgcggtacctgcggtcagtgcagctccctgacggtggctggggcctgcacattgaggataagtccaccgtgtttgggactgcgctcaactatgtgtctctcagaattctgggtgttgggcctgacgatcctgacctggtacragcccggaacattcttcacaagaaaggtggtgctgtggccatcccctcctgggggaagttctggctggctgtcctgaatgtttacagctgggaaggcctcaataccctgttcccagagatgtggctgtttcctgactgggcaccggcacacccctccacactctggtgccactgccggcaggtgtacctgcccatgagctactgctacgccgttcggctgagtgccgyggaagacccgctggtccagagcctccgccaggagctctatgtggaggacttcgccagcattgactggctggcgcagaggaacaacgtggcccccgacgagctgtacacgccscacagctggctgctccgcgtggtatatgcgctcctcaacctgtatgagcaccaccacagtgcccrcctgcggcagcgggccgtgcagaagctgtatgaacacattgtggccgacgaccgattcaccaagagcatcagcatcggcccgatctcgaaaaccatcaacatgcttgtgcgctggtatgtggacgggcccgcctccactgccttccaggagcatgtctccagaatcccggactatctctggatgggccttgacggcatgaaaatgcagggcaccaacggctcacagatctgggacaccgcattcgccatccaggctctgcttgaggcgggcgggcaccacaggcccgagttttcgtcctgcctgcagaaggctcatgagttcctgaggctctcacaggtcccagataaccctcccgactaccagaagtactaccgccagatgcgcaagggtggcttctccttcagtacgctggactgcggctggatcgtttctgactgcacggctgaggccttgaaggctgtgctgctcctgcaggagaagtgtccccatgtcaccgagcacatccccagagaacggctctgcgatgctgtggctgtgctgctgaacatgagaaatccagatggagggttcgccacctatgagaccaagcgtggggggcacttgctggagctgctgaacccctcggaggtcttcggggacatcatgattgactacacctatgtggagtgcacctcagccgtgatgcaggcgcttaagtatttccacaagcgtttcccggagcacagggcagcggagatccgggagaccctcacgcagggcttagagttctgtcggcggcagcagagggccgatggctcctgggaaggctcctggggagtttgcttcacctacggcacctggtttggcctggaggccttcgcctgtatggggcagacctaccgagatgggactgcctgtgcagaggtctccygggcctgtgacttcctgctgtcccrgcagatggcagacggaggctggggggaggactttgagtcctgcgaggagcggcgttatktgcagagtgcccagtcccagatccayaacacatgctgggccatgatggggctgatggccgttcggcatcctgacatcgaggcccaggagagaggagtccggtgtctacttgagaaacagctccccaatggcgactggccgcaggaaaacattgctggggtcttcaacaagtcctgtgccatctcctacacgagctacaggaacatcttccccatctgggccctcggccgcttctcccagctgtaccctgagagagcccttgctggccacccctgagaacatgcctacctgctgggtgccgtctgtgcgttccagtgaggccaaggggtcctggccgggttggggagccctcccataaccctgtcttgggctccaacccctcaacytctatctcatagatgtgaatctgggggccaggctggaggcagggatggggacagggtgggtggcttagactcttgatttttactgtaggttcatttctgaaagtagcttgtcgggcttgggtgaggaagggggcacaggagccgtgacccctgaggaggcacagcgccttctgccacctctgggcacggcctcaaggtagtgaggctaggaggttttttctgaccaatagctgagttcttgggagaggagcagctgtgcctgtgtgattccttagtgtcgagtgggctctgggctggggtcggccctgggcaggcttctcctgcaccttttgtctgctgggctgagggacacgagggcaaccctgtgacaatggcaggtagtgtgcatccgtgaatagcccagtgcgggggttgctcatggagcatcctgaggccgtgcagcagggagccccatgcccctgggtcgtgagcttgcctgcgtatggggtggtgtcatggagcctcatgcccctgggtcgtgagctcgcctgagtatggggtggtgtcatggagccgcatacccctgggttgtgagctcgcctgcatatgcagggtctgtcatggaacatcccaagtctgtgcagcagggagccccatgcccctgggacatgaacccacctgcgtggaatgctgtttgtgaggtgtctacagggtttatagtagtcttgtggacacagaaatgcacaggggacacttacggacacagaaatgcacaggggaggccgagcataaccaggggtgaggggcaggcagcagttgtagttactgccgcggggcactgctatgtgcagggacagccagcrcccagcccatcaccactccctgggctggctggcaggtatggcaccctgggagcccggcatatacccagggcacccctacggctgccgccagtctcatgcccaggtgggtgctctgggctggagcgagggccaggttttgggccgaggcttccccaggcaatcctgtgagctcccttctagcctctgacccagtctggtctggcttgcatggatgtagggcttggggtgggaagttcaggtcctggctttgcctttgcctgatgtggatgagcagctcacatgctcagggccacctgagactgtcactgctctcccctggctactgggaggagtcrctgagagcttcgttacccctgctgccttgcccagggcacaccctatacctcctyatctgctcttcccctccctgccgccttctgggcaggtagcagtccctggcctctccccctggctgctgtccctgggactcctagccatggtcagactgtacaaaacggttttccagaaatgaaatgtaaatccatttttatactgaaaatgttactgaaagtcacttttatgagcatctgccttaataaacagacattgattcccttatca

SEQ ID NO: 6927 - DNA, 4244 bp, Homo sapiens
gcggcaggtcccgggtgcggacatctggcagctggcagtgggcggcgtagagcactgcagcagcaatgacggagggcacgtgtctgcggcgccgagggggcccctacaagaccgagcccgccaccgacctcggccgctggcgactcaactgcgagaggggccggcagacgtggacctacctgcaggacgagcgcgccggccgcgagcagaccggcctggaagcctacgccctggggctggacaccaagaattactttaaggacttgcccaaagcccacaccgcctttgagggggctctgaacgggatgacattttacgtggggctgcaggctgaggatgggcactggacgggtgattatggtggcccacttttcctcctgccaggcctcctgatcacttgccacgtggcacgcatccctctgccagcyggatacagagaagagattgtgcggtacctgcggtcagtgcagctccctgacggtggctggggcctgcacattgaggataagtccaccgtgtttgggactgcgctcaactatgtgtctctcagaattctgggtgttgggcctgacgatcctgacctggtacragcccggaacattcttcacaagaaaggtggtgctgtggccatcccctcctgggggaagttctggctggctgtcctgaatgtttacagctgggaaggcctcaataccctgttcccagagatgtggctgtttcctgactgggcaccggcacacccctccacactctggtgccactgccggcaggtgtacctgcccatgagctactgctacgccgttcggctgagtgccgyggaagacccgctggtccagagcctccgccaggagctctatgtggaggacttcgccagcattgactggctggcgcagaggaacaacgtggcccccgacgagctgtacacgccscacagctggctgctccgcgtggtatatgcgctcctcaacctgtatgagcaccaccacagtgcccrcctgcggcagcgggccgtgcagaagctgtatgaacacattgtggccgacgaccgattcaccaagagcatcagcatcggcccgatctcgaaaaccatcaacatgcttgtgcgctggtatgtggacgggcccgcctccactgccttccaggagcatgtctccagaatcccggactatctctggatgggccttgacggcatgaaaatgcagggcaccaacggctcacagatctgggacaccgcattcgccatccaggctctgcttgaggcgggcgggcaccacaggcccgagttttcgtcctgcctgcagaaggctcatgagttcctgaggctctcacaggtcccagataaccctcccgactaccagaagtactaccgccagatgcgcaagggtggcttctccttcagtacgctggactgcggctggatcgtttctgactgcacggctgaggccttgaaggctgtgctgctcctgcaggagaagtgtccccatgtcaccgagcacatccccagagaacggctctgcgatgctgtggctgtgctgctgaacatgagaaatccagatggagggttcgccacctatgagaccaagcgtggggggcacttgctggagctgctgaacccctcggaggtcttcggggacatcatgattgactacacctatgtggagtgcacctcagccgtgatgcaggcgcttaagtatttccacaagcgtttcccggagcacagggcagcggagatccgggagaccctcacgcagggcttagagttctgtcggcggcagcagagggccgatggctcctgggaaggctcctggggagtttgcttcacctacggcacctggtttggcctggaggccttcgcctgtatggggcagacctaccgagatgggactgcctgtgcagaggtctccygggcctgtgacttcctgctgtcccrgcagatggcagacggaggctggggggaggactttgagtcctgcgaggagcggcgttatktgcagagtgcccagtcccagatccayaacacatgctgggccatgatggggctgatggccgttcggcatcctgacatcgaggcccaggagagaggagtccggtgtctacttgagaaacagctccccaatggcgactggccgcaggaaaacattgctggggtcttcaacaagtcctgtgccatctcctacacgagctacaggaacatcttccccatctgggccctcggccgcttctcccagctgtaccctgagagagcccttgctggccacccctgagaacatgcctacctgctgggtgccgtctgtgcgttccagtgaggccaaggggtcctggccgggttggggagccctcccataaccctgtcttgggctccaacccctcaacytctatctcatagatgtgaatctgggggccaggctggaggcagggatggggacagggtgggtggcttagactcttgatttttactgtaggttcatttctgaaagtagcttgtcgggcttgggtgaggaagggggcacaggagccgtgacccctgaggaggcacagcgccttctgccacctctgggcacggcctcaaggtagtgaggctaggaggttttttctgaccaatagctgagttcttgggagaggagcagctgtgcctgtgtgattccttagtgtcgagtgggctctgggctggggtcggccctgggcaggcttctcctgcaccttttgtctgctgggctgagggacacgagggcaaccctgtgacaatggcaggtagtgtgcatccgtgaatagcccagtgcgggggttgctcatggagcatcctgaggccgtgcagcagggagccccatgcccctgggtcgtgagcttgcctgcgtatggggtggtgtcatggagcctcatgcccctgggtcgtgagctcgcctgagtatggggtggtgtcatggagccgcatacccctgggttgtgagctcgcctgcatatgcagggtctgtcatggaacatcccaagtctgtgcagcagggagccccatgcccctgggacatgaacccacctgcgtggaatgctgtttgtgaggtgtctacagggtttatagtagtcttgtggacacagaaatgcacaggggacacttacggacacagaaatgcacaggggaggccgagcataaccaggggtgaggggcaggcagcagttgtagttactgccgcggggcactgctatgtgcagggacagccagcrcccagcccatcaccactccctgggctggctggcaggtatggcaccctgggagcccggcatatacccagggcacccctacggctgccgccagtctcatgcccaggtgggtgctctgggctggagcgagggccaggttttgggccgaggcttccccaggcaatcctgtgagctcccttctagcctctgacccagtctggtctggcttgcatggatgtagggcttggggtgggaagttcaggtcctggctttgcctttgcctgatgtggatgagcagctcacatgctcagggccacctgagactgtcactgctctcccctggctactgggaggagtcrctgagagcttcgttacccctgctgccttgcccagggcacaccctatacctcctyatctgctcttcccctccctgccgccttctgggcaggtagcagtccctggcctctccccctggctgatcactctccctcaggcagtggagatctgcgtctggacaccctcagatcctgtcattgcctgcccagagtccttcaggggcacccctctgccttggtgtgcrgtccagggctctcacccaggtgccgcaccctctggggtcttctgtccagctcccttgccccatgtgctgtcactgactctccttgggactcgcctgcctgctcagagccctgcagggcttggtcagctgcctgttcagtgtcaacacttccctgcacatcttaaaactgggctttattttcgctgaaggaactgtgttgggacccttgacatctgtcaggtttgcacatgctgtttttttttctcagcccacgtgttctcccccacgtggggtagcagcaggacagacagtgaatcacagagtctgccctgagcagaggctgctgtccctgggactcctagccatggtcagactgtacaaaacggttttccagaaatgaaatgtaaatccatttttatactgaaaatgttactgaaagtcacttttatgagcatctgccttaataaacagacattgattcccttatcagaag

SEQ ID NO: 6928 - DNA, 3167 bp, Homo sapiens
gcggcaggtcccgggtgcggacatctggcagctggcagtgggcggcgtagagcactgcagcagcaatgacggagggcacgtgtctgcggcgccgagggggcccctacaagaccgagcccgccaccgacctcggccgctggcgactcaactgcgagaggggccggcagacgtggacctacctgcaggacgagcgcgccggccgcgagcagaccggcctggaagcctacgccctggggctggacaccaagaattactttaaggacttgcccaaagcccacaccgcctttgagggggctctgaacgggatgacattttacgtggggctgcaggctgaggatgggcactggacgggtgattatggtggcccacttttcctcctgccaggcctcctgatcacttgccacgtggcacgcatccctctgccagcyggatacagagaagagattgtgcggtacctgcggtcagtgcagctccctgacggtggctggggcctgcacattgaggataagtccaccgtgtttgggactgcgctcaactatgtgtctctcagaattctgggtgttgggcctgacgatcctgacctggtacragcccggaacattcttcacaagaaaggtggtgctgtggccatcccctcctgggggaagttctggctggctgtcctgaatgtttacagctgggaaggcctcaataccctgttcccagagatgtggctgtttcctgactgggcaccggcacacccctccacactctggtgccactgccggcaggtgtacctgcccatgagctactgctacgccgttcggctgagtgccgyggaagacccgctggtccagagcctccgccaggagctctatgtggaggacttcgccagcattgactggctggcgcagaggaacaacgtggcccccgacgagctgtacacgccscacagctggctgctccgcgtggtatatgcgctcctcaacctgtatgagcaccaccacagtgcccrcctgcggcagcgggccgtgcagaagctgtatgaacacattgtggccgacgaccgattcaccaagagcatcagcatcggcccgatctcgaaaaccatcaacatgcttgtgcgctggtatgtggacgggcccgcctccactgccttccaggagcatgtctccagaatcccggactatctctggatgggccttgacggcatgaaaatgcagggcaccaacggctcacagatctgggacaccgcattcgccatccaggctctgcttgaggcgggcgggcaccacaggcccgagttttcgtcctgcctgcagaaggctcatgagttcctgaggctctcacaggtcccagataaccctcccgactaccagaagtactaccgccagatgcgcaagggtggcttctccttcagtacgctggactgcggctggatcgtttctgactgcacggctgaggccttgaaggctgtgctgctcctgcaggagaagtgtccccatgtcaccgagcacatccccagagaacggctctgcgatgctgtggctgtgctgctgaacatgagaaatccagatggagggttcgccacctatgagaccaagcgtggggggcacttgctggagctgctgaacccctcggaggtcttcggggacatcatgattgactacacctatgtggagtgcacctcagccgtgatgcaggcgcttaagtatttccacaagcgtttcccggagcacagggcagcggagatccgggagaccctcacgcagggcttagagttctgtcggcggcagcagagggccgatggctcctgggaaggctcctggggagtttgcttcacctacggcacctggtttggcctggaggccttcgcctgtatggggcagacctaccgagatgggactgcctgtgcagaggtctccygggcctgtgacttcctgctgtcccrgcagatggcagacggaggctggggggaggactttgagtcctgcgaggagcggcgttatktgcagagtgcccagtcccagatccayaacacatgctgggccatgatggggctgatggccgttcggcatcctgacatcgaggcccaggagagaggagtccggtgtctacttgagaaacagctccccaatggcgactggccgcaggaaaacattgctggggtcttcaacaagtcctgtgccatctcctacacgagctacaggaacatcttccccatctgggccctcggccgcttctcccagctgtaccctgagagagcccttgctggccacccctgagaacatgcctacctgctgggtgccgtctgtgcgttccatggccttcaagtcacaggacgcagcgattccctgccctcttcggtgttattacacaggcaggacttcagtgtcagtatccctgccttcagtcttctttagaaatcacatctgtgttcaatccattgtttagagggagtgtatttttcctgttccaygaagaggactttttgttcacaattggatcacaatgcagaggagtctgttcctcccccgtcggcttctcggtgctgggagggtgacctgtcccagatgactcatcmccctgacatgctcttgacaaaggacaccaccaagaggagatggcagctgtaccggtgcagcctctgtctgagggggatatttgcctcagtgtgattaaaaatcagtcatgaaagatttttgaattcagattatttttatcaggaacagattttgaacatcctgaaatcttttccctggcatcatattaggttttctttgttcactatgatgtaaagtttcagactcttgatatttttaatatcaacatagacggtaggacaaggaacggtaccagaaatgagtaaagagacaataatgataagatcgatttatcaagacataacaaccccaaatgtatatgcactaaataacagcttcaaaatacatgaagcaaaatggcagaattgaagagaatgagataaaaacagaattttaacgggtgctttccgtactttgtaactgacagacatgagatctgtaaggacagagatttgaacatcagccaacacaagcgagcggtctttagaggatgcttcacctaacactgctgaagcacacggctttgcaagagctcgtggcccatgtgctaaggtagaccacagctggctcaccaggtgagtctca

SEQ ID NO: 6929 - DNA, 822 bp, Homo sapiens
gcggggcgccgggccctgggcggggccttcccggctgacggcctgcgtgcactgcgcttgcgcgggttgagggcggtggctcagkctcctggaaaggaccgtccacccctccgcgctggcggtgtggacgcggaactcagcggagaaacgcgattgagagcagtgtgtggattacactatcacyggaaaaatacgaattgagaagaaggaaaagactggaagatgcagaccttggttcctgttagtggaaacactgtaaggtcccagaaatggaaaagaaaatgaaataaatcagcagttatgaggcagagcctaagagaactatggcaacatcaggtgactgtcccagaagtgaatcgcagggagaagagcctgctgagtgcagtgaggcgggtctcctgcaggagggagtacagccagaggagtttgtggccatcgcggactacgctgccaccgatgagacccagctcagttttttgagaggagaaaaaattcttatcctgagacaaaccactgcagattggtggtggggtgagcgtgcgggctgctgtgggtacattccggcaaaccatgtggggaagcacgtggatgagtacgaccccgaggacacgtggcaggatgaagagtacttcggcagctatggaactctgaaactccacttggagatgttggcagaccagccacgaacaactaaataccacagtgtcatcctgcagaataaagaatccctgacggataaagtcatcctggacgtgggctgtgggactgggatcatcagtctcttctgtgcacactatgcgcggcctagagcggtgagtgggg

SEQ ID NO: 6930 - DNA, 2981 bp, Homo sapiens
gcggggcgccgggccctgggcggggccttcccggctgacggcctgcgtgcactgcgcttgcgcgggttgagggcggtggctcagkctcctggaaaggaccgtccacccctccgcgctggcggtgtggacgcggaactcagcggagaaacgcgattgagagcagtgtgtggattacactatcacyggaaaaatacgaattgagaagaaggaaaagactggaagatgcagaccttggttcctgttagtggaaacactgtaaggtcccagaaatggaaaagaaaatgaaataaatcagcagttatgaggcagagcctaagagaactatggcaacatcaggtgactgtcccagaagtgaatcgcagggagaagagcctgctgagtgcagtgaggcgggtctcctgcaggagggagtacagccagaggagtttgtggccatcgcggactacgctgccaccgatgagacccagctcagttttttgagaggagaaaaaattcttatcctgagacaaaccactgcagattggtggtggggtgagcgtgcgggctgctgtgggtacattccggcaaaccatgtggggaagcacgtggatgagtacgaccccgaggacacgtggcaggatgaagagtacttcggcagctatggaactctgaaactccacttggagatgttggcagaccagccacgaacaactaaataccacagtgtcatcctgcagaataaagaatccctgacggataaagtcatcctggacgtgggctgtgggactgggatcatcagtctcttctgtgcacactatgcgcggcctagagcggtgtacgcggtggaggccagtgagatggcacagcacacggggcagctggtcctgcagaacggctttgctgacatcatcaccgtgtaccagcagaaggtggaggatgtggtgctgcccgagaaggtggacgtgctggtgtctgagtggatggggacctgcctgctgtttgagttcatgatcgagtccatcctgtatgcccgggatgcctggctgaaggaggacggggtcatttggcccaccatggctgcgttgcaccttgtgccctgcagtgctgataaggattatcgtagcaaggtgctcttctgggacaacgcgtacgagttcaacctcagcgctctgaaatctttagcagttaaggagtttttttcaaagcccaagtataaccacattttgaaaccagaagactgtctctctgaaccgtgcactatattgcagttggacatgagaaccgtgcaaatttctgatctagagaccctgaggggcgagctgcgcttcgacatcaggaaggcggggaccctgcacggcttcacggcctggtttagcgtccacttccagagcctgcaggaggggcagccgccgcagtgctcagcaccgggcccttccaccccaccacacactggaagcagacgctgttcatgatggacgacccagtccctgtccatacaggagacgtggtcacgggttcagttgtgttgcagagaaacccagtgtggagaaggcacatgtctgtggctctgagctgggctgtcacttccagacaagaccccacatctcaaaaagttggagaaaaagtcttccccatctggagatgacagttgatgctttatttggaaagcagtgtgcatatcttgaggggtgatgaacacaagcaaaccaagttgcacctggcttctgcacactcctgcgaaagtcggtgaacattcactccacattgacccctccctagcctggcaggtgacgtcagggtccttcacagacaaacacgcttgggctcggcaggagctgccgtggccacccccgctgcccagtgtctgccctctagaagtaggctgtgtttccaggtgttcacccgtggtgcccacagtgccgacccgtggctgggtcggagctccatgttcctaagctaggtctaggtctacactcctaggacgcacgcatatcagcccgtgtaccctgtgacagtgactgtccccacctcctrtgttagtggtgcccttactgccgtcgctcatccactcgtgtgggacgtaggattgcacagggctgtgccagtggcgtgtagggaacactgccctggctcagcgtgcgagctaaggtgkygatgtatgcgatgggactctgcatgggatagtacagttgtgtagacgtcttccaaataaattatgtgttggtscatcgcacatgctcaataaatatttttaaatgagtgaatgtcattgtgtatcctgttttatgcatatatgttattttttgtaattacaggatcatactatatgcattgctttataagtttttctcaatattgtgaaaaaacttccacatcagtagatacatgtccatamtttttttttgtattgttttgatttttattaaattttattgaaatataggctgggtgcagtggcttacctctgtaatcccaacactttgagaggctgaggtgggatgattccttgagctcaggagttcaagaccaccctgggcaacacagcgagatactatctctacaaaaaaaatagaaaaattagctgggcatggtggcgtgtgcctgtagtcccagctactcgggaggctgaggcggggggatcacttgagcccaggaggttgaggctgcagtgatctaggattgcactgctgcactccagcgtgggtgacagagcaagaccctgtctcaaaaaccccaaaaaacaaaactgaaatatcaaatatatattgaaaacagtkctagtcatgggtacatagatgatggcattttataaagtggacgcacatgtaaccagcatccaggccaggacacactacagattccccgattccccttccactcagtgcccaccctctcaagggtgatgtcctgacttgtaactgtcgattactcttgcctgaatggagttgtacacgtgttcttttgtgtctgccttctttaattaaacattgtttgtgagactc

SEQ ID NO: 6931 - DNA, 1927 bp, Homo sapiens
gaccgtccacccctccgcgctggcggtgtggacgcggaactcagcggagaaacgcgattgaggtaggtgtcctgatgggcagctcagatggctggactgcacgtaaggaaggacaggccagaaatggaaaagaaaatgaaataaatcagcagttatgaggcagagcctaagagaactatggcaacatcaggtgactgtcccagaagtgaatcgcagggagaagagcctgctgagtgcagtgaggcgggtctcctgcaggagggagtacagccagaggagtttgtggccatcgcggactacgctgccaccgatgagacccagctcagttttttgagaggagaaaaaattcttatcctgagacaaaccactgcagattggtggtggggtgagcgtgcgggctgctgtgggtacattccggcaaaccatgtggggaagcacgtggatgagtacgaccccgaggacacgtggcaggatgaagagtacttcggcagctatggaactctgaaactccacttggagatgttggcagaccagccacgaacaactaaataccacagtgtcatcctgcagaataaagaatccctgacggataaagtcatcctggacgtgggctgtgggactgggatcatcagtctcttctgtgcacactatgcgcggcctagagcggtgtacgcggtggaggccagtgagatggcacagcacacggggcagctggtcctgcagaacggctttgctgacatcatcaccgtgtaccagcagaaggtggaggatgtggtgctgcccgagaaggtggacgtgctggtgtctgagtggatggggacctgcctgctgtttgagttcatgatcgagtccatcctgtatgcccgggatgcctggctgaaggaggacggggtcatttggcccaccatggctgcgttgcaccttgtgccctgcagtgctgataaggattatcgtagcaaggtgctcttctgggacaacgcgtacgagttcaacctcagcgctctgaaatctttagcagttaaggagtttttttcaaagcccaagtataaccacattttgaaaccagaagactgtctctctgaaccgtgcactatattgcagttggacatgagaaccgtgcaaatttctgatctagagaccctgaggggcgagctgcgcttcgacatcaggaaggcggggaccctgcacggcttcacggcctggtttagcgtccacttccagagcctgcaggaggggcagccgccgcagtgctcagcaccgggcccttccaccccaccacacactggaagcagacgctgttcatgatggacgacccagtccctgtccatacaggagacgtggtcacgggttcagttgtgttgcagagaaacccagtgtggagaaggcacatgtctgtggctctgagctgggctgtcacttccagacaagaccccacatctcaaaaagttggagaaaaagtcttccccatctggagatgacagttgatgctttatttggaaagcagtgtgcatatcttgaggggtgatgaacacaagcaaaccaagttgcacctggcttctgcacactcctgcgaaagtcggtgaacattcactccacattgacccctccctagcctggcaggtgacgtcagggtccttcacagacaaacacgcttgggctcggcaggagctgccgtggccacccccgctgcccagtgtctgccctctagaagtaggctgtgtttccaggtgttcacccgtggtctaggtctacactcctaggacgcacgcatatcagcccgtgtaccctgtgacagtgactgtccccacctcctrtgttagtggtgcccttactgccgtcgctcatccactcgtgtgggacgtaggattgcacagggctgtgccagtggcgtgtagggaacactgccctggctcagcgtgcgagctaa

SEQ ID NO: 6932 - DNA, 1924 bp, Homo sapiens
gaccgtccacccctccgcgctggcggtgtggacgcggaactcagcggagaaacgcgattgaggtaggtgtcctgatgggcagctcagatggctggactgcacgtaaggaaggacaggccagaaatggaaaagaaaatgaaataaatcagcagttatgaggcagagcctaagagaactatggcaacatcaggtgactgtcccagaagtgaatcgcagggagaagagcctgctgagtgcagtgaggcgggtctcctgcaggagggagtacagccagaggagtttgtggccatcgcggactacgctgccaccgatgagacccagctcagttttttgagaggagaaaaaattcttatcctgagacaaaccactgcagattggtggtggggtgagcgtgcgggctgctgtgggtacattccggcaaaccatgtggggaagcacgtggatgagtacgaccccgaggacacgtggcaggatgaagagtacttcggcagctatggaactctgaaactccacttggagatgttggcagaccagccacgaacaactaaataccacagtgtcatcctgcagaataaagaatccctgacggataaagtcatcctggacgtgggctgtgggactgggatcatcagtctcttctgtgcacactatgcgcggcctagagcgtacgcggtggaggccagtgagatggcacagcacacggggcagctggtcctgcagaacggctttgctgacatcatcaccgtgtaccagcagaaggtggaggatgtggtgctgcccgagaaggtggacgtgctggtgtctgagtggatggggacctgcctgctgtttgagttcatgatcgagtccatcctgtatgcccgggatgcctggctgaaggaggacggggtcatttggcccaccatggctgcgttgcaccttgtgccctgcagtgctgataaggattatcgtagcaaggtgctcttctgggacaacgcgtacgagttcaacctcagcgctctgaaatctttagcagttaaggagtttttttcaaagcccaagtataaccacattttgaaaccagaagactgtctctctgaaccgtgcactatattgcagttggacatgagaaccgtgcaaatttctgatctagagaccctgaggggcgagctgcgcttcgacatcaggaaggcggggaccctgcacggcttcacggcctggtttagcgtccacttccagagcctgcaggaggggcagccgccgcagtgctcagcaccgggcccttccaccccaccacacactggaagcagacgctgttcatgatggacgacccagtccctgtccatacaggagacgtggtcacgggttcagttgtgttgcagagaaacccagtgtggagaaggcacatgtctgtggctctgagctgggctgtcacttccagacaagaccccacatctcaaaaagttggagaaaaagtcttccccatctggagatgacagttgatgctttatttggaaagcagtgtgcatatcttgaggggtgatgaacacaagcaaaccaagttgcacctggcttctgcacactcctgcgaaagtcggtgaacattcactccacattgacccctccctagcctggcaggtgacgtcagggtccttcacagacaaacacgcttgggctcggcaggagctgccgtggccacccccgctgcccagtgtctgccctctagaagtaggctgtgtttccaggtgttcacccgtggtctaggtctacactcctaggacgcacgcatatcagcccgtgtaccctgtgacagtgactgtccccacctcctrtgttagtggtgcccttactgccgtcgctcatccactcgtgtgggacgtaggattgcacagggctgtgccagtggcgtgtagggaacactgccctggctcagcgtgcgagctaa

SEQ ID NO: 6933 - DNA, 2642 bp, Homo sapiens
cggctgacggcctgcgtgcactgcgcttgcgcgggttgagggcggtggctcagkctcctggaaaggaccgtccacccctccgcgctggcggtgtggacgcggaactcagcggagaaacgcgattgagaaatggaaaagaaaatgaaataaatcagcagttatgaggcagagcctaagagaactatggcaacatcaggtgactgtcccagaagtgaatcgcagggagaagagcctgctgagtgcagtgaggcgggtctcctgcaggagggagtacagccagaggagtttgtggccatcgcggactacgctgccaccgatgagacccagctcagttttttgagaggagaaaaaattcttatcctgagacaaaccactgcagattggtggtggggtgagcgtgcgggctgctgtgggtacattccggcaaaccatgtggggaagcacgtggatgagtacgaccccgaggacacgtggcaggatgaagagtacttcggcagctatggaactctgaaactccacttggagatgttggcagaccagccacgaacaactaaataccacagtgtcatcctgcagaataaagaatccctgacggataaagtcatcctggacgtgggctgtgggactgggatcatcagtctcttctgtgcacactatgcgcggcctagagcggtgtacgcggtggaggccagtgagatggcacagcacacggggcagctggtcctgcagaacggctttgctgacatcatcaccgtgtaccagcagaaggtggaggatgtggtgctgcccgagaaggtggacgtgctggtgtctgagtggatggggacctgcctgctgtttgagttcatgatcgagtccatcctgtatgcccgggatgcctggctgaaggaggacggggtcatttggcccaccatggctgcgttgcaccttgtgccctgcagtgctgataaggattatcgtagcaaggtgctcttctgggacaacgcgtacgagttcaacctcagcgctctgaagtaagtgtccacagctgggactggcaccgtcttgtggggcctcctggtccacagtctgcaggtgggccaaggccctgggagatcccatacgacggttggataaatgagggtacctgtgcacccagataggacaatctgttgtagcattggagtaattaaagcagtatggtgctataacaagacagatgggcagagcagggtagaatgcaaggaacaaaaattttcgtatgtgaaaaaggtggcattacgattaggagggagtgagggccaagtcagcaaattattctggagcagttgattagcccttgttctctcacgccatacgtgaaaacttaattctgcatggaatcagcgtcagcgacagacatccatgggggcctgtgtgcaccatcttaggtggagaaatgagcagcaacaatggatggaatggaccctgggctagatagaatctggcagtctatgtggcagaaatcagcaaaaacacgattgtaaaagcaaacaagtaattagagaaatcacgtgctgtcaggtcttggaatcaattagaaagagatgactagccagatggaattgcagcccaatcatgtgaacaggcaaaccgcaaaaaataaataaaattaccaataaatayatgaaaaattataatgttgttagtagttaaaatgcgaattaaaatacatgctgttttccctaccagacaagcaaagagtaaattaaaatagtagcccaggcttgcctggcagtggcagggaggtgtggctgccagggccttagaggttggcatcaggctgcccaccccagtcactgccagagcctcccacctgagtgttcctcccrgcactggaagccagtggccgtccagaggaacgtgattgaattgctgtatatccatctggtggagcactgctgtgtgtctgttaaaaaagaaaccataggtttttagggatatgtaatgatatttagaaagggtttaagagacagtaaagcttggcagaataamccgtgtatacagaatggatgtttgcttgcataaataaatttatataaatatgtctgggggataaaaataagtatatcmcaatgctaagacaggmatatggggaatttaagcttttctttatacttgtccatagtttccaatttttaaatttgtaattttttatcagaaaaataaatgtgtaaatatagtggaatctttattaaaacattcacttttatttgctatttcagaagttactgctttgcttattttttacaacatttctgtggtaaataatcggtgacttacaagcctagtgcagccagtgatgggggttggcaaacggtgacatgcaggggccatgcggcgtctagtgtctgtttctgtgttgaatttgtgtagcaacagagcaagtatttctcctgaaactcagactcactcaggccacctcagcccttctagttcctttcgtttattatagagtaacctacagcaggaataccgcgttcatttactgttaatagaagatccacaaaagattttgaaatcaaatacattctaaaactaggcaagacacgctgcaactccccttgtcctctgggttatgaggggtgagcgttggtttccgtgtgctcagatcccatgaatga

SEQ ID NO: 6934 - DNA, 2841 bp, Homo sapiens
cggctgacggcctgcgtgcactgcgcttgcgcgggttgagggcggtggctcagkctcctggaaaggaccgtccacccctccgcgctggcggtgtggacgcggaactcagcggagaaacgcgattgagaaatggaaaagaaaatgaaataaatcagcagttatgaggcagagcctaagagaactatggcaacatcaggtgactgtcccagaagtgaatcgcagggagaagagcctgctgagtgcagtgaggcgggtctcctgcaggagggagtacagccagaggagtttgtggccatcgcggactacgctgccaccgatgagacccagctcagttttttgagaggagaaaaaattcttatcctgagacaaaccactgcagattggtggtggggtgagcgtgcgggctgctgtgggtacattccggcaaaccatgtggggaagcacgtggatgagtacgaccccgaggacacgtggcaggatgaagagtacttcggcagctatggaactctgaaactccacttggagatgttggcagaccagccacgaacaactaaataccacagtgtcatcctgcagaataaagaatccctgacggataaagtcatcctggacgtgggctgtgggactgggatcatcagtctcttctgtgcacactatgcgcggcctagagcggtgtacgcggtggaggccagtgagatggcacagcacacggggcagctggtcctgcagaacggctttgctgacatcatcaccgtgtaccagcagaaggtggaggatgtggtgctgcccgagaaggtggacgtgctggtgtctgagtggatggggacctgcctgctgtttgagttcatgatcgagtccatcctgtatgcccgggatgcctggctgaaggaggacggggtcatttggcccaccatggctgcgttgcaccttgtgccctgcagtgctgataaggattatcgtagcaaggtgctcttctgggacaacgcgtacgagttcaacctcagcgctctgaaatctttagcagttaaggagtttttttcaaagcccaagtataaccacattttgaaaccagaagactgtctctctgaaccgtgcactatattgcagttggacatgagaaccgtgcaaatttctgatctagagaccctgaggggcgagctgcgcttcgacatcaggaaggcggggaccctgcacggcttcacggcctggtttagcgtccacttccagagcctgcaggaggggcagccgccgcagtgctcagcaccgggcccttccaccccaccacacactggaagcagacgctgttcatgatggacgacccagtccctgtccatacaggagacgtggtcacgggttcagttgtgttgcagagaaacccagtgtggagaaggcacatgtctgtggctctgagctgggctgtcacttccagacaagaccccacatctcaaaaagttggagaaaaagtcttccccatctggagatgacagttgatgctttatttggaaagcagtgtgcatatcttgaggggtgatgaacacaagcaaaccaagttgcacctggcttctgcacactcctgcgaaagtcggtgaacattcactccacattgacccctccctagcctggcaggtgacgtcagggtccttcacagacaaacacgcttgggctcggcaggagctgccgtggccacccccgctgcccagtgtctgccctctagaagtaggctgtgtttccaggtgttcacccgtggtgcccacagtgccgacccgtggctgggtcggagctccatgttcctaagctaggtctaggtctacactcctaggacgcacgcatatcagcccgtgtaccctgtgacagtgactgtccccacctcctrtgttagtggtgcccttactgccgtcgctcatccactcgtgtgggacgtaggattgcacagggctgtgccagtggcgtgtagggaacactgccctggctcagcgtgcgagctaaggtgkygatgtatgcgatgggactctgcatgggatagtacagttgtgtagacgtcttccaaataaattatgtgttggtscatcgcacatgctcaataaatatttttaaatgagtgaatgtcattgtgtatcctgttttatgcatatatgttattttttgtaattacaggatcatactatatgcattgctttataagtttttctcaatattgtgaaaaaacttccacatcagtagatacatgtccatamtttttttttgtattgttttgatttttattaaattttattgaaatataggctgggtgcagtggcttacctctgtaatcccaacactttgagaggctgaggtgggatgattccttgagctcaggagttcaagaccaccctgggcaacacagcgagatactatctctacaaaaaaaatagaaaaattagctgggcatggtggcgtgtgcctgtagtcccagctactcgggaggctgaggcggggggatcacttgagcccaggaggttgaggctgcagtgatctaggattgcactgctgcactccagcgtgggtgacagagcaagaccctgtctcaaaaaccccaaaaaacaaaactgaaatatcaaatatatattgaaaacagtkctagtcatgggtacatagatgatggcattttataaagtggacgcacatgtaaccagcatccaggccaggacacactacagattccccgattccccttccactcagtgcccaccctctcaagggtgatgtcctgacttgtaactgtcgattactcttgcctgaatggagttgtacacgtgttcttttgtgtctgccttctttaattaaacattgtttgtgagactc

SEQ ID NO: 6935 - DNA, 2195 bp, Homo sapiens
ctcatgctggcctctcgccctccacagccccaggggtccaggctcctccaggaacaaacgcaggccccacgggctgcctggaaggcctcccagaaggcagcacagggtcacgagggtcacccgcagkggcacagggaggcctcgtcacgacaggattccagccaggctsgcctgatgctmctgggggtcctcggcacatgccccttcaccctggcatgtgcttcttttccgggaacccayactctggctgagtggagccatcccctctgggtcaacagcacccggggtggctctgcagcaccccactccgcggctgcacagggaccttggccccactgctccttgtgccttgctggttaatgagaagccggtggggaggtgctgccggtgagcgtataaaggccctggcggcggctgcggagcactggccctgtccttccatctgcycagagaggagcatctggatcaaggtgctggccatgtcccagctggtggaatgcgtccccaacttttcggaggggaagaaccaggaggtgatcgacgccatctctggagccatcacacagaccccgggctgcgtgctgctggatgtggacgcaggcccttccaccaaccgcacygtgtacaccttcgtggggccgccggagtgcgtggtggagggggccctcaacgctgcccgggtagcttcccgacttatcgacatgagcaggcaccaaggagagcacccccgcatgggggccctagacgtctgccccttcatccccgtgaggggcgtcagcrtggatgagtgtgtgctctgcgcccaggcctttggccagaggctggcagaggagctggacgtgccagtttacctgtacggcraggcagccaggatggacagtcgccggaccctgccrgccatccgggccggggagtacgaggccctccctaagaagctccagcaggccgactgggcgcccgactttggtcccagctcctttgtccccagttggggggccacggccacgggggcgaggaagttcctcattgcttttaacatcaacctgctcggcacaaaggagcaagcccaccgcatcgcgctcaacctgcgggagcagggccgcgggaaggaccagccaggacgtctgaagaaagttcagggcattggctggtacctggatgagaagaacctggctcaggtgtccaccaatcttctggactttgaggtcacggcactgcacacggtctacgaggagacctgccgagaagcacaggagctgagcctcccagtggtgggctcacagctggtgggcctggtgcccctgaaggctctgctggatgcggccgccttctactgcgagaaggagaacctcttcatcctggaggaggagcagcggatcaggctggtggtgagccggctgggcctggactccctgtgccccttcagccctaaggagcggatcatcgagtacctggtccctgagcgcgggcctgagcgaggcctgggcagcaagtccctgcgcgccttcgtgggggaggtgggtgcccgctctgcggcccccgggggcggctcggtggcggcggccgctgcggccatgggtgcggcgctgggctccatggtgggcctcatgacctacgggcggcgccaattccagtccctggacacgacgatgcggcgcctgatcccgcccttccgcgaggcttcggccaagctaaccacgctggtggatgccgacgccgaggccttcaccgcctacctggaagcaatgaggctccccaagaacacacctgaggaaaaggacaggcgcacggyggccctacaggagggtctgaggcgggcagtctctgtgccgctgacgctggyggagacggtggcctcgctgtggccggcsctgcaggaactggcccrgtgtgggaacctggcctgccggtcagacctccaggtggcggccaaagccytggagatgggygtgtttggcgcatatttcaacgtgctcatcaacctgagggacatcacagacgaggcatttaaggaccagcctcctgcaggaagccaagacccaggctgcactggtgctggactgcttggagacccggcaggagtgacggtgcgggaggcctctcygggctctgtggcccctccctcgcccatccccagagggcagagctgtgacctcgaaaccccagggacagcaggaccttcgacgctggaagga

SEQ ID NO: 6936 - DNA, 2424 bp, Homo sapiens
ccagggcctcatgctggcctctcgccctccacagccccaggggtccaggctcctccaggaacaaacgcaggccccacgggctgcctggaaggcctcccagaaggcagcacagggtcacgagggtcacccgcagkggcacagggaggcctcgtcacgacaggattccagccaggctsgcctgatgctmctgggggtcctcggcacatgccccttcaccctggcatgtgcttcttttccgggaacccayactctggctgagtggagccatcccctctgggtcaacagcacccggggtggctctgcagcaccccactccgcggctgcacagggaccttggccccactgctccttgtgccttgctggttaatgagaagccggtggggaggtgctgccggtgagcgtataaaggccctggcggcggctgcggagcactggccctgtccttccatctgcycagagaggagcatctggatcaaggtgctggccatgtcccagctggtggaatgcgtccccaacttttcggaggggaagaaccaggaggtgatcgacgccatctctggagccatcacacagaccccgggctgcgtgctgctggatgtggacgcaggcccttccaccaaccgcacygtgtacaccttcgtggggccgccggagtgcgtggtggagggggccctcaacgctgcccgggtagcttcccgacttatcgacatgagcaggcaccaaggagagcacccccgcatgggggccctagacgtctgccccttcatccccgtgaggggcgtcagcrtggatgagtgtgtgctctgcgcccaggcctttggccagaggctggcagaggagctggacgtgccagtttacctgtacggcraggcagccaggatggacagtcgccggaccctgccrgccatccgggccggggagtacgaggccctccctaagaagctccagcaggccgactgggcgcccgactttggtcccagctcctttgtccccagttggggggccacggccacgggggcgaggaagttcctcattgcttttaacatcaacctgctcggcacaaaggagcaagcccaccgcatcgcgctcaacctgcgggagcagggccgcgggaaggaccaggtgaccccgttcactgaccccatggagccccacccagcccctcgggaaagggttagaggctgagagcctcaggcggggaggtcggtggggatggggcaccggccggacagggttcggcctcccacctgcagaccggcccagcctccgcgtccacaccgtgcggggaccgcgcaggtcggcaggtcaggggcggagtgaagctggggagctctggcctcctggggattttccagggaacgaggcaggacttccctttgttaacatgtggcagcatttccatactgctgggaaacagcgacttccggagtcccaggtgccctcaggggccccccatatccctccagatgccttgggagccccgacacccctacaaaccttcaggtgcccccaggcctttccctccacgtctgcacagcagtggtcacccggtctgagcgtcactccgggtatagatacccggagaaagcgggggggaccacctgcccatctgttccccactcagagaccccggtcccacaaacagccaaggtcctgggacccggcttcccgacctgcagactcagcacaaaagcacagggacctctaagtcctgctttaggccccggccaagggcagaggtcagagtccccccacgtggactcagtcaccccgacaagtgcggggctgaggggacttgtcgggagcggagcagatgggatgggagaacggcatgggggtgcctggggccccacccctcagcattcccccaacatctaggacacagcgtggctggaaggcagggcctaggctgggcgggggcctgccggggtgggcctccggtgtctgacccttggggcctccgtttccctgtggcaagcgaagtttctctggccctccccggccagctcagtgagggacggaggagaaccacagcacccacccaggcacaggctcctccccgtccagctggggaatgcaagtgccaggagagactggcagggccaggcaggatgagcttcctagtccaggctggggaacgctcttcctttgcagccaggacgtctgaagaaagttcagggcattggctggtacctggatgagaagaacctggctcaggtgtccaccaatcttctggactttgaggtcacggcactgcacacggtctacgaggagacctgccgagaagcacaggagctgagcctcccagtggtgggctcacagctggtgggcctggtgcccctgaaggctctgctggatgcggccgccttctactgcgagaaggagaacctcttcatcctggaggaggagcagcggatcaggctg

SEQ ID NO: 6937 - DNA, 2394 bp, Homo sapiens
ctcatgctggcctctcgccctccacagccccaggggtccaggctcctccaggaacaaacgcaggccccacgggctgcctggaaggcctcccagaaggcagcacagggtcacgagggtcacccgcagkggcacagggaggcctcgtcacgacaggattccagccaggctsgcctgatgctmctgggggtcctcggcacatgccccttcaccctggcatgtgcttcttttccgggaacccayactctggctgagtggagccatcccctctgggtcaacagcacccggggtggctctgcagcaccccactccgcggctgcacagggaccttggccccactgctccttgtgccttgctggttaatgagaagccggtggggaggtgctgccggtgagcgtataaaggccctggcggcggctgcggagcactggccctgtccttccatctgcycagagaggagcatctggatcaaggtgctggccatgtcccagctggtggaatgcgtccccaacttttcggaggggaagaaccaggaggtgatcgacgccatctctggagccatcacacagaccccgggctgcgtgctgctggatgtggacgcaggcccttccaccaaccgcacygtgtacaccttcgtggggccgccggagtgcgtggtggagggggccctcaacgctgcccgggtagcttcccgacttatcgacatgagcaggcaccaaggagagcacccccgcatgggggccctagacgtctgccccttcatccccgtgaggggcgtcagcrtggatgagtgtgtgctctgcgcccaggcctttggccagaggctggcagaggagctggacgtgccaggcctgaccgccgggctctcctgcagtttacctgtacggcraggcagccaggatggacagtcgccggaccctgccrgccatccgggccggggagtacgaggccctccctaagaagctccagcaggccgactgggcgcccgactttggtcccagctcctttgtccccagttggggggccacggccacgggggcgaggaagttcctcattgcttttaacatcaacctgctcggcacaaaggagcaagcccaccgcatcgcgctcaacctgcgggagcagggccgcgggaaggaccagccaggacgtctgaagaaagttcagggcattggctggtacctggatgagaagaacctggctcaggtgtccaccaatcttctggactttgaggtcacggcactgcacacggtctacgaggagacctgccgagaagcacaggagctgagcctcccagtggtgggctcacagctggtgggcctggtgcccctgaaggctctgctggatgcggccgccttctactgcgagaaggagaacctcttcatcctggaggaggagcagcggatcaggctggtggtgagccggctgggcctggactccctgtgccccttcagccctaaggagcggatcatcgagtacctggtccctgagcgcgggcctgagcgaggcctgggcagcaagtccctgcgcgccttcgtgggggaggtgggtgcccgctctgcggcccccgggggcggctcggtggcggcggccgctgcggccatgggtgcggcgctgggctccatggtgggcctcatgacctacgggcggcgccaattccagtccctggacacgacgatgcggcgcctgatcccgcccttccgcgaggcttcggccaagctaaccacgctggtggatgccgacgccgaggccttcaccgcctacctggaagcaatgaggctccccaagaacacactctctgtgccgctgacgctggyggagacggtggcctcgctgtggccggcsctgcaggaactggcccrgtgtgggaacctggcctgccggtcagacctccaggtggcggccaaagccytggagatgggygtgtttggcgcatatttcaacgtgctcatcaacctgagggacatcacagacgaggcatttaaggaccagatccaccatcgtgtttccagcctcctgcaggaagccaagacccaggctgcactggtgctggactgcttggagacccggcaggartgacggtgcgggaggcctctcygggctctgtggcccctccctcgcccatccccagagggcagagctgtgacctcggtggggacacagcttgttcrtgtggggcccggaggaaaccccagggacagcaggaccttcgacgctggaaggatagcctcgcttcccaggtgcagctcccggcaggtctggacagttccacagagcacggtactggccctgtcctcagttcccgtccacccttcaaccagtggctcctgggagacttttcctccctgcctcagctccctgcccagccagcctcctgtctccagagaagttctccat

SEQ ID NO: 6938 - DNA, 2346 bp, Homo sapiens
ccagggcctcatgctggcctctcgccctccacagccccaggggtccaggctcctccaggaacaaacgcaggccccacgggctgcctggaaggcctcccagaaggcagcacagggtcacgagggtcacccgcagkggcacagggaggcctcgtcacgacaggattccagccaggctsgcctgatgctmctgggggtcctcggcacatgccccttcaccctggcatgtgcttcttttccgggaacccayactctggctgagtggagccatcccctctgggtcaacagcacccggggtggctctgcagcaccccactccgcggctgcacagggaccttggccccactgctccttgtgccttgctggttaatgagaagccggtggggaggtgctgccggtgagcgtataaaggccctggcggcggctgcggagcactggccctgtccttccatctgcycagagaggagcatctggatcaaggtgctggccatgtcccagctggtggaatgcgtccccaacttttcggaggggaagaaccaggaggtgatcgacgccatctctggagccatcacacagaccccgggctgcgtgctgctggatgtggacgcaggcccttccaccaaccgcacygtgtacaccttcgtggggccgccggagtgcgtggtggagggggccctcaacgctgcccgggtagcttcccgacttatcgacatgagcaggcaccaaggagagcacccccgcatgggggccctagacgtctgccccttcatccccgtgaggggcgtcagcrtggatgagtgtgtgctctgcgcccaggcctttggccagaggctggcagaggagctggacgtgccagtttacctgtacggcraggcagccaggatggacagtcgccggaccctgccrgccatccgggccggggagtacgaggccctccctaagaagctccagcaggccgactgggcgcccgactttggtcccagctcctttgtccccagttggggggccacggccacgggggcgaggaagttcctcattgcttttaacatcaacctgctcggcacaaaggagcaagcccaccgcatcgcgctcaacctgcgggagcagggccgcgggaaggaccagccaggacgtctgaagaaagttcagggcattggctggtacctggatgagaagaacctggctcaggtgtccaccaatcttctggactttgaggtcacggcactgcacacggtctacgaggagacctgccgagaagcacaggagctgagcctcccagtggtgggctcacagctggtgggcctggtgcccctgaaggctctgctggatgcggccgccttctactgcgagaaggagaacctcttcatcctggaggaggagcagcggatcaggctggtggtgagccggctgggcctggactccctgtgccccttcagccctaaggagcggatcatcgagtacctggtccctgagcgcgggcctgagcgaggcctgggcagcaagtccctgcgcgccttcgtgggggaggtgggtgcccgctctgcggcccccgggggcggctcggtggcggcggccgctgcggccatgggtgcggcgctgggctccatggtgggcctcatgacctacgggcggcgccaattccagtccctggacacgacgatgcggcgcctgatcccgcccttccgcgaggcttcggccaagctaaccacgctggtggatgccgacgccgaggccttcaccgcctacctggaagcaatgaggctccccaagaacacacctgaggaaaaggacaggcgcacggyggccctacaggagggtctgaggcgggcagtctctgtgccgctgacgctggyggagacggtggcctcgctgtggccggcsctgcaggaactggcccrgtgtgggaacctggcctgccggtcagacctccaggtggcggccaaagccytggagatgggygtgtttggcgcatatttcaacgtgctcatcaacctgagggacatcacagacgaggcatttaaggaccagatccaccatcgtgtttccagcctcctgcaggaagccaagacccaggctgcactggtgctggactgcttggagacccggcaggagtgacgaaaccccagggacagcaggaccttcgacgctggaaggatagcctcgcttcccaggtgcagctcccggcaggtctggacagttccacagagcacggtactggccctgtcctcagttcccgtccacccttcaaccagtggctcctgggagacttttcctccctgcctcagctccctgcccagccagcctcctgtctccagagaagttctccattaaaaaataatttagcaaatc

SEQ ID NO: 6939 - DNA, 2379 bp, Homo sapiens
ctcatgctggcctctcgccctccacagccccaggggtccaggctcctccaggaacaaacgcaggccccacgggctgcctggaaggcctcccagaaggcagcacagggtcacgagggtcacccgcagkggcacagggaggcctcgtcacgacaggattccagccaggctsgcctgatgctmctgggggtcctcggcacatgccccttcaccctggcatgtgcttcttttccgggaacccayactctggctgagtggagccatcccctctgggtcaacagcacccggggtggctctgcagcaccccactccgcggctgcacagggaccttggccccactgctccttgtgccttgctggttaatgagaagccggtggggaggtgctgccggtgagcgtataaaggccctggcggcggctgcggagcactggccctgtccttccatctgcycagagaggagcatctggatcaaggtgctggccatgtcccagctggtggaatgcgtccccaacttttcggaggggaagaaccaggaggtgatcgacgccatctctggagccatcacacagaccccgggctgcgtgctgctggatgtggacgcaggcccttccaccaaccgcacygtgtacaccttcgtggggccgccggagtgcgtggtggagggggccctcaacgctgcccgggtagcttcccgacttatcgacatgagcaggcaccaaggagagcacccccgcatgggggccctagacgtctgccccttcatccccgtgaggggcgtcagcrtggatgagtgtgtgctctgcgcccaggcctttggccagaggctggcagaggagctggacgtgccagtttacctgtacggcraggcagccaggatggacagtcgccggaccctgccrgccatccgggccggggagtacgaggccctccctaagaagctccagcaggccgactgggcgcccgactttggtcccagctcctttgtccccagttggggggccacggccacgggggcgaggaagttcctcattgcttttaacatcaacctgctcggcacaaaggagcaagcccaccgcatcgcgctcaacctgcgggagcagggccgcgggaaggaccagccaggacgtctgaagaaagttcagggcattggctggtacctggatgagaagaacctggctcaggtgtccaccaatcttctggactttgaggtcacggcactgcacacggtctacgaggagacctgccgagaagcacaggagctgagcctcccagtggtgggctcacagctggtgggcctggtgcccctgaaggctctgctggatgcggccgccttctactgcgagaaggagaacctcttcatcctggaggaggagcagcggatcaggctggtggtgagccggctgggcctggactccctgtgccccttcagccctaaggagcggatcatcgagtacctggtccctgagcgcgggcctgagcgaggcctgggcagcaagtccctgcgcgccttcgtgggggaggtgggtgcccgctctgcggcccccgggggcggctcggtggcggcggccgctgcggccatgggtgcggcgctgggctccatggtgggcctcatgacctacgggcggcgccaattccagtccctggacacgacgatgcggcgcctgatcccgcccttccgcgaggcttcggccaagctaaccacgctggtggatgccgacgccgaggccttcaccgcctacctggcgcacggyggccctacaggagggtctgaggcgggcagtctctgtgccgctgacgctggyggagacggtggcctcgctgtggccggcsctgcaggaactggcccrgtgtgggaacctggcctgccggtcagacctccaggtggcggccaaagccytggagatgggygtgtttggcgcatatttcaacgtgctcatcaacctgagggacatcacagacgaggcatrtaaggaccagatccaccatcgtgtttccagcctcctgcaggaagccaagacccaggctgcactggtgctggactgcttggagacccggcaggagtgacggtgcgggaggcctctcygggctctgtggcccctccctcgcccatccccagagggcagagctgtgacctcggtggggacacagcttgttcrtgtggggcccggaggaaaccccagggacagcaggaccttcgacgctggaaggatagcctcgcttcccaggtgcagctcccggcaggtctggacagttccacagagcacggtactggccctgtcctcagttcccgtccacccttcaaccagtggctcctgggagacttttcctccctgcctcagctccctgcccagccagcctcctgtctccagagaagttctccat

SEQ ID NO: 6940 - DNA, 273 bp, Homo sapiens
atgggggtgctgggggtggacgagcacaggggagccccggagaccatgtcagccccaggggtccaggctcctccaggaacaaacgcaggccccacgggctgcctggaaggcctcccagaaggcagcacagggtcacgagggtcacccgcagkggcacagggaggcctcgtcacgacaggattccagccaggctsgcctgatgctmctgggggtcctcggcacatgccccttcaccctggcatgtgcttcttttccgggaacccayactctggc

SEQ ID NO: 6941 - DNA, 2321 bp, Homo sapiens
ccagggcctcatgctggcctctcgccctccacagccccaggggtccaggctcctccaggaacaaacgcaggccccacgggctgcctggaaggcctcccagaaggcagcacagggtcacgagggtcacccgcagkggcacagggaggcctcgtcacgacaggattccagccaggctsgcctgatgctmctgggggtcctcggcacatgccccttcaccctggcatgtgcttcttttccgggaacccayactctggctgagtggagccatcccctctgggtcaacagcacccggggtggctctgcagcaccccactccgcggctgcacagggaccttggccccactgctccttgtgccttgctggttaatgagaagccggtggggaggtgctgccggtgagcgtataaaggccctggcggcggctgcggagcactggccctgtccttccatctgcycagagaggagcatctggatcaaggtgctggccatgtcccagctggtggaatgcgtccccaacttttcggaggggaagaaccaggaggtgatcgacgccatctctggagccatcacacagaccccgggctgcgtgctgctggatgtggacgcaggcccttccaccaaccgcacygtgtacaccttcgtggggccgccggagtgcgtggtggagggggccctcaacgctgcccgggtagcttcccgacttatcgacatgagcaggcaccaaggagagcacccccgcatgggggccctagacgtctgccccttcatccccgtgaggggcgtcagcrtggatgagtgtgtgctctgcgcccaggcctttggccagaggctggcagaggagctggacgtgccagtttacctgtacggcraggcagccaggatggacagtcgccggaccctgccrgccatccgggccggggagtacgaggccctccctaagaagctccagcaggccgactgggcgcccgactttggtcccagctcctttgtccccagttggggggccacggccacgggggcgaggaagttcctcattgcttttaacatcaacctgctcggcacaaaggagcaagcccaccgcatcgcgctcaacctgcgggagcagggccgcgggaaggaccagccaggacgtctgaagaaagttcagggcattggctggtacctggatgagaagaacctggctcaggtgtccaccaatcttctggactttgaggtcacggcactgcacacggtctacgaggagacctgccgagaagcacaggagctgagcctcccagtggtgggctcacagctggtgggcctggtgcccctgaaggctctgctggatgcggccgccttctactgcgagaaggagaacctcttcatcctggaggaggagcagcggatcaggctggtggtgagccggctgggcctggactccctgtgccccttcagccctaaggagcggatcatcgagtacctggtccctgagcgcgggcctgagcgaggcctgggcagcaagtccctgcgcgccttcgtgggggaggtgggtgcccgctctgcggcccccgggggcggctcggtggcggcggccgctgcggccatgggtgcggcgctgggctccatggtgggcctcatgacctacgggcggcgccaattccagtccctggacacgacgatgcggcgcctgatcccgcccttccgcgaggcttcggccaagctaaccacgctggtggatgccgacgccgaggccttcaccgcctacctggaagcaatgaggctccccaagaacacacctgaggaaaaggacaggcgcacggyggccctacaggagggtctgaggcgggcagtctctgtgccgctgacgctggyggagacggtggcctcgctgtggccggcsctgcaggaactggcccrgtgtgggaacctggcctgccggtcagacctccaggtggcggccaaagccytggagatgggygtgtttggcgcatatttcaacgtgctcatcaacctgagggacatcacagacgaggcatttaaggaccagatccaccatcgtgtttccagcctcctgcaggaagccaagacccaggctgcactggtgctggactgcttggagacccggcaggagtgacggtgcgggaggcctctcygggctctgtggcccctccctcgcccatccccagagggcagagctgtgacctcggtggggacacagcttgttcrtgtggggcccggaggrtaggtgggcaggcagcggggcatcgcctgggaatggaggcgctggcagggacagaaggcccctagtcccatgtgacctccagtaaagttttggcaccaaac

SEQ ID NO: 6942 - DNA, 2423 bp, Homo sapiens
ctcatgctggcctctcgccctccacagccccaggggtccaggctcctccaggaacaaacgcaggccccacgggctgcctggaaggcctcccagaaggcagcacagggtcacgagggtcacccgcagkggcacagggaggcctcgtcacgacaggattccagccaggctsgcctgatgctmctgggggtcctcggcacatgccccttcaccctggcatgtgcttcttttccgggaacccayactctggctgagtggagccatcccctctgggtcaacagcacccggggtggctctgcagcaccccactccgcggctgcacagggaccttggccccactgctccttgtgccttgctggttaatgagaagccggtggggaggtgctgccggtgagcgtataaaggccctggcggcggctgcggagcactggccctgtccttccatctgcycagagaggagcatctggatcaaggtgctggccatgtcccagctggtggaatgcgtccccaacttttcggaggggaagaaccaggaggtgatcgacgccatctctggagccatcacacagaccccgggctgcgtgctgctggatgtggacgcaggcccttccaccaaccgcacygtgtacaccttcgtggggccgccggagtgcgtggtggagggggccctcaacgctgcccgggtagcttcccgacttatcgacatgagcaggcaccaaggagagcacccccgcatgggggccctagacgtctgccccttcatccccgtgaggggcgtcagcrtggatgagtgtgtgctctgcgcccaggcctttggccagaggctggcagaggagctggacgtgccagtttacctgtacggcraggcagccaggatggacagtcgccggaccctgccrgccatccgggccggggagtacgaggccctccctaagaagctccagcaggccgactgggcgcccgactttggtcccagctcctttgtccccagttggggggccacggccacgggggcgaggaagttcctcattgcttttaacatcaacctgctcggcacaaaggagcaagcccaccgcatcgcgctcaacctgcgggagcagggccgcgggaaggaccagccaggacgtctgaagaaagttcagggcattggctggtacctggatgagaagaacctggctcaggtgtccaccaatcttctggactttgaggtcacggcactgcacacggtctacgaggagacctgccgagaagcacaggagctgagcctcccagtggtgggctcacagctggtgggcctggtgcccctgaaggctctgctggatgcggccgccttctactgcgagaaggagaacctcttcatcctggaggaggagcagcggatcaggctggtggtgagccggctgggcctggactccctgtgccccttcagccctaaggagcggatcatcgagtacctggtccctgagcgcgggcctgagcgaggcctgggcagcaagtccctgcgcgccttcgtgggggaggtgggtgcccgctctgcggcccccgggggcggctcggtggcggcggccgctgcggccatgggtgcggcgctgggctccatggtgggcctcatgacctacgggcggcgccaattccagtccctggacacgacgatgcggcgcctgatcccgcccttccgcgaggcttcggccaagctaaccacgctggtggatgccgacgccgaggccttcaccgcctacctggaagcaatgaggctccccaagaacacacctgaggaaaaggacaggcgcacggyggccctacaggagggtctgaggcgggcagtctctgtgccgctgacgctggyggagacggtggcctcgctgtggccggcsctgcaggaactggcccrgtgtgggaacctggcctgccggtcagacctccaggtggcggccaaagccytggagatgggygtgtttggcgcatatttcaacgtgctcatcaacctgagggacatcacagacgaggcatttaaggaccagatccaccatcgtgtttccagcctcctgcaggaagccaagacccaggctgcactggtgctggactgcttggagacccggcaggartgacggtgcgggaggcctctcygggctctgtggcccctccctcgcccatccccagagggcagagctgtgacctcggtggggacacagcttgttcrtgtggggcccggaggaaaccccagggacagcaggaccttcgacgctggaaggatagcctcgcttcccaggtgcagctcccggcaggtctggacagttccacagagcacggtactggccctgtcctcagttcccgtccacccttcaaccagtggctcctgggagacttttcctccctgcctcagctccctgcccagccagcctcctgtctccagagaagttctccat

SEQ ID NO: 6943 - DNA, 1931 bp, Homo sapiens
ggcgcaggatgggatccggctcctccagctaccggcccaaggccatctacctggacatcgatggacgcattcagaagcactccgtacaaagtgagacctgtggccatcaagcaactctccgagcattcaaaatcaatgaactgaaagctgaagttgcaaatcacttggctgtcctagagaaacgcgtggaattggaaggactaaaagtggtggagattgagaaatgcaagagtgacattaagaagatgagggaggagctggcggccagaagcagcaggaccaactgcccctgtaagtacagttttttggataaccacaagaagttgactcctcgacgcgatgttcccacttaccccaagtacctgctctctccagagaccatcgaggccctgcggaagccgacctttgacgtctggctttgggagcccaatgagatgctgagctgcctggagcacatgtaccacgacctcgggctggtcagggacttcagcatcaaccctgtcaccctcaggaggtggctgttctgygtccacgacaactacagaaacaaccccttccacaacttccggcactgcttctgcgtggcccagatgatgtacagcatggtctggctctgcagtctccaggagaagttctcacaaacggatatcctgatcctaatgacagcggccatctgccacgatctggaccatcccggctacaacaacacgtaccagatcaatgcccgcacagagctggcggtccgctacaatgacatctcaccgctggagaaccaccactgcgccgtggccttccagatcctcgccgagcctgagtgcaacatcttctccaacatcccacctgatgggttcaagcagatccgacagggaatgatcacattaatcttggccactgacatggcaagacatgcagaaattatggattctttcaaagagaaaatggagaattttgactacagcaacgaggagcacatgaccctgctgaagatgattttgataaaatgctgtgatatctctaacgaggtccgtccaatggaagtcgcagagccttgggtggactgtttattagaggaatattttatgcagagcgaccgtgagaagtcagaaggccttccygtggcmccgttcatggaccgagacaaagtgaccaaggccacagcccagattgggttcatcaagtttgtcctgatcccaatgtttgaaacagtgaccaagctcttccccatggttgaggagatcatgctgcagccactttgggaatcccgagatcgctacgaggagctgaagcggatagatgacgccatgaaagagttacagaagaagactgacagcttgacgtctggggccaccgagaagtccagagagagaagcagagatgtgaaaaacagtgaaggagactgtgcctgaggaaagcggggggcgtggctgcagttctggacgggctggccgagctgcgcgggatccttgtgcagggaagagctgccctgggcacctggcaccacaagrccatgttttctaagaaccattttgttcactgatacaaaaaaaaaaaaaggaattcatgatgctgtacagaattttatttttaaactgtcttttaaataatatattcttatacggaaatgggtactgtacttcttctttggtagagttgtgtatgctgcttccggtaagttctctcatggagacgaaggacactgtgcttttcccccagatgtatcttagagcaattgaccagtgtgatgcggtgcgtacgtccctgtaaattcagcattaaatgtcagcacggtgccctgagtgcaaggacrtgcacgggtcctgtgtttctgagcagagggggacgtcagtgccgtgtgtgggacatctggggactgaggcaggttggccagactgtaggtcgtgtgtcggagcaaacgcacccatgaccatggg

SEQ ID NO: 6944 - DNA, 2190 bp, Homo sapiens
tcccgcggcggctggcgtcgggaaagtacagtaaaaagtccgagtgcagccgccgggcgcaggatgggatccggctcctccagctaccggcccaaggccatctacctggacatcgatggacgcattcagaaggtaatcttcagcaagtactgcaactccagcgacatcatggacctgttctgcatcgccaccggcctgcctcggaacacgaccatctccctgctgaccaccgacgacgccatggtctccatcgaccccaccatgcccgcgaattcagaacgcactccgtacaaagtgagacctgtggccatcaagcaactctccgagagagaagaattaatccagagcgtgctggcgcaggttgcagagcagttctcaagagcattcaaaatcaatgaactgaaagctgaagttgcaaatcacttggctgtcctagagaaacgcgtggaattggaaggactaaaagtggtggagattgagaaatgcaagagtgacattaagaagatgagggaggagctggcggccagaagcagcaggaccaactgcccctgtaagtacagttttttggataaccacaagaagttgactcctcgacgcgatgttcccacttaccccaagtacctgctctctccagagaccatcgaggccctgcggaagccgacctttgacgtctggctttgggagcccaatgagatgctgagctgcctggagcacatgtaccacgacctcgggctggtcagggacttcagcatcaaccctgtcaccctcaggaggtggctgttctgygtccacgacaactacagaaacaaccccttccacaacttccggcactgcttctgcgtggcccagatgatgtacagcatggtctggctctgcagtctccaggagaagttctcacaaacggatatcctgatcctaatgacagcggccatctgccacgatctggaccatcccggctacaacaacacgtaccagatcaatgcccgcacagagctggcggtccgctacaatgacatctcaccgctggagaaccaccactgcgccgtggccttccagatcctcgccgagcctgagtgcaacatcttctccaacatcccacctgatgggttcaagcagatccgacagggaatgatcacattaatcttggccactgacatggcaagacatgcagaaattatggattctttcaaagagaaaatggagaattttgactacagcaacgaggagcacatgaccctgctgaagatgattttgataaaatgctgtgatatctctaacgaggtccgtccaatggaagtcgcagagccttgggtggactgtttattagaggaatattttatgcagagcgaccgtgagaagtcagaaggccttccygtggcmccgttcatggaccgagacaaagtgaccaaggccacagcccagattgggttcatcaagtttgtcctgatcccaatgtttgaaacagtgaccaagctcttccccatggttgaggagatcatgctgcagccactttgggaatcccgagatcgctacgaggagctgaagcggatagatgacgccatgaaagagttacagaagaagactgacagcttgacgtctggggccaccgagaagtccagagagagaagcagagatgtgaaaaacagtgaaggagactgtgcctgaggaaagcggggggcgtggctgcagttctggacgggctggccgagctgcgcgggatccttgtgcagggaagagctgccctgggcacctggcaccacaagrccatgttttctaagaaccattttgttcactgatacaaaaaaaaaaaaaggaattcatgatgctgtacagaattttatttttaaactgtcttttaaataatatattcttatacggaaatgggtactgtacttcttctttggtagagttgtgtatgctgcttccggtaagttctctcatggagacgaaggacactgtgcttttcccccagatgtatcttagagcaattgaccagtgtgatgcggtgcgtacgtccctgtaaattcagcattaaatgtcagcacggtgccctgagtgcaaggacrtgcacgggtcctgtgtttctgagcagagggggacgtcagtgccgtgtgtgggacatctggggactgaggcaggttggccagactgtaggtcgtgtgtcggagcaaacgcacccatgaccatggg

SEQ ID NO: 6945 - DNA, 2370 bp, Homo sapiens
tcccgcggcggctggcgtcgggaaagtacagtaaaaagtccgagtgcagccgccgggcgcaggatgggatccggctcctccagctaccggcccaaggccatctacctggacatcgatggacgcattcagaaggtaatcttcagcaagtactgcaactccagcgacatcatggacctgttctgcatcgccaccggcctgcctcggaacacgaccatctccctgctgaccaccgacgacgccatggtctccatcgaccccaccatgcccgcgaattcagaacgcactccgtacaaagtgagacctgtggccatcaagcaactctccgctggtgtcgaggacaagagaaccacaagccgtggccagtctgctgagagaccactgagggacagacgggttgtgggcctggagcagccccggagggaaggagcatttgaaagtggacaggtagarcccaggcccagagagccccagggctgctaccaggaaggccagcgcatccctccagagagagaagaattaatccagagcgtgctggcgcaggttgcagagcagttctcaagagcattcaaaatcaatgaactgaaagctgaagttgcaaatcacttggctgtcctagagaaacgcgtggaattggaaggactaaaagtggtggagattgagaaatgcaagagtgacattaagaagatgagggaggagctggcggccagaagcagcaggaccaactgcccctgtaagtacagttttttggataaccacaagaagttgactcctcgacgcgatgttcccacttaccccaagtacctgctctctccagagaccatcgaggccctgcggaagccgacctttgacgtctggctttgggagcccaatgagatgctgagctgcctggagcacatgtaccacgacctcgggctggtcagggacttcagcatcaaccctgtcaccctcaggaggtggctgttctgygtccacgacaactacagaaacaaccccttccacaacttccggcactgcttctgcgtggcccagatgatgtacagcatggtctggctctgcagtctccaggagaagttctcacaaacggatatcctgatcctaatgacagcggccatctgccacgatctggaccatcccggctacaacaacacgtaccagatcaatgcccgcacagagctggcggtccgctacaatgacatctcaccgctggagaaccaccactgcgccgtggccttccagatcctcgccgagcctgagtgcaacatcttctccaacatcccacctgatgggttcaagcagatccgacagggaatgatcacattaatcttggccactgacatggcaagacatgcagaaattatggattctttcaaagagaaaatggagaattttgactacagcaacgaggagcacatgaccctgctgaagatgattttgataaaatgctgtgatatctctaacgaggtccgtccaatggaagtcgcagagccttgggtggactgtttattagaggaatattttatgcagagcgaccgtgagaagtcagaaggccttccygtggcmccgttcatggaccgagacaaagtgaccaaggccacagcccagattgggttcatcaagtttgtcctgatcccaatgtttgaaacagtgaccaagctcttccccatggttgaggagatcatgctgcagccactttgggaatcccgagatcgctacgaggagctgaagcggatagatgacgccatgaaagagttacagaagaagactgacagcttgacgtctggggccaccgagaagtccagagagagaagcagagatgtgaaaaacagtgaaggagactgtgcctgaggaaagcggggggcgtggctgcagttctggacgggctggccgagctgcgcgggatccttgtgcagggaagagctgccctgggcacctggcaccacaagrccatgttttctaagaaccattttgttcactgatacaaaaaaaaaaaaaggaattcatgatgctgtacagaattttatttttaaactgtcttttaaataatatattcttatacggaaatgggtactgtacttcttctttggtagagttgtgtatgctgcttccggtaagttctctcatggagacgaaggacactgtgcttttcccccagatgtatcttagagcaattgaccagtgtgatgcggtgcgtacgtccctgtaaattcagcattaaatgtcagcacggtgccctgagtgcaaggacrtgcacgggtcctgtgtttctgagcagagggggacgtcagtgccgtgtgtgggacatctggggactgaggcaggttggccagactgtaggtcgtgtgtcggagcaaacgcacccatgaccatggg

SEQ ID NO: 6946 - DNA, 5032 bp, Homo sapiens
gcggcggcggcggcggcggcggcagcggcggccaagcggccaggttggcggccggggctccgggccgcgcgaggccacggccacgccgcgccgctgcgcacaaccaacgaggcagagcgccgcccggcgcgagactgcggccgaagcgtggggcgcgcgtgcggaggaccaggcgcggcgcggctgcggctgagagtggagcctttcaggctggcatggagagcttaaggggcaactgaaggagacacactggccaagcgcggagttctgcttacttcagtcctgctgagatactctctcagtccgctcgcaccgaaggaagctgccttgggatcagagcagacataaagctagaaaaatttcaagacagaaacagtctccgccagtcaagaaaccctcaaaagtattttgccatggatatagaagatgaagaaaacatgagttccagcagcactgatgtgaaggaaaaccgcaatctggacaacgtgtcccccaaggatggcagcacacctgggcctggcgagggctctcagctctccaatgggggtggtggtggccccggcagaaagcggcccctggaggagggcagcaatggccactccaagtaccgcctgaagaaaaggaggaaaacaccagggccygtcctccccaagaacgccctgatgcagctgaatgagatcaagcctggtttgcagtacacactcctgtcccagactgggcccgtgcacgcgcctttgtttgtcatgtctgtggaggtgaatggccaggtttttgagggctctggtcccacaaagaaaaaggcaaaactccatgctgctgagaaggccttgaggtctttcgttcagtttcctaatgcctctgaggcccacctggccatggggaggaccctgtctgtcaacacggacttcacatctgaccaggccgacttccctgacacgctcttcaatggttttgaaactcctgacaaggcggagcctcccttttaygtgggctccaatggggatgactccttcagttccagcggggacctcagcttgtctgcttccccggtgcctgccagcctagcccagcctcctctccctgtcttaccaccattcccacccccgagtgggaagaatcccgtgatgatcttgaacgaactgcgcccaggactcaagtatgacttcctctccgagagcggggagagccatgccaagagcttcgtcatgtctgtggtcgtggatggtcagttctttgaaggctcggggagaaacaaraagcttgccaaggcccgggctgcgcagtctgccctggccgccatttttaacttgcacttggatcagacgccatctcgccagcctattcccagtgagggtcttcagctgcatttaccgcaggttttagctgacgctgtctcacgcctggtcctgggtaagtttggtgacctgaccgacaacttctcctcccctcacgctcgcagaaaagtgctggctggagtcgtcatgacaacaggcacagatgttaaagatgccaaggtgataagtgtttctacaggaacaaaatgtattaatggtgaatacatgagtgatcgtggccttgcattaaatgactgccatgcagaaataatatctcggagatccttgctcagatttctttatacacaacttgagctttacttaaataacaaagatgatcaaaaaagatccatctttcagaaatcagagcgaggggggtttaggctgaaggagaatgtccagtttcatctgtacatcagcacctctccctgtggagatgccagaatcttctcaccacatgagccaatcctggaagggtctcgctcttacacccaggctggagtgcagtggtgcaatcatggctcactgcagcctcgacctcctgggctcttaagcgatccttccacctcaaccttccaaggagctgggactacagaaccagcagatagacacccaaatcgtaaagcaagaggacagctacggaccaaaatagagtctggtgaggggacgattccagtgcgctccaatgcgagcatccaaacgtgggacggggtgctgcaaggggagcggctgctcaccatgtcctgcagtgacaagattgcacgctggaacgtggtgggcatccagggatccctgctcagcattttcgtggagcccatttacttctcgagcatcatcctgggcagcctttaccacggggaccacctttccagggccatgtaccagcggatctccaacatagaggacctgccacctctctacaccctcaacaagcctttgctcagtggcatcagcaatgcagaagcacggcagccagggaaggcccccaacttcagtgtcaactggacggtaggcgactccgctattgaggtcatcaacgccacgactgggaaggatgagctgggccgcgcgtcccgcctgtgtaagcacgcgttgtactgtcgctggatgcgtgtgcacggcaaggttccctcccacttactacgctccaagattaccaarcccaacgtgtaccatgagtccaagctggcggcaaaggagtaccaggccgccaaggcgcgtctgttcacagccttcatcaaggcggggctgggggcctgggtggagaagcccaccgagcaggaccagttytcactcacgccctgacccgggcagacatgatggggggtgcagggggctgtgggcatccagcgtcatcctccagaacctcacatctgaactgggggcaggtgcataccttggggagggagtagggggacacgggggaccaccaggtgtccacggttgtccccagcatctcacatcagacctggggcaggtgcgcagtgtggggaggggatggggtgcgtcagggcccagcatcgccgcctggcatctctctgccgcagcatttccccttctgaaccgtccagtgactgctttcaatctcggttyacgtttagaaattgagttctactgagtagggcttccttaagtttaggaaaatagaaattactttgtgtgaaattcttgaataaataatttattcagagctaggaatgtggtttataaaataggaagtaattgtgtcaggtcacttttatgccacattattttaattgcaaaaaagcatctatatatggaggagggtgggaaaatagaggtaggaaatagtagcctaaaggaaatcgccacacgtctgtctaaacttaggtctcttttctccgtaggtacctccctgggtagttccacacactaggttgtaacagtctctccctgaggagcagactcccagcatggtgtagcgtggccctgtcaygcacatggggtcccgcagcagtgactgtgtgtcctgcagaggcgtgacccaggcccctgtagccctcagcctcctctagaagcttctgtactccttgtaggatcagatcatggaaaacttttctcagtttacttctaagtaatcacagataatacatggccagtaatcccaggctggccattcattcaggttttttaaaggatatttaacttttatggactagaaggaatcacgagggctactgcacaatacatggcctaagttccctctgttccttcctctgaatcgaatggatgtgggtgaccgcccgaaggccttcacaggatggaagtagaatgatttcagtagatactcattcttggaaaatgccatagttttaaattattgtttccagctttatcaaagacatgtttgaaaaataaaaagcatccaagtgagagctggtgagaccacgtgctgctggcgtagtgtaggccagacattgacagtcctgacgggagctcagggctgcccagcgcccagcgtgcacgggacggccccacgacagagggagtcagcccgggaggtcaggagcgcggcgggcgagggccctgtgtggaccacctccaccaagctcagagatttgcaccaggtgccttgttgcctccgctcaggatgaaagaggagctgagagaagtgctctgcctgccagtgcagtgcccagctccaaggctctagagggtgttcaggtacactgaggaggggacggctccgtcttcacattgtgcacagatctgaggatgggattagcgaagctgtggagactgcacatccggacctgcccatgtctcaaaacaaacacatgtacagtggctctttttccttctcaaacactttaccccagaagcaggtggtctgccccaggcataaagaaggaaaattggccatctttcccacctctaaattctgtaaaattatagacttgctcaaaagattccttttkatcatccccacgctgtgtaagtggaaagggcatkgtgttccgtgtgtgtccagtttacagcgtctctgccccctagcgtgttttgtgacaatctccctgggtgaggagtgggtgcacccagccccgaggccagtggttgctcggggccttccgtgtgagttctagtgttcacttgatgccggggaatagaattagagaaaactctgacctgccgggttccagggactggtggaggtggatggcaggtccgactcgaccatgacttagttgtaagggtgtgtcggcttttycagtctcatgtgaaaatcctcctgtctctggcagcactgtctgcactttcttgtttactgtttgaagggacgagtaccaagccacaagaacacttcttttggccacagcataagctgatggtatgtaaggaaccgatgggccattaaacatgaactgaacggttaaaagcacagtctatggaacgctaatggagtcagcccctaaagctgtttgctttttcaggctttggattacatgcttttaatttgattttagaayctggacactttctatgaatgtaattcggctgagaaacatgttgctgagatgcaatcctcagtgttctctgtatgtaaatctgtgtatacaccacacgttacaactgcatgagcttcctctcgcacaagaccagctggaactgagcatgagacgctgtcaaatacagacaaaggatttgagatgttctcaataaaaagaaaatgtttcact

SEQ ID NO: 6947 - DNA, 4909 bp, Homo sapiens
gcggcggcggcggcggcggcggcagcggcggccaagcggccaggttggcggccggggctccgggccgcgcgaggccacggccacgccgcgccgctgcgcacaaccaacgaggcagagcgccgcccggcgcgagactgcggccgaagcgtggggcgcgcgtgcggaggaccaggcgcggcgcggctgcggctgagagtggagcctttcaggctggcatggagagcttaaggggcaactgaaggagacacactggccaagcgcggagttctgcttacttcagtcctgctgagatactctctcagtccgctcgcaccgaaggaagctgccttgggatcagagcagacataaagctagaaaaatttcaagacagaaacagtctccgccagtcaagaaaccctcaaaagtattttgccatggatatagaagatgaagaaaacatgagttccagcagcactgatgtgaaggaaaaccgcaatctggacaacgtgtcccccaaggatggcagcacacctgggcctggcgagggctctcagctctccaatgggggtggtggtggccccggcagaaagcggcccctggaggagggcagcaatggccactccaagtaccgcctgaagaaaaggaggaaaacaccagggccygtcctccccaagaacgccctgatgcagctgaatgagatcaagcctggtttgcagtacacactcctgtcccagactgggcccgtgcacgcgcctttgtttgtcatgtctgtggaggtgaatggccaggtttttgagggctctggtcccacaaagaaaaaggcaaaactccatgctgctgagaaggccttgaggtctttcgttcagtttcctaatgcctctgaggcccacctggccatggggaggaccctgtctgtcaacacggacttcacatctgaccaggccgacttccctgacacgctcttcaatggttttgaaactcctgacaaggcggagcctcccttttaygtgggctccaatggggatgactccttcagttccagcggggacctcagcttgtctgcttccccggtgcctgccagcctagcccagcctcctctccctgtcttaccaccattcccacccccgagtgggaagaatcccgtgatgatcttgaacgaactgcgcccaggactcaagtatgacttcctctccgagagcggggagagccatgccaagagcttcgtcatgtctgtggtcgtggatggtcagttctttgaaggctcggggagaaacaaraagcttgccaaggcccgggctgcgcagtctgccctggccgccatttttaacttgcacttggatcagacgccatctcgccagcctattcccagtgagggtcttcagctgcatttaccgcaggttttagctgacgctgtctcacgcctggtcctgggtaagtttggtgacctgaccgacaacttctcctcccctcacgctcgcagaaaagtgctggctggagtcgtcatgacaacaggcacagatgttaaagatgccaaggtgataagtgtttctacaggaacaaaatgtattaatggtgaatacatgagtgatcgtggccttgcattaaatgactgccatgcagaaataatatctcggagatccttgctcagatttctttatacacaacttgagctttacttaaataacaaagatgatcaaaaaagatccatctttcagaaatcagagcgaggggggtttaggctgaaggagaatgtccagtttcatctgtacatcagcacctctccctgtggagatgccagaatcttctcaccacatgagccaatcctggaagaaccagcagatagacacccaaatcgtaaagcaagaggacagctacggaccaaaatagagtctggtgaggggacgattccagtgcgctccaatgcgagcatccaaacgtgggacggggtgctgcaaggggagcggctgctcaccatgtcctgcagtgacaagattgcacgctggaacgtggtgggcatccagggatccctgctcagcattttcgtggagcccatttacttctcgagcatcatcctgggcagcctttaccacggggaccacctttccagggccatgtaccagcggatctccaacatagaggacctgccacctctctacaccctcaacaagcctttgctcagcatcagcaatgcagaagcacggcagccagggaaggcccccaacttcagtgtcaactggacggtaggcgactccgctattgaggtcatcaacgccacgactgggaaggatgagctgggccgcgcgtcccgcctgtgtaagcacgcgttgtactgtcgctggatgcgtgtgcacggcaaggttccctcccacttactacgctccaagattaccaarcccaacgtgtaccatgagtccaagctggcggcaaaggagtaccaggccgccaaggcgcgtctgttcacagccttcatcaaggcggggctgggggcctgggtggagaagcccaccgagcaggaccagttytcactcacgccctgacccgggcagacatgatggggggtgcagggggctgtgggcatccagcgtcatcctccagaacctcacatctgaactgggggcaggtgcataccttggggagggagtagggggacacgggggaccaccaggtgtccacggttgtccccagcatctcacatcagacctggggcaggtgcgcagtgtggggaggggatggggtgcgtcagggcccagcatcgccgcctggcatctctctgccgcagcatttccccttctgaaccgtccagtgactgctttcaatctcggttyacgtttagaaattgagttctactgagtagggcttccttaagtttaggaaaatagaaattactttgtgtgaaattcttgaataaataatttattcagagctaggaatgtggtttataaaataggaagtaattgtgtcaggtcacttttatgccacattattttaattgcaaaaaagcatctatatatggaggagggtgggaaaatagaggtaggaaatagtagcctaaaggaaatcgccacacgtctgtctaaacttaggtctcttttctccgtaggtacctccctgggtagttccacacactaggttgtaacagtctctccctgaggagcagactcccagcatggtgtagcgtggccctgtcaygcacatggggtcccgcagcagtgactgtgtgtcctgcagaggcgtgacccaggcccctgtagccctcagcctcctctagaagcttctgtactccttgtaggatcagatcatggaaaacttttctcagtttacttctaagtaatcacagataatacatggccagtaatcccaggctggccattcattcaggttttttaaaggatatttaacttttatggactagaaggaatcacgagggctactgcacaatacatggcctaagttccctctgttccttcctctgaatcgaatggatgtgggtgaccgcccgaaggccttcacaggatggaagtagaatgatttcagtagatactcattcttggaaaatgccatagttttaaattattgtttccagctttatcaaagacatgtttgaaaaataaaaagcatccaagtgagagctggtgagaccacgtgctgctggcgtagtgtaggccagacattgacagtcctgacgggagctcagggctgcccagcgcccagcgtgcacgggacggccccacgacagagggagtcagcccgggaggtcaggagcgcggcgggcgagggccctgtgtggaccacctccaccaagctcagagatttgcaccaggtgccttgttgcctccgctcaggatgaaagaggagctgagagaagtgctctgcctgccagtgcagtgcccagctccaaggctctagagggtgttcaggtacactgaggaggggacggctccgtcttcacattgtgcacagatctgaggatgggattagcgaagctgtggagactgcacatccggacctgcccatgtctcaaaacaaacacatgtacagtggctctttttccttctcaaacactttaccccagaagcaggtggtctgccccaggcataaagaaggaaaattggccatctttcccacctctaaattctgtaaaattatagacttgctcaaaagattccttttkatcatccccacgctgtgtaagtggaaagggcatkgtgttccgtgtgtgtccagtttacagcgtctctgccccctagcgtgttttgtgacaatctccctgggtgaggagtgggtgcacccagccccgaggccagtggttgctcggggccttccgtgtgagttctagtgttcacttgatgccggggaatagaattagagaaaactctgacctgccgggttccagggactggtggaggtggatggcaggtccgactcgaccatgacttagttgtaagggtgtgtcggcttttycagtctcatgtgaaaatcctcctgtctctggcagcactgtctgcactttcttgtttactgtttgaagggacgagtaccaagccacaagaacacttcttttggccacagcataagctgatggtatgtaaggaaccgatgggccattaaacatgaactgaacggttaaaagcacagtctatggaacgctaatggagtcagcccctaaagctgtttgctttttcaggctttggattacatgcttttaatttgattttagaayctggacactttctatgaatgtaattcggctgagaaacatgttgctgagatgcaatcctcagtgttctctgtatgtaaatctgtgtatacaccacacgttacaactgcatgagcttcctctcgcacaagaccagctggaactgagcatgagacgctgtcaaatacagacaaaggatttgagatgttctcaataaaaagaaaatgtttcact

SEQ ID NO: 6948 - DNA, 2600 bp, Homo sapiens
ctggagacagtctcgctcagtcgcacaggctggaggacagtggcgcgatcccggcctccaatgccaccttccagagccttcatgatgtaactccatccctgtcccctccccacatcgccggctttattgttcttcgtgtcagttcctgccagtggacatttaattctaattcacgtctcactccctcccctactgtgagccccacgtggcagagaccscggcggagctgcgcgggccggaggaggctgcggarcatcgctctgacctgagccggggacgctgcggaggcgcagcacgttcctctgcccagagctgatgggcaccgtccgtgtctttcgctgcaggatcccatgacagattctgttgtcacgtctccttacagagtttgagcggtgctgaactgtcagcaccatctgtccggtcccagcatgccttctgagacyccccaggcagaagtggggcccacaggctgcccccaccgctcagggccacactcggcgaaggggagcctggagaaggggtccccagaggataaggaagccaaggagcccctgtggatccggcccgatgctcygagcaggtgcacctggcagctgggccggcctgcctccgagtccccacrtcaccacactgccccggcaaaatctccaaaaatcttgccagatattctgaaraaaatcrgggacaccyctwtggtcagaatcaacaagattgggaagaagttcggccygmastgtgagctcttggccaagygtgagttcttcaacgcgggcgggagcgtgaaggacydcatcagcctgyvgrtgattgasgatgctgascgcgacgggacgctgaagcccggggacacgattatcragcygacatccrggaacaccrggatsgggctgrccctggctgcggcagtgaggggctaycgctgcatcatcgtgatgccagagaagatgagctccragaaggtggacgygctgcgggcactgggggctgagattgtgaggaygcccaccaatgccaggttcgwctccccggagtcacacgtgggggtggcctggcggctgaagaaygaaatccccaattctcacatcctagaccagtaccrcaacgccagcaavcccctggctcactaygacaccaccgctgatragatcctgcagcagtgtgatgggaagctggacatgctggtggcttcagtgggcacgggcggcaccatcabgggcattgccaggaagctgaaggagaagtgtcctggatgcaggatcaytggggtggatcccgaagggtccatcctcgcagagcyggaggagctgaaccagacggagcagacaacctacraggtggaarggatcggctacgacttcatccccacrgtgctggacaggacggtggyggacaagtggttcaagagcaacgatgaggaggcgttcacctttgcccgcatgctgatcgcgcaagaggggctgctgtgcrgtggcagtgctggcarcayrrtgscggtggccgtgaaggcyrcgcaggagctgcaggagggccagyrctgcgtggtcattctgcccgactcagtgcggaactacatgaccrasttcctgagcgacaggtggatgctgcagaagggctttctgaaggaggaggacctcacggagaagaagccctggtrgtggcacctccgtgttcaggagctgggcctgtcagccccgctgaccgtgctcccgaccatcacctgtgggcacamcaycgagatcctccrggagaagggcttcgaccaggcgcccgtggtggatgaggcgggggwaatcctgggaatggtgacgcttgggaacatgctctcgtccctgcttgccgggaaggtgcagccgtcagaccaagttggcaaagtcatctacaagcagttcaaacagatcygcctcacggacacgctgggcaggctctcgcacatcctggagatggaccacttcgccctggtggtgcacgagcagatccagtcgcaggaccaggcctgggcaggcgtggtgggggggcctgcagaccacagcaccgggaagtccagtcagcggcagatggtgttcggggtggwcaccgccattgactygctgaacttcgtggccgcccaggagcgggaccagaagtgaagtccggagmgctgggcggatgtttcaccaaggaaatattgagagagaagtcggccaggtaggatgaacacaggcaatgactgcrcagagtggattaaaggcaaaagagagaagagtccaggaaggggcggggagaagcctgggtggctcagcatcctccacgggctgcgccgtctgctcggggctgagctggcgggagcagtttgcgtgtttgggttttttaaytgagatgaaattcaaataacctaaaaatcaatcacttgaaagtgaacaatcagcggcatttagtacatccagaaagttgtgtaggcaccacctctgtcacgttcyggaacattctgtcatcacccygtgaagcaatcatttcccctcccgtcttcctcctcccctggcaactgctgatcgactttgtgtctctgttgtctaaaataggttttccctgttctggacatttcatataaatggaatcacaca

SEQ ID NO: 6949 - DNA, 2568 bp, Homo sapiens
acgccctcggggtcggtcctcgaggacgcgcagggccccccacccaccaggacgcacgtttcaagctcatcagtaaaggttccttaaattcccgaagggcaagaagttaaccaagtaaaacagcatcggaacaccaggatcccatgacagattctgttgtcacgtctccttacagagtttgagcggtgctgaactgtcagcaccatctgtccggtcccagcatgccttctgagacyccccaggcagaagtggggcccacaggctgcccccaccgctcagggccacactcggcgaaggggagcctggagaaggggtccccagaggataaggaagccaaggagcccctgtggatccggcccgatgctcygagcaggtgcacctggcagctgggccggcctgcctccgagtccccacrtcaccacactgccccggcaaaatctccaaaaatcttgccagatattctgaaraaaatcrgggacaccyctwtggtcagaatcaacaagattgggaagaagttcggccygmastgtgagctcttggccaagygtgagttcttcaacgcgggcgggagcgtgaaggacydcatcagcctgyvgrtgattgasgatgctgascgcgacgggacgctgaagcccggggacacgattatcragcygacatccrggaacaccrggatsgggctgrccctggctgcggcagtgaggggctaycgctgcatcatcgtgatgccagagaagatgagctccragaaggtggacgygctgcgggcactgggggctgagattgtgaggaygcccaccaatgccaggttcgwctccccggagtcacacgtgggggtggcctggcggctgaagaaygaaatccccaattctcacatcctagaccagtaccrcaacgccagcaavcccctggctcactaygacaccaccgctgatragatcctgcagcagtgtgatgggaagctggacatgctggtggcttcagtgggcacgggcggcaccatcabgggcattgccaggaagctgaaggagaagtgtcctggatgcaggatcaytggggtggatcccgaagggtccatcctcgcagagcyggaggagctgaaccagacggagcagacaacctacraggtggaarggatcggctacgacttcatccccacrgtgctggacaggacggtggyggacaagtggttcaagagcaacgatgaggaggcgttcacctttgcccgcatgctgatcgcgcaagaggggctgctgtgcrgtggcagtgctggcarcayrrtgscggtggccgtgaaggcyrcgcaggagctgcaggagggccagyrctgcgtggtcattctgcccgactcagtgcggaactacatgaccrasttcctgagcgacaggtggatgctgcagaagggctttctgaaggaggaggacctcacggagaagaagccctggtrgtggcacctccgtgttcaggagctgggcctgtcagccccgctgaccgtgctcccgaccatcacctgtgggcacamcaycgagatcctccrggagaagggcttcgaccaggcgcccgtggtggatgaggcgggggwaatcctgggaatggtgacgcttgggaacatgctctcgtccctgcttgccgggaaggtgcagccgtcagaccaagttggcaaagtcatctacaagcagttcaaacagatcygcctcacggacacgctgggcaggctctcgcacatcctggagatggaccacttcgccctggtggtgcacgagcagatccagtaccacagcaccgggaagtccagtcagcggcagatggtgttcggggtggwcaccgccattgactygctgaacttcgtggccgcccaggagcgggaccagaagtgaagtccggagmgctgggcggtgyggagcgggcccgccacccttgcccacttctccttcgctttcctgagccctaaacacacrcgtgattggtaactgcctggcctggcaccgttatccctgcasacggcacagagcatccgtctcccctcgttaacacatggcttcctaaatggccctgtttacggcctatgagatgaaatatgtgattttctctaatgtaacttcctcttaggatgtttcaccaaggaaatattgagagagaagtcggccaggtaggatgaacacaggcaatgactgcrcagagtggattaaaggcaaaagagagaagagtccaggaaggggcggggagaagcctgggtggctcagcatcctccacgggctgcgccgtctgctcggggctgagctggcgggagcagtttgcgtgtttgggttttttaaytgagatgaaattcaaataacctaaaaatcaatcacttgaaagtgaacaatcagcggcatttagtacatccagaaagttgtgtaggcaccacctctgtcacgttcyggaacattctgtcatcacccygtgaagcaatcatttcccctcccgtcttcctcctcccctggcaactgctgatcgactttgtgtctctgttgtctaaaataggttttccctgttctggacatttcatataaatggaatcacacaatt

SEQ ID NO: 6950 - DNA, 2666 bp, Homo sapiens
aaggccctgggatcagaaaactcgctggttaatragtggccaagaacatatcagcttaagtttgggaaaaacacacaacagggcattgtgtcagagggtgaccaaagtgactccccagcagatggacmagggaacgaacaggtgacctttgaactgaggccggagtggaagcagcgagggtgtgaagggccgggtgagggtcaaaggcagaagcaagcaggtggggagggttagcgtcatgcctgctaaggagcagtggacgggtcctagcacgtgctgtgagccacccgctgtccagggagcggttacctctgtcttgccagcttcgtggggacagatagttcagctcatcatttatgagacagagaatgggaatttggagggtctgtggctggcctcgtcctgggtgcgcagggggtcacctgaggtgtggtctgaggcctccggggaagggcatttctttgcaggacgcagtttccaggctcaagarcgtggagggaattcctaagggtcgctcttcaccaagagcgcagagccctggtagacctcagcatcgtcacagagaaagctgtgggtgcagaggccttggggacaaggcggggacggaatttcgtatttcagatgaccaaggycaatggccaagygtgagttcttcaacgcgggcgggagcgtgaaggacydcatcagcctgyvgrtgattgasgatgctgascgcgacgggacgctgaagcccggggacacgattatcragcygacatccrggaacaccrggatsgggctgrccctggctgcggcagtgaggggctaycgctgcatcatcgtgatgccagagaagatgagctccragaaggtggacgygctgcgggcactgggggctgagattgtgaggaygcccaccaatgccaggttcgwctccccggagtcacacgtgggggtggcctggcggctgaagaaygaaatccccaattctcacatcctagaccagtaccrcaacgccagcaavcccctggctcactaygacaccaccgctgatragatcctgcagcagtgtgatgggaagctggacatgctggtggcttcagtgggcacgggcggcaccatcabgggcattgccaggaagctgaaggagaagtgtcctggatgcaggatcaytggggtggatcccgaagggtccatcctcgcagagcyggaggagctgaaccagacggagcagacaacctacraggtggaarggatcggctacgacttcatccccacrgtgctggacaggacggtggyggacaagtggttcaagagcaacgatgaggaggcgttcacctttgcccgcatgctgatcgcgcaagaggggctgctgtgcrgtggcagtgctggcarcayrrtgscggtggccgtgaaggcyrcgcaggagctgcaggagggccagyrctgcgtggtcattctgcccgactcagtgcggaactacatgaccrasttcctgagcgacaggtggatgctgcagaagggctttctgaaggaggaggacctcacggagaagaagccctggtrgtggcacctccgtgttcaggagctgggcctgtcagccccgctgaccgtgctcccgaccatcacctgtgggcacamcaycgagatcctccrggagaagggcttcgaccaggcgcccgtggtggatgaggcgggggwaatcctgggaatggtgacgcttgggaacatgctctcgtccctgcttgccgggaaggtgcagccgtcagaccaagttggcaaagtcatctacaagcagttcaaacagatcygcctcacggacacgctgggcaggctctcgcacatcctggagatggaccacttcgccctggtggtgcacgagcagatccagtaccacagcaccgggaagtccagtcagcggcagatggtgttcggggtggwcaccgccattgactygctgaacttcgtggccgcccaggagcgggaccagaagtgaagtccggagmgctgggcggtgyggagcgggcccgccacccttgcccacttctccttcgctttcctgagccctaaacacacrcgtgattggtaactgcctggcctggcaccgttatccctgcasacggcacagagcatccgtctcccctcgttaacacatggcttcctaaatggccctgtttacggcctatgagatgaaatatgtgattttctctaatgtaacttcctcttaggatgtttcaccaaggaaatattgagagagaagtcggccaggtaggatgaacacaggcaatgactgcrcagagtggattaaaggcaaaagagagaagagtccaggaaggggcggggagaagcctgggtggctcagcatcctccacgggctgcgccgtctgctcggggctgagctggcgggagcagtttgcgtgtttgggttttttaaytgagatgaaattcaaataacctaaaaatcaatcacttgaaagtgaacaatcagcggcatttagtacatccagaaagttgtgtaggcaccacctctgtcacgttcyggaacattctgtcatcacccygtgaagcaatcatttcccctcccgtcttcctcctcccctggcaactgctgatcgactttgtgtctctgttgtctaaaataggttttccctgttctggacatttcatataaatggaatcacacaatt

SEQ ID NO: 6951 - DNA, 1302 bp, Homo sapiens
ctggagacagtctcgctcagtcgcacaggctggaggacagtggcgcgatcccggcctccaatgccaccttccagagccttcatgatgtaactccatccctgtcccctccccacatcgccggctttattgttcttcgtgtcagttcctgccagtggacatttaattctaattcacgtctcactccctcccctactgtgagccccacgtggcagagaccscggcggagctgcgcgggccggaggaggctgcggarcatcgctctgacctgagccggggacgctgcggaggcgcagcacgttcctctgcccagagctgatgggcaccgtccgtgtctttcgctgcaggatcccatgacagattctgttgtcacgtctccttacagagtttgagcggtgctgaactgtcagcaccatctgtccggtcccagcatgccttctgagacyccccaggcagaagtggggcccacaggctgcccccaccgctcagggccacactcggcgaaggggagcctggagaaggggtccccagaggataaggaagccaaggagcccctgtggatccggcccgatgctcygagcaggtgcacctggcagctgggccggcctgcctccgagtccccacrtcaccacactgccccggcaaaatctccaaaaatcttgccagatattctgaaraaaatcrgggacaccyctwtggtcagaatcaacaagattgggaagaagttcggccygmastgtgagctcttggccaagygtgagttcttcaacgcgggcgggagcgtgaaggacydcatcagcctgyvgrtgattgasgatgctgascgcgacgggacgctgaagcccggggacacgattatcragcygacatccrggaacaccrggatsgggctgrccctggctgcggcagtgaggggctaycgctgcatcatcgtgatgccagagaagatgagctccragaaggtggacgygctgcgggcactgggggctgagattgtgaggaygcccaccaatgccaggttcgwctccccggagtcacacgtgggggtggcctggcggctgaagaaygaaatccccaattctcacatcctagaccagtaccrcaacgccagcaavcccctggctcactaygacaccaccgctgatragatcctgcagcagtgtgatgggaagctggacatgctggtggcttcagtgggcacgggcggcaccatcabgggcattgccaggaagctgaaggagaagtgtcctggatgcatcaytggggtggatcccgaagggtccatcctcgcagagcyggaggagc

SEQ ID NO: 6952 - DNA, 3105 bp, Homo sapiens
tcgccgcagtcggggcagccgctcgcccctcttttccatgtatccgtccagagtttgagcggtgctgaactgtcagcaccatctgtccggtcccagcatgccttctgagacyccccaggcagaagtggggcccacaggctgcccccaccgctcagggccacactcggcgaaggggagcctggagaaggggtccccagaggataaggaagccaaggagcccctgtggatccggcccgatgctcygagcaggtgcacctggcagctgggccggcctgcctccgagtccccacrtcaccacactgccccggcaaaatctccaaaaatcttgccagatattctgaaraaaatcrgggacaccyctwtggtcagaatcaacaagattgggaagaagttcggccygmastgtgagctcttggccaagygtgagttcttcaacgcgggcgggagcgtgaaggacydcatcagcctgyvgrtgattgasgatgctgascgcgacgggacgctgaagcccggggacacgattatcragcygacatccrggaacaccrggatsgggctgrccctggctgcggcagtgaggggctaycgctgcatcatcgtgatgccagagaagatgagctccragaaggtggacgygctgcgggcactgggggctgagattgtgaggaygcccaccaatgccaggttcgwctccccggagtcacacgtgggggtggcctggcggctgaagaaygaaatccccaattctcacatcctagaccagtaccrcaacgccagcaavcccctggctcactaygacaccaccgctgatragatcctgcagcagtgtgatgggaagctggacatgctggtggcttcagtgggcacgggcggcaccatcabgggcattgccaggaagctgaaggagaagtgtcctggatgcaggatcaytggggtggatcccgaagggtccatcctcgcagagcyggaggagctgaaccagacggagcagacaacctacraggtggaarggatcggctacgacttcatccccacrgtgctggacaggacggtggyggacaagtggttcaagagcaacgatgaggaggcgttcacctttgcccgcatgctgatcgcgcaagaggggctgctgtgcrgtggcagtgctggcarcayrrtgscggtggccgtgaaggcyrcgcaggagctgcaggagggccagyrctgcgtggtcattctgcccgactcagtgcggaactacatgaccrasttcctgagcgacaggtggatgctgcagaagggctttctgaaggaggaggacctcacggagaagaagccctggtrgtggcacctccgtgttcaggagctgggcctgtcagccccgctgaccgtgctcccgaccatcacctgtgggcacamcaycgagatcctccrggagaagggcttcgaccaggcgcccgtggtggatgaggcgggggwaatcctgggaatggtgacgcttgggaacatgctctcgtccctgcttgccgggaaggtgcagccgtcagaccaagttggcaaagtcatctacaagcagttcaaacagatcygcctcacggacacgctgggcaggctctcgcacatcctggagatggaccacttcgccctggtggtgcacgagcagatccagtcgcaggaccaggcctgggcaggcgtggtgggggggcctgcagggtccccaaatcaagtcttcctggagcrtgtccacgcttgtcaccaccgtctgtggctgctttcaagcacgtcagggctgcgtgctcataacagagacggcacrgcccccaagacctaaaataccaccagctggcccttgtcggaaagtcccctggctggccctagtccattgactctgggccgrgctgccaggrccacagaagcctgcggcactcagggctcccagggctcccttctccaacagttgctgtgcctccgtttccccraaatgcaaggagctgatctcatctgtgttccctrtcttttcctggggctctaagtgggccaccccaagggacctctgcctacaaagagaggagtgacagccgtggcggagttgggacgggctccgagggctcttcctcacccgcaccttgctcacccctctgtgcctcatgacagctggtgtagggtcctgtggagacgcaggaccaagaggatgtgtggggagcggggagagagagggaacgagatctgtgttaaggaactggatcatgagatcacggaggctgacaaaccctgagatctgcagggtgaggcggcaggccggagactggagagccagcagttcaagccccaaggcaggaaattccacctttggttctattcaggccttcaactgcttgggtgaggccctccacagtagcacacgttatctgcctcttgactcttgtgctaatccggaatcccctcacacatgcccagaacgacgtgtgaccaatgcctgggctcccacggccccgttaatctgtattaaaattaaccatcacaacagccctgtctgggtatgtggcatgggagcctcggccagcattaacaccgggtctacgcttgccaggagaaagcaggaggggtgaagacagaatcaggccagagatggaagctgtgtgctgcccatggtggcaaggggtttttgtctgtttttagagacagggtcttgctctgttgccgactggagtgcagtagtgccatcatagctcgctgcagcctcgacctgctgtgctcaactgatccttctgcctcagtctcccaagtagctgggaccacaagcgtgtgccaccatgctcgactaatttatttttaaaaatattctrtagagacagggtcwcaatatgttgcccaggctggtcccagacttccgggcttaaatgatcctcccaccttggcctcccacagcgctgggatcacaggtgtgagccactgtgcccggccctgtaagcgggtttgaatttcatgcccacaccggctctgaagtcatgagtgcctcaggagctcagmcggtgggccagggaagggtgtgtcctgacctgcggtgggtggagcctggcctggggcccaggggactcacgtggtgggtagaacctggcctggggg

SEQ ID NO: 6953 - DNA, 3376 bp, Homo sapiens
ggatcccccatttagccatagggcggggggatcaggttcagcctctgaaagtccagagcacgatgtttgggaaacggccccgcccgcggcctccggsacctggcgaaggagccccgcggggcgcccctgctaccaccctgcgcggagtcggccccgtccccgagagcgcccggcagcccctggccgtgggccgcaccggagccgcgcaaggcgactgttctgcgcctcggmtcggggttcggacccggctctgggcgcggtcacgcggggcgctgcgcacggcgtccggcggccacagagcgcggccatcgagtcccgccccggcgcggcgccccctcccgggcccgcgacacacgccctcggggtcggtcctcgaggacgcgcagggccccccacccaccaggacgcacgtttcaagctcatcagtaaaggttccttaaattcccgaagggcaagaagttaaccaagtaaaacagcatcggaacaccaggtagaagacaccaccggggtccgcgggtgggggtggctggaacccggggcgggcgggctcaggcgaagaggaaggcgggggagggggcggcgacccgggtctgcggttgaatcaacagggcgtgggaatggggcgggcggactggggtgggggcatgccggggtcccggggagggcgggggtcgggcaggccggagggtcccaggctgcggcggggtggggaaggggtgggggggagggscccgggctgggtggggtggaggaggggctgggsgggcgggtgctctgccacgagacattggccggcgccggcctccgcccccgcctctccgccaatcaccgcccgcctgctcccctcgccgtgggtccccgcgaggccgccaccccggggtcgccgtctccgcctcgccgcagtcggggcagccgctcgcccctcttttccatgtatccgtccaggatcccatgacagattctgttgtcacgtctccttacagagtttgagcggtgctgaactgtcagcaccatctgtccggtcccagcatgccttctgagacyccccaggcagaagtggggcccacaggctgcccccaccgctcagggccacactcggcgaaggggagcctggagaaggggtccccagaggataaggaagccaaggagcccctgtggatccggcccgatgctcygagcaggtgcacctggcagctgggccggcctgcctccgagtccccacrtcaccacactgccccggcaaaatctccaaaaatcttgccagatattctgaaraaaatcrgggacaccyctwtggtcagaatcaacaagattgggaagaagttcggccygmastgtgagctcttggccaagygtgagttcttcaacgcgggcgggagcgtgaaggacydcatcagcctgyvgrtgattgasgatgctgascgcgacgggacgctgaagcccggggacacgattatcragcygacatccrggaacaccrggatsgggctgrccctggctgcggcagtgaggggctaycgctgcatcatcgtgatgccagagaagatgagctccragaaggtggacgygctgcgggcactgggggctgagattgtgaggaygcccaccaatgccaggttcgwctccccggagtcacacgtgggggtggcctggcggctgaagaaygaaatccccaattctcacatcctagaccagtaccrcaacgccagcaavcccctggctcactaygacaccaccgctgatragatcctgcagcagtgtgatgggaagctggacatgctggtggcttcagtgggcacgggcggcaccatcabgggcattgccaggaagctgaaggagaagtgtcctggatgcaggatcaytggggtggatcccgaagggtccatcctcgcagagcyggaggagctgaaccagacggagcagacaacctacraggtggaarggatcggctacgacttcatccccacrgtgctggacaggacggtggyggacaagtggttcaagagcaacgatgaggaggcgttcacctttgcccgcatgctgatcgcgcaagaggggctgctgtgcrgtggcagtgctggcarcayrrtgscggtggccgtgaaggcyrcgcaggagctgcaggagggccagyrctgcgtggtcattctgcccgactcagtgcggaactacatgaccrasttcctgagcgacaggtggatgctgcagaagggctttctgaaggaggaggacctcacggagaagaagccctggtrgtggcacctccgtgttcaggagctgggcctgtcagccccgctgaccgtgctcccgaccatcacctgtgggcacamcaycgagatcctccrggagaagggcttcgaccaggcgcccgtggtggatgaggcgggggwaatcctgggaatggtgacgcttgggaacatgctctcgtccctgcttgccgggaaggtgcagccgtcagaccaagttggcaaagtcatctacaagcagttcaaacagatcygcctcacggacacgctgggcaggctctcgcacatcctggagatggaccacttcgccctggtggtgcacgagcagatccagtaccacagcaccgggaagtccagtcagcggcagatggtgttcggggtggwcaccgccattgactygctgaacttcgtggccgcccaggagcgggaccagaagtgaagtccggagmgctgggcggtgyggagcgggcccgccacccttgcccacttctccttcgctttcctgagccctaaacacacrcgtgattggtaactgcctggcctggcaccgttatccctgcasacggcacagagcatccgtctcccctcgttaacacatggcttcctaaatggccctgtttacggcctatgagatgaaatatgtgattttctctaatgtaacttcctcttaggatgtttcaccaaggaaatattgagagagaagtcggccaggtaggatgaacacaggcaatgactgcrcagagtggattaaaggcaaaagagagaagagtccaggaaggggcggggagaagcctgggtggctcagcatcctccacgggctgcgccgtctgctcggggctgagctggcgggagcagtttgcgtgtttgggttttttaaytgagatgaaattcaaataacctaaaaatcaatcacttgaaagtgaacaatcagcggcatttagtacatccagaaagttgtgtaggcaccacctctgtcacgttcyggaacattctgtcatcacccygtgaagcaatcatttcccctcccgtcttcctcctcccctggcaactgctgatcgactttgtgtctctgttgtctaaaataggttttccctgttctggacatttcatataaatggaatcacacaatt

SEQ ID NO: 6954 - DNA, 2558 bp, Homo sapiens
ctggagacagtctcgctcagtcgcacaggctggaggacagtggcgcgatcccggcctccaatgccaccttccagagccttcatgatgtaactccatccctgtcccctccccacatcgccggctttattgttcttcgtgtcagttcctgccagtggacatttaattctaattcacgtctcactccctcccctactgtgagccccacgtggcagagaccscggcggagctgcgcgggccggaggaggctgcggarcatcgctctgacctgagccggggacgctgcggaggcgcagcacgttcctctgcccagagctgatgggcaccgtccgtgtctttcgctgcaggatcccatgacagattctgttgtcacgtctccttacagagtttgagcggtgctgaactgtcagcaccatctgtccggtcccagcatgccttctgagacyccccaggcagaagtggggcccacaggctgcccccaccgctcagggccacactcggcgaaggggagcctggagaaggggtccccagaggataaggaagccaaggagcccctgtggatccggcccgatgctcygagcaggtgcacctggcagctgggccggcctgcctccgagtccccacrtcaccacactgccccggcaaaatctccaaaaatcttgccagatattctgaaraaaatcrgggacaccyctwtggtcagaatcaacaagattgggaagaagttcggccygmastgtgagctcttggccaagygtgagttcttcaacgcgggcgggagcgtgaaggacydcatcagcctgyvgrtgattgasgatgctgascgcgacgggacgctgaagcccggggacacgattatcragcygacatccrggaacaccrggatsgggctgrccctggctgcggcagtgaggggctaycgctgcatcatcgtgatgccagagaagatgagctccragaaggtggacgygctgcgggcactgggggctgagattgtgaggaygcccaccaatgccaggttcgwctccccggagtcacacgtgggggtggcctggcggctgaagaaygaaatccccaattctcacatcctagaccagtaccrcaacgccagcaavcccctggctcactaygacaccaccgctgatragatcctgcagcagtgtgatgggaagctggacatgctggtggcttcagtgggcacgggcggcaccatcabgggcattgccaggaagctgaaggagaagtgtcctggatgcaggatcaytggggtggatcccgaagggtccatcctcgcagagcyggaggagctgaaccagacggagcagacaacctacraggtggaarggatcggctacgacttcatccccacrgtgctggacaggacggtggyggacaagtggttcaagagcaacgatgaggaggcgttcacctttgcccgcatgctgatcgcgcaagaggggctgctgtgcrgtggcagtgctggcarcayrrtgscggtggccgtgaaggcyrcgcaggagctgcaggagggccagyrctgcgtggtcattctgcccgactcagtgcggaactacatgaccrasttcctgagcgacaggtggatgctgcagaagggctttctgaaggaggaggacctcacggagaagaagccctggtrgtggcacctccgtgttcaggagctgggcctgtcagccccgctgaccgtgctcccgaccatcacctgtgggcacamcaycgagatcctccrggagaagggcttcgaccaggcgcccgtggtggatgaggcgggggwaatcctgggaatggtgacgcttgggaacatgctctcgtccctgcttgccgggaaggtgcagccgtcagaccaagttggcaaagtcatctacaagcagttcaaacagatcygcctcacggacacgctgggcaggctctcgcacatcctggagatggaccacttcgccctggtggtgcacgagcagatccagtaccacagcaccgggaagtccagtcagcggcagatggtgttcggggtggwcaccgccattgactygctgaacttcgtggccgcccaggagcgggaccagaagtgaagtccggagmgctgggcggatgtttcaccaaggaaatattgagagagaagtcggccaggtaggatgaacacaggcaatgactgcrcagagtggattaaaggcaaaagagagaagagtccaggaaggggcggggagaagcctgggtggctcagcatcctccacgggctgcgccgtctgctcggggctgagctggcgggagcagtttgcgtgtttgggttttttaaytgagatgaaattcaaataacctaaaaatcaatcacttgaaagtgaacaatcagcggcatttagtacatccagaaagttgtgtaggcaccacctctgtcacgttcyggaacattctgtcatcacccygtgaagcaatcatttcccctcccgtcttcctcctcccctggcaactgctgatcgactttgtgtctctgttgtctaaaataggttttccctgttctggacatttcatataaatggaatcacaca

SEQ ID NO: 6955 - DNA, 7390 bp, Homo sapiens
ccagcccccggcgccgcgcggaactcgcgggttcggagccgcccgctgaggtcagaaggaggcgtctgcgctgatcgggtccgccgcgcgccagagccagagtcgcagccgaggggagccggggccggagcccgagcccgagccgagccggagcccgagcgagcggcggagaccgtgcccccgcctcggccccgcgccgccgcggccaggcccggcatggaggaggagtgccgggtgctctccatacagagccacgtcatccgcggctacgtgggcaaccgggcggccacgttcccgctgcaggttttgggatttgagattgacgcggtgaactctgtccagttttcaaaccacacaggctatgcccactggaagggccaagtgctgaattcagatgagctccaggagttgtacgaaggcctgaggctgaacaacatgaataaatatgactacgtgctcacaggttatacgagggacaagtcgttcctggccatggtggtggacattgtgcaggagctgaagcagcagaaccccaggctggtgtacgtgtgtgatccagtcttgggtgacaagtgggacggcgaaggctcgatgtacgtcccrgaggacctccttcccgtctacaaagaaaaagtggtgccrcttgcagacattatcacgcccaaccagtttgaggccgagttactgagtggccggaagatccacagccaggaggaagccttgcgggtgatggacatgctgcactctatgggccccgacaccgtggtcatcaccagctccgacctgccctccccgcagggcagcaactacctgattgtgctggggagtcagaggaggaggaatcccgctggctcygtggtgatggaacgcatccggatggacattcscaaagtggacgccgtctttgtgggcactggggacctgtttgctgccatgctcctggcgtggacacacaagcaccccaataacctcaaggtggcctgtgagaagaccgtstctaccttgcaccacgttctgcagaggaccatccagtgtgcaaaagcccaggccggggaaggagtgaggcccagccccatgcagctggagctgcggatggtgcagagcaaaagggacatcgaggacccagagatcgtcgtccaggccacggtgctgtgagggccccsccgctygcccgtgacacgcagcgcgttggtgtctccgtgtttgtccctgtgaaaacatgtaacgtctgccttagagccatgaccgaaacttgatatttttttctttcatgagtgtccggcatctgctggtcttcattgtgaaacgtgccagtcgtgctttgtgaaaaataacaaagtggtcacagaaatttgtgatctgaaaacccggctcccttccccacaaggctcctgggcctccgggaagacgggcccctgtttgccatctcgggggtgttccctgtgggagggtgagtgggtgaggccgagcctgctgcgtgtggagcctcgagtgggccctggctgccactaccgyacagaggccgtgtcgcgctgggctgggcytgggtggcctctgtctttgcatctctgagaaggagtcgggtggtaacggttggggtcaggaagaattctgccaagtatctttactgtcattctgaccatagcctctttgttcccgcattcgaacttttggttcttactttgctgctcgtttagtccctggggatttcagatcttaggctgttgtttcaccgtatgggagggttgatgtgagcttgcttggagacacacggtgcagcatcagggaccttcccaggccccagcaaattcaagtcggtctgcagacctctcagctacccgcgggacctcttgtaacccatcggcatcttccaggaatccgccgagtgacttgaggaagatgctaacgcagtaaggtctgtgctgggccaagagcagctttgaagctccagagaaccaccccgtcaggttccttgtggaagctcccctcatccgtggtgcagcaggctgagcactgcgcgtttgccacgtgctgcccgtgacagcacattgagccacagcatttgtagacaggacagaggggtgcctgccccctgcccctgctggcacatttaacccttgtcccctgacctcagttctgtgccccaccaaatgcccaggggcaagaggccaccctggaagctgccaatcttccaaggtgggtgtggggcacggtgggggcgggcagctcccaggcccttgggcaggctggggtgacggcagaggccacagcaccagctctgacaagtcctatcatcctctgctcagcagtgacctccctggccccactttgcccagagtttggggtccccccaggtatagctataggcggcagtgcctgtccctggcctgccttgatttcagccacacccctgcagccctgcatcccagctctggggtgtgcagaggtttgtgtctccagggaacmcacggctggagagaaatagggagatgcaggaagtgggggcccatggggcccccaagaagcggactctccaaggggtacccccaccccgctaccttccccacggacgggcccctcctggagcccataccctcctgtgaggccattccagtgtcttctagaaagactcgcttgccaggagtgcgttctttgttgaaaaatgccctgaagcgaaaagatgcaggtttatatggaacccccaccccctcccccactctcccactctgttcgttctgaatgtcttcacgagcgtgcatcagggcgcctggctcccccacctcagccagtgagtcagacacgggtttcgcagccatgtttcctggctccgaggacacgggtggcaggcccgttgcagcccagagccactggtccctacagggcgccgccacaccagcaggaaggaggatggctgtgtccggagcctggcggggaggcggcctccccagtatgtgagtgcagggatctgccagaaccacctggccctctgtagggcgtttaactggaaataccctcactgccaagtggagactggggcgtgtgccacattgccagccaccaggaaagcttttctttttcttttttttttttttttaaacaccaagagcacgtatagcatgggggaaagaacctaaatgtctctctgtcctgtgagctggtgaaaaacccagcatgagaacgcagtgtcaggtgtgggactccttctgcccctgcagtgggtgttacgggcggtgtgccctggcgagcaagctttgattcttggttctttgagctcgtttcagaggctgagtccccacatcagctttagttcttggacttccctgtattaagcaagaattaggagaatggctgtccctgcaggcgcctcccgtaaatcctgagctctctggcgcaatctgaaacttctcttctgttttctttggctgtatcagccgaaccaggagaggcctgggctgcgactaaggagaaagaaatcgggggtttctgagagcagatggtgcctttgtgggtgcagggcttttgtggaaattgtcagcctctacgggcagagtccggcatcccctccccagactgcctgctgtcaaaccacggagcagctggagcctgccctgtccacggcccgtttccacccgggcatgttcgtctctcmtgacttcggcagaggcccctggtggccttcagtttcagtttctcatccaggaaggtaaccttgggcattggcagtgggtttccctatggcttggatccagattagaattgatctttgttttcactttccatagttaataacatgcaaaataatgagaagaatttattttaaggtgacagctatactggtccaacatcgcctgcttattgtcagggtacagaagtttaatactttcttaatccagtttttcaaacttctccctgtagaccgtaaggatgaattccacaataggatcctttttaaaatcgattttaaattgttgcctagtcctgccaaggttattatgtgcatctgttatttttccaatacatgtaaacagttgcagcatgatgctttgtttaatgtcctgttcttaagctcgttagagccagttttgaaacgtttggtcttaccgtgaacggaggctggcttggcttagccacgctgatgagtaagtgagggatgtctccatcttgagatcaccaggcaagagagttgcctgcaccaggtaagaggccaaagcccctggggtaacagtccccaccgctacccgaggtaaaacaataaaagctatgtggttgagctcaggcctctcgtgcctggtgtcagagaaggcagagcccacagtaggtgcasggtgcaaggccctgggagggcactggccagggaaggtggtatagatggccctcagattgcggggccccgagcagctccccactctgcccgtccaccttccctggctccagcctcattctctctttagtttaactatgcaaagagaggaggttgagagtgttctggcagctggagctcttttccttgtccttcctgccctccgatggggccacctgtgtcggggcagcagtgtccatgtttatggagatcagaggtgtccccactgtgtggctggactgtactctgctgcccgggtagccaggagtctctccctctctcccctgccgcctgcctggtctcatgggcctccttcacacacccctccctgtggatcgcctgcctgggcccagagcaggggaactggagtttgtgagtgagcagagcaggttatgtgcagacagggaaacgagaactttggacctggctttctgagtccaggtgagagctgtgtggccccccgatgccactctgcccgccggagggatgtgcctgctgagccttttccttccacgccgcctctcactgccaggccagcggcttccgctgagactcgctggagaggcggctcccgtgtccgtccaccgagcactcagatggatgctgatcaccagggccgagggggctcccagaaggaccccaggccctggggagggtggctgtgggaggccaagtccactgcccggaagtcttgtcagccctaagccagggaagcctggagcgtggcctggcgggtctgggtggacaccgtccccactccggactcccagcacaggggaggakrsswgagcctgtatggccctgtagccctgggcagagctgggcctgtcgtgtgttcctgcctggcaggtgcaggtgctggccatctgcaggtggaaggaggtgggaatcttggattttttgkttttttttgtytttttttttttgagrtgaagtctcgctctgacacccaggctggcgtgcagtggtgtgatctcggctcactgcaaactccgcttcctgggttcaagtggttctcctgccccagcctcccaagtagctgggattacaggcatgmgccaccacgctcagctgatttttgtatttttagtagagatggggtttcaccatgttggccaagctggtctcaaactcctgacctcaagtgatctgcccgcctcggcctcccagagtgctgggattacaggcatgagccagtgcacccggcggaatcttggaatttttatagacrgcacctcagtttctgactccagccgcacacctcctgcctctgccagcaggggttgccgccagaccagagccagggccaggtccctgcgtccatcccccccggtaggatggacgtgagccatccttctaggggacttttttcagtgtgcgactcgtctctgttaggtggtaggagccagtttgtgtggcctgtgccacgctccacagtgcgtggctgggctctgtgtgtggcctgtgtcccctgtccctgcaggacccagcaggcatcgtggcgtgacagctgtgtccaagccactgcccgggcatcccatcacccaccagggtgcacrgtctctcctgctgggggctttctgtcgcatgtgtgtctcctgtcgactctgcagtttgttctcagagcagaatgtttcctgttctcagtgcacaaagacactggttttcaatcggcgtctaaaaccacgttcctgcctttcattgcaacacggtgtgttcatttgtttaaaacagtttaatgagtaagtttagatgactggtcaatatcttaaaaatgtatattagtaagaagttcttcctggaatttttctttcgattctggcagaataaacaggtgtttttagttttcccactgtctgagccaagcagsaccctgtcccagagcaagagatgtccccttccatctctgacccttgcctgggacaagctttgatggggggccccagcttcaaggctgtggtgggaacagcacccccaaatgccagcctctcctttcttcccatccaccagtatactgcggggccatttctggtctttgtscaacaggaaacccatttctggtgggatatgccttccagtgccacagggccactcaccccatgcatctctgtcctgcccgtcagtgctgggacggacagcaagggcaagcccagtgtctggcrgataggtgggtgggaacagagaggggagaatgccgtcctaagcttctgcttggggatcccccacacgacctgggtactgcctgggaaacctgtcctaagtaaaactatggacctcgcctcgcccaccggcctgcraagccagcatctccgtgaaggtggatggaagcgcctttgtcctcaytttgagctgcaagctgggtcagcggctctgaagccctcgagtgactttctaacccaagacccagcccctggcaggaggaggggtgggtgcagggctggtgggacaaaaagaggcctcagcaggcctggaagacccttccagtacatcccacagcgtgtcgagcagctgggagaacctgtgtcaagctcgagccgtcataggtccccatgaggtgtctgaagccccttcttggtgatgggaggcagaggtgctgacgttctggagcatggacgtgagtcctcagctggctccgcgtgggcccttggagggtgccaggtgtgtggtgaccttctggatgcctttaacttcatggctgcgtcattcctgatttagaactttaaccggagcttcatctagtgattgcaaaactggaccaatgggaggacggcggcgcagcccgctccctccgtggaatggagctcagctcttcggaggcatcaaagcacctgtcgcctccgtggtccccctgcygagggagtgcggcctctgcaaggttcgggggtggcttcgtttgcctggagtggccggccctgyttgtgccatgtggatgtttgtgagcctcggtcctacagcactgtgtaggctgcatctgtttcgtgctggtcctgttgacttgtatgatatccacaaataaatattttcatggcg

SEQ ID NO: 6956 - DNA, 2924 bp, Homo sapiens
gggacggcgacgcggcgcaggcggcgggagtgcgagctgggcccgtgtttcggccgccgccatggccgcggtggacctggagaagctgcgggcgtcgggcgcgggcaaggccatcggcgtcctgaccagcggcggcgacgcgcaaggcatgaacgctgctgtccgggctgtgacgcgcatgggcatttatgtgggtgccaaagtcttcctcatctacgagggctatgagggcctcgtggagggaggtgagaacatcaagcaggccaactggctgagcgtctccaacatcatccagctgggcggcactatcattggcagcgctcgctgcaaggcctttaccaccagggaggggcgccgggcagcggcctacaacctggtccagcacggcatcaccaacctgtgcgtcatcggcggggatggcagcctyacaggtgccaacatcttccgcagcgagtggggcagcctgctggaggagctggtggcggaaggtaagatctcagagactacagcccggacctactcgcacctgaacatcgcgggcctagtgggctccatcgataacgacttctgcggcaccgacatgaccatcggcacggactcggccctccaccgcatcatggaggtcatcgatgccatcaccaccactgcccagagccaccagaggaccttcgtgctggaagtgatgggccggcactgcgggtacctggcgctggtatctgcactggcctcaggggccgactggctgttcatccccgaggctccacccgaggwcggctgggagaacttcatgtgtgagakgctgggtgagactcggagccgtgggtcccgactgaacatcatcatcatcgctgagggtgccattgaccgcaacgggaagcccatctcgtccagctacgtgaaggacctggtggttcagaggctgggcttcgacacccgtgtaactgtgctgggccacgtgcagcggggagggacgccctctgccttcgaccggatcctgagcagcaagatgggcatggaggcggtgatggcgctgctggaagccacgcctgacacgccggcctgcgtggtcaccctctcggggaaccagtcagtgcggctgcccctcatggagtgcgtgcagatgaccaaggaagtgcagaaagccatggatgacaagaggtttgacgaggccacccagctccgtggtgggagcttcgagaacaactggaacatttacaagctcctcgcccaccagaagccccccaaggagaagtctaacttctccctggccatcctgaatgtgggggccccggcggctggcatgaatgcggccgtgcgctcggcggtgcggaccggcatctcccatggacacacagtatacgtggtgcacgatggcttcgaaggcctagccaagggtcaggtgcaagaagtaggctggcacgacgtggccggctggttggggcgtggtggctccatgctggggaccaagaggacyctgcccaagggccagctggagtccattgtggagaacatccgcatctatggtattcacgccctgctggtggtcggtgggtttgaggcctatgaaggggtgctgcagctggtggaggctcgcgggcgctacgaggagctctgcatcgtcatgtgtgtcatcccagccaccatcagcaacaaygtccctggcaccgacttcagcctgggctccgacactgctgtaaatgcygccatggagagctgtgaccgcatcaaacagtctgcctcggggaccaagcgccgtgtgttcatcgtggagaccatggggggttactgtggctacctggccaccgtgactggcattgctgtgggggccgacgccgcctacgtcttcgaggaccctttcaacatccacgacttaaaggtcaacgtggagcacatgacggagaagatgaagacagacattcagaggggcctggtgctgcggaacgagaagtgccatgactactacaccacggagttcctgtacaacctgtactcatcagagggcaagggcgtcttcgactgcaggaccaatgtcctgggccacctgcagcagggtggcgctccaaccccctttgaccggaactatgggaccaagctgggggtgaaggccatgctgtggttgtcggagaagctgcgcgaggtttaccgcaagggacgggtgttcgccaatgccccagactcggcctgcgtgatcggcctgaagaagaaggcggtggccttcagccccgtcactgagctcaagaaagacactgatttcgagcaccgcatgccacgggagcagtggtggctgagcctgcggctcatgctgaagatgctggcacaataccgcatcagtatggccgcctacgtgtcaggggagctggagcacgtgacccgccgcaccctgagcatggacaagggcttctgaggccagccatgcccacgcccctccccagcccccacccatgccagcgcagcgccagggctcagatggggcctgggctgttgtgtctggagcctgcaggcaggtgggggctgcgtccctgctcagcccatcccctgcctctatccctggccacctgccaggcctccctcsggctggtgtcttgagaccagcctgccaggccctccagcaggaggacagagtgccctggggcatccaccttcctgcccaggggacgtggcgctgtcggtgtttggaggctgctgccccctggctttggcgccccatgggccctcagcgtctccccatgctgggctcactacatgggccagcccttgctctacctggccggtaggctgctggcgcctaggttgtgttgagagggggatgcccctggccctgcctcactgtgacctgctcctgcccacgtgcagcacctgtcmccttttctagaaataaaatcaccctgactgtggggtgcatcggtctccggagagcacagcct

SEQ ID NO: 6957 - DNA, 3372 bp, Homo sapiens
tgcgagctgggcccgtgtttcggccgccgccatggccgcggtggacctggagaagctgcgggcgtcgggcgcgggcaaggccatcggcgtcctgaccagcggcggcgacgcgcaaggtcccctgacaagcccaccaggccccctgctgagatggctgtgaccctgggctgacccgcccagtggcacattgactccgcctggagctggggagaccagagaggccctgtggttggacggtggcctgggtgcgctgctcctgccctctccttgccctgcctcagctgctgcctgccagaggcgtggcacctcacctcacacctgctccctgctgctgagccccacgccaagctggagagcggatgagaagcatgtgtaaccagggtagaggtcgagagtcctctcgtgggggtctccatgttcaagggagctgccgaggcttgagcaggagcccccagcaggaaactggctttgccaaggcccccgctgggacrgactgtttctttcactgcagtcctgggagccgagggcaaggggacaggaaagaggaagtgacctcagagcctggtggcaccagcatcatgtccaggctggggggcatgaacgctgctgtccgggctgtgacgcgcatgggcatttatgtgggtgccaaagtcttcctcatctacgagggctatgagggcctcgtggagggaggtgagaacatcaagcaggccaactggctgagcgtctccaacatcatccagctgggcggcactatcattggcagcgctcgctgcaaggcctttaccaccagggaggggcgccgggcagcggcctacaacctggtccagcacggcatcaccaacctgtgcgtcatcggcggggatggcagcctyacaggtgccaacatcttccgcagcgagtggggcagcctgctggaggagctggtggcggaaggtaagatctcagagactacagcccggacctactcgcacctgaacatcgcgggcctagtgggctccatcgataacgacttctgcggcaccgacatgaccatcggcacggactcggccctccaccgcatcatggaggtcatcgatgccatcaccaccactgcccagagccaccagaggaccttcgtgctggaagtgatgggccggcactgcgggtacctggcgctggtatctgcactggcctcaggggccgactggctgttcatccccgaggctccacccgaggwcggctgggagaacttcatgtgtgagakgctgggtgagactcggagccgtgggtcccgactgaacatcatcatcatcgctgagggtgccattgaccgcaacgggaagcccatctcgtccagctacgtgaaggacctggtggttcagaggctgggcttcgacacccgtgtaactgtgctgggccacgtgcagcggggagggacgccctctgccttcgaccggatcctgagcagcaagatgggcatggaggcggtgatggcgctgctggaagccacgcctgacacgccggcctgcgtggtcaccctctcggggaaccagtcagtgcggctgcccctcatggagtgcgtgcagatgaccaaggaagtgcagaaagccatggatgacaagaggtttgacgaggccacccagctccgtggtgggagcttcgagaacaactggaacatttacaagctcctcgcccaccagaagccccccaaggagaagtctaacttctccctggccatcctgaatgtgggggccccggcggctggcatgaatgcggccgtgcgctcggcggtgcggaccggcatctcccatggacacacagtatacgtggtgcacgatggcttcgaaggcctagccaagggtcaggtgcaagaagtaggctggcacgacgtggccggctggttggggcgtggtggctccatgctggggaccaagaggacyctgcccaagggccagctggagtccattgtggagaacatccgcatctatggtattcacgccctgctggtggtcggtgggtttgaggcctatgaaggggtgctgcagctggtggaggctcgcgggcgctacgaggagctctgcatcgtcatgtgtgtcatcccagccaccatcagcaacaaygtccctggcaccgacttcagcctgggctccgacactgctgtaaatgcygccatggagagctgtgaccgcatcaaacagtctgcctcggggaccaagcgccgtgtgttcatcgtggagaccatggggggttactgtggctacctggccaccgtgactggcattgctgtgggggccgacgccgcctacgtcttcgaggaccctttcaacatccacgacttaaaggtcaacgtggagcacatgacggagaagatgaagacagacattcagaggggcctggtgctgcggaacgagaagtgccatgactactacaccacggagttcctgtacaacctgtactcatcagagggcaagggcgtcttcgactgcaggaccaatgtcctgggccacctgcagcagggtggcgctccaaccccctttgaccggaactatgggaccaagctgggggtgaaggccatgctgtggttgtcggagaagctgcgcgaggtttaccgcaagggacgggtgttcgccaatgccccagactcggcctgcgtgatcggcctgaagaagaaggcggtggccttcagccccgtcactgagctcaagaaagacactgatttcgagcaccgcatgccacgggagcagtggtggctgagcctgcggctcatgctgaagatgctggcacaataccgcatcagtatggccgcctacgtgtcaggggagctggagcacgtgacccgccgcaccctgagcatggacaagggcttctgaggccagccatgcccacgcccctccccagcccccacccatgccagcgcagcgccagggctcagatggggcctgggctgttgtgtctggagcctgcaggcaggtgggggctgcgtccctgctcagcccatcccctgcctctatccctggccacctgccaggcctccctcsggctggtgtcttgagaccagcctgccaggccctccagcaggaggacagagtgccctggggcatccaccttcctgcccaggggacgtggcgctgtcggtgtttggaggctgctgccccctggctttggcgccccatgggccctcagcgtctccccatgctgggctcactacatgggccagcccttgctctacctggccggtaggctgctggcgcctaggttgtgttgagagggggatgcccctggccctgcctcactgtgacctgctcctgcccacgtgcagcacctgtcmccttttctagaaataaaatcaccctgactgtggggtgcatcggtctccggagagcacagcct

SEQ ID NO: 6958 - DNA, 2965 bp, Homo sapiens
cctgcccggcggtcctccgccccctgctctgaagcccctaacctccctccaacaaagtcccccttcccaacccaccccgcacctcccacactgcccctctgcccaccccaccttcctgctcccttccctgcttccacgttccacccccaccctgaacctacccctcccagctccccaaccccccacctgccctgacattccccacccaacaccccttaccccatcctccagggccttccctgtttccttctctcccccacagctgccccccaaacctggggctccagactgagctcccaagcccggctcctgaacgcccctccctctatcccgccagaggaccacctcccctgaacacccccatctcctcctcaccatctacccccacccccactcccatcccaaccgaccctgagatccctgaggcccatccccaccccattctcacccctatcctgccctaaaggccacctcccctgaaacccccatcctcggcctcacacccccattcctactttcaccccgtctctacccttgccctgagccccgacccccgccactgagccctgccccggagtgcccaccctcaccctatcatcacccccatcccgccaaaggaccacctcccctgaaggcccccatctccaactcagcatccacccccacccccactccctaatcccccaacagatctccctaagccccgccctccacccacccaccctgccctgagggccacctccactaatcctcacccatctccacccagggggccaactccacctaaccccccgccctgccctacctccaccctccaccctccaccctccacccctccacccctccaccctccaccctcatccctttcttcacccttgccctgaagcccacccctatgaccttcctaaaccccacctctgagcgccctgcccctaccccacagccacccctatcccccaccccaccccaagggcccccctctactgaaacccccctcatctgccccatccccagtcctcccatctccacccctcccctgaaccccactccccactgaggtccccaaaccccacccctcactccaccctgagggccccatcctctgaaccccaatcccccagccccactgagctcttaaccctccccacctgagggttccctttccctgcccgtcccccagcttcctagctccccaccccaagtgaccccccgcagctcctcgcccctcccactgcaaaccggcactgaagggctgccccgcccccgcccctccccgcccccgcgggacacgcccagattctttgcccccatagcctggtgacctctggccacccgctgtcccaggtgggcctggatccttccagctcattctttgcctgcgccgtccctcgttccatggcccagtcctccccggggaccctgagcctggaagccccggaccactggaaccttgaacccaccagctggctgtacccggagccgtggcagcagccctcatccccatggcggccatcccagccctggacccagaggccgagcccagcatggacgtgattttggtgggatccagtgagctctcaagctccgtttcacccgggacaggcagagatcttattgcatatgaagtcaaggctaaccagcgaaatatagaagacatctgcatctgctgcggaagtctccaggttcacacacagcaccctctgtttgagggagggatctgcgccccatgtaaggacaagttcctggatgccctcttcctgtacgacgatgacgggtaccaatcctactgctccatctgctgctccggagagacgctgctcatctgcggaaaccctgattgcacccgatgctactgcttcgagtgtgtggatagcctggtcggccccgggacctcggggaaggtgcacgccatgagcaactgggtgtgctacctgtgcctgccgtcctcccgaagcgggctgctgcagcgtcggaggaagtggcgcagccagctcaaggccttctaygaccgagagtcggagaatccccttgagatgttcgaaaccgtgcctgtgtggaggagacagccagtccgggtgctgtccctttttgaagacatcaagaaagagctgacgagtttgggctttttggaaagtggttcygacccgggacaactgaagcatgtggttgatgtcacagacacagtgaggaaggatgtggaggagtggggacccttcgatcttgtgtacggcgccacacctcccctgggccacacctgtgaccgtcctcccagctggtacctgttccagttccaccggctcctgcagtacgcacggcccaagccaggcagccccaggcccttcttctggatgttcgtggacaatctggtgctgaacaaggaagacctggacgtcgcatctcgcttcctggagatggagccagtcaccatcccagatgtccacggcggatccttgcagaatgctgtccgcgtgtggagcaacatcccagccataagragcagcaggcactgggctctggtttcggaagaagaattgtccctgctggcccagaacaagcagagctcgaagctcgcggccaagtggcccaccaagctggtgaagaactgctttctccccctaagagaatatttcaagtatttttcaacagaactcacttcctctttataaatgagtcactatactgtraagaaaaagacttttcctagaacaaaggcaactttcctcacgttgtctctttcctcttcggattcttgtttttttgcgtctccgtcgtcactgcagacccacgttccgttgggttctggagactcagggtctctcccccatcacgctggctcatgggacggggcgaggcccacgccgctgcacacaggaccacacgtggtggtgcgcgatgtacttcctgaaagcatttctgtgttctagttgagaagttcgagtatatttattataagatagttattggt

SEQ ID NO: 6959 - DNA, 1947 bp, Homo sapiens
cccatctccacccctcccctgaaccccactccccactgaggtccccaaaccccacccctcactccaccctgagggccccatcctctgaaccccaatcccccagccccactgagctcttaaccctccccacctgagggttccctttccctgcccgtcccccagcttcctagctccccaccccaagtgaccccccgcagctcctcgcccctcccactgcaaaccggcactgaagggctgccccgcccccgcccctccccgcccccgcgggacacgcccagattctttgcccccatagcctggtgacctctggccacccgctgtcccaggtgggcctggatccttccagctcattctttgcctgcgccgtccctcgttccatggcccagtcctccccggggaccctgagcctggaagccccggaccactggaaccttgaacccaccagctggctgtacccggagccgtggcagcagccctcatccccatggcggccatcccagccctggacccagaggccgagcccagcatggacgtgattttggtgggatccagtgagctctcaagctccgtttcacccgggacaggcagagatcttattgcatatgaagtcaaggctaaccagcgaaatatagaagacatctgcatctgctgcggaagtctccaggttcacacacagcaccctctgtttgagggagggatctgcgccccatgtaaggacaagttcctggatgccctcttcctgtacgacgatgacgggtaccaatcctactgctccatctgctgctccggagagacgctgctcatctgcggaaaccctgattgcacccgatgctactgcttcgagtgtgtggatagcctggtcggccccgggacctcggggaaggtgcacgccatgagcaactgggtgtgctacctgtgcctgccgtcctcccgaagcgggctgctgcagcgtcggaggaagtggcgcagccagctcaaggccttctaygaccgagagtcggagaatccccttgagatgttcgaaaccgtgcctgtgtggaggagacagccagtccgggtgctgtccctttttgaagacatcaagaaagagctgacgagtttgggctttttggaaagtggttcygacccgggacaactgaagcatgtggttgatgtcacagacacagtgaggaaggatgtggaggagtggggacccttcgatcttgtgtacggcgccacacctcccctgggccacacctgtgaccgtcctcccagctggtacctgttccagttccaccggctcctgcagtacgcacggcccaagccaggcagccccaggcccttcttctggatgttcgtggacaatctggtgctgaacaaggaagacctggacgtcgcatctcgcttcctggagatggagccagtcaccatcccagatgtccacggcggatccttgcagaatgctgtccgcgtgtggagcaacatcccagccataagragcagcaggcactgggctctggtttcggaagaagaattgtccctgctggcccagaacaagcagagctcgaagctcgcggccaagtggcccaccaagctggtgaagaactgctttctccccctaagagaatatttcaagtatttttcaacagaactcacttcctctttataaatgagtcactatactgtraagaaaaagacttttcctagaacaaaggcaactttcctcacgttgtctctttcctcttcggattcttgtttttttgcgtctccgtcgtcactgcagacccacgttccgttgggttctggagactcagggtctctcccccatcacgctggctcatgggacggggcgaggcccacgccgctgcacacaggaccacacgtggtggtgcgcgatgtacttcctgaaagcatttctgtgttctagttgagaagttcgagtatatttattataagatagttattggt

SEQ ID NO: 6960 - DNA, 897 bp, Homo sapiens
tgcagccgaaggactcacagctaatctgggtcaggagcggctgccggctcccccactcctggagatgagcgactctgtgacgtcacgggaggcgcggggcggagcgccggggaagcgaagtaggcagggrcgaggcggctggggaccgcggggcggacgggagcgagtatgtccgctctgactcggctggcgtctttcgctcgcgttggaggccgccttttcagaagcggctgcgcacggactgctggagatggtggagtccgtcatgccggtggtggtgtgcacattgagccccggtatagacagttcccccagctgaccagatcccaggtgttccagagcragttcttcagcggactcatgtggttctggattctctggcgcttttggcatgactcagaagaggtgctgggtcactttccgtatcctgatccttcccagtggacagatgaagaattaggtatccctcctgatgatgaagactgaaggtgtagactcagcctcactctgtacaaggtctcattctgtcatccagactggagtgcagcgtgatcatggctcactgtaaccccaacctcctgagctcaagtgattctcccgcctcagccttctcagtagctgggactactactcttggctaatttttgtatattttgtagagatgaggttttgccatgttgcccaggctgatctcaaattcttggactcaagtgatccacctcttggcttcccaaagtgttgggattacaggtgtgagccagtgtacctggccaacaaatttgttttaatgactggactgtaaacccttgagagaggaagggtgattttgcttctcttgtctacaaggctgtcacatgatcagtgctcaataaatacttgaataattgaataaatgaa

SEQ ID NO: 6961 - DNA, 819 bp, Homo sapiens
tgcagccgaaggactcacagctaatctgggtcaggagcggctgccggctcccccactcctggagatgagcgactctgtgacgtcacgggaggcgcggggcggagcgccggggaagcgaagtaggcagggrcgaggcggctggggaccgcggggcggacgggagcgagtatgtccgctctgactcggctggcgtctttcgctcgcgttggaggccgccttttcagaagcggctgcgcacggactgctggagatggtggagtccgtcatgccggtggtggtgtgcacattgagccccggtatagacagttcccccagctgaccagatcccaggtgttccagagcragttcttcagcggactcatgtggttctggattctctggcgcttttggcatgactcagaagaggtgctgggtcactttccgtatcctgatccttcccagtggacagatgaagaattaggtatccctcctgatgatgaagactgaaggtgtagactcagcctcactctgtacaagtgggtgtgctccaaatttctttatgtcatatttaccttttttcataaacattagtttttactttgtgcctatgatggacttgaaaaaactgcatattctaacagcatgaagttgagttaaccatgtcctgtatctgcttttttttttttttttgagacagagtcttgctctgtcgcccagactggagtgcagtggcgtgatctgggctcactgcaacctctgccttccaggttcaagtgattctccttcctcagcctcctgagtagctgggattataggcacatgctaccacacttggctaat

SEQ ID NO: 6962 - DNA, 708 bp, Homo sapiens
atggagagccatgagcgacagcccttggtcctgcatgaggagatgggggaatgccgatcttccctgagtgccggtggtggtgtgcacattgagccccggtatagacagttcccccagctgaccagatcccaggtgttccagagcragttcttcagcggactcatgtggttctggattctctggcgcttttggcatgactcagaagaggtgctgggtcactttccgtatcctgatccttcccagtggacagatgaagaattaggtatccctcctgatgatgaagactgaaggtgtagactcagcctcactctgtacaagtggagctagcaacatggaccacagatatactggtgactccgctctcctctggccaagctacaaatcatcacctgaggcagagatgctactaccctcttctggggctcaactaccgatgggcatcagtaatccatcccagtataacatttyaaggatgtgctggagacaatacatggactttctctttcaatggtgaggaatgaaacaagatacaagaaccacagcatggaatatgttttcttttacatccaatggccaggtcataaaggatgccttgagacctccaccctggcccccacagcgctttgggacaggatgactaacgcagtccagcttcatgtgcaatcaagtcccgggaagaaatttacatttcaaactctgaaaaatcag

SEQ ID NO: 6963 - DNA, 906 bp, Homo sapiens
tgcagccgaaggactcacagctaatctgggtcaggagcggctgccggctcccccactcctggagatgagcgactctgtgacgtcacgggaggcgcggggcggagcgccggggaagcgaagtaggcagggrcgaggcggctggggaccgcggggcggacgggagcgagtatgtccgctctgactcggctggcgtctttcgctcgcgttggaggccgccttttcagaagcggctgcgcacggactgctggagatggtggagtccgtcatgccggtggtggtgtgcacattgagccccggtatagacagttcccccagctgaccagatcccaggtgttccagagcragttcttcagcggactcatgtggttctggattctctggcgcttttggcatgactcagaagaggtgctgggtcactttccgtatcctgatccttcccagtggacagatgaagaattaggtatccctcctgatgatgaagactgaaggtgtagactcagcctcactctgtacaagtggagctagcaacatggaccacagatatactggtgactccgctctcctctggccaagctacaaatcatcacctgaggcagagatgctactaccctcttctggggctcaactaccgatgggcatcagtaatccatcccagtataacatttyaaggatgtgctggagacaatacatggactttctctttcaatggtgaggaatgaaacaagatacaagaaccacagcatggaatatgttttcttttacatccaatggccaggtcataaaggatgccttgagacctccaccctggcccccacagcgctttgggacaggatgactaacgcagtccagcttcatgtgcaatcaagtcccgggaagaaatttacatttcaaactctgaaaaatcag

SEQ ID NO: 6964 - DNA, 603 bp, Homo sapiens
tgcagccgaaggactcacagctaatctgggtcaggagcggctgccggctcccccactcctggagatgagcgactctgtgacgtcacgggaggcgcggggcggagcgccggggaagcgaagtaggcagggrcgaggcggctggggaccgcggggcggacgggagcgagtatgtccgctctgactcggctggcgtctttcgctcgcgttggaggccgccttttcagaagcggctgcgcacggactgctggagatggtggagtccgtcatgccggtggtggtgtgcacattgagccccggtatagacagttcccccagctgaccagatcccaggtgttccagagcragttcttcagcggactcatgtggttctggattctctggcgcttttggcatgactcagaagaggtgctgggtcactttccgtatcctgatccttcccagtggacagatgaagaattaggtatccctcctgatgatgaagactgaaggtgtagactcagcctcactctgtacaagagccaggtgagaatttcaaggattatcgacttcatattgcacattaaagttacaaattaaagtggcttggtcaagaatgagaatgga

SEQ ID NO: 6965 - DNA, 2192 bp, Homo sapiens
cctctgctgtggctcgcttcgccgcgctccctccttccccgccttccatacctccccggctccgctcggttcctggccaccccgcagcccctgcccaggtgccatggccgcattgtaccgccctggcctgcggcttaactggcatgggctgagccccttgggctggccatcatgccgtagcatccagaccctgcgagtgcttagtggagatctgggccagcttcccactggcattcgagattttgtagagcacagtgcccgcctgtgccaaccagagggcatccacatctgtgatggaactgaggctgagaatactgccacactgaccctgctggagcagcagggcctcatccgaaagctccccaagtacaataactgctggctggcccgcacagaccccaaggatgtggcacgagtagagagcaagacggtgattgtaactccttctcagcgggacacggtacmactcccgccyggtggggcccgtgggcagctgggcaactggatgtccccagctgatttccagcgagctgtggatgagaggtttccaggctgcatgcagggccgcaccatgtatgtgcttccattcagcatgggtcctgtgggctccccgctgtcccgcatcggggtgcagctcactgactcrgcctatgtggtggcaagcatgcgtattatgacccgactggggacacctgtgcttcaggccctgggagatggtgactttgtcaagtgtctgcactccgtgggccagcccctgacaggacaaggggagccagtgagccagtggccgtgcaacccagagaaaaccctgattggccacgtgcccgaccagcgggagatcatctccttcggcagcggctatggtggcaactccctgctgggcaagaagtgctttgccctacgcatcgcctctcggctggcccgggatgagggctggctggcagagcacatgctgatcctgggcatcaccagccctgcagggaagaagcgctatgtggcagccgccttccctagtgcctgtggcaagaccaacctggctatgatgcggcctgcactgccaggctggaaagtggagtgtgtgggggatgatattgcttggatgaggtttgacagtgaaggtcgactccgggccatcaaccctgagaacggcttctttggggttgcccctggtacctctgccaccaccaatcccaacgccatggctacaatccagagtaacactatttttaccaatgtggctgagaccagtgatggtggcgtgtactgggagggcattgaccagcctcttccacctggtgttactgtgacctcctggctgggcaaaccctggaarcctggtgacaaggagccctgtgcacatcccaactctcgattttgtgccccggctcgccagtgccccatcatggacccagcctgggaggccccagagggtgtccccattgacgccatcatctttggtggccgcagacccaaaggggtacccctggtatacgaggccttcaactggcgtcatggggtgtttgtgggcasmsccatgcgctctgagtccactgctgcagcagaacacaaagggaagatcatcatgcacgacccatttgccatgcggcccttttttggctacaacttcgggcactacctggaacactggctgagcatggaagggcrcaagggggcccagctgccccgtatcttccatgtcaactggttccggcgtgacgaggcagggcacttcctgtggccaggctttggggagaatgctcgggtgctagactggatctgccggcggttagagggggaggacagtgcccgagagacacccattgggctggtgccaaaggaaggagccttggatctcagcrgcctcagagctatagacaccactcagctgttctccctccccaaggacttctgggaacaggaggttcgtgacattcggagctacctgacagagcaggtcaaccaggatctgcccaaagaggtgttggctgagcttgaggccctggagagacgtgtgcacaaaatgtgacctgaggccctagtctagcaagaggacatagcaccctcatctgggaatagggaaggcaccttgcagaaaatatgagcaatttgatattaactaacatcttcaatgtgccatagaccttcccacaaagactgtccaataataagagatgcttatctattttacacaa

SEQ ID NO: 6966 - DNA, 2415 bp, Homo sapiens
gtttcgatgagccgggacgtggcgccrctctagccagcgcctgggctctgtggcgggcgccgcagctccgcgtcccccgcgcctcctcccagcgcaggtgggtccgcccgcggggggcgggggtgcccgggagccgtgggacgggcgggtagcggcaacctttggggagcagagtggtccccaacgcccaggtgccccggctcgcgctctggcccgggcgaatcgggctataggaagggccacacggatggaagtcctagtccgggtgctcacctcttgtggaacgtgcaaagcctgtcccaggacctctttacactctgggggtctctgcccaggcacgcttgctgcttccggacacagctgtgggcggagctagtaggggcggggctacgtgattgacacttctctcctcagacttcaagggctaccactggacccttcccctgtcttgaaccctgagccggcaccatggtgagaaccctgagcccagcccttcacctccgcaggcccgcgccctyacccccagtggcagtgccatggttgccccgtatgaacctmgggctccacagtgtggggtttttgcaggtcagcttctgcaaggcaacctgcactcttccaaccckttcatccttgtagcacggacgcctgaaggtgaagacgtcagaagagcaggcggaggccaaaaggctagagcgagagcagaagctgaagctataccagtcagccacccaggccgtattccagaagcgccaggctggtgagctggatgagtccgtgctggaactgacaagccagattctgggagccaaccctgattttgccaccctctggaactgccgacgagaggtgctccagcagctggagactcagaagtctcctgaagagttggctgctctggtgaaggcagaactgggcttcctggagagctgcctgcgggtgaaccccaagtcttatggtacctggcaccaccgatgctggctgctaggccgcctgcctgagcccaactggacccgagagctggagctctgtgcccgtttcctggaggtggatgagcggaactttcactgctgggactatcggcggtttgtggccacacaggcagccgtgccccctgcagaagagctagccttcactgacagcctcatcacccgaaacttctccaactactcttcctggcattaccgctcctgtctcttgccccagytgcacccccagccggattctggaccacaggggcgcctccctgaggatgtgctgctyaaagagctggagctggtgcagaatgccttcttcactgaccccaatgaccagagtgcctggttttatcaccgttggctcctaggccgagctgacccccaggatgcactgcgctgcctgcatgtgagccgggacgaggcctgtctgactgtctccttctctcggcccctcttagtgggctccaggatggagatcttgctgctcatggttgatgattctcccctgattgtggagtggaggaccccagatggcaggaaccggcccagccatgtctggctctgtgacctgcctgctgcctccctcaacgaccagttgccccaacatacatttcgcgtcatttggacagcaggcgatgtccagaaagaatgcgtgcttttaaaaggccgccaggagggctggtgccgggactccacgacagacgagcagctattcaggtgtgagctgtcagtggagaagtccacagtgctgcagtctgagctggaatcctgtaaggagctgcaggagctggagcctgagaataaatggtgcctgcttaccatcatcctgctgatrcgggcactggaccccctgctgtatgagaaggagaccctgcagtacttccagaccctcaaggccgtggaccccatgcgggcarcgtatctggatgacctgcgcagcaagttcttgctggagaatagcgtgctcaagatggagtatgccgaggtgcgtgtgctgcacctggctcacaaggatctgacagtgctctgccatctggaacagctgctcttggtcacccatcttgacttgtcacacaatcgyctccgaaccctgccacctgcactggctgccctgcgctgccttgaggtgctgcaggccagtgataatgccatagagtccctrgacggcgtcaccaacctaccccggctgcaggagctgctactgtgcaacaaccgcctccagcagcctgcagtgctccagcctcttgcctcctgccccaggctggtcctcctcaacctgcagggtaacccgctgtgccaagcggtgggcatcttggagcaactggctgaactgctgccttcagttagcagcgtcctcacctaagaggccctgccccctacccttgccctttaacttattgggactgaataaagaatggagaggccctctcaggctaccaag

SEQ ID NO: 6967 - DNA, 2217 bp, Homo sapiens
ccagcgcctgggctctgtggcgggcgccgcagctccgcgtcccccgcgcctcctcccagcgcaggtgggtccgcccgcggggggcgggggtgcccgggagccgtgggacgggcgggtagcggcaacctttggggagcagagtggtccccaacgcccaggtgccccggctcgcgctctggcccgggcgaatcgggctataggaagggccacacggatggaagtcctagtccgggtgctcacctcttgtggaacgtgcaaagcctgtcccaggacctctttacactctgggggtctctgcccaggcacgcttgctgcttccggacacagctgtgggcggagctagtaggggcggggctacgtgattgacacttctctcctcagacttcaagggctaccactggacccttcccctgtcttgaaccctgagccggcaccatgcacggacgcctgaaggtgaagacgtcagaagagcaggcggaggccaaaaggctagagcgagagcagaagctgaagctataccagtcagccacccaggccgtattccagaagcgccaggctggtgagctggatgagtccgtgctggaactgacaagccagattctgggagccaaccctgattttgccaccctctggaactgccgacgagaggtgctccagcagctggagactcagaagtctcctgaagagttggctgctctggtgaaggcagaactgggcttcctggagagctgcctgcgggtgaaccccaagtcttatggtacctggcaccaccgatgctggctgctaggccgcctgcctgagcccaactggacccgagagctggagctctgtgcccgtttcctggaggtggatgagcggaactttcactgctgggactatcggcggtttgtggccacacaggcagccgtgccccctgcagaagagctagccttcactgacagcctcatcacccgaaacttctccaactactcttcctggcattaccgctcctgtctcttgccccagytgcacccccagccggattctggaccacaggggcgcctccctgaggatgtgctgctyaaagagctggagctggtgcagaatgccttcttcactgaccccaatgaccagagtgcctggttttatcaccgttggctcctaggccgagctgacccccaggatgcactgcgctgcctgcatgtgagccgggacgaggcctgtctgactgtctccttctctcggcccctcttagtgggctccaggatggagatcttgctgctcatggttgatgattctcccctgattgtggagtggaggaccccagatggcaggaaccggcccagccatgtctggctctgtgacctgcctgctgcctccctcaacgaccagttgccccaacatacatttcgcgtcatttggacagcaggcgatgtccagaaagaatgcgtgcttttaaaaggccgccaggagggctggtgccgggactccacgacagacgagcagctattcaggtgtgagctgtcagtggagaagtccacagtgctgcagtctgagctggaatcctgtaaggagctgcaggagctggagcctgagaataaatggtgcctgcttaccatcatcctgctgatrcgggcactggaccccctgctgtatgagaaggagaccctgcagtacttccagaccctcaaggccgtggaccccatgcgggcarcgtatctggatgacctgcgcagcaagttcttgctggagaatagcgtgctcaagatggagtatgccgaggtgcgtgtgctgcacctggctcacaaggatctgacagtgctctgccatctggaacagctgctcttggtcacccatcttgacttgtcacacaatcgyctccgaaccctgccacctgcactggctgccctgcgctgccttgaggtgctgcaggccagtgataatgccatagagtccctrgacggcgtcaccaacctaccccggctgcaggagctgctactgtgcaacaaccgcctccagcagcctgcagtgctccagcctcttgcctcctgccccaggctggtcctcctcaacctgcagggtaacccgctgtgccaagcggtgggcatcttggagcaactggctgaactgctgccttcagttagcagcgtcctcacctaagaggccctgccccctacccttgccctttaacttattgggactgaataaagaatggagaggccctctcaggctaccaag

SEQ ID NO: 6968 - DNA, 2313 bp, Homo sapiens
agagtgcgctgcgtttcgatgagccgggacgtggcgccrctctagccagcgcctgggctctgtggcgggcgccgcagctccgcgtcccccgcgcctcctcccagcgcagacttcaagggctaccactggacccttcccctgtcttgaaccctgagccggcaccatgcacggacgcctgaaggtgaagacgtcagaagagcaggcggaggccaaaaggctagagcgagagcagaagctgaagctataccagtcagccacccaggccgtattccagaagcgccaggctggtgagctggatgagtccgtgctggaactgacaagccagattctgggagccaaccctgattttgccaccctctggaactgccgacgagaggtgctccagcagctggagactcagaagtctcctgaagagttggctgctctggtgaaggcagaactgggcttcctggagagctgcctgcgggtgaaccccaagtcttatggtacctggcaccaccgatgctggctgctaggccgcctgcctgagcccaactggacccgagagctggagctctgtgcccgtttcctggaggtggatgagcggaactttcactgctgggactatcggcggtttgtggccacacaggcagccgtgccccctgcagaagagctagccttcactgacagcctcatcacccgaaacttctccaactactcttcctggcattaccgctcctgtctcttgccccagytgcacccccagccggattctggaccacaggggcgcctccctgaggatgtgctgctyaaagagctggagctggtgcagaatgccttcttcactgaccccaatgaccagagtgcctggttttatcaccgttggctcctaggccgagctgacccccaggatgcactgcgctgcctgcatgtgagccgggacgaggcctgtctgactgtctccttctctcggcccctcttagtgggctccaggatggagatcttgctgctcatggttgatgattctcccctgattgtggagtggaggaccccagatggcaggaaccggcccagccatgtctgggtatcccaggattggtggggcagaagttggggtctggggcagggctgggtgggacagtcaaaaaagtggttaggctggggcatttccttgacccagtactcccagctctgtgacctgcctgctgcctccctcaacgaccagttgccccaacatacatttcgcgtcatttggacagcaggcgatgtccagaaagaatgcgtgcttttaaaaggtgatggaacctgcagcctccaccccttgcagcagcccccatcactcttttcctctcaagggtgcaccctccaaccacctactctttccccaggccgccaggagggctggtgccgggactccacgacagacgagcagctattcaggtggtgatagggaagcacaaaacaaggagaggggctctggactctgggcatcaggcagccagggcaggaggctggggcctcaaggagctgtttcagtctagatactgggaatgttgaccagtgcttcagggctgtgggcctcaactcctccccaccctgyccaccctcaggtgtgagctgtcagtggagaagtccacagtgctgcagtctgagctggaatcctgtaaggagctgcaggagctggagcctgagaataaatggtgcctgcttaccatcatcctgctgatrcgggcactggaccccctgctgtatgagaaggagaccctgcagtacttccagaccctcaaggccgtggaccccatgcgggcarcgtatctggatgacctgcgcagcaagttcttgctggagaatagcgtgctcaagatggagtatgccgaggtgcgtgtgctgcacctggctcacaaggatctgacagtgctctgccatctggaacagctgctcttggtcacccatcttgacttgtcacacaatcgyctccgaaccctgccacctgcactggctgccctgcgctgccttgaggtgctgcaggccagtgataatgccatagagtccctrgacggcgtcaccaacctaccccggctgcaggagctgctactgtgcaacaaccgcctccagcagcctgcagtgctccagcctcttgcctcctgccccaggctggtcctcctcaacctgcagggtaacccgctgtgccaagcggtgggcatcttggagcaactggctgaactgctgccttcagttagcagcgtcctcacctaagaggccctgccccctacccttgccctttaacttattgggactgaataaagaatggagaggccctctcaggctaccaag

SEQ ID NO: 6969 - DNA, 1945 bp, Homo sapiens
agagtgcgctgcgtttcgatgagccgggacgtggcgccrctctagccagcgcctgggctctgtggcgggcgccgcagctccgcgtcccccgcgcctcctcccagcgcagacttcaagggctaccactggacccttcccctgtcttgaaccctgagccggcaccatgcacggacgcctgaaggtgaagacgtcagaagagcaggcggaggccaaaaggctagagcgagagcagaagctgaagctataccagtcagccacccaggccgtattccagaagcgccaggctggtgagctggatgagtccgtgctggaactgacaagccagattctgggagccaaccctgattttgccaccctctggaactgccgacgagaggtgctccagcagctggagactcagaagtctcctgaagagttggctgctctggtgaaggcagaactgggcttcctggagagctgcctgcgggtgaaccccaagtcttatggtacctggcaccaccgatgctggctgctaggccgcctgcctgagcccaactggacccgagagctggagctctgtgcccgtttcctggaggtggatgagcggaactttcactgctgggactatcggcggtttgtggccacacaggcagccgtgccccctgcagaagagctagccttcactgacagcctcatcacccgaaacttctccaactactcttcctggcattaccgctcctgtctcttgccccagytgcacccccagccggattctggaccacaggggcgcctccctgaggatgtgctgctyaaagagctggagctggtgcagaatgccttcttcactgaccccaatgaccagagtgcctggttttatcaccgttggctcctaggccgagctgacccccaggatgcactgcgctgcctgcatgtgagccgggacgaggcctgtctgactgtctccttctctcggcccctcttagtgggctccaggatggagatcttgctgctcatggttgatgattctcccctgattgtggagtggaggaccccagatggcaggaaccggcccagccatgtctggctctgtgacctgcctgctgcctccctcaacgaccagttgccccaacatacatttcgcgtcatttggacagcaggcgatgtccagaaagaatgcgtgcttttaaaaggccgccaggagggctggtgccgggactccacgacagacgagcagctattcaggtgtgagctgtcagtggagaagtccacagtgctgcagtctgagctggaatcctgtaaggagctgcaggagctggagcctgagaataaatggtgcctgcttaccatcatcctgctgatrcgggcactggaccccctgctgtatgagaaggagaccctgcagtacttccagaccctcaaggccgtggaccccatgcgggcarcgtatctggatgacctgcgcagcaagttcttgctggagaatagcgtgctcaagatggagtatgccgaggtgcgtgtgctgcacctggctcacaaggatctgacagtgctctgccatctggaacagctgctcttggtcacccatcttgacttgtcacacaatcgyctccgaaccctgccacctgcactggctgccctgcgctgccttgaggtgctgcaggccagtgataatgccatagagtccctrgacggcgtcaccaacctaccccggctgcaggagctgctactgtgcaacaaccgcctccagcagcctgcagtgctccagcctcttgcctcctgccccaggctggtcctcctcaacctgcagggtaacccgctgtgccaagcggtgggcatcttggagcaactggctgaactgctgccttcagttagcagcgtcctcacctaagaggccctgccccctacccttgccctttaacttattgggactgaataaagaatggagaggccctctcaggctaccaag

SEQ ID NO: 6970 - DNA, 1364 bp, Homo sapiens
taactttggcctgggactctgcccctctacctcagcacagaatcgccccgggtcctactacagaatcaatccttgaacactgcctccacgtcgccggctcaatctgggcgagaacccagacttccaccgcagccccgcaatctgcctcctttgcctgtgagtcatggcagctcccatgaatggccaagtgtgtgtggtgactggtgcctccaggggtattggccgtggcattgccttgcagctctgcaaagcaggcgccacagtttacatcactggccgccatctggacacccttcgcgttgttgctcargaggcacaatccctcgggggccaatgtgtgcctgtggtgtgcgattcaagccaggagagtgaagtgcgaagcctgtttgagcaagtggatsgggaayagcaagggcgtctagatgtgctggtcaacaatgcttatgcaggggtccagacgatcctgaacaccaggaataaggcattctgggaaacccctgcctccatgtgggatgatatcaacaacgtyggactcagaggccactacttttgctcagtgtatggggcacggctgatggtaccagctggccaggggctcatcgtggtcatctcctccccaggaagcctgcagtatatgttcaatgtcccctatggtgtgggcaaagctgcgtgtgacaagctggctgctgactgtgcccacgagctgcggcgccatggggtcagctgtgtgtctctgtggccggggattgtgcagacagaactgctgaaggagcatatggcaaaggaggaggtcctgcaggatcctgtgttgaagcagttcaaatcagccttctcatctgcrgaaaccacagaattgagtggcaaatgtgtggtggctttggcaayagatcccaatatcctgagcctgagtggtaaggtgctgccatcctgtgaccttgckcgacgctatggmcttcgggatgtggacggccgccccgtccaagactatttgtctttgagctctgttctctcacacgtgtccggcctgggctggctggcctcctacctgccctccttcctccgtgtgcccaagtggattattgccctctacactagcaagttctaaccctcctggtctgacactacgtctctgcttgtcttctcatttggacttggtggttygtcctgtctcagtgaaacagcagcctttcttgtttacccatacccttgatatgaagagaagccctctgctgtgtgtccgtggtgagttctggggtgcgcctaggtcccttctttgtgccttggttttccttgtccttctttttactttttgccttagtattgaaaaatgctcttggagctaataaaagtctcatttctctttc

SEQ ID NO: 6971 - DNA, 1470 bp, Homo sapiens
agatagcccaggactctgcgtggacgcgccccgaggggctgccgcgccagattcccatatccaggcagccacactcagagggttgtagtagttgtccacctctggacagtcccactcagccccttcttcactmtctgggcctcccaaaagacagtcagccttgtcctcaggcccgcacccagttgtcagcctctgactcctctcccctcaaaggattcttaccttggctcctcctcttagccctaacctgcctcctttgcctgtgagtcatggcagctcccatgaatggccaagtgtgtgtggtgactggtgcctccaggggtattggccgtggcattgccttgcagctctgcaaagcaggcgccacagtttacatcactggccgccatctggacacccttcgcgttgttgctcargaggcacaatccctcgggggccaatgtgtgcctgtggtgtgcgattcaagccaggagagtgaagtgcgaagcctgtttgagcaagtggatsgggaayagcaagggcgtctagatgtgctggtcaacaatgcttatgcaggggtccagacgatcctgaacaccaggaataaggcattctgggaaacccctgcctccatgtgggatgatatcaacaacgtyggactcagaggccactacttttgctcagtgtatggggcacggctgatggtaccagctggccaggggctcatcgtggtcatctcctccccaggaagcctgcagtatatgttcaatgtcccctatggtgtgggcaaagctgcgtgtgacaagctggctgctgactgtgcccacgagctgcggcgccatggggtcagctgtgtgtctctgtggccggggattgtgcagacagaactgctgaaggagcatatggcaaaggaggaggtcctgcaggatcctgtgttgaagcagttcaaatcagccttctcatctgcrgaaaccacagaattgagtggcaaatgtgtggtggctttggcaayagatcccaatatcctgagcctgagtggtaaggtgctgccatcctgtgaccttgckcgacgctatggmcttcgggatgtggacggccgccccgtccaagactatttgtctttgagctctgttctctcacacgtgtccggcctgggctggctggcctcctacctgccctccttcctccgtgtgcccaagtggattattgccctctacactagcaagttctaaccctcctggtctgacactacgtctctgcttgtcttctcatttggacttggtggttygtcctgtctcagtgaaacagcagcctttcttgtttacccatacccttgatatgaagagaagccctctgctgtgtgtccgtggtgagttctggggtgcgcctaggtcccttctttgtgccttggttttccttgtccttctttttactttttgccttagtattgaaaaatgctcttggagctaataaaagtctcatttctctttc

SEQ ID NO: 6972 - DNA, 2025 bp, Homo sapiens
cttccgggtcactgtctggctccacccccccccccccccccactgggttccggaaaggctcagggttgctcccgcgtttcggttcagtgacgtcgtaaattggaatgaggcatccagtttagcaacagcasagatgacractctgcgattctgagagtccctggcgagcccgggctagcgaaaagtgggggcagaacgaactacatctcccatcgtgccaggaggcggtcccgcccgtttccccctgggagttgtagtctaaccccctcggatccaacagcaacctcagtgcgtgaactctgttatccagaaggcctcgccctgccgccgccgaagctggaattcgtcggctagtagttctcgccggcaactagaggaacctgttggcgtggcccagaaggcttagcgggattgcacgaggttagttgctaagcaaggtggtctttggtcaactgcckcctggaccaaggcaacaggaaccctcagattcatcgctaccccgaggctaagcgccatgcctcatattgacaacgatgtgaaactggacttcaaggatgtccttttgaggcccaaacgcagtacccttaagtctcgaagtgaggtggatctcacaagatccttttcatttcggaactcaaagcagacatactctggggttcccatcattgctgccaatatggatactgtgggcacctttgagatggcyaaggttctctgtaagttctctctcttcactgctgtccataagcactatagcctcgttcagtggcaagagtttgctggccagaatcctgactgtcttgagcatctggctgccagctcaggcacaggctcttctgactttgagcagctggaacagatcctggaagctattccccaggtgaagtatatatgcctggatgtggcaaatggctactctgaacactttgttgaatttgtaaaagatgtacggaagcgcttcccccagcacaccatcatggcagggaatgtggtaacaggagagatggtagaagagctcatcctttctggggctgacatcatcaaagtgggaattgggccaggctctgtgtgtactactcggaagaaaactggagtggggtatccacagctcagcgcagtgatggagtgtgcagatgctgctcatggcctcaaaggccacatcatttcagatggaggttgcagctgtcctggggatgtggccaaggcttttggggcaggagctgacttcgtgatgctggrtggcatgctggctgggcacagtgagtcaggtggtgagctcatcgagagggatggcaagaagtacaagctcttctatggaatgagttctgaaatggccatgaagaagtatgctgggggcgtggctgagtacagagcctcagagggaaagacagtggaagttccttttaaaggagatgtggaacataccatccgagacatcctaggagggatccgctctacgtgtacctatgtgggagcagctaagctcaaagagttgagcaggagaactaccttcatccgagtcacccagcaggtgaatccaatcttcagtgaggcgtgctagacctgagcagttctaccctcccaaggcaccagtactctaccatggggcatcccaagtggggtcctcacccatcccagctactgcagctctgtattactttgtcatttcctgttgtctcactcctgagggctcctgcagtaactctgtacttctctatctgcacacacaaaatgcccaaggcactcactggggaggaagcaaggaagcaaacagtctgagaaaatgatgcaagaaaatcaaatgggaatctggggacccaacacaacatcctgaagattattaaaaggaaaagatgctgattggtacataaatcttttacatggccttggtctagaggaggcaggcttttagaatcatgttttgttaatccgcttcactaaattggaccttcacatatctaaaaagctctgaagtgtttgtatatttgaaatacctcaataaagagagagctcattgactgtaaa

SEQ ID NO: 6973 - DNA, 1638 bp, Homo sapiens
cccgccccccgtcgccaacattccttcgttcccctaaatcagcctcttgccccattgctctttgcaggggtagaagaaggaagtgtagcgggccctcagattcatcgctaccccgaggctaagcgccatgcctcatattgacaacgatgtgaaactggacttcaaggatgtccttttgaggcccaaacgcagtacccttaagtctcgaagtgaggtggatctcacaagatccttttcatttcggaactcaaagcagacatactctggggttcccatcattgctgccaatatggatactgtgggcacctttgagatggcyaaggttctctgtaagttctctctcttcactgctgtccataagcactatagcctcgttcagtggcaagagtttgctggccagaatcctgactgtcttgagcatctggctgccagctcaggcacaggctcttctgactttgagcagctggaacagatcctggaagctattccccaggtgaagtatatatgcctggatgtggcaaatggctactctgaacactttgttgaatttgtaaaagatgtacggaagcgcttcccccagcacaccatcatggcagggaatgtggtaacaggagagatggtagaagagctcatcctttctggggctgacatcatcaaagtgggaattgggccaggctctgtgtgtactactcggaagaaaactggagtggggtatccacagctcagcgcagtgatggagtgtgcagatgctgctcatggcctcaaaggccacatcatttcagatggaggttgcagctgtcctggggatgtggccaaggcttttggggcaggagctgacttcgtgatgctggrtggcatgctggctgggcacagtgagtcaggtggtgagctcatcgagagggatggcaagaagtacaagctcttctatggaatgagttctgaaatggccatgaagaagtatgctgggggcgtggctgagtacagagcctcagagggaaagacagtggaagttccttttaaaggagatgtggaacataccatccgagacatcctaggagggatccgctctacgtgtacctatgtgggagcagctaagctcaaagagttgagcaggagaactaccttcatccgagtcacccagcaggtgaatccaatcttcagtgaggcgtgctagacctgagcagttctaccctcccaaggcaccagtactctaccatggggcatcccaagtggggtcctcacccatcccagctactgcagctctgtattactttgtcatttcctgttgtctcactcctgagggctcctgcagtaactctgtacttctctatctgcacacacaaaatgcccaaggcactcactggggaggaagcaaggaagcaaacagtctgagaaaatgatgcaagaaaatcaaatgggaatctggggacccaacacaacatcctgaagattattaaaaggaaaagatgctgattggtacataaatcttttacatggccttggtctagaggaggcaggcttttagaatcatgttttgttaatccgcttcactaaattggaccttcacatatctaaaaagctctgaagtgtttgtatatttgaaatacctcaataaagagagagctcattgactgtaaa

SEQ ID NO: 6974 - DNA, 1966 bp, Homo sapiens
cttccgggtcactgtctggctccacccccccccccccccccactgggttccggaaaggctcagggttgctcccgcgtttcggttcagtgacgtcgtaaattggaatgaggcatccagtttagcaacagcasagatgacractctgcgattctgagagtccctggcgagcccgggctagcgaaaagtgggggcagaacgaactacatctcccatcgtgccaggaggcggtcccgcccgtttccccctgggagttgtagtctaaccccctcggatccaacagcaacctcagtgcgtgaactctgttatccagaaggcctcgccctgccgccgccgaagctggaattcgtcggctagtagttctcgccggcaactagaggaacctgttggcgtggcccagaaggcttagcgggattgcacgagccctcagattcatcgctaccccgaggctaagcgccatgcctcatattgacaacgatgtgaaactggacttcaaggatgtccttttgaggcccaaacgcagtacccttaagtctcgaagtgaggtggatctcacaagatccttttcatttcggaactcaaagcagacatactctggggttcccatcattgctgccaatatggatactgtgggcacctttgagatggcyaaggttctctgtaagttctctctcttcactgctgtccataagcactatagcctcgttcagtggcaagagtttgctggccagaatcctgactgtcttgagcatctggctgccagctcaggcacaggctcttctgactttgagcagctggaacagatcctggaagctattccccaggtgaagtatatatgcctggatgtggcaaatggctactctgaacactttgttgaatttgtaaaagatgtacggaagcgcttcccccagcacaccatcatggcagggaatgtggtaacaggagagatggtagaagagctcatcctttctggggctgacatcatcaaagtgggaattgggccaggctctgtgtgtactactcggaagaaaactggagtggggtatccacagctcagcgcagtgatggagtgtgcagatgctgctcatggcctcaaaggccacatcatttcagatggaggttgcagctgtcctggggatgtggccaaggcttttggggcaggagctgacttcgtgatgctggrtggcatgctggctgggcacagtgagtcaggtggtgagctcatcgagagggatggcaagaagtacaagctcttctatggaatgagttctgaaatggccatgaagaagtatgctgggggcgtggctgagtacagagcctcagagggaaagacagtggaagttccttttaaaggagatgtggaacataccatccgagacatcctaggagggatccgctctacgtgtacctatgtgggagcagctaagctcaaagagttgagcaggagaactaccttcatccgagtcacccagcaggtgaatccaatcttcagtgaggcgtgctagacctgagcagttctaccctcccaaggcaccagtactctaccatggggcatcccaagtggggtcctcacccatcccagctactgcagctctgtattactttgtcatttcctgttgtctcactcctgagggctcctgcagtaactctgtacttctctatctgcacacacaaaatgcccaaggcactcactggggaggaagcaaggaagcaaacagtctgagaaaatgatgcaagaaaatcaaatgggaatctggggacccaacacaacatcctgaagattattaaaaggaaaagatgctgattggtacataaatcttttacatggccttggtctagaggaggcaggcttttagaatcatgttttgttaatccgcttcactaaattggaccttcacatatctaaaaagctctgaagtgtttgtatatttgaaatacctcaataaagagagagctcattgactgtaaa

SEQ ID NO: 6975 - DNA, 1869 bp, Homo sapiens
cttccgggtcactgtctggctccacccccccccccccccccactgggttccggaaaggctcagggttgctcccgcgtttcggttcagtgacgtcgtaaattggaatgaggcatccagtttagcaacagcasagatgacractctgcgattctgagagtccctggcgagcccgggctagcgaaaagtgggggcagaacgaactacatctcccatcgtgccaggaggcggtcccgcccgtttccccctgggagttgtagtctaaccccctcggatccaacagcaacctcagtgcgtgaactctgttatccagaaggcctcgccctgccgccgccgaagctggaattcgtcggctagtagttctcgccggcaactagaggaacctgttggcgtggcccagaaggcttagcgggattgcacgaggttagttgctaagcaaggtggtctttggtcaactgcckcctggaccaaggcaacaggaaccctcagattcatcgctaccccgaggctaagcgccatgcctcatattgacaacgatgtgaaactggacttcaaggatgtccttttgaggcccaaacgcagtacccttaagtctcgaagtgaggtggatctcacaagatccttttcatttcggaactcaaagcagacatactctggggttcccatcattgctgccaatatggatactgtgggcacctttgagatggcyaaggttctctgtaagttctctctcttcactgctgtccataagcactatagcctcgttcagtggcaagagtttgctggccagaatcctgactgtcttgagcatctggctgccagctcaggcacaggctcttctgactttgagcagctggaacagatcctggaagctattccccaggtgaagtatatatgcctggatgtggcaaatggctactctgaacactttgttgaatttgtaaaagatgtacggaagcgcttcccccagcacaccatcatggcagggaatgtggtaacaggagagatggtagaagagctcatcctttctggggctgacatcatcaaagtgggaattgggccaggctctgtgtgtactactcggaagaaaactggagtggggtatccacagctcagcgcagtgatggagtgtgcagatgctgctcatggcctcaaaggccacatcatttcagatggaggttgcagctgtcctggggatgtggccaaggcttttggggcaggagctgacttcgtgatgctggrtggcatgctggctgggcacagtgagtcaggtggtgagctcatcgagagggatggcaagaagtacaagctcttctatggaatgagttctgaaatggccatgaagaagtatgctgggggcgtggctgagtacagagcctcagagggaaagacagtggaagttccttttaaaggagatgtggaacataccatccgagacatcctaggagggatccgctctacgtgtacctatgtgggagcagctaagctcaaagagttgagcaggagaactaccttcatccgagtcacccagcaggtgaatccaatcttcagtgaggcgtgctagacctgagcagttctaccctcccaaggcactcactggggaggaagcaaggaagcaaacagtctgagaaaatgatgcaagaaaatcaaatgggaatctggggacccaacacaacatcctgaagattattaaaaggaaaagatgctgattggtacataaatcttttacatggccttggtctagaggaggcaggcttttagaatcatgttttgttaatccgcttcactaaattggaccttcacatatctaaaaagctctgaagtgtttgtatatttgaaatacctcaataaagagagagctcattgactgta

SEQ ID NO: 6976 - DNA, 1878 bp, Homo sapiens
ccgccccccgtcgccaacattccttcgttcccctaaatcagcctcttgccccattgctctttgcaggggtagaagaaggaagtgtagcggggtaaggaatgcaccgtcagggtctctcacaaccctttcccagctctcctccccaacaaacagtacctgggatggagccctagggtaatcgcagccacgggatgggtcgaggtgacaggcttcagggaccacacttcggcctttgcccgaccttccacaacttaagcgaagagaggccaccagccgtaacagggcgttaaagcccaggggaagattggtccttatgacttcctgccttccagccctcagattcatcgctaccccgaggctaagcgccatgcctcatattgacaacgatgtgaaactggacttcaaggatgtccttttgaggcccaaacgcagtacccttaagtctcgaagtgaggtggatctcacaagatccttttcatttcggaactcaaagcagacatactctggggttcccatcattgctgccaatatggatactgtgggcacctttgagatggcyaaggttctctgtaagttctctctcttcactgctgtccataagcactatagcctcgttcagtggcaagagtttgctggccagaatcctgactgtcttgagcatctggctgccagctcaggcacaggctcttctgactttgagcagctggaacagatcctggaagctattccccaggtgaagtatatatgcctggatgtggcaaatggctactctgaacactttgttgaatttgtaaaagatgtacggaagcgcttcccccagcacaccatcatggcagggaatgtggtaacaggagagatggtagaagagctcatcctttctggggctgacatcatcaaagtgggaattgggccaggctctgtgtgtactactcggaagaaaactggagtggggtatccacagctcagcgcagtgatggagtgtgcagatgctgctcatggcctcaaaggccacatcatttcagatggaggttgcagctgtcctggggatgtggccaaggcttttggggcaggagctgacttcgtgatgctggrtggcatgctggctgggcacagtgagtcaggtggtgagctcatcgagagggatggcaagaagtacaagctcttctatggaatgagttctgaaatggccatgaagaagtatgctgggggcgtggctgagtacagagcctcagagggaaagacagtggaagttccttttaaaggagatgtggaacataccatccgagacatcctaggagggatccgctctacgtgtacctatgtgggagcagctaagctcaaagagttgagcaggagaactaccttcatccgagtcacccagcaggtgaatccaatcttcagtgaggcgtgctagacctgagcagttctaccctcccaaggcaccagtactctaccatggggcatcccaagtggggtcctcacccatcccagctactgcagctctgtattactttgtcatttcctgttgtctcactcctgagggctcctgcagtaactctgtacttctctatctgcacacacaaaatgcccaaggcactcactggggaggaagcaaggaagcaaacagtctgagaaaatgatgcaagaaaatcaaatgggaatctggggacccaacacaacatcctgaagattattaaaaggaaaagatgctgattggtacataaatcttttacatggccttggtctagaggaggcaggcttttagaatcatgttttgttaatccgcttcactaaattggaccttcacatatctaaaaagctctgaagtgtttgtatatttgaaatacctcaataaagagagagctcattgactgtaaa

SEQ ID NO: 6977 - DNA, 2711 bp, Homo sapiens
gggtcctgtcccatccatcctgacctgttccatctcagccccaggactcagtaytgcggttgccaacactgctgccaggcatgatggatgggccacgttccgatgtgggccgttggggtggcaaccccttgcagccccctaccacgccatctccagagccagagccagagccagacggacgctctcgcagaggaggaggccgttmcttctgggctcgctgctgtggctgctgttcawgccgaaatgcggcagatgacgactggggacctgaaccctctgactccaggggtcgagggtccagctctggcactygaagacctggctcccggggctcagactcccgccggcctgtatcccggggcagcggtgtcaatgcagctggagwtggcaccatccgagagggcatgctagtagtgaacggtgtggacttgctgagctcgcgctcrgaccagaaccgcygagagcaccacacagacgagtatgagtacgacgagctgatagtgyvcyrcrrgcagcctttccatatgctcctcctcctgtcccggacctatgaatcctctgatcgcatcacccttgagttactcatcwgaaacaaccccgaggtgggcaagggcacgcacgtgatcatcccagtgggcaaggggggcagtggaggctggaaagcccaggtggtcaaggccagtgggcagaatcwgaacctgcgggtccacacttcccccaacgccatcatcrgcaagtttcagttcacagtccrcacacaatcagacgctggggagttccagttgccctttgacccccgcaatgaratctacatcctcttcaaccyctggtgcccagaggacattgtgtacgtggaccatgaggattggcggcaggagtatgttcttaatgagyctgggagaatttactacsggaccgaagcacagattggtgagcrgacctggamctacggccagtttgaccacggggtgctggatgcctgcttatacatcctggacyggcgggggatgccatatggaggcyktggagacccagtcaatgtctcccrggtcatctctgccatggtgaactccctggatgacaatggagtcctgattgggaactggtctggtgattactcccgaggcaccaacccatcagcgtgggtgggcagcgtggagatcctgcttagctacctacgcacgggatattcygtmccctatggccagtgctgggtctttgctrgmrtgaccaccacagtgctgcgctgcctgggtctggccacccgtactgtcaccaacktcaactccgcccacgacacagacacatcccttaccatggacatctacttcgacgagaacatgaagcccctggagcacctgaaccatgwttctgtctggaacttccatgtgtggaacgactgctggatgaagaggccggatctsccctcgggctttgatgggtggcaggtggtggatgccacaccccaagagactagcagtggcatcttctgctgcrgcccctgctctgtggagtccatcaagaatggsctsgtctacatgaagtacgacacgcctttcatttttgctgaggtgaatagtgacaaggtgtactggcagcgscasgatgatggcagcttcaagattgtttatrtggaggrgaaggccatcggcacactcattgtcacaaaggccatcagctccaacatgcgggaggacatcacctacctctataagcacccagaaggctcagasgcagagcggaaggcagtagagacagcagcagcccacggcagcaaacccaatgtgtatgccaaccggggctcagcggaggatgtggccatgyaggtggaggcacaggacgcggtgatggggcaggatctgatggtctctgtgatgctgatcaatcacagcagcagcygccgcacagtgaaactgcacctctacctctcagtcactttctatactggtgtcagtggtaccatcttcaaggagaccaagaaggaagtggagctggcaccaggggcctcggaccgtgtgaccatgccagtggcctacaaggaataccggccccatcttgtggacyagggggccatgctgctcaatrtctcaggccacgtcaaggagagcgggcaggtgctggccaagcagcacaccttccgtctgcgcaccccagacctctccctsacgttactgggagcagcagtggttggccaggagtgtgaagtacagattgtcttcaagaacccccttcccgtcaccctcaccaatgtcgtcttccggctcgaaggctctgggttacagaggcccaagatcctcaacgttggggacattggaggcaatgaaacagtgacactgcgccagtygtttgtgcctgtgygaccaggcccccgccagctcattgccagcttggacagcccacagctctcccaggtgcacggtgtcatccaggtggatgtggccccagcccctggggatgggggcttcttctcagacgctggaggtgwcagtcacttaggagagaccatccctatggcatctcgaggtggagcttagcccygtgccaggagcaatgggactggagtcagatgagcaaggacattgccccaagataggggcacactacagagcagctccccaggagctcaggtggggagtccagggctcccggagagggagtcagtcttcacttgcactgggggaacagatgctaataaactgttttttaatgaa

SEQ ID NO: 6978 - DNA, 1855 bp, Homo sapiens
gccgaaggtgcctgggcttgctcattcagtcacagtcacagccaccatgccagggaggacctgggagctgtgcctgctactgctgctggggctgggactggggtcccaggaggccctacccccaccctgtgagagtgagatttactgccacggggagctcctaaaccaagttcaaatggccaagctctaccaggatgacaarcagtttgtggacatgccactgtctatagctccagaacaagtcctgcagaccttcactgagctgtccagggaccacaatcacagcatccccagggagcagctgcaggcgtttgtccacgaacacttccaggccaaggggcaggagctgcagccctggacccctgcagactggaaagacagcccccagttcctgcagaagatttcagatgccaaactgcgtgcctgggcagggcagctgcatcagctctggaagaagctggggargaagatgaagccagaggttctcagccaccctgagcggttctctctcatctactcagaacatcccttcattgtgcctggcggtcgctttgttgagttctactactgggactcctactgggtcatggagggtctgctcctctcagagatggctgagacggtgaagggcatgctgcagaacttcttggacctggtgaaaacctatgggcatgtccccaatggtgggcgcgtgtactacctgcagcggagccagcccccactcttgaccctcatgatggattgctacttgactcacaccaatgacaccgcctttctacaggaaaacattgaaacactagccttggaattggacttttggaccaagaacaggactgtctctgtgagcttggagggaaagaactacctcctgaatcgctattatgtcccttatgggggacccaggcctgagtcctacagcaaagatgtggagttggctgacaccttgccagaaggagaccgggaggctctgtgggctgagctcaaggctggggctgagtctggctgggacttctcttcacgctggctcattggaggcccaaaccccaactcgcttagcggcatccgaacaagcaaactggtgcctgttgacctgaatgccttcctatgccaagcagaggagctgatgagcaacttctattccaggctggggaacgactcccaggccacgaagtacagaatcctgcggtcgcagcgcttggccgccctgaacrcagtcctgtgggatgagcagaccggagcctggttcgattacgaccttgagaagaagaagaaaaaccgggagttttacccatccaacctcactccactctgggccgggtgtttctctgaccctggcgtggcggacaaggctctgaaatacctggaggacaaccggatcctgacttaccagyatgggatcccgacctctctccagaagacaggccagcagtgggatttccccaatgcctgggcccccctgcaggacctggtcatcagaggcctggccaaggcacctttacgtygggcccaggaagtggctttccagctggctcagaattggatccgaaccaattttgatgtctactcgcagaagtcagccatgtatgagaagtatgacgtcagcaacggtggacagcccggtgggggaggagaatatgaagttcaggagggatttggctggacgaatggygtggtcctgatgctgctggaccgctatggtgaccggctgacctcaggrgccaagytggctttcctggagccccactgcctggcggccacccttctgcccagcctcctgctcagcctcctgccatggtgacagccctcctctcctcacctggmcccagctcctgccccattaaacctctgcaccagt

SEQ ID NO: 6979 - DNA, 3479 bp, Homo sapiens
tcaaggaataggcagacatttcagcaaggctgctgaggaaggataggctgtggaaattaggatgcagcactcctgcccgggtcccgcctcggggtcgccaggccctgaaccccaacgccggcattagtcgcgcctgcgcacggccctgtggagccgcggaggcaagggacggagaacggggcggaggcggagtcagggcgcccgcgcgtgggccccgcccccttatgtmgggtataaagcccctcccgctcacagtttccctagtcctcgaaggctcggaagcccgtcaccstgtcgtgcgagtcgtctmtggttctcgggtactgggatattcgtgggctggcgcacgccatccgcctgctcctggagttcacggatacctcttatgaggagaaacggtacacgtgcggggaagctcctgactatgatcgaagccaatggctggatgtgaaattcaagctagacctggactttcctaatctgccctacctcctggatgggaagaacaagatcacccagagcaatgccatcttgcgctacatcgctcgcaagcacaacatgtgtggtgagactgaagaagaaaagattcgagtggacatcatagagaaccaagtaatggatttccgcacacaactgataaggctctgttacagctctgaccacgaaaaactgaagcctcagtacttggaagagctacctggacaactgaaacaattctccatgtttctggggaaattctcatggtttgccggggaaaagctcacctttgtggattttctcacctatgatatcttggatcagaaccgtatatttgaccccaagtgcctggatgagttcccraacctgaaggctttcatgtgycgttttgaggctttggagaaaatcgctgcctacttacagtctgatcagttctgcaagatgcccatcaacaacaagatggcccagtggggcaacaagcctrtatgctgagcaggaggcagacttgcagagcttgttttktttcatcctgtccgtaaggggtcagcgctcttgctttgctcttttcaatgaatagcacttmtgttactggtgtccagctgagtttctcttgggtataaaggctaaaagggaaaaaggatatgtggagaatcatcaagatatgaattgaatcgctgcgatactggcatttccctactccccaactgagttcaagggctgtaggttcatgcccaagccctgagagtgggtactagaaaaaacgagattgcacagttggagagagcaggtgtgttaaatgggactggagtccctgtgaagactgggtgaggataacacaagtaaaactgtggtactgatggacttaaccggagttcggaaaccgtcctgtgtacacatgggagtttagtgtgataaaggcagtatttcagactggtgggctagccaatagagttgggacaattgcttactcattaaaaataatagagccccacttgacactattcactaaaattaatctggaatttaaggcccaacattaaacacaaagctgttgaaatattgatgaaaatgtaagaatttttgtgaccacggggtaggagaagtttctttaaagacgtaaaaagaaaaaaccataggctgctctgcctgtggagtarccattctttattcttttactttttaaaataataacaatcacaaaggaaagatttrccaattgaataggatcaaattctacaacttttcctaaggcacccacaaataaatgacaagtgagacaaaaagcactagtataaagattatataaagacctataaatcattaagacaactgagtttttaaaaatggacaaaatccatgaacaatttataaaatagaaatatagccaaaaatgtctaaaagatgtttatgatgtaaggaattatcaattacaacagtgagaaaccatatttccttctatccgatgagtaaaaagtttctaaagtgttggcaaggcttaggaaagtgatatgcatttcctgctggtcaagttgtaaattagtatagctactttggaggacaattgtaaaatttaaatcatatcctatgacccagcaattccatgctataaaaactcatccatggccgggcttggtggctcacgcctgtaatcccagcactttgggaggctgaggtgggcagatcacgaggtcaagagatcgagaccatcctggccaacatgatgaaaccccgtttctactaaaaatacaaaaattagctgggcatggtggcatgtgcctatagtcccagctactcaggaggctgaggcaggagaattgcttgaacctgggagtgggataaaggcccagactccatggtggaagttaaagggcatttccaagttaaggctaagacttgcttttctaactaagagaatgtgctcatgcattgcttgtgtagtagaaactagtttttagaaaagaaagcaaacttaagaaacactgactcctgtggagatgacttggcaccactctcctttcacagagcagagtctgaatagtcttcagagataggcctgtgggccagattgccatcccctatggaccagaagccaaggatctctctagtgatggtcagagggcccaaatggcagggatacccagtgatgtcaggaggaatagtrcagacagaaggtgctaagcagacaattcaactgccatgttttgccaccccctgtgagcagggattaggtgttcaggccagtatcttgggcatgggggagcctttggccagaagaggtataaagctcagaagtttttcagtctgataactattgatataatttccatagtgtgagggagcggtatgctctacccttgtgtatttaaggcaggacagagaaattgaggatgcccctggggctagatcgatgatatgaccagaaatcaaaaagggaatgcattatttattgctgtgtaacactgttaagagaggaggtagttaagggatggataggcacatagagagggaaggtctcaggagaagggatagaaaggaactatgttcacaagaacaacggcaagacagtgcctatactgcctctacagttaataggaaaaacggaagaagttacccttaagctaggatgttgctcagaagtgaccatcccaactttggtgcgggcacaataaatcagcctaaatgtccctaatttaacccagctcrttataatgtcattaaacatgacattagcattgtggttttagcacccccatgggttttgcttaggcactcatgggtaataaccaagatggagtccctttggcaaaacttaggcatgcacagctgtagtaccccaagaagaaaatgttacttctctcatctgggcaaaacccacagaagacttcccagcttctgccacataaaagacacagaacacagacgccttactggcaacctgctttcaagacccctgtctttgctgagagctttcctttttcccaataaattctactctgccctac

SEQ ID NO: 6980 - DNA, 2241 bp, Homo sapiens
cactcctgcccgggtcccgcctcggggtcgccaggccctgaaccccaacgccggcattagtcgcgcctgcgcacggccctgtggagccgcggaggcaagggacggagaacggggcggaggcggagtcagggcgcccgcgcgtgggccccgcccccttatgtmgggtataaagcccctcccgctcacagtttccctagtcctcgaaggctcggaagcccgtcaccatgtcgtgcgagtcgtctmtggttctcgggtactgggatattcgtgggctggcgcacgccatccgcctgctcctggagttcacggatacctcttatgaggagaaacggtacacgtgcggggaagctcctgactatgatcgaagccaatggctggatgtgaaattcaagctagacctggactttcctaatctgccctacctcctggatgggaagaacaagatcacccagagcaatgccatcttgcgctacatcgctcgcaagcacaacatgtgtggtgagactgaagaagaaaagattcgagtggacatcatagagaaccaagtaatggatttccgcacacaactgataaggctctgttacagctctgaccacgaaaaactgaagcctcagtacttggaagagctacctggacaactgaaacaattctccatgtttctggggaaattctcatggtttgccggggaaaagctcacctttgtggattttctcacctatgatatcttggatcagaaccgtatatttgaccccaagtgcctggatgagttcccraacctgaaggctttcatgtgycgttttgaggctttggagaaaatcgctgcctacttacagtctgatcagttctgcaagatgcccatcaacaacaagatggcccagtggggcaacaagcctrtatgctgagcaggaggcagacttgcagagcttgttttktttcatcctgtccgtaaggggtcagcgctcttgctttgctcttttcaatgaatagcacttmtgttactggtgtccagctgagtttctcttgggtataaaggctaaaagggaaaaaggatatgtggagaatcatcaagatatgaattgaatcgctgcgatactggcatttccctactccccaactgagttcaagggctgtaggttcatgcccaagccctgagagtgggtactagaaaaaacgagattgcacagttggagagagcaggtgtgttaaatgggactggagtccctgtgaagactgggtgaggataacacaagtaaaactgtggtactgatggacttaaccggagttcggaaaccgtcctgtgtacacatgggagtttagtgtgataaaggcagtatttcagactggtgggctagccaatagagttgggacaattgcttactcattaaaaataatagagccccacttgacactattcactaaaattaatctggaatttaaggcccaacattaaacacaaagctgttgaaatattgatgaaaatgtaagaatttttgtgaccacggggtaggagaagtttctttaaagacgtaaaaagaaaaaaccataggctgctctgcctgtggagtarccattctttattcttttactttttaaaataataacaatcacaaaggaaagatttrccaattgaataggatcaaattctacaacttttcctaaggcacccacaaataaatgacaagtgagacaaaaagcactagtataaagattatataaagacctataaatcattaagacaactgagtttttaaaaatggacaaaatccatgaacaatttataaaatagaaatatagccaaaaatgtctaaaagatgtttatgatgtaaggaattatcaattacaacagtgagaaaccatatttccttctatccgatgagtaaaaagtttctaaagtgttggcaaggcttaggaaagtgatatgcatttcctgctggtcaagttgtaaattagtatagctactttggaggacaattgtaaaatttaaatcatatcctatgacccagcaattccatgctataaaaactcatccatggccgggcttggtggctcacgcctgtaatcccagcactttgggaggctgaggtgggcagatcacgaggtcaagagatcgagaccatcctggccaacatgatgaaaccccgtttctactaaaaatacaaaaattagctgggcatggtggcatgtgcctatagtcccagctactcaggaggctgaggcaggagaattgcttgaacctgggag

SEQ ID NO: 6981 - DNA, 3483 bp, Homo sapiens
tcaaggaataggcagacatttcagcaaggctgctgaggaaggataggctgtggaaattaggatgcaggtagcactcctgcccgggtcccgcctcggggtcgccaggccctgaaccccaacgccggcattagtcgcgcctgcgcacggccctgtggagccgcggaggcaagggacggagaacggggcggaggcggagtcagggcgcccgcgcgtgggccccgcccccttatgtmgggtataaagcccctcccgctcacagtttccctagtcctcgaaggctcggaagcccgtcaccstgtcgtgcgagtcgtctmtggttctcgggtactgggatattcgtgggctggcgcacgccatccgcctgctcctggagttcacggatacctcttatgaggagaaacggtacacgtgcggggaagctcctgactatgatcgaagccaatggctggatgtgaaattcaagctagacctggactttcctaatctgccctacctcctggatgggaagaacaagatcacccagagcaatgccatcttgcgctacatcgctcgcaagcacaacatgtgtggtgagactgaagaagaaaagattcgagtggacatcatagagaaccaagtaatggatttccgcacacaactgataaggctctgttacagctctgaccacgaaaaactgaagcctcagtacttggaagagctacctggacaactgaaacaattctccatgtttctggggaaattctcatggtttgccggggaaaagctcacctttgtggattttctcacctatgatatcttggatcagaaccgtatatttgaccccaagtgcctggatgagttcccraacctgaaggctttcatgtgycgttttgaggctttggagaaaatcgctgcctacttacagtctgatcagttctgcaagatgcccatcaacaacaagatggcccagtggggcaacaagcctrtatgctgagcaggaggcagacttgcagagcttgttttktttcatcctgtccgtaaggggtcagcgctcttgctttgctcttttcaatgaatagcacttmtgttactggtgtccagctgagtttctcttgggtataaaggctaaaagggaaaaaggatatgtggagaatcatcaagatatgaattgaatcgctgcgatactggcatttccctactccccaactgagttcaagggctgtaggttcatgcccaagccctgagagtgggtactagaaaaaacgagattgcacagttggagagagcaggtgtgttaaatgggactggagtccctgtgaagactgggtgaggataacacaagtaaaactgtggtactgatggacttaaccggagttcggaaaccgtcctgtgtacacatgggagtttagtgtgataaaggcagtatttcagactggtgggctagccaatagagttgggacaattgcttactcattaaaaataatagagccccacttgacactattcactaaaattaatctggaatttaaggcccaacattaaacacaaagctgttgaaatattgatgaaaatgtaagaatttttgtgaccacggggtaggagaagtttctttaaagacgtaaaaagaaaaaaccataggctgctctgcctgtggagtarccattctttattcttttactttttaaaataataacaatcacaaaggaaagatttrccaattgaataggatcaaattctacaacttttcctaaggcacccacaaataaatgacaagtgagacaaaaagcactagtataaagattatataaagacctataaatcattaagacaactgagtttttaaaaatggacaaaatccatgaacaatttataaaatagaaatatagccaaaaatgtctaaaagatgtttatgatgtaaggaattatcaattacaacagtgagaaaccatatttccttctatccgatgagtaaaaagtttctaaagtgttggcaaggcttaggaaagtgatatgcatttcctgctggtcaagttgtaaattagtatagctactttggaggacaattgtaaaatttaaatcatatcctatgacccagcaattccatgctataaaaactcatccatggccgggcttggtggctcacgcctgtaatcccagcactttgggaggctgaggtgggcagatcacgaggtcaagagatcgagaccatcctggccaacatgatgaaaccccgtttctactaaaaatacaaaaattagctgggcatggtggcatgtgcctatagtcccagctactcaggaggctgaggcaggagaattgcttgaacctgggagtgggataaaggcccagactccatggtggaagttaaagggcatttccaagttaaggctaagacttgcttttctaactaagagaatgtgctcatgcattgcttgtgtagtagaaactagtttttagaaaagaaagcaaacttaagaaacactgactcctgtggagatgacttggcaccactctcctttcacagagcagagtctgaatagtcttcagagataggcctgtgggccagattgccatcccctatggaccagaagccaaggatctctctagtgatggtcagagggcccaaatggcagggatacccagtgatgtcaggaggaatagtrcagacagaaggtgctaagcagacaattcaactgccatgttttgccaccccctgtgagcagggattaggtgttcaggccagtatcttgggcatgggggagcctttggccagaagaggtataaagctcagaagtttttcagtctgataactattgatataatttccatagtgtgagggagcggtatgctctacccttgtgtatttaaggcaggacagagaaattgaggatgcccctggggctagatcgatgatatgaccagaaatcaaaaagggaatgcattatttattgctgtgtaacactgttaagagaggaggtagttaagggatggataggcacatagagagggaaggtctcaggagaagggatagaaaggaactatgttcacaagaacaacggcaagacagtgcctatactgcctctacagttaataggaaaaacggaagaagttacccttaagctaggatgttgctcagaagtgaccatcccaactttggtgcgggcacaataaatcagcctaaatgtccctaatttaacccagctcrttataatgtcattaaacatgacattagcattgtggttttagcacccccatgggttttgcttaggcactcatgggtaataaccaagatggagtccctttggcaaaacttaggcatgcacagctgtagtaccccaagaagaaaatgttacttctctcatctgggcaaaacccacagaagacttcccagcttctgccacataaaagacacagaacacagacgccttactggcaacctgctttcaagacccctgtctttgctgagagctttcctttttcccaataaattctactctgccctac

SEQ ID NO: 6982 - DNA, 2308 bp, Homo sapiens
tcaaggaataggcagacatttcagcaaggctgctgaggaaggataggctgtggaaattaggatgcagcactcctgcccgggtcccgcctcggggtcgccaggccctgaaccccaacgccggcattagtcgcgcctgcgcacggccctgtggagccgcggaggcaagggacggagaacggggcggaggcggagtcagggcgcccgcgcgtgggccccgcccccttatgtmgggtataaagcccctcccgctcacagtttccctagtcctcgaaggctcggaagcccgtcaccstgtcgtgcgagtcgtctmtggttctcgggtactgggatattcgtgggctggcgcacgccatccgcctgctcctggagttcacggatacctcttatgaggagaaacggtacacgtgcggggaagctcctgactatgatcgaagccaatggctggatgtgaaattcaagctagacctggactttcctaatctgccctacctcctggatgggaagaacaagatcacccagagcaatgccatcttgcgctacatcgctcgcaagcacaacatgtgtggtgagactgaagaagaaaagattcgagtggacatcatagagaaccaagtaatggatttccgcacacaactgataaggctctgttacagctctgaccacgaaaaactgaagcctcagtacttggaagagctacctggacaactgaaacaattctccatgtttctggggaaattctcatggtttgccggggaaaagctcacctttgtggattttctcacctatgatatcttggatcagaaccgtatatttgaccccaagtgcctggatgagttcccraacctgaaggctttcatgtgycgttttgaggctttggagaaaatcgctgcctacttacagtctgatcagttctgcaagatgcccatcaacaacaagatggcccagtggggcaacaagcctrtatgctgagcaggaggcagacttgcagagcttgttttktttcatcctgtccgtaaggggtcagcgctcttgctttgctcttttcaatgaatagcacttmtgttactggtgtccagctgagtttctcttgggtataaaggctaaaagggaaaaaggatatgtggagaatcatcaagatatgaattgaatcgctgcgatactggcatttccctactccccaactgagttcaagggctgtaggttcatgcccaagccctgagagtgggtactagaaaaaacgagattgcacagttggagagagcaggtgtgttaaatgggactggagtccctgtgaagactgggtgaggataacacaagtaaaactgtggtactgatggacttaaccggagttcggaaaccgtcctgtgtacacatgggagtttagtgtgataaaggcagtatttcagactggtgggctagccaatagagttgggacaattgcttactcattaaaaataatagagccccacttgacactattcactaaaattaatctggaatttaaggcccaacattaaacacaaagctgttgaaatattgatgaaaatgtaagaatttttgtgaccacggggtaggagaagtttctttaaagacgtaaaaagaaaaaaccataggctgctctgcctgtggagtarccattctttattcttttactttttaaaataataacaatcacaaaggaaagatttrccaattgaataggatcaaattctacaacttttcctaaggcacccacaaataaatgacaagtgagacaaaaagcactagtataaagattatataaagacctataaatcattaagacaactgagtttttaaaaatggacaaaatccatgaacaatttataaaatagaaatatagccaaaaatgtctaaaagatgtttatgatgtaaggaattatcaattacaacagtgagaaaccatatttccttctatccgatgagtaaaaagtttctaaagtgttggcaaggcttaggaaagtgatatgcatttcctgctggtcaagttgtaaattagtatagctactttggaggacaattgtaaaatttaaatcatatcctatgacccagcaattccatgctataaaaactcatccatggccgggcttggtggctcacgcctgtaatcccagcactttgggaggctgaggtgggcagatcacgaggtcaagagatcgagaccatcctggccaacatgatgaaaccccgtttctactaaaaatacaaaaattagctgggcatggtggcatgtgcctatagtcccagctactcaggaggctgaggcaggagaattgcttgaacctgggag

SEQ ID NO: 6983 - DNA, 1565 bp, Homo sapiens
ctgggcctctcaaagtctgagccccgctccgctgatgcctgtctgcagaatccgcaccaaccagcaccatgcccatgactctggggtactgggacatccgtgggckggcccacgccatccgcttgctcctggaatacacagactcaagctatgtggaaaagaagtacacgctgggggacgctcctgactatgacagaagccagtggctgaatgaaaaattcaagctgggcctggactttcccaatctgccctacttgattgatgggrctcacaagatcacccagagcaatgccatcctgcgctacattgcccgcaagcacaacctgtgtggggagacagaagaggagaagattcgtgtggacattttggagaaccaggttatggataaccacatggagctggtcagactgtgctatgacccagattttgagaaactgaagccaaaatacytggaggaactccctgaaaagctaaagctctactcagagtttctggggaagcggccatggtttgcaggagacaagatcacctttgtggatttccttgcctatgatgtccttgacatgaagcgtatatttgagcccaagtgcttggacgccttccyaaayytgaaggacttcatctcccgctttgagggtttgaagaagatctctgcctacatgaagtccagccaattcctccgaggtcttttgtttggaaagtcagctacatggaacagcaaatagggcccagtgatgccagaagatgggagggaggagccaaccttgctgcctgcgaccctggaggacagcctgactccctggacctgccttcttcctttttccttctttctactctcttctcttccccaaggcctcattggcttcctttcttctaacatcatccctccccgcatcgaggctctttaaagcttcagctccccactgtcctccatcaaagtccccctcctaacgtcttcctttccctgcactaacgccaacctgactgcttttcctgtcagtgcttttctcttctttgagaagccagactgatctctgagctccctagcactgtcctcaaagaccatctgtatgccctgctccctttgctgggtccctaccccagctccgtgtgatgcccagtaaagcctgaaccatgcctgccatgtcttgtcttattccctgaggctcccttgactcaggactgtsctcgaattgtgggtggttttttgtcttctgttgtccacagccagagcttagtggatgggtgtgtgtgtgtgtgtgttgggggtggtgatcaggcaggttcataaatttccttggtcatttctgccctctagccacatccctctgttcctcactgtggggattactacagaaaggtgctctgtgccaagttcctcactcattcgcgctcctgtaggccgtctagaactggcayggttcaaagaggggctaggctgatggggaagggggctgagcagctcccaggcagactgccttctttcaccctgtcctgatagacttccctgatctagatatccttcgtcatgacacttctcaataaaacgtatcccaccgtattgt

SEQ ID NO: 6984 - DNA, 3636 bp, Homo sapiens
ccgggagctgagggtcagatgtggaaggaaagtgggtgctgggttttcacggagtatgcctgccctgccccgggaggactgtgtttgagcttggactcgctcgctgctgaattcctgtttgttattcttttttcttccaggctagctggaaggaccagctagcctggactttggcttctttgcccgggagccctggcatgatggggtgagggctcttggtgggttagtggagagctgggggctggcccttccccatcttcttttctacccaccccctccccgccccccgccaggcccagccaccatcagtcacgtcactcctgggactgaggaggcaggggagggataaggggcagagatggaggccccactccccgaggttgcctagacaacatgagaaatcgtggccagggcctcttccgcctgcggagccgctgcttcctgcatcagtcactcccgctgggggcggggcggaggaaggggttggatgtggcagagccaggccccagccggtgccgctcagactcccccgctgtcgccgccgtggtcccagccatggcatcctatccatctggctctggcaagcccaaggccaaatatccctttaagaagcgggccagcctgcaggcctccactgcagctccaggagctgttcacccgctcactggctgagagcgagctccgtagtgccccgtatgagttccccgaggagagccccattgaacagctggaggagcggcggcagcggctggagcggcagatcagccaggatgtcaagctggagccagacatcctgcttcgggccaagcaagatttcctgaagacggacagtgactcggacctacagctctacaaggaacagggtgaggggcagggtgaccggagcctgcgggagcgtgatgtgctggaacgggagtttcagcgggtcaccatctctggggaggagaagtgtggggtgccgttcacagacctgctggatgcagccaagagtgtggtgcgggcgctcttcatccgggagaagtacatggccctgtccctgcagagcttctgccccaccacccgccgctacctgcagcagctggctgaaaagcctctggagacccggacctatgaacagggccccgacacccctgtgtctgctgatgccccggtgcacccccctgcgctggagcagcacccgtatgagcactgtgagccaagcaccatgcctggggacctgggcttgggtctgcgcatggtgcggggtgtggtgcacgtctacacccgcagggaacccgacgagcattgctcagaggtggagctgccataccctgacctgcaggaatttgtggctgacgtcaatgtgctgatggccctgattatcaatggccccataaagtcattctgctaccgccggctgcagtacctgagctccaagttccagatgcatgtgctactcaatgagatgaaggagctggccgcccagaagaaagtgccacaccgagatttctacaacatccgcaaggtggacacccacatccatgcctcrtcctgcatgaaccagaagcatctgctgcgcttcatcaagcgggcaatgaagcggcacctggaggagatcgtgcacgtggagcagggccgtgaacagacgctgcgggaggtctttgagagcatgaatctcacggcctacgacctgagtgtggacacgctggatgtgcaygcggacaggaacactttccatcgctttgacaagtttaatgccaaatacaaccctattggggagtccgtcctccgagagatcttcatcaagacggacaacagggtatctgggaagtactttgctcacatcatcaaggaggtgatgtcagacctggaggagagcaaataccagaatgcagagctgcggctctccatttacgggcgctcgagggatgagtgggacaagctggcgcgctgggccgtcatgcaccgcgtgcactcccccaacgtgcgctggctggtgcaggtgccccgcctctttgatgtgtaccgtacmaagggccagctggccaacttccaggagatgctggagaacatcttcctgccactgttcgaggccactgtgcaccctgccagccacccggaactgcatctcttcttagagcacgtggatggttttgacagcgtggatgatgagtccaagcctgaaaaccatgtcttcaacctggagagccccctgcctgaggcgtgggtggaggaggacaacccaccctatgcctactacctgtactacacctttgccaacatggccatgttgaaccacctgcgcaggcagaggggcttccacacgtttgtgctgaggccacactgtggggaggctgggcccatccaccacctggtgtcagccttcatgctggctgagaacatttcccacgggctccttctgcgcaaggcccccgtcctgcagtacctgtactacctggcccagatcggcatcgccatgtctccgctcagcaacaacagcctcttcctcagctatcaccggaatccgctaccggagtacctgtcccgcggcctcatggtctccctgtccactgatgatcccttgcagttccacttcaccaaggagccgctgatggaggagtacagcatcgccacccaggtgtggaagctcagctcctgcgatatgtgtgagctggcccgcaacagcgtgctcatgagcggcttctcgcacaaggtaaagagccactggctgggacccaactataccaaggaaggccctgaggggaatgacatccgccggaccaatgtgccagacatccgcgtgggctaccgctacgagaccctgtgccaggagctggcgctcatcacgcaggcagtccagagtgagatgctggagaccattccagaggaggcgggtatcaccatgagcccagggcctcaatgakcctggtccatgaagtgcccaccacatcgcagcacttttaccacgttttgtcctcagaccccgcccatgctgtgtggtctctgcatgtctccattcttctctgtctctgtcttgcatgtctcctaccatgtcactgtccctgggccacccagtgaaagcaaagcctgggaatctgctcattgttgtttgggctcaggtattgagcctgatggcccaggtattgagggcctcccctgctggtggccctgtcctgggatcctcagaagcctgactgtcctatgggcttctccagtgtccacaggggcttgggatggttgtggggggctggcccctctagcctttccggtccttcctgggcaaatctaagccttggccagggccgaagtttaggcccctgtcttgttcatgtagccgaggggcaggcgggggayctctacacctctgctgtgggcacggggctgctgagggtctgtggaactccagcagctctgcactgggtagagctgggcctagagctcagtcacaggcctgggcttcctggcctgagtgggtagacgcaggcggcagaggtgctggaccacatctcccccacgtgctccttgggtgtcagcttcctgtgcctctgtgggagagggcagctgccttgtgttatgtctggggccacagttgctgcaaagtcctggatctgccactcaaccccgggagtggtgttcccagtgtggctcccagagctt

SEQ ID NO: 6985 - DNA, 4253 bp, Homo sapiens
ctggcgcggagccggcgagattttggtggggtctcacctgttgcgtgactcccccacagtccggccgcgggagtcygaccctgaatgcccagggagtgttgagagaaatctggacgagtttcgggtcccgctcccttgggagcacgtggcctaccagcctctcgattgcagggttgggtggtcgcgacaccggggtcgccttgaggccagtccggctgccgaggtctgcgggagtccacctccggccagctggcaattttgaaagactgccttactttccccatctcagtgccagggcaggggcccttggagtgacttggctggggtctgtggcccgatccccctgccgtccctcaggacccgggctttctgctgtacagacttctcgtgggcagcctcccctcggaactcgggcatcatggcctcagaggctcggggtggtctgggggcccctccgctgcagtctgcccgatccctgccgggccccgccccctgcctcaagcacttcccgctsgacctgcgcacgtctatggatggcaaatgcaaggagatcgccgaggagctgttcacccgctcactggctgagagcgagctccgtagtgccccgtatgagttccccgaggagagccccattgaacagctggaggagcggcggcagcggctggagcggcagatcagccaggatgtcaagctggagccagacatcctgcttcgggccaagcaagatttcctgaagacggacagtgactcggacctacagctctacaaggaacagggtgaggggcagggtgaccggagcctgcgggagcgtgatgtgctggaacgggagtttcagcgggtcaccatctctggggaggagaagtgtggggtgccgttcacagacctgctggatgcagccaagagtgtggtgcgggcgctcttcatccgggagaagtacatggccctgtccctgcagagcttctgccccaccacccgccgctacctgcagcagctggctgaaaagcctctggagacccggacctatgaacagggccccgacacccctgtgtctgctgatgccccggtgcacccccctgcgctggagcagcacccgtatgagcactgtgagccaagcaccatgcctggggacctgggcttgggtctgcgcatggtgcggggtgtggtgcacgtctacacccgcagggaacccgacgagcattgctcagaggtggagctgccataccctgacctgcaggaatttgtggctgacgtcaatgtgctgatggccctgattatcaatggccccataaagtcattctgctaccgccggctgcagtacctgagctccaagttccagatgcatgtgctactcaatgagatgaaggagctggccgcccagaagaaagtgccacaccgagatttctacaacatccgcaaggtggacacccacatccatgcctcrtcctgcatgaaccagaagcatctgctgcgcttcatcaagcgggcaatgaagcggcacctggaggagatcgtgcacgtggagcagggccgtgaacagacgctgcgggaggtctttgagagcatgaatctcacggcctacgacctgagtgtggacacgctggatgtgcaygcggtctgtgccagtggcgtgggctgtgggactgagtcagtcaggggaccaggagtcacgggtgacctgagccttcccatgtcccccaggacaggaacactttccatcgctttgacaagtttaatgccaaatacaaccctattggggagtccgtcctccgagagatcttcatcaagacggacaacagggtatctgggaagtactttgctcacatcatcaaggtaaggaggcagccttccctgccaagcctcgagcctgaggatctgggggcttttagggggtgagactcaaggagggtaggcagatgaccccctgaagagctctgactcagctcacctcatgtctgactcagctcacctcatgtctaggaggtgatgtcagacctggaggagagcaaataccagaatgcagagctgcggctctccatttacgggcgctcgagggatgagtgggacaagctggcgcgctgggccgtcatgcaccgcgtgcactcccccaacgtgcgctggctggtgcaggtgccccgcctcttgtgagtgtccctggagtgggaggggaacctgcggggtcatattcaaggggtcagggcctgcctcctgccctcctaggatggctgagcctcccttgtscctgccaacccctctgagtgcaaggargggcttcctggtcccatccatggtctgtccagcctggcccacctgggtatccttgctttcccaatatggttcagatgcgcccctgcgctcttgggccaagctctgacccttgctggaccgctgggtttcctcccactggccctgacttgcacmtacctgcatgttgtctcacctgcagtgatgtgtaccgtacmaagggccagctggccaacttccaggagatgctggagaacatcttcctgccactgttcgaggccactgtgcaccctgccagccacccggaactgcatctcttcttagagcacgtggatggttttgacagcgtggatgatgagtccaagcctgaaaaccatgtcttcaacctggagagccccctgcctgaggcgtgggtggaggaggacaacccaccctatgcctactacctgtactacacctttgccaacatggccatgttgaaccacctgcgcaggcagaggggcttccacacgtttgtgctgaggccacactgtggggaggctgggcccatccaccacctggtgtcagccttcatgctggctgagaacatttcccacgggctccttctgcgcaaggcccccgtcctgcagtacctgtactacctggcccagatcggcatcgccatgtctccgctcagcaacaacagcctcttcctcagctatcaccggaatccgctaccggagtacctgtcccgcggcctcatggtctccctgtccactgatgatcccttgcagttccacttcaccaaggagccgctgatggaggagtacagcatcgccacccaggtgtggaagctcagctcctgcgatatgtgtgagctggcccgcaacagcgtgctcatgagcggcttctcgcacaaggtaaagagccactggctgggacccaactataccaaggaaggccctgaggggaatgacatccgccggaccaatgtgccagacatccgcgtgggctaccgctacgagaccctgtgccaggagctggcgctcatcacgcaggcagtccagagtgagatgctggagaccattccagaggaggcgggtatcaccatgagcccagggcctcaatgakcctggtccatgaagtgcccaccacatcgcagcacttttaccacgttttgtcctcagaccccgcccatgctgtgtggtctctgcatgtctccattcttctctgtctctgtcttgcatgtctcctaccatgtcactgtccctgggccacccagtgaaagcaaagcctgggaatctgctcattgttgtttgggctcaggtattgagcctgatggcccaggtattgagggcctcccctgctggtggccctgtcctgggatcctcagaagcctgactgtcctatgggcttctccagtgtccacaggggcttgggatggttgtggggggctggcccctctagcctttccggtccttcctgggcaaatctaagccttggccagggccgaagtttaggcccctgtcttgttcatgtagccgaggggcaggcgggggayctctacacctctgctgtgggcacggggctgctgagggtctgtggaactccagcagctctgcactgggtagagctgggcctagagctcagtcacaggcctgggcttcctggcctgagtgggtagacgcaggcggcagaggtgctggaccacatctccgccaagtcactgcccagcagccttctccgtcctgtccccagcccacgtgctccttgggtgtcagcttcctgtgcctctgtgggagagggcagctgccttgtgttatgtctggggccacagttgctgcaaagtcctggatctgccactcaaccccgggagtggtgttcccagtgtggctcccagagctttgaccagattgtgatcccagctggcccctatgttgtgttctggactgaggcctttgctgtgaactgcagtgtttcatacgaaccatctttcctagtgcatgagaaataaagattatttaagtaatgag

SEQ ID NO: 6986 - DNA, 3936 bp, Homo sapiens
ccgggagctgagggtcagatgtggaaggaaagtgggtgctgggttttcacggagtatgcctgccctgccccgggaggactgtgtttgagcttggactcgctcgctgctgaattcctgtttgttattcttttttcttccaggctagctggaaggaccagctagcctggactttggcttctttgcccgggagccctggcatgatggggtgagggctcttggtgggttagtggagagctgggggctggcccttccccatcttcttttctacccaccccctccccgccccccgccaggcccagccaccatcagtcacgtcactcctgggactgaggaggcaggggagggataaggggcagagatggaggccccactccccgaggttgcctagacaacatgagaaatcgtggccagggcctcttccgcctgcggagccgctgcttcctgcatcagtcactcccgctgggggcggggcggaggaaggggttggatgtggcagagccaggccccagccggtgccgctcagactcccccgctgtcgccgccgtggtcccagccatggcatcctatccatctggctctggcaagcccaaggccaaatatccctttaagaagcgggccagcctgcaggcctccactgcagctccagaggctcggggtggtctgggggcccctccgctgcagtctgcccgatccctgccgggccccgccccctgcctcaagcacttcccgctsgacctgcgcacgtctatggatggcaaatgcaaggagatcgccgaggagctgttcacccgctcactggctgagagcgagctccgtagtgccccgtatgagttccccgaggagagccccattgaacagctggaggagcggcggcagcggctggagcggcagatcagccaggatgtcaagctggagccagacatcctgcttcgggccaagcaagatttcctgaagacggacagtgactcggacctacagctctacaaggaacagggtgaggggcagggtgaccggagcctgcgggagcgtgatgtgctggaacgggagtttcagcgggtcaccatctctggggaggagaagtgtggggtgccgttcacagacctgctggatgcagccaagagtgtggtgcgggcgctcttcatccgggagaagtacatggccctgtccctgcagagcttctgccccaccacccgccgctacctgcagcagctggctgaaaagcctctggagacccggacctatgaacagggccccgacacccctgtgtctgctgatgccccggtgcacccccctgcgctggagcagcacccgtatgagcactgtgagccaagcaccatgcctggggacctgggcttgggtctgcgcatggtgcggggtgtggtgcacgtctacacccgcagggaacccgacgagcattgctcagaggtggagctgccataccctgacctgcaggaatttgtggctgacgtcaatgtgctgatggccctgattatcaatggccccataaagtcattctgctaccgccggctgcagtacctgagctccaagttccagatgcatgtgctactcaatgagatgaaggagctggccgcccagaagaaagtgccacaccgagatttctacaacatccgcaaggtggacacccacatccatgcctcrtcctgcatgaaccagaagcatctgctgcgcttcatcaagcgggcaatgaagcggcacctggaggagatcgtgcacgtggagcagggccgtgaacagacgctgcgggaggtctttgagagcatgaatctcacggcctacgacctgagtgtggacacgctggatgtgcaygcggacaggaacactttccatcgctttgacaagtttaatgccaaatacaaccctattggggagtccgtcctccgagagatcttcatcaagacggacaacagggtatctgggaagtactttgctcacatcatcaaggaggtgatgtcagacctggaggagagcaaataccagaatgcagagctgcggctctccatttacgggcgctcgagggatgagtgggacaagctggcgcgctgggccgtcatgcaccgcgtgcactcccccaacgtgcgctggctggtgcaggtgccccgcctctttgatgtgtaccgtacmaagggccagctggccaacttccaggagatgctggagaacatcttcctgccactgttcgaggccactgtgcaccctgccagccacccggaactgcatctcttcttagagcacgtggatggttttgacagcgtggatgatgagtccaagcctgaaaaccatgtcttcaacctggagagccccctgcctgaggcgtgggtggaggaggacaacccaccctatgcctactacctgtactacacctttgccaacatggccatgttgaaccacctgcgcaggcagaggggcttccacacgtttgtgctgaggccacactgtggggaggctgggcccatccaccacctggtgtcagccttcatgctggctgagaacatttcccacgggctccttctgcgcaaggcccccgtcctgcagtacctgtactacctggcccagatcggcatcgccatgtctccgctcagcaacaacagcctcttcctcagctatcaccggaatccgctaccggagtacctgtcccgcggcctcatggtctccctgtccactgatgatcccttgcagttccacttcaccaaggagccgctgatggaggagtacagcatcgccacccaggtgtggaagctcagctcctgcgatatgtgtgagctggcccgcaacagcgtgctcatgagcggcttctcgcacaaggtaaagagccactggctgggacccaactataccaaggaaggccctgaggggaatgacatccgccggaccaatgtgccagacatccgcgtgggctaccgctacgagaccctgtgccaggagctggcgctcatcacgcaggcagtccagagtgagatgctggagaccattccagaggaggcgggtatcaccatgagcccagggcctcaatgakcctggtccatgaagtgcccaccacatcgcagcacttttaccacgttttgtcctcagaccccgcccatgctgtgtggtctctgcatgtctccattcttctctgtctctgtcttgcatgtctcctaccatgtcactgtccctgggccacccagtgaaagcaaagcctgggaatctgctcattgttgtttgggctcaggtattgagcctgatggcccaggtattgagggcctcccctgctggtggccctgtcctgggatcctcagaagcctgactgtcctatgggcttctccagtgtccacaggggcttgggatggttgtggggggctggcccctctagcctttccggtccttcctgggcaaatctaagccttggccagggccgaagtttaggcccctgtcttgttcatgtagccgaggggcaggcgggggayctctacacctctgctgtgggcacggggctgctgagggtctgtggaactccagcagctctgcactgggtagagctgggcctagagctcagtcacaggcctgggcttcctggcctgagtgggtagacgcaggcggcagaggtgctggaccacatctccgccaagtcactgcccagcagccttctccgtcctgtccccagcccacgtgctccttgggtgtcagcttcctgtgcctctgtgggagagggcagctgccttgtgttatgtctggggccacagttgctgcaaagtcctggatctgccactcaaccccgggagtggtgttcccagtgtggctcccagagctttgaccagattgtgatcccagctggcccctatgttgtgttctggactgaggcctttgctgtgaactgcagtgtttcatacgaaccatctttcctagtgcatgagaaataaagattatttaagtaatgag

SEQ ID NO: 6987 - DNA, 3017 bp, Homo sapiens
atgctgaccttccttccctccccccaggagctgttcacccgctcactggctgagagcgagctccgtagtgccccgtatgagttccccgaggagagccccattgaacagctggaggagcggcggcagcggctggagcggcagatcagccaggatgtcaagctggagccagacatcctgcttcgggccaagcaagatttcctgaagacggacagtgactcggacctacagctctacaaggaacagggtgaggggcagggtgaccggagcctgcgggagcgtgatgtgctggaacgggagtttcagcgggtcaccatctctggggaggagaagtgtggggtgccgttcacagacctgctggatgcagccaagagtgtggtgcgggcgctcttcatccgggagaagtacatggccctgtccctgcagagcttctgccccaccacccgccgctacctgcagcagctggctgaaaagcctctggagacccggacctatgaacagggccccgacacccctgtgtctgctgatgccccggtgcacccccctgcgctggagcagcacccgtatgagcactgtgagccaagcaccatgcctggggacctgggcttgggtctgcgcatggtgcggggtgtggtgcacgtctacacccgcagggaacccgacgagcattgctcagaggtggagctgccataccctgacctgcaggaatttgtggctgacgtcaatgtgctgatggccctgattatcaatggccccataaagtcattctgctaccgccggctgcagtacctgagctccaagttccagatgcatgtgctactcaatgagatgaaggagctggccgcccagaagaaagtgccacaccgagatttctacaacatccgcaaggtggacacccacatccatgcctcrtcctgcatgaaccagaagcatctgctgcgcttcatcaagcgggcaatgaagcggcacctggaggagatcgtgcacgtggagcagggccgtgaacagacgctgcgggaggtctttgagagcatgaatctcacggcctacgacctgagtgtggacacgctggatgtgcaygcggacaggaacactttccatcgctttgacaagtttaatgccaaatacaaccctattggggagtccgtcctccgagagatcttcatcaagacggacaacagggtatctgggaagtactttgctcacatcatcaaggaggtgatgtcagacctggaggagagcaaataccagaatgcagagctgcggctctccatttacgggcgctcgagggatgagtgggacaagctggcgcgctgggccgtcatgcaccgcgtgcactcccccaacgtgcgctggctggtgcaggtgccccgcctctttgatgtgtaccgtacmaagggccagctggccaacttccaggagatgctggagaacatcttcctgccactgttcgaggccactgtgcaccctgccagccacccggaactgcatctcttcttagagcacgtggatggttttgacagcgtggatgatgagtccaagcctgaaaaccatgtcttcaacctggagagccccctgcctgaggcgtgggtggaggaggacaacccaccctatgcctactacctgtactacacctttgccaacatggccatgttgaaccacctgcgcaggcagaggggcttccacacgtttgtgctgaggccacactgtggggaggctgggcccatccaccacctggtgtcagccttcatgctggctgagaacatttcccacgggctccttctgcgcaaggcccccgtcctgcagtacctgtactacctggcccagatcggcatcgccatgtctccgctcagcaacaacagcctcttcctcagctatcaccggaatccgctaccggagtacctgtcccgcggcctcatggtctccctgtccactgatgatcccttgcagttccacttcaccaaggagccgctgatggaggagtacagcatcgccacccaggtgtggaagctcagctcctgcgatatgtgtgagctggcccgcaacagcgtgctcatgagcggcttctcgcacaaggtaaagagccactggctgggacccaactataccaaggaaggccctgaggggaatgacatccgccggaccaatgtgccagacatccgcgtgggctaccgctacgagaccctgtgccaggagctggcgctcatcacgcaggcagtccagagtgagatgctggagaccattccagaggaggcgggtatcaccatgagcccagggcctcaatgakcctggtccatgaagtgcccaccacatcgcagcacttttaccacgttttgtcctcagaccccgcccatgctgtgtggtctctgcatgtctccattcttctctgtctctgtcttgcatgtctcctaccatgtcactgtccctgggccacccagtgaaagcaaagcctgggaatctgctcattgttgtttgggctcaggtattgagcctgatggcccaggtattgagggcctcccctgctggtggccctgtcctgggatcctcagaagcctgactgtcctatgggcttctccagtgtccacaggggcttgggatggttgtggggggctggcccctctagcctttccggtccttcctgggcaaatctaagccttggccagggccgaagtttaggcccctgtcttgttcatgtagccgaggggcaggcgggggayctctacacctctgctgtgggcacggggctgctgagggtctgtggaactccagcagctctgcactgggtagagctgggcctagagctcagtcacaggcctgggcttcctggcctgagtgggtagacgcaggcggcagaggtgctggaccacatctcccccacgtgctccttgggtgtcagcttcctgtgcctctgtgggagagggcagctgccttgtgttatgtctggggccacagttgctgcaaagtcctggatctgccactcaaccccgggagtggtgttcccagtgtggctcccagagctt

SEQ ID NO: 6988 - DNA, 3767 bp, Homo sapiens
ccgggagctgagggtcagatgtggaaggaaagtgggtgctgggttttcacggagtatgcctgccctgccccgggaggactgtgtttgagcttggactcgctcgctgctgaattcctgtttgttattcttttttcttccaggctagctggaaggaccagctagcctggactttggcttctttgcccgggagccctggcatgatggggtgagggctcttggtgggttagtggagagctgggggctggcccttccccatcttcttttctacccaccccctccccgccccccgccaggcccagccaccatcagtcacgtcactcctgggactgaggaggcaggggagggataaggggcagagatggaggccccactccccgaggttgcctagacaacatgagaaatcgtggccagggcctcttccgcctgcggagccgctgcttcctgcatcagtcactcccgctgggggcggggcggaggaaggggttggatgtggcagagccaggccccagccggtgccgctcagactcccccgctgtcgccgccgtggtcccagccatggcatcctatccatctggctctggcaagcccaaggccaaatatccctttaagaagcgggccagcctgcaggcctccactgcagctccagaggctcggggtggtctgggggcccctccgctgcagtctgcccgatccctgccgggccccgccccctgcctcaagcacttcccgctsgacctgcgcacgtctatggatggcaaatgcaaggagatcgccgaggagctgttcacccgctcactggctgagagcgagctccgtagtgccccgtatgagttccccgaggagagccccattgaacagctggaggagcggcggcagcggctggagcggcagatcagccaggatgtcaagctggagccagacatcctgcttcgggccaagcaagatttcctgaagacggacagtgactcggacctacagctctacaaggaacagggtgaggggcagggtgaccggagcctgcgggagcgtgatgtgctggaacgggagtttcagcgggtcaccatctctggggaggagaagtgtggggtgccgttcacagacctgctggatgcagccaagagtgtggtgcgggcgctcttcatccgggagaagtacatggccctgtccctgcagagcttctgccccaccacccgccgctacctgcagcagctggctgaaaagcctctggagacccggacctatgaacagggccccgacacccctgtgtctgctgatgccccggtgcacccccctgcgctggagcagcacccgtatgagcactgtgagccaagcaccatgcctggggacctgggcttgggtctgcgcatggtgcggggtgtggtgcacgtctacacccgcagggaacccgacgagcattgctcagaggtggagctgccataccctgacctgcaggaatttgtggctgacgtcaatgtgctgatggccctgattatcaatggccccataaagtcattctgctaccgccggctgcagtacctgagctccaagttccagatgcatgtgctactcaatgagatgaaggagctggccgcccagaagaaagtgccacaccgagatttctacaacatccgcaaggtggacacccacatccatgcctcrtcctgcatgaaccagaagcatctgctgcgcttcatcaagcgggcaatgaagcggcacctggaggagatcgtgcacgtggagcagggccgtgaacagacgctgcgggaggtctttgagagcatgaatctcacggcctacgacctgagtgtggacacgctggatgtgcaygcggacaggaacactttccatcgctttgacaagtttaatgccaaatacaaccctattggggagtccgtcctccgagagatcttcatcaagacggacaacagggtatctgggaagtactttgctcacatcatcaaggaggtgatgtcagacctggaggagagcaaataccagaatgcagagctgcggctctccatttacgggcgctcgagggatgagtgggacaagctggcgcgctgggccgtcatgcaccgcgtgcactcccccaacgtgcgctggctggtgcaggtgccccgcctctttgatgtgtaccgtacmaagggccagctggccaacttccaggagatgctggagaacatcttcctgccactgttcgaggccactgtgcaccctgccagccacccggaactgcatctcttcttagagcacgtggatggttttgacagcgtggatgatgagtccaagcctgaaaaccatgtcttcaacctggagagccccctgcctgaggcgtgggtggaggaggacaacccaccctatgcctactacctgtactacacctttgccaacatggccatgttgaaccacctgcgcaggcagaggggcttccacacgtttgtgctgaggccacactgtggggaggctgggcccatccaccacctggtgtcagccttcatgctggctgagaacatttcccacgggctccttctgcgcaaggcccccgtcctgcagtacctgtactacctggcccagatcggcatcgccatgtctccgctcagcaacaacagcctcttcctcagctatcaccggaatccgctaccggagtacctgtcccgcggcctcatggtctccctgtccactgatgatcccttgcagttccacttcaccaaggagccgctgatggaggagtacagcatcgccacccaggtgtggaagctcagctcctgcgatatgtgtgagctggcccgcaacagcgtgctcatgagcggcttctcgcacaaggtaaagagccactggctgggacccaactataccaaggaaggccctgaggggaatgacatccgccggaccaatgtgccagacatccgcgtgggctaccgctacgagaccctgtgccaggagctggcgctcatcacgcaggcagtccagagtgagatgctggagaccattccagaggaggcgggtatcaccatgagcccagggcctcaatgakcctggtccatgaagtgcccaccacatcgcagcacttttaccacgttttgtcctcagaccccgcccatgctgtgtggtctctgcatgtctccattcttctctgtctctgtcttgcatgtctcctaccatgtcactgtccctgggccacccagtgaaagcaaagcctgggaatctgctcattgttgtttgggctcaggtattgagcctgatggcccaggtattgagggcctcccctgctggtggccctgtcctgggatcctcagaagcctgactgtcctatgggcttctccagtgtccacaggggcttgggatggttgtggggggctggcccctctagcctttccggtccttcctgggcaaatctaagccttggccagggccgaagtttaggcccctgtcttgttcatgtagccgaggggcaggcgggggayctctacacctctgctgtgggcacggggctgctgagggtctgtggaactccagcagctctgcactgggtagagctgggcctagagctcagtcacaggcctgggcttcctggcctgagtgggtagacgcaggcggcagaggtgctggaccacatctcccccacgtgctccttgggtgtcagcttcctgtgcctctgtgggagagggcagctgccttgtgttatgtctggggccacagttgctgcaaagtcctggatctgccactcaaccccgggagtggtgttcccagtgtggctcccagagctt

SEQ ID NO: 6989 - DNA, 3718 bp, Homo sapiens
ctggcgcggagccggcgagattttggtggggtctcacctgttgcgtgactcccccacagtccggccgcgggagtcygaccctgaatgcccagggagtgttgagagaaatctggacgagtttcgggtcccgctcccttgggagcacgtggcctaccagcctctcgattgcagggttgggtggtcgcgacaccggggtcgccttgaggccagtccggctgccgaggtctgcgggagtccacctccggccagctggcaattttgaaagactgccttactttccccatctcagtgccagggcaggggcccttggagtgacttggctggggtctgtggcccgatccccctgccgtccctcaggacccgggctttctgctgtacagacttctcgtgggcagcctcccctcggaactcgggcatcatggcctcagaggctcggggtggtctgggggcccctccgctgcagtctgcccgatccctgccgggccccgccccctgcctcaagcacttcccgctsgacctgcgcacgtctatggatggcaaatgcaaggagatcgccgaggagctgttcacccgctcactggctgagagcgagctccgtagtgccccgtatgagttccccgaggagagccccattgaacagctggaggagcggcggcagcggctggagcggcagatcagccaggatgtcaagctggagccagacatcctgcttcgggccaagcaagatttcctgaagacggacagtgactcggacctacagctctacaaggaacagggtgaggggcagggtgaccggagcctgcgggagcgtgatgtgctggaacgggagtttcagcgggtcaccatctctggggaggagaagtgtggggtgccgttcacagacctgctggatgcagccaagagtgtggtgcgggcgctcttcatccgggagaagtacatggccctgtccctgcagagcttctgccccaccacccgccgctacctgcagcagctggctgaaaagcctctggagacccggacctatgaacagggccccgacacccctgtgtctgctgatgccccggtgcacccccctgcgctggagcagcacccgtatgagcactgtgagccaagcaccatgcctggggacctgggcttgggtctgcgcatggtgcggggtgtggtgcacgtctacacccgcagggaacccgacgagcattgctcagaggtggagctgccataccctgacctgcaggaatttgtggctgacgtcaatgtgctgatggccctgattatcaatggccccataaagtcattctgctaccgccggctgcagtacctgagctccaagttccagatgcatgtgctactcaatgagatgaaggagctggccgcccagaagaaagtgccacaccgagatttctacaacatccgcaaggtggacacccacatccatgcctcrtcctgcatgaaccagaagcatctgctgcgcttcatcaagcgggcaatgaagcggcacctggaggagatcgtgcacgtggagcagggccgtgaacagacgctgcgggaggtctttgagagcatgaatctcacggcctacgacctgagtgtggacacgctggatgtgcaygcggacaggaacactttccatcgctttgacaagtttaatgccaaatacaaccctattggggagtccgtcctccgagagatcttcatcaagacggacaacagggtatctgggaagtactttgctcacatcatcaaggaggtgatgtcagacctggaggagagcaaataccagaatgcagagctgcggctctccatttacgggcgctcgagggatgagtgggacaagctggcgcgctgggccgtcatgcaccgcgtgcactcccccaacgtgcgctggctggtgcaggtgccccgcctctttgatgtgtaccgtacmaagggccagctggccaacttccaggagatgctggagaacatcttcctgccactgttcgaggccactgtgcaccctgccagccacccggaactgcatctcttcttagagcacgtggatggttttgacagcgtggatgatgagtccaagcctgaaaaccatgtcttcaacctggagagccccctgcctgaggcgtgggtggaggaggacaacccaccctatgcctactacctgtactacacctttgccaacatggccatgttgaaccacctgcgcaggcagaggggcttccacacgtttgtgctgaggccacactgtggggaggctgggcccatccaccacctggtgtcagccttcatgctggctgagaacatttcccacgggctccttctgcgcaaggcccccgtcctgcagtacctgtactacctggcccagatcggcatcgccatgtctccgctcagcaacaacagcctcttcctcagctatcaccggaatccgctaccggagtacctgtcccgcggcctcatggtctccctgtccactgatgatcccttgcagttccacttcaccaaggagccgctgatggaggagtacagcatcgccacccaggtgtggaagctcagctcctgcgatatgtgtgagctggcccgcaacagcgtgctcatgagcggcttctcgcacaaggtaaagagccactggctgggacccaactataccaaggaaggccctgaggggaatgacatccgccggaccaatgtgccagacatccgcgtgggctaccgctacgagaccctgtgccaggagctggcgctcatcacgcaggcagtccagagtgagatgctggagaccattccagaggaggcgggtatcaccatgagcccagggcctcaatgakcctggtccatgaagtgcccaccacatcgcagcacttttaccacgttttgtcctcagaccccgcccatgctgtgtggtctctgcatgtctccattcttctctgtctctgtcttgcatgtctcctaccatgtcactgtccctgggccacccagtgaaagcaaagcctgggaatctgctcattgttgtttgggctcaggtattgagcctgatggcccaggtattgagggcctcccctgctggtggccctgtcctgggatcctcagaagcctgactgtcctatgggcttctccagtgtccacaggggcttgggatggttgtggggggctggcccctctagcctttccggtccttcctgggcaaatctaagccttggccagggccgaagtttaggcccctgtcttgttcatgtagccgaggggcaggcgggggayctctacacctctgctgtgggcacggggctgctgagggtctgtggaactccagcagctctgcactgggtagagctgggcctagagctcagtcacaggcctgggcttcctggcctgagtgggtagacgcaggcggcagaggtgctggaccacatctccgccaagtcactgcccagcagccttctccgtcctgtccccagcccacgtgctccttgggtgtcagcttcctgtgcctctgtgggagagggcagctgccttgtgttatgtctggggccacagttgctgcaaagtcctggatctgccactcaaccccgggagtggtgttcccagtgtggctcccagagctttgaccagattgtgatcccagctggcccctatgttgtgttctggactgaggcctttgctgtgaactgcagtgtttcatacgaaccatctttcctagtgcatgagaaataaagattatttaagtaatgag

SEQ ID NO: 6990 - DNA, 3801 bp, Homo sapiens
tgggaaaacaaaatatccgccggaggagctttgctagagcgttggtcttggtgtcagagagaattcgctttccttttctgtttcccgcggtgtccttaaccaaaggcctcctctcttcacccgccccgaccaaaaggtggcgtctccctgaggaaactccctccccgccaggcagattacgtttacaaagtcctgagaagagaatcgaaacagaaaccaaagtcaggcaaactctgtaagaactgcctgacagaaagctggactcaaagctcctacccgagtgtgcagcaggatcgccccggtccgggaccccaggcgcacaccgcagagtccaaagtgccgcgcctgccggccgcacctgcctgccgcggccccgcgcgccgccccgctgcccacctgcccgcctgcccacctgcccaggtgcgagtgcagccccgcgcgccggcctgagagccctgtggacaacctcgtcattgtcaggcacagagcggtagaccctgcttctctaagtgggcagcggacagcggcacgcacatttcacctgtcccgcagacaacagcaccatctgcttgggagaaccctctcccttctctgagaaagaaagatgtcgaatgggtattccacagacgagaatttccgctatctcatctcgtgcttcagggccagggtgaaaatgtacatccaggtggagcctgtgctggactacctgacctttctgcctgcagaggtgaaggagcagattcagaggacagtcgccacctccgggaacatgcaggcagttgaactgctgctgagcaccttggagaagggagtctggcaccttggttggactcgggaattcgtggaggccctccggagaaccggcagccctctggccgcccgctacatgaaccctgagctcacggacttgccctctccatcgtttgagaacgctcatgatgaatatctccaactgctgaacctccttcagcccactctggtggacaagcttctagttagagacgtcttggataagtgcatggaggaggaactgttgacaattgaagacagaaaccggattgctgctgcagaaaacaatggaaatgaatcaggtgtaagagagctactaaaaaggattgtgcagaaagaaaactggttctctgcatttctgaatgttcttcgtcaaacaggaaacaatgaacttgtccaagagttaacaggctctgattgctcagaaagcaatgcagagattgagaatttatcacaagttgatggtcctcaagtggaagagcaacttctttcaaccacagttcagccaaatctggagaaggaggtctggggcatggagaataactcatcagaatcatcttttgcagattcttctgtagtttcagaatcagacacaagtttggcagaaggaagtgtcagctgcttagatgaaagtmttggacataacagcaacatgggcagtgattcaggcaccatgggaagtgattcagatgaagagaatgtggcagcaagagcatccccggagccagaactccagctcaggccttaccaaatggaagttgcccagccagccttggaagggaagaatatcatcatctgcctccctacagggagtggaaaaaccagagtggctgtttacattgccaaggatcacttagacaagaagaaaaaagcatctgagcctggaaaagttatagttcttgtcaataaggtactgctagttgaacagctcttccgcaaggagttccaaccatttttgaagaaatggtatcgtgttattggattaagtggtgatacccaactgaaaatatcatttccagaagttgtcaagtcctgtgatattattatcagtacagctcaaatccttgaaaactccctcttaaacttggaaaatggagaagatgctggtgttcaattgtcagacttttccctcattatcattgatgaatgtcatcacaccaacaaagaagcagtgtataataacatcatgaggcrttatttgatgcagaagttgaaaaacaatagactcaagaaagaaaacaaaccagtgattccccttcctcagatactgggactaacagcttcacctggtgttggaggggccacsaagcaagccaaagctgaagaacacattttaaaactatgtgccaatcttgatgcatttactattaaaactgttaaagaaaaccttgatcaactgaaaaaccaaatacaggagccatgcaagaagtttgccattgcagatgcaaccagagasgatccatttaaagagaaacttctagaaataatgacaaggattcaaacttattgtcaaatgagtccaatgtcagattttggaactcaaccctatgaacaatgggccattcaaatggaaaaaaaagctgcaaaagaaggaaatcgcaaagaacgtgtttgtgcagaacatttgaggaagtacaatgaggccctacaaattaatgacacaattcgaatgatagatgcgtatactcatcttkaaactttctataatgaagagaaagataagaagtttgcagtcatagaagatgatagtgatgagggtggtgatgatgagtattgtgatggtgatgaagatgaggatgatttaaagaaacctttgaaactggatgaaacagatagatttctcatgactttattttttgaaaacaataaaatgttgaaaaggctggctgaaaacccagaatatgaaaatgaaaagctgaccaaattaagaaataccataatggagcaatatactaggactgaggaatcagcacgaggaataatctttacaaaaacacgacagagtgcatatgcgctttcccagtggattactgaaaatgaaaaatttgctgaagtaggagtcaaagcccaccatctgattggagctggacacagcagtgagttcaaacccatgacacagaatgaacaaaaagaagtcattagtaaatttcgcactggaaaaataaatctgcttatcgctaccacagtggcagaagaaggtctggatattaaagaatgtaacattgttatccgttatggtctcgtcaccaatgaaatagccatggtccaggcccgtggtcgagccagagctgatgagagcacctacgtcctggttgctcacagtggttcaggagttatcgaacrtgagacagttaatgatttccgagagaagatgatgtataaagctatacattgtgttcaaaatatgaaaccagaggagtatgctcataagattttggaattacagatgcaaagtataatggaaaagaaaatgaaaaccaagagaaatattgccaagcattacaagaataacccatcactaataactttcctttgcaaaaactgcagtgtgctagcctgttctggggaagatatccatgtarttgagaaaatgcatcacgtcaatatgaccccagaattcaaggaactttacattgtaagagaaaacaaarcactgcaaaagaagtgtgccgactatcaaataaatggtgaaatcatctgcaaatgtggccaggcttggggaacaatgatggtgcacaaaggcttagatttgccttgtctcaaaataaggaattttgtagtggttttcaaaaataattcaacaaagaaacaatacaaaaagtgggtagaattacctatcacatttcccaatcttgactattcagaatgctgtttatttagtgatgaggattagcacttrattgaagattcttttaaaatactatcagttaaacatttaatatgattatgattaatgtattcattatgctacagaactgacataagaatcaataaaatgattgttttactctg

SEQ ID NO: 6991 - DNA, 4522 bp, Homo sapiens
tgttcgctggctgttccgagaatcagtccgsgtcacgttggtgcctctcctttcctgttctgattggttgcttacgtgagcgtgactactttcttgcctcatgattggctgaaatcagtagcgtcatcggcggccgggagggcggagggacgagggaagtcggcgagagggagactgggktgggggaggggttcaggcctgttccccgcggctgcggcagcaccagggccggccgccaccgcctctagaacgcggaggaggtgggtcctgggaagcgggatgtccatcgctccagcttggtggtgaatgctgaggagagtcactgttgctgcagtctgtgccacccggaggaagttgtgtgaggccgggcgggagctcgcggcgctctggggaatcgaaacgcggggtcggtgcgaagactctgctgctgccagaccctttcctattctggccatgcctggaaggaacaaggcgaagtctacctgcagctgccctgacctgcagcccaatggacaggatctgggcgagaacagccgggttgcccgtctaggagcggatgaatctgaggaagagggacggagggggtctctcagtaatgctggggaccctgagatcgtcaagtctcccagcgaccccaagcaataccgatacatcaaattacagaatggcttgcaggcacttctgatttcagacctaagtaatatggaaggtaaaacaggaaatacaacagatgatgaagaagaagargaggwggwggaagaagaagaagatgatgatgaagattctggagctgaaatagaagatgaygatgaagagggttttgatgatgaagatgagtttgatgatgaacatgatgatgatcttgatactgaggataatgaattggaagaattagaagagagagcagaagctagaaaaaaaactactgaaaaacagcaattgcagagcctgtttttgctgtggtcaaagctgactgatagactgtggtttaagtcaacttattcaaaaatgtcttcaaccctgctggtcgagacaagaaatctttatggggtagttggagctgaaagcaggtctgcacctgttcagcatttggcaggatggcaagcggaggagcagcagggtgaaactgacacagttctgtctgcagcggctctttgtgttggagttgggagtttcgctgatccagatgacctgccggggctggcacactttttggagcacatggtattcatgggtagtttgaaatatccagatgagaatggatttgatgccttcctgaagaagcatgggggtagtgataatgcctcaactgattgtgaacgcactgtctttcagtttgatgtccagaggaagtacttcaaggaagctcttgatagatgggcgcagttcttcatccacccactaatgatcagagatgcaattgaccgtgaagttgaagctgttgatagtgaatatcaacttgcaaggccttctgatgcaaacagaaaggaaatgttgtttggaagccttgctagacctggmcatcctatgggaaaatttttttggggaaatgctgagacgctcaagcatgagccaagaaagaataatattgatacacatgctagattgagagaattctggatgcgttactactcttctcattacatgactttagtggttcaatccaaagaaacactggatactttggaaaagtgggtgactgaaatcttctctcagataccaaacaatgggttacccagaccaaactttggccatttaacggatccatttgacacaccagcatttaacaaactttatagagttgttccaatcagaaaaattcatgctctgaccatcacatgggcacttcctcctcaacagcaacattacagggtgaagccacttcattatatatcctggctggttggacatgaaggcaaaggcagcattctttctttccttaggaaaaagcaatgctgggctcttgcactgtttggtggaaatggtgagacaggatttgagcaaaattctacttattcagtgttcagcatttctattacattgactgatgagggttatgaacatttttatgaggttgcttacactgtctttcagtatttaaaaatgctgcagaagctaggcccagaaaaaagaatttttgaagagattcggaaaattgaggataatgaatttcattaccaagaacagacagatccagttgagtatgtggaaaacatgtgtgagaacatgcagctgtacccattgcaggacattctcactggagatcagcttctttttgaatacaagccagaagtcattggtgaagccttgaatcagctagttcctcaaaaagcaaatcttgttttactgtctggtgctaatgagggaaaatgtgacctcaaggagaaatggtttggaactcaatatagtatagaagatattgaaaactcttgggctgaactgtggaatagtaatttcgaattaaatccagatcttcatcttccagctgaaaacaagtacatagccacggactttacgttgaaggctttcgattgcccggaaacagaatacccagttaaaattgtgaatactccacaaggttgcctgtggtataagaaagacaacaaattcaaaatccccaaagcatatatacgtttccatctaatttcaccgttgatacagaaatctgcagcaaatgtggtcctctttgatatctttgtcaatatccttacgcataaccttgcggaaccagcttatgaagcagatgtggcacagctggagtataaactggtagctggagaacatggtttaattattcgagtgaaaggatttaaccacaaactacctctactrtttcagctcattattgactacttagctgagttcaattccacaccagctgtctttacaatgataactgagcagttgaagaagacctactttaacatcctcatcaagccygagactttggccaaagatgtacggcttttaatcytggaatatgcccgttggtctatgattgacaagtmccaggctttgatggacggcctttcccttgagtctctgctgagcttcgtcaaagaattcaaatcccagctctttgtggagggcctggtacaagggaatgtcacaagcacagaatctatggatttcctgaaatatgttgttgacaaaytaaacttcaagcctctggagcaggagatgcctgtkcagttccaggtggtagagctgcccagtggccaccatctatgcaaagtgaaagctctgaacaagggtgatgccaactctgaagtcactgtgtactaccaggtcagtaccaggagtctaagagaatatacgcttatggagctgcttgtgatgcacatggaagaaccttgttttgacttccttcgaaccaagcagacccttgggtaccatgtctaccctacctgtaggaacacatccgggattctaggattttctgtcactgtggggactcaggcaaccaaatacaattctgaagttgttgataagaagatagaagagtttctttctagctttgaggagaagattgagaacctcactgaagaggcattcaacacccaggtcacagctctcatcaagctgaaggagtgtgaggatacccaccttggggaggaggtggataggaactggaatgaagtggttacacagcagtacctctttgaccgccttgcccacgagattgaagcactgaagtcattctcaaaatcagacctggtcaactggttcaaggcccatagagggccaggaagtaaaatgctcagcgttcatgttgttggatatgggaagtatgaactggaagaggatggtaccccttctagtgaggattcaaattcttcttgtgaagtgatgcagctgacctacctgccaacctctcctctgctggcagattgtatcatccccattactgatatcagggctttcacaacaacactcaaccttctcccctaccataaaatagtcaaataaataaactgcagtcacgttggcctgaagcaatgtgtattttaaaatgtgtktgtttgtattttatggagttagttatactactgccttagggcttccattgaagttttgcactggcatcatagcatttgatttactttttatcctttgttgagactaataaacccagggttactgtaggagctggcaaaggaaaattagcagaatgggccaagcgagaccagaaagcctgcagcagcactttgagaagccctggcctgtgtcctctcagactgagaatctacttcttgaaaggccttacgtaaccagtatattgaataactaactaaatgctaggtactaatacctgtttttttaatgtatttttaaataaaaaagatgatagatagatagatagatatagttctgtatttcccttcagaatgagccatctgctgctgtggcattcattttattctatctatctatctatttttgttcactgtggggtggggatctataaatacacactcttcccaaaccctctaaggcaataaaacatttttggataaaatgt

SEQ ID NO: 6992 - DNA, 4519 bp, Homo sapiens
tgttcgctggctgttccgagaatcagtccgsgtcacgttggtgcctctcctttcctgttctgattggttgcttacgtgagcgtgactactttcttgcctcatgattggctgaaatcagtagcgtcatcggcggccgggagggcggagggacgagggaagtcggcgagagggagactgggktgggggaggggttcaggcctgttccccgcggctgcggcagcaccagggccggccgccaccgcctctagaacgcggaggaggtgggtcctgggaagcgggatgtccatcgctccagcttggtggtgaatgctgaggagagtcactgttgctgcagtctgtgccacccggaggaagttgtgtgaggccgggcgggagctcgcggcgctctggggaatcgaaacgcggggtcggtgcgaagactctgctgctgccagaccctttcctattctggccatgcctggaaggaacaaggcgaagtctacctgcagctgccctgacctgcagcccaatggacaggatctgggcgagaacagccgggttgcccgtctaggagcggatgaatctgaggaagagggacggagggggtctctcagtaatgctggggaccctgagatcgtcaagtctcccagcgaccccaagcaataccgatacatcaaattacagaatggcttgcaggcacttctgatttcagacctaagtaatatggaaggtaaaacaggaaatacaacagatgatgaagaagaagargaggwggwggaagaagaagaagatgatgatgaagattctggagctgaaatagaagatgaygatgaagagggttttgatgatgaagatgagtttgatgatgaacatgatgatgatcttgatactgaggataatgaattggaagaattagaagagagagcagaagctagaaaaaaaactactgaaaaacagcaattgcagagcctgtttttgctgtggtcaaagctgactgatagactgtggtttaagtcaacttattcaaaaatgtcttcaaccctgctggtcgagacaagaaatctttatggggtagttggagctgaaagcaggtctgcacctgttcagcatttggcaggatggcaagcggaggagcagcagggtgaaactgacacagttctgtctgcagcggctctttgtgttggagttgggagtttcgctgatccagatgacctgccggggctggcacactttttggagcacatggtattcatgggtagtttgaaatatccagatgagaatggatttgatgccttcctgaagaagcatgggggtagtgataatgcctcaactgattgtgaacgcactgtctttcagtttgatgtccagaggaagtacttcaaggaagctcttgatagatgggcgcagttcttcatccacccactaatgatcagagatgcaattgaccgtgaagttgaagctgttgatagtgaatatcaacttgcaaggccttctgatgcaaacagaaaggaaatgttgtttggaagccttgctagacctggmcatcctatgggaaaatttttttggggaaatgctgagacgctcaagcatgagccaagaaagaataatattgatacacatgctagattgagagaattctggatgcgttactactcttctcattacatgactttagtggttcaatccaaagaaacactggatactttggaaaagtgggtgactgaaatcttctctcagataccaaacaatgggttacccagaccaaactttggccatttaacggatccatttgacacaccagcatttaacaaactttatagagttgttccaatcagaaaaattcatgctctgaccatcacatgggcacttcctcctcaacagcaacattacagggtgaagccacttcattatatatcctggctggttggacatgaaggcaaaggcagcattctttctttccttaggaaaaaatgctgggctcttgcactgtttggtggaaatggtgagacaggatttgagcaaaattctacttattcagtgttcagcatttctattacattgactgatgagggttatgaacatttttatgaggttgcttacactgtctttcagtatttaaaaatgctgcagaagctaggcccagaaaaaagaatttttgaagagattcggaaaattgaggataatgaatttcattaccaagaacagacagatccagttgagtatgtggaaaacatgtgtgagaacatgcagctgtacccattgcaggacattctcactggagatcagcttctttttgaatacaagccagaagtcattggtgaagccttgaatcagctagttcctcaaaaagcaaatcttgttttactgtctggtgctaatgagggaaaatgtgacctcaaggagaaatggtttggaactcaatatagtatagaagatattgaaaactcttgggctgaactgtggaatagtaatttcgaattaaatccagatcttcatcttccagctgaaaacaagtacatagccacggactttacgttgaaggctttcgattgcccggaaacagaatacccagttaaaattgtgaatactccacaaggttgcctgtggtataagaaagacaacaaattcaaaatccccaaagcatatatacgtttccatctaatttcaccgttgatacagaaatctgcagcaaatgtggtcctctttgatatctttgtcaatatccttacgcataaccttgcggaaccagcttatgaagcagatgtggcacagctggagtataaactggtagctggagaacatggtttaattattcgagtgaaaggatttaaccacaaactacctctactrtttcagctcattattgactacttagctgagttcaattccacaccagctgtctttacaatgataactgagcagttgaagaagacctactttaacatcctcatcaagccygagactttggccaaagatgtacggcttttaatcytggaatatgcccgttggtctatgattgacaagtmccaggctttgatggacggcctttcccttgagtctctgctgagcttcgtcaaagaattcaaatcccagctctttgtggagggcctggtacaagggaatgtcacaagcacagaatctatggatttcctgaaatatgttgttgacaaaytaaacttcaagcctctggagcaggagatgcctgtkcagttccaggtggtagagctgcccagtggccaccatctatgcaaagtgaaagctctgaacaagggtgatgccaactctgaagtcactgtgtactaccagtcaggtaccaggagtctaagagaatatacgcttatggagctgcttgtgatgcacatggaagaaccttgttttgacttccttcgaaccaagcagacccttgggtaccatgtctaccctacctgtaggaacacatccgggattctaggattttctgtcactgtggggactcaggcaaccaaatacaattctgaagttgttgataagaagatagaagagtttctttctagctttgaggagaagattgagaacctcactgaagaggcattcaacacccaggtcacagctctcatcaagctgaaggagtgtgaggatacccaccttggggaggaggtggataggaactggaatgaagtggttacacagcagtacctctttgaccgccttgcccacgagattgaagcactgaagtcattctcaaaatcagacctggtcaactggttcaaggcccatagagggccaggaagtaaaatgctcagcgttcatgttgttggatatgggaagtatgaactggaagaggatggtaccccttctagtgaggattcaaattcttcttgtgaagtgatgcagctgacctacctgccaacctctcctctgctggcagattgtatcatccccattactgatatcagggctttcacaacaacactcaaccttctcccctaccataaaatagtcaaataaataaactgcagtcacgttggcctgaagcaatgtgtattttaaaatgtgtktgtttgtattttatggagttagttatactactgccttagggcttccattgaagttttgcactggcatcatagcatttgatttactttttatcctttgttgagactaataaacccagggttactgtaggagctggcaaaggaaaattagcagaatgggccaagcgagaccagaaagcctgcagcagcactttgagaagccctggcctgtgtcctctcagactgagaatctacttcttgaaaggccttacgtaaccagtatattgaataactaactaaatgctaggtactaatacctgtttttttaatgtatttttaaataaaaaagatgatagatagatagatagatatagttctgtatttcccttcagaatgagccatctgctgctgtggcattcattttattctatctatctatctatttttgttcactgtggggtggggatctataaatacacactcttcccaaaccctctaaggcaataaaacatttttggataaaatgt

SEQ ID NO: 6993 - DNA, 4318 bp, Homo sapiens
tgttcgctggctgttccgagaatcagtccgsgtcacgttggtgcctctcctttcctgttctgattggttgcttacgtgagcgtgactactttcttgcctcatgattggctgaaatcagtagcgtcatcggcggccgggagggcggagggacgagggaagtcggcgagagggagactgggktgggggaggggttcaggcctgttccccgcggctgcggcagcaccagggccggccgccaccgcctctagaacgcggaggaggtgggtcctgggaagcgggatgtccatcgctccagcttggtggtgaatgctgaggagagtcactgttgctgcagtctgtgccacccggaggaagttgtgtgaggccgggcgggagctcgcggcgctctggggaatcgaaacgcggggtcggtgcgaagactctgctgctgccagaccctttcctattctggccatgcctggaaggaacaaggcgaagtctacctgcagctgccctgacctgcagcccaatggacaggatctgggcgagaacagccgggttgcccgtctaggagcggatgaatctgaggaagagggacggagggggtctctcagtaatgctggggaccctgagatcgtcaagtctcccagcgaccccaagcaataccgatacatcaaattacagaatggcttgcaggcacttctgatttcagacctaagtaatatggaaggtaaaacaggaaatacaacagatgatgaagaagaagargaggwggwggaagaagaagaagatgatgatgaagattctggagctgaaatagaagatgaygatgaagagggttttgatgatgaagatgagtttgatgatgaacatgatgatgatcttgatactgaggataatgaattggaagaattagaagagagagcagaagctagaaaaaaaactactgaaaaacagtctgcagcggctctttgtgttggagttgggagtttcgctgatccagatgacctgccggggctggcacactttttggagcacatggtattcatgggtagtttgaaatatccagatgagaatggatttgatgccttcctgaagaagcatgggggtagtgataatgcctcaactgattgtgaacgcactgtctttcagtttgatgtccagaggaagtacttcaaggaagctcttgatagatgggcgcagttcttcatccacccactaatgatcagagatgcaattgaccgtgaagttgaagctgttgatagtgaatatcaacttgcaaggccttctgatgcaaacagaaaggaaatgttgtttggaagccttgctagacctggmcatcctatgggaaaatttttttggggaaatgctgagacgctcaagcatgagccaagaaagaataatattgatacacatgctagattgagagaattctggatgcgttactactcttctcattacatgactttagtggttcaatccaaagaaacactggatactttggaaaagtgggtgactgaaatcttctctcagataccaaacaatgggttacccagaccaaactttggccatttaacggatccatttgacacaccagcatttaacaaactttatagagttgttccaatcagaaaaattcatgctctgaccatcacatgggcacttcctcctcaacagcaacattacagggtgaagccacttcattatatatcctggctggttggacatgaaggcaaaggcagcattctttctttccttaggaaaaagcaatgctgggctcttgcactgtttggtggaaatggtgagacaggatttgagcaaaattctacttattcagtgttcagcatttctattacattgactgatgagggttatgaacatttttatgaggttgcttacactgtctttcagtatttaaaaatgctgcagaagctaggcccagaaaaaagaatttttgaagagattcggaaaattgaggataatgaatttcattaccaagaacagacagatccagttgagtatgtggaaaacatgtgtgagaacatgcagctgtacccattgcaggacattctcactggagatcagcttctttttgaatacaagccagaagtcattggtgaagccttgaatcagctagttcctcaaaaagcaaatcttgttttactgtctggtgctaatgagggaaaatgtgacctcaaggagaaatggtttggaactcaatatagtatagaagatattgaaaactcttgggctgaactgtggaatagtaatttcgaattaaatccagatcttcatcttccagctgaaaacaagtacatagccacggactttacgttgaaggctttcgattgcccggaaacagaatacccagttaaaattgtgaatactccacaaggttgcctgtggtataagaaagacaacaaattcaaaatccccaaagcatatatacgtttccatctaatttcaccgttgatacagaaatctgcagcaaatgtggtcctctttgatatctttgtcaatatccttacgcataaccttgcggaaccagcttatgaagcagatgtggcacagctggagtataaactggtagctggagaacatggtttaattattcgagtgaaaggatttaaccacaaactacctctactrtttcagctcattattgactacttagctgagttcaattccacaccagctgtctttacaatgataactgagcagttgaagaagacctactttaacatcctcatcaagccygagactttggccaaagatgtacggcttttaatcytggaatatgcccgttggtctatgattgacaagtmccaggctttgatggacggcctttcccttgagtctctgctgagcttcgtcaaagaattcaaatcccagctctttgtggagggcctggtacaagggaatgtcacaagcacagaatctatggatttcctgaaatatgttgttgacaaaytaaacttcaagcctctggagcaggagatgcctgtkcagttccaggtggtagagctgcccagtggccaccatctatgcaaagtgaaagctctgaacaagggtgatgccaactctgaagtcactgtgtactaccaggtcagtaccaggagtctaagagaatatacgcttatggagctgcttgtgatgcacatggaagaaccttgttttgacttccttcgaaccaagcagacccttgggtaccatgtctaccctacctgtaggaacacatccgggattctaggattttctgtcactgtggggactcaggcaaccaaatacaattctgaagttgttgataagaagatagaagagtttctttctagctttgaggagaagattgagaacctcactgaagaggcattcaacacccaggtcacagctctcatcaagctgaaggagtgtgaggatacccaccttggggaggaggtggataggaactggaatgaagtggttacacagcagtacctctttgaccgccttgcccacgagattgaagcactgaagtcattctcaaaatcagacctggtcaactggttcaaggcccatagagggccaggaagtaaaatgctcagcgttcatgttgttggatatgggaagtatgaactggaagaggatggtaccccttctagtgaggattcaaattcttcttgtgaagtgatgcagctgacctacctgccaacctctcctctgctggcagattgtatcatccccattactgatatcagggctttcacaacaacactcaaccttctcccctaccataaaatagtcaaataaataaactgcagtcacgttggcctgaagcaatgtgtattttaaaatgtgtktgtttgtattttatggagttagttatactactgccttagggcttccattgaagttttgcactggcatcatagcatttgatttactttttatcctttgttgagactaataaacccagggttactgtaggagctggcaaaggaaaattagcagaatgggccaagcgagaccagaaagcctgcagcagcactttgagaagccctggcctgtgtcctctcagactgagaatctacttcttgaaaggccttacgtaaccagtatattgaataactaactaaatgctaggtactaatacctgtttttttaatgtatttttaaataaaaaagatgatagatagatagatagatatagttctgtatttcccttcagaatgagccatctgctgctgtggcattcattttattctatctatctatctatttttgttcactgtggggtggggatctataaatacacactcttcccaaaccctctaaggcaataaaacatttttggataaaatgt

SEQ ID NO: 6994 - DNA, 4315 bp, Homo sapiens
tgttcgctggctgttccgagaatcagtccgsgtcacgttggtgcctctcctttcctgttctgattggttgcttacgtgagcgtgactactttcttgcctcatgattggctgaaatcagtagcgtcatcggcggccgggagggcggagggacgagggaagtcggcgagagggagactgggktgggggaggggttcaggcctgttccccgcggctgcggcagcaccagggccggccgccaccgcctctagaacgcggaggaggtgggtcctgggaagcgggatgtccatcgctccagcttggtggtgaatgctgaggagagtcactgttgctgcagtctgtgccacccggaggaagttgtgtgaggccgggcgggagctcgcggcgctctggggaatcgaaacgcggggtcggtgcgaagactctgctgctgccagaccctttcctattctggccatgcctggaaggaacaaggcgaagtctacctgcagctgccctgacctgcagcccaatggacaggatctgggcgagaacagccgggttgcccgtctaggagcggatgaatctgaggaagagggacggagggggtctctcagtaatgctggggaccctgagatcgtcaagtctcccagcgaccccaagcaataccgatacatcaaattacagaatggcttgcaggcacttctgatttcagacctaagtaatatggaaggtaaaacaggaaatacaacagatgatgaagaagaagargaggwggwggaagaagaagaagatgatgatgaagattctggagctgaaatagaagatgaygatgaagagggttttgatgatgaagatgagtttgatgatgaacatgatgatgatcttgatactgaggataatgaattggaagaattagaagagagagcagaagctagaaaaaaaactactgaaaaacagtctgcagcggctctttgtgttggagttgggagtttcgctgatccagatgacctgccggggctggcacactttttggagcacatggtattcatgggtagtttgaaatatccagatgagaatggatttgatgccttcctgaagaagcatgggggtagtgataatgcctcaactgattgtgaacgcactgtctttcagtttgatgtccagaggaagtacttcaaggaagctcttgatagatgggcgcagttcttcatccacccactaatgatcagagatgcaattgaccgtgaagttgaagctgttgatagtgaatatcaacttgcaaggccttctgatgcaaacagaaaggaaatgttgtttggaagccttgctagacctggmcatcctatgggaaaatttttttggggaaatgctgagacgctcaagcatgagccaagaaagaataatattgatacacatgctagattgagagaattctggatgcgttactactcttctcattacatgactttagtggttcaatccaaagaaacactggatactttggaaaagtgggtgactgaaatcttctctcagataccaaacaatgggttacccagaccaaactttggccatttaacggatccatttgacacaccagcatttaacaaactttatagagttgttccaatcagaaaaattcatgctctgaccatcacatgggcacttcctcctcaacagcaacattacagggtgaagccacttcattatatatcctggctggttggacatgaaggcaaaggcagcattctttctttccttaggaaaaaatgctgggctcttgcactgtttggtggaaatggtgagacaggatttgagcaaaattctacttattcagtgttcagcatttctattacattgactgatgagggttatgaacatttttatgaggttgcttacactgtctttcagtatttaaaaatgctgcagaagctaggcccagaaaaaagaatttttgaagagattcggaaaattgaggataatgaatttcattaccaagaacagacagatccagttgagtatgtggaaaacatgtgtgagaacatgcagctgtacccattgcaggacattctcactggagatcagcttctttttgaatacaagccagaagtcattggtgaagccttgaatcagctagttcctcaaaaagcaaatcttgttttactgtctggtgctaatgagggaaaatgtgacctcaaggagaaatggtttggaactcaatatagtatagaagatattgaaaactcttgggctgaactgtggaatagtaatttcgaattaaatccagatcttcatcttccagctgaaaacaagtacatagccacggactttacgttgaaggctttcgattgcccggaaacagaatacccagttaaaattgtgaatactccacaaggttgcctgtggtataagaaagacaacaaattcaaaatccccaaagcatatatacgtttccatctaatttcaccgttgatacagaaatctgcagcaaatgtggtcctctttgatatctttgtcaatatccttacgcataaccttgcggaaccagcttatgaagcagatgtggcacagctggagtataaactggtagctggagaacatggtttaattattcgagtgaaaggatttaaccacaaactacctctactrtttcagctcattattgactacttagctgagttcaattccacaccagctgtctttacaatgataactgagcagttgaagaagacctactttaacatcctcatcaagccygagactttggccaaagatgtacggcttttaatcytggaatatgcccgttggtctatgattgacaagtmccaggctttgatggacggcctttcccttgagtctctgctgagcttcgtcaaagaattcaaatcccagctctttgtggagggcctggtacaagggaatgtcacaagcacagaatctatggatttcctgaaatatgttgttgacaaaytaaacttcaagcctctggagcaggagatgcctgtkcagttccaggtggtagagctgcccagtggccaccatctatgcaaagtgaaagctctgaacaagggtgatgccaactctgaagtcactgtgtactaccagtcaggtaccaggagtctaagagaatatacgcttatggagctgcttgtgatgcacatggaagaaccttgttttgacttccttcgaaccaagcagacccttgggtaccatgtctaccctacctgtaggaacacatccgggattctaggattttctgtcactgtggggactcaggcaaccaaatacaattctgaagttgttgataagaagatagaagagtttctttctagctttgaggagaagattgagaacctcactgaagaggcattcaacacccaggtcacagctctcatcaagctgaaggagtgtgaggatacccaccttggggaggaggtggataggaactggaatgaagtggttacacagcagtacctctttgaccgccttgcccacgagattgaagcactgaagtcattctcaaaatcagacctggtcaactggttcaaggcccatagagggccaggaagtaaaatgctcagcgttcatgttgttggatatgggaagtatgaactggaagaggatggtaccccttctagtgaggattcaaattcttcttgtgaagtgatgcagctgacctacctgccaacctctcctctgctggcagattgtatcatccccattactgatatcagggctttcacaacaacactcaaccttctcccctaccataaaatagtcaaataaataaactgcagtcacgttggcctgaagcaatgtgtattttaaaatgtgtktgtttgtattttatggagttagttatactactgccttagggcttccattgaagttttgcactggcatcatagcatttgatttactttttatcctttgttgagactaataaacccagggttactgtaggagctggcaaaggaaaattagcagaatgggccaagcgagaccagaaagcctgcagcagcactttgagaagccctggcctgtgtcctctcagactgagaatctacttcttgaaaggccttacgtaaccagtatattgaataactaactaaatgctaggtactaatacctgtttttttaatgtatttttaaataaaaaagatgatagatagatagatagatatagttctgtatttcccttcagaatgagccatctgctgctgtggcattcattttattctatctatctatctatttttgttcactgtggggtggggatctataaatacacactcttcccaaaccctctaaggcaataaaacatttttggataaaatgt

SEQ ID NO: 6995 - DNA, 859 bp, Homo sapiens
tgttcgctggctgttccgagaatcagtccgsgtcacgttggtgcctctcctttcctgttctgattggttgcttacgtgagcgtgactactttcttgcctcatgattggctgaaatcagtagcgtcatcggcggccgggagggcggagggacgagggaagtcggcgagagggagactgggktgggggaggggttcaggcctgttccccgcggctgcggcagcaccagggccggccgccaccgcctctagaacgcggaggaggtgggtcctgggaagcgggatgtccatcgctccagcttggtggtgaatgctgaggagagtcactgttgctgcagtctgtgccacccggaggaagttgtgtgaggccgggcgggagctcgcggcgctctggggaatcgaaacgcggggtcggtgcgaagactctgctgctgccagaccctttcctattctggccatgcctggaaggaacaaggcgaagtctacctgcagctgccctgacctgcagcccaatggacaggatctgggcgagaacagccgggttgcccgtctaggagcggatgaatctgaggaagagggacggagggggtctctcagtaatgctggggaccctgagatcgtcaagtctcccagcgaccccaagcaataccgagagatgatctcactgtgtcacccaggctgtactgcagtggtgccatcatagctcactgcagcatcgaacttctaggctcaagtgatcctcctgcctgtgccgcccaaagtgttggaattacaggcatgagccactgcttctagatggatgtcttttattggcgggggggaaagccctatatacgtatatatgtattttttactaattctaa

SEQ ID NO: 6996 - DNA, 3517 bp, Homo sapiens
acgcgggtcacgtgagggcgcggcgcggcagcagctccggcggccgagacgggggcggcggccgcgcgggtctggcgggaccggtttggaagactttgccggcctgcagattggccttaagagaaggacggagccacatactgctgacggcccagaactggcagagagaaggttgccatggctgctgttgacagtttctacctcttgtacagggaaatcgccaggtcttgcaattgctatatggaagctctagctttggttggagcctggtatacggccagaaaaagcatcactgtcatctgtgacttttacagcctgatcaggctgcattttatcccccgcctggggagcagagcagacttgatcaagcagtatggaagatgggccgttgtcagcggtgcaacagatgggattggaaaagcctaygctgaagagttagcaagccgaggtctcaatataatcctgattagtcggaacgaggagaagttgcaggttgttgctaaagacatagccgacacgtacaaagtggaaactgatattatagttgcggacttcagcagcggtcgtgagatctaccttccaattcgagaagccctgaaggacaaagacgttggcatcttggtaaataacgtgggtgtgttttatccctacccgcagtatttcactcagctgtccgaggacaagctctgggacatcataaatgtgaacattgccgccgctagtttgatggtccatgttgtgttaccgggaatggtggagagaaagaaaggtgccatcgtcacgatctcttctggctcctgctgcaaacccactcctcagctggctgcattttctgcttctaaggcttatttagaccacttcagcagagccttgcaatatgaatatgcctctaaaggaatctttgtacagagtctaatccctttctatgtagccaccagcatgacagcacccagcaactttctgcacaggtgctcgtggttggtgccttcgccaaaagtctatgcacatcatgctgtttctactcttgggatttccaaaaggaccacaggatattggtcccattctattcagtttctttttgcacagtatatgcctgaatggctctgggtgtggggagcaaatattctcaaccgttcactacgtaaggaagccttatsctgcacagcctgagtctggatggccacttgagaagttttgccaactcctgggaacctcgatattctgacatttggaaaaacayatttaatttatctcctgtgtttcattgctgattattcagcatactgttgattcgtcatttgcaaaacacacataataccgtcagagtgctgtgaaaaaccttaagggtgtgtggatggcacaggatcaataatgcctgaggctgattgacgacatctacatttcagtgctttttccctaagctgtttgaaagttacgcttttctgttgttctagagccacagcagtctaatattgaaatataatatgatttgtcaggtcttataatttcagatgttgttttttaagggaaattgaccatttcactagaggagttgtgctggtttttaaatgtgcatcaagaaagactactgaaaagtattattttgtaactaagattgctggtactattaggaaaaatctgtgtgtattgtatagctctagctgtttgactatctgtaatgaaaatgctgcacttcaactggtatttcattagagaaccgtgtgtgtgcgtgtgtgtggtgcctttgagcaactttatttatggttaccatatttttaaaaagattttttgtcaggrtgacttaacatggactcttatagggtattaaaacaatctagattattccttttcatcctaaataagcctaccaaatttcatgctgttggtttgccatgaatgatattacttcctacattatatttgtgttttttcaaatctgctatggaatgaacttattcctagatttggatatgtaagagaaacctgcagtcatcttttgatttataaggcaattcttgtggataaatagtgatttctcagcctctgacccattttataactgaaatttagccctttagagcttgttatatctggttttcctacgtttttctatgtaatattattccattccagtagcattattgatagaaatagtaagtatttatggaatagtaaaatatggacaaattacgtgtgtgacatatctgtcaawataagttagaagcttattcttggtttgtgtaatgaatttatgtattgtagtgaatacctttactggtgtgaagataattatgcacaaaccctcacaatacgcgttaacattgaaacctgtgaaatgtccttagkttgggtcatataaagccaaccatttttgaggaccatgtacctagtgctttgaaaactstaagtcactatatgaatatgacaatatgtgcacatttaaaattcagagctcggcattgtgatactgatgcagaagctagtagattggttaaaagtctggacttctgtggcatttttttcgtgacgtgataatctatcataagcagacctaagcacagttttatgaacacaattttgcccatgacattgcctacaggatttccagatgtgacttgcactcagaagatcagtggtcaacttcagaagytcttccacgcttagatcatgtcttcagaacttagatgtgaaaatctacacactgggagatgctgtgagccccaaggttttgatggagtttgcttggaatcctcttgacktcatgccacattgacgtgaactttgatgtataataagcagcagcaacttcatgtgaaaatatggtcaggtagttatatgtaaggttacgtggtccagtaatgtcttagattgataaattaggtatggaatccatcagtgttacgtgatgagaataggtgaacacaccttgtcagtgatgatgtaaacttctctccttggcaggacatgggcaaacatgctgattggtgcaaatgtggtgccgagctgtccatagctgcagtgaaagatgaagagcaagaccttctctaggttttctagctttcattaaatgtatttttttccccagagctaatttgaaagttgattggaccactgtggatggggtstcattaagaatgtgggaaataggggccgagtgcggtggctcacacctgtaatcccagcagtttggaaggccagggcaggtggatcgcttgatcccaggaggtcgagaccagcctggggaacacatcctgtctctacaaaaaatacaaaaattagccaggcagggtggtgcatgcctgtagtcccagctacttgggaggctgaggcaggagaattttttgagcccaggatgcagaggttgaagtgagccaagatcgtgccactgcactccagccttgagacagagcgagaccctgtctcaaaaaaaaaaaaagaacgtgggaaatatgaacctttgaaagttaatctgtgaattgaaagtttaacaataaaagtagttgtttgtttcctttgg

SEQ ID NO: 6997 - DNA, 3443 bp, Homo sapiens
gcggccgcgcgggtctggcgggaccggtttggaagactttgccggcctgcaggacggagccacatactgctgacggcccagaactggcagagagaaggttgccatggctgctgttgacagtttctacctcttgtacagggaaatcgccaggtcttgcaattgctatatggaagctctagctttggttggagcctggtatacggccagaaaaagcatcactgtcatctgtgacttttacagcctgatcaggctgcattttatcccccgcctggggagcagagcagacttgatcaagcagtatggaagatgggccgttgtcagcggtgcaacagatgggattggaaaagcctaygctgaagagttagcaagccgaggtctcaatataatcctgattagtcggaacgaggagaagttgcaggttgttgctaaagacatagccgacacgtacaaagtggaaactgatattatagttgcggacttcagcagcggtcgtgagatctaccttccaattcgagaagccctgaaggacaaagacgttggcatcttggtaaataacgtgggtgtgttttatccctacccgcagtatttcactcagctgtccgaggacaagctctgggacatcataaatgtgaacattgccgccgctagtttgatggtccatgttgtgttaccgggaatggtggagagaaagaaaggtgccatcgtcacgatctcttctggctcctgctgcaaacccactcctcagctggctgcattttctgcttctaaggcttatttagaccacttcagcagagccttgcaatatgaatatgcctctaaaggaatctttgtacagagtctaatccctttctatgtagccaccagcatgacagcacccagcaactttctgcacaggtgctcgtggttggtgccttcgccaaaagtctatgcacatcatgctgtttctactcttgggatttccaaaaggaccacaggatattggtcccattctattcagtttctttttgcacagtatatgcctgaatggctctgggtgtggggagcaaatattctcaaccgttcactacgtaaggaagccttatsctgcacagcctgagtctggatggccacttgagaagttttgccaactcctgggaacctcgatattctgacatttggaaaaacayatttaatttatctcctgtgtttcattgctgattattcagcatactgttgattcgtcatttgcaaaacacacataataccgtcagagtgctgtgaaaaaccttaagggtgtgtggatggcacaggatcaataatgcctgaggctgattgacgacatctacatttcagtgctttttccctaagctgtttgaaagttacgcttttctgttgttctagagccacagcagtctaatattgaaatataatatgatttgtcaggtcttataatttcagatgttgttttttaagggaaattgaccatttcactagaggagttgtgctggtttttaaatgtgcatcaagaaagactactgaaaagtattattttgtaactaagattgctggtactattaggaaaaatctgtgtgtattgtatagctctagctgtttgactatctgtaatgaaaatgctgcacttcaactggtatttcattagagaaccgtgtgtgtgcgtgtgtgtggtgcctttgagcaactttatttatggttaccatatttttaaaaagattttttgtcaggrtgacttaacatggactcttatagggtattaaaacaatctagattattccttttcatcctaaataagcctaccaaatttcatgctgttggtttgccatgaatgatattacttcctacattatatttgtgttttttcaaatctgctatggaatgaacttattcctagatttggatatgtaagagaaacctgcagtcatcttttgatttataaggcaattcttgtggataaatagtgatttctcagcctctgacccattttataactgaaatttagccctttagagcttgttatatctggttttcctacgtttttctatgtaatattattccattccagtagcattattgatagaaatagtaagtatttatggaatagtaaaatatggacaaattacgtgtgtgacatatctgtcaawataagttagaagcttattcttggtttgtgtaatgaatttatgtattgtagtgaatacctttactggtgtgaagataattatgcacaaaccctcacaatacgcgttaacattgaaacctgtgaaatgtccttagkttgggtcatataaagccaaccatttttgaggaccatgtacctagtgctttgaaaactstaagtcactatatgaatatgacaatatgtgcacatttaaaattcagagctcggcattgtgatactgatgcagaagctagtagattggttaaaagtctggacttctgtggcatttttttcgtgacgtgataatctatcataagcagacctaagcacagttttatgaacacaattttgcccatgacattgcctacaggatttccagatgtgacttgcactcagaagatcagtggtcaacttcagaagytcttccacgcttagatcatgtcttcagaacttagatgtgaaaatctacacactgggagatgctgtgagccccaaggttttgatggagtttgcttggaatcctcttgacktcatgccacattgacgtgaactttgatgtataataagcagcagcaacttcatgtgaaaatatggtcaggtagttatatgtaaggttacgtggtccagtaatgtcttagattgataaattaggtatggaatccatcagtgttacgtgatgagaataggtgaacacaccttgtcagtgatgatgtaaacttctctccttggcaggacatgggcaaacatgctgattggtgcaaatgtggtgccgagctgtccatagctgcagtgaaagatgaagagcaagaccttctctaggttttctagctttcattaaatgtatttttttccccagagctaatttgaaagttgattggaccactgtggatggggtstcattaagaatgtgggaaataggggccgagtgcggtggctcacacctgtaatcccagcagtttggaaggccagggcaggtggatcgcttgatcccaggaggtcgagaccagcctggggaacacatcctgtctctacaaaaaatacaaaaattagccaggcagggtggtgcatgcctgtagtcccagctacttgggaggctgaggcaggagaattttttgagcccaggatgcagaggttgaagtgagccaagatcgtgccactgcactccagccttgagacagagcgagaccctgtctcaaaaaaaaaaaaagaacgtgggaaatatgaacctttgaaagttaatctgtgaattgaaagtttaacaataaaagtagttgtttgtttcctttgg

SEQ ID NO: 6998 - DNA, 3309 bp, Homo sapiens
gcggccgcgcgggtctggcgggaccggtttggaagactttgccggcctgcaggacggagccacatactgctgacggcccagaactggcagagagaaggttgccatggctgctgttgacagtttctacctcttgtacagggaaatcgccaggtcttgcaattgctatatggaagctctagctttggttggagcctggtatacggccagaaaaagcatcactgtcatctgtgacttttacagcctgatcaggctgcattttatcccccgcctggggagcagagcagacttgatcaagcagtatggaagatgggccgttgtcagcggtgcaacagatgggattggaaaagcctaygctgaagagttagcaagccgaggtctcaatataatcctgattagtcggaacgaggagaagttgcaggttgttgctaaagacatagccgacacgtacaaagtggaaactgatattatagttgcggacttcagcagcggtcgtgagatctaccttccaattcgagaagccctgaaggacaaagacgttggcatcttggtaaataacgtgggtgtgttttatccctacccgcagtatttcactcagctgtccgaggacaagctctgggacatcataaatgtgaacattgccgccgctagtttgatggtccatgttgtgttaccgggaatggtggagagaaagaaaggtgccatcgtcacgatctcttctggctcctgctgcaaacccactcctcagctggctgcattttctgcttctaaggcttatttagaccacttcagcagagccttgcaatatgaatatgcctctaaaggaatctttgtacagagtctaatccctttctatgtagccaccagcatgacagcacccagcaactttctgcacaggtgctcgtggttggtgccttcgccaaaagtctatgcacatcatgctgtttctactcttgggatttccaaaaggaccacaggatattggtcccattctattcagtttctttttgcacagtatatgcctgaatggctctgggtgtggggagcaaatattctcaaccgttcactacgtaaggaagccttatsctgcacagcctgagtctggatggccacttgagaagttttgccaactcctgggaacctcgatattctgacatttggaaaaacayatttaatttatctcctgtgtttcattgctgattattcagcatactgttgattcgtcatttgcaaaacacacataataccgtcagagtgctgtgaaaaaccttaagggtgtgtggatggcacaggatcaataatgcctgaggctgattgacgacatctacatttcagtgctttttccctaagctgtttgaaagttacgcttttctgttgttctagagccacagcagtctaatattgaaatataatatgatttgtcaggtcttataatttcagatgttgttttttaagggaaattgaccatttcactagaggagttgtgctggtttttaaatgtgcatcaagaaagactactgaaaagtattattttgtaactaagattgctggtactattaggaaaaatctgtgtgtattgtatagctctagctgtttgactatctgtaatgaaaatgctgcacttcaactggtatttcattagagaaccgtgtgtgtgcgtgtgtgtggtgcctttgagcaactttatttatggttaccatatttttaaaaagattttttgtcaggrtgacttaacatggactcttatagggtattaaaacaatctagattattccttttcatcctaaataagcctaccaaatttcatgctgttggtttgccatgaatgatattacttcctacattatatttgtgttttttcaaatctgctatggaatgaacttattcctagatttggatatgtaagagaaacctgcagtcatcttttgatttataaggcaattcttgtggataaatagtgatttctcagcctctgacccattttataactgaaatttagccctttagagcttgttatatctggttttcctacgtttttctatgtaatattattccattccagtagcattattgatagaaatagtaagtatttatggaatagtaaaatatggacaaattacgtgtgtgacatatctgtcaawataagttagaagcttattcttggtttgtgtaatgaatttatgtattgtagtgaatacctttactggtgtgaagataattatgcacaaaccctcacaatacgcgttaacattgaaacctgtgaaatgtccttagkttgggtcatataaagccaaccatttttgaggaccatgtacctagtgctttgaaaactstaagtcactatatgaatatgacaatatgtgcacatttaaaattcagagctcggcattgtgatactgatgcagaagctagtagattggttaaaagtctggacttctgtggcatttttttcgtgacgtgataatctatcataagcagacctaagcacagttttatgaacacaattttgcccatgacattgcctacaggatttccagatgtgacttgcactcagaagatcagtggtcaacttcagaagytcttccacgcttagatcatgtcttcagaacttagatgtgaaaatctacacactgggagatgctgtgagccccaaggttttgatggagtttgcttggaatcctcttgacktcatgccacattgacgtgaactttgatgtataataagcagcagcaacttcatgtgaaaatatggtcaggacatgggcaaacatgctgattggtgcaaatgtggtgccgagctgtccatagctgcagtgaaagatgaagagcaagaccttctctaggttttctagctttcattaaatgtatttttttccccagagctaatttgaaagttgattggaccactgtggatggggtstcattaagaatgtgggaaataggggccgagtgcggtggctcacacctgtaatcccagcagtttggaaggccagggcaggtggatcgcttgatcccaggaggtcgagaccagcctggggaacacatcctgtctctacaaaaaatacaaaaattagccaggcagggtggtgcatgcctgtagtcccagctacttgggaggctgaggcaggagaattttttgagcccaggatgcagaggttgaagtgagccaagatcgtgccactgcactccagccttgagacagagcgagaccctgtctcaaaaaaaaaaaaagaacgtgggaaatatgaacctttgaaagttaatctgtgaattgaaagtttaacaataaaagtagttgtttgtttcctttgg

SEQ ID NO: 6999 - DNA, 2174 bp, Homo sapiens
atgcgaggcttcgggccaggcttgacggccaggcgtctcctcccgctgcggttgcccccgcggccgcccgggccccggctggcgagcgggcaggcggccggcgccctggagcgggccatggacgagctgctgcgccgcgcggtgccgccgacgccggcctacgagctgcgcgagaagacaccggcgcccgccgagggtcagtgcgcggacttcgtgagcttctacggtgggctggccgagacggcccagcgggccgaactgctgggccgcctggcgcggggcttcggcgtggaccacggccaggtggcggagcagagcgccggcgtgctccatctgcgccagcagcagcgggaggcggcggtgctgctgcaggccgaggaccggctgcgctacgcgctggtgccgcgctatcgcggcctcttccaccacatcagcaagctggayggcggcgtgcgcttcctggtgcagctgcgggccgacctgctggaggcgcaggccctcaagctggtggaggggccggacgtccgggaaatgaatggggtgctgaaaggaatgctctcagaatggttttcctccgggttcctgaacctagaacgggttacctggcattcaccgtgtgaagtgcttcagaaaatcagtgaggctgaggctgtgcatcctgtaaaaaactggatggacatgaagcgccgcgttgggccctacagaaggtgttacttcttttctcactgttcracccctggggagcccctggtcgttttgcacgtggcactgactggtgacatctccagcaacatccaggcaatcgtgaaggaacatcctccatcagaaacagaagagaagaacaaaatcrctgctgcgatcttttattccatcagcttgacccagcagggactccaaggggtggagctgggaacattcctcataaagcgagtcgtcaaggagttgcagagagagtttcctcaccttggggtgttttcaagtctgtcacctatacctggtttcaccaaatggcttctggggcttctgaactcgcaaacgaaggagcatgggaggaatgaactctttacagattcggaakgtaaggaaatctcggagatcacaggtggccccattaacgagaccctcaagctcctcctcagcagcagcgagtgggtgcagtcggagaagctggtgcgggcgctgcagactccgctgatgaggctgtgcgcctggtacctgtatggagagaagcaccgcggctacgcgctgaaccccgtggccaacttccacctgcagaacggggcggtgctgtggygcatcaactggatggcggatgtgagcctcagaggcatcaccggctcctgcggcctgatggccaactaccgctacttcctggaggagacgggccccaacagcacctcctacctcggctccaagatcatcaaagcctctgagcaggtcctcagcctagtggcccagtttcaraagaacagcaagctctgacagtaaacctctcctaaagcacagggccccggctaagaaaacgatcattttcaggaggggccgggagttatgtatctgaagcagctttccaagcaaagccaaagttgactgtgttcttgtcccgcagccggtccacactgtgaggccaggcctcaacttccctcaccctgggcgtgacatgcacccagtgcaagacggttgtgggtgcgggtgcacacaaatgagtgggttgctgtgctgtctccggaagattctgtcgttgcccttggcctggctccctgcccggggctggtgctgtggtacctacatcttcaggaagctgtgcagcctctgccattgccatcccagggggatctggcatcctcctaaggaccggggcgcgtggcccagataagaataggtgttcctttgygctcataaaacagaatgcggcgatggttgctttagccgtttctcaccmtgcaatgcagagggacaaagggctgtgctacacttcccagttacattctgaagctcataaatgtatgagaaggtttgtgattttgcacaaggtgtgtgtagtaagttaaattgttgaacacaaaaatgttgctgcttgaggcataagttggataataggctttaaatgatcagggattcaggttcataatgaacttcacagtaaagaacacgtttgttctgtaaagcattga

SEQ ID NO: 7000 - DNA, 2152 bp, Homo sapiens
tgacggccaggcgtctcctcccgctgcggttgcccccgcggccgcccgggccccggctggcgagcgggcaggcggccggcgccctggagcgggccatggacgagctgctgcgccgcgcggtgccgccgacgccggcctacgagctgcgcgagaagacaccggcgcccgccgagggtcagtgcgcggacttcgtgagcttctacggtgggctggccgagacggcccagcgggccgaactgctgggccgcctggcgcggggcttcggcgtggaccacggccaggtggcggagcagagcgccggcgtgctccatctgcgccagcagcagcgggaggcggcggtgctgctgcaggccgaggaccggctgcgctacgcgctggtgccgcgctatcgcggcctcttccaccacatcagcaagctggayggcggcgtgcgcttcctggtgcagctgcgggccgacctgctggaggcgcaggccctcaagctggtggaggggccggacgtccgggaaatgaatggggtgctgaaaggaatgctctcagaatggttttcctccgggttcctgaacctagaacgggttacctggcattcaccgtgtgaagtgcttcagaaaatcagtgaggctgaggctgtgcatcctgtaaaaaactggatggacatgaagcgccgcgttgggccctacagaaggtgttacttcttttctcactgttcracccctggggagcccctggtcgttttgcacgtggcactgactggtgacatctccagcaacatccaggcaatcgtgaaggaacatcctccatcagaaacagaagagaagaacaaaatcrctgctgcgatcttttattccatcagcttgacccagcagggactccaaggggtggagctgggaacattcctcataaagcgagtcgtcaaggagttgcagagagagtttcctcaccttggggtgttttcaagtctgtcacctatacctggtttcaccaaatggcttctggggcttctgaactcgcaaacgaaggagcatgggaggaatgaactctttacagattcggaakgtaaggaaatctcggagatcacaggtggccccattaacgagaccctcaagctcctcctcagcagcagcgagtgggtgcagtcggagaagctggtgcgggcgctgcagactccgctgatgaggctgtgcgcctggtacctgtatggagagaagcaccgcggctacgcgctgaaccccgtggccaacttccacctgcagaacggggcggtgctgtggygcatcaactggatggcggatgtgagcctcagaggcatcaccggctcctgcggcctgatggccaactaccgctacttcctggaggagacgggccccaacagcacctcctacctcggctccaagatcatcaaagcctctgagcaggtcctcagcctagtggcccagtttcaraagaacagcaagctctgacagtaaacctctcctaaagcacagggccccggctaagaaaacgatcattttcaggaggggccgggagttatgtatctgaagcagctttccaagcaaagccaaagttgactgtgttcttgtcccgcagccggtccacactgtgaggccaggcctcaacttccctcaccctgggcgtgacatgcacccagtgcaagacggttgtgggtgcgggtgcacacaaatgagtgggttgctgtgctgtctccggaagattctgtcgttgcccttggcctggctccctgcccggggctggtgctgtggtacctacatcttcaggaagctgtgcagcctctgccattgccatcccagggggatctggcatcctcctaaggaccggggcgcgtggcccagataagaataggtgttcctttgygctcataaaacagaatgcggcgatggttgctttagccgtttctcaccmtgcaatgcagagggacaaagggctgtgctacacttcccagttacattctgaagctcataaatgtatgagaaggtttgtgattttgcacaaggtgtgtgtagtaagttaaattgttgaacacaaaaatgttgctgcttgaggcataagttggataataggctttaaatgatcagggattcaggttcataatgaacttcacagtaaagaacacgtttgttctgtaaagcattga

SEQ ID NO: 7001 - DNA, 2198 bp, Homo sapiens
agccactcacctgtccccgtcttccacgccctgagggccgcggctctggaaacggggatacaggagcctggcggcgccgaagcaccckygcaggccaagacggctccccaggccaagacggctccccaggccgcacacagccatgagccaggctgcttgacgggacctgaccccgccaggttcccgtccagtccgcggggtgactccacccacagctggccgcgccrccgctcaggattcccaggagccatgttgtcagaagtcctactggtgtctgctccggggwaagtcatccttcatggagaammtgccgtggtacatggcaaggtagcactggctgtatccttgaacttgagaacattcctccggcttcaaccccacagcaatgggaaagtggacctcarcttacccaacattggtatcaagcgggcctrggatgtggccaggcttcagtcactggacacaagctttctggggtctcactctgttatgcagcctggagtacagtggtgcgaccacagctcactgtttcttcaacctcctgggctcaagcgatcctcctgcctcagccttctgagtagctgggaccacagagcaaggtgatgtcacaacacccacctcagagcaagtggagaagctaaaggaggttgcaggcttgcctgacgactgtgctgtcaccgagcgcctggctgtgctggcctttctttacttatacctgtccatctgccggaagcagagggccctgccgagcctggatatcgtagtgtggtcrgagctgccccccggggcgggcttgggctccagcgccrcctastyggtgtgtctggcagcagccctcctgactgtgtgcgaggagatcccaaacccgctgaaggayggggattgcgtcaacaggtggaccaaggaggatttggagctaattaacaagtgggccttccaaggggagagaatgattcacgggaacccctccggagtggacaatgctgtcagcrcctggggaggagccctccgataccatcaagggaagatttcatccttaaagaggtcgccagctctccagatcctgctgaccaacaccaaagtccctcgcaataycagggcccttgtggctggcgtcagaaacaggctgctcaagttcccagagatmgtggcccccctcctgacctcaatagatgccatctycctggagtgtgagygcgtgctgggagagatgggggaagccccagccccggagcagtacctcgtgctggaagagctcattgacatgamccagcaccatctgaatgccctcggcrtgggccacgcctctctggaccagctctgccaggtgaccagggcccgcrgacttcacagcaagctgactggcgcaggcggtggtggctgtggcatcacactcctcaagccagggctggagcagccagaagtggaggccacgaagcaggccctgaccagctgtggctttgactgcttggaaaccagcatcggtgcccccggcrtctccatccactcagccacctccctggacagcygagtccagcaagccctggatggcctctgagaggagcccacgacactgcagccccacccagatgcccctttctggattattctgggggctgcagttcgactctgtgctggccagcgagcgcccagctcctgacactgctggagaggccccagccgcttggcgatgccagccaagctctgcagtcccagcggtgggacctagggaggcatggtctgccctctgcatcctctggagccagccgagcaggaggcctaggagggtcctctgagactccagacctgaggcgagaagggctgcttccctgaagctcccacagtcccatctgcttcagggtgctggggcctggttcccggagaagtgtgccttctctctcccttttcagggaccgccccctgtctctcagggccaggcctctccctcctccaggaagccttcccctaccccttgtcgcccctccctcccagagcacctgctgtctgggtggctcactcagcacttggtgtggccttcccttctacctagcgggatggggctcccccaggggctgtcccggaggcggtgggcctggttaaataaggcagggtttatatgcactttcttccgatctgtacctgagaggtttgtggaaaagatggcaaatggggaataaaaagattttgtgtcaacagta

SEQ ID NO: 7002 - DNA, 2062 bp, Homo sapiens
ttcaagcctattggtaaaggtactccgggctcgcgcgctctgattggctggcctgaagtacaacgcctcctccccttgaggcacgggcgctctgggttgtgggagttggggagctgctccggcttcggcgcggaggggcggcggccggggaggcggcggcggcggcaggattcccaggagccatgttgtcagaagtcctactggtgtctgctccggggwaagtcatccttcatggagaammtgccgtggtacatggcaaggtagcactggctgtatccttgaacttgagaacattcctccggcttcaaccccacagcaatgggaaagtggacctcarcttacccaacattggtatcaagcgggcctrggatgtggccaggcttcagtcactggacacaagctttctggagcaaggtgatgtcacaacacccacctcagagcaagtggagaagctaaaggaggttgcaggcttgcctgacgactgtgctgtcaccgagcgcctggctgtgctggcctttctttacttatacctgtccatctgccggaagcagagggccctgccgagcctggatatcgtagtgtggtcrgagctgccccccggggcgggcttgggctccagcgccrcctastyggtgtgtctggcagcagccctcctgactgtgtgcgaggagatcccaaacccgctgaaggayggggattgcgtcaacaggtggaccaaggaggatttggagctaattaacaagtgggccttccaaggggagagaatgattcacgggaacccctccggagtggacaatgctgtcagcrcctggggaggagccctccgataccatcaagggaagatttcatccttaaagaggtcgccagctctccagatcctgctgaccaacaccaaagtccctcgcaataycagggcccttgtggctggcgtcagaaacaggctgctcaagttcccagagatmgtggcccccctcctgacctcaatagatgccatctycctggagtgtgagygcgtgctgggagagatgggggaagccccagccccggagcagtacctcgtgctggaagagctcattgacatgamccagcaccatctgaatgccctcggcrtgggccacgcctctctggaccagctctgccaggtgaccagggcccgcrgacttcacagcaagctgactggcgcaggcggtggtggctgtggcatcacactcctcaagccagggctggagcagccagaagtggaggccacgaagcaggccctgaccagctgtggctttgactgcttggaaaccagcatcggtgcccccggcrtctccatccactcagccacctccctggacagcygagtccagcaagccctggatggcctctgagaggagcccacgacactgcagccccacccagatgcccctttctggattattctgggggctgcagttcgactctgtgctggccagcgagcgcccagctcctgacactgctggagaggccccagccgcttggcgatgccagccaagctctgcagtcccagcggtgggacctagggaggcatggtctgccctctgcatcctctggagccagccgagcaggaggcctaggagggtcctctgagactccagacctgaggcgagaagggctgcttccctgaagctcccacagtcccatctgcttcaggcccccgccttggcctgtgttcttcctggccgcctgggtccaatgctcaggtgctggggcctggttcccggagaagtgtgccttctctctcccttttcagggaccgccccctgtctctcagggccaggcctctccctcctccaggaagccttcccctaccccttgtcgcccctccctcccagagcacctgctgtctgggtggctcactcagcacttggtgtggccttcccttctacctagcgggatggggctcccccaggggctgtcccggaggcggtgggcctggttaaataaggcagggtttatatgcactttcttccgatctgtacctgagaggtttgtggaaaagatggcaaatggggaataaaaagattttgtgtcaacagta

SEQ ID NO: 7003 - DNA, 5568 bp, Homo sapiens
ccccggccggagtgggttccagcttttctcggctggggagggcatttatcccacctccgctatttcagctgccagaggggaggcaaggtgtggggaagttttccttcccgggcgaagaagctctgcggaactgtcattttccggaactggatgcttgcttcctggcggggttctgaaagcgaacaccgcggggcaagatggcggtagtgcgtcggctgctgccccgggtctggcrgaactcgggtgttttgggctgagacagtggcagctgcggccccgaccccaagtgcggggacctccggcgaataaagaaaaaataacaagcttttctgaagtgagaagctgttctyagccacgagtcctgtgcaagatcactaatgattacctggcatttctgcgacacaggcaggtcctcagggtttgtgcaagtttgcaaacatgttcaccctgtctcagacctcgagagcatggttcatcgatagagcccgtcaggcacgagaagaaaggcttgtgcagaaggaacgggagcgggcagctgttgtgatccaggcccatgtccggagttttctctgtcggagtcgactgcagagagatatcaggagagagattgatgacttttttaaagcagatgaccctgagtccactaaaagaagtgcactttgtattttcaagattgccaggaaactgctgttcctattcagaatcaaagaggataatgagagatttgagaagttgtgtcgcagcatcctgagcagcatggatgctgagaatgagcctaaggtgtggtatgtgtccctggcttgttctaaggacctcaccctcctttggattcaacagatcaagaacattttgtggtactgctgtgattttctcaagcagctcaagcctgaaatcctgcaggactcccgactcatcaccctgtacctcacgatgcttgtcaccttcacagacacttcaacrtggaaaattcttcggggaaaaggtgaaagtcttcgaccagcgatgaaccacatttgtgcaaatataatgggacatctcaaccagcatggattttattctgtgctgcagatattgttaacccgtggcctggcaagaccccgtccttgtctatccaaaggcactttaacagcagctttttctctagcgttacgccctgtgattgctgcacagttctcagacaatctgattcggccgttcctcatccacatcatgtctgtgcctgctctggtgactcatctcagcacagtgacccctgagcgcctcactgttttagaatcccatgacatgcttcgtaaattcatcatatttttaagagaccaagatcgatgccgtgatgtatgtgaaagtttagaaggatgccatacgctttgtctaatgggcaacctcctacacttgggctccctcagccccagagtgttagaggaggagacagatgggttcgtgagtttgctcacccagacgctgtgctactgtcrgaagtatgtgtctcagaagaagtccaacctgacccactggcatcctgtccttggctggttctcccaatctgtggattatggccttaacgagtcaatgcacttgatcaccaaacagctgcagttcttgtggggggtgcctctgatccgsatcttcttctgtgacatcctgagcaagaagctactggagagccaggagccagcccacgcacagccagcatcccctcagaatgtgctcccagtgaagagtctcctaaagcgtgcttttcaaaagtcggcatcagtccggaatattctcaggcctgtcgggggtaaacgggtcgactctgcagaagtccagaaggtttgcaacatctgtgtcctctaccagacctcgctgacaactctcacacagattcggctgcagatactcacaggtctcacttaccttgatgacctgcttcccaaactgtgggcatttatctgtgagctcgggccccacggagggttaaagctcttcttggaatgcctgaacaatgacactgaagagtccaagcaactcttggccatgctgatgctgttctgtgactgttcgcggcacctcatcacaatccttgatgacattgaagtttatgaagaacagatttcattcaaactggaagagctggtcactatctcctctttcctgaattcttttgtgtttaagatgatctgggatggaattgtagagaacgccaagggtgagaccttggagctgttccagtctgtccacgggtggcttatggtgctgtacgagcgggactgccggcggcgcttcacccccgaggaccactggctgcgaaaggatctcaaacctagcgtgctcttccaagaactygacagggacagaaaacgggcacagttgatcctgcagtacatcccacatgtcatccctcacaaaaacagagttctactgtttcgaaccatggttaccaaggagaaggagaaactggggctggtggaaaccagctctgcctccccgcatgtcactcacatcaccatccgccggtccaggatgctggaggayggctacgagcagcttaggcagctctcccagcacgccatgaagggggtcatccgtgtgaagtttgtcaatgacctcggggtggacgaagcagggattgatcaagacggtgtttttaaggagttcttggaagagatcatcaagagagtttttgacccagcactcaatctgttcaagacaaccagtggggatgagaggctgtacccctcacccacatcctacatccatgagaattacctgcagctcttcgagtttgtggggaagatgctggggaaggctgtgtatgagggaattgtggtggacgtgccatttgcatccttcttcctgagccaactgcttgggcaccaccacagcgtcttctatagctcggtggatgaactgccttctctggactccgagttctataaaaacctcacctccatcaagcgctatgatggggacatcactgacctgggcctgacgctgtcttacgacgaggacgtcatgggtcagcttgtttgccatgaactgattcctggagggaagaccattcctgttacaaatgaaaataaaattagctacatccatctgatggcacattttcgaatgcacactcaaataaaaaaccaaacagctgccctcattagcggattccgttccattatcaaacccgagtggatccgaatgttctcaactcctgaactgcagcgtctcatctctggygacaatgctgagattgatctggaagatttaaagaagcacacagtctactacggtggtttccatggaagtcacagagtcatcatctggctctgggatattctggcctcyracttcacaccggatgagagakctatgtttctgaagttcgtgaccagctgctccagacccccgctcctgggattcgcctacctcaagcctccattctccatccgctgcgtggaggtgtcggacgatcaggacaccggggacactctgggcagcgtcctccggggcttcttcaccatccgcaagcgggagccaggcggccgcctgcccacctcctccacctgcttcaacctgctcaagctgcccaactacagcaagaagagcgtcctccgygagaagctgcgctacgccatcagcatgaacacgggctttgaactctcctagctcctgtcccagccctgcctccagggctcctgggctgccagggaccttcagctcccagaggcagtgtggtcctgggaatgtgaccaacatgccaggtgacattggcccctagaccctctctatagccatgagactccttgtggcctcaagaaatttagacgcccacgacagcactacacagcatctccaggtgatgcccaaggcacagggctgcagaaaataaacctccagattccaccaacacgggtccattcttcctggtgatggcagaggggcttcttttagctagtttgatcttttgggagtctgtctttccttagccgtctgagtgagctgtgtatgaacaagtcccaggagttccaagagtctagagtggtttttgcagcatgggttgagtgtacaaagcctactgtgcgtgagatcctctccttccgtttctgaaatctcttactcaggtaaggcctcgccaagcctctatgcaccccacaaagtttctgcctccatgccgtccacagcgcctcttcccagacagccaggcccatctgctgcccagggaagcgcaggcgcctgctagggacgctatggacaccgtgagtccaaggcgctgctcctgccttgaagccacgcgctccacgccgcggccctcccattttctgcgtcctcagcgggctgagctgccagagagycttcccggacctattcccgtcctrtgcattcacattggcatcctggtttgggggaagaaaaacaacggcccttagcagcagccccgtttccagaatgtgctgcctgttccccaaagcctgcttgtcccgcggaggacggctgcctttgaccctgcttatttgtctcactggttatctaatgaggaacaaacactaacctaaggtacacatcccatctgggcggtggcttcactcctgagtctgcaaaatcccaggaaacttgggtcttgctgcccatccttcctcagcacagggaacccggaagcccgttgcactgacagaggctcacaccctctgggttttttgttttttttttaaacttcatttctcttccaacccattgtgttcctctgccctcattctttacctttgttgtaagaactttagctccagggaactgaggcagaggccctgtttgtggtctgtgttgacagccacccaccctctcccacctcatgctcctgcacctgcaccaccaaggttgatgccggattcgaagccaggaaggcccagtccctcctctgctctcctcaaagacgcaaaacattttccaacaagagctgtcacagtggcagcaaagcaggggccacccgtctccacagtccttcagagtttcagctgcatcctggtgtcccacccaggtcgagcccccaggcttctggaaaasartgtgtgctctactttgatggaaacatggcaaggaatttaaagacaggratgtattaatattattgaaggtgtgttcgtaacctctgattctgtggacttgccactttctccaaacgctcggttcctttgaagatttcttctgaacgtgtgtgcgcacgctgggcgggttygtgcatacatgcggggaccccagactgtcagcacagggargawggatcccatcctaatttttatcacctgaaggttggaaccagtgagggactgggagagagtgatttataarcaccaatatcaacttcatgtggatttttgacragraggggtagtttgtaatttcatttaaattcttttcagcagctggaaatattgcactatctgaaacactgaatctccttttgtaactggtgttcactgacaccttgatggctcttgatggctctaaaaagttgtaggattttttgtttttgtagctaacttatggattgagatgtgatcaaaggctttattaaatttgtacttcagcawatga

SEQ ID NO: 7004 - DNA, 5519 bp, Homo sapiens
ccccggccggagtgggttccagcttttctcggctggggagggcatttatcccacctccgctatttcagctgccagaggggaggcaaggtgtggggaagttttccttcccgggcgaagaagctctgcggaactgtcattttccggaactggatgcttgcttcctggcggggttctgaaagcgaacaccgcggggcaagatggcggtagtgcgtcggctgctgccccgggtctggcrgaactcgggtgttttgggctgagacagtggcagctgcggccccgaccccaagtgcggggacctccggcgaataaagaaaaaataacaagcttttctgaagtgagaagctgttctyagccacgagtcctgtgcaagatcactaatgattacctggcatttctgcgacacaggcaggtcctcagcatggttcatcgatagagcccgtcaggcacgagaagaaaggcttgtgcagaaggaacgggagcgggcagctgttgtgatccaggcccatgtccggagttttctctgtcggagtcgactgcagagagatatcaggagagagattgatgacttttttaaagcagatgaccctgagtccactaaaagaagtgcactttgtattttcaagattgccaggaaactgctgttcctattcagaatcaaagaggataatgagagatttgagaagttgtgtcgcagcatcctgagcagcatggatgctgagaatgagcctaaggtgtggtatgtgtccctggcttgttctaaggacctcaccctcctttggattcaacagatcaagaacattttgtggtactgctgtgattttctcaagcagctcaagcctgaaatcctgcaggactcccgactcatcaccctgtacctcacgatgcttgtcaccttcacagacacttcaacrtggaaaattcttcggggaaaaggtgaaagtcttcgaccagcgatgaaccacatttgtgcaaatataatgggacatctcaaccagcatggattttattctgtgctgcagatattgttaacccgtggcctggcaagaccccgtccttgtctatccaaaggcactttaacagcagctttttctctagcgttacgccctgtgattgctgcacagttctcagacaatctgattcggccgttcctcatccacatcatgtctgtgcctgctctggtgactcatctcagcacagtgacccctgagcgcctcactgttttagaatcccatgacatgcttcgtaaattcatcatatttttaagagaccaagatcgatgccgtgatgtatgtgaaagtttagaaggatgccatacgctttgtctaatgggcaacctcctacacttgggctccctcagccccagagtgttagaggaggagacagatgggttcgtgagtttgctcacccagacgctgtgctactgtcrgaagtatgtgtctcagaagaagtccaacctgacccactggcatcctgtccttggctggttctcccaatctgtggattatggccttaacgagtcaatgcacttgatcaccaaacagctgcagttcttgtggggggtgcctctgatccgsatcttcttctgtgacatcctgagcaagaagctactggagagccaggagccagcccacgcacagccagcatcccctcagaatgtgctcccagtgaagagtctcctaaagcgtgcttttcaaaagtcggcatcagtccggaatattctcaggcctgtcgggggtaaacgggtcgactctgcagaagtccagaaggtttgcaacatctgtgtcctctaccagacctcgctgacaactctcacacagattcggctgcagatactcacaggtctcacttaccttgatgacctgcttcccaaactgtgggcatttatctgtgagctcgggccccacggagggttaaagctcttcttggaatgcctgaacaatgacactgaagagtccaagcaactcttggccatgctgatgctgttctgtgactgttcgcggcacctcatcacaatccttgatgacattgaagtttatgaagaacagatttcattcaaactggaagagctggtcactatctcctctttcctgaattcttttgtgtttaagatgatctgggatggaattgtagagaacgccaagggtgagaccttggagctgttccagtctgtccacgggtggcttatggtgctgtacgagcgggactgccggcggcgcttcacccccgaggaccactggctgcgaaaggatctcaaacctagcgtgctcttccaagaactygacagggacagaaaacgggcacagttgatcctgcagtacatcccacatgtcatccctcacaaaaacagagttctactgtttcgaaccatggttaccaaggagaaggagaaactggggctggtggaaaccagctctgcctccccgcatgtcactcacatcaccatccgccggtccaggatgctggaggayggctacgagcagcttaggcagctctcccagcacgccatgaagggggtcatccgtgtgaagtttgtcaatgacctcggggtggacgaagcagggattgatcaagacggtgtttttaaggagttcttggaagagatcatcaagagagtttttgacccagcactcaatctgttcaagacaaccagtggggatgagaggctgtacccctcacccacatcctacatccatgagaattacctgcagctcttcgagtttgtggggaagatgctggggaaggctgtgtatgagggaattgtggtggacgtgccatttgcatccttcttcctgagccaactgcttgggcaccaccacagcgtcttctatagctcggtggatgaactgccttctctggactccgagttctataaaaacctcacctccatcaagcgctatgatggggacatcactgacctgggcctgacgctgtcttacgacgaggacgtcatgggtcagcttgtttgccatgaactgattcctggagggaagaccattcctgttacaaatgaaaataaaattagctacatccatctgatggcacattttcgaatgcacactcaaataaaaaaccaaacagctgccctcattagcggattccgttccattatcaaacccgagtggatccgaatgttctcaactcctgaactgcagcgtctcatctctggygacaatgctgagattgatctggaagatttaaagaagcacacagtctactacggtggtttccatggaagtcacagagtcatcatctggctctgggatattctggcctcyracttcacaccggatgagagakctatgtttctgaagttcgtgaccagctgctccagacccccgctcctgggattcgcctacctcaagcctccattctccatccgctgcgtggaggtgtcggacgatcaggacaccggggacactctgggcagcgtcctccggggcttcttcaccatccgcaagcgggagccaggcggccgcctgcccacctcctccacctgcttcaacctgctcaagctgcccaactacagcaagaagagcgtcctccgygagaagctgcgctacgccatcagcatgaacacgggctttgaactctcctagctcctgtcccagccctgcctccagggctcctgggctgccagggaccttcagctcccagaggcagtgtggtcctgggaatgtgaccaacatgccaggtgacattggcccctagaccctctctatagccatgagactccttgtggcctcaagaaatttagacgcccacgacagcactacacagcatctccaggtgatgcccaaggcacagggctgcagaaaataaacctccagattccaccaacacgggtccattcttcctggtgatggcagaggggcttcttttagctagtttgatcttttgggagtctgtctttccttagccgtctgagtgagctgtgtatgaacaagtcccaggagttccaagagtctagagtggtttttgcagcatgggttgagtgtacaaagcctactgtgcgtgagatcctctccttccgtttctgaaatctcttactcaggtaaggcctcgccaagcctctatgcaccccacaaagtttctgcctccatgccgtccacagcgcctcttcccagacagccaggcccatctgctgcccagggaagcgcaggcgcctgctagggacgctatggacaccgtgagtccaaggcgctgctcctgccttgaagccacgcgctccacgccgcggccctcccattttctgcgtcctcagcgggctgagctgccagagagycttcccggacctattcccgtcctrtgcattcacattggcatcctggtttgggggaagaaaaacaacggcccttagcagcagccccgtttccagaatgtgctgcctgttccccaaagcctgcttgtcccgcggaggacggctgcctttgaccctgcttatttgtctcactggttatctaatgaggaacaaacactaacctaaggtacacatcccatctgggcggtggcttcactcctgagtctgcaaaatcccaggaaacttgggtcttgctgcccatccttcctcagcacagggaacccggaagcccgttgcactgacagaggctcacaccctctgggttttttgttttttttttaaacttcatttctcttccaacccattgtgttcctctgccctcattctttacctttgttgtaagaactttagctccagggaactgaggcagaggccctgtttgtggtctgtgttgacagccacccaccctctcccacctcatgctcctgcacctgcaccaccaaggttgatgccggattcgaagccaggaaggcccagtccctcctctgctctcctcaaagacgcaaaacattttccaacaagagctgtcacagtggcagcaaagcaggggccacccgtctccacagtccttcagagtttcagctgcatcctggtgtcccacccaggtcgagcccccaggcttctggaaaasartgtgtgctctactttgatggaaacatggcaaggaatttaaagacaggratgtattaatattattgaaggtgtgttcgtaacctctgattctgtggacttgccactttctccaaacgctcggttcctttgaagatttcttctgaacgtgtgtgcgcacgctgggcgggttygtgcatacatgcggggaccccagactgtcagcacagggargawggatcccatcctaatttttatcacctgaaggttggaaccagtgagggactgggagagagtgatttataarcaccaatatcaacttcatgtggatttttgacragraggggtagtttgtaatttcatttaaattcttttcagcagctggaaatattgcactatctgaaacactgaatctccttttgtaactggtgttcactgacaccttgatggctcttgatggctctaaaaagttgtaggattttttgtttttgtagctaacttatggattgagatgtgatcaaaggctttattaaatttgtacttcagcawatga

SEQ ID NO: 7005 - DNA, 5655 bp, Homo sapiens
cccggccggagtgggttccagcttttctcggctggggagggcatttatcccacctccgctatttcagctgccagaggggaggcaaggtgtggggaagttttccttcccgggcgaagaagctctgcggaactgtcattttccggaactggatgcttgcttcctggcggggttctgaaagcgaacaccgcggggcaagatggcggtagtgcgtcggctgctgccccgggtctggcrgaactcgggtgttttgggctgagacagtggcagctgcggccccgaccccaagtgcggggacctccggcgaataaaggtcggcctgcgggtaggccggtagggcctgcggtccggcctgcgggagaactgggtcgtcagtcctccgagtggtggggctggggactttgagggagttggctctagggcacagtccctgcctggccaggtcggaggaacaagtgctgggatctggcktgtgtgctccaggggctctttccgcggccctttccacctcttttcactttggggacggtaggcctttataaacggactaatgctgggtgatttgttcctgtggttgttgatgccgaggaaagactctgggccccaggactcacctaaactggagttcgaatactgttcgctcgctgtgtgaccttggaaaaaataacaagcttttctgaagtgagaagctgttctyagccacgagtcctgtgcaagatcactaatgattacctggcatttctgcgacacaggcaggtcctcagggtttgtgcaagtttgcaaacatgttcaccctgtctcagacctcgagagcatggttcatcgatagagcccgtcaggcacgagaagaaaggcttgtgcagaaggaacgggagcgggcagctgttgtgatccaggcccatgtccggagttttctctgtcggagtcgactgcagagagatatcaggagagagattgatgacttttttaaagcagatgaccctgagtccactaaaagaagtgcactttgtattttcaagattgccaggaaactgctgttcctattcagaatcaaagaggataatgagagatttgagaagttgtgtcgcagcatcctgagcagcatggatgctgagaatgagcctaaggtgtggtatgtgtccctggcttgttctaaggacctcaccctcctttggattcaacagatcaagaacattttgtggtactgctgtgattttctcaagcagctcaagcctgaaatcctgcaggactcccgactcatcaccctgtacctcacgatgcttgtcaccttcacagacacttcaacrtggaaaattcttcggggaaaaggtgaaagtcttcgaccagcgatgaaccacatttgtgcaaatataatgggacatctcaaccagcatggattttattctgtgctgcagatattgttaacccgtggcctggcaagaccccgtccttgtctatccaaaggcactttaacagcagctttttctctagcgttacgccctgtgattgctgcacagttctcagacaatctgattcggccgttcctcatccacatcatgtctgtgcctgctctggtgactcatctcagcacagtgacccctgagcgcctcactgttttagaatcccatgacatgcttcgtaaattcatcatatttttaagagaccaagatcgatgccgtgatgtatgtgaaagtttagaaggatgccatacgctttgtctaatgggcaacctcctacacttgggctccctcagccccagagtgttagaggaggagacagatgggttcgtgagtttgctcacccagacgctgtgctactgtcrgaagtatgtgtctcagaagaagtccaacctgacccactggcatcctgtccttggctggttctcccaatctgtggattatggccttaacgagtcaatgcacttgatcaccaaacagctgcagttcttgtggggggtgcctctgatccgsatcttcttctgtgacatcctgagcaagaagctactggagagccaggagccagcccacgcacagccagcatcccctcagaatgtgctcccagtgaagagtctcctaaagcgtgcttttcaaaagtcggcatcagtccggaatattctcaggcctgtcgggggtaaacgggtcgactctgcagaagtccagaaggtttgcaacatctgtgtcctctaccagacctcgctgacaactctcacacagattcggctgcagatactcacaggtctcacttaccttgatgacctgcttcccaaactgtgggcatttatctgtgagctcgggccccacggagggttaaagctcttcttggaatgcctgaacaatgacactgaagagtccaagcaactcttggccatgctgatgctgttctgtgactgttcgcggcacctcatcacagaacgccaagggtgagaccttggagctgttccagtctgtccacgggtggcttatggtgctgtacgagcgggactgccggcggcgcttcacccccgaggaccactggctgcgaaaggatctcaaacctagcgtgctcttccaagaactygacagggacagaaaacgggcacagttgatcctgcagtacatcccacatgtcatccctcacaaaaacagagttctactgtttcgaaccatggttaccaaggagaaggagaaactggggctggtggaaaccagctctgcctccccgcatgtcactcacatcaccatccgccggtccaggatgctggaggayggctacgagcagcttaggcagctctcccagcacgccatgaagggggtcatccgtgtgaagtttgtcaatgacctcggggtggacgaagcagggattgatcaagacggtgtttttaaggagttcttggaagagatcatcaagagagtttttgacccagcactcaatctgttcaagacaaccagtggggatgagaggctgtacccctcacccacatcctacatccatgagaattacctgcagctcttcgagtttgtggggaagatgctggggaaggctgtgtatgagcgctatgatggggacatcactgacctgggcctgacgctgtcttacgacgaggacgtcatgggtcagcttgtttgccatgaactgattcctggagggaagaccattcctgttacaaatgaaaataaaattagctacatccatctgatggcacattttcgaatgcacactcaaataaaaaaccaaacagctgccctcattagcggattccgttccattatcaaacccgagtggatccgaatgttctcaactcctgaactgcagcgtctcatctctggygacaatgctgagattgatctggaagatttaaagaagcacacagtctactacggtggtttccatggaagtcacagagtcatcatctggctctgggatattctggcctcyracttcacaccggatgagagakctatgtttctgaagttcgtgaccagctgctccagacccccgctcctgggattcgcctacctcaagcctccattctccatccgctgcgtggaggtgtcggacgatcaggacaccggggacactctgggcagcgtcctccggggcttcttcaccatccgcaagcgggagccaggcggccgcctgcccacctcctccacctgcttcaacctgctcaagctgcccaactacagcaagaagagcgtcctccgygagaagctgcgctacgccatcagcatgaacacgggctttgaactctcctagctcctgtcccagccctgcctccagggctcctgggctgccagggaccttcagctcccagaggcagtgtggtcctgggaatgtgaccaacatgccaggtgacattggcccctagaccctctctatagccatgagactccttgtggcctcaagaaatttagacgcccacgacagcactacacagcatctccaggtgatgcccaaggcacagggctgcagaaaataaacctccagattccaccaacacgggtccattcttcctggtgatggcagaggggcttcttttagctagtttgatcttttgggagtctgtctttccttagccgtctgagtgagctgtgtatgaacaagtcccaggagttccaagagtctagagtggtttttgcagcatgggttgagtgtacaaagcctactgtgcgtgagatcctctccttccgtttctgaaatctcttactcaggtaaggcctcgccaagcctctatgcaccccacaaagtttctgcctccatgccgtccacagcgcctcttcccagacagccaggcccatctgctgcccagggaagcgcaggcgcctgctagggacgctatggacaccgtgagtccaaggcgctgctcctgccttgaagccacgcgctccacgccgcggccctcccattttctgcgtcctcagcgggctgagctgccagagagycttcccggacctattcccgtcctrtgcattcacattggcatcctggtttgggggaagaaaaacaacggcccttagcagcagccccgtttccagaatgtgctgcctgttccccaaagcctgcttgtcccgcggaggacggctgcctttgaccctgcttatttgtctcactggttatctaatgaggaacaaacactaacctaaggtacacatcccatctgggcggtggcttcactcctgagtctgcaaaatcccaggaaacttgggtcttgctgcccatccttcctcagcacagggaacccggaagcccgttgcactgacagaggctcacaccctctgggttttttgttttttttttaaacttcatttctcttccaacccattgtgttcctctgccctcattctttacctttgttgtaagaactttagctccagggaactgaggcagaggccctgtttgtggtctgtgttgacagccacccaccctctcccacctcatgctcctgcacctgcaccaccaaggttgatgccggattcgaagccaggaaggcccagtccctcctctgctctcctcaaagacgcaaaacattttccaacaagagctgtcacagtggcagcaaagcaggggccacccgtctccacagtccttcagagtttcagctgcatcctggtgtcccacccaggtcgagcccccaggcttctggaaaasartgtgtgctctactttgatggaaacatggcaaggaatttaaagacaggratgtattaatattattgaaggtgtgttcgtaacctctgattctgtggacttgccactttctccaaacgctcggttcctttgaagatttcttctgaacgtgtgtgcgcacgctgggcgggttygtgcatacatgcggggaccccagactgtcagcacagggargawggatcccatcctaatttttatcacctgaaggttggaaccagtgagggactgggagagagtgatttataarcaccaatatcaacttcatgtggatttttgacragraggggtagtttgtaatttcatttaaattcttttcagcagctggaaatattgcactatctgaaacactgaatctccttttgtaactggtgttcactgacaccttgatggctcttgatggctctaaaaagttgtaggattttttgtttttgtagctaacttatggattgagatgtgatcaaaggctttattaaatttgtacttcagcawatga

SEQ ID NO: 7006 - DNA, 2370 bp, Homo sapiens
gagtcaccccgcggactggacgggaacctggcggggtcaggtcccgtcaagcagcctggctcatggctgtgtgcggcctggggagccgtcttggcctggggagccgtcttggcctgcrmgggtgcttcggcgccgccaggctcctgtatccccgtttccagagccgcggccctcagggcgtggaagacggggacaggccacagccttcctcgaagacacccaggatccccaagatttacaccaaaacgggagacaaagggttttctagtaccttcacaggagaaaggagacccaaagatgaccaagtgtttgaagccgtgggaactacagatgaattaagttcagctatygggtttgctctggaattagtcacagaaaagggccatacatttgccgaagagcttcagaaaatccagtgcacattgcaggacgtcggctcggccctggcgacaccatgctcctcgrcccgggaggctcacttaaagtataccacgttcaaggcggggcccatcctggagctggagcagtggatcgacaagtacaccagccagctcccaccactcacggccttcatcctgccttcgggaggcaagatcagctcggcgctgcatttctgccgggccgtgtgccgccgggccgagagacgtgtggtgcctcttgtccagatgggagagaccgatgygaacgtggccaagttcttaaacagactcagtgactatctcttcacgctagccagatatgcagccatgaaggaggggaatcaagagaaaatatacawgaaaaatgacccatcggccgagtctgagggactctgaaatcacagaaagtgggagcttggaggatccctccatggcgatggccgtggagagaggagcttgcccttytggggtcctggttcctgaagagctcacccagagaggctcaaagcagccttttgtcccagctcagctttgatytacacctcttgccaccttcctcaagggactgtgaccctttggggattctgyccctgaccctgcttccccaagctctcctgggtcttggagggatgtgggaatgaattggcattgcaggaaagacaggtaaagtgattgctgcaatgagaaggagctgtgcggaaaaggaataaaagttggaaaggctggagccgtgtgtgtgtgtgtgtgtgtgtgtgtgtgtgtgtgtgtgwgwgwgagagagarccctcccactgccagctcaggttgttcacagatttggaatgggaccagaggcccttgaaaatgtaattgtgatttacctgtgccaaaggtgctttaaatgtcacatttgtaaaggggaaggcggacaagatttggaagtttagtcacctctgagccacccatcaccgccaaagtgtgggggaaggatagctgcagattgacaggcgaggctcagaaactcctggcttagattgaagtgtgtgtgatgggggtgcagcttagaggaccccctctgaaagggatggagatgctgatgagaacaacactaccacttgaaggtgaacattccctgtckggttggactgagtcaagggtctgcggtgcagcatcttcagcttgagaaaatgaggttgtcagtttccagcaaggctgacatccaccagactgatttctccgatgttgcacttggctggcttatgcctctgagatcsgtgccacggctgtatttatttcagttgtcactgmtgctccctcctgctatgaaacgacactgccagtgccagcagtgtccttgggaaaggcaatatttatgaagggcagaagaggcagccccaagaacctaaagactgcaggctgctaattgcaggaaatgactttggaagggcaggctcttgtccagtttcagggctgaaatgcctggcgaactccattcagccatcacatattgactgagtggctgcttagcatgggccaccgcgctaggctcgggacagctggtctttccggccatctttcttgctggcaagtcagcaaacattaccttcttagtcacgtgcatatttttgccttcattcttaccacctggcctgcaaagtttgcaggagggccaggtatattcacttgtgtcttctgggtcctttcattgctgacaggctgtgatggccctcttgagccttgggcagggtgggtgaggtgcagatgaccaggagtgtgtgaatgccttccaggaggtggctttgttccgtgcctccctgcccccatcgtcactaccaggtctggtacggagtcggtgctcagtgtttgcaaaacagagctgaaaayggactttgggaggccgaggcaggcagatcacctgaggtcaggagtttgagaccagcctggtcaacatrgtaaaaccccatttctgcta

SEQ ID NO: 7007 - DNA, 1319 bp, Homo sapiens
gtggtaaaaggccggtacctcgggcaagatggctatcaagagtatcgcttcccgcctccggggttcccgtcgttttctgagcggcttcgtggctggggctgtagtgggcgctgcgggagctgggctcgcggccctgcagttcttccggagtcagggcgctgarggagcgttgacagggaagcagccggatggatctgcagaaaaggctgtcttggaacaatttggattccctttaactggaacagaggcaaggtgttacactaatcacgctttgtcttatgatcaggcaaagcgggtgcctagatgggttcttgaacatatttccaaaagcaagataatgggtagattcttcaagtttacactcctagcatcattgtttcttctctctctcaaccttcacctatggctggtcttgaatttctgggttcaagtgaccctcctgcctcagcctcctgagtagctgggattacagggactacatggaaggttgtcttggcactgaacggagaaaggtcaaaaggaagataaaaagtttgttccagagaaggtgatgcagacagaaagcattgtaaatttaagcctgatcccaatatccctccaaccttcagtgccttcaatgaagattatgttggaagtgggtggtcacgaggacacatggctccagcaggaaataacaaattttcaagtaaagccatggctgaaaccttttacctttctaacattgtgcctcaggattttgataataattctggatattggaacagaatagaaatgtactgtcgagagctgacagaaaggtttgaagatgtttgggtggtatctgggcctttgaccttacctcagactagaggcgatggaaagaaaatagttagttaccaggtgattggcgaggacaacgtggcagtcccctcacacctttataaggaccaygctggctgctgtgttgagagcccgctggggacaaggaccagtgaggaggccactgcaagaatccaggagagagatgatggcggctcagaccagcgcagtggcctggttgaacttgggatatatttcgaaggtagagccaacaggatttccggccggattggatgtagggtgtgagaaacagagaggaggcaaggatgacgtcaagggttttggcctgagcagctggaaatccagccgggcacccccgtgggggctgttgagtggttttaactgtctcctggggcctgtgggtgaagctgagacagagaccgaagggaggggctgagccctacccctggctctgtggctcagggaataggctgcacatactgattattccattacccttt

SEQ ID NO: 7008 - DNA, 1918 bp, Homo sapiens
gtggtaaaaggccggtacctcgggcaagatggctatcaagagtatcgcttcccgcctccggggttcccgtcgttttctgagcggcttcgtggctggggctgtagtgggcgctgcgggagctgggctcgcggccctgcagttcttccggagtcagggcgctgarggagcgttgacagggaagcagccggatggatctgcagaaaaggctgtcttggaacaatttggattccctttaactggaacagaggcaaggtgttacactaatcacgctttgtcttatgatcaggcaaagcgggtgcctagatgggttcttgaacatatttccaaaagcaagataatgggtgatgcagacagaaagcattgtaaatttaagcctgatcccaatatccctccaaccttcagtgccttcaatgaagattatgttggaagtgggtggtcacgaggacacatggctccagcaggaaataacaaattttcaagtaaagccatggctgaaaccttttacctttctaacattgtgcctcaggattttgataataattctggatattggaacagaatagaaatgtactgtcgagagctgacagaaaggtttgaagatgtttgggtggtatctgggcctttgaccttacctcagactagaggcgatggaaagaaaatagttagttaccaggtgattggcgaggacaacgtggcagtcccctcacacctttataaggtaatcctggcccgcagaagctcagtatctaccgaaccactggcgctaggggcctttgtggtacccaatgaagccatcggcttccagccccagttaactgaattccaagtgagcctccaggacctagagaagttgtcagkactggtgttttttcctcatttggatagaactagtgatatccggaatatctgctctgtggacacctgtaagctcctggatttccaggagttcaccttgtacttgagtacaagaaagattgaaggagcccgatcagtgctcagactggaaaagatcatggaaaacttgaagaatgcagagattgaaccagatgattactttatgagtcgctatgagaagaagctagaagaactcaaagctaaggagcagtcaggaacccagataagaaagccatcctagtttttatctcaagatgtgtcataccgtctgtaatgaagcaggcatgccctctttaggctaacatattttagtggctttgctttttgctttttaaaaagtttttctctttaagagatgtggtctcgccrtgtcatccaggctggagtgcagtggtggaatcatagctcactatagcctcaaacttctgggcttaagcaatcctcctgcctctgccccctgagcagctgggwctacaggcacacaccatcaccctcagctactagtggctttgctttaaagaaacagtggaatcctaaatttatgactaaaaattcccccaaaagatgaaagatctacaatgtttttgtcagtattatatttgactcaggaactaattattaakggagctttgacacctgcagatggagggctgatcttgtgtcaagttaacaggaagactgcccacagatgacactgcatttgtatccctgtggatgtagagtattgggaaggcatttgtttagtttcatgcctccaaaccatgcattgtctgtgatgtatctgcccagccttctcagaactcaatgttgtacatttttccctctaggacctgaattggtcttggaggcagcttttagaaatcctctrtgtagttcctgtccacatgcactatatatttgtttcttytttctcctctcatgaatctgctcgtttctctacttctgtctacgtagaagcactcrgcaactagtttctgctcattaaatgtgttctatatactaggctcagtgctttacatgtgtt

SEQ ID NO: 7009 - DNA, 2010 bp, Homo sapiens
gatggtaagtctgtgggyccgtcctcccttcgctggcccagatttcgggctccgactcctacctggagtgtgaatggcagtccttgacggacagccttcaccgtttgctgggcccctagcctggcccttggtttctgacctttattctcccggctcggcctcccttccccacctcgcgtctcgccagcttccctcatgtccttccttcccccgggcatcttcgttttctgcacagaaccacccccgccgcccgactttcttccccccagttactcatcgcgatatctatgttttaatgtctgtgttctctactaagattgttagctccataagacttgagactatgtctgttttggtctccatcatctaaccagcacagtacctggtacataattggcattcagtaagtatgaatgaaggaataaattaatacataattttagtagatkagttaactgcccttctttcgtcattgttcagttgaagaatacctgctatccctccaaagtgtataaaaactcatgttgcaatgggtaccttatatttgacaaaaaaaaaaaaaaaattaacacgagctcatttcttgtactttgcggatgtgctaatttaacttgctcctttggatacttggcatctagcaagagaactacycycttggggggttgaggatttgagaaggcatcggggaggattatctcgaaactgactcactgctgaatgtgtgcttggtttctcccactaggaaaaacagtaccagttttactgtcatcttgcaacagcacacatatcagtgcttcagagatgattkggaaatttgatgtgaaagactaataagatcaagtctttattcaaaagttaatgcagtagctgcattttattcactgattataggcaaatcagtactttgcctactgtctgttttcttcatctcataagtaattgcaaaaatgagattttctggttgattagacttctgagccagtcctttgtaaatcacaccgctctccttttccttataatctttcattattaagagccactaattgtgtgtgtgtgttttttttgtctctgccccccctttttttttttttttcatttttaggatctgcagaaaaggctgtcttggaacaatttggattccctttaactggaacagaggcaagggactacatggaaggttgtcttggcactgaacggagaaaggtcaaaaggaagataaaaagtttgttccagagaaggtgatgcagacagaaagcattgtaaatttaagcctgatcccaatatccctccaaccttcagtgccttcaatgaagattatgttggaagtgggtggtcacgaggacacatggctccagcaggaaataacaaattttcaagtaaagccatggctgaaaccttttacctttctaacattgtgcctcaggattttgataataattctggatattggaacagaatagaaatgtactgtcgagagctgacagaaaggtttgaagatgtttgggtggtatctgggcctttgaccttacctcagactagaggcgatggaaagaaaatagttagttaccaggtgattggcgaggacaacgtggcagtcccctcacacctttataaggaccaygctggctgctgtgttgagagcccgctggggacaaggaccagtgaggaggccactgcaagaatccaggagagagatgatggcggctcagaccagcgcagtggcctggttgaacttgggatatatttcgaaggtagagccaacaggatttccggccggattggatgtagggtgtgagaaacagagaggaggcaaggatgacgtcaagggttttggcctgagcagctggaaatccagccgggcacccccgtgggggctgttgagtggttttaactgtctcctggggcctgtgggtgaagctgagacagagaccgaagggaggggctgagccctacccctggctctgtggctcagggaataggctgcacatactgattattccattacccttt

SEQ ID NO: 7010 - DNA, 2276 bp, Homo sapiens
gtggtaaaaggccggtacctcgggcaagatggctatcaagagtatcgcttcccgcctccggggttcccgtcgttttctgagcggcttcgtggctggggctgtagtgggcgctgcgggagctgggctcgcggccctgcagttcttccggagtcagggcgctgarggagcgttgacagggaagcagccggatggatctgcagaaaaggctgtcttggaacaatttggattccctttaactggaacagaggcaaggtgttacactaatcacgctttgtcttatgatcaggcaaagcgggtgcctagatgggttcttgaacatatttccaaaagcaagataatgggtgatgcagacagaaagcattgtaaatttaagcctgatcccaatatccctccaaccttcagtgccttcaatgaagattatgttggaagtgggtggtcacgaggacacatggctccagcaggaaataacaaattttcaagtaaagccatggctgaaaccttttacctttctaacattgtgcctcaggattttgataataattctggatattggaacagaatagaaatgtactgtcgagagctgacagaaaggtttgaagatgtttgggtggtatctgggcctttgaccttacctcagactagaggcgatggaaagaaaatagttagttaccaggtgattggcgaggacaacgtggcagtcccctcacacctttataaggtaatcctggcccgcagaagctcagtatctaccgaaccactggcgctaggggcctttgtggtacccaatgaagccatcggcttccagccccagttaactgaattccaagtgagcctccaggacctagagaagttgtcagkactggtgttttttcctcatttggatagaactagtgatatccggaatatctgctctgtggacacctgtaagctcctggatttccaggagttcaccttgtacttgagtacaagaaagattgaaggagcccgatcagtgctcagactggaaaagatcatggaaaacttgaagaatgcagagattgaaccagatgattactttatgagtcgctatgagaagaagctagaagaactcaaagctaaggagcagtcaggaacccagataagaaagccatcctagtttttatctcaagatgtgtcataccgtctgtaatgaagcaggcatgccctctttaggctaacatattttagtggctttgctttttgctttttaaaaagtttttctctttaagagatgtggtctcgccrtgtcatccaggctggagtgcagtggtggaatcatagctcactatagcctcaaacttctgggcttaagcaatcctcctgcctctgccccctgagcagctgggwctacaggcacacaccatcaccctcagctactagtggctttgctttaaagaaacagtggaatcctaaatttatgactaaaaattcccccaaaagatgaaagatctacaatgtttttgtcagtattatatttgactcaggaactaattattaakggagctttgacacctgcagatggagggctgatcttgtgtcaagttaacaggaagactgcccacagatgacactgcatttgtatccctgtggatgtagagtattgggaaggcatttgtttagtttcatgcctccaaaccatgcattgtctgtgatgtatctgcccagccttctcagaactcaatgttgtacatttttccctctaggacctgaattggtcttggaggcagcttttagaaatcctctrtgtagttcctgtccacatgcactatatatttgtttcttytttctcctctcatgaatctgctcgtttctctacttctgtctacgtagaagcactcrgcaactagtttctgctcattaaatgtgttctatatactaggctcagtgctttacatgtgtttgtcttaccygagtttcacttttccaaagtagtcatccacaaagtatgaggcagacagatctaagagaagaaagacagctgaggtagattcaaatcttttctgacatggatggtggctttttactcagaaatatatacctatttccatgggtatttgtgggcctgaggcatgcttggcaagaagagtctggtttctcgtctgctatgcaagccaaagggactttaatgttctttgaattgaaccctccttagctctgtggaaagagacagtcaggaatatttgggaattagacggcaatactttgtggggtttattagagcccatgcttgcctccagagatacagttcttttagtgac

SEQ ID NO: 7011 - DNA, 1088 bp, Homo sapiens
gagacgttatcagctctttaaggattgcagaagaataggctactttattttctgaaaaggccatcaggacagtgaagatggtgaccctgcggaagaggaccctgaaagtgctcaccttcctcgtgctcttcatcttcctcacctccttcctgaactactcccacgccatggtggccaccacctggttccccaagaagatggtcctggagctcttggagaacctgaagagactgatcaagcacaggccctgcacttgcacccactgcatcaggcagcatgggctctcagcctggttcgatgagaggttcaaccagatagtgcagctgctgctgactgcccagaayrcgctcttggaggacaacacctaccaatggtggctgaggctccagcaggagaagaagcccaatatcatsaacaataccatcaaggaattcagagcagtacctgggaatgtggacccaatgctggagaagaggtcggtgggctgctggcactgtgctgtcgtgggcaactcgggcaacctgaggcaattgtcatataggcctgcgatagagtcacaattttatgctcaggatgaacaaggcacccacggcagggtttgaagctgctgccgggagcaaaaccgcccaccatctggtgtaccctgagagcttccgggagctgggggacaatgtcagcatggtcctggtgcccttaaagaccatgaacttggagtgggtggtgagcaccaccaccacgggtgccatttcccacacctacaccccggtcctcgtgaagatcagagtgaaacaggataagatcctgatctaccacccagccttcatcaagtatgtcttcgacaactggctgcagagccacaggcggtacccactcaccrgcatcctctcggtcatcttctcaatgcatgtctgcgattaggtagacttgtatagcttctgagcagatagcaaagggaactgacaccactactgggagaacaacctgtctgcrgggtcttttcacaagacgggggtgcacgatgcaggctttgagtctaacgtgacggccaccttggcttcatgaataaaatccggatcttcaaggggaga

SEQ ID NO: 7012 - DNA, 5568 bp, Homo sapiens
cagccccccacctcaggaaaacagtcccccacaaagaatggcagcccctccaagtgtccacgcttcctcaaggtcaagaactgggagactgaggtggttctcactgacaccctccaccttaagagcacattgatttggctccaaagcccacatggaaaggctggaagaggtgaacaaagagatcgacaccactagcacttaccagctcaaggacacagagctcatctatggggccaagcacgcctggcggaatgcctcgcgctgtgtgggcaggatccagtggtccaagctgcaggtattcgatgcccgtgactgcaccacggcccacgggatgttcaactacatctgtaaccatgtcaagtatgccaccaacaaagggaacctcaggtctgccatcaccatattcccccagaggacagacggcaagcacgacttccgagtctggaactcccagctcatccgctacgctggctacaagcagcctgacggctccaccctgggggacccagccaatgtgcagttcacagagatatgcatacagcagggctggaaaccgcctagaggccgcttcgatgtcctgccgctcctgcttcaggccaacggcaatgaccctgagctcttccagattcctccagagctggtgttggaagttcccatcaggcaccccaagtttgagtggttcaaggacctggggctgaagtggtacggcctccccgccgtgtccaacatgctcctagagattggcggcctggagttcagcgcctgtcccttcagtggctggtacatgggcacagagattggtgtccgcgactactgtgacaactcccgctacaatatcctggaggaagtggccaagaagatgaacttagacatgaggaagacgtcctccctgtggaaggaccaggcgctggtggagatcaatatcgcggttctctatagcttccagagtgacaaagtgaccattgttgaccatcactccgccaccgagtccttcattaagcacatggagaatgagtaccgctgccgggggggctgccctgccgactgggtgtggatcgtgccccccatgtccggaagcatcacccctgtgttccaccaggagatgctcaactaccggctcaccccctccttcgaataccagcctgatccctggaacacgcatgtctggaaaggcaccaacgggacccccacaaagcggcgagccatyggcttcaagaagctagcagaagctgtcaagttctcggccaagctgatggggcaggctatggccaagagggtgaaagcgaccatcctctatgccacagagacaggcaaatcgcaagcttatgccaagaccttgtgtgagatcttcaaacacgcctttgatgccaaggtgatgtccatggaagaatatgacattgtgcacctggaacatgaaactctggtccttgtggtcaccagcacctttggcaatggagatccccctgagaatggggagaaattcggctgtgctttgatggaaatgaggcaccccaactctgtgcaggaagaaaggaagtacccggaacccttgcgtttctttycccgtaaagggcctcccctccccaatggtgacacagaagtccacggtctggctgcagcccgtgacagccagcacaggagctacaaggtccgattcaacagcgtctcctcctactctgactcccaaaaatcatcaggcgatgggccygacctcagagacaactttgagagtgctggacccctggccaatgtgaggttctcagtttttggcctcggctcacgagcataccctcacttttgcgccttcggacaygctgtggacaccctyctggaagaactgggaggggagaggatcctgaagatgagrgaaggggatgagctctgtgggcaggaagaggctttcaggacctgggccaagaaggtcttcaaggcagcctgtgatgtcttctgtgtgggagatgatgtcaacattgaaaaggccaacaattccctcatcagcaatgatcgcagctggaagagaaacaagttccgcctcacctttgtggccgaagctccagaactcacacaaggtctatccaatgtccacaaaaagcgagtctcagctgcccggctccttagccgtcaaaacctccagagccctaaatccagtcggtcaactatcttcgtgcgtctscacaccaacgggagccaggagctgcagtaccagcctggggaccacctgggtgtcttccctggcaaccacgaggacctcgtgaatgccctgatcgagcggctggaggacgcgccgcctgtcaaccagatggtgaaagtggaactgctggaggagcggaacacggctttaggtgtcatcagtaactggacagaygagctccgcctcccgccctgcaccatcttccaggccttcaagtactacctggacatcaccacgccaccaacgcctctgcagctgcagcagtttgcctccctagctaccagcgagaaggagaagcagcgtctgctggtcctcagcaagggtttgcaggagtacgaggaatggaaatggggcaagaaccccaccatcgtggaggtgctggaggagttcccatctatccagatgccggccaccctgctcctgacccagctgtccctrctgcagccccgctactattccatcagctcctccccagacatgtaccctgatgaagtgcacctcacygtggccatcgtttcctaccgcactcgagatggagaaggaccaattcaccacggcgtatgctcctcctggctcaaccggatacaggctgacgaactggtcccctgtttcgtgagaggagcacccagcttccacctgccccggaacccccaagtcccctgcatcctcgttggaccaggcaccggcattgcccctttccgaagcttctggcaacagcggcaatttgatatccaacacaaaggaatgaacccctgccccatggtcctggtcttcgggtgccggcaatccaagatagatcatatctacagggaagagaccctgcaggccaagaacaagggggtcttcagagagctgtacacggcttactcccgggagccagacaaaccaaagaagtacgtgcaggacatcctgcaggagcagctggcggagtctgtgtaccgagccctgaaggagcaagggggccacatatacgtmtgtggggacgtcaccatggctgctgatgtcctcaaagccatccagcgcatcatgacccagcaggggaagctctcggcagaggacgccggcgtattcatcagccggatgagggatgacaaccgataccatgaggatatttttggagtcaccctgcgaacgtacgaagtgaccaaccgccttagatctgagtccattgccttcattgaagagagcaaaaaagacaccgatgaggttttcagctcctaactggaccctcttgcccagccggctgcaagttttgtaagcgcggacagacactgctgaacctttcctctgggaccccctgtggccctcgctctgcctcctgtccttgtcgctgtgccctggtttccctcctcgggcttctcgcccctcagtggtttcctcggccctcctgggtttactccttgagttttcctgctgcgatgcaatgcttttctaatctgcagtggctcttacaaaactctgttcccactccctctcttgccgacaagggcaactcaygggtgcatgaaaccactggaacatggccgtcgctgtgggggtttttttctctggggttcccctggaaaggctgcaggaactaggcacaagctctctgagccagtccctcagccactgaagtccccctttctccttttttatgatgacattttggttgtgcgtgcctgtgtgtgtgtgtgtgtgtgtgtgtgtgtgtgtgtgatgggccaggtctctgtccgtcctcttccctgcacaagtgtgtcgatcttagattgccactgctttcattgaagaccctcaatgccaagaaacgtgtccctggcccatattaatccctcgtgtgtccataattagggtccacgcccatgtacctgaaacatttggaagccccataattgttctagttaraaagggttcagggcatggggagaggagtgggaaattgattaaaggggctgtctcccaatgaaagaggcattcccagaatttgctgcatttagattttgataccagtgagcagagccctcatgtgacatgaacccatccaatggattgtgcaaatcccctccccaaacccacccataccagctagaatcacttgactttgccacatccattgactgaccccctcctccagcaatagcatccaaggggcctggaagttatgttgttcaaagaagcctggtggcaataaggatcttcccactttgccactggatgactttggatgggtcacttgtcctcagtttttcctagtcataatgtcatacgaacctaaagaatatgaatggattaaatgttaaagctttggtgcctggaaacaatatcaagtaacaatatgattattatttttttattcccccaaagcgggcttgctgcttcacccttggggatgaaataatggaagctggttaaagtggatgaggttggaaagagttgccataatgaggtcccacgtggcttcttcgataggagccacaacttggggtgggaagaacttgtccctcaggcttgttgccctctgcagttgatctccaaagttttaaacctgttaaattaattttgacaaataagttaccctcaactcagatcaaaaatgggcagccaagtcttcggtaggaattggagccggtgtaattcctccctaagaggcaacctgttgaatttactctctcagagtaaatggtgggaagggatccctttgtatacttttttaaatactacaaattagtgtcaggcagttcccagaaagagacaagaaatcctagtggcctcccagactgcagggtccccaaggatggaaagggaatgttctgctggttctaccctgtttgttgtgtcttgctatacagaaaaaccacatttcttttatatactgtacgtgggcatatcttgttgttcagtttgggtgtctgctaaagaggaagtgcactggccctctttgaaagggctttacagtgggggcaccaagaccccaaagggcccaggccaggagactgttaaagtgaaaaggcaatctatgactcaccttgctctgccatccctggcagcccccaccggtgtcctgttcctgccacatggagcttgacttcatgccagctataatctcccctgccttcctttaatcccaatttcccctgctcactcttccacagatataaagaacaaacacttagcatcccacactcaccccttctaatcctgaagggaagcccattctaaactcctttcctgcaaacccatttccagctcctagtagctttcctcccaaaggctttctttccaatcctttatagctttggagacgcctccccaattccccagggaaggaaactgttgtgtccaatccccattaaagacaaattgatcagtgcttcccactccaagtcaagctttat

SEQ ID NO: 7013 - DNA, 201 bp, Homo sapiens
caccccaactctgtgcaggaagaaaggaagtacccggaacccttgcgtttctttycccgtaaagggcctcccctccccaatggtgacacagaagtccacggtctggctgcagcccgtgacagccagcacaggagctacaaggtccgattcaacagcgtctcctcctactctgactcccaaaaatcatcaggcgatgggccy

SEQ ID NO: 7014 - DNA, 5466 bp, Homo sapiens
cagccccccacctcaggaaaacagtcccccacaaagaatggcagcccctccaagtgtccacgcttcctcaaggtcaagaactgggagactgaggtggttctcactgacaccctccaccttaagagcacattgatttggctccaaagcccacatggaaaggctggaagaggtgaacaaagagatcgacaccactagcacttaccagctcaaggacacagagctcatctatggggccaagcacgcctggcggaatgcctcgcgctgtgtgggcaggatccagtggtccaagctgcaggtattcgatgcccgtgactgcaccacggcccacgggatgttcaactacatctgtaaccatgtcaagtatgccaccaacaaagggaacctcaggtctgccatcaccatattcccccagaggacagacggcaagcacgacttccgagtctggaactcccagctcatccgctacgctggctacaagcagcctgacggctccaccctgggggacccagccaatgtgcagttcacagagatatgcatacagcagggctggaaaccgcctagaggccgcttcgatgtcctgccgctcctgcttcaggccaacggcaatgaccctgagctcttccagattcctccagagctggtgttggaagttcccatcaggcaccccaagtttgagtggttcaaggacctggggctgaagtggtacggcctccccgccgtgtccaacatgctcctagagattggcggcctggagttcagcgcctgtcccttcagtggctggtacatgggcacagagattggtgtccgcgactactgtgacaactcccgctacaatatcctggaggaagtggccaagaagatgaacttagacatgaggaagacgtcctccctgtggaaggaccaggcgctggtggagatcaatatcgcggttctctatagcttccagagtgacaaagtgaccattgttgaccatcactccgccaccgagtccttcattaagcacatggagaatgagtaccgctgccgggggggctgccctgccgactgggtgtggatcgtgccccccatgtccggaagcatcacccctgtgttccaccaggagatgctcaactaccggctcaccccctccttcgaataccagcctgatccctggaacacgcatgtctggaaaggcaccaacgggacccccacaaagcggcgagccatyggcttcaagaagctagcagaagctgtcaagttctcggccaagctgatggggcaggctatggccaagagggtgaaagcgaccatcctctatgccacagagacaggcaaatcgcaagcttatgccaagaccttgtgtgagatcttcaaacacgcctttgatgccaaggtgatgtccatggaagaatatgacattgtgcacctggaacatgaaactctggtccttgtggtcaccagcacctttggcaatggagatccccctgagaatggggagaaattcggctgtgctttgatggaaatgaggcaccccaactctgtgcaggaagaaaggaagagctacaaggtccgattcaacagcgtctcctcctactctgactcccaaaaatcatcaggcgatgggccygacctcagagacaactttgagagtgctggacccctggccaatgtgaggttctcagtttttggcctcggctcacgagcataccctcacttttgcgccttcggacaygctgtggacaccctyctggaagaactgggaggggagaggatcctgaagatgagrgaaggggatgagctctgtgggcaggaagaggctttcaggacctgggccaagaaggtcttcaaggcagcctgtgatgtcttctgtgtgggagatgatgtcaacattgaaaaggccaacaattccctcatcagcaatgatcgcagctggaagagaaacaagttccgcctcacctttgtggccgaagctccagaactcacacaaggtctatccaatgtccacaaaaagcgagtctcagctgcccggctccttagccgtcaaaacctccagagccctaaatccagtcggtcaactatcttcgtgcgtctscacaccaacgggagccaggagctgcagtaccagcctggggaccacctgggtgtcttccctggcaaccacgaggacctcgtgaatgccctgatcgagcggctggaggacgcgccgcctgtcaaccagatggtgaaagtggaactgctggaggagcggaacacggctttaggtgtcatcagtaactggacagaygagctccgcctcccgccctgcaccatcttccaggccttcaagtactacctggacatcaccacgccaccaacgcctctgcagctgcagcagtttgcctccctagctaccagcgagaaggagaagcagcgtctgctggtcctcagcaagggtttgcaggagtacgaggaatggaaatggggcaagaaccccaccatcgtggaggtgctggaggagttcccatctatccagatgccggccaccctgctcctgacccagctgtccctrctgcagccccgctactattccatcagctcctccccagacatgtaccctgatgaagtgcacctcacygtggccatcgtttcctaccgcactcgagatggagaaggaccaattcaccacggcgtatgctcctcctggctcaaccggatacaggctgacgaactggtcccctgtttcgtgagaggagcacccagcttccacctgccccggaacccccaagtcccctgcatcctcgttggaccaggcaccggcattgcccctttccgaagcttctggcaacagcggcaatttgatatccaacacaaaggaatgaacccctgccccatggtcctggtcttcgggtgccggcaatccaagatagatcatatctacagggaagagaccctgcaggccaagaacaagggggtcttcagagagctgtacacggcttactcccgggagccagacaaaccaaagaagtacgtgcaggacatcctgcaggagcagctggcggagtctgtgtaccgagccctgaaggagcaagggggccacatatacgtmtgtggggacgtcaccatggctgctgatgtcctcaaagccatccagcgcatcatgacccagcaggggaagctctcggcagaggacgccggcgtattcatcagccggatgagggatgacaaccgataccatgaggatatttttggagtcaccctgcgaacgtacgaagtgaccaaccgccttagatctgagtccattgccttcattgaagagagcaaaaaagacaccgatgaggttttcagctcctaactggaccctcttgcccagccggctgcaagttttgtaagcgcggacagacactgctgaacctttcctctgggaccccctgtggccctcgctctgcctcctgtccttgtcgctgtgccctggtttccctcctcgggcttctcgcccctcagtggtttcctcggccctcctgggtttactccttgagttttcctgctgcgatgcaatgcttttctaatctgcagtggctcttacaaaactctgttcccactccctctcttgccgacaagggcaactcaygggtgcatgaaaccactggaacatggccgtcgctgtgggggtttttttctctggggttcccctggaaaggctgcaggaactaggcacaagctctctgagccagtccctcagccactgaagtccccctttctccttttttatgatgacattttggttgtgcgtgcctgtgtgtgtgtgtgtgtgtgtgtgtgtgtgtgtgtgatgggccaggtctctgtccgtcctcttccctgcacaagtgtgtcgatcttagattgccactgctttcattgaagaccctcaatgccaagaaacgtgtccctggcccatattaatccctcgtgtgtccataattagggtccacgcccatgtacctgaaacatttggaagccccataattgttctagttaraaagggttcagggcatggggagaggagtgggaaattgattaaaggggctgtctcccaatgaaagaggcattcccagaatttgctgcatttagattttgataccagtgagcagagccctcatgtgacatgaacccatccaatggattgtgcaaatcccctccccaaacccacccataccagctagaatcacttgactttgccacatccattgactgaccccctcctccagcaatagcatccaaggggcctggaagttatgttgttcaaagaagcctggtggcaataaggatcttcccactttgccactggatgactttggatgggtcacttgtcctcagtttttcctagtcataatgtcatacgaacctaaagaatatgaatggattaaatgttaaagctttggtgcctggaaacaatatcaagtaacaatatgattattatttttttattcccccaaagcgggcttgctgcttcacccttggggatgaaataatggaagctggttaaagtggatgaggttggaaagagttgccataatgaggtcccacgtggcttcttcgataggagccacaacttggggtgggaagaacttgtccctcaggcttgttgccctctgcagttgatctccaaagttttaaacctgttaaattaattttgacaaataagttaccctcaactcagatcaaaaatgggcagccaagtcttcggtaggaattggagccggtgtaattcctccctaagaggcaacctgttgaatttactctctcagagtaaatggtgggaagggatccctttgtatacttttttaaatactacaaattagtgtcaggcagttcccagaaagagacaagaaatcctagtggcctcccagactgcagggtccccaaggatggaaagggaatgttctgctggttctaccctgtttgttgtgtcttgctatacagaaaaaccacatttcttttatatactgtacgtgggcatatcttgttgttcagtttgggtgtctgctaaagaggaagtgcactggccctctttgaaagggctttacagtgggggcaccaagaccccaaagggcccaggccaggagactgttaaagtgaaaaggcaatctatgactcaccttgctctgccatccctggcagcccccaccggtgtcctgttcctgccacatggagcttgacttcatgccagctataatctcccctgccttcctttaatcccaatttcccctgctcactcttccacagatataaagaacaaacacttagcatcccacactcaccccttctaatcctgaagggaagcccattctaaactcctttcctgcaaacccatttccagctcctagtagctttcctcccaaaggctttctttccaatcctttatagctttggagacgcctccccaattccccagggaaggaaactgttgtgtccaatccccattaaagacaaattgatcagtgcttcccactccaagtcaagctttat

SEQ ID NO: 7015 - DNA, 7147 bp, Homo sapiens
agagcggctcttttaatgagggttgcgacgtctccctccccacacccataaaccagtcgggttggacgtcactgctaattcgtttcagtgatgataggataaaggagggacattaagaaataaattccccctcacgaccctcgctgagctcacggctcagtccctacatatttatgccgcgtttccagccgctgggtgaggagctacttagcgccgcggctcctccraggggcggccgggcagcgagcagcggccgagcggacgggctcatgatgcctcagatctgatccgcatctaacaggctggcaatgaagatacccagagaatagttcacatctatcatgcgtcacttctagacacagccatcagacgcatctcctcccctttctgcctgaccttagggacacgtcccaccgcctctcttgacgtctgcctggtcaaccatcacttccttagagaataaggagagaggcggatgcaggaaatcatgccaccgacgggccaccagccatgagtgggtgaygctgagctgacgtcaaagacagagagggctgaagccttgtcagcacctgtcaccccggctcctgctctccgtgtagcctgaagcctggatcctcctggtgaaatcatcttggcctgatagcattgtgaggtcttcagacaggacccctcggaagctagttaccatggaggatcacatgttcggtgttcagcaaatccagcccaatgtcatttctgttcgtctcttcaagcgcaaagttgggggcctgggatttctggtgaaggagcgggtcagtaagccgcccgtgatcatctctgacctgattcgtgggggcgccgcagagcagagtggcctcatccaggccggagacatcattcttgcggtcaacggccggcccttggtggacctgagctatgacagcgccctggaggtactcagaggcattgcctctgagacccacgtggtcctcattctgaggggccctgaaggtttcaccacgcacctggagaccacctttacaggtgatgggacccccaagaccatccgggtgacacagcccctgggtccccccaccaaagccgtggatctgtcccaccagccaccggccggcaaagaacagcccctggcagtggatggggcctcgggtcccgggaatgggcctcagcatgcctacgatgatgggcaggaggctggctcactcccccatgccaacggcctggcccccaggcccccaggccaggaccccgcgaagaaagcaaccagagtcagcctccaaggcagaggggagaacaatgaactgctcaaggagatagagcctgtgctgagccttctcaccagtgggagcagaggggtcaagggaggggcacctgccaaggcagagatgaaagatatgggaatccaggtggacagagatttggacggcaagtcacacaaacctctgcccctcggcgtggagaacgaccgagtcttcaatgacctatgggggaagggcaatgtgcctgtcgtcctcaacaacccatattcagagaaggagcagccccccacctcaggaaaacagtcccccacaaagaatggcagcccctccaagtgtccacgcttcctcaaggtcaagaactgggagactgaggtggttctcactgacaccctccaccttaagagcacattggaaacgggatgcactgagtacatctgcatgggctccatcatgcatccttctcagcatgcaaggaggcytgaagacgtccgcacaaaaggacagctcttccctctcgccaaagagtttattgatcaatactattcatcaattaaaagatttggctccaaagcccacatggaaaggctggaagaggtgaacaaagagatcgacaccactagcacttaccagctcaaggacacagagctcatctatggggccaagcacgcctggcggaatgcctcgcgctgtgtgggcaggatccagtggtccaagctgcaggtattcgatgcccgtgactgcaccacggcccacgggatgttcaactacatctgtaaccatgtcaagtatgccaccaacaaagggaacctcaggtctgccatcaccatattcccccagaggacagacggcaagcacgacttccgagtctggaactcccagctcatccgctacgctggctacaagcagcctgacggctccaccctgggggacccagccaatgtgcagttcacagagatatgcatacagcagggctggaaaccgcctagaggccgcttcgatgtcctgccgctcctgcttcaggccaacggcaatgaccctgagctcttccagattcctccagagctggtgttggaagttcccatcaggcaccccaagtttgagtggttcaaggacctggggctgaagtggtacggcctccccgccgtgtccaacatgctcctagagattggcggcctggagttcagcgcctgtcccttcagtggctggtacatgggcacagagattggtgtccgcgactactgtgacaactcccgctacaatatcctggaggaagtggccaagaagatgaacttagacatgaggaagacgtcctccctgtggaaggaccaggcgctggtggagatcaatatcgcggttctctatagcttccagagtgacaaagtgaccattgttgaccatcactccgccaccgagtccttcattaagcacatggagaatgagtaccgctgccgggggggctgccctgccgactgggtgtggatcgtgccccccatgtccggaagcatcacccctgtgttccaccaggagatgctcaactaccggctcaccccctccttcgaataccagcctgatccctggaacacgcatgtctggaaaggcaccaacgggacccccacaaagcggcgagccatyggcttcaagaagctagcagaagctgtcaagttctcggccaagctgatggggcaggctatggccaagagggtgaaagcgaccatcctctatgccacagagacaggcaaatcgcaagcttatgccaagaccttgtgtgagatcttcaaacacgcctttgatgccaaggtgatgtccatggaagaatatgacattgtgcacctggaacatgaaactctggtccttgtggtcaccagcacctttggcaatggagatccccctgagaatggggagaaattcggctgtgctttgatggaaatgaggcaccccaactctgtgcaggaagaaaggaagagctacaaggtccgattcaacagcgtctcctcctactctgactcccaaaaatcatcaggcgatgggccygacctcagagacaactttgagagtgctggacccctggccaatgtgaggttctcagtttttggcctcggctcacgagcataccctcacttttgcgccttcggacaygctgtggacaccctyctggaagaactgggaggggagaggatcctgaagatgagrgaaggggatgagctctgtgggcaggaagaggctttcaggacctgggccaagaaggtcttcaaggcagcctgtgatgtcttctgtgtgggagatgatgtcaacattgaaaaggccaacaattccctcatcagcaatgatcgcagctggaagagaaacaagttccgcctcacctttgtggccgaagctccagaactcacacaaggtctatccaatgtccacaaaaagcgagtctcagctgcccggctccttagccgtcaaaacctccagagccctaaatccagtcggtcaactatcttcgtgcgtctscacaccaacgggagccaggagctgcagtaccagcctggggaccacctgggtgtcttccctggcaaccacgaggacctcgtgaatgccctgatcgagcggctggaggacgcgccgcctgtcaaccagatggtgaaagtggaactgctggaggagcggaacacggctttaggtgtcatcagtaactggacagaygagctccgcctcccgccctgcaccatcttccaggccttcaagtactacctggacatcaccacgccaccaacgcctctgcagctgcagcagtttgcctccctagctaccagcgagaaggagaagcagcgtctgctggtcctcagcaagggtttgcaggagtacgaggaatggaaatggggcaagaaccccaccatcgtggaggtgctggaggagttcccatctatccagatgccggccaccctgctcctgacccagctgtccctrctgcagccccgctactattccatcagctcctccccagacatgtaccctgatgaagtgcacctcacygtggccatcgtttcctaccgcactcgagatggagaaggaccaattcaccacggcgtatgctcctcctggctcaaccggatacaggctgacgaactggtcccctgtttcgtgagaggagcacccagcttccacctgccccggaacccccaagtcccctgcatcctcgttggaccaggcaccggcattgcccctttccgaagcttctggcaacagcggcaatttgatatccaacacaaaggaatgaacccctgccccatggtcctggtcttcgggtgccggcaatccaagatagatcatatctacagggaagagaccctgcaggccaagaacaagggggtcttcagagagctgtacacggcttactcccgggagccagacaaaccaaagaagtacgtgcaggacatcctgcaggagcagctggcggagtctgtgtaccgagccctgaaggagcaagggggccacatatacgtmtgtggggacgtcaccatggctgctgatgtcctcaaagccatccagcgcatcatgacccagcaggggaagctctcggcagaggacgccggcgtattcatcagccggatgagggatgacaaccgataccatgaggatatttttggagtcaccctgcgaacgtacgaagtgaccaaccgccttagatctgagtccattgccttcattgaagagagcaaaaaagacaccgatgaggttttcagctcctaactggaccctcttgcccagccggctgcaagttttgtaagcgcggacagacactgctgaacctttcctctgggaccccctgtggccctcgctctgcctcctgtccttgtcgctgtgccctggtttccctcctcgggcttctcgcccctcagtggtttcctcggccctcctgggtttactccttgagttttcctgctgcgatgcaatgcttttctaatctgcagtggctcttacaaaactctgttcccactccctctcttgccgacaagggcaactcaygggtgcatgaaaccactggaacatggccgtcgctgtgggggtttttttctctggggttcccctggaaaggctgcaggaactaggcacaagctctctgagccagtccctcagccactgaagtccccctttctccttttttatgatgacattttggttgtgcgtgcctgtgtgtgtgtgtgtgtgtgtgtgtgtgtgtgtgtgatgggccaggtctctgtccgtcctcttccctgcacaagtgtgtcgatcttagattgccactgctttcattgaagaccctcaatgccaagaaacgtgtccctggcccatattaatccctcgtgtgtccataattagggtccacgcccatgtacctgaaacatttggaagccccataattgttctagttaraaagggttcagggcatggggagaggagtgggaaattgattaaaggggctgtctcccaatgaaagaggcattcccagaatttgctgcatttagattttgataccagtgagcagagccctcatgtgacatgaacccatccaatggattgtgcaaatcccctccccaaacccacccataccagctagaatcacttgactttgccacatccattgactgaccccctcctccagcaatagcatccaaggggcctggaagttatgttgttcaaagaagcctggtggcaataaggatcttcccactttgccactggatgactttggatgggtcacttgtcctcagtttttcctagtcataatgtcatacgaacctaaagaatatgaatggattaaatgttaaagctttggtgcctggaaacaatatcaagtaacaatatgattattatttttttattcccccaaagcgggcttgctgcttcacccttggggatgaaataatggaagctggttaaagtggatgaggttggaaagagttgccataatgaggtcccacgtggcttcttcgataggagccacaacttggggtgggaagaacttgtccctcaggcttgttgccctctgcagttgatctccaaagttttaaacctgttaaattaattttgacaaataagttaccctcaactcagatcaaaaatgggcagccaagtcttcggtaggaattggagccggtgtaattcctccctaagaggcaacctgttgaatttactctctcagagtaaatggtgggaagggatccctttgtatacttttttaaatactacaaattagtgtcaggcagttcccagaaagagacaagaaatcctagtggcctcccagactgcagggtccccaaggatggaaagggaatgttctgctggttctaccctgtttgttgtgtcttgctatacagaaaaaccacatttcttttatatactgtacgtgggcatatcttgttgttcagtttgggtgtctgctaaagaggaagtgcactggccctctttgaaagggctttacagtgggggcaccaagaccccaaagggcccaggccaggagactgttaaagtgaaaaggcaatctatgactcaccttgctctgccatccctggcagcccccaccggtgtcctgttcctgccacatggagcttgacttcatgccagctataatctcccctgccttcctttaatcccaatttcccctgctcactcttccacagatataaagaacaaacacttagcatcccacactcaccccttctaatcctgaagggaagcccattctaaactcctttcctgcaaacccatttccagctcctagtagctttcctcccaaaggctttctttccaatcctttatagctttggagacgcctccccaattccccagggaaggaaactgttgtgtccaatccccattaaagacaaattgatcagtgcttcccactccaagtcaagctttat

SEQ ID NO: 7016 - DNA, 981 bp, Homo sapiens
atggtgcctgctgcacagcaggccacaagagcagagcgacaggacacagtgaggggcggcggtgccttcgagactggctcagcctccatcttcgatgggwcctccctggctgcctatgaggacatgctggttgtgatcgtccagtaccggctgggaatatttggcttcttcaccacatgggatcagcacgctcccgggaactgggccttcaaggaccaggtggctgctctatcctgggtccagaagaacatcgagttcttyggtggggaccccagctctgtgaccatctttggtgagtccgtgggagccataagtgtttccagccttatkctgtctcccatggccgaaggcttattccacaaagccgtcatggagagtggggtggccatcatcctttacctgaaggcccatgattatgagaagagtgaggacctgcaggtagttgcacaattctgtgggtacaatgcatcagactctgaggccccactgaggtgcctgaggacaaaatcctccaaggagctgctgaccctcagccagaaaacaaaggctttcactcaagtggttgatggtgctttctttcctaatgagcctctagatctattgtctcagaaagcatttaaagcaattccttccatcatcggagtcaataaccccgagtgtggcttccckctgcctatgaaggaggctcctgagattctcagtggctccaacaagtcccttgccctctgtctgacacaaaacatcctgcacatcctgcccaattatttgcaccttgtggctggtgaatacttccatgacaagcactccctgactgaaatccgagacagtcttctggacttgcttggagatgtgttctttgtgatccctaagctgatcacagctcrgtatcatagaggccaaataccccagggccgatacctgcttcttcgaatccaggttccaacccatccctccatctcatttccattttacgtgcacaca

SEQ ID NO: 7017 - DNA, 1289 bp, Homo sapiens
  misc_feature (1)...(1289): n = A,T,C or G
aacgaaaccaacagcagtccaagctcagtcagcagaagagataaaagcaaacaggtctgggaggcagttctgttgccactctctctcctgtcaatgatggatctcagaaataccccagccaaatctctggacaagttcattgaagactatctcttgccagacacgtgtttccgcatgcaaatcraccatgccattgacatcatctgtgggttcctgaaggaaaggtgcttccgaggtagctcctaccctgtgtgtgtgtccaaggtggtaaagggtggctcctcaggcaagggcaccaccctcagaggccgatctgacgctgacctggttgtcttcctcagtcctctcaccacttttcaggatcagttaaatcgccggggagagttcatccaggaaattaggrgacagctggaagcctgtcaaagagagagagcaytttccgtgaagtttgaggtccaggctccacgctggsgcaaccsccgtgcgctcagcttcgtactgagttcgctccagctcggggagggggtggagttcgatgtgctgcctgcctttgatgccctgggtcagttgactggcngctataaacctaacccccaaatctatgtcaagctcatcgaggagtgcacckacctgcagaaagasggcgagttctccacctgcttcacagaactacagagagacttcctgaagcagcgccccaccaagctcaagagcctcatccgcctagtcaagcactggtaccaaaattgtaagaagaagcttgggaagctgccacctcagtatgccctggagctcctgacggtctatgcttgggagcgagggagcatgaaaacacatttcaacacagcccagggatttcggacrgtcttggaattagtcataaactaccagcaactctgcatctactggacaaagtattatgactttaaaamccccattattgaaaagtacctgagaaggcagctcacgaaacccaggcctgtgatcctggacccggcggaccctacaggaaacttgggtggtggagacccaaagggttggaggcagctggcacaagaggctgaggcctggctgaattacycatgctttaagaattgggatgggtccccagtgagctcctggattctgrtgaaagcaacagtncagacgatgagaccgacgatcccaggasgtatcagaaatatggttacattggaacacatgagtaccctcatttctctcatagacccagcacactccargcagcatccaccccacaggcagaagaggactggacctgcaccatcctc

SEQ ID NO: 7018 - DNA, 1335 bp, Homo sapiens
  misc_feature (1)...(1335): n = A,T,C or G
aacgaaaccaacagcagtccaagctcagtcagcagaagagataaaagcaaacaggtctgggaggcagttctgttgccactctctctcctgtcaatgatggatctcagaaataccccagccaaatctctggacaagttcattgaagactatctcttgccagacacgtgtttccgcatgcaaatcraccatgccattgacatcatctgtgggttcctgaaggaaaggtgcttccgaggtagctcctaccctgtgtgtgtgtccaaggtggtaaagggtggctcctcaggcaagggcaccaccctcagaggccgatctgacgctgacctggttgtcttcctcagtcctctcaccacttttcaggatcagttaaatcgccggggagagttcatccaggaaattaggrgacagctggaagcctgtcaaagagagagagcaytttccgtgaagtttgaggtccaggctccacgctggsgcaaccsccgtgcgctcagcttcgtactgagttcgctccagctcggggagggggtggagttcgatgtgctgcctgcctttgatgccctgggtcagttgactggcngctataaacctaacccccaaatctatgtcaagctcatcgaggagtgcacckacctgcagaaagasggcgagttctccacctgcttcacagaactacagagagacttcctgaagcagcgccccaccaagctcaagagcctcatccgcctagtcaagcactggtaccaaaattgtaagaagaagcttgggaagctgccacctcagtatgccctggagctcctgacggtctatgcttgggagcgagggagcatgaaaacacatttcaacacagcccagggatttcggacrgtcttggaattagtcataaactaccagcaactctgcatctactggacaaagtattatgactttaaaamccccattattgaaaagtacctgagaaggcagctcacgaaacccaggcctgtgatcctggacccggcggaccctacaggaaacttgggtggtggagacccaaagggttggaggcagctggcacaagaggctgaggcctggctgaattacycatgctttaagaattgggatgggtccccagtgagctcctggattctgctgacccagcacactccargcagcatccaccccacaggcagaagaggactggacctgcaccatcctctgaatgccagtgcatcttgggggaaagggctccagtgttatctggaccagttccttcattttcaggtgggactcttgatccagagargacaaagctcctcagtgagctggtgtataatccaggacagaacccaggtctcc

SEQ ID NO: 7019 - DNA, 1469 bp, Homo sapiens
  misc_feature (1)...(1469): n = A,T,C or G
aacgaaaccaacagcagtccaagctcagtcagcagaagagataaaagcaaacaggtctgggaggcagttctgttgccactctctctcctgtcaatgatggatctcagaaataccccagccaaatctctggacaagttcattgaagactatctcttgccagacacgtgtttccgcatgcaaatcraccatgccattgacatcatctgtgggttcctgaaggaaaggtgcttccgaggtagctcctaccctgtgtgtgtgtccaaggtggtaaagggtggctcctcaggcaagggcaccaccctcagaggccgatctgacgctgacctggttgtcttcctcagtcctctcaccacttttcaggatcagttaaatcgccggggagagttcatccaggaaattaggrgacagctggaagcctgtcaaagagagagagcaytttccgtgaagtttgaggtccaggctccacgctggsgcaaccsccgtgcgctcagcttcgtactgagttcgctccagctcggggagggggtggagttcgatgtgctgcctgcctttgatgccctgggtcagttgactggcngctataaacctaacccccaaatctatgtcaagctcatcgaggagtgcacckacctgcagaaagasggcgagttctccacctgcttcacagaactacagagagacttcctgaagcagcgccccaccaagctcaagagcctcatccgcctagtcaagcactggtaccaaaattgtaagaagaagcttgggaagctgccacctcagtatgccctggagctcctgacggtctatgcttgggagcgagggagcatgaaaacacatttcaacacagcccagggatttcggacrgtcttggaattagtcataaactaccagcaactctgcatctactggacaaagtattatgactttaaaamccccattattgaaaagtacctgagaaggcagctcacgaaacccaggcctgtgatcctggacccggcggaccctacaggaaacttgggtggtggagacccaaagggttggaggcagctggcacaagaggctgaggcctggctgaattacycatgctttaagaattgggatgggtccccagtgagctcctggattctgctggtgagacctcctgcttcctccctgccattcatccctgcccctctccatgaagcttgagacatatagctggagaccattctttccaaagaacttacctcttgccaaaggccatttatattcatatagtgacaggctgtgctccatattttacagtcattttggtcacaatcgagggtttctggaattttcacatcccttgtccagaattcattcccctaagagtaataataaataatctctaacmccatttattgactgtctgcttcgggctcaggttctgtcctaagccctttaatatgcactctctcattaaatagtcacaacaatcccatgaggca

SEQ ID NO: 7020 - DNA, 1649 bp, Homo sapiens
  misc_feature (1)...(1649): n = A,T,C or G
aacgaaaccaacagcagtccaagctcagtcagcagaagagataaaagcaaacaggtctgggaggcagttctgttgccactctctctcctgtcaatgatggatctcagaaataccccagccaaatctctggacaagttcattgaagactatctcttgccagacacgtgtttccgcatgcaaatcraccatgccattgacatcatctgtgggttcctgaaggaaaggtgcttccgaggtagctcctaccctgtgtgtgtgtccaaggtggtaaagggtggctcctcaggcaagggcaccaccctcagaggccgatctgacgctgacctggttgtcttcctcagtcctctcaccacttttcaggatcagttaaatcgccggggagagttcatccaggaaattaggrgacagctggaagcctgtcaaagagagagagcaytttccgtgaagtttgaggtccaggctccacgctggsgcaaccsccgtgcgctcagcttcgtactgagttcgctccagctcggggagggggtggagttcgatgtgctgcctgcctttgatgccctgggtcagttgactggcngctataaacctaacccccaaatctatgtcaagctcatcgaggagtgcacckacctgcagaaagasggcgagttctccacctgcttcacagaactacagagagacttcctgaagcagcgccccaccaagctcaagagcctcatccgcctagtcaagcactggtaccaaaattgtaagaagaagcttgggaagctgccacctcagtatgccctggagctcctgacggtctatgcttgggagcgagggagcatgaaaacacatttcaacacagcccagggatttcggacrgtcttggaattagtcataaactaccagcaactctgcatctactggacaaagtattatgactttaaaamccccattattgaaaagtacctgagaaggcagctcacgaaacccaggcctgtgatcctggacccggcggaccctacaggaaacttgggtggtggagacccaaagggttggaggcagctggcacaagaggctgaggcctggctgaattacycatgctttaagaattgggatgggtccccagtgagctcctggattctgctgrtgaaagcaacagtncagacgatgagaccgacgatcccaggasgtatcagaaatatggttacattggaacacatgagtaccctcatttctctcatagacccagcacactccargcagcatccaccccacaggcagaagaggactggacctgcaccatcctctgaatgccagtgcatcttgggggaaagggctccagtgttatctggaccagttccttcattttcaggtgggactcttgatccagagargacaaagctcctcagtgagctggtgtataatccaggacagaacccaggtctcctgactcctggccttctatgccctctatcctatcatagataacattctccacagcctcacttcattccacctattctctgaaaatattccctgagagagaacagagagatttagataagagaatgaaattccagccttgactttcttctgtgcacctgatgggagggtaatgtctaatgtattatcaataacaataaaaataaagcaaataccattta

SEQ ID NO: 7021 - DNA, 1525 bp, Homo sapiens
  misc_feature (1)...(1525): n = A,T,C or G
ctgggaggcagttctgttgccactctctctcctgtcaatgatggatctcagaaataccccagccaaatctctggacaagttcattgaagactatctcttgccagacacgtgtttccgcatgcaaatcraccatgccattgacatcatctgtgggttcctgaaggaaaggtgcttccgaggtagctcctaccctgtgtgtgtgtccaaggtggtaaagtcctctcaccacttttcaggatcagttaaatcgccggggagagttcatccaggaaattaggrgacagctggaagcctgtcaaagagagagagcaytttccgtgaagtttgaggtccaggctccacgctggsgcaaccsccgtgcgctcagcttcgtactgagttcgctccagctcggggagggggtggagttcgatgtgctgcctgcctttgatgccctgggtcagttgactggcngctataaacctaacccccaaatctatgtcaagctcatcgaggagtgcacckacctgcagaaagasggcgagttctccacctgcttcacagaactacagagagacttcctgaagcagcgccccaccaagctcaagagcctcatccgcctagtcaagcactggtaccaaaattgtaagaagaagcttgggaagctgccacctcagtatgccctggagctcctgacggtctatgcttgggagcgagggagcatgaaaacacatttcaacacagcccagggatttcggacrgtcttggaattagtcataaactaccagcaactctgcatctactggacaaagtattatgactttaaaamccccattattgaaaagtacctgagaaggcagctcacgaaacccaggcctgtgatcctggacccggcggaccctacaggaaacttgggtggtggagacccaaagggttggaggcagctggcacaagaggctgaggcctggctgaattacycatgctttaagaattgggatgggtccccagtgagctcctggattctgctgrtgaaagcaacagtncagacgatgagaccgacgatcccaggasgtatcagaaatatggttacattggaacacatgagtaccctcatttctctcatagacccagcacactccargcagcatccaccccacaggcagaagaggactggacctgcaccatcctctgaatgccagtgcatcttgggggaaagggctccagtgttatctggaccagttccttcattttcaggtgggactcttgatccagagargacaaagctcctcagtgagctggtgtataatccaggacagaacccaggtctcctgactcctggccttctatgccctctatcctatcatagataacattctccacagcctcacttcattccacctattctctgaaaatattccctgagagagaacagagagatttagataagagaatgaaattccagccttgactttcttctgtgcacctgatgggagggtaatgtctaatgtattatcaataacaataaaaataaagcaaataccattta

SEQ ID NO: 7022 - DNA, 1554 bp, Homo sapiens
gaccattcagaagactgtccacccgtcctcagccccctctcttcgtgggctatctactcagttgatccctccctcgctggcttggctctgactcctgctcagacccatcacctttgccgggaatgatgtctggagaacccctgcacgtgaagacccccatccgtgacagcatggccctgtccaaaatggccggcaccagcgtctacctcaagatggacagtgcccagccctccggctccttcaagatccggggcattgggcacttctgcaagaggtgggccaagcaaggctgtgcacattttgtctgctcctcggcgggcaaygcaggcatggcggctgcatatgcggccaggcaactcggcgtccccgccaccatcgtggtgcccagcaccacacctgctctcaccattgagcgcctcaagaatgaaggtgccacagtcaaggtggtgggtgagttattggatgaagccttcgagctggccaaggccctagcgaagaacaacccgggttgggtctacattcccccctttgatgaccccctcatctgggaaggccacgcttccatcgtgaaagagctgaaggagacactgtgggaaaagccgggggccatcgcgctgtcagtgggcggcgggggcctgctgtgtggagtggtccaggggctgcaggaggtgggctggggggaygtgcctgtcatcgccatggagacttttggtgcccacagcttccacgctgccaccaccgcaggcaaacttgtctccctgcccaagatcaccagtgttgccaaggccctgggcgtgaagactgtgggggctcaggccctgaagctgtttcaggaacaccccattttctctgaagttatctcggaccaggaggctgtggccgccattgagaagttcgtggatgatgagaagatcctggtggagcccgcctgcggggcagccctggccgctgtctatagccacgtgatccagaagctccaactggaggggaatctccgaaccccgctgccatccctcgtggtcatcgtctgcgggggcagcaacatcagcctggcccagctgcgggcgctcaaggaacagctgggcatgacaaataggttgcccaagtgaggacggaccccttaccgatctgtgctctcctagcccaagagacccctggaggggctggagttttatccagcgcctcgtcgtatgtttgrctgagcacctgtggcctgggtgcaggttaacttcttgttatcaggagcccactatgcagaggccaaaggtcggcagccagcgaggctatgaattggacctttttggtatctgtgtgactgctctgtgcccatccttagccaacttgctggcgtgacaagtgcccacaagtaacacaccaggtacccagagcagggtggacaggagagacctgaatcacagcagtgaggaattcctcaaagctgtgacctcgcccctgaacttgttcccagtgaaggtcaacagggccaccaaccagggttgaggaaccatctcagccatcctcccaggaagcccacccctgacccttactaatttt

SEQ ID NO: 7023 - DNA, 655 bp, Homo sapiens
gaccattcagaagactgtccacccgtcctcagccccctctcttcgtgggctatctactcagttgatccctccctcgctggcttggctctgactcctgctcagacccatcacctttgccgggaatgatgtctggagaacccctgcacgtgaagacccccatccgtgacagcatggccctgtccaaaatggccggcaccagcgtctacctcaagatggacagtgcccagccctccggctccttcaagatccggggcattgggcacttctgcaagaggtgggccaagcaaggctgtgcacattttgtctgctcctcggcgggcaaygcaggcatggccgctgtctatagccacgtgatccagaagctccaactggaggggaatctccgaaccccgctgccatccctcgtggtcatcgtctgcgggggcagcaacatcagcctggcccagctgcgggcgctcaaggaacagctgggcatgacaaataggttgcccaagtgaggacggaccccttaccgatctgtgctctcctagcccaagagacccctggaggggctggagttttatccagcgcctcgtcgtatgtttgrctgagcacctgtggcctgggtgcaggttaacttcttgttatcaggagcccactatgcagaggccaaagg

SEQ ID NO: 7024 - DNA, 1743 bp, Homo sapiens
ctgtacgttcttgaaaggggaactttgaaatggatgacaggaagagagccaagaggaaaagttcctacagagaacagcagccaggaccacctcgagggagaaatgcactttggggtgccgcggatgcagacagaaggrgtttgsggcaggagagacggggtttcaccatgttggctggtctcaaactcctgagctcaagtgatcygcccacctcggcctcccgaagtgctgggactacatccgtgagccaccgcgctcagcccwttgagaggtttgaagccgaggagctgtgtgtgaatggaccagtgggaatgatgtctggagaacccctgcacgtgaagacccccatccgtgacagcatggccctgtccaaaatggccggcaccagcgtctacctcaagatggacagtgcccagccctccggctccttcaagatccggggcattgggcacttctgcaagaggtgggccaagcaaggctgtgcacattttgtctgctcctcggcgggcaaygcaggcatggcggctgcatatgcggccaggcaactcggcgtccccgccaccatcgtggtgcccagcaccacacctgctctcaccattgagcgcctcaagaatgaaggtgccacagtcaaggtggtgggtgagttattggatgaagccttcgagctggccaaggccctagcgaagaacaacccgggttgggtctacattcccccctttgatgaccccctcatctgggaaggccacgcttccatcgtgaaagagctgaaggagacactgtgggaaaagccgggggccatcgcgctgtcagtgggcggcgggggcctgctgtgtggagtggtccaggggctgcaggaggtgggctggggggaygtgcctgtcatcgccatggagacttttggtgcccacagcttccacgctgccaccaccgcaggcaaacttgtctccctgcccaagatcaccagtgttgccaaggccctgggcgtgaagactgtgggggctcaggccctgaagctgtttcaggaacaccccattttctctgaagttatctcggaccaggaggctgtggccgccattgagaagttcgtggatgatgagaagatcctggtggagcccgcctgcggggcagccctggccgctgtctatagccacgtgatccagaagctccaactggaggggaatctccgaaccccgctgccatccctcgtggtcatcgtctgcgggggcagcaacatcagcctggcccagctgcgggcgctcaaggaacagctgggcatgacaaataggttgcccaagtgaggacggaccccttaccgatctgtgctctcctagcccaagagacccctggaggggctggagttttatccagcgcctcgtcgtatgtttgrctgagcacctgtggcctgggtgcaggttaacttcttgttatcaggagcccactatgcagaggccaaaggtcggcagccagcgaggctatgaattggacctttttggtatctgtgtgactgctctgtgcccatccttagccaacttgctggcgtgacaagtgcccacaagtaacacaccaggtacccagagcagggtggacaggagagacctgaatcacagcagtgaggaattcctcaaagctgtgacctcgcccctgaacttgttcccagtgaaggtcaacagggccaccaaccagggttgaggaaccatctcagccatcctcccaggaagcccacccctgacccttactaatttt

SEQ ID NO: 7025 - DNA, 6576 bp, Homo sapiens
  misc_feature (1)...(6576): n = A,T,C or G
ggttcggagagccgggcgggaaaacgaaaccagaaatccgaaggccgcgccagagccctgcttccccttgcanctgcgccgggnggccatggacttgtacagcaccccggccgctgcgctggacaggttcgtggccagaangctgcagccgcggaaggagttcgtagagaaggcgcggcgcgctctgggcgccctggccgctgcnctgagggagcgcgggggccgcctcggtrctgctgccccgcgggtgctgaaaactgtcaagggaggctcctcgggcyggggcacagctctcaagggtggctgtgattctgaacttgtcatcttcctcgactgcttcaagagctatgtggaccagagggcccgccgtgcagagatcctcagtgagatgcgggcatcgctggaatcctggtggcagaacccagtccctggtctgagactcacgtttcctgagcagagcgtgcctggggccctgcagttccgcctgacatccgtagatcttgaggactggatggatgttagcctggtgcctgccttcaatgtcctgggtcaggccggctccggcgtcaaacccaagccacaagtctactctaccctcctcaacagtggctgccaagggggcgagcatgcggcctgcttcacagagctgcggaggaactttgtgaacattcgcccagccaagttgaagaacctaatcttgctggtgaagcactggtaccaccaggtgtgcctacaggggttgtggaaggagacgctgcccccggtctatgccctggaattgctgaccatcttcgcctgggagcagggctgtaagaaggatgctttcagcctagccgaaggcctccgaactgtcctgggcctgatccaacagcatcagcacctgtgtgttttctggactgtcaactatggcttcgaggaccctgcagttgggcagttcttgcagcggcagcttaagagacccaggcctgtgatcctggacccagctgaccccacatgggacctggggaatggggcagcctggcactgggatttgctagcccaggaggcagcatcctgctatgaccacccatgctttctgagggggatgggggacccagtgcagtcttggaaggggccgggccttccacgtgctggatgctcaggtttgggccaccccatccagctagaccctaaccagaagacccctgaaaacagcaagagcctcaatgctgtgtacccaagagcagggagsaaacctccctcatgcccagctcctggccccactggggcagccagcatcgtcccctctgtgccgggaatggccttggacctgtctcagatccccaccaaggagctggaccgcttcatccaggaccacctgaagccgagcccccagttccaggagcaggtgaaaaaggccatygacatcatcttgcgctgcctccatgagaactgtgttcacaaggcctcaagagtcagtaaagggggctcatttggccggggcacagacctaagggatggctgtgatgttgaactcatcatcttcctcaactgcttcacggactacaaggaccaggggccccgccgcgcagagatccttgatgagatgcgagcgcagctagaatcctggtggcaggaccaggtgcccagcctgagccttcagtttcctgagcagaatgtgcctgaggctctgcagttccagctggtgtccacagccctgaagagctggacggatgttagcctgctgcctgccttcgatgctgtggggcagctcagttctggcaccaaaccaaatccccaggtctactcraggctcctcaccagtggctgccaggagggcgagcataaggcctgcttcrcagagctgcggaggaacttcatgaacattcgccctgtcaagctgaagaacctgattctgctggtgaagcactggtaccgccaggttgcggctcagaacaaaggaaaaggaccagcccctgcctctctgcccccagcctatgccctggagctcctcaccatctttgcctgggagcagggctgcaggcaggattgtttcaacatggcccaaggcttccggacggtgctggggctcgtgcaacagcatcagcagctctgtgtctactggacggtcaactatagcactgaggacccagccatgagaatgcaccttcttggccagcttcgaaaacccagacccctggtcctggaccccgctgatcccacctggaacgtgggccacggtagctgggagctgttggcccaggaagcagcagcrctggggatgcagkcctgctttctgagtagagacgggacatctgtgcagccctgggatgtgatgccagccctcctttaccaaaccccagctggggaccttgacaagttcatcagtgaatttctccagcccaaccgccagttcctggcccaggtgaacaaggccgttgataccatctgttcatttttgaaggaaaactgcttccggaattctcccatcaaagtgatcaaggtggtcaagggtggctcttcagccaaaggcacagctctgcgaggccgctcagatgccgacctcgtggtgttcctcagctgcttcagccagttcactgagcagggcaacaagcgggccgagatcatctccgagatccgagcccagytggaggcatgtcaacaggagcggcagttcgaggtcaagtttgaagtctccaaatgggagaatccccgcgtgctgagcttctcactgacatcccagacgatgctggaccagagtgtggactttgatgtgctgccagcctttgacgccctaggccagctggtctctggctccaggcccagctctcaagtctacgtcgacctcatccacagctacagcaatgcgggcgagtactccacctgcttcacagagctacaacrggacttcatcatctctcgccctaccaagctgaagagcctgatccggctggtgaagcactggtaccagcagtgtaccaagatctccaaggggagaggctccctacccccacagcaygggctggaactcctgactgtgtatgcctgggagcagggcgggaaggactcccagttcaacatggctgagggcttccgcacggtcctggagctggtcacccagtaccgccagctctgtatctactggaccatcaactacaacgccaaggacaagactgttggagacttcctgaaacagcagcttcagaagcccaggcctatcatcctggatccggctgacccgacaggcaacctgggccacaatgcccgctgggacctgctggccaaggaagctgcagcctgcacatctgccctgtgctgcatgggacggaatggcatccccatccagccatggccagtgaaggctgctgtgtgaagttgagaaaatcagcggtcctactggatgaagagaagatggacaccagccctcagcatgaggaaattcagggtcccctaccagatgagagasattgtgtacatgtgtgtgtgagcacatgtgtgcrtgtgtgtgcacacgtgtgcatgtgtgtgttttagtgaatctgctctcccagctcacacactcccctgcctcccatggcttacacactrggatccagactccatggtttgacaccagcctgcgtttgcagcttctctgtcacttccatgactctatcctcataccaccactgctgcttcccacccagctgagaatgccccctcctccctgactcctctctgcccatgcaaattagctcacatctttcctcctgctgcaatccatcccttcctcccattggcctctccttgccaaatctaaatastttatatagggatggcagagagttcccatctcatctgtcagccacagtcatttggtactggctacctggagccttatcttctgaagggttttaaagaatggccaattagctgagaagaattatctaatcaattagtgatgtctgccatggatgcagtagaggaaagtggtggtacaagtgccatgattgattagcaatgtctgcactggatacggaaaaaagaaggtgcttgcaggtttacagtgtatatgtgggctattgaagagccctctgagctcggttgctagcaggagagcatgcccatattggcttactttgtctgccacagacacagacagagggagttgggacatgcatgctatggggaccctcttgttggacacctaattggatgcctcttcatgagaggcctccttttcttcaccttttatgctgcactcctcccctagtttacacatcttgatgctgtggctcagtttgccttcctgaatttttattgggtccctgttttctctcctaacatgctgagattctgcatccccacagcctaaactgagccagtggccaaacaaccgtgctcagcctgtttctctctgccctctagagcaaggcccaccaggtccatccaggaggctctcctgacctcaagkccaacaacagtgtccrcactagtcaaggttcagcccagaaaacagaaagcactctaggaatcttaggcagaaagggattttatctaaatcactggaaaggctggaggagcagaaggcagaggccaccactggactattsgtttcaatattagaccactgtagccgaatcagaggccagagagcagccactgctactgctaatgccaccactacccctgccatcactgccccacatggacaaaactggagtcgagacctaggttagattcctgcaaccacaaacatccatcagggatggccagctgccagagctgcggraagacggatcccacctccctttcttagcagaatctaaattacagccagacctctggctgcagaggagtctgagacatgtatgaytgaatgggtgccaagtgccagggggcggagtccccagcagatgcatcctggccatctgttgcgtggatgagggagtgggtctatctcagaggaaggaacaggaaacaaagaaaggaagccactgaacatcccttctctgctccacaggagtgycttagacagcctgactctccacaaaccactgttaaaacttacctgctaggaatgctagattgaatgggatgggaagagccttccctcattattgtcattcttggagagaggtgagcaaccaagggaagctcctctgattcacctagaacctgttctctgccgtctttggctcagcctacagagactagagtaggtgaagggacagaggacagggcttctaatacctgtgccatattgacagcctccatccctgtcccccatcttggtgctgaaccaacgctaagggcaccttcttagactcacctcatcgatactgcctggtaatccaaagctagaactctcaggaccccaaactccacctcttggattggccctggctgctgccacacacatatccaagagctcagggccagttctggtgggcagcagagacctgctctgccaagttgtccagcagcagagtggccctggcctgggcatcacaagccagtgatgctcctgggaagaccaggtggcaggtcgcagttgggtaccttccattcccaccacacagactctgggcctccccgcaaaatggctccagaattagagtaattatgagatggtgggaaccagagcaactcaggtgcatgatacaaggagaggttgtcatctgggtagggcagagaggagggcttgctcatctgaacaggggtgtatttcattccaggccctcagtctttggcaatggccaccctggtgttggcatattggccccactgtaacttttgggggcttcccggtctagccacaccctcggatggaaagacttgactgcataaagatgtcagttctccctgagttgattgataggcttaatggtcaccctaaaaacamccacatatgcttttcgacgcaatagctaggaaaacacagggaaagaagagttctgagcagggcctagtcttagccaatattaaaacatactatgaagcctctgatacttaaacagcatggcgctggtacgtaaatagaccaatgcagttaggtggctctttccaagactctggggaaaaaagtagtaaaaagctaaatgcaatcaatcagcaattgaaagctaagtgagagagccagagggcctccttggtggtaaaagagggttgcatttcttgcagccagaaggcagagaaagtgaagaccaagtccagaactgaatcctaagaaatgcaggactgcaaagaaattggtgtgtgtgtgtgtgtgtgtgtgtttaatttttaaaaagtttttattgagatacaagtcaataccataaagctctcacccttctaaagtgtacaattcagtggtgtgagtatattcataagatttatacttggtgtctattcataagacttatatccagcatattcataactagagccatatcacagatgcattcatcataataattccagacattttcatcaccctaaaaggaaaccctgaaacccattagcagtcattccccattcctccaacccattmtctccctaatccctagaaaccaccaatctgctgtgtatttcatctattgccaacatttcatataaatggcatcatacaatatg

SEQ ID NO: 7026 - DNA, 6622 bp, Homo sapiens
  misc_feature (1)...(6622): n = A,T,C or G
ggttcggagagccgggcgggaaaacgaaaccagaaatccgaaggccgcgccagagccctgcttccccttgcanctgcgccgggnggccatggacttgtacagcaccccggccgctgcgctggacaggttcgtggccagaangctgcagccgcggaaggagttcgtagagaaggcgcggcgcgctctgggcgccctggccgctgcnctgagggagcgcgggggccgcctcggtrctgctgccccgcgggtgctgaaaactgtcaagggaggctcctcgggcyggggcacagctctcaagggtggctgtgattctgaacttgtcatcttcctcgactgcttcaagagctatgtggaccagagggcccgccgtgcagagatcctcagtgagatgcgggcatcgctggaatcctggtggcagaacccagtccctggtctgagactcacgtttcctgagcagagcgtgcctggggccctgcagttccgcctgacatccgtagatcttgaggactggatggatgttagcctggtgcctgccttcaatgtcctgggtcaggccggctccggcgtcaaacccaagccacaagtctactctaccctcctcaacagtggctgccaagggggcgagcatgcggcctgcttcacagagctgcggaggaactttgtgaacattcgcccagccaagttgaagaacctaatcttgctggtgaagcactggtaccaccaggtgtgcctacaggggttgtggaaggagacgctgcccccggtctatgccctggaattgctgaccatcttcgcctgggagcagggctgtaagaaggatgctttcagcctagccgaaggcctccgaactgtcctgggcctgatccaacagcatcagcacctgtgtgttttctggactgtcaactatggcttcgaggaccctgcagttgggcagttcttgcagcggcagcttaagagacccaggcctgtgatcctggacccagctgaccccacatgggacctggggaatggggcagcctggcactgggatttgctagcccaggaggcagcatcctgctatgaccacccatgctttctgagggggatgggggacccagtgcagtcttggaaggggccgggccttccacgtgctggatgctcaggtttgggccaccccatccagctagaccctaaccagaagacccctgaaaacagcaagagcctcaatgctgtgtacccaagagcagggagsaaacctccctcatgcccagctcctggccccactggggcagccagcatcgtcccctctgtgccgggaatggccttggacctgtctcagatccccaccaaggagctggaccgcttcatccaggaccacctgaagccgagcccccagttccaggagcaggtgaaaaaggccatygacatcatcttgcgctgcctccatgagaactgtgttcacaaggcctcaagagtcagtaaagggggctcatttggccggggcacagacctaagggatggctgtgatgttgaactcatcatcttcctcaactgcttcacggactacaaggaccaggggccccgccgcgcagagatccttgatgagatgcgagcgcagctagaatcctggtggcaggaccaggtgcccagcctgagccttcagtttcctgagcagaatgtgcctgaggctctgcagttccagctggtgtccacagccctgaagagctggacggatgttagcctgctgcctgccttcgatgctgtggggcagctcagttctggcaccaaaccaaatccccaggtctactcraggctcctcaccagtggctgccaggagggcgagcataaggcctgcttcrcagagctgcggaggaacttcatgaacattcgccctgtcaagctgaagaacctgattctgctggtgaagcactggtaccgccaggttgcggctcagaacaaaggaaaaggaccagcccctgcctctctgcccccagcctatgccctggagctcctcaccatctttgcctgggagcagggctgcaggcaggattgtttcaacatggcccaaggcttccggacggtgctggggctcgtgcaacagcatcagcagctctgtgtctactggacggtcaactatagcactgaggacccagccatgagaatgcaccttcttggccagcttcgaaaacccagacccctggtcctggaccccgctgatcccacctggaacgtgggccacggtagctgggagctgttggcccaggaagcagcagcrctggggatgcagkcctgctttctgagtagagacgggacatctgtgcagccctgggatgtgatgccagccctcctttaccaaaccccagctggggaccttgacaagttcatcagtgaatttctccagcccaaccgccagttcctggcccaggtgaacaaggccgttgataccatctgttcatttttgaaggaaaactgcttccggaattctcccatcaaagtgatcaaggtggtcaagggtggctcttcagccaaaggcacagctctgcgaggccgctcagatgccgacctcgtggtgttcctcagctgcttcagccagttcactgagcagggcaacaagcgggccgagatcatctccgagatccgagcccagytggaggcatgtcaacaggagcggcagttcgaggtcaagtttgaagtctccaaatgggagaatccccgcgtgctgagcttctcactgacatcccagacgatgctggaccagagtgtggactttgatgtgctgccagcctttgacgccctaggccagctggtctctggctccaggcccagctctcaagtctacgtcgacctcatccacagctacagcaatgcgggcgagtactccacctgcttcacagagctacaacrggacttcatcatctctcgccctaccaagctgaagagcctgatccggctggtgaagcactggtaccagcagtgtaccaagatctccaaggggagaggctccctacccccacagcaygggctggaactcctgactgtgtatgcctgggagcagggcgggaaggactcccagttcaacatggctgagggcttccgcacggtcctggagctggtcacccagtaccgccagctctgtatctactggaccatcaactacaacgccaaggacaagactgttggagacttcctgaaacagcagcttcagaagcccaggcctatcatcctggatccggctgacccgacaggcaacctgggccacaatgcccgctgggacctgctggccaaggaagctgcagcctgcacatctgccctgtgctgcatgggacggaatggcatccccatccagccatggccagtgaaggctgctgtgtgaagttgagaaaatcagcggtcctactggatgaagagaagatggacaccagccctcagcatgaggaaattcagggtcccctaccagatgagagasattgtgtacatgtgtgtgtgagcacatgtgtgcrtgtgtgtgcacacgtgtgcatgtgtgtgttttagtgaatctgctctcccagctcacacactcccctgcctcccatggcttacacactrggatccagactccatggtttgacaccagcctgcgtttgcagcttctctgtcacttccatgactctatcctcataccaccactgctgcttcccacccagctgagaatgccccctcctccctgactcctctctgcccatgcaaattagctcacatctttcctcctgctgcaatccatcccttcctcccattggcctctccttgccaaatctaaatastttatatagggatggcagagagttcccatctcatctgtcagccacagtcatttggtactggctacctggagccttatcttctgaagggttttaaagaatggccaattagctgagaagaattatctaatcaattagtgatgtctgccatggatgcagtagaggaaagtggtggtacaagtgccatgattgattagcaatgtctgcactggatacggaaaaaagaaggtgcttgcaggtttacagtgtatatgtgggctattgaagagccctctgagctcggttgctagcaggagagcatgcccatattggcttactttgtctgccacagacacagacagagggagttgggacatgcatgctatggggaccctcttgttggacacctaattggatgcctcttcatgagaggcctccttttcttcaccttttatgctgcactcctcccctagtttacacatcttgatgctgtggctcagtttgccttcctgaatttttattgggtccctgttttctctcctaacatgctgagattctgcatccccacagcctaaactgagccagtggccaaacaaccgtgctcagcctgtttctctctgccctctagagcaaggcccaccaggtccatccaggaggctctcctgacctcaagkccaacaacagtgtccrcactagtcaaggttcagcccagaaaacagaaagcactctaggaatcttaggcagaaagggattttatctaaatcactggaaaggctggaggagcagaaggcagaggccaccactggactattsgtttcaatattagaccactgtagccgaatcagaggccagagagcagccactgctactgctaatgccaccactacccctgccatcactgccccacatggacaaaactggagtcgagacctaggttagattcctgcaaccacaaacatccatcagggatggccagctgccagagctgcggraagacggatcccacctccctttcttagcagaatctaaattacagccagacctctggctgcagaggagtctgagacatgtatgaytgaatgggtgccaagtgccagggggcggagtccccagcagatgcatcctggccatctgttgcgtggatgagggagtgggtctatctcagaggaaggaacaggaaacaaagaaaggaagccactgaacatcccttctctgctccacaggagtgycttagacagcctgactctccacaaaccactgttaaaacttacctgctaggaatgctagattgaatgggatgggaagagccttccctcattattgtcattcttggagagaggtgagcaaccaagggaagctcctctgattcacctagaacctgttctctgccgtctttggctcagcctacagagactagagtaggtgaagggacagaggacagggcttctaatacctgtgccatattgacagcctccatccctgtcccccatcttggtgctgaaccaacgctaagggcaccttcttagactcacctcatcgatactgcctggtaatccaaagctagaactctcaggaccccaaactccacctcttggattggccctggctgctgccacacacatatccaagagctcagggccagttctggtgggcagcagagacctgctctgccaagttgtccagcagcagagtggccctggcctgggcatcacaagccagtgatgctcctgggaagaccaggtggcaggtcgcagttgggtaccttccattcccaccacacagactctgggcctccccgcaaaatggctccagaattagagtaattatgagatggtgggaaccagagcaactcaggtgcatgatacaaggagaggttgtcatctgggtagggcagagaggagggcttgctcatctgaacaggggtgtatttcattccaggccctcagtctttggcaatggccaccctggtgttggcatattggccccactgtaacttttgggggcttcccggtctagccacaccctcggatggaaagacttgactgcataaagatgtcagttctccctgagttgattgataggcttaatggtcaccctaaaaacamccacatatgcttttcgatggaaccagataagttgacgctaaagttcttatggaaaaatacacacgcaatagctaggaaaacacagggaaagaagagttctgagcagggcctagtcttagccaatattaaaacatactatgaagcctctgatacttaaacagcatggcgctggtacgtaaatagaccaatgcagttaggtggctctttccaagactctggggaaaaaagtagtaaaaagctaaatgcaatcaatcagcaattgaaagctaagtgagagagccagagggcctccttggtggtaaaagagggttgcatttcttgcagccagaaggcagagaaagtgaagaccaagtccagaactgaatcctaagaaatgcaggactgcaaagaaattggtgtgtgtgtgtgtgtgtgtgtgtttaatttttaaaaagtttttattgagatacaagtcaataccataaagctctcacccttctaaagtgtacaattcagtggtgtgagtatattcataagatttatacttggtgtctattcataagacttatatccagcatattcataactagagccatatcacagatgcattcatcataataattccagacattttcatcaccctaaaaggaaaccctgaaacccattagcagtcattccccattcctccaacccattmtctccctaatccctagaaaccaccaatctgctgtgtatttcatctattgccaacatttcatataaatggcatcatacaatatg

SEQ ID NO: 7027 - DNA, 1283 bp, Homo sapiens
ggaaagagctggttccctggcaggctggagggcaggagctggggccacgctggtctgggatagttgggcagggaggctgtctacctggtctccagaatggacggccctgtggcagagcatgccaagcaggagccctttcacgtggtcacacctctgttggagagctgggcgctgtcccaggtggcgggcatgcctgtcttcctcaagtgtgagaatgtgcagcccagcggctccttcaagattcggggcattgggcatttctgccaggagatggccaagaagggatgcagacacctggtgtgctcctcagggggtaatgcgggcatygctgctgcctatgctgctaggaagctgggcattcctgccaccatygtgctccccgagagcacctccctgcaggtggtgcagaggctgcagggggagggggccgaggttcagctgactggaaaggtctgggacgaggccaatctgagggcgcaagagttggccaagagggacggctgggagaatgtccccccgtttgaccaccccctaatatggaaaggccacgccagcctggtgcaggagctgaaagcagtgctgaggaccccaccaggtgccctggtgctggcagttgggggtgggggtctcctggccggggtggtggctggcctgctggaggtgggctggcagcatgtacccatcattgccatggagacccatggggcacactgcttcaatgcggccatcacagccggcaagctggtcacacttccagacatcaccagtgtggccaagagcctgggtgccaagacggtggccgctcgggccctggagtgcatgcaggtgtgcaagattcactctgaagtggtggaggacaccgaggctgtgagcgctgtgcagcagctcctggatgatgagcgtatgctggtggagcctgcctgtggggcagccttagcagccatctactcaggcctcctgcggaggctccaggccgagggctgcctgcccccttccctgacttcagttgtggtaatygtgtgtggaggcaacaacatcaacagccgagagctgcaggctttgaaaacccacctgggccaggtctgaggggtcccatcctggccccaaagacccctgagaggcccatggacagtcctgtgtctggatgaggaggactcagtgctggcagatggcagtggaagctgccctgtgcaactgtgctggctgcctcctgaaggaagccctcctggactgcttcttttggctctccgacaactccggccaataaacactttctgaattga

SEQ ID NO: 7028 - DNA, 1405 bp, Homo sapiens
ggaaagagctggttccctggcaggctggagggcaggagctggggccacgctggtctgggatagttgggcagggagacggagtctcgatctgtcacccaggctggagtgcagtggcacaaccttggctcactgcaacctccgcctcccaggttcaagtgattctcctgcctcagccttctgagtagctggaattacaagctgtctacctggtctccagaatggacggccctgtggcagagcatgccaagcaggagccctttcacgtggtcacacctctgttggagagctgggcgctgtcccaggtggcgggcatgcctgtcttcctcaagtgtgagaatgtgcagcccagcggctccttcaagattcggggcattgggcatttctgccaggagatggccaagaagggatgcagacacctggtgtgctcctcagggggtaatgcgggcatygctgctgcctatgctgctaggaagctgggcattcctgccaccatygtgctccccgagagcacctccctgcaggtggtgcagaggctgcagggggagggggccgaggttcagctgactggaaaggtctgggacgaggccaatctgagggcgcaagagttggccaagagggacggctgggagaatgtccccccgtttgaccaccccctaatatggaaaggccacgccagcctggtgcaggagctgaaagcagtgctgaggaccccaccaggtgccctggtgctggcagttgggggtgggggtctcctggccggggtggtggctggcctgctggaggtgggctggcagcatgtacccatcattgccatggagacccatggggcacactgcttcaatgcggccatcacagccggcaagctggtcacacttccagacatcaccagtgtggccaagagcctgggtgccaagacggtggccgctcgggccctggagtgcatgcaggtgtgcaagattcactctgaagtggtggaggacaccgaggctgtgagcgctgtgcagcagctcctggatgatgagcgtatgctggtggagcctgcctgtggggcagccttagcagccatctactcaggcctcctgcggaggctccaggccgagggctgcctgcccccttccctgacttcagttgtggtaatygtgtgtggaggcaacaacatcaacagccgagagctgcaggctttgaaaacccacctgggccaggtctgaggggtcccatcctggccccaaagacccctgagaggcccatggacagtcctgtgtctggatgaggaggactcagtgctggcagatggcagtggaagctgccctgtgcaactgtgctggctgcctcctgaaggaagccctcctggactgcttcttttggctctccgacaactccggccaataaacactttctgaattga

SEQ ID NO: 7029 - DNA, 1119 bp, Homo sapiens
ggctgtctacctggtctccagaatggacggccctgtggcagagcatgccaagcaggagccctttcacgtggtcacacctctgttggagagctgggcgctgtcccagatggccaagaagggatgcagacacctggtgtgctcctcagggggtaatgcgggcatygctgctgcctatgctgctaggaagctgggcattcctgccaccatygtgctccccgagagcacctccctgcaggtggtgcagaggctgcagggggagggggccgaggttcagctgactggaaaggtctgggacgaggccaatctgagggcgcaagagttggccaagagggacggctgggagaatgtccccccgtttgaccaccccctaatatggaaaggccacgccagcctggtgcaggagctgaaagcagtgctgaggaccccaccaggtgccctggtgctggcagttgggggtgggggtctcctggccggggtggtggctggcctgctggaggtgggctggcagcatgtacccatcattgccatggagacccatggggcacactgcttcaatgcggccatcacagccggcaagctggtcacacttccagacatcaccagtgtggccaagagcctgggtgccaagacggtggccgctcgggccctggagtgcatgcaggtgtgcaagattcactctgaagtggtggaggacaccgaggctgtgagcgctgtgcagcagctcctggatgatgagcgtatgctggtggagcctgcctgtggggcagccttagcagccatctactcaggcctcctgcggaggctccaggccgagggctgcctgcccccttccctgacttcagttgtggtaatygtgtgtggaggcaacaacatcaacagccgagagctgcaggctttgaaaacccacctgggccaggtctgaggggtcccatcctggccccaaagacccctgagaggcccatggacagtcctgtgtctggatgaggaggactcagtgctggcagatggcagtggaagctgccctgtgcaactgtgctggctgcctcctgaaggaagccctcctggactgcttcttttggctctccgacaactccggccaataaacactttctgaattga

SEQ ID NO: 7030 - DNA, 713 bp, Homo sapiens
ggsctccaggatggaggccgrcctgayttctccgcctcggtgggctgggtcggcggctggagcattacccctactgcgggtcccgctgctggcagcgctggaaactgggtggacggcatgggttggtctcaggatttgttccgcgccttgtggagatcgctgtcaagggaagtgaargagcacgtgggcacggaccaattcgggaacaaatactactacatcccgcagtacaagaactggagaggacaaactattcgagagaaaagaattgtagaagcagcaaataaaaaagaagtagactatgaagcaggggatattccaacagaatgggaagcttggattagaagaacaagaaagactccacctactatggaggaaatactaaagaatgaaaaacacagagaagaaatcaaaataaaaagccaagatttttatgaaaaagaaaaactccttagtaaagagaccagtgaggaactcctgcctccaccagttcaaactcaaattaaaggccatgcctctgctccatactttggaaaggaagaaccctcagtggctcccagcagcactggtaaaacctttcagccaggatcctggatgccacgagatggcaagagccacaatcaatgaatgcattatggtcaaatcttttcatgtatatggatgtgactattttaacaaataaaagaagtgaaaagttatttaccttgtatttt

SEQ ID NO: 7031 - DNA, 8230 bp, Homo sapiens
ccgcccgccctgcagagcagccatggaggaggtggtgattgccggcatgtccgggaagctgccagagtcggagaacttgcaggagttctgggacaacctcatcggcggtgtggacatggtcacggacgatgaccgtcgctggaaggcggggctctacggcctgccccggcggtccggcaagctgaaggacctgtctaggtttgatgcctccttcttcggagtccaccccaagcaggcacacacgatggaccctcagctgcggctgctgctggaagtcacctatgaagccatcgtggacggaggcatcaacccagattcactccgaggaacacacactggcgtctgggtgggcgtgagcggctctgagacctcggaggccctgagccgagaccccgagacactcgtgggctacagcatggtgggctgccagcgagcgatgatggccaaccggctctccttcttcttcgacttcagagggcccagcatcgcactggacacagcctgctcctccagcctgatggccctgcagaacgcctaccaggccatccacagcgggcagtgccctgccgccatcgtggggggcatcaaygtcctgctgaagcccaacacctccgtgcagttcttgaggctggggatgctcagccccgagggcacctgcaaggccttcgacacagcggggaatgggtactgccgctcggagggtgtggtggccgtcctgctgaccaagaagtccctggcccggmgggtstacrccaccatcctgaacgccggcaccaatacagatggcttcaaggagcaaggcgtgaccttcccctcaggggatatccaggagcagctcatccgctcgttgtaccagtcggccggagtggcccctgagtcatttgaatacatcgaagcccacggcacaggcaccaaggtgggcgacccccaggagctgaatggcatcacccgagccctgtgcgccacccgccaggagccgctgctcatcggctccaccaagtccaacatggggcacccggagccagcctcggggctggcagccctggccaaggtgctgctgtccctggagcacgggctctgggcccccaacctgcacttccatagccccaaccctgagatcccagcgctgttggatgggcggctgcaggtggtggaccagcccctgcccgtccgtggcggcaacgtgggcatcaactcctttggcttcgggggctccaacgtgcacatcatcctgaggcccaacacgcagccgccccccgcacccgccccacatgccaccctgccccgtctgctgcgggccagcggacgcacccctgaggccgtgcagaagctgctggagcagggcctccggcacagccaggacctggctttcctgagcatgctgaacgacatcgcggctgtccccgccaccgccatgcccttccgtggctacgctgtgctgggtggtgagcgcggtggcccagaggtgcagcaggtgcccgctggcragcgcccgctctggttcatctgctctgggatgggcacacagtggcgcgggatggggctgagcctcatgcgcctggaccgcttccgagattccatcctacgctccgatgaggctgtgaagccattcggcctgaaggtgtcacagctgctgctgagcacagacgagagcacctttgatgacatcgtccattcgtttgtgagcctgactgccatccagataggcctcatagacctgctgagctgcatggggctgaggccagatggcatcgtcggccactccctgggggaggtggcctgtggctacgccgacggctgcctgtcccaggaggaggccgtcctcgctgcctactggaggggacagtgcatcaaagaagcccatctcccgccgggcgccatggcagccgtgggcttgtcctgggaggagtgtaaacagcgctgccccccgggcgtggtgcccgcctgccacaactccaaggacacagtcaccatctcgggacctcaggcyccggtgtttgagttcgtggagcagctgaggaaggagggtgtgtttgccaaggaggtgcggaccggcggtatggccttccactcctacttcatggaggccatcgcacccccactgctgcaggagctcaagaaggtgatccgggagccgaagccacgttcagcccgctggctcagcacctctatccccraggcccagtggcacagcagcctggcacgcacgtcytccgccgagtacaatgtcaacaacctggtgagccctgtgctgttccaggaggccctgtggcacgtgcctgagcacgcggtggtgctggagatcgcgccccacgccctgctgcaggctgtcctgaagcgtggcctgaagccgagctgcaccatcatccccctgatgaagaaggatcacagggacaacctggagttcttcctggccggcatcggcaggctgcacctctcaggcatcgacgccaaccccaatgccttgttcccacctgtggagttcccagctccccgaggaactcccctcatctccccactcatcaagtgggaccacagcctggcctgggacgtgccggccgccgaggacttccccaacggttcaggttccccctcagccgccatctacaacatcgacaccagctccgagtctcctgaccactacctggtggaccacaccctcgacggtcgcgtcctcttccccgccactggctacctgagcatagtgtggaagacgctggcccgcgccctgggcctgggcgtcgagcagctgcctgtggtgtttgaggatgtggtgctgcaccaggccaccatcctgcccaagactgggacagtgtccctggaggtacggctcctggaggcctcccgtgccttcgaggtgtcagagaacggcaacctggtagtgagtgggaaggtgtaccagtgggatgaccctgaccccaggctcttcgaccacccggaaagccccacccccaacccyacggagcccctcttcctggcccaggctgaagtttacaaggagctgcgtctgcgtggctacgactacggccctcatttccagggcatcctggaggccagcctggaaggtgactcggggaggctgctgtggaaggataactgggtgagcttcatggacaccatgctgcagatgtccatcctgggctcggccaagcacggcctgtacctgcccacccgtgtcaccgccatccacatcgaccctgccacccacaggcagaagctgtacacactgcaggacaaggcccaagtggctgacgtggtggtgagcaggtggctgagggtcacagtggcsggaggcgtccacatctycsggctccacactgagtcggcsccgcggcggcagcaggagcagcaggtgcccatcctggagaagttttgcttcactccccacacggaggaggggtgcctgtctgagcgcgctgccctgcaggaggagctgcaactgtgcaaggggctggtgcaggcactgcagaccaaggtgacccagcaggggctgaagatggtggtgcccggactggatggggcccagatcccccgggacccctcacagcaggaactgccccggctgttgtcggctgcctgcaggcttcagctcaacgggaacctgcagctggagctggcgcaggtgctggcccaggagaggcccaagctgccagaggaccctctgctcagcggcctcctggactccccggcactcaaggcctgcctggacactgccgtggagaacatgcccagcctgaagatgaaggtggtggaggtgctggcyggccayggtcacctgtattcccgcatcccaggcctgctcagcccccatcccctgctgcagmtgagctacacggccaccgaccgccacccccaggccctggaggctgcccaggccgagctgcagcagcacgacgttgcccagggccagtgggatcccgcagaccctgcccccagcgccctgggcagcgccgacctcctggtgtgcaactgtgctgtggctgccctcggggacccggcctcagctctcagcaacatggtggctgccctgagagaagggggctttctgctcctgcacacactgctccgggggcaccccctcggggacatcgtggccttcctcacctccactgagccgcagtatggccagggcatcctgagccaggacgcgtgggagagcctcttctccagggtgtcgctgcgcctggtgggcctgaagaagtccttctacggckccacgctcttcctgtgccgccggcccaccccgcaggacagccccatcttcctgccggtggacgataccagcttccgctgggtggagtctctgaagggcatcctggctgacgaagactcttcccggcctgtgtggctgaaggccatcaactgtgccacctcgggcgtggtgggcttggtgaactgtctccgccgagagcccggcgggaaccgcctccggtgtgtgctgctctccaacctcagcagcacctcccacgtcccggaggtggacccgggctccgcagaactgcagaaggtgttgcagggagacctggtgatgaacgtctaccgcgacggggcctggggggctttccgccacttcctgctggaggaggacaagcctgaggagccgacggcacatgcctttgtgagcaccctcacccggggggacctgtcctccatccgctgggtctgctcctcgctgcgccatgcccagcccacctgccctggcgcccagctctgcacggtctactacgcctccctcaacttccgcgacatcatgctggccactggcaagctgtcccctgatgccatcccagggaagtggacctcccaggacagcctgctaggtatggagttctcgggccgagacgccagcggcaagcgtgtgatgggactggtgcctgccaagggcctggccacctctgtcctgctgtcaccggacttcctctgggatgtgccttccaactggacgctggaggaggcggcctcggtgcctgtcgtctacagcacggcctactacgcgctggtggtgcgtgggcgggtgcgccccggggagacgctgctcatccactcgggctcgggcggcgtgggccaggccgccatcgccatcgccctcagtctgggctgccgcgtcttcaccaccgtggggtcggctgagaagcgggcgtacctccaggccaggttcccccagctcgacagcaccagcttcgccaactcccgggacacatccttcgagcagcatgtgctgtggcacacgggcgggaagggcgttgacctggtcttgaactccttggcggaagagaagctgcaggccagygtgaggtgcttggctacgcacggtcgcttcctggaaattggcaaattcgacctttctcagaaccacccgctyggcatggctatcttcctgaagaacgtgacattccacggggtcctactggatgcgttcttcaacgagagcagtgctgactggcgggaggtgtgggcgcttgtgcaggccggcatccgggatggggtggtacggcccctcaagtgcacggtgttccatggggcccaggtggaggacgccttccgctacatggcccargggaagcacattggcaaagtcgtcgtgcaggtgcttgcggaggagccggaggcagtgctgaagggggccaaacccaagctgatgtcggccatctccaagaccttctgcccggcccacaagagctacrtcatcgctggtggtctgggtggcttcggcctggagttggcgcagtggctgatacagcgtggggtgcagaagctcgtgttgacttctcgctccgggatccggacaggctaccaggccaagcaggtccgccggtggaggcgccagggcgtacaggtgcaggtgtccaccagcaacatcagctcactggagggggcccggggcctcattgccgaggcggcgcagcttgggcccgtgggcggcgtcttcaacctggccgtggtcttgagagatggcttgctggagaaccagaccccagagttcttccaggacgtctgcaagcccaagtacagcggcaccctgaacctggacagggtgacccgagaggcgtgccctgagctggactactttgtggtcttctcctctgtgagctgcgggcgtggcaatgcgggacagagcaactacggctttgccaattccgccatggagcgtatctgtgagaaacgccggcacgaaggcctcccaggcctggccgtgcagtggggcgccatcggcgacgtgggcattttggtggagacgatgagcaccaacgacacgatcgtcagtggcacgctgccccagcgcatggcgtcctgcctggaggtgctggacctcttcctgaaccagccccacatggtcctgagcagctttgtgctggctgagaaggctgcggcctatagggacagggacagccagcgggacctggtggaggccgtggcacacatyctgggcatccgcgacttggctgctgtcaacctggacagctcactggcggacctgggcctggactcgctcatgagcgygsaggtgcgccagacgctggagcgtgagctcaacctggtgctgtccgtgcgcgaggtgcggcaactcacgctccggaaactgcaggagctgtcctcaaaggcggatgaggccagcgagctggcatgccccacgcccaaggaggatggtctggcccagcagcagactcagctgaacctgcgctccctgctggtgaacccggagggccccaccctgatgcggctcaactccgtgcagagctcggagcggcccctgttcctggtgcacccaatcgagggctccaccaccgtgttccacagcctggcctcccggctcagcatccccacctatggcctgcagtgcacccgagctgcgccccttgacagcatccacagcctggctgcctactacatcgactgcatcaggcaggtgcagcccgagggcccctaccgcgtggccggctactcctacggggcctgcgtggcytttgaaatgtgctcccagctgcaggcccagcagagcccagcccccacccacaacagcctcttcctgttcgacggctcgcccacctacgtactggcctacacccagagctaccgggcaaagctgaccccaggctgtgaggctgaggctgagacggaggccatatgcttcttcgtgcagcagttcacggacatggagcacaacagggtgctggaggcgctgctgccgctgaagggcctagaggagcgtgtggcagccgccgtggacctgatcatcaagagccaccagggcctggaccgccaggagctgagctttgcggcccggtccttctactacaagctgcgtgccgctgagcagtayacacccaaggccaagtaccatggcaacgtgatgctactgcgcgccaagacgggtggcgcctacggcgaggacctgggcgcggactacaacctctcccaggtatgcgacgggaaagtatccgtccacgtcatcgagggtgaccaccgcacgctgctggagggcagcggcctggagtccatcatcagcatcatccacagctccctggctgagccacgygtgagcgtgcgggagggctaggcccgtgcccccgcctgccaccggaggtcactccaccatccccaccccaccccaccccacccccgccatgcaacgggattgaagggtcctgccggtgggaccctgtccggcccagtgccactgccccccgaggctgctagacgtaggtgttaggcatgtcccacccacccgccgcctcccacggcacctcggggaacaccagagctgccgacttggagactcctggtctgtgaagagccggtggtgcccgtgcccgcaggaactgggctgggcctcgtgcgcccgtggggtctgcgcttggtctttctgtgcttggatttgcatatttwttgcattgctggtagagacccccaggcctgtccaccctgccaagactcctcaggcagcgtgtgggtcccgcactctgcccccatttccccgatgccacacccagcggccccccgcacagccacccgtggggtgctgcccttatgcccggcgccgggcaccaactccatgtttggtgtttgtctgtgtttgttyttcaagaaatgattcaaattgctgcttggattttgaaatttactgtaactgtcagtgtacacgtctggaccccgtttcatttttacaccaatttggtaaaaatgctgctctcagcctcccacaattaaaccgcatgtgatctccaccacc

SEQ ID NO: 7032 - DNA, 8365 bp, Homo sapiens
ccgcccgccctgcagagcagccatggaggaggtggtgattgccggcatgtccgggaagctgccagagtcggagaacttgcaggagttctgggacaacctcatcggcggtgtggacatggtcacggacgatgaccgtcgctggaaggcggggctctacggcctgccccggcggtccggcaagctgaaggacctgtctaggtttgatgcctccttcttcggagtccaccccaagcaggcacacacgatggaccctcagctgcggctgctgctggaagtcacctatgaagccatcgtggacggaggcatcaacccagattcactccgaggaacacacactggcgtctgggtgggcgtgagcggctctgagacctcggaggccctgagccgagaccccgagacactcgtgggctacagcatggtgggctgccagcgagcgatgatggccaaccggctctccttcttcttcgacttcagagggcccagcatcgcactggacacagcctgctcctccagcctgatggccctgcagaacgcctaccaggccatccacagcgggcagtgccctgccgccatcgtggggggcatcaaygtcctgctgaagcccaacacctccgtgcagttcttgaggctggggatgctcagccccgagggcacctgcaaggccttcgacacagcggggaatgggtactgccgctcggagggtgtggtggccgtcctgctgaccaagaagtccctggcccggmgggtstacrccaccatcctgaacgccggcaccaatacagatggcttcaaggagcaaggcgtgaccttcccctcaggggatatccaggagcagctcatccgctcgttgtaccagtcggccggagtggcccctgagtcatttgaatacatcgaagcccacggcacaggcaccaaggtgggcgacccccaggagctgaatggcatcacccgagccctgtgcgccacccgccaggagccgctgctcatcggctccaccaagtccaacatggggcacccggagccagcctcggggctggcagccctggccaaggtgctgctgtccctggagcacgggctctgggcccccaacctgcacttccatagccccaaccctgagatcccagcgctgttggatgggcggctgcaggtggtggaccagcccctgcccgtccgtggcggcaacgtgggcatcaactcctttggcttcgggggctccaacgtgcacatcatcctgaggcccaacacgcagccgccccccgcacccgccccacatgccaccctgccccgtctgctgcgggccagcggacgcacccctgaggccgtgcagaagctgctggagcagggcctccggcacagccaggacctggctttcctgagcatgctgaacgacatcgcggctgtccccgccaccgccatgcccttccgtggctacgctgtgctgggtggtgagcgcggtggcccagaggtgcagcaggtgcccgctggcragcgcccgctctggttcatctgctctgggatgggcacacagtggcgcgggatggggctgagcctcatgcgcctggaccgcttccgagattccatcctacgctccgatgaggctgtgaagccattcggcctgaaggtgtcacagctgctgctgagcacagacgagagcacctttgatgacatcgtccattcgtttgtgagcctgactgccatccagataggcctcatagacctgctgagctgcatggggctgaggccagatggcatcgtcggccactccctgggggaggtggcctgtggctacgccgacggctgcctgtcccaggaggaggccgtcctcgctgcctactggaggggacagtgcatcaaagaagcccatctcccgccgggcgccatggcagccgtgggcttgtcctgggaggagtgtaaacagcgctgccccccgggcgtggtgcccgcctgccacaactccaaggacacagtcaccatctcgggacctcaggcyccggtgtttgagttcgtggagcagctgaggaaggagggtgtgtttgccaaggaggtgcggaccggcggtatggccttccactcctacttcatggaggccatcgcacccccactgctgcaggagctcaagaaggtgatccgggagccgaagccacgttcagcccgctggctcagcacctctatccccraggcccagtggcacagcagcctggcacgcacgtcytccgccgagtacaatgtcaacaacctggtgagccctgtgctgttccaggaggccctgtggcacgtgcctgagcacgcggtggtgctggagatcgcgccccacgccctgctgcaggctgtcctgaagcgtggcctgaagccgagctgcaccatcatccccctgatgaagaaggatcacagggacaacctggagttcttcctggccggcatcggcaggctgcacctctcaggcatcgacgccaaccccaatgccttgttcccacctgtggagttcccagctccccgaggaactcccctcatctccccactcatcaagtgggaccacagcctggcctgggacgtgccggccgccgaggacttccccaacggttcaggttccccctcagccgccatctacaacatcgacaccagctccgagtctcctgaccactacctggtggaccacaccctcgacggtcgcgtcctcttccccgccactggctacctgagcatagtgtggaagacgctggcccgcgccctgggcctgggcgtcgagcagctgcctgtggtgtttgaggatgtggtgctgcaccaggccaccatcctgcccaagactgggacagtgtccctggaggtacggctcctggaggcctcccgtgccttcgaggtgtcagagaacggcaacctggtagtgagtgggaaggtgtaccagtgggatgaccctgaccccaggctcttcgaccacccggaaagccccacccccaacccyacggagcccctcttcctggcccaggctgaagtttacaaggagctgcgtctgcgtggctacgactacggccctcatttccagggcatcctggaggccagcctggaaggtgactcggggaggctgctgtggaaggataactgggtgagcttcatggacaccatgctgcagatgtccatcctgggctcggccaagcacggcctgtacctgcccacccgtgtcaccgccatccacatcgaccctgccacccacaggcagaagctgtacacactgcaggacaaggcccaagtggctgacgtggtggtgagcaggtggctgagggtcacagtggcsggaggcgtccacatctycsggctccacactgagtcggcsccgcggcggcagcaggagcagcaggtgcccatcctggagaagttttgcttcactccccacacggaggaggggtgcctgtctgagcgcgctgccctgcaggaggagctgcaactgtgcaaggggctggtgcaggcactgcagaccaaggtgacccagcaggggctgaagatggtggtgcccggactggatggggcccagatcccccgggacccctcacagcaggaactgccccggctgttgtcggctgcctgcaggcttcagctcaacgggaacctgcagctggagctggcgcaggtgctggcccaggagaggcccaagctgccagaggaccctctgctcagcggcctcctggactccccggcactcaaggcctgcctggacactgccgtggagaacatgcccagcctgaagatgaaggtggtggaggtgctggcyggccayggtcacctgtattcccgcatcccaggcctgctcagcccccatcccctgctgcagmtgagctacacggccaccgaccgccacccccaggccctggaggctgcccaggccgagctgcagcagcacgacgttgcccagggccagtgggatcccgcagaccctgcccccagcgccctgggcagcgccgacctcctggtgtgcaactgtgctgtggctgccctcggggacccggcctcagctctcagcaacatggtggctgccctgagagaagggggctttctgctcctgcacacactgctccgggggcaccccctcggggacatcgtggccttcctcacctccactgagccgcagtatggccagggcatcctgagccaggacgcgtgggagagcctcttctccagggtgtcgctgcgcctggtgggcctgaagaagtccttctacggckccacgctcttcctgtgccgccggcccaccccgcaggacagccccatcttcctgccggtggacgataccagcttccgctgggtggagtctctgaagggcatcctggctgacgaagactcttcccggcctgtgtggctgaaggccatcaactgtgccacctcgggcgtggtgggcttggtgaactgtctccgccgagagcccggcgggaaccgcctccggtgtgtgctgctctccaacctcagcagcacctcccacgtcccggaggtggacccgggctccgcagaactgcagaaggtgttgcagggagacctggtgatgaacgtctaccgcgacggggcctggggggctttccgccacttcctgctggaggaggacaagcctgaggagccgacggcacatgcctttgtgagcaccctcacccggggggacctgtcctccatccgctgggtctgctcctcgctgcgccatgcccagcccacctgccctggcgcccagctctgcacggtctactacgcctccctcaacttccgcgacatcatgctggccactggcaagctgtcccctgatgccatcccagggaagtggacctcccaggacagcctgctaggtatggagttctcgggccgagacgccagcggcaagcgtgtgatgggactggtgcctgccaagggcctggccacctctgtcctgctgtcaccggacttcctctgggatgtgccttccaactggacgctggaggaggcggcctcggtgcctgtcgtctacagcacggcctactacgcgctggtggtgcgtgggcgggtgcgccccggggagacgctgctcatccactcgggctcgggcggcgtgggccaggccgccatcgccatcgccctcagtctgggctgccgcgtcttcaccaccgtggggtcggctgagaagcgggcgtacctccaggccaggttcccccagctcgacagcaccagcttcgccaactcccgggacacatccttcgagcagcatgtgctgtggcacacgggcgggaagggcgttgacctggtcttgaactccttggcggaagagaagctgcaggccagygtgaggtgcttggctacgcacggtcgcttcctggaaattggcaaattcgacctttctcagaaccacccgctyggcatggctatcttcctgaagaacgtgacattccacggggtcctactggatgcgttcttcaacgagagcagtgctgactggcgggaggtgtgggcgcttgtgcaggccggcatccgggatggggtggtacggcccctcaagtgcacggtgttccatggggcccaggtggaggacgccttccgctacatggcccargggaagcacattggcaaagtcgtcgtgcaggtgcttgcggaggagccggaggcagtgctgaagggggccaaacccaagctgatgtcggccatctccaagaccttctgcccggcccacaagagctacrtcatcgctggtggtctgggtggcttcggcctggagttggcgcagtggctgatacagcgtggggtgcagaagctcgtgttgacttctcgctccgggatccggacaggctaccaggccaagcaggtccgccggtggaggcgccagggcgtacaggtgcaggtgtccaccagcaacatcagctcactggagggggcccggggcctcattgccgaggcggcgcagcttgggcccgtgggcggcgtcttcaacctggccgtggtcttgagagatggcttgctggagaaccagaccccagagttcttccaggacgtctgcaagcccaagtacagcggcaccctgaacctggacagggtgacccgagaggcgtgccctgagctggactactttgtggtcttctcctctgtgagctgcgggcgtggcaatgcgggacagagcaactacggctttgccaattccgccatggagcgtatctgtgagaaacgccggcacgaaggcctcccaggcctggccgtgcagtggggcgccatcggcgacgtgggcattttggtggagacgatgagcaccaacgacacgatcgtcagtggcacgctgccccagcgcatggcgtcctgcctggaggtgctggacctcttcctgaaccagccccacatggtcctgagcagctttgtgctggctgagaaggctgcggcctatagggacagggacagccagcgggacctggtggaggccgtggcacacatyctgggcatccgcgacttggctgctgtcaacctggacagctcactggcggacctgggcctggactcgctcatgagcgygsaggtgcgccagacgctggagcgtgagctcaacctggtgctgtccgtgcgcgaggtgcggcaactcacgctccggaaactgcaggagctgtcctcaaaggcggatgaggccagcgagctggcatgccccacgcccaaggaggatggtctggcccagcagcagactcagctgaacctgcgctccctgctggtgaacccggagggccccaccctgatgcggctcaactccgtgcagagctcggagcggcccctgttcctggtgcacccaatcgagggctccaccaccgtgttccacagcctggcctcccggctcagcatccccacctatggcctgcagtgcacccgagctgcgccccttgacagcatccacagcctggctgcctactacatcgactgcatcaggcaggtgcagcccgagggcccctaccgcgtggccggctactcctacggggcctgcgtggcytttgaaatgtgctcccagctgcaggcccagcagagcccagcccccacccacaacagcctcttcctgttcgacggctcgcccacctacgtactggcctacacccagagctaccgggcaaagctgaccccaggctgtgaggctgaggctgagacggaggccatatgcttcttcgtgcagcagttcacggacatggagcacaacagggtgctggaggcgctgctgccgctgaagggcctagaggagcgtgtggcagccgccgtggacctgatcatcaagagccaccagggcctggaccgccaggagctgagctttgcggcccggtccttctactacaagctgcgtgccgctgagcagtayacacccaaggccaagtaccatggcaacgtgatgctactgcgcgccaagacgggtggcgcctacggcgaggacctgggcgcggactacaacctctcccaggtatgcgacgggaaagtatccgtccacgtcatcgagggtgaccaccgcacgctgctggagggcagcggcctggagtccatcatcagcatcatccacagctccctggctgagccacgygtgagcgtgcgggagggctaggcccgtgcccccgcctgccaccggaggtcactccaccatccccaccccaccccaccccacccccgccatgcaacgggattgaagggtcctgccggtgggaccctgtccggcccagtgccactgccccccgaggctgctagacgtaggtgttaggcatgtcccacccacccgccgcctcccacggcacctcggggaacaccagagctgccgacttggagactcctggtctgtgaagagccggtggtgcccgtgcccgcaggaactgggctgggcctcgtgcgcccgtggggtctgcgcttggtctttctgtgcttggatttgcatatttwttgcattgctggtagagacccccaggcctgtccaccctgccaagactcctcaggcagcgtgtgggtcccgcactctgcccccatttccccgatgtcccctgcgggcgcgggcagccacccaagcctgctggctgcggccccctctcggccaggcattggctcagcccgctgagtggggggtcgtgggccagtccccgaggagctgggcccctgcacaggcacacagggcccggccacacccagcggccccccgcacagccacccgtggggtgctgcccttatgcccggcgccgggcaccaactccatgtttggtgtttgtctgtgtttgttyttcaagaaatgattcaaattgctgcttggattttgaaatttactgtaactgtcagtgtacacgtctggaccccgtttcatttttacaccaatttggtaaaaatgctgctctcagcctcccacaattaaaccgcatgtgatctccac

SEQ ID NO: 7033 - DNA, 2874 bp, Homo sapiens
agacgactgtctgagagaggggccgctacgccgcacagcaaacaagctccgcgacgtttccaggacccggataatcccgcccttagagcagagccggaagaaggcgggacgaaccggaagagggtgaaatgctttcggtaggcactccacggctgtgaagatggcggckgctgcgtggcttcaggtgttgcctgtcattcttctgcttctgggagctcacccgtcaccactgtcgtttttcagtgcgggaccggcaaccgtagctgctgccgaccggtccaaatggcacattccgataccgtcggggaaaaattattttagttttggaaagatcctcttcagaaataccactatcttcctgaagtttgatggagaaccttgtgacctgtctttgaatataacctggtatctgaaaagcgctgattgttacaatgaaatctataacttcaaggcagaagaagtagagttgtatttggaaaaacttaaggaaaaaagaggcttgtctgggaaatatcaaacatcatcaaaattgttccagaactgcagtgaactctttaaaacacagaccttttctggagattttatgcatcgactgcctcttttaggagaaaaacaggaggctaaggagaatggaacaaaccttacctttattggagacaaaaccgcaatgcatgaaccattgcaaacttggcaagatgcaccatacatttttattgtacatattggcatttcatcctcaaaggaatcatcaaaagaaaattcactgagtaatctttttaccatgactgttgaagtgaagggtccctatgaatacctcacacttgaagactatcccttgatgatttttttcatggtgatgtgtattgtatatgtcctgtttggtgttctgtggctggcatggtctgcctgctactggagagatctcctgagaattcagttttggattggtgctgtcatcttcctgggaatgcttgagaaagctgtcttctatgcggaatttcagaatatccgatacaaaggagaatctgtccagggtgctttgatccttgcagagctgctttcagcagtgaaacgctcactggctcgaaccctggtcatcatagtcagtctgggatatggcatygtcaagccacgccttggagtcactcttcataaggttgtagtagcaggagccctctatcttttgttctctggcatggaaggggtcctcagagttactggggcccagactgatcttgcttccttggcctttatccccttggctttcctagacactgccttgtgctggtggatatccttctccctgactcaaacaatgaagctattaaaacttcggaggaacattgtaaaactctctttgtatcggcatttcaccaacacgcttattttggcagtggcagcatccattgtgtttatcatctggacaaccatgaagttcagaatagtgacatgtcagtcggactggcgggagctgtgggtagacgatgccatctggcgcttgctgttctccatgatcctctttgtcatcatggttctctggcgaccatctgcaaacaaccagaggtttgccttttcaccattgtctgaggaagaggaggaggatgaacaaaaggagcctatgctgaaagaaagctttgaaggaatgaaaatgagaagtaccaaacaagaacccaatggaaatagtaaagttaacaaagcacaggaagatgatttgaagtgggtagaagagaatgttccttcttctgtgacagatgtagcacttccagcccttctggattcagatgaggaacgaatgatcacacactttgaaaggtccaaaatggagtaaggaatgggaagatttgcagttaaagatggctaccatcagggaagagatcagcatctgtgtcagtcttctgtacggctccatgggattaaaggaagcaatgacatcctgatctgttccttgatctttgggcattggagttggcgagaggtgtcagaacaaagagaacatcttactgaaaacaagttcataagatgagaaaaatctacgagcttcttatttacaacactgctgccccctttcctcccagactctgacatggatgttcatgcaacttaagtttagggagttacataggtgatgggggaaattgttaactacctttcattttcctgggaagtcaaggttacatcttgcagaggttgttttgagaaaaaagggcccttctgagttaaggagccatagttctatcaatgatcaaaaraaaaaaaaaaaaaagagaaactgttacagtatgattcagatcatttaaaaaagcaaaatcaagtgcaattttgtttacaaatggtgtatattaaagatttttctatttcagatgtactttaaagagaaatattagcttaactcttttgacatctgctattgtgacacatcccattgctggcaatgtggtgcacactccgaaacttttaactactgttttgtaagcctccaagggtggcattgcagggtccttaggcaatgttttgtttgcctttatgcagagaggtgctccaagtgctgtgattgagcaccgtgctagaggaactgtaatgcttcagaagttgtagcttatacaaaggaaacaggtcctgctggcttaatttaaacagttattgcatgaagtagcgtggaggccctggactgctgctcgttctttaggatggactgttctggtawctggtattggtttagagactgttaataagggacatcacaaggtgatgggattcatttgaagcactctatttctgttttaatggttttayccaattttgccttcccaagatttttgttctacataaaaagttcatgccactttttaatataaaaaaatttaacaaaattaa

SEQ ID NO: 7034 - DNA, 3009 bp, Homo sapiens
agacgactgtctgagagaggggccgctacgccgcacagcaaacaagctccgcgacgtttccaggacccggataatcccgcccttagagcagagccggaagaaggcgggacgaaccggaagagggtgaaatgctttcggtaggcactccacggctgtgaagatggcggckgctgcgtggcttcaggtgttgcctgtcattcttctgcttctgggagctcacccgtcaccactgtcgtttttcagtgcgggaccggcaaccgtagctgctgccgaccggtccaaatggcacattccgataccgtcggggaaaaattattttagttttggaaagatcctcttcagaaataccactatcttcctgaagtttgatggagaaccttgtgacctgtctttgaatataacctggtatctgaaaagcgctgattgttacaatgaaatctataacttcaaggcagaagaagtagagttgtatttggaaaaacttaaggaaaaaagaggcttgtctgggaaatatcaaacatcatcaaaattgttccagaactgcagtgaactctttaaaacacagaccttttctggagattttatgcatcgactgcctcttttaggagaaaaacaggaggctaaggagaatggaacaaaccttacctttattggagacaaaaccgcaatgcatgaaccattgcaaacttggcaagatgcaccatacatttttattgtacatattggcatttcatcctcaaaggaatcatcaaaagaaaattcactgagtaatctttttaccatgactgttgaagtgaagggtccctatgaatacctcacacttgaagactatcccttgatgatttttttcatggtgatgtgtattgtatatgtcctgtttggtgttctgtggctggcatggtctgcctgctactggagagatctcctgagaattcagttttggattggtgctgtcatcttcctgggaatgcttgagaaagctgtcttctatgcggaatttcagaatatccgatacaaaggagaatctgtccagggtgctttgatccttgcagagctgctttcagcagtgaaacgctcactggctcgaaccctggtcatcatagtcagtctgggatatggcatygtcaagccacgccttggagtcactcttcataaggttgtagtagcaggagccctctatcttttgttctctggcatggaaggggtcctcagagttactggggcccagactgatcttgcttccttggcctttatccccttggctttcctagacactgccttgtgctggtggatatttattagcctgactcaaacaatgaagctattaaaacttcggaggaacattgtaaaactctctttgtatcggcatttcaccaacacgcttattttggcagtggcagcatccattgtgtttatcatctggacaaccatgaagttcagaatagtgacatgtcagtcggactggcgggagctgtgggtagacgatgccatctggcgcttgctgttctccatgatcctctttgtcatcatggttctctggcgaccatctgcaaacaaccagaggtttgccttttcaccattgtctgaggaagaggaggaggatgaacaaaaggagcctatgctgaaagaaagctttgaaggaatgaaaatgagaagtaccaaacaagaacccaatggaaatagtaaagttaacaaagcacaggaagatgatttgaagtgggtagaagagaatgttccttcttctgtgacagatgtagcacttccagcccttctggattcagatgaggaacgaatgatcacacactttgaaaggtccaaaatggagtaaggaatgggaagatttgcagttaaagatggctaccatcagggaagagatcagcatctgtgtcagtcttctgtacggctccatgggattaaaggaagcaatgacatcctgatctgttccttgatctttgggcattggagttggcgagaggtgtcagaacaaagagaacatcttactgaaaacaagttcataagatgagaaaaatctacgagcttcttatttacaacactgctgccccctttcctcccagactctgacatggatgttcatgcaacttaagtgtgttgttcctgaactttctgtaatgtttcattttttaaatctgacaaactaaaaagtttaacgtcttctaaaagattgtcatcaacaccataatatgtaatctccaggagcaactgcctgtaatttttatttatttagggagttacataggtgatgggggaaattgttaactacctttcattttcctgggaagtcaaggttacatcttgcagaggttgttttgagaaaaaagggcccttctgagttaaggagccatagttctatcaatgatcaaaaraaaaaaaaaaaaaagagaaactgttacagtatgattcagatcatttaaaaaagcaaaatcaagtgcaattttgtttacaaatggtgtatattaaagatttttctatttcagatgtactttaaagagaaatattagcttaactcttttgacatctgctattgtgacacatcccattgctggcaatgtggtgcacactccgaaacttttaactactgttttgtaagcctccaagggtggcattgcagggtccttaggcaatgttttgtttgcctttatgcagagaggtgctccaagtgctgtgattgagcaccgtgctagaggaactgtaatgcttcagaagttgtagcttatacaaaggaaacaggtcctgctggcttaatttaaacagttattgcatgaagtagcgtggaggccctggactgctgctcgttctttaggatggactgttctggtawctggtattggtttagagactgttaataagggacatcacaaggtgatgggattcatttgaagcactctatttctgttttaatggttttayccaattttgccttcccaagatttttgttctacataaaaagttcatgccactttttaatataaaaaaatttaacaaaattaa

SEQ ID NO: 7035 - DNA, 897 bp, Homo sapiens
agacgactgtctgagagaggggccgctacgccgcacagcaaacaagctccgcgacgtttccaggacccggataatcccgcccttagagcagagccggaagaaggcgggacgaaccggaagagggtgaaatgctttcggtaggcactccacggctgtgaagatggcggckgctgcgtggcttcaggtgttgcctgtcattcttctgcttctgggagctcacccgtcaccactgtcgtttttcagtgcgggaccggcaaccgtagctgctgccgaccggtccaaatggcacattccgataccgtcggggaaaaattattttagttttggaaagatcctcttcagaaataccactatcttcctgaagtttgatggagaaccttgtgacctgtctttgaatataacctggtatctgaaaagcgctgattgttacaatgaaatctataacttcaaggcagaagaagtagagttgtatttggaaaaacttaaggaaaaaagaggcttgtctgggaaatatcaaacatcatcaaaattgttccagaactgcagtgaactctttaaaacacagaccttttctggagattttatgcatcgactgcctcttttaggagaaaaacaggaggctaaggagaatggaacaaaccttacctttattggagacaaaaccattcagatgcctttcttgaagaaacatttcttggattgttgaaagactttaataatttccaaagttccaaaagttgattttgatagtttttgccagtgttttcgttgcttttatggatgagtagattttcagagtttcttattctgccattctgaaagtgttctcactacctaaaccccagttttatttgtacagaattttaactgaatgtaagttaggcatgacagtctttg

SEQ ID NO: 7036 - DNA, 1014 bp, Homo sapiens
ccttgttcaaacagcacttacaggtggggacctgtttttgctaagtcatcctggggatgctcaaagctccattgttagatcctttctgtcctccttcctggctcctccttcctccccacccctctaataggctcataagtgggctcaggcctctctgcggggctcactctgcgcttcaccatggctttcattgccaagtccttctatgacctcagtgccatcagcctggatggggagaaggtagatttcaatacgttccggggcagggccgtgctgattgagaatgtggcttcgctctgaggcacaaccacccgggacttcacccagctcaacgagctgcaatgccgctttcccaggcgcctggtggtccttggcttcccttgcaaccaatttggacatcaggagaactgtcagaatgaggagatcctgaacagtctcaagtatgtccgtcctgggggtggataccagcccaccttcacccttgtccaaaaatgtgaggtgaatgggcagaacgagcatcctgtcttcgcctacctgaaggacaagctcccctacccttatgatgacccattttccctcatgaccgatcccaagctcatcatttggagccctgtgcgccgctcagatgtggcctggaactttgagaagttcctcatagggccggagggagagcccttccgacgctacagccgcaccttcccaaccatcaacattgagcctgacatcaagcgcctccttaaagttgccatatagatgtgaactgctcaacacacagatctcctactccatccagtcctgaggagccttaggatgcagcatgcyttcaggagacactgctggacctcagcattcccttgatatcagtccccttcactgcagagccttgcctttcccctctgcctgtttccttttcctctcccaaccctctggttggtgattcaacttgtaaaccctcatgggtggtgtctgagaggcgtgaagggcctggagccactctgctagaagagaccaata

SEQ ID NO: 7037 - DNA, 1087 bp, Homo sapiens
ccttgttcaaacagcacttacaggtggggacctgtttttgctaagtcatcctggggatgctcaaagctccattgttagatcctttctgtcctccttcctggctcctccttcctccccacccctctaataggctcataagtgggctcaggcctctctgcggggctcactctgcgcttcaccatggctttcattgccaagtccttctatgacctcagtgccatcagcctggatggggagaaggtagatttcaatacgttccggggcagggccgtgctgattgagaatgtggcttcgctctgaggcacaaccacccgggacttcacccagctcaacgagctgcaatgccgctttcccaggcgcctggtggtccttggcttcccttgcaaccaatttggacatcaggagaactgtcagaatgaggagatcctgaacagtctcaagtatgtccgtcctgggggtggataccagcccaccttcacccttgtccaaaaatgtgaggtgaatgggcagaacgagcatcctgtcttcgcctacctgaaggacaagctcccctacccttatgatgacccattttccctcatgaccgatcccaagctcatcatttggagccctgtgcgccgctcagatgtggcctggaactttgagaagttcctcatagggccggagggagagcccttccgacgctacagccgcaccttcccaaccatcaacattgagcctgacatcaagcgcctccttaaagttgccatatagatgtgaactgctcaacacacagatctcctactccatccagtcctgaggagccttaggatgcagcatgcyttcaggagacactgctggacctcagcattcccttgatatcagtccccttcactgcagagccttgcctttcccctctgcctgtttccttttcctctcccaaccctctggttggtgattcaacttgggctccaagacttgggtaagctctgggccttcacagaatgatggcaccttcctaaaccctcatgggtggtgtctgagaggcgtgaagggcctggagccactctgctagaagagaccaataaagggcaggtgtggaaacggc

SEQ ID NO: 7038 - DNA, 1110 bp, Homo sapiens
gacactacggtgaaggtgaagatcaaagtcaatggatttggttgtattgggtgcctagtcaccagggcggtttttaactctggtaaagtggatattgttgccatcaatgaccccttcattgacctcaactacatggtctgtgtgttccagtatgattttgtctgtgrcaaattccatggcactgccaaggctgagaatgggaagcttgtcatcaaygaaaatcctatcaccatcttccaggagcgagatccctccaaaatcagatggggcaatgctggtgctgagtatatcatggaatccaccggtgtcttcaccaccatggagaaggctgggactcacttgcagcrgggagccaaaagggtcatcatctctgccccttctgctgacacccccatgtctgtgatgggcatgaagcatgagaagtaatgacaacagcctcaagatcatcagcatgcctcctgtatcaccaactgcttagtgcctctggccaaggttatccatgacaactccggtatcgtggaaggactcatgaatgaccacagtccatgccatcactgccacccagaagactgtggatggcccctctgggaaactgtggtgtgacagccacggcgctctccagaacatcatccctgcctctactggtgctgctaaggttgtgggcaaggtcatccctgagctaaatgggaagttcactggcatggccttctgtgtccctactgccaatgtgtcagttgtgggcctgaactgctgtctggaaaaactgccaaatatgatgacatcaagaaggtggtgaagcaggcgtccgagaccccctcaagggcatcctgggctacactgagcaccaggttgtctcctctgattttaacagcgacatccactcttcaacctttgatgctggggatggcattgacctcaacgaccactttgtcaagctcatttcctggtatgacaatgaatttggctacagcaacagggtggtggacctcatggcccacatgacttccaaggagtaagacccctggactaccaaccccagcgagagcgagagaggaagagagaggccctcactgctgggaagtccctgccatactcagtcccccacaacac

SEQ ID NO: 7039 - DNA, 2064 bp, Homo sapiens
gcagtttacctcaagcctttattattgtagattgaaagaagtttatatacaggaaatatttccagcaaaacactcaccaaatggccttcgaatcaggggccctccacctcccagccccacaatcagcagctctgcctaggactcccctcacttggggacctcaggctctccccccacctctctttccccggactccatcaccccaacgtcattccccaggagtctcagctttttctctctccctggggcgctgcgaacctcgccaatgcctctcaagctatcttcctctggtcccaaagcagacaccccaacttccctcccatttaaggtggttacctcacggaaacccagagcaccctccccctcaaggtttaggtgctgctttgaggcccctgcaattcagaactagctcgtggtcaagaccagttagagatagttcgtcatcagcagtggggctcctgtgcacccaaaacaagcgggggaaactaccctgcccacccctccccatccmcgacatcacttcccctaccagggacaggaaacagacacaaaagcaacagggaaccccctctccgcgcgcgacaggtgggtgccaggcaactagctcagctgagctgagagtctcctggaacccagctgcgctcakggcgcgcgggcgtggccaaggtctctgtgcagctgcgggaagcaccgggccaaagcacttggctgagggcacgctggggagggggtgtaagaaaatgctgtagaggcaaagtcctgggggcacacggacaagggcaaccaggcaggtgtgaatgagacagttacagaagcagagtcccagggaggtaggggagattgttcatgtggctgagggtgcagactcagtctgaaatggtggctcagcacatcagtgtcactggggcctcgccaagcgtgacttggtttgaggcgcttgcacgtgggcttcgaaggctcgaaggcccagcccaccaagttcagtcaattgtccgttggatgtttacaccctccggggccgagcgccgtgcagttgctcatcatagcgttccaaccaagtgcgcagctcagagacctggtagccgtcggggccacggccgccctggtacataatagtgccactctggatgacatagagacgctcgaagtaggcgccataggccgagctgctggagttggccatggtgtcgaggaccagagcgcagccgggtgcaccttgctgcagtaccctcgctgcgctgacccggtcctccaggctccggtgctgtgggatgatgtagggagagtccgtggtgacccagccgtcggaggggtgcgcttcctcgatgtagatgatgaggaagtcgacgtcgcgctggtacttagtgaccaggcgctggaaggcgctcatgcgcgccatgaacggtggtcaggtgcagctgccgaaattgagaaccagcgggcggttcccttgcgcgtagtcgaggatgtgctggctctggaagccgtcgggcagaaccacctcggagttgggcgccggaccgccctcgtgcgcctgcttgaagaaatccaacttctggccatgccacaccgccttgagcgacgccagggtgcacaggcggttgtcgtcggacacgcagatgggcgggtcatcgggaggcacctcctcgccttcactgttgagctccacttcgggctcgggctgcccccggcggcggcggcccaggaaatgcttgcggatacacaagaaatcgagaagccagagcatgaaggccgtgccgaggaagcgcgggaagagcacgaggcacgaggcggtctgggcgcagagcctcaaggagtgaagcagcagggagcggagcatggtggctgcaggccccgaagccccctgggacccctcgccctctccgaccaccaaccgcgacgtggcctggcgaggcatctgggcttcagcagtgcagggagttcaatttatagcggaggcttcaattggcgggagactccacctccggcccggcccgcccccttgcaacttgagcccggagggatcacccagcagcgcggccaatgccctagaaatcttgggct

SEQ ID NO: 7040 - DNA, 2063 bp, Homo sapiens
gcagtttacctcaagcctttattattgtagattgaaagaagtttatatacaggaaatatttccagcaaaacactcaccaaatggccttcgaatcaggggccctccacctcccagccccacaatcagcagctctgcctaggactcccctcacttggggacctcaggctctccccccacctctctttccccggactccatcaccccaacgtcattccccaggagtctcagctttttctctctccctggggcgctgcgaacctcgccaatgcctctcaagctatcttcctctggtcccaaagcagacaccccaacttccctcccatttaaggtggttacctcacggaaacccagagcaccctccccctcaaggtttaggtgctgctttgaggcccctgcaattcagaactagctcgtggtcaagaccagttagagatagttcgtcatcagcagtggggctcctgtgcacccaaaacaagcgggggaaactaccctgcccacccctccccatccmcgacatcacttcccctaccagggacaggaaacagacacaaaagcaacagggaaccccctctccgcgcgcgacaggtgggtgccaggcaactagctcagctgagctgagagtctcctggaacccagctgcgctcakggcgcgcgggcgtggccaaggtctctgtgcagctgcgggaagcaccgggccaaagcacttggctgagggcacgctggggagggggtgtaagaaaatgctgtagaggcaaagtcctgggggcacacggacaagggcaagccgcaggtgtgaatgagacagttacagaagcagagtcccagggaggtaggggagattgttcatgtggctgagggtgcagactcagtctgaaatggtggctcagcacatcagtgtcactggggcctcgccaagcgtgacttggtttgaggcgcttgcacgtgggcttcgaaggctcgaaggcccagcccaccaagttcagtcaattgtccgttggatgtttacaccctccggggccgagcgccgtgcagttgctcatcatagcgttccaaccaagtgcgcagctcagagacctggtagccgtcggggccacggccgccctggtacataatagtgccactctggatgacatagagacgctcgaagtaggcgccataggccgagctgctggagttggccatggtgtcgaggaccagagcgcagccgggtgcaccttgctgcagtaccctcgctgcgctgacccggtcctccaggctccggtgctgtgggatgatgtagggagagtccgtggtgacccagccgtcggaggggtgcgcttcctcgatgtagatgatgaggaagtcgacgtcgcgctggtacttagtgaccaggcgctggaaggcgctcatgcgcgccatgaacggtggtcaggtgcagctgccgaaattgagaaccagcgggcggttcccttgcgcgtagtcgaggatgtgctggctctggaagccgtcgggcagaaccacctcggagttgggcgccggaccgccctcgtgcgcctgcttgaagaaatccaacttctggccatgccacaccgccttgagcgacgccagggtgcacaggcggttgtcgtcggacacgcagatgggcgggtcatcgggaggcacctcctcgccttcactgttgagctccacttcgggctcgggctgcccccggcggcggcggcccaggaaatgcttgcggatacacaagaaatcgagaagccagagcatgaaggccgtgccgaggaagcgcgggaagagcacgaggcacgaggcggtctgggcgcagagcctcaaggagtgaagcagcagggagcggagcatggtggctgcaggccccgaagccccctgggacccctcgccctctccgaccaccaaccgcgacgtggcctggcgaggcatctgggcttcagcagtgcagggagttcaatttatagcggaggcttcaattggcgggagactccacctccggcccggcccgcccccttgcaacttgagcccggagggatcacccagcagcgcggccaatgccctagaaatcttgggct

SEQ ID NO: 7041 - DNA, 3120 bp, Homo sapiens
tttygggatgattttcaattgctcagagaataaattccttgactttctacgtaaggccctgcaggaccaggcccctgtcattatctctgagcactctccatcttgcacccaaagccccagcartatcttactgctttcrgtaaatacacaccgggctatgtggggttttgtctggggaaaggggatgtgagttgtaactaagagatttatastcaatcttgaagggaagagctcatattggaggcaatggaatgcctcaagctggctctgaaagtacacattttttccagtcataagtagatcacatttgtgtgatcttgtgatcctctctctagcagagccgtgcagactacctacttccggccctttcttgccccacgaaatttcacatcacaacgacttgtggttttaatcctccgtttttctgcttctgaagttacttcagcctggcaagtcctttacctccccgtaggcctggcgagctgcatcacaacattcaagattcaccctagagccatctgggaaactttcttctccaggtcgccctgcgtcctcgcctccccaccccgttcttctcgagtcgggtgagctgtctagttccatcacggccggcacggccgcaggggtggccggttatttactgctctactgggcccgtgarcagtctggcgagccragcagttgccgacgcccggcacaatccgctgcacgtagcaggarcctcaggtccaggccggaagtgaaagggcagggtgtgggtcctcctggggtcgcaggcgcagagccgcctctggtcacgtgattcgccgataagtcacgggggcgccrctcacctgaccagggtctcacgtggccagccccctccgagaggggagaccagcgggccaygacaagytccaggctttggttttcgctgctgctggcggcagcgttcgcaggacgggcgacggccctctggycctgrcctcagaacttccaaacctccgaccagcgctacgtcckttacccgaacaactttcaattccagtacgatgtcagctcggccgcgcagcccggctgctcagtcctcgacgaggccttccagcgctatcgtgacctgcttttcggttccgggtcttggccccgtccttacctcacagggaaacggcatacactggagaagaatgtgttggttgtctctgtagtcacacctggatgtaaccagcttcctactttggagtcagtggagaattataccctgaccataaatgatgaccagtgtttactcctctctgagactgtctggggagctctcygaggtctggagacttttagccagcttgtttggaaatctgctgagggcacattctttatcaacaagactgagattgaggactttccccgctttcctcacyrgggcttgctgttggatacatctcgccattacctgccactctctagcatcctggacactctggatstcatggcgtacartamattgaacrtgttccactggcrtctggtagatgatccttyctycccatatgagagcttcacttttccagagctcatgagaaaggggtyctacaaccctgtcacccacatctacacagcacaggatgtgaaggaggtcattgaatacgcayggctcyrgrdtatccrtgtgcttgcagagtttgacactcctggccacactttgtcctggggaccarrtatccctggattactgactccttgctactctgggtctgagccctctggcacctttggaccagtgaatcccaktctcaataatacctatgagytcakgagcacattcttcttagaagtcagctctgtcttcccagwtttttatcttcatcttggaggagatgaggttgatttcacctgctrgaagtccaacccagagwtccaggactttatgaggaagaaaggcttcggtgaggacttcaagcagctggagtccttctacatccagacgctgctggacatcgtctcttcttatggcaagggctatgtggtgtggcaggaggtgtttgataataaagtaaagattcagccagacacaatsatacaggtgtggcgagaggatattccagtgractatatgaaggagctggaactggtcaccaaggccggcttccgggcccttctctctgccccctgstacctgaaccgtatatcctatggccctgactggaaggatttctacrtagtggaacccctggcatttgaaggtaccccygagcagaaggctctggtgattggtggagaggcttrtatgtggggagaatatgtggacaacacaaacctggtccccaggctctgscccagagcaggggctgttgccgaaaggctgtggagcaacaagttgacatctgacctgacatttgcctatgaacgtttgtcacacttcyrctgtgaattgctgaggcgaggtgtccaggcccaacccctcaatgtaggcttctgtgagcaggagtttgaacagacctgagccccaggcaccgaggagggtgctggctgtaggtgaatggtagtggagccaggcttccactgcatcctggccaggggacggagccccttgccttcgtgccccttgcctgcgtgcccctgtgcttggagagaaaggggccggtgctggcgctcgcattcaataaagagtaatgtggcatttttctataataaacatggattacctgtgtttaaaaaaaaaagtgtgaatggcgttagggtaagggcacagccaggctggagtcagtgtctgcccctgaggtcttttaagttgagggctgggaatgaaacctatagcctttgtgctgttctgccttgcctgtgagctatgtcactcccctcccactcctgaccatattccagacacctgccctaatcctcagcctgctcacttcacttctgcattatatctccaaggcgttggtatatggaaaaagatgtaggggcttggaggtgttctggacagtggggagggctccagacccaacctggtcacaraagagcctctcccccatgcatactcatccacctccctcccctagagctattctcctttgggtttcttgctgctkcaattttatacaaccattatttaaatattattaaacacatrttgttctctaggca

SEQ ID NO: 7042 - DNA, 2760 bp, Homo sapiens
cgccgctgctatgctgagtgccgcgtctcgcgtagtctcccgcgccgccgtccactgcgcgcttcgctctccgccgcccgaggcccgcgcgctcgccatgtcccggccaccgccaccgcgggtcgcctcggtgctgggcaccatggagatggggcgccgcatggacgcgcccgccagcgccgcggccgtgcgcgcctttctggagcgcggccacaccgaactggacacggccttcatgtacagcgacggccagtccgagaccatcctgggcggcctggggctcgggctgggcggtggcgactgcagagtgaaaattgccaccaaggccaacccttgggatggaaaatcactaaagcctgacagtgtccggtcccagctggagacgtcattgaagaggctgcagtgtccccaagtggacctcttctacctacacrcacctgaccacggcaccccggtggaagagacgctgcatgcctgccascggctgcaccaggagggcaagttcrtggagcttggcctctccaactatgctagctgggaagtggccragatctgtaccctctgcaagagcaatggctggatcctgcccactgtgtaccagrgcatgtacaacgccaccacccggcaggtggaaacggagctcttcccctgcctcaggcactttggactgaggttctatgcctacaaccctctggctgggggcctgctgactggcaagtacaagtatgaggacaaggacgggaaacagcctgtgggccgcttytttgggaatarctgggctgagacctacaggaatcgcttctggaaggagcaccacttcgaggccattgcgttggtggagaaggccctgcaggccgcatatggcgccagcgcccccagtgtgacctcggctgccctccggtggatgtaccaccactcacagctgcagggtgcccacggggacgcggtcatcctgggcatgtccagcctggagcagctggagcagaacttggcagcaacagaggaagggcccctggagccggctgtcgtggatgcctttaatcaagcctggcatttggttgctcacgaatgtcccaactacttccgctaggcccrtcatggctcaggctgcccaaggcttttctgtcacctcttttgttctctcacactgaccagtcttggccttaagctgacttagaagggtttttctgaattgtctagatccatgcattatttttctagcttcctgccttgctccctattcactttacactgtgaaaggtggggggtgagtcccacttgagcgcttcctgttgaataaagcaggcacttgacctggctgtagcctaggtcttgagtgaaccccaaaaacttgctttctctgctgttaacactttgtttcccatcctacctggggactgagaaagggcagaaccatgggctggagtcttcagagggcagaggtagtaggagggtcacagaagcacactgccctcccagggtctcctcgggcccctggtctgaatacccacctgacctctcaacattgaggtgtctctcactcttctacacacgatagaaaagagagtcatacacctgcagtacattttctctaattcagagttgcctcaatacattcttaggaatgaaacaactgggacaaagaaactaccattagagtcactaccaagaagaagaacacttcccaggatctgtggaacatcttgaagctctcaatcttagcctcctcttgtcttaactaaagcctcttgtcttttcacccattaggttctcagtcttggctctgggcctcctgttcggcatggggacagacataggcagccaaggtcctcatttcccttggaaacccctactccaaacaggaggcaccaaggctgagaataagaatccttggttcagtggttgctgaacctgctgcattcccagtgcaccaaaatccctccagccatgggcagggcagcaggcagcacttggagcagcttcttgaagcaatgaaagaggcccaacctggaaatttactttttcatttatatttattatttgttcttgagacaggctcttgctctgtcacctagaccggagtacagtggcatgatcactgctcacagcaattttgacctccggggctcaagggatcctcccacctcagcctcccgagaagtttttatttttattttttttgtggagtggagatctccctatgttgtcaccgtcttttctgtttacccgtaacaaaacagatgctcacccatgtggaatggtgtatcagttatctttgcacaacaaaccacactaataagttgcttgaaaagataaaatccaaggctggcacagtggctcatggctataatcccagcacgttgagagcccaaagcaggcagatcacttgagctcaggagtttgagaccagcctgggcaacatggtgaaaccctgtctctaccaaaaatacaaaaaattaatctgtgtgtggtggcacatacctgtggtcccagctactctggaggctgaggtgggaggatcgcctgggccccggaaacagaggttgcagtgggccgagatcatgccattacactctagcctgggtgacacagtcagaccccatctcaaaaaaaaaaaaaaaaatcttattgatcaaaagatttgatataattcctattattcccagctgactttttcttaatactgaaattgacaaactaatcctaaagctcatatggaaattcaagggacccaggagaaccaaaacagtcttgaaaaac

SEQ ID NO: 7043 - DNA, 1888 bp, Homo sapiens
cagacagaccaatcacgcgcattcttcggccacgacaagcgcgcctctgatcacgtgaccaggtccgctacccacgtgggggmtcagcgtgcacccttctttgtgctcgggttaggaggagctaggytgccatcgggccggtgcagatacggggttgctcttttgctcataagaggggcttcgctggcagtctgaacggcaagcttgagtcaggacccttaattaagatcctcaattggctggagggcagrtctcgcgagtagggcaacgcggtaaaaatattgcttcggtgggtgacgcggtacagctgcccaagggcgttcgtaacgggaatgccgaagcgtgggaaaaagggagcggtggcggaagacggggatgagctcaggacagagccagaggccaagaagagtaagacggccgcaaagaaaaatgacaaagaggcagcagragagggcccagccctgtatgaggaccccccagatcasaaaacctcacccagtggcaaacctgccacactcaagryctgctcttggaatgtggatgggcttcgagcctggattaagaagaaaggattagattgggtaaaggaagaagccccagatatactgtgccttcaagagaccaaatgttcagagaacaaactaccagctgaacttcaggagctgcctggactctctcatcaatactggtcagctccttcggacaaggaagggtacagtggcgtgggcctgctttcccgccagtgcccactcaaagtttcttacggcataggcgakgaggagcatgatcaggaaggccgggtgattgtggctgaatttgactcgtttgtgctggtaacagcatatgtacctaatgcaggccgaggtctggtacgactggagtaccggcagcgctgggatgaagcctttcgcaagttcctgaagggcctggcttcccgaaagccccttgtgctgtgtggagacctcaatgtggcacatgaagaaattgaccttcgcaaccccaaggggaacaaaaagaatgctggcttcacgccacaagagcgccaaggcttcrgggaattactgcaggctgtgccactggctgacagctttaggcacctctaccccaacacaccctatgcctacaccttttggacttayatgatgaatgctcgatccaagaatgttggttggcgccttgattactttytgttgtcccactctctgttacctgcattgtgtgacagcaagatccgttccaaggccctcggcagtgatcactgtyctatcaccctatacctagyactgtgacaccacccctaaatcactttgagcctgggaaataagccccctcaactaccattccttctttaaacactcttcagagaaatctgcattctatttctcatgtataaaactaggaatcctccaaccaggctcctgtgatagagttcttttaagcccaagattttttatttgagggttttttktttttwaaaaaaaaattgaacaaagactactaatgactttgtttgaattatccacatgaaaataaagagccatagtttcagccttgctgtcttcgtgtcttaccccttcgtggggctacacattctcttcctcatattttcatgcacacaagttaacaactgaaaaagcgtagagtcatgaccttatttatttacaagcacaggataagtccctaacctcccccaaagactgagcaaccctacccagcccagttaaatactgcaactgggggggtaaaaaaggtcgggaggaggaattaagggaaatacaggaataggggaacatatcccacattaaatagttatatacacatcagttcctgtggttctgtacagagcagcggctgaccccacccccacaggacacaatgtggggagagg

SEQ ID NO: 7044 - DNA, 1822 bp, Homo sapiens
cagacagaccaatcacgcgcattcttcggccacgacaagcgcgcctctgatcacgtgaccaggtccgctacccacgtgggggmtcagcgtgcacccttctttgtgctcgggttaggaggagctaggytgccatcgggccggtgcagatacggggttgctcttttgctcataagaggggcttcgctggcagtctgaacggcaacgcggtaaaaatattgcttcggtgggtgacgcggtacagctgcccaagggcgttcgtaacgggaatgccgaagcgtgggaaaaagggagcggtggcggaagacggggatgagctcaggacagagccagaggccaagaagagtaagacggccgcaaagaaaaatgacaaagaggcagcagragagggcccagccctgtatgaggaccccccagatcasaaaacctcacccagtggcaaacctgccacactcaagryctgctcttggaatgtggatgggcttcgagcctggattaagaagaaaggattagattgggtaaaggaagaagccccagatatactgtgccttcaagagaccaaatgttcagagaacaaactaccagctgaacttcaggagctgcctggactctctcatcaatactggtcagctccttcggacaaggaagggtacagtggcgtgggcctgctttcccgccagtgcccactcaaagtttcttacggcataggcgakgaggagcatgatcaggaaggccgggtgattgtggctgaatttgactcgtttgtgctggtaacagcatatgtacctaatgcaggccgaggtctggtacgactggagtaccggcagcgctgggatgaagcctttcgcaagttcctgaagggcctggcttcccgaaagccccttgtgctgtgtggagacctcaatgtggcacatgaagaaattgaccttcgcaaccccaaggggaacaaaaagaatgctggcttcacgccacaagagcgccaaggcttcrgggaattactgcaggctgtgccactggctgacagctttaggcacctctaccccaacacaccctatgcctacaccttttggacttayatgatgaatgctcgatccaagaatgttggttggcgccttgattactttytgttgtcccactctctgttacctgcattgtgtgacagcaagatccgttccaaggccctcggcagtgatcactgtyctatcaccctatacctagyactgtgacaccacccctaaatcactttgagcctgggaaataagccccctcaactaccattccttctttaaacactcttcagagaaatctgcattctatttctcatgtataaaactaggaatcctccaaccaggctcctgtgatagagttcttttaagcccaagattttttatttgagggttttttktttttwaaaaaaaaattgaacaaagactactaatgactttgtttgaattatccacatgaaaataaagagccatagtttcagccttgctgtcttcgtgtcttaccccttcgtggggctacacattctcttcctcatattttcatgcacacaagttaacaactgaaaaagcgtagagtcatgaccttatttatttacaagcacaggataagtccctaacctcccccaaagactgagcaaccctacccagcccagttaaatactgcaactgggggggtaaaaaaggtcgggaggaggaattaagggaaatacaggaataggggaacatatcccacattaaatagttatatacacatcagttcctgtggttctgtacagagcagcggctgaccccacccccacaggacacaatgtggggagagg

SEQ ID NO: 7045 - DNA, 1755 bp, Homo sapiens
gccatcgggccggtgcagatacggggttgctcttttgctcataagaggggcttcgctggcagtctgaacggcaagcttgagtcaggacccttaattaagatcctcaattggctggagggcagrtctcgcgagcaacgcggtaaaaatattgcttcggtgggtgacgcggtacagctgcccaagggcgttcgtaacgggaatgccgaagcgtgggaaaaagggagcggtggcggaagacggggatgagctcaggacagagccagaggccaagaagagtaagacggccgcaaagaaaaatgacaaagaggcagcagragagggcccagccctgtatgaggaccccccagatcasaaaacctcacccagtggcaaacctgccacactcaagryctgctcttggaatgtggatgggcttcgagcctggattaagaagaaaggattagattgggtaaaggaagaagccccagatatactgtgccttcaagagaccaaatgttcagagaacaaactaccagctgaacttcaggagctgcctggactctctcatcaatactggtcagctccttcggacaaggaagggtacagtggcgtgggcctgctttcccgccagtgcccactcaaagtttcttacggcataggcgakgaggagcatgatcaggaaggccgggtgattgtggctgaatttgactcgtttgtgctggtaacagcatatgtacctaatgcaggccgaggtctggtacgactggagtaccggcagcgctgggatgaagcctttcgcaagttcctgaagggcctggcttcccgaaagccccttgtgctgtgtggagacctcaatgtggcacatgaagaaattgaccttcgcaaccccaaggggaacaaaaagaatgctggcttcacgccacaagagcgccaaggcttcrgggaattactgcaggctgtgccactggctgacagctttaggcacctctaccccaacacaccctatgcctacaccttttggacttayatgatgaatgctcgatccaagaatgttggttggcgccttgattactttytgttgtcccactctctgttacctgcattgtgtgacagcaagatccgttccaaggccctcggcagtgatcactgtyctatcaccctatacctagyactgtgacaccacccctaaatcactttgagcctgggaaataagccccctcaactaccattccttctttaaacactcttcagagaaatctgcattctatttctcatgtataaaactaggaatcctccaaccaggctcctgtgatagagttcttttaagcccaagattttttatttgagggttttttktttttwaaaaaaaaattgaacaaagactactaatgactttgtttgaattatccacatgaaaataaagagccatagtttcagccttgctgtcttcgtgtcttaccccttcgtggggctacacattctcttcctcatattttcatgcacacaagttaacaactgaaaaagcgtagagtcatgaccttatttatttacaagcacaggataagtccctaacctcccccaaagactgagcaaccctacccagcccagttaaatactgcaactgggggggtaaaaaaggtcgggaggaggaattaagggaaatacaggaataggggaacatatcccacattaaatagttatatacacatcagttcctgtggttctgtacagagcagcggctgaccccacccccacaggacacaatgtggggagagg

SEQ ID NO: 7046 - DNA, 1664 bp, Homo sapiens
cccacgtgggggmtcagcgtgcacccttctttgtgctcgggcaacgcggtaaaaatattgcttcggtgggtgacgcggtacagctgcccaagggcgttcgtaacgggaatgccgaagcgtgggaaaaagggagcggtggcggaagacggggatgagctcaggacagagccagaggccaagaagagtaagacggccgcaaagaaaaatgacaaagaggcagcagragagggcccagccctgtatgaggaccccccagatcasaaaacctcacccagtggcaaacctgccacactcaagryctgctcttggaatgtggatgggcttcgagcctggattaagaagaaaggattagattgggtaaaggaagaagccccagatatactgtgccttcaagagaccaaatgttcagagaacaaactaccagctgaacttcaggagctgcctggactctctcatcaatactggtcagctccttcggacaaggaagggtacagtggcgtgggcctgctttcccgccagtgcccactcaaagtttcttacggcataggcgakgaggagcatgatcaggaaggccgggtgattgtggctgaatttgactcgtttgtgctggtaacagcatatgtacctaatgcaggccgaggtctggtacgactggagtaccggcagcgctgggatgaagcctttcgcaagttcctgaagggcctggcttcccgaaagccccttgtgctgtgtggagacctcaatgtggcacatgaagaaattgaccttcgcaaccccaaggggaacaaaaagaatgctggcttcacgccacaagagcgccaaggcttcrgggaattactgcaggctgtgccactggctgacagctttaggcacctctaccccaacacaccctatgcctacaccttttggacttayatgatgaatgctcgatccaagaatgttggttggcgccttgattactttytgttgtcccactctctgttacctgcattgtgtgacagcaagatccgttccaaggccctcggcagtgatcactgtyctatcaccctatacctagyactgtgacaccacccctaaatcactttgagcctgggaaataagccccctcaactaccattccttctttaaacactcttcagagaaatctgcattctatttctcatgtataaaactaggaatcctccaaccaggctcctgtgatagagttcttttaagcccaagattttttatttgagggttttttktttttwaaaaaaaaattgaacaaagactactaatgactttgtttgaattatccacatgaaaataaagagccatagtttcagccttgctgtcttcgtgtcttaccccttcgtggggctacacattctcttcctcatattttcatgcacacaagttaacaactgaaaaagcgtagagtcatgaccttatttatttacaagcacaggataagtccctaacctcccccaaagactgagcaaccctacccagcccagttaaatactgcaactgggggggtaaaaaaggtcgggaggaggaattaagggaaatacaggaataggggaacatatcccacattaaatagttatatacacatcagttcctgtggttctgtacagagcagcggctgaccccacccccacaggacacaatgtggggagagg

SEQ ID NO: 7047 - DNA, 1955 bp, Homo sapiens
aggagctaggytgccatcgggccggtgcagatacggggttgctcttttgctcataagaggggcttcgctggcagtctgaacggcaagcttgagtcaggacccttaattaagatcctcaattggctggagggcagrtctcgcgagtagggtacaaggcactatgaaatgatctagtttcgtgggtgaggggctgaagggcctatgatgcacggaggcggggaaaggatttagagataacgtggtttgaaaggcgggacctggtgcggggacgctcttgggaggagtcttctccccagccttagctggtttcatgatttctttgcgtytgtaggcaacgcggtaaaaatattgcttcggtgggtgacgcggtacagctgcccaagggcgttcgtaacgggaatgccgaagcgtgggaaaaagggagcggtggcggaagacggggatgagctcaggacagagccagaggccaagaagagtaagacggccgcaaagaaaaatgacaaagaggcagcagragagggcccagccctgtatgaggaccccccagatcasaaaacctcacccagtggcaaacctgccacactcaagryctgctcttggaatgtggatgggcttcgagcctggattaagaagaaaggattagattgggtaaaggaagaagccccagatatactgtgccttcaagagaccaaatgttcagagaacaaactaccagctgaacttcaggagctgcctggactctctcatcaatactggtcagctccttcggacaaggaagggtacagtggcgtgggcctgctttcccgccagtgcccactcaaagtttcttacggcataggcgakgaggagcatgatcaggaaggccgggtgattgtggctgaatttgactcgtttgtgctggtaacagcatatgtacctaatgcaggccgaggtctggtacgactggagtaccggcagcgctgggatgaagcctttcgcaagttcctgaagggcctggcttcccgaaagccccttgtgctgtgtggagacctcaatgtggcacatgaagaaattgaccttcgcaaccccaaggggaacaaaaagaatgctggcttcacgccacaagagcgccaaggcttcrgggaattactgcaggctgtgccactggctgacagctttaggcacctctaccccaacacaccctatgcctacaccttttggacttayatgatgaatgctcgatccaagaatgttggttggcgccttgattactttytgttgtcccactctctgttacctgcattgtgtgacagcaagatccgttccaaggccctcggcagtgatcactgtyctatcaccctatacctagyactgtgacaccacccctaaatcactttgagcctgggaaataagccccctcaactaccattccttctttaaacactcttcagagaaatctgcattctatttctcatgtataaaactaggaatcctccaaccaggctcctgtgatagagttcttttaagcccaagattttttatttgagggttttttktttttwaaaaaaaaattgaacaaagactactaatgactttgtttgaattatccacatgaaaataaagagccatagtttcagccttgctgtcttcgtgtcttaccccttcgtggggctacacattctcttcctcatattttcatgcacacaagttaacaactgaaaaagcgtagagtcatgaccttatttatttacaagcacaggataagtccctaacctcccccaaagactgagcaaccctacccagcccagttaaatactgcaactgggggggtaaaaaaggtcgggaggaggaattaagggaaatacaggaataggggaacatatcccacattaaatagttatatacacatcagttcctgtggttctgtacagagcagcggctgaccccacccccacaggacacaatgtggggagagg

SEQ ID NO: 7048 - DNA, 1832 bp, Homo sapiens
cagacagaccaatcacgcgcattcttcggccacgacaagcgcgcctctgatcacgtgaccaggtccgctacccacgtgggggmtcagcgtgcacccttctttgtgctcgggttaggaggagctaggytgccatcgggccggtgcagatacggggttgctcttttgctcataagaggggcttcgctggcagtctgaacggcaagcttgagcaacgcggtaaaaatattgcttcggtgggtgacgcggtacagctgcccaagggcgttcgtaacgggaatgccgaagcgtgggaaaaagggagcggtggcggaagacggggatgagctcaggacagagccagaggccaagaagagtaagacggccgcaaagaaaaatgacaaagaggcagcagragagggcccagccctgtatgaggaccccccagatcasaaaacctcacccagtggcaaacctgccacactcaagryctgctcttggaatgtggatgggcttcgagcctggattaagaagaaaggattagattgggtaaaggaagaagccccagatatactgtgccttcaagagaccaaatgttcagagaacaaactaccagctgaacttcaggagctgcctggactctctcatcaatactggtcagctccttcggacaaggaagggtacagtggcgtgggcctgctttcccgccagtgcccactcaaagtttcttacggcataggcgakgaggagcatgatcaggaaggccgggtgattgtggctgaatttgactcgtttgtgctggtaacagcatatgtacctaatgcaggccgaggtctggtacgactggagtaccggcagcgctgggatgaagcctttcgcaagttcctgaagggcctggcttcccgaaagccccttgtgctgtgtggagacctcaatgtggcacatgaagaaattgaccttcgcaaccccaaggggaacaaaaagaatgctggcttcacgccacaagagcgccaaggcttcrgggaattactgcaggctgtgccactggctgacagctttaggcacctctaccccaacacaccctatgcctacaccttttggacttayatgatgaatgctcgatccaagaatgttggttggcgccttgattactttytgttgtcccactctctgttacctgcattgtgtgacagcaagatccgttccaaggccctcggcagtgatcactgtyctatcaccctatacctagyactgtgacaccacccctaaatcactttgagcctgggaaataagccccctcaactaccattccttctttaaacactcttcagagaaatctgcattctatttctcatgtataaaactaggaatcctccaaccaggctcctgtgatagagttcttttaagcccaagattttttatttgagggttttttktttttwaaaaaaaaattgaacaaagactactaatgactttgtttgaattatccacatgaaaataaagagccatagtttcagccttgctgtcttcgtgtcttaccccttcgtggggctacacattctcttcctcatattttcatgcacacaagttaacaactgaaaaagcgtagagtcatgaccttatttatttacaagcacaggataagtccctaacctcccccaaagactgagcaaccctacccagcccagttaaatactgcaactgggggggtaaaaaaggtcgggaggaggaattaagggaaatacaggaataggggaacatatcccacattaaatagttatatacacatcagttcctgtggttctgtacagagcagcggctgaccccacccccacaggacacaatgtggggagagg

SEQ ID NO: 7049 - DNA, 1492 bp, Homo sapiens
ccagtgagccaactgtgcgaaccagacccggcarccttgctcagttcagcatagcggagcggatccgatcggatcggagcggatcggagcacaccggagcaggctcatcgagaaggcgtctgcgagaccatggagaacggatacacctatgaagattataagaacactgcagaatggcttctgtctcayactaagcacygacctcaagttgcaataatctgtggttctggattaggaggtctgactgataaattaactcaggcccagatctttgactacrgtgaaatccccaactttccycgaagtacagtgccaggtcatgctggccgactggtgtttgggttcctgaatggcagggcctgtgtgatgatgcagggcaggttccacatgtatraagggtacccactctggaaggtgacattcccagtgagggttttccaccttctgggtgtggacaccctggtagtcaccaatgcagcaggagggctgaaccccaagtttgaggttggagrtatcatgctgatccgtgaccatatcaacctacctggtttcagtggtcagaaccctctcagagggcccaatgatgaaaggtttggagatcgtttccctgccatgtctgatgcctacgaccggactatgaggcagaggsctctcagtacctggaaacaaatgggggagcaacgtgagctacaggaagkcacctrtgtgatggtggcaggccccagctttgagactgtggcagaatgtcgtgtgctgcagaagctgggagcagacgctgttggcatgagtacagtaccagaagttatcgttgcacggcactgtggacttcsagtctttggcttctcactcatcactaacaaggtcatcatggattatgaaagcctggagaaggccaaccatgaagaagtcttagcagctggcaaacaagctgcacagaaattggaacagtttgtctccattcttatggccagcattccactccctgacaaagccagttgacctgccttggagtcgtctggcatctcccacacaagacccaagtagctgctaccttctttggccccttgctggagtcatgtgcctctgtccttaggttgtagcagaaaggaaaagattcctgtccttcacctttcccactttcttctaccagacccttctggtgccagatcctcttctcaaagctgggattacaggtgtgagcatagtgagaccttggcgctacaaaataaagctgttctcattcctgttctttyttacacaagagctggagcccgtgccctaccacacatctgtggagatgcccaggatttgactcgggccttagaactttgcatagcagctgctactagctctttgagataatacattccgaggggctcagttctgccttatytaaatcaccagagaccaaacaaggactaatccaatacctcttggattttatttaatgtcataatgttgtcagaataaagagaaagatgaaataatttca

SEQ ID NO: 7050 - DNA, 1465 bp, Homo sapiens
ccagtgagccaactgtgcgaaccagacccggcarccttgctcagttcagcatagcggagcggatccgatcggatcggagcggatcggagcacaccggagcaggctcatcgagaaggcgtctgcgagaccatggagaacggatacacctatgaagattataagaacactgcagaatggcttctgtctcayactaagcacygacctcaagttgcaataatctgtggttctggattaggaggtctgactgataaattaactcaggcccagatctttgactacrgtgaaatccccaactttccycgaagtacagtgccaggtcatgctggccgactggtgtttgggttcctgaatggcagggcctgtgtgatgatgcagggcaggttccacatgtatraagggtacccactctggaaggtgacattcccagtgagggttttccaccttctgggtgtggacaccctggtagtcaccaatgcagcaggagggctgaaccccaagtttgaggttggagrtatcatgctgatccgtgaccatatcaacctacctggtttcagtggtcagaaccctctcagagggcccaatgatgaaaggtttggagatcgtttccctgccatgtctgatgcctacgaccggactatgaggcagaggsctctcagtacctggaaacaaatgggggagcaacgtgagctacaggaagkcacctrtgtgatggtggcaggccccagctttgagactgtggcagaatgtcgtgtgctgcagaagctgggagcagacgctgttggcatgagtacagtaccagaagttatcgttgcacggcactgtggacttcsagtctttggcttctcactcatcactaacaaggtcatcatggattatgaaagcctggagaaggccaaccatgaagaagtcttagcagctggcaaacaagctgcacagaaattggaacagtttgtctccattcttatggccagcattccactccctgacaaagccagttgacctgccttggagtcgtctggcatctcccacacaagacccaagtagctgctaccttctttggccccttgctggagtcatgtgcctctgtccttaggttgtagcagaaaggaaaagattcctgtccttcacctttcccactttcttctaccagacccttctggtgccagatcctcttctcaaagctgggattacaggtgtgagcatagtgagaccttggcgctacaaaataaagctgttctcattcctgttctttyttacacaagagctggagcccgtgccctaccacacattcgggccttagaactttgcatagcagctgctactagctctttgagataatacattccgaggggctcagttctgccttatytaaatcaccagagaccaaacaaggactaatccaatacctcttggattttatttaatgtcataatgttgtcagaataaagagaaagatgaaataatt

SEQ ID NO: 7051 - DNA, 739 bp, Homo sapiens
atgatgccgtgtcagagagcaaagctcctgtccttttggcctaatttggtgatgctgttcttgggtctaccacacctccttttgccctccgcaggagcctgtgttggaagagatggtgatgggcctgggcgttttgttgttggtcttcgtgctgggtctgggtctgaccccaccgaccctggctcaggataactccaggtacacacacttcctgacccagcactatgatgccaaaccacagggccgggatgacagatactgtgaaagcatcatgaggagacggggcctgacctcaccctgcaaagacatcaacacatttattcatggcaacaagcgcagcatcaaggccatctgtgaaaacragaatggaaaccctcacagagaaaacctaagaataagcaagtcttctttccaggtcaccacttgcaagctacatggaggktccccctggcctccatgccagtaccgagccacwgcggggttcagaaacgttgttgttgcttgtgaaaatggcttacctgtccacttggatcagtcaattttccgtcgtccgtaaccagcgggcccctggtcaagtgctggctctgctgtccttgccttccatttcccctctgcacccagaacagtggtggcaacattcattgccaagggcccaaagaaagagctacctggaccttttgttttctgtttgacaacatgtttaataaataaaaatgtcttgatatcagtaagaatcaga

SEQ ID NO: 7052 - DNA, 1227 bp, Homo sapiens
gtcctgccaaagaaagcagcagcgaataagtacgtggcagatggtgctgtcgaccagtgtcaagaccaagtttcatgggttcctggacgctcagccaggggtagtctctgaagggccgcctggcaattgggagcagaagccagtttcccgccatctgctctccgtggaggcagtgctctcgcggctgctgcccgttggggtccagctgaggaaggagcgcggatcccaggctcgttctttgcctgggctgcccctgcggcccctggggcgggtgctgctgcggcgccagctccaagggcggatccaggcgggaggggcctcctcggagaagcggggcgcggtcccaactacgcagaggctggcacgccgaccctccacacctcaccacgcccccatctccgtccgtgtacacacactcacacaaggacgccaaccccacctagatgcaaagcaggattcaaaagaacatctttgcgttttctaccggctccccatcatcgtactagggaggaagaagcgggtgagaaacaaaacttctttccattgtcctgcccgtttctgcggacttgttctgaggccgaggagcctgtgttggaagagatggtgatgggcctgggcgttttgttgttggtcttcgtgctgggtctgggtctgaccccaccgaccctggctcaggataactccaggtacacacacttcctgacccagcactatgatgccaaaccacagggccgggatgacagatactgtgaaagcatcatgaggagacggggcctgacctcaccctgcaaagacatcaacacatttattcatggcaacaagcgcagcatcaaggccatctgtgaaaacragaatggaaaccctcacagagaaaacctaagaataagcaagtcttctttccaggtcaccacttgcaagctacatggaggktccccctggcctccatgccagtaccgagccacwgcggggttcagaaacgttgttgttgcttgtgaaaatggcttacctgtccacttggatcagtcaattttccgtcgtccgtaaccagcgggcccctggtcaagtgctggctctgctgtccttgccttccatttcccctctgcacccagaacagtggtggcaacattcattgccaagggcccaaagaaagagctacctggaccttttgttttctgtttgacaacatgtttaataaataaaaatgtcttgatatcagtaagaatcaga

SEQ ID NO: 7053 - DNA, 724 bp, Homo sapiens
ggttcacacaactggaacccatctccaggaacaaacagctggaacccatctcccgttgaagggaaactgccagatttttgagcctgtgttggaagagatggtgatgggcctgggcgttttgttgttggtcttcgtgctgggtctgggtctgaccccaccgaccctggctcaggataactccaggtacacacacttcctgacccagcactatgatgccaaaccacagggccgggatgacagatactgtgaaagcatcatgaggagacggggcctgacctcaccctgcaaagacatcaacacatttattcatggcaacaagcgcagcatcaaggccatctgtgaaaacragaatggaaaccctcacagagaaaacctaagaataagcaagtcttctttccaggtcaccacttgcaagctacatggaggktccccctggcctccatgccagtaccgagccacwgcggggttcagaaacgttgttgttgcttgtgaaaatggcttacctgtccacttggatcagtcaattttccgtcgtccgtaaccagcgggcccctggtcaagtgctggctctgctgtccttgccttccatttcccctctgcacccagaacagtggtggcaacattcattgccaagggcccaaagaaagagctacctggaccttttgttttctgtttgacaacatgtttaataaataaaaatgtcttgatatcagtaagaatcaga

SEQ ID NO: 7054 - DNA, 729 bp, Homo sapiens
cctgaaccccagaacaaccagctggatcagttctcacaggagccacagctcagagactgggaaacatggttccaaaactgttcacttcccaaatttgtctgcttcttctgttggggcttatgggtgtggagggctcactccatgccagacccccacagtttacgagggctcagtggtttgccatccagcacatcagtctgaacccccctcgatgcaccattgcaatgcgggcaattaacaattatcgatggcgttgcaaaaaccaaaatacttttcttcgtacaacttttgctaatgtagttaatgtttgtggtaaccaaagtatacgctgccctcataacagaactctcaacaattgtcatcggagtagattccgggtgcctttactccactgtgacctcataaatccaggtgcacagaatatttcaaactgcasgtatgcagacagaccaggaaggaggttctatgtagttgcatgtgacaacagagatccacgggattctccacggtatcctgtggttccagttcacctggataccaccatctaagctcctgtatcagcastcctcatcatcactcatctgccaagctcctcaatcatagccaagatcccatccctccatgtactctgggtatcagcaactgtcctcatcagtctccataccccttcagctttcctgagctgaagtcccttgtgaaccctgcaataaactgctttgcaaattcatc

SEQ ID NO: 7055 - DNA, 1893 bp, Homo sapiens
agcgggttgatgacgtcagcgttcgaattccatggcggcgcggcggcgacggagcaccggcggcggcagggcgagagcattaaatgaaagcaaaagagttaataatggcaacacggctccagaagactcttcccctgccaagaaaactcgtagatgccagagacaggagtcgaaaaagatgcctgtggctggaggaaaagctaataaggacaggacagaagacaagcaagatggtatgccaggaaggtcatgggccagcaaaagggtctctgaatctgtgaaggccttgctgttaaagggcaaagctcctgtggacccagagtgtacagccaaggtggggaaggctcatgtgtattgtgaaggaaatgatgtctatgatgtcatgctaaatcagaccaatctccagttcaacaacaacaagtactatctgattcagctattagaagatgatgcccagaggaacttcagtgtttggatgagatggggccgagttgggaaaatgggacagcacagcctggtggcttgttcaggcaatctcaacaaggccaaggaaatctttcagaagaaattccttgacaaaacgaaaaacaattgggaagatcgagaaaagtttgagaaggtgcctggaaaatatgatatgctacagatggactatgccaccaatactcaggatgaagaggaaacaaagaaagaggaatctcttaaatctcccttgaagccagagtcacagctagatcttcgggtacaggagttaataaagttgatctgtaatgttcaggccatggaagaaatgatgatggaaatgaagtataataccaagaaagccccacttgggaagctgacagtggcacaaatcaaggcaggttaccagtctcttaagaagattgaggattgtattcgggctggccagcatggacragctctcatggaagcatgcaatgaattctacaccaggattccrcatgactttggactccgtactcctccactaatccggacacagaaggaactgtcagaaaaaayacaattactagaggctttgggagacattgaaattgctattaagctggtgaaaacagagctacaaagcccagaacacccattggaccaacactatagaaacctacattgtgccttgcgcccccttgaccatgaaagttaygagttcaaagtgatttcccagtacctacaatctacccatgctcccacacacagcgactataccatgaccttgctggatttgtttgaagtggagaaggatggtgagaaagaagccttcagagaggaccttcataacaggatgcttctatggcatggttccaggatgagtaactgggtgggaatcttgagccatgggcttcgaattgccccacctgaagctcccatcacaggttacatgtttgggaaaggaatctactttgctgacatgtcttccaagagtgccaattactgctttgcctctcgcctaaagaatacaggactgctgctcttatcagaggtagctctaggtcagtgtaatgaactactagaggccaatcctaaggccgaaggattgcttcaaggtaaacatagcaccaaggggctgggcaagatggctcccagttctgcccacttcgtcaccctgaatgggagtacagtgccattaggaccagcaagtgacacaggaattctgaatccagatggttataccctcaactacaatgaatatattgtatataaccccaaccaggtccgtatgcggtaccttttaaaggttcagtttaatttccttcagctgtggtgaatgttgatmttaaataaaccagagatctgatcttcaagcaagaaaataagcagtgttgtacttgtgaattttgtgatattttatgtaataaaaactgtacaggtctacca

SEQ ID NO: 7056 - DNA, 1854 bp, Homo sapiens
agcgggttgatgacgtcagcgttcgaattccatggcggcgcggcggcgacggagcaccggcggcggcagggcgagagcattaaatgaaagcaaaagagttaataatggcaacacggctccagaagactcttcccctgccaagaaaactcgtagatgccagagacaggagtcgaaaaagatgcctgtggctggaggaaaagctaataaggacaggacagaagacaagcaagatgaatctgtgaaggccttgctgttaaagggcaaagctcctgtggacccagagtgtacagccaaggtggggaaggctcatgtgtattgtgaaggaaatgatgtctatgatgtcatgctaaatcagaccaatctccagttcaacaacaacaagtactatctgattcagctattagaagatgatgcccagaggaacttcagtgtttggatgagatggggccgagttgggaaaatgggacagcacagcctggtggcttgttcaggcaatctcaacaaggccaaggaaatctttcagaagaaattccttgacaaaacgaaaaacaattgggaagatcgagaaaagtttgagaaggtgcctggaaaatatgatatgctacagatggactatgccaccaatactcaggatgaagaggaaacaaagaaagaggaatctcttaaatctcccttgaagccagagtcacagctagatcttcgggtacaggagttaataaagttgatctgtaatgttcaggccatggaagaaatgatgatggaaatgaagtataataccaagaaagccccacttgggaagctgacagtggcacaaatcaaggcaggttaccagtctcttaagaagattgaggattgtattcgggctggccagcatggacragctctcatggaagcatgcaatgaattctacaccaggattccrcatgactttggactccgtactcctccactaatccggacacagaaggaactgtcagaaaaaayacaattactagaggctttgggagacattgaaattgctattaagctggtgaaaacagagctacaaagcccagaacacccattggaccaacactatagaaacctacattgtgccttgcgcccccttgaccatgaaagttaygagttcaaagtgatttcccagtacctacaatctacccatgctcccacacacagcgactataccatgaccttgctggatttgtttgaagtggagaaggatggtgagaaagaagccttcagagaggaccttcataacaggatgcttctatggcatggttccaggatgagtaactgggtgggaatcttgagccatgggcttcgaattgccccacctgaagctcccatcacaggttacatgtttgggaaaggaatctactttgctgacatgtcttccaagagtgccaattactgctttgcctctcgcctaaagaatacaggactgctgctcttatcagaggtagctctaggtcagtgtaatgaactactagaggccaatcctaaggccgaaggattgcttcaaggtaaacatagcaccaaggggctgggcaagatggctcccagttctgcccacttcgtcaccctgaatgggagtacagtgccattaggaccagcaagtgacacaggaattctgaatccagatggttataccctcaactacaatgaatatattgtatataaccccaaccaggtccgtatgcggtaccttttaaaggttcagtttaatttccttcagctgtggtgaatgttgatmttaaataaaccagagatctgatcttcaagcaagaaaataagcagtgttgtacttgtgaattttgtgatattttatgtaataaaaactgtacaggtctacca

SEQ ID NO: 7057 - DNA, 2578 bp, Homo sapiens
agggtgagagctcattttctgtttgcacaattgcctggctcctctggccaaagggtgctctgcttctggcagctgaagatcccagtagacagcttcttaaaccatggctttccctgcaggatttggatgggcggcagccactgcagcttatcaagtagaaggaggctgggatgcagatggaaaaggcccttgtgtctgggacacatttactcatcagggaggagagagagttttcaagaaccagactggcgatgtagcttgtggcagctacactctgtgggaggaagatttgaaatgtatcaaacagcttggattgactcattaccgcttctctctttcctggtcacgtctgttacctgatgggacgacaggtttcatcaaccagaaaggaattgattattacaacaagatcatcgatgatttgttaaaaaatggggttactcccattgtgaccctctaccactttgatttgcctcagactttagaagaccaaggaggttggttgtcagaggcaatcattgaatcctttgacaaatatgctcagttttgcttcagtacctttggggatcgtgtcaagcagtggatcaccataaatgaagctaatgttctttctgtgatrtcatatgacttaggtatgtttcctccgggtatccctcactttgggactggaggttatcaggcagctcataatttgattaaggctcatgccagatcctggcacagctatgattccttatttcsaaaaaagcagaaaggtatggtgtctctatcactttttgcggtctggttggaaccagcagatcccaactcagtgtctgaccaggaagctgctaaaagagccatcactttccatctggatttatttgctaaacccatattcatcgatggtgattatcctgaagttgtcaagtctcagattgcctccatgagtcaaaagcaaggctatccatcatcgaggcttccagaattcactgaagaagagaagaaaatgatcaaaggcactgctgatttttttgctgtgcaatattatacaactcgcttaatcaagtaccaggagaacaagaaaggagaactaggkattctccaggatgcggaaattgaattttttccagatccatcttggaaaaatgtggattggatctacgtggtaccatggggagtaygtaaactactgaaatatattaaggatacatataataaccctgtaatttacatcactgagaatgggtttccccagagtgacccagcgcctcttgatgacactcaacgctgggagtatttcagacaaacatttcaggaactgttcaaagctatccaacttgataaagtcaatcttcaagtatattgtgcatggtctcttctggataactttgagtggaaccagggatacagcagccggtttggtctcttccacgttgattttgaagacccagctagaccccgagtcccttacacrtcrgccaagkaatawgccaagatcatccgaaacaatggccttgaagcacatctgtaggcaagatggctgagaaatacaggagaggcgtctgcttttggaaaggaaatctgctttggtgatgatctttcaggcaatctcaacttacttctttaatcaacatttaatatcaatggatctgtgattaaaakgtctgaatatgtaatgcctcgtgaagtatttaataatggcctttatttgtatttggatcaatgaggtttttaaaaaaaatggaagagaaaaccactaaccttgatttttgtattgcaaaatcagatagacctggaaacataaatttaaatccttagacatttttctagaaaaaaatgcaaagtttataaagatgatacaaccatgatttgcaactgtaacaggagaccatttattataagcgtacctgtttgtgaacttaattattctgattccataagctgtttttgcttaggtgatccactgccatgtgatccataatttttctacataaaaaatcaaagttaaaagtcacattatacagttatgcattcatttcaacaaaatagtgaattgataatctacttgttaatatattcggcccatattttgtgtgtttggacaagtacatctcccttttgcctaatgaacttttgaaaaataataaaataatagaataaattagactttgaatggcagaaaaagtatttgagtgttgatgttcagtaaaaaacagattcctaatttggcagagtggtgccaaattaaaagctaagtgataagcagggcataatttccacttttgaatgtttctttaaagtttagaaccttaagaacctcatgaaaaaaatacatgaagtgaatgaccaacctcagtgtaagcaaaggtggggtggggatttattaccccggtagttgaaatgtctgagattggtatggggttgactggaattggacattttactgaacttcctaaggtaggggtcaggagtagaggcagggctccttctggcctccatgtctcccctccagcaaacccttcacgtatgtggagtttggtctttcacatccatatttcagtagacttcagtaagcacctagttacccattagactt

SEQ ID NO: 7058 - DNA, 2584 bp, Homo sapiens
agggtgagagctcattttctgtttgcacaattgcctggctcctctggccaaagggtgctctgcttctggcagctgaagatcccagtagacagcttcttaaaccatggctttccctgcaggatttggatgggcggcagccactgcagcttatcaagtagaaggaggctgggatgcagatggaaaaggcccttgtgtctgggacacatttactcatcagggaggagagagagttttcaagaaccagactggcgatgtagcttgtggcagctacactctgtgggaggaagatttgaaatgtatcaaacagcttggattgactcattaccgcttctctctttcctggtcacgtctgttacctgatgggacgacaggtttcatcaaccagaaaggcaagtgaattgattattacaacaagatcatcgatgatttgttaaaaaatggggttactcccattgtgaccctctaccactttgatttgcctcagactttagaagaccaaggaggttggttgtcagaggcaatcattgaatcctttgacaaatatgctcagttttgcttcagtacctttggggatcgtgtcaagcagtggatcaccataaatgaagctaatgttctttctgtgatrtcatatgacttaggtatgtttcctccgggtatccctcactttgggactggaggttatcaggcagctcataatttgattaaggctcatgccagatcctggcacagctatgattccttatttcsaaaaaagcagaaaggtatggtgtctctatcactttttgcggtctggttggaaccagcagatcccaactcagtgtctgaccaggaagctgctaaaagagccatcactttccatctggatttatttgctaaacccatattcatcgatggtgattatcctgaagttgtcaagtctcagattgcctccatgagtcaaaagcaaggctatccatcatcgaggcttccagaattcactgaagaagagaagaaaatgatcaaaggcactgctgatttttttgctgtgcaatattatacaactcgcttaatcaagtaccaggagaacaagaaaggagaactaggkattctccaggatgcggaaattgaattttttccagatccatcttggaaaaatgtggattggatctacgtggtaccatggggagtaygtaaactactgaaatatattaaggatacatataataaccctgtaatttacatcactgagaatgggtttccccagagtgacccagcgcctcttgatgacactcaacgctgggagtatttcagacaaacatttcaggaactgttcaaagctatccaacttgataaagtcaatcttcaagtatattgtgcatggtctcttctggataactttgagtggaaccagggatacagcagccggtttggtctcttccacgttgattttgaagacccagctagaccccgagtcccttacacrtcrgccaagkaatawgccaagatcatccgaaacaatggccttgaagcacatctgtaggcaagatggctgagaaatacaggagaggcgtctgcttttggaaaggaaatctgctttggtgatgatctttcaggcaatctcaacttacttctttaatcaacatttaatatcaatggatctgtgattaaaakgtctgaatatgtaatgcctcgtgaagtatttaataatggcctttatttgtatttggatcaatgaggtttttaaaaaaaatggaagagaaaaccactaaccttgatttttgtattgcaaaatcagatagacctggaaacataaatttaaatccttagacatttttctagaaaaaaatgcaaagtttataaagatgatacaaccatgatttgcaactgtaacaggagaccatttattataagcgtacctgtttgtgaacttaattattctgattccataagctgtttttgcttaggtgatccactgccatgtgatccataatttttctacataaaaaatcaaagttaaaagtcacattatacagttatgcattcatttcaacaaaatagtgaattgataatctacttgttaatatattcggcccatattttgtgtgtttggacaagtacatctcccttttgcctaatgaacttttgaaaaataataaaataatagaataaattagactttgaatggcagaaaaagtatttgagtgttgatgttcagtaaaaaacagattcctaatttggcagagtggtgccaaattaaaagctaagtgataagcagggcataatttccacttttgaatgtttctttaaagtttagaaccttaagaacctcatgaaaaaaatacatgaagtgaatgaccaacctcagtgtaagcaaaggtggggtggggatttattaccccggtagttgaaatgtctgagattggtatggggttgactggaattggacattttactgaacttcctaaggtaggggtcaggagtagaggcagggctccttctggcctccatgtctcccctccagcaaacccttcacgtatgtggagtttggtctttcacatccatatttcagtagacttcagtaagcacctagttacccattagactt

SEQ ID NO: 7059 - DNA, 4199 bp, Homo sapiens
agtcagtgtcccctctcttttgcctcgggacagctggtatttatcagactcctaagaagttttccttgctccctagtagaagagagagattatgcagcgggcttttgattgatccaatgggaattacattgatctggtgtctggcyttggttcttatcaagtggatcacctctaagaggcgtggagctatttcctatgacagttctgatcagastgcattatacattcgtatgctaggagatgtacgtgtaaggagccgagcagratttgaatcagaaagaagaggttctcacccatatattgattttcgtattttccactctcaatctgaaattgaagtgtctgtctctgcaaggaatatcagaaggctactaagtttccagcgatatcttagatcttcacgcttttttcgtggtactgcggtttcaaattccctaaacattttagatgatgattataatggacaagccaagtgtatgctggaaaaagttggaaattggaattttgatatctttctatttgatagactaacaaatggaaatagtctagtaagcttaacctttcatttatttagtcttcatggattaattgagtacttccatttagatatgatgaaacttcgtagatttttagttatgattcaagaagattaccacagtcaaaatccttaccataacgcagtccacgctgcggatgttactcaggccatgcactgttacttaaaggaacctaagcttgccaattctgtaactccttgggatatcttgctgagcttaattgcagctgccactcatgatctggatcatccaggtgttaatcaacctttccttattaaaactaaccattacttggcaactttatacaagaatacctcagtactggaaaatcaccactggagatctgcagtgggcttattgagagaatcaggcttattctcacatctgccattagaaagcaggcaacaaatggagacacagataggtgctctgatactagccacagacatcagtcgccagaatgagtatctgtctttgtttaggtcccatttggatagaggtgatttatgcctagaagacaccagacacagacatttggttttacagatggctttgaaatgtgctgatatttgtaacccatgtcggacgtgggaattaagcaagcagtggagtgaaaaagtaacggaggaattcttccatcaaggcaaatatagaaaaaaaatatcatttgggtgtgagtccactttgcgatcgtcacactgaatctattgccaacatccagattggttttatgacttacctagtggagcctttatttacagaatgggccaggttttccaatacaaggctatcccagacaatgcttggacacgtggggctgaataaagccagytggaagggactgcagagagaacagtcgagcagtgaggacactgatgctgcatttgagttgaactcacagttattacctcaggaaaatcggttatcataacccccagaaccagtgggacaaactgcctcctggaggtttttagaaatgtgaaatggggtcttgaggtgagagaacttaactcttgactgccaaggtttccaagtgagtgatgccagccagcattatttatttccaagatttcctctgttggatcatttgaacccacttgttaattgcaagacccgaacatacagcaatatgaatttggctttcatgtgaaaccttgaatatgcaaagcccagcaggagagaatccgaaaggagtaacaaaggaagttttgatatgtgccacgactttttcaaagcatctaatcttcaaaacgtgaaacttgaattgttcagcaacaatctcttggaatttaaccagtctgatgcaacaatgtgtatcttgtaccttccactaagttctctctgagaaaatggaaatgtgaagtgcccagcctctgctgcctctggcaagacaatgtttacaaatcaactctgaaaatattggttctaaattgccttggagcatgattgtgaaggaaccactcaaacaaatttaaagatcaaactttagactgcagctctttccccctggtttgcctttttcttctttggatgccaccaaagcctcccatttgctatagttttatttcatgcactggaaactgagcatttatcgtagagtaccgccaagctttcactccagtgccgtttggcaatgcaattttttttagcaattagtttttaatttggggtgggaggggaagaacaccaatgtcctagctgtattatgattctgcagtgaagacattgcatgttgttttcactactgtacacttgacctgcacatgcgagaaaaaggtggaatgtttaaaacaccataatcagctcagggtatttgccaatctgaaataaaagtgggatgggagagtgtgtccttcagatcaagggtactaaagtccctttcgctgcagtgagtgagaggtatgttgtgtgtgaatgtacggatgtgtgtttgcgtgcatgtttgtgcatgtgtgactgtgcatgttatgtttctccatgtgggcaaagatttgaaatgtaagcttttatttattattttagaatgtgacataatgagcagccacactcgggggaggggaaggttggtaggtaagctgtaacagattgctccagttgccttaaactatgcacatagctaagtgaccaaacttcttgttttgatttgaaaaaagtgcattgttttcttgtccctccctttgatgaaacgttaccctttgacgggccttttgatgtgaacagatgttttctaggacaaactataaggactaattttaaacttcaaacattccacttttgtaatttgttttaaattgttttatgtatagtaagcacaactgtaatctagttttaagagaaaccggtgctttcttttagttcatttgtatttcccttgttactgtaaaagactgtttattaattgtttacagtttgttgcaacagccattttcttgggagaaagcttgagtgtaaagccatttgtaaaaggctttgccatactcattttaatatgtgcctgttgctgttaacttttgatgaataaaaacctatcttttcatatttttatctttgacatttaccttataactcaatcttttggaaaacacaatgctaaattacaaggaaatcaaagttagcttcttggctcttgtaattcatccctcagatgtttactcagtccgagcttatctactaatgactcaccttgcaagtgagtaagcagaagcccagttagggctgttggagtcctgactaacacaggggagaggtcagctttgagccaggccttttgttcctacagtggtgaactgcataagacatcagcaagtcttgcaagtactaaaatactagttgtatttatttctatcaatcattggcctttttaaagtgataagaaaaggccactccactctacttgattgatatcagttgtaaacaaggtaccactgtgccattccctatatcttcccaggtccaactcattagaagggatatggtgcaaacttctaaatcaaacacattaacatattatttgtacagaagagtgttgatgtccaatagaaacagaatccaagccacataattttcggttttctagtagccacatttagaaaacatggaattaattttagtaacatctattccaatacgtccaaaatattgtatcactttaaaatgtcaatataaaaacaattagatgtttttacattcttttggggggtactaagtctttgaaatccagtgtatattgtgtacttacagcacatctcaatttggactagtcatatctcaggcacccaatatccacatgtggctagtggctaccatattggacagtgtgggtatagaggtctgagggtagtagaggaatatggtcagctggtcactctcgtgagatggccataccttggcctatatttaatgtgtacagaaagtctgataactcagatccttaaaaattcaggcccactgtttcagtacatagagagtggaactatcatggcaaacccacattaaccaagctcacagtaactatttttttaaaacactatcaatattttaatttacagtgagaaatgtaactatcaattattctctccctttaggcaaatcttcctgggaagctaaattatgagcagctggtgagcatggattctgagcaag

SEQ ID NO: 7060 - DNA, 4202 bp, Homo sapiens
agtcagtgtcccctctcttttgcctcgggacagctggtatttatcagactcctaagaagttttccttgctccctagtagaagagagagattatgcagcgggcttttgattgatccaatgggaattacattgatctggtgtctggcyttggttcttatcaagtggatcacctctaagaggcgtggagctatttcctatgacagttctgatcagastgcattatacattcgtatgctaggagatgtacgtgtaaggagccgagcagratttgaatcagaaagaagaggttctcacccatatattgattttcgtattttccactctcaatctgaaattgaagtgtctgtctctgcaaggaatatcagaaggctactaagtttccagcgatatcttagatcttcacgcttttttcgtggtactgcggtttcaaattccctaaacattttagatgatgattataatggacaagccaagtgtatgctggaaaaagttggaaattggaattttgatatctttctatttgatagactaacaaatggaaatagtctagtaagcttaacctttcatttatttagtcttcatggattaattgagtacttccatttagatatgatgaaacttcgtagatttttagttatgattcaagaagattaccacagtcaaaatccttaccataacgcagtccacgctgcggatgttactcaggccatgcactgttacttaaaggaacctaagcttgccaattctgtaactccttgggatatcttgctgagcttaattgcagctgccactcatgatctggatcatccaggtgttaatcaacctttccttattaaaactaaccattacttggcaactttatacaagaatacctcagtactggaaaatcaccactggagatctgcagtgggcttattgagagaatcaggcttattctcacatctgccattagaaagcaggcaacaaatggagacacagataggtgctctgatactagccacagacatcagtcgccagaatgagtatctgtctttgtttaggtcccatttggatagaggtgatttatgcctagaagacaccagacacagacatttggttttacagatggctttgaaatgtgctgatatttgtaacccatgtcggacgtgggaattaagcaagcagtggagtgaaaaagtaacggaggaattcttccatcaaggcaagagatatagaaaaaaaatatcatttgggtgtgagtccactttgcgatcgtcacactgaatctattgccaacatccagattggttttatgacttacctagtggagcctttatttacagaatgggccaggttttccaatacaaggctatcccagacaatgcttggacacgtggggctgaataaagccagytggaagggactgcagagagaacagtcgagcagtgaggacactgatgctgcatttgagttgaactcacagttattacctcaggaaaatcggttatcataacccccagaaccagtgggacaaactgcctcctggaggtttttagaaatgtgaaatggggtcttgaggtgagagaacttaactcttgactgccaaggtttccaagtgagtgatgccagccagcattatttatttccaagatttcctctgttggatcatttgaacccacttgttaattgcaagacccgaacatacagcaatatgaatttggctttcatgtgaaaccttgaatatgcaaagcccagcaggagagaatccgaaaggagtaacaaaggaagttttgatatgtgccacgactttttcaaagcatctaatcttcaaaacgtgaaacttgaattgttcagcaacaatctcttggaatttaaccagtctgatgcaacaatgtgtatcttgtaccttccactaagttctctctgagaaaatggaaatgtgaagtgcccagcctctgctgcctctggcaagacaatgtttacaaatcaactctgaaaatattggttctaaattgccttggagcatgattgtgaaggaaccactcaaacaaatttaaagatcaaactttagactgcagctctttccccctggtttgcctttttcttctttggatgccaccaaagcctcccatttgctatagttttatttcatgcactggaaactgagcatttatcgtagagtaccgccaagctttcactccagtgccgtttggcaatgcaattttttttagcaattagtttttaatttggggtgggaggggaagaacaccaatgtcctagctgtattatgattctgcagtgaagacattgcatgttgttttcactactgtacacttgacctgcacatgcgagaaaaaggtggaatgtttaaaacaccataatcagctcagggtatttgccaatctgaaataaaagtgggatgggagagtgtgtccttcagatcaagggtactaaagtccctttcgctgcagtgagtgagaggtatgttgtgtgtgaatgtacggatgtgtgtttgcgtgcatgtttgtgcatgtgtgactgtgcatgttatgtttctccatgtgggcaaagatttgaaatgtaagcttttatttattattttagaatgtgacataatgagcagccacactcgggggaggggaaggttggtaggtaagctgtaacagattgctccagttgccttaaactatgcacatagctaagtgaccaaacttcttgttttgatttgaaaaaagtgcattgttttcttgtccctccctttgatgaaacgttaccctttgacgggccttttgatgtgaacagatgttttctaggacaaactataaggactaattttaaacttcaaacattccacttttgtaatttgttttaaattgttttatgtatagtaagcacaactgtaatctagttttaagagaaaccggtgctttcttttagttcatttgtatttcccttgttactgtaaaagactgtttattaattgtttacagtttgttgcaacagccattttcttgggagaaagcttgagtgtaaagccatttgtaaaaggctttgccatactcattttaatatgtgcctgttgctgttaacttttgatgaataaaaacctatcttttcatatttttatctttgacatttaccttataactcaatcttttggaaaacacaatgctaaattacaaggaaatcaaagttagcttcttggctcttgtaattcatccctcagatgtttactcagtccgagcttatctactaatgactcaccttgcaagtgagtaagcagaagcccagttagggctgttggagtcctgactaacacaggggagaggtcagctttgagccaggccttttgttcctacagtggtgaactgcataagacatcagcaagtcttgcaagtactaaaatactagttgtatttatttctatcaatcattggcctttttaaagtgataagaaaaggccactccactctacttgattgatatcagttgtaaacaaggtaccactgtgccattccctatatcttcccaggtccaactcattagaagggatatggtgcaaacttctaaatcaaacacattaacatattatttgtacagaagagtgttgatgtccaatagaaacagaatccaagccacataattttcggttttctagtagccacatttagaaaacatggaattaattttagtaacatctattccaatacgtccaaaatattgtatcactttaaaatgtcaatataaaaacaattagatgtttttacattcttttggggggtactaagtctttgaaatccagtgtatattgtgtacttacagcacatctcaatttggactagtcatatctcaggcacccaatatccacatgtggctagtggctaccatattggacagtgtgggtatagaggtctgagggtagtagaggaatatggtcagctggtcactctcgtgagatggccataccttggcctatatttaatgtgtacagaaagtctgataactcagatccttaaaaattcaggcccactgtttcagtacatagagagtggaactatcatggcaaacccacattaaccaagctcacagtaactatttttttaaaacactatcaatattttaatttacagtgagaaatgtaactatcaattattctctccctttaggcaaatcttcctgggaagctaaattatgagcagctggtgagcatggattctgagcaag

SEQ ID NO: 7061 - DNA, 1325 bp, Homo sapiens
gcggccgcggcagggcgggcgccgcgcggaggcagggcgggcgtattcaatggaagtgtgttaccagctgccggtactgcccctggacaggccggtcccccagcacgtcctcagccgccgaggagccatcagcttcagctccagctccgctctcttcggctgccccaatccccggcagctctctcagaggcgtggagctatttcctatgacagttctgatcagastgcattatacattcgtatgctaggagatgtacgtgtaaggagccgagcagratttgaatcagaaagaagaggttctcacccatatattgattttcgtattttccactctcaatctgaaattgaagtgtctgtctctgcaaggaatatcagaaggctactaagtttccagcgatatcttagatcttcacgcttttttcgtggtactgcggtttcaaattccctaaacattttagatgatgattataatggacaagccaagtgtatgctggaaaaagttggaaattggaattttgatatctttctatttgatagactaacaaatggaaatagtctagtaagcttaacctttcatttatttagtcttcatggattaattgagtacttccatttagatatgatgaaacttcgtagatttttagttatgattcaagaagattaccacagtcaaaatccttaccataacgcagtccacgctgcggatgttactcaggccatgcactgttacttaaaggaacctaagcttgccaattctgtaactccttgggatatcttgctgagcttaattgcagctgccactcatgatctggatcatccaggtgttaatcaacctttccttattaaaactaaccattacttggcaactttatacaagaatacctcagtactggaaaatcaccactggagatctgcagtgggcttattgagagaatcaggcttattctcacatctgccattagaaagcaggcaacaaatggagacacagataggtgctctgatactagccacagacatcagtcgccagaatgagtatctgtctttgtttaggtcccatttggatagaggtgatttatgcctagaagacaccagacacagacatttggttttacagatggctttgaaatgtgctgatatttgtaacccatgtcggacgtgggaattaagcaagcagtggagtgaaaaagtaacggaggaattcttccatcaaggcaagagatatagaaaaaaaatatcatttgggtgtgagtccactttgcgatcgtcacactgaatctattgccaacatccagattggtaactatacatatttagatatagctggt

SEQ ID NO: 7062 - DNA, 4213 bp, Homo sapiens
gcggccgcggcagggcgggcgccgcgcggaggcagggcgggcgtattcaatggaagtgtgttaccagctgccggtactgcccctggacaggccggtcccccagcacgtcctcagccgccgaggagccatcagcttcagctccagctccgctctcttcggctgccccaatccccggcagctctctcagaggcgtggagctatttcctatgacagttctgatcagastgcattatacattcgtatgctaggagatgtacgtgtaaggagccgagcagratttgaatcagaaagaagaggttctcacccatatattgattttcgtattttccactctcaatctgaaattgaagtgtctgtctctgcaaggaatatcagaaggctactaagtttccagcgatatcttagatcttcacgcttttttcgtggtactgcggtttcaaattccctaaacattttagatgatgattataatggacaagccaagtgtatgctggaaaaagttggaaattggaattttgatatctttctatttgatagactaacaaatggaaatagtctagtaagcttaacctttcatttatttagtcttcatggattaattgagtacttccatttagatatgatgaaacttcgtagatttttagttatgattcaagaagattaccacagtcaaaatccttaccataacgcagtccacgctgcggatgttactcaggccatgcactgttacttaaaggaacctaagcttgccaattctgtaactccttgggatatcttgctgagcttaattgcagctgccactcatgatctggatcatccaggtgttaatcaacctttccttattaaaactaaccattacttggcaactttatacaagaatacctcagtactggaaaatcaccactggagatctgcagtgggcttattgagagaatcaggcttattctcacatctgccattagaaagcaggcaacaaatggagacacagataggtgctctgatactagccacagacatcagtcgccagaatgagtatctgtctttgtttaggtcccatttggatagaggtgatttatgcctagaagacaccagacacagacatttggttttacagatggctttgaaatgtgctgatatttgtaacccatgtcggacgtgggaattaagcaagcagtggagtgaaaaagtaacggaggaattcttccatcaaggcaagagatatagaaaaaaaatatcatttgggtgtgagtccactttgcgatcgtcacactgaatctattgccaacatccagattggttttatgacttacctagtggagcctttatttacagaatgggccaggttttccaatacaaggctatcccagacaatgcttggacacgtggggctgaataaagccagytggaagggactgcagagagaacagtcgagcagtgaggacactgatgctgcatttgagttgaactcacagttattacctcaggaaaatcggttatcataacccccagaaccagtgggacaaactgcctcctggaggtttttagaaatgtgaaatggggtcttgaggtgagagaacttaactcttgactgccaaggtttccaagtgagtgatgccagccagcattatttatttccaagatttcctctgttggatcatttgaacccacttgttaattgcaagacccgaacatacagcaatatgaatttggctttcatgtgaaaccttgaatatgcaaagcccagcaggagagaatccgaaaggagtaacaaaggaagttttgatatgtgccacgactttttcaaagcatctaatcttcaaaacgtgaaacttgaattgttcagcaacaatctcttggaatttaaccagtctgatgcaacaatgtgtatcttgtaccttccactaagttctctctgagaaaatggaaatgtgaagtgcccagcctctgctgcctctggcaagacaatgtttacaaatcaactctgaaaatattggttctaaattgccttggagcatgattgtgaaggaaccactcaaacaaatttaaagatcaaactttagactgcagctctttccccctggtttgcctttttcttctttggatgccaccaaagcctcccatttgctatagttttatttcatgcactggaaactgagcatttatcgtagagtaccgccaagctttcactccagtgccgtttggcaatgcaattttttttagcaattagtttttaatttggggtgggaggggaagaacaccaatgtcctagctgtattatgattctgcagtgaagacattgcatgttgttttcactactgtacacttgacctgcacatgcgagaaaaaggtggaatgtttaaaacaccataatcagctcagggtatttgccaatctgaaataaaagtgggatgggagagtgtgtccttcagatcaagggtactaaagtccctttcgctgcagtgagtgagaggtatgttgtgtgtgaatgtacggatgtgtgtttgcgtgcatgtttgtgcatgtgtgactgtgcatgttatgtttctccatgtgggcaaagatttgaaatgtaagcttttatttattattttagaatgtgacataatgagcagccacactcgggggaggggaaggttggtaggtaagctgtaacagattgctccagttgccttaaactatgcacatagctaagtgaccaaacttcttgttttgatttgaaaaaagtgcattgttttcttgtccctccctttgatgaaacgttaccctttgacgggccttttgatgtgaacagatgttttctaggacaaactataaggactaattttaaacttcaaacattccacttttgtaatttgttttaaattgttttatgtatagtaagcacaactgtaatctagttttaagagaaaccggtgctttcttttagttcatttgtatttcccttgttactgtaaaagactgtttattaattgtttacagtttgttgcaacagccattttcttgggagaaagcttgagtgtaaagccatttgtaaaaggctttgccatactcattttaatatgtgcctgttgctgttaacttttgatgaataaaaacctatcttttcatatttttatctttgacatttaccttataactcaatcttttggaaaacacaatgctaaattacaaggaaatcaaagttagcttcttggctcttgtaattcatccctcagatgtttactcagtccgagcttatctactaatgactcaccttgcaagtgagtaagcagaagcccagttagggctgttggagtcctgactaacacaggggagaggtcagctttgagccaggccttttgttcctacagtggtgaactgcataagacatcagcaagtcttgcaagtactaaaatactagttgtatttatttctatcaatcattggcctttttaaagtgataagaaaaggccactccactctacttgattgatatcagttgtaaacaaggtaccactgtgccattccctatatcttcccaggtccaactcattagaagggatatggtgcaaacttctaaatcaaacacattaacatattatttgtacagaagagtgttgatgtccaatagaaacagaatccaagccacataattttcggttttctagtagccacatttagaaaacatggaattaattttagtaacatctattccaatacgtccaaaatattgtatcactttaaaatgtcaatataaaaacaattagatgtttttacattcttttggggggtactaagtctttgaaatccagtgtatattgtgtacttacagcacatctcaatttggactagtcatatctcaggcacccaatatccacatgtggctagtggctaccatattggacagtgtgggtatagaggtctgagggtagtagaggaatatggtcagctggtcactctcgtgagatggccataccttggcctatatttaatgtgtacagaaagtctgataactcagatccttaaaaattcaggcccactgtttcagtacatagagagtggaactatcatggcaaacccacattaaccaagctcacagtaactatttttttaaaacactatcaatattttaatttacagtgagaaatgtaactatcaattattctctccctttaggcaaatcttcctgggaagctaaattatgagcagctggtgagcatggattctgagcaag

SEQ ID NO: 7063 - DNA, 2963 bp, Homo sapiens
tgggccgcagccctccccgccccgccgaccgcggtcacacactctcggagcctccccgtgagcgggagcgcggcgcacggcgatgcgccgaggcgggcgctgaggcggcgccgcgcgagcagcagcagaggcggcggcggcccccagcccagcccggcgccgccgccgagcccgggccccaaggtgcggcggcgccccaagttcccgccatgagcagccggctcggggggctccgcggccccggggactcccgccccgccgggcgcgaccgcagcgccccgcggccccgacgcgcttaacgttgtcgcttgccggtcccgccaccgccgcctccgccgccgctcgcgtcctcgccgccaccgcctcggccgctgcagctccgccggcagcatgtctcgaaggaagatttcgtccgagtccttcagctccctgggctccgactacctggagaccagcccggaggaggagggggagtgccccctgtctaggctctgctggaatggcagccggagcccgcccgggccgctggagcccagcccggccgcagctgccgctgccgccgcyccggccccgaccccggctgcttctgccgccgccgccgctgccactgccggggccaggagggtgcagcgccggaggcgggtcaacctggactcgctgggcgagagcatcagccgcctgacggcgccctcgcctcagacgatacagcagactctcaagaggacactgcagtattatgaacatcaagttattggttacagggatgcagaaaagaatttccacaatatctctaacagatgctcctatgcagaccactccaayaargaagaaattgaagatgtctcaggaattcttcagtgtactgctaatatactcggtttgaagtttgaggaaattcaaaaaagatttggkgaagagttctttaatatatgctttcatgagaatgagagagtccttcgagctgtaggtggcactttgcaggacttttttaacggctttgatgctttgttggaacacattagaacttcttttggaaaacaggccactctggagtcaccatctttcctatgcaaagagctccctgaaggtactctcatgctccactacttccaccctcaccatattgtggggtttgcaatgctggggatgattaaggctgcaggaaagaagatctatcggctggatgtggaagtggaacaggttgcaaatgagaagctatgctctgatgtttcaaacccaggcaattgtagctgtcttactttccttatcaaagaatgtgaaaatackaatatcrtgaagaaccttccacagggaacctcccaagttcctgcggacctcagaattagcatcaacaccttctgtagagccttccctttccacttgatgtttgatcccagcatgtcagtccttcagttgggggaaggtctaaggaagcagcttcgatgtgacactcacaaagtgctcaagtttgaggactgcttcgagattgtatctccaaaggttaatgccacctttgaaagggtcctgctgcgactgtctaccccgtttgtgattagaaccaagcctgaggcttctggctctgaaaataaagacaaggtgatggaagtcaaaggacaaatgatccatgttccagaatcaaattccattttatttttgggctctccatgtgtggacaagttggatgaactcatgggccgagggctacatctctcagacatccctatccatgatgccacccgagatgtcattttggttggtgagcaggcaaaggcccaagatgggttgaagaaaaggatggataaattaaaggcaactttagaaagaactcaccaggccctggaagaagagaaaaagaagacagtggatcttctatattctattttccctggtgatgtagcccagcaattatggcaagggcagcaagtacaggccagaaagtttgatgatgtcaccatgctcttttcagacattgttggcttcacagccatatgtgcccagtgtactcccatgcaagtaatcagcatgctgaatgaactgtacaccagatttgaccaccagtgtggatttttggatatttataaggtggaaacaataggtgatgcctactgtgttgcagcagggctccacagaaaaagcctctgccatgctaaacccattgctctgatggcyttgaagatgatggaactttcagaagaggtgctgacacctgatggaagaccgattcagatgaggataggaattcactcaggctccgtgctggctggagttgttggggtgcgaatgccacgttattgcctgtttggaaataatgtcacactggcaagcaaattcgagtcgggaagtcaccctcggcgcatcaatgtcagcccaaccacttaccaattattaaaacgagaagaaagtttcacattcattccgcggtctcgtgaagagcttccagacaactttccaaaggaaattcctgggatctgctatttcctggaggtaaggactggtccaaagccaccaaagccttctctttcttcgtcgagaataaaaaaggtttcctacaacatcggcaccatgttcctccgggagacaagcctctgagacctgctacagatcaaagactcctccaaaaagcacaagcccagaacatgggtcaccaatggggggtggaaagagattgtgtctctttcattgctttgttgagaacaagcagcaaaatttctgtattatgtcaggcaataatcctactaaaaggtggaggtgaccgctgtcaataaaaagccggaggatgagggaaataagatgtgtccattcatatgagtggttttggtcatatatatacacatatattttaattacaagtgtgggtcccctttcagaactaaccaataaatagattccatgttttcttgtttatcacacatacaagtatctttccctatatatttgtaccacttttgagagccagttttgat

SEQ ID NO: 7064 - DNA, 3270 bp, Homo sapiens
ctggcggggaaggagaggtcaggcgctccgggctcgcccgctaggtcggggccgcggcgtcccccaccctaagtcccacctccggccgggcatgggtacccgggcgggcctgcctcggcctgggcccactcactggtccagaagcagctgtaggtgcccaccaagcccatgacgacgctgctggccagggtccagagcgcttgcatcaaacacccctaactcagaagtgtgcagccacactgggactcagaacccaacaacagggacagaagactcacgcccttggggtgcccggtctcgtggcatcaggcatgacttccagctcctgcgccttccccagcaactgctgactggggacccagaccgggagctgagcgacgggcctggcgagcgaagctcggggtctcactcaggcaccagcccctccttgccccaggcttgagtgactcacagccctattcaggcaggagctgctcttctggggtatcgcgatccacttaaggatgaggcagacttggtgacaagctggtctgagcagcgcctccagagccagaactgagcccagtgagagcgcaccctggrgcarcctggattcctggggtgtccccggcagccacacacagccatgcactacccaactgcactcctcttcctcatcctggccaatggggcccaggcctttcgcatctgcgccttcaatgcccagcggctgacactggccaaggtggccagggagcaggtgatggacaccttagttcggatactggctcgctgtgacatcatggtgctgcaggaggtggtrgactcttccggcagcgccatcccsctcctgcttcgagaactcaatcgatttgatggctctgggccctacagcaccctgagcagcccccagctggggcgcagcacctacatggagacgtatgtgtacttctatcggtcacacaaaacacaggtcctgagttcctacgtgtacaacgatgaggatgacrtctttgcccgggagccatttgtggcccagttctctttgcccagcaatgtccttcccagcctggtgttggtcccgctgcacaccactcctaaggccgtagagaaggagctgaacgccctctacgatgtgtttctggaggtctcccagcactggcagagcaaggacgtgatcctgcttggggacttcaatgctgactgcgcttcactgaccaaaaagcgcctggacaagctggagctgcggactgagccaggcttccactgggtgattgccgatggggaggacaccacagtgcgggccagcacccactgcacctatgaccgcgtcgtgctgcacggggagcgctgccggagtctgctgcacactgcggctgcctttgacttccccacgagcttccagctcaccgaggaggaggccctcaacatcagtgaccactaccccgtggaggtggagctgaagctgagccaggcrcacagcgtccagcctctcagcctcactgttctgttgctgctatcactcctgtcccctcagctgtgccctgctgcctgagcrtccccctacccccccagggcctgctgccttttgggacttaaaccccagcctcccccgtccatccagccctggggctggggggcttcaactatagttgccctgtgactgtagtccacccctgcctgccttgtttgatttggctcttgttctttggttgggcttgtgcctagattaggagaggaagccaggggccctgcactcatgccacctgccaggtagtgtagtatcaggagtggagacaaagtgggctctgggttggggtaggggaagggagggttcagaaagaggaatgaagatgttgtatgacaagaaggaaagttactgagaacaaaaacccagattggtgagataggacacttgtgcagcagatatgccaatgggccatgtttattgtggattggtaagaatcaccaggaaaccattaagccccaatagctacaaggagggtggttaatctgctatatcaaactccttcccygaaaccagcaaacaccgggaaacattttggctcattataatccggtgaacaatgcagtcaggcctgttataaccgctgagcagccacactcgcacctcctgggtgctgtagtctgtgttggtacaggcttctgcatgcctggtaaaggtccagccaaggctggtcaaggcaacatctccacacagaaaatctgcaccagttatgtaagctaaaaagctgtgtgaacccaggtgtcccggaaaggggctgcaggacacagcaaaatgccagcagcrtgccggacccctcccttccatcctcctctccaaagaasagaggtcaggaaaaacactggctgggacgctagaagggtcatgtgttaactataatcacatttatggtttggaaccatcaccccaaggtaaaaaaaaaataaaaggtattcccaggtatgtttggcaaaataaaataaaggtaattaaaaacctaagaaatggctgtaaactgagattacaaaaaaccagaggccttttgggagccacaggctgggggctggggccaacataccccagctctgggaccaaaagcctttggagtcctgtccctggatacagatgctcaggccacccacctagcactcctctcatttttgctgctcccccaaaagccagcgctgttctacaatagttcaggtcagacatctaagatccccaggccaaaccatgccacacacgtgtctgttccgaggtcttgttacaaatgaccaaaggttagcctagacctttggtcaggtggtgaaggccctgggaatgcaggttctagaaggggtgggggcatggggcccaggaggttgctagagataggaaatggggcaaatcgcaggtgacctcagcagtacctggatgattcccaccaaggaggaatgrccaaaccagatgggtgagaacaagcccaatgtgatgcacacctacccttgctaaataaacgctgctggtcagcctctagcccacaagcccctcttggtccgcatgtgttgtaataagcaacacaactgtaggctgaccccagcctgggattgcaaggctttgctgcagctgtgcttcatgaaaagcacttcagtgtttttcaacctactgcctaggacctggggaggtccaagtcaagctccagagtagacaactgacataaggccaccagtcccagccctttgcagggtttgctgcctcatgagcagggctgagttgtcaacctgtttctgaagtgaaagggcaatgac

SEQ ID NO: 7065 - DNA, 2944 bp, Homo sapiens
caggtggttcatgtactctggcggggaaggagaggtcaggcgctccgggctcgcccgctaggtcggggccgcggcgtcccccaccctaagtcccacctccggccgggcatgggtacccgggcgggcctgcctcggcctgggcccactcactggtccagaagcagctgtaggtgcccaccaagcccatgacgacgctgctggccagggtccagcgcctccagagccagaactgagcccagtgagagcgcaccctggrgcarcctggattcctggggtgtccccggcagccacacacagccatgcactacccaactgcactcctcttcctcatcctggccaatggggcccaggcctttcgcatctgcgccttcaatgcccagcggctgacactggccaaggtggccagggagcaggtgatggacaccttagttcggatactggctcgctgtgacatcatggtgctgcaggaggtggtrgactcttccggcagcgccatcccsctcctgcttcgagaactcaatcgatttgatggctctgggccctacagcaccctgagcagcccccagctggggcgcagcacctacatggagacgtatgtgtacttctatcggtcacacaaaacacaggtcctgagttcctacgtgtacaacgatgaggatgacrtctttgcccgggagccatttgtggcccagttctctttgcccagcaatgtccttcccagcctggtgttggtcccgctgcacaccactcctaaggccgtagagaaggagctgaacgccctctacgatgtgtttctggaggtctcccagcactggcagagcaaggacgtgatcctgcttggggacttcaatgctgactgcgcttcactgaccaaaaagcgcctggacaagctggagctgcggactgagccaggcttccactgggtgattgccgatggggaggacaccacagtgcgggccagcacccactgcacctatgaccgcgtcgtgctgcacggggagcgctgccggagtctgctgcacactgcggctgcctttgacttccccacgagcttccagctcaccgaggaggaggccctcaacatcagtgaccactaccccgtggaggtggagctgaagctgagccaggcrcacagcgtccagcctctcagcctcactgttctgttgctgctatcactcctgtcccctcagctgtgccctgctgcctgagcrtccccctacccccccagggcctgctgccttttgggacttaaaccccagcctcccccgtccatccagccctggggctggggggcttcaactatagttgccctgtgactgtagtccacccctgcctgccttgtttgatttggctcttgttctttggttgggcttgtgcctagattaggagaggaagccaggggccctgcactcatgccacctgccaggtagtgtagtatcaggagtggagacaaagtgggctctgggttggggtaggggaagggagggttcagaaagaggaatgaagatgttgtatgacaagaaggaaagttactgagaacaaaaacccagattggtgagataggacacttgtgcagcagatatgccaatgggccatgtttattgtggattggtaagaatcaccaggaaaccattaagccccaatagctacaaggagggtggttaatctgctatatcaaactccttcccygaaaccagcaaacaccgggaaacattttggctcattataatccggtgaacaatgcagtcaggcctgttataaccgctgagcagccacactcgcacctcctgggtgctgtagtctgtgttggtacaggcttctgcatgcctggtaaaggtccagccaaggctggtcaaggcaacatctccacacagaaaatctgcaccagttatgtaagctaaaaagctgtgtgaacccaggtgtcccggaaaggggctgcaggacacagcaaaatgccagcagcrtgccggacccctcccttccatcctcctctccaaagaasagaggtcaggaaaaacactggctgggacgctagaagggtcatgtgttaactataatcacatttatggtttggaaccatcaccccaaggtaaaaaaaaaataaaaggtattcccaggtatgtttggcaaaataaaataaaggtaattaaaaacctaagaaatggctgtaaactgagattacaaaaaaccagaggccttttgggagccacaggctgggggctggggccaacataccccagctctgggaccaaaagcctttggagtcctgtccctggatacagatgctcaggccacccacctagcactcctctcatttttgctgctcccccaaaagccagcgctgttctacaatagttcaggtcagacatctaagatccccaggccaaaccatgccacacacgtgtctgttccgaggtcttgttacaaatgaccaaaggttagcctagacctttggtcaggtggtgaaggccctgggaatgcaggttctagaaggggtgggggcatggggcccaggaggttgctagagataggaaatggggcaaatcgcaggtgacctcagcagtacctggatgattcccaccaaggaggaatgrccaaaccagatgggtgagaacaagcccaatgtgatgcacacctacccttgctaaataaacgctgctggtcagcctctagcccacaagcccctcttggtccgcatgtgttgtaataagcaacacaactgtaggctgaccccagcctgggattgcaaggctttgctgcagctgtgcttcatgaaaagcacttcagtgtttttcaacctactgcctaggacctggggaggtccaagtcaagctccagagtagacaactgacataaggccaccagtcccagccctttgcagggtttgctgcctcatgagcagggctgagttgtcaacctgtttctgaagtgaaagggcaatgac

SEQ ID NO: 7066 - DNA, 3040 bp, Homo sapiens
ttgtgcacggtcaggtggttcatgtactctggcggggaaggagaggtcaggcgctccgggctcgcccgctaggtcggggccgcggcgtcccccaccctaagtcccacctccggccgggcatgggtacccgggcgggcctgcctcggcctgggcccactcactggtccagaagcagctgtaggtgcccaccaagcccatgacgacgctgctggccagggtccagccctattcaggcaggagctgctcttctggggtatcgcgatccacttaaggatgaggcagacttggtgacaagctggtctgagcagcgcctccagagccagaactgagcccagtgagagcgcaccctggrgcarcctggattcctggggtgtccccggcagccacacacagccatgcactacccaactgcactcctcttcctcatcctggccaatggggcccaggcctttcgcatctgcgccttcaatgcccagcggctgacactggccaaggtggccagggagcaggtgatggacaccttagttcggatactggctcgctgtgacatcatggtgctgcaggaggtggtrgactcttccggcagcgccatcccsctcctgcttcgagaactcaatcgatttgatggctctgggccctacagcaccctgagcagcccccagctggggcgcagcacctacatggagacgtatgtgtacttctatcggtcacacaaaacacaggtcctgagttcctacgtgtacaacgatgaggatgacrtctttgcccgggagccatttgtggcccagttctctttgcccagcaatgtccttcccagcctggtgttggtcccgctgcacaccactcctaaggccgtagagaaggagctgaacgccctctacgatgtgtttctggaggtctcccagcactggcagagcaaggacgtgatcctgcttggggacttcaatgctgactgcgcttcactgaccaaaaagcgcctggacaagctggagctgcggactgagccaggcttccactgggtgattgccgatggggaggacaccacagtgcgggccagcacccactgcacctatgaccgcgtcgtgctgcacggggagcgctgccggagtctgctgcacactgcggctgcctttgacttccccacgagcttccagctcaccgaggaggaggccctcaacatcagtgaccactaccccgtggaggtggagctgaagctgagccaggcrcacagcgtccagcctctcagcctcactgttctgttgctgctatcactcctgtcccctcagctgtgccctgctgcctgagcrtccccctacccccccagggcctgctgccttttgggacttaaaccccagcctcccccgtccatccagccctggggctggggggcttcaactatagttgccctgtgactgtagtccacccctgcctgccttgtttgatttggctcttgttctttggttgggcttgtgcctagattaggagaggaagccaggggccctgcactcatgccacctgccaggtagtgtagtatcaggagtggagacaaagtgggctctgggttggggtaggggaagggagggttcagaaagaggaatgaagatgttgtatgacaagaaggaaagttactgagaacaaaaacccagattggtgagataggacacttgtgcagcagatatgccaatgggccatgtttattgtggattggtaagaatcaccaggaaaccattaagccccaatagctacaaggagggtggttaatctgctatatcaaactccttcccygaaaccagcaaacaccgggaaacattttggctcattataatccggtgaacaatgcagtcaggcctgttataaccgctgagcagccacactcgcacctcctgggtgctgtagtctgtgttggtacaggcttctgcatgcctggtaaaggtccagccaaggctggtcaaggcaacatctccacacagaaaatctgcaccagttatgtaagctaaaaagctgtgtgaacccaggtgtcccggaaaggggctgcaggacacagcaaaatgccagcagcrtgccggacccctcccttccatcctcctctccaaagaasagaggtcaggaaaaacactggctgggacgctagaagggtcatgtgttaactataatcacatttatggtttggaaccatcaccccaaggtaaaaaaaaaataaaaggtattcccaggtatgtttggcaaaataaaataaaggtaattaaaaacctaagaaatggctgtaaactgagattacaaaaaaccagaggccttttgggagccacaggctgggggctggggccaacataccccagctctgggaccaaaagcctttggagtcctgtccctggatacagatgctcaggccacccacctagcactcctctcatttttgctgctcccccaaaagccagcgctgttctacaatagttcaggtcagacatctaagatccccaggccaaaccatgccacacacgtgtctgttccgaggtcttgttacaaatgaccaaaggttagcctagacctttggtcaggtggtgaaggccctgggaatgcaggttctagaaggggtgggggcatggggcccaggaggttgctagagataggaaatggggcaaatcgcaggtgacctcagcagtacctggatgattcccaccaaggaggaatgrccaaaccagatgggtgagaacaagcccaatgtgatgcacacctacccttgctaaataaacgctgctggtcagcctctagcccacaagcccctcttggtccgcatgtgttgtaataagcaacacaactgtaggctgaccccagcctgggattgcaaggctttgctgcagctgtgcttcatgaaaagcacttcagtgtttttcaacctactgcctaggacctggggaggtccaagtcaagctccagagtagacaactgacataaggccaccagtcccagccctttgcagggtttgctgcctcatgagcagggctgagttgtcaacctgtttctgaagtgaaagggcaatgac

SEQ ID NO: 7067 - DNA, 3558 bp, Homo sapiens
caagcaattctcctgcctcagcctcctgagtagctgggattacaggcgcccaccaccacgccgggctaattttttgtatttttagtagaaacgggtttcattatgttggccaggctggtcttgaacgcctgacctcgtatccacccgcctcagcctcccaaagtgctgggattacaggcatgagccaccacgcccagcccataatttattgattttttaaaatttgtccagccttctattaccacgtcgaatccattagctacagccatcccatgagaagctgagtggattcagccccacctcctgctcacagaccctgtccgagcacctcatttgtcccaacagcattactgcaggacccccaggacgttggactgccagctccctgggtctcctcctctctggggcagatcctcagtcctcccttgacttcacgactgtggccagatcatgtgtggactgtccctctctttgggtctccagagcgcttgcatcaaacacccctaactcagaagtgtgcagccacactgggactcagaacccaacaacagggacagaagactcacgcccttggggtgcccggtctcgtggcatcaggcatgacttccagctcctgcgccttccccagcaactgctgactggggacccagaccgggagctgagcgacgggcctggcgagcgaagctcggggtctcactcaggcaccagcccctccttgccccaggcttgagtgactcacagccctattcaggcaggagctgctcttctggggtatcgcgatccacttaaggatgaggcagacttggtgacaagctggtctgagcagcgcctccagagccagaactgagcccagtgagagcgcaccctggrgcarcctggattcctggggtgtccccggcagccacacacagccatgcactacccaactgcactcctcttcctcatcctggccaatggggcccaggcctttcgcatctgcgccttcaatgcccagcggctgacactggccaaggtggccagggagcaggtgatggacaccttagttcggatactggctcgctgtgacatcatggtgctgcaggaggtggtrgactcttccggcagcgccatcccsctcctgcttcgagaactcaatcgatttgatggctctgggccctacagcaccctgagcagcccccagctggggcgcagcacctacatggagacgtatgtgtacttctatcggtcacacaaaacacaggtcctgagttcctacgtgtacaacgatgaggatgacrtctttgcccgggagccatttgtggcccagttctctttgcccagcaatgtccttcccagcctggtgttggtcccgctgcacaccactcctaaggccgtagagaaggagctgaacgccctctacgatgtgtttctggaggtctcccagcactggcagagcaaggacgtgatcctgcttggggacttcaatgctgactgcgcttcactgaccaaaaagcgcctggacaagctggagctgcggactgagccaggcttccactgggtgattgccgatggggaggacaccacagtgcgggccagcacccactgcacctatgaccgcgtcgtgctgcacggggagcgctgccggagtctgctgcacactgcggctgcctttgacttccccacgagcttccagctcaccgaggaggaggccctcaacatcagtgaccactaccccgtggaggtggagctgaagctgagccaggcrcacagcgtccagcctctcagcctcactgttctgttgctgctatcactcctgtcccctcagctgtgccctgctgcctgagcrtccccctacccccccagggcctgctgccttttgggacttaaaccccagcctcccccgtccatccagccctggggctggggggcttcaactatagttgccctgtgactgtagtccacccctgcctgccttgtttgatttggctcttgttctttggttgggcttgtgcctagattaggagaggaagccaggggccctgcactcatgccacctgccaggtagtgtagtatcaggagtggagacaaagtgggctctgggttggggtaggggaagggagggttcagaaagaggaatgaagatgttgtatgacaagaaggaaagttactgagaacaaaaacccagattggtgagataggacacttgtgcagcagatatgccaatgggccatgtttattgtggattggtaagaatcaccaggaaaccattaagccccaatagctacaaggagggtggttaatctgctatatcaaactccttcccygaaaccagcaaacaccgggaaacattttggctcattataatccggtgaacaatgcagtcaggcctgttataaccgctgagcagccacactcgcacctcctgggtgctgtagtctgtgttggtacaggcttctgcatgcctggtaaaggtccagccaaggctggtcaaggcaacatctccacacagaaaatctgcaccagttatgtaagctaaaaagctgtgtgaacccaggtgtcccggaaaggggctgcaggacacagcaaaatgccagcagcrtgccggacccctcccttccatcctcctctccaaagaasagaggtcaggaaaaacactggctgggacgctagaagggtcatgtgttaactataatcacatttatggtttggaaccatcaccccaaggtaaaaaaaaaataaaaggtattcccaggtatgtttggcaaaataaaataaaggtaattaaaaacctaagaaatggctgtaaactgagattacaaaaaaccagaggccttttgggagccacaggctgggggctggggccaacataccccagctctgggaccaaaagcctttggagtcctgtccctggatacagatgctcaggccacccacctagcactcctctcatttttgctgctcccccaaaagccagcgctgttctacaatagttcaggtcagacatctaagatccccaggccaaaccatgccacacacgtgtctgttccgaggtcttgttacaaatgaccaaaggttagcctagacctttggtcaggtggtgaaggccctgggaatgcaggttctagaaggggtgggggcatggggcccaggaggttgctagagataggaaatggggcaaatcgcaggtgacctcagcagtacctggatgattcccaccaaggaggaatgrccaaaccagatgggtgagaacaagcccaatgtgatgcacacctacccttgctaaataaacgctgctggtcagcctctagcccacaagcccctcttggtccgcatgtgttgtaataagcaacacaactgtaggctgaccccagcctgggattgcaaggctttgctgcagctgtgcttcatgaaaagcacttcagtgtttttcaacctactgcctaggacctggggaggtccaagtcaagctccagagtagacaactgacataaggccaccagtcccagccctttgcagggtttgctgcctcatgagcagggctgagttgtcaacctgtttctgaagtgaaagggcaatgac

SEQ ID NO: 7068 - DNA, 3412 bp, Homo sapiens
tactctggcggggaaggagaggtcaggcgctccgggctcgcccgctaggtcggggccgcggcgtcccccaccctaagtcccacctccggccgggcatgggtacccgggcgggcctgcctcggcctgggcccactcactggtccagaagcagctgtaggtgcccaccaagcccatgacgacgctgctggccagggtccagcattactgcaggacccccaggacgttggactgccagctccctgggtctcctcctctctggggcagatcctcagtcctcccttgacttcacgactgtggccagatcatgtgtggactgtccctctctttgggtctccagagcgcttgcatcaaacacccctaactcagaagtgtgcagccacactgggactcagaacccaacaacagggacagaagactcacgcccttggggtgcccggtctcgtggcatcaggcatgacttccagctcctgcgccttccccagcaactgctgactggggacccagaccgggagctgagcgacgggcctggcgagcgaagctcggggtctcactcaggcaccagcccctccttgccccaggcttgagtgactcacagccctattcaggcaggagctgctcttctggggtatcgcgatccacttaaggatgaggcagacttggtgacaagctggtctgagcagcgcctccagagccagaactgagcccagtgagagcgcaccctggrgcarcctggattcctggggtgtccccggcagccacacacagccatgcactacccaactgcactcctcttcctcatcctggccaatggggcccaggcctttcgcatctgcgccttcaatgcccagcggctgacactggccaaggtggccagggagcaggtgatggacaccttagttcggatactggctcgctgtgacatcatggtgctgcaggaggtggtrgactcttccggcagcgccatcccsctcctgcttcgagaactcaatcgatttgatggctctgggccctacagcaccctgagcagcccccagctggggcgcagcacctacatggagacgtatgtgtacttctatcggtcacacaaaacacaggtcctgagttcctacgtgtacaacgatgaggatgacrtctttgcccgggagccatttgtggcccagttctctttgcccagcaatgtccttcccagcctggtgttggtcccgctgcacaccactcctaaggccgtagagaaggagctgaacgccctctacgatgtgtttctggaggtctcccagcactggcagagcaaggacgtgatcctgcttggggacttcaatgctgactgcgcttcactgaccaaaaagcgcctggacaagctggagctgcggactgagccaggcttccactgggtgattgccgatggggaggacaccacagtgcgggccagcacccactgcacctatgaccgcgtcgtgctgcacggggagcgctgccggagtctgctgcacactgcggctgcctttgacttccccacgagcttccagctcaccgaggaggaggccctcaacatcagtgaccactaccccgtggaggtggagctgaagctgagccaggcrcacagcgtccagcctctcagcctcactgttctgttgctgctatcactcctgtcccctcagctgtgccctgctgcctgagcrtccccctacccccccagggcctgctgccttttgggacttaaaccccagcctcccccgtccatccagccctggggctggggggcttcaactatagttgccctgtgactgtagtccacccctgcctgccttgtttgatttggctcttgttctttggttgggcttgtgcctagattaggagaggaagccaggggccctgcactcatgccacctgccaggtagtgtagtatcaggagtggagacaaagtgggctctgggttggggtaggggaagggagggttcagaaagaggaatgaagatgttgtatgacaagaaggaaagttactgagaacaaaaacccagattggtgagataggacacttgtgcagcagatatgccaatgggccatgtttattgtggattggtaagaatcaccaggaaaccattaagccccaatagctacaaggagggtggttaatctgctatatcaaactccttcccygaaaccagcaaacaccgggaaacattttggctcattataatccggtgaacaatgcagtcaggcctgttataaccgctgagcagccacactcgcacctcctgggtgctgtagtctgtgttggtacaggcttctgcatgcctggtaaaggtccagccaaggctggtcaaggcaacatctccacacagaaaatctgcaccagttatgtaagctaaaaagctgtgtgaacccaggtgtcccggaaaggggctgcaggacacagcaaaatgccagcagcrtgccggacccctcccttccatcctcctctccaaagaasagaggtcaggaaaaacactggctgggacgctagaagggtcatgtgttaactataatcacatttatggtttggaaccatcaccccaaggtaaaaaaaaaataaaaggtattcccaggtatgtttggcaaaataaaataaaggtaattaaaaacctaagaaatggctgtaaactgagattacaaaaaaccagaggccttttgggagccacaggctgggggctggggccaacataccccagctctgggaccaaaagcctttggagtcctgtccctggatacagatgctcaggccacccacctagcactcctctcatttttgctgctcccccaaaagccagcgctgttctacaatagttcaggtcagacatctaagatccccaggccaaaccatgccacacacgtgtctgttccgaggtcttgttacaaatgaccaaaggttagcctagacctttggtcaggtggtgaaggccctgggaatgcaggttctagaaggggtgggggcatggggcccaggaggttgctagagataggaaatggggcaaatcgcaggtgacctcagcagtacctggatgattcccaccaaggaggaatgrccaaaccagatgggtgagaacaagcccaatgtgatgcacacctacccttgctaaataaacgctgctggtcagcctctagcccacaagcccctcttggtccgcatgtgttgtaataagcaacacaactgtaggctgaccccagcctgggattgcaaggctttgctgcagctgtgcttcatgaaaagcacttcagtgtttttcaacctactgcctaggacctggggaggtccaagtcaagctccagagtagacaactgacataaggccaccagtcccagccctttgcagggtttgctgcctcatgagcagggctgagttgtcaacctgtttctgaagtgaaagggcaatgac

SEQ ID NO: 7069 - DNA, 795 bp, Homo sapiens
agcttcaagttccgcagccccagtgcggagggcggagactgcgccgacatggagctgttcctcgcgggccgycgggtgctggtcaccggggcaggcaaaggtatagggcgcggcacggtccaggcgctgcacgcgacgggcgcgcgggtggtggctgtgagccggactcaggcggatcttgacagccttgtccgcgagtgcccggggatagaacccgtgtgcgtggacctgggtgactgggaggccaccgagcgggcgctgggcagcgtgggccccgtggacctgctggtgaacaacgccgctgtcgccctgctgcagcccttcctggaggtcaccaaggaggcctttgacagatcctttgaggtgaacctgcgtgcggtcatccaggtgtcrcagattgtggccaggggcttaatagcccggggagtcccaggggccatcgtgaatgtctccagccagtgctcccagcgggcagtaactaaccatagcgtctactgctccaccaagggtgccctggacatgctgaccaaggtgatggccctagagctcgggccccacaagatccgagtgaatgcagtaaaccccacagtggtgatgacgtccatgggccaggccacctggagtgacccccacaaggccaagactatgctgaaccgaatcccacttggcaagtttgctggtcccacagatgtacataaccgaggggcagagaaaacagtcgtgtatgcagaaataastaggaagtgacgtttgccgattttgcttttaataacacaaattgtaagcttctataat

SEQ ID NO: 7070 - DNA, 865 bp, Homo sapiens
agcttcaagttccgcagccccagtgcggagggcggagactgcgccgacatggagctgttcctcgcgggccgycgggtgctggtcaccggggcaggcaaaggtatagggcgcggcacggtccaggcgctgcacgcgacgggcgcgcgggtggtggctgtgagccggactcaggcggatcttgacagccttgtccgcgagtgcccggggatagaacccgtgtgcgtggacctgggtgactgggaggccaccgagcgggcgctgggcagcgtgggccccgtggacctgctggtgaacaacgccgctgtcgccctgctgcagcccttcctggaggtcaccaaggaggcctttgacagatcctttgaggtgaacctgcgtgcggtcatccaggtgtcrcagattgtggccaggggcttaatagcccggggagtcccaggggccatcgtgaatgtctccagccagtgctcccagcgggcagtaactaaccatagcgtctactgctccaccaagggtgccctggacatgctgaccaaggtgatggccctagagctcgggccccacaagatccgagtgaatgcagtaaaccccacagtggtgatgacgtccatgggccaggccacctggagtgacccccacaaggccaagactatgctgaaccgaatcccacttggcaagtttgctgaggtagagcacgtggtgaacrccatcctctttctgctgagtgaccgaagtggcatgaccacgggttccactttgccggtggaagggggcttytgggcctgctgagctccctccacacacctcaagccccatgccgtgctcatcctacccccaatccctccaataaacctgattctgctgcccagac

SEQ ID NO: 7071 - DNA, 947 bp, Homo sapiens
tctcctcctaccggtcgggtgccccggggcgttccctctgccgctgcttctcggcgcggttcctacccggccgctccccgaggcgcgggctctggcggcctcgaccgactaggacgccccgtgcgccgcccgcgggccgccgcctccctgggcgcgcggggccagcatggagctcttccaagccaaggaccactacatcctgcagcagggcgagcgcgcgctgtggtgcagccgccgcgacggcggcctccagctccgacccgctactgatctacttcttgcctggaatcccatttgtttggggttggtagaaggtgttattgggaaaattcaacttcattcagatcttccatggtggcttattctaattcggcagaaagcattggtgggcaaactcccaggagaccatgaggtctgtaaagttaccaaaattgctgtgctctcactttctgaaatggaacctcaggatcttgagctagagctctgtaagaagcatcattttggtattaacaaaccagagaagatcataccatctcctgatgactcaaagtttctactgaagacctttacgcatattaaatccaatgtgtctgctcctaataaaaagaaagttaaggaaagtaaagagaaggagaagttggagaggagattacttgaagagttgctgaagatgttcatggactcagaatccttttattatagcttgacctatgacctgaccaattccgtgcagaggcagagcactggggagagggacggtcggcccctctggcagaaggtaccactcacagctcgtagagcagggtttgcmcttgggaagaagtgatgrcctgttttggcttttgtaggaaaactgaaataatgtgtttctgaactattgttcctgcaccttttctaggttgatgaccgatttttttggaataaatacatgatacaagatcttactg

SEQ ID NO: 7072 - DNA, 4931 bp, Homo sapiens
tctcctcctaccggtcgggtgccccggggcgttccctctgccgctgcttctcggcgcggttcctacccggccgctccccgaggcgcgggctctggcggcctcgaccgactaggacgccccgtgcgccgcccgcgggccgccgcctccctgggcgcgcggggccagcatggagctcttccaagccaaggaccactacatcctgcagcagggcgagcgcgcgctgtggtgcagccgccgcgacggcggcctccagctccgacccgctactgatctacttcttgcctggaatcccatttgtttggggttggtagaaggtgttattgggaaaattcaacttcattcagatcttccatggtggcttattctaattcggcagaaagcattggtgggcaaactcccaggagaccatgaggtctgtaaagttaccaaaattgctgtgctctcactttctgaaatggaacctcaggatcttgagctagagctctgtaagaagcatcattttggtattaacaaaccagagaagatcataccatctcctgatgactcaaagtttctactgaagacctttacgcatattaaatccaatgtgtctgctcctaataaaaagaaagttaaggaaagtaaagagaaggagaagttggagaggagattacttgaagagttgctgaagatgttcatggactcagaatccttttattatagcttgacctatgacctgaccaattccgtgcagaggcagagcactggggagagggacggtcggcccctctggcagaaggttgatgaccgatttttttggaataaatacatgatacaagatcttactgagattggtactccagatgtggacttttggattatccccatratccaaggttttgtgcagattgaagaacttgtggttaattataccgaatcatctgatgatgagaaaagcagcccagagaccccccctcaggagtccacctgtgtagatgatattcacccacgatttctagtggctctcatttcacgccgaagtaggcacagagcaggaatgcgctataaacgaagaggagtggataaaaatggaaatgttgccaattatgtggagactgagcagttgattcatgttcataatcataccctgtcatttgttcaaacacgaggctctgtgcctgtcttttggagccaggttgggtatcgatataacccaagaccgcggctggacagaagtgaaaaggaaactgttgcctatttctgtgcccatttcgaagaacaactgaacatttacaaaaaacaggttattattaacttggtagaccaggcaggaagagagaagattattggcgatgcttacctgaagcaagtgttgcttttcaacaactcacacctcacttacgtttcgtttgacttccatgagcactgccgaggaatgaagtttgagaatgttcagacactaacagatgccatttatgacattattcttgatatgaagtggtgttgggttgatgaagctggggtaatatgtaagcaggaagggrtttttcgtgttaattgtatggactgcctggatcgcaccaacgtggtccaagctgccatcgcgagagtggtcatggaacagcagctgaaaaaattaggtgtgatgcccccggaacagccattacctgtgaaatgtaatcgcatctaccagataatgtgggccaataatggtgactccattagcagacagtatgctgggacagctgctctgaagggtgactttacaaggacaggagaaaggaagttagcaggagttatgaaagatggagtgaactcagcaaacagatattacctcaaccgatttaaggatgcttataggcaagctgttatagatttgatgcaaggcattccagtgacagaagatctttattccatatttaccaaggagaaagaacatgaagctttgcataaggaaaatcagagaagccaccaggaactaattagccagctcttacaaagttacatgaagttactactgcctgatgatgagaagttccatgggggctgggccctcattgactgtgaccctagcctcattgatgctactcacagagacgtggatgtgctgttactgctttctaactctgcctactacgtggcctattatgatgatgaagttgataaagtaaaccagtatcaacgactaagtctasaaaacctggaaaaaattgaaataggccctgaacccactctttttggtaagccaaagttctcctgcatgcgactgcactacagatacaaagaagcgagtggctatttccacacattgcgagctgtaatgcgtaatcctgaagaggatggaaaagatacccttcagtgcattgcagagatgctgcagatcaccaagcaagccatgggatcggatttacccataattgagaagaaacttgagaggaagagcagtaaacctcacgaagacatcattggtatcaggtctcaaaaccaaggttctttggcccagggaaagaattttttaatgagcaaattttcatctctaaatcaaaaagtgaagcagaccaaatccaatgtaaatattggcaacctccgaaagctaggaaactttaccaaacctgaaatraaagttaactttctaaaaccaaacttaaaagtaaatctttggaaatcagatagtagtcttgaaactatggaaaacacaggagtgatggataaggttcaggcagagtctgatggggacatgtcttcrgataatgactcataccactctgatgaattccttacaaattctaagtctgatgaagacaggcagctagctaactcattagagagtgtagggccaatagattacgttcttcctagttgtggtattattgcctcagcgcctcgattgggcagtcggtcccagtctcttagcagcacagayagtagcgttcatgctccttcagagattactgttgctcatgggagtgggcttggaaaaggccasgagtctcctttgaagaaaagtccttctgctggcgacgtacacatattgactggctttgccaagcctatggatatttactgccacagatttgtgcaagatgcacagaacaaagtgacccacctatcagagaccagrtctgtgtctcagcaggctagtcaggaaagaaatcaaatgaccaatcaagtttcaratgaaacccaatcagaatcaacagaacagacacyttctcggccatcgcaattagatgtctctctttctgcaacaggcccacagtttttgtcagttgagccagcgcattcagttgcatctcaaaaaacccccacctccgcttccagcatgcttgaacttgagacagggcttcatgtaactccttctccttcagagagcagtagcagcagagcagtctctccctttgccaagattcgaagttccatggtccaggttgctagtattacccaagctggattaacccatgggataaactttgcagtgtcaaaagttcagaagagtcctccagaacctgaaatcattaatcaagtccagcaaaatgaacttaaaaagatgtttatacaatgccagacacggataattcagatttagcttttagccataagaatccttccatggcttttatttaaaaatatgaaattttcacctcttggggtattttaattgtactgtctgaacccagggatcacaaattctgttcattggaaagggttttaaacggagtcggaacctgagtagatttccaaattttacagccaggactacagaagtgcatcattctagaatgtgtagacctgagtagcttatacactacagagcactttgcttatttgaaagtaattcagcaacaggtcactttgggatataacctgaacctttttttggagtggggtgggtagactacagtagacacaagggctggacatgcagatgcttaggggattagcgtttttcataatttgttctgtttgtcagttcattcctgtgtgttcttacctctacaaagtaaattacacatttagtttttagtgactttaacatgttactgaagcatttgaatataaagctattttagttttgatggcttaactgttccctgaggagttgagggttattgacactagagaaatgaattctcatttgatcctaattttccccgtattctacttgaacacattaaaaatactctgctgcctatayaatgtaaacctaggagcattaagacttgtcacacagtaaacctgatacatcagaggtgaataccagcacctattaggtttcattttgcygttttcaggaatgtaagaacacccatattggctactggaaattctagmagtcagtcaggttttaatttattccagraggggcatcctcgacatcttatgtagatgatccacaacttcaaaatttagtctgggcctagtgcagtggctcacacctataatcccaacactttgggaggccaggagttttgagaccagcctgggaaacatctgyctctacaaaaaaatacaaaaattagctgggcatagtggtgcatgcctgtgtttctagctaygcaggaggattgcttgagcccatgagattgaggctgcagtgagctgtgatcgtgccactgacctccagcctgggggacagagcaagaccgtgtctcaaaaacaatttagtctgaaacacaattgtgctgaatctgtctgactataactctgaccacacagaaccagggctgcccctgtaatccccacagtaagaaagttgtatggcatattccaacaagtattggttcgtctggtgtctttagagctttactctgttraagtgactgattctcarctgaacattatgtcgtwactttgataagcattccacttttgttatttattagtgctatcttttttttttacgtgttaaatcttgtgattattaaaataaagtaccattgtaatttaaagtg

SEQ ID NO: 7073 - DNA, 4735 bp, Homo sapiens
tctcctcctaccggtcgggtgccccggggcgttccctctgccgctgcttctcggcgcggttcctacccggccgctccccgaggcgcgggctctggcggcctcgaccgactaggacgccccgtgcgccgcccgcgggccgccgcctccctgggcgcgcggggccagcatggagctcttccaagccaaggaccactacatcctgcagcagggcgagcgcgcgctgtggtgcagccgccgcgacggcggcctccagctccgacccgctactgatctacttcttgcctggaatcccatttgtttggggttggtagaaggtgttattgggaaaattcaacttcattcagatcttccatggtggcttattctaattcggcagaaagcattggtgggcaaactcccaggagaccatgaggtctgtaaagttaccaaaattgctgtgctctcactttctgaaatggaacctcaggatcttgagctagagctctgtaagaagcatcattttggtattaacaaaccagagaagatcataccatctcctgatgactcaaagtttctactgaagacctttacgcatattaaatccaatgtgtctgctcctaataaaaagaaagttaaggaaagtaaagagaaggagaagttggagaggagattacttgaagagttgctgaagatgttcatggactcagaatccttttattatagcttgacctatgacctgaccaattccgtgcagaggcagagcactggggagagggacggtcggcccctctggcagaaggttgatgaccgatttttttggaataaatacatgatacaagatcttactgagattggtactccagatgtggacttttggattatccccatratccaaggttttgtgcagattgaagaacttgtggttaattataccgaatcatctgatgatgagaaaagcagcccagagaccccccctcaggagtccacctgtgtagatgatattcacccacgatttctagtggctctcatttcacgccgaagtaggcacagagcaggaatgcgctataaacgaagaggagtggataaaaatggaaatgttgccaattatgtggagactgagcagttgattcatgttcataatcataccctgtcatttgttcaaacacgaggctctgtgcctgtcttttggagccaggttgggtatcgatataacccaagaccgcggctggacagaagtgaaaaggaaactgttgcctatttctgtgcccatttcgaagaacaactgaacatttacaaaaaacaggttattattaacttggtagaccaggcaggaagagagaagattattggcgatgcttacctgaagcaagtgttgcttttcaacaactcacacctcacttacgtttcgtttgacttccatgagcactgccgaggaatgaagtttgagaatgttcagacactaacagatgccatttatgacattattcttgatatgaagtggtgttgggttgatgaagctggggtaatatgtaagcaggaagggrtttttcgtgttaattgtatggactgcctggatcgcaccaacgtggtccaagctgccatcgcgagagtggtcatggaacagcagctgaaaaaattaggtgtgatgcccccggaacagccattacctgtgaaatgtaatcgcatctaccagataatgtgggccaataatggtgactccattagcagacagtatgctgggacagctgctctgaagggtgactttacaaggacaggagaaaggaagttagcaggagttatgaaagatggagtgaactcagcaaacagatattacctcaaccgatttaaggatgcttataggcaagctgttatagatttgatgcaaggcattccagtgacagaagatctttattccatatttaccaaggagaaagaacatgaagctttgcataaggaaaatcagagaagccaccaggaactaattagccagctcttacaaagttacatgaagttactactgcctgatgatgagaagttccatgggggctgggccctcattgactgtgaccctagcctcattgatgctactcacagagacgtggatgtgctgttactgctttctaactctgcctactacgtggcctattatgatgatgaagttgataaagtaaaccagtatcaacgactaagtctasaaaacctggaaaaaattgaaataggccctgaacccactctttttggtaagccaaagttctcctgcatgcgactgcactacagatacaaagaagcgagtggctatttccacacattgcgagctgtaatgcgtaatcctgaagaggatggaaaagatacccttcagtgcattgcagagatgctgcagatcaccaagcaagccatgggatcggatttacccataattgagaagaaacttgagaggaagagcagtaaacctcacgaagacatcattggtatcaggtctcaaaaccaaggttctttggcccagggaaagaattttttaatgagcaaattttcatctctaaatcaaaaagtgaagcagaccaaatccaatgtaaatattggcaacctccgaaagctaggaaactttaccaaacctgaaatraaagttaactttctaaaaccaaacttaaaagtaaatctttggaaatcagatagtagtcttgaaactatggaaaacacaggagtgatggataaggttcaggcagagtctgatggggacatgtcttcrgataatgactcataccactctgatgaattccttacaaattctaagtctgatgaagacaggcagctagctaactcattagagagtgtagggccaatagattacgttcttcctagttgtggtattattgcctcagcgcctcgattgggcagtcggtcccagtctcttagcagcacagayagtagcgttcatgctccttcagagattactgttgctcatgggagtgggcttggaaaaggccasgagtctcctttgaagaaaagtccttctgctggcgacgtacacatattgactggctttgccaagcctatggatatttactgccacagatttgtgcaagatgcacagaacaaagtgacccacctatcagagaccagrtctgtgtctcagcaggctagtcaggaaagaaatcaaatgaccaatcaagtttcaratgaaacccaatcagaatcaacagaacagacacyttctcggccatcgcaattagatgtctctctttctgcaacaggcccacagtttttgtcagttgagccagcgcattcagttgcatctcaaaaaacccccacctccgcttccagcatgcttgaacttgagacagggcttcatgtaactccttctccttcagagagcagtagcagcagagcagtctctccctttgccaagattcgaagttccatggtccaggttgctagtattacccaagctggattaacccatgggataaactttgcagtgtcaaaagttcagaagagtcctccagaacctgaaatcattaatcaagtccagcaaaatgaacttaaaaagatgtttatacaatgccagacacggataattcagatttagcttttagccataagaatccttccatggcttttatttaaaaatatgaaattttcacctcttggggtattttaattgtactgtctgaacccagggatcacaaattctgttcattggaaagggttttaaacggagtcggaacctgagtagatttccaaattttacagccaggactacagaagtgcatcattctagaatgtgtagacctgagtagcttatacactacagagcactttgcttatttgaaagtaattcagcaacaggtcactttgggatataacctgaacctttttttggagtggggtgggtagactacagtagacacaagggctggacatgcagatgcttaggggattagcgtttttcataatttgttctgtttgtcagttcattcctgtgtgttcttacctctacaaagtaaattacacatttagtttttagtgactttaacatgttactgaagcatttgaatataaagctattttagttttgatggcttaactgttccctgaggagttgagggttattgacactagagaaatgaattctcatttgatcctaattttccccgtattctacttgaacacattaaaaatactctgctgcctatayaatgtaaacctaggagcattaagacttgtcacacagtaaacctgatacatcagaggtgaataccagcacctattaggtttcattttgcygttttcaggaatgtaagaacacccatattggctactggaaattctagmagtcagtcaggttttaatttattccagraggggcatcctcgacatcttatgtagatgatccacaacttcaaaatttagtctgggcctagtgcagtggctcacacctataatcccaacactttgggaggccaggagttttgagaccagcctgggaaacatctgyctctacaaaaaaatacaaaaattagctgggcatagtggtgcatgcctgtgtttctagctaygcaggaggattgcttgagcccatgagattgaggctgcagtgagctgtgatcgtgccactgacctccagcctgggggacagagcaagaccaacaatttagtctgaaacacaattgtgctgaatctgtctgactataactctgaccacacagaaccagggctgcccctgtaatccccacagtaagaaagttgtatggcatat

SEQ ID NO: 7074 - DNA, 3295 bp, Homo sapiens
ccgccgcctagggcggtggggaggaggagggagccgcggggcttggcggggtcgggagggagggacgtgctgggggaacgagctggggaagacggagcgggctctgtgccgggcgggcgggcggcgggggggccagcgaccgcagccggggggacgcgggaggatggagcaagtggagatcctgaggaaattcatccagaggrtccaggccatgaagagtcctgaccacaatggggaggacaacttcgcccgggacttcatgcggttaagaagattgtctaccaaatatagaacagaaaagatatatcccacagccactggagaaaaagaagaaaatgttaaaaagaacagatacaaggacatactgccatttgatcacagccgagttaaattgacattaaagactccttcacaagattcagactatatcaatgcaaattttataaagggcgtctatgggccaaaagcatatgtagcaactcaaggacctttagcaaatacagtaatagatttttggaggatgatatgggagtataatgttgtgatcattgtaatggcctgccgagaatttgagatgggaaggaaaaaatgtgagcgctattggcctttgtatggagaagaccccataacgtttgcaccatttaaaatttcttgtgaggatgaacaagcaagaacagactacttcatcaggacactcttacttgaatttcaaaatgaatctcgtaggctgtatcagtttcattatgtgaactggccagaccatgatgttccttcatcatttgattctattctggacatgataagcttaatgaggaaatatcaagaacatgaagatgttcctatttgtattcattgcagtgcaggctgtggaagaacaggtgccatttgtgccatagattatacgtggaatttactaaaagctgggaaaataccagaggaatttaatgtatttaatttaatacaagaaatgagaacacaaaggcattctgcagtacaaacaaaggagcaatatgaacttgttcatagagctattgcccaactgtttgaaaaacagctacaactatatgaaattcatggagctcagaaaattgctgatggagtgaatgaaattaacactgaaaacatgrtcagctccatagagcctgaaaaacaagattctcctcctccaaaaccaccaaggacccgcagttgccttgttgaaggggatgctaaagaagaaatactgcagccaccggaacctcatccagtgccacccatcttgacaccttctcccccttcagcttttccaacagtcactactgtgtggcaggacaatgatagataccatccaaagccagtgttgcatatggtttcatcagaacaacattcagcagacctcaacagaaactatagtaaatcaacagaacttccagggaaaaatgaatcaacaattgaacagatagataaaaaattggaacgaaatttaagttttgagattaagaaggtccctctccaagagggaccaaaaagttttgatgggaacacacttttgaataggggacatgcaattaaaattaaatctgcttcaccttgtrtagctgataaaatctctaagccacaggaattaagttcagatctaaatgtcggtgatacttcccagaattcttgtgtggactgcagtgtaacacaatcaaacaaagtttcagttactccaccagaagaatcccagaattcagacacacctccaaggccagaccgcttgcctcttgatgagaaaggacatgtaacgtggtcatttcatggacctgaaaatgccatacccatacctgatttatctgaaggcaattcctcagatatcaactatcaaactaggaaaactgtgagtttaacaccaagtcctrcaacacaagttgaaacacctgatcttgtggatcatgataacacttcaccactcttcagaacacccctcagttttactaatccacttcactctgatgactcagactcagatgaaagaaactctgatggtgctgtgacccagaataaaactaatatttcaacagcaagtgccacagtttctgctgccactagtactgaaagcatttctactaggaaagtattgccaatgtccattgctagacataatatagcaggaacaacacattcaggtgctgaaaaagatgttgatgttagtgaagattcacctcctcccctacctgaaagaactcctgaatcgtttgtgttagcaagtgaacataatacacctgtaagatcggaatggagtgaacttcaaagtcaggaacgatctgaacaaaaaaagtctgaaggcttgataacctctgaaaatgagaaatgtgatcatccagcgggaggtattcactatgaaatgtgcatagaatgtccacctactttcagtgacaagagagaacaaatatcagaaaatccaacagaagccacagatattggttttggtaatcgatgtggaaaacccaaaggaccaagagatccaccttcagaatggacatgattcagggagctagaagacactttaagttatactggaaaattcaggtgccactgaamgccagatttatagtattccatctttaatatgtgggactaacagcagtgtagattgttaccttaatattttttgctgggaccatctacctgccttatactacacttaggaaaaagtattacatatggtttattttgaaacttcaagtattattgccttaatgtctcttaaccctgttacacgctgcttgtagacatgttaatatagtaatacctttatgatatattgagtttaaggactactctttttctgttttatcatgtatgcattattttgtatatgtacagggcaagtaggtatataatttgataaagttgcaattgaaatattattaacagaagatgtaagaaatttctgcatggtctaaatctttgtgtactttatttgtaaattatttgcccyggagttttagaaaatagtttctgaattttaaacttgctggattcatgcagccagctttgcaggttatcagagatcaaagattgtaataataattttgtaaattgtaagcaaaaagttatttttatattatatacagtctaattgttcatcctaattgttcctgttttcatctagtcagagattcagtaagtgccttggaacaatattgaattctcttagcttgtgtgtgtttctttaatatttgaactcaagtgggattagaagactatcaaaatacatgtatgtttcaggatatttgacctgtcattaaaaaaaacaaacagttttacagtg

SEQ ID NO: 7075 - DNA, 3413 bp, Homo sapiens
cccgtggggagaggcggctgcggctgcggctgcggctgctggcggggggtgggggggaggaggaaccgggaagggggggcagggcgagcggagagctagctgtgttcctgaggcggcgccgccgcctagggcggtggggaggaggagggagccgcggggcttggcggggtcgggagggagggacgtgctgggggaacgagctggggaagacggagcgggctctgtgccgggcgggcgggcggcgggggggccagcgaccgcagccggggggacgcgggaggatggagcaagtggagatcctgaggaaattcatccagaggrtccaggccatgaagagtcctgaccacaatggggaggacaacttcgcccgggacttcatgcggttaagaagattgtctaccaaatatagaacagaaaagatatatcccacagccactggagaaaaagaagaaaatgttaaaaagaacagatacaaggacatactgccatttgatcacagccgagttaaattgacattaaagactccttcacaagattcagactatatcaatgcaaattttataaagggcgtctatgggccaaaagcatatgtagcaactcaaggacctttagcaaatacagtaatagatttttggaggatgatatgggagtataatgttgtgatcattgtaatggcctgccgagaatttgagatgggaaggaaaaaatgtgagcgctattggcctttgtatggagaagaccccataacgtttgcaccatttaaaatttcttgtgaggatgaacaagcaagaacagactacttcatcaggacactcttacttgaatttcaaaatgaatctcgtaggctgtatcagtttcattatgtgaactggccagaccatgatgttccttcatcatttgattctattctggacatgataagcttaatgaggaaatatcaagaacatgaagatgttcctatttgtattcattgcagtgcaggctgtggaagaacaggtgccatttgtgccatagattatacgtggaatttactaaaagctgggaaaataccagaggaatttaatgtatttaatttaatacaagaaatgagaacacaaaggcattctgcagtacaaacaaaggagcaatatgaacttgttcatagagctattgcccaactgtttgaaaaacagctacaactatatgaaattcatggagctcagaaaattgctgatggagtgaatgaaattaacactgaaaacatgrtcagctccatagagcctgaaaaacaagattctcctcctccaaaaccaccaaggacccgcagttgccttgttgaaggggatgctaaagaagaaatactgcagccaccggaacctcatccagtgccacccatcttgacaccttctcccccttcagcttttccaacagtcactactgtgtggcaggacaatgatagataccatccaaagccagtgttgcatatggtttcatcagaacaacattcagcagacctcaacagaaactatagtaaatcaacagaacttccagggaaaaatgaatcaacaattgaacagatagataaaaaattggaacgaaatttaagttttgagattaagaaggtccctctccaagagggaccaaaaagttttgatgggaacacacttttgaataggggacatgcaattaaaattaaatctgcttcaccttgtrtagctgataaaatctctaagccacaggaattaagttcagatctaaatgtcggtgatacttcccagaattcttgtgtggactgcagtgtaacacaatcaaacaaagtttcagttactccaccagaagaatcccagaattcagacacacctccaaggccagaccgcttgcctcttgatgagaaaggacatgtaacgtggtcatttcatggacctgaaaatgccatacccatacctgatttatctgaaggcaattcctcagatatcaactatcaaactaggaaaactgtgagtttaacaccaagtcctrcaacacaagttgaaacacctgatcttgtggatcatgataacacttcaccactcttcagaacacccctcagttttactaatccacttcactctgatgactcagactcagatgaaagaaactctgatggtgctgtgacccagaataaaactaatatttcaacagcaagtgccacagtttctgctgccactagtactgaaagcatttctactaggaaagtattgccaatgtccattgctagacataatatagcaggaacaacacattcaggtgctgaaaaagatgttgatgttagtgaagattcacctcctcccctacctgaaagaactcctgaatcgtttgtgttagcaagtgaacataatacacctgtaagatcggaatggagtgaacttcaaagtcaggaacgatctgaacaaaaaaagtctgaaggcttgataacctctgaaaatgagaaatgtgatcatccagcgggaggtattcactatgaaatgtgcatagaatgtccacctactttcagtgacaagagagaacaaatatcagaaaatccaacagaagccacagatattggttttggtaatcgatgtggaaaacccaaaggaccaagagatccaccttcagaatggacatgattcagggagctagaagacactttaagttatactggaaaattcaggtgccactgaamgccagatttatagtattccatctttaatatgtgggactaacagcagtgtagattgttaccttaatattttttgctgggaccatctacctgccttatactacacttaggaaaaagtattacatatggtttattttgaaacttcaagtattattgccttaatgtctcttaaccctgttacacgctgcttgtagacatgttaatatagtaatacctttatgatatattgagtttaaggactactctttttctgttttatcatgtatgcattattttgtatatgtacagggcaagtaggtatataatttgataaagttgcaattgaaatattattaacagaagatgtaagaaatttctgcatggtctaaatctttgtgtactttatttgtaaattatttgcccyggagttttagaaaatagtttctgaattttaaacttgctggattcatgcagccagctttgcaggttatcagagatcaaagattgtaataataattttgtaaattgtaagcaaaaagttatttttatattatatacagtctaattgttcatcctaattgttcctgttttcatctagtcagagattcagtaagtgccttggaacaatattgaattctcttagcttgtgtgtgtttctttaatatttgaactcaagtgggattagaagactatcaaaatacatgtatgtttcaggatatttgacctgtcattaaaaaaaacaaacagttttacagtg

SEQ ID NO: 7076 - DNA, 2702 bp, Homo sapiens
cccgtggggagaggcggctgcggctgcggctgcggctgctggcggggggtgggggggaggaggaaccgggaagggggggcagggcgagcggagagctagctgtgttcctgaggcggcgccgccgcctagggcggtggggaggaggagggagccgcggggcttggcggggtcgggagggagggacgtgctgggggaacgagctggggaagacggagcgggctctgtgccgggcgggcgggcggcgggggggccagcgaccgcagccggggggacgcgggaggatggagcaagtggagatcctgaggaaattcatccagaggrtccaggccatgaagagtcctgaccacaatggggaggacaacttcgcccgggacttcatgcggttaagaagattgtctaccaaatatagaacagaaaagatatatcccacagccactggagaaaaagaagaaaatgttaaaaagaacagatacaaggacatactgccatttgatcacagccgagttaaattgacattaaagactccttcacaagattcagactatatcaatgcaaattttataaagggcgtctatgggccaaaagcatatgtagcaactcaaggacctttagcaaatacagtaatagatttttggaggatgatatgggagtataatgttgtgatcattgtaatggcctgccgagaatttgagatgggaaggaaaaaatgtgagcgctattggcctttgtatggagaagaccccataacgtttgcaccatttaaaatttcttgtgaggatgaacaagcaagaacagactacttcatcaggacactcttacttgaatttcaaaatgaatctcgtaggctgtatcagtttcattatgtgaactggccagaccatgatgttccttcatcatttgattctattctggacatgataagcttaatgaggaaatatcaagaacatgaagatgttcctatttgtattcattgcagtgcaggctgtggaagaacaggtgccatttgtgccatagattatacgtggaatttactaaaagctgggaaaataccagaggaatttaatgtatttaatttaatacaagaaatgagaacacaaaggcattctgcagtacaaacaaaggagcaatatgaacttgttcatagagctattgcccaactgtttgaaaaacagctacaactatatgaaattcatggagctcagaaaattgctgatggagtgaatgaaattaacactgaaaacatgrtcagctccatagagcctgaaaaacaagattctcctcctccaaaaccaccaaggacccgcagttgccttgttgaaggggatgctaaagaagaaatactgcagccaccggaacctcatccagtgccacccatcttgacaccttctcccccttcagcttttccaacagtcactactgtgtggcaggacaatgatagataccatccaaagccagtgttgcatatggtttcatcagaacaacattcagcagacctcaacagaaactatagtaaatcaacagaacttccagggaaaaatgaatcaacaattgaacagatagataaaaaattggaacgaaatttaagttttgagattaagaaggtccctctccaagagggaccaaaaagttttgatgggaacacacttttgaataggggacatgcaattaaaattaaatctgcttcaccttgtrtagctgataaaatctctaagccacaggaattaagttcagatctaaatgtcggtgatacttcccagaattcttgtgtggactgcagtgtaacacaatcaaacaaagtttcagttactccaccagaagaatcccagaattcagacacacctccaaggccagaccgcttgcctcttgatgagaaaggacatgtaacgtggtcatttcatggacctgaaaatgccatacccatacctgatttatctgaaggcaattcctcagatatcaactatcaaactaggaaaactgtgagtttaacaccaagtcctrcaacacaagttgaaacacctgatcttgtggatcatgataacacttcaccactcttcagaacacccctcagttttactaatccacttcactctgatgactcagactcagatgaaagaaactctgatggtgctgtgacccagaataaaactaatatttcaacagcaagtgccacagtttctgctgccactagtactgaaagcatttctactaggaaagtattgccaatgtccattgctagacataatatagcaggaacaacacattcaggtgctgaaaaagatgttgatgttagtgaagattcacctcctcccctacctgaaagaactcctgaatcgtttgtgttagcaagtgaacataatacacctgtaagatcggaatggagtgaacttcaaagtcaggaacgatctgaacaaaaaaagtctgaaggcttgataacctctgaaaatgagaaatgtgatcatccagcgggaggtattcactatgaaatgtgcatagaatgtccacctactttcagtgacaagagagaacaaatatcagaaaatccaacagaagccacagatattggttttggtaatcgatgtggaaaacccaaaggaccaagagatccaccttcagaatggacatgattcagggagctagaagacactttaagttatacttgggactaacagcagtgtagattgttaccttaatattttttgctg

SEQ ID NO: 7077 - DNA, 1512 bp, Homo sapiens
tctgtctctcagggcatgagaccagccaggcactgggaaacaaggtttggtgccagagattttggtggcttccaagactgctttttcagagacaggctcatggacacagcacggattgcagttgtcrgggcaggtgtggtggggctctccacggctgtgtgcatctccaaactggtgccccgatgctccgttaccatcatttcagacaagtttactccagataccaccagtgatgtggcagccggaatgcttattcctcacacttatccagatacacccattcacacgcagaagcagtggttcagagaaacctttaatcacctctttgcaattgccaattctgcagaagctggagatgctggtgttcatttggtatcagggataaagggaagtggaggctggacactcactcggcgaatagaagacctgtgggaacttcatccgtcctttgacatcgtggtcaactgttcaggccttggaagcagasagcttgcaggagactcaaagattttccctgtaaggggccaagtcctccaagttcaggctccctgggtggagcattttatccgagatggcagtgggctgacatatatttatcctggtacatccyatgtaaccctaggtggaactaggcaaaaaggggactggaatctgtccccggatgcagaaaatagcagagagattckttcccgatgctgtgctctggagccctccctccacrgagcctgcaacatcagggagaaggtgggcttgaggccctacaggccaggcgtgcgactgcagacagagctccttgcgcragatggacagaggctgcctgtagtccaccactatggccatgggagtgggggcatctcagtgcactggggcactgctctggaggccgccaggctggtgagcgagtgtgtccatgccctcaggacccccattcccaagtcaaacctgtagatgacataaaatgacagcaaagagactgagagactgttgatcaaagcacagaacaggttcaaataacttttccactgcatgaaagtttaattagacatttctttgttttcaacattagaagtggtgtaacatgtaagctgagcayggtggcatgcctatagtcccagctacttgagaggctgaggcaggaggatygttgagcccaggagtttgagtgcaatctgggtaacattttttagaggtgccagttcccacctctaaaaaaaacaccaacaacaaaagaaatgatgcaacatgtaggcttacttaggaagtccagcattaatggcatagggcataaagctctattttttgttaaaaatacttcttatagagtaaaatttatttagaactgatgtccaaggacctatgcagatttatatgaatgttggaagctatagagattttgatatcatttggcttataaatccacaggaggagataatgtatggaaaacatttaaatcactgtcaattgcagagctgcctgtgatcttcttaggttatagccaagtcagcaacataa

SEQ ID NO: 7078 - DNA, 1689 bp, Homo sapiens
tctgtctctcagggcatgagaccagccaggcactgggaaacaaggtttggtgccagagattttggtggcttccaagactgctttttcagagacaggctcatggacacagcacggattgcagttgtcrgggcaggtgtggtggggctctccacggctgtgtgcatctccaaactggtgccccgatgctccgttaccatcatttcagacaagtttactccagataccaccagtgatgtggcagccggaatgcttattcctcacacttatccagatacacccattcacacgcagaagcagtggttcagagaaacctttaatcacctctttgcaattgccaattctgcagaagctggagatgctggtgttcatttggtatcaggttggcagatatttcagagcactccgactgaagaagtgccattctgggctgacrtggttctgggatttcgaaagatgactgaggctgagctgaagaarttcccccagtatgtgtttggtcaggcttttacaaccctgaaatgtgaatgccctgcctacctcccgtggttggagaaaaggataaagggaagtggaggctggacactcactcggcgaatagaagacctgtgggaacttcatccgtcctttgacatcgtggtcaactgttcaggccttggaagcagasagcttgcaggagactcaaagattttccctgtaaggggccaagtcctccaagttcaggctccctgggtggagcattttatccgagatggcagtgggctgacatatatttatcctggtacatccyatgtaaccctaggtggaactaggcaaaaaggggactggaatctgtccccggatgcagaaaatagcagagagattckttcccgatgctgtgctctggagccctccctccacrgagcctgcaacatcagggagaaggtgggcttgaggccctacaggccaggcgtgcgactgcagacagagctccttgcgcragatggacagaggctgcctgtagtccaccactatggccatgggagtgggggcatctcagtgcactggggcactgctctggaggccgccaggctggtgagcgagtgtgtccatgccctcaggacccccattcccaagtcaaacctgtagatgacataaaatgacagcaaagagactgagagactgttgatcaaagcacagaacaggttcaaataacttttccactgcatgaaagtttaattagacatttctttgttttcaacattagaagtggtgtaacatgtaagctgagcayggtggcatgcctatagtcccagctacttgagaggctgaggcaggaggatygttgagcccaggagtttgagtgcaatctgggtaacattttttagaggtgccagttcccacctctaaaaaaaacaccaacaacaaaagaaatgatgcaacatgtaggcttacttaggaagtccagcattaatggcatagggcataaagctctattttttgttaaaaatacttcttatagagtaaaatttatttagaactgatgtccaaggacctatgcagatttatatgaatgttggaagctatagagattttgatatcatttggcttataaatccacaggaggagataatgtatggaaaacatttaaatcactgtcaattgcagagctgcctgtgatcttcttaggttatagccaagtcagcaacataa

SEQ ID NO: 7079 - DNA, 1836 bp, Homo sapiens
tctgtctctcagggcatgagaccagccaggcactgggaaacaaggtttggtgccagagattttggtggcttccaagactgctttttcagagacaggctcatggacacagcacggattgcagttgtcrgggcaggtgtggtggggctctccacggctgtgtgcatctccaaactggtgccccgatgctccgttaccatcatttcagacaagtttactccagataccaccagtgatgtggcagccggaatgcttattcctcacacttatccagatacacccattcacacgcagaagcagtggttcagagaaacctttaatcacctctttgcaattgccaattctgcagaagctggagatgctggtgttcatttggtatcaggttggcagatatttcagagcactccgactgaagaagtgccattctgggctgacrtggttctgggatttcgaaagatgactgaggctgagctgaagaarttcccccagtatgtgtttggtcaggcttttacaaccctgaaatgtgaatgccctgcctacctcccgtggttggagaaaagattagctccctgcagcccggagcctgcgtccgaccaggctggtggaggaacaaggccacgtgtcccctttcctccctcaggaggctttgcagcacgggactcctctcagcccaagtccggcctttcagggcgagcatttcaggcggggataaagggaagtggaggctggacactcactcggcgaatagaagacctgtgggaacttcatccgtcctttgacatcgtggtcaactgttcaggccttggaagcagasagcttgcaggagactcaaagattttccctgtaaggggccaagtcctccaagttcaggctccctgggtggagcattttatccgagatggcagtgggctgacatatatttatcctggtacatccyatgtaaccctaggtggaactaggcaaaaaggggactggaatctgtccccggatgcagaaaatagcagagagattckttcccgatgctgtgctctggagccctccctccacrgagcctgcaacatcagggagaaggtgggcttgaggccctacaggccaggcgtgcgactgcagacagagctccttgcgcragatggacagaggctgcctgtagtccaccactatggccatgggagtgggggcatctcagtgcactggggcactgctctggaggccgccaggctggtgagcgagtgtgtccatgccctcaggacccccattcccaagtcaaacctgtagatgacataaaatgacagcaaagagactgagagactgttgatcaaagcacagaacaggttcaaataacttttccactgcatgaaagtttaattagacatttctttgttttcaacattagaagtggtgtaacatgtaagctgagcayggtggcatgcctatagtcccagctacttgagaggctgaggcaggaggatygttgagcccaggagtttgagtgcaatctgggtaacattttttagaggtgccagttcccacctctaaaaaaaacaccaacaacaaaagaaatgatgcaacatgtaggcttacttaggaagtccagcattaatggcatagggcataaagctctattttttgttaaaaatacttcttatagagtaaaatttatttagaactgatgtccaaggacctatgcagatttatatgaatgttggaagctatagagattttgatatcatttggcttataaatccacaggaggagataatgtatggaaaacatttaaatcactgtcaattgcagagctgcctgtgatcttcttaggttatagccaagtcagcaacataa

SEQ ID NO: 7080 - DNA, 1594 bp, Homo sapiens
gctcatggacacagcacggattgcagttgtcrgggcaggtgtggtggggctctccacggctgtgtgcatctccaaactggtgccccgatgctccgttaccatcatttcagacaagtttactccagataccaccagtgatgtggcagccggaatgcttattcctcacacttatccagatacacccattcacacgcagaagcagtggttcagagaaacctttaatcacctctttgcaattgccaattctgcagaagctggagatgctggtgttcatttggtatcaggttggcagatatttcagagcactccgactgaagaagtgccattctgggctgacrtggttctgggatttcgaaagatgactgaggctgagctgaagaarttcccccagtatgtgtttggtcaggcttttacaaccctgaaatgtgaatgccctgcctacctcccgtggttggagaaaaggataaagggaagtggaggctggacactcactcggcgaatagaagacctgtgggaacttcatccgtcctttgacatcgtggtcaactgttcaggccttggaagcagasagcttgcaggagactcaaagattttccctgtaaggggccaagtcctccaagttcaggctccctgggtggagcattttatccgagatggcagtgggctgacatatatttatcctggtacatccyatgtaaccctaggtggaactaggcaaaaaggggactggaatctgtccccggatgcagaaaatagcagagagattckttcccgatgctgtgctctggagccctccctccacrgagcctgcaacatcagggagaaggtgggcttgaggccctacaggccaggcgtgcgactgcagacagagctccttgcgcragatggacagaggctgcctgtagtccaccactatggccatgggagtgggggcatctcagtgcactggggcactgctctggaggccgccaggctggtgagcgagtgtgtccatgccctcaggacccccattcccaagtcaaacctgtagatgacataaaatgacagcaaagagactgagagactgttgatcaaagcacagaacaggttcaaataacttttccactgcatgaaagtttaattagacatttctttgttttcaacattagaagtggtgtaacatgtaagctgagcayggtggcatgcctatagtcccagctacttgagaggctgaggcaggaggatygttgagcccaggagtttgagtgcaatctgggtaacattttttagaggtgccagttcccacctctaaaaaaaacaccaacaacaaaagaaatgatgcaacatgtaggcttacttaggaagtccagcattaatggcatagggcataaagctctattttttgttaaaaatacttcttatagagtaaaatttatttagaactgatgtccaaggacctatgcagatttatatgaatgttggaagctatagagattttgatatcatttggcttataaatccacaggaggagataatgtatggaaaacatttaaatcactgtcaattgcagagctgcctgtgatcttcttaggttatagccaagtcagcaacataa

SEQ ID NO: 7081 - DNA, 1417 bp, Homo sapiens
gctcatggacacagcacggattgcagttgtcrgggcaggtgtggtggggctctccacggctgtgtgcatctccaaactggtgccccgatgctccgttaccatcatttcagacaagtttactccagataccaccagtgatgtggcagccggaatgcttattcctcacacttatccagatacacccattcacacgcagaagcagtggttcagagaaacctttaatcacctctttgcaattgccaattctgcagaagctggagatgctggtgttcatttggtatcagggataaagggaagtggaggctggacactcactcggcgaatagaagacctgtgggaacttcatccgtcctttgacatcgtggtcaactgttcaggccttggaagcagasagcttgcaggagactcaaagattttccctgtaaggggccaagtcctccaagttcaggctccctgggtggagcattttatccgagatggcagtgggctgacatatatttatcctggtacatccyatgtaaccctaggtggaactaggcaaaaaggggactggaatctgtccccggatgcagaaaatagcagagagattckttcccgatgctgtgctctggagccctccctccacrgagcctgcaacatcagggagaaggtgggcttgaggccctacaggccaggcgtgcgactgcagacagagctccttgcgcragatggacagaggctgcctgtagtccaccactatggccatgggagtgggggcatctcagtgcactggggcactgctctggaggccgccaggctggtgagcgagtgtgtccatgccctcaggacccccattcccaagtcaaacctgtagatgacataaaatgacagcaaagagactgagagactgttgatcaaagcacagaacaggttcaaataacttttccactgcatgaaagtttaattagacatttctttgttttcaacattagaagtggtgtaacatgtaagctgagcayggtggcatgcctatagtcccagctacttgagaggctgaggcaggaggatygttgagcccaggagtttgagtgcaatctgggtaacattttttagaggtgccagttcccacctctaaaaaaaacaccaacaacaaaagaaatgatgcaacatgtaggcttacttaggaagtccagcattaatggcatagggcataaagctctattttttgttaaaaatacttcttatagagtaaaatttatttagaactgatgtccaaggacctatgcagatttatatgaatgttggaagctatagagattttgatatcatttggcttataaatccacaggaggagataatgtatggaaaacatttaaatcactgtcaattgcagagctgcctgtgatcttcttaggttatagccaagtcagcaacataa

SEQ ID NO: 7082 - DNA, 2896 bp, Homo sapiens
ggtgagagtggccagcgagggcagcgttcgccgcccctcaggccccgtcccggcgccgcagccgcctgcgtttcggtttgtgagcaggcccggccgggccaggagcgagagcgagactctggagcggtcgccgccgcagtcgcccgggccgggaaaggcgggcgatgcccccaaccgccgctcgggccatgtccgaggggcgcgcgtgttgtcgccgccggggcgccgtgcccgcctgtcgtcccccgggcccagccgctcgtccgaggcccgcgaggagctgcgccgccacctcgtgggcctcatcgagcgcagccgggtggtgatcttcagcaagagctactgtccccatagtactcgggtgaaagaactcttttcttctttgggagtcgaatgtaatgtcttggaacttgatcaagttgatgatggggccagggttcaagaagtgctgtcagaaatcactaatcagaaaactgtgcccaatattttcgtgaataaagtgcatgtaggtggatgtgaccaaactttccaggcatatcagagtggtttgttacagaagctccttcaggaagatttgscatatgattatgatctcatcatcatcggtggtggttctggaggcctttcatgtgcgaaggaagctgccattytgggaaagaaagttatggtgctagactttgttgtyccgtcacctcagggcacatcctggggtcttggtggcacttgtgtaaatgtaggttgtattcctaagaaattgatgcatcaggctgcccttttggggcaggcattatgtgactcaaggaaatttggctgggaatataatcaacaagtgaggcacaactgggagacaatgrcaaaagcgattcagaaccacatcagctctctaaactggggctacaggttgtctctgagggaaaaggctgtggcctatgtcaattcctatggagaatttgttgaacatcataaaataaaggcaaccaataaaaaaggacaggagacttattatactgctgcacagtttgtcatagcaacgggtgaaaggccacggtatttaggaatccaaggagataaagaatactgtattactagtgatgaccttttttctctgccttattgccctggcaaaacattagtggtgggtgcctcttatgttgccctggagtgtgcagggtttctggctggctttggcctagatgtcacagttatggtacgctcaatccttctccgtggcttcgaccaagaaatggcagaaaaagtgggttcctacatggagcagcatggtgtgaagttcctacggaaattcatacctgtgatggttcaacagttggagaaaggttcacctggaaagctgaaagtgttggctaaatccactgaaggaacagaaacaattgaaggagtctataacacagttttgttagctattggtcgtgactcctgtacaaggaaaataggcttggagaagattggtgtcaaaattaatgagaagagtggaaaaatacctgtaaatgatgtggaacagaccaatgtgccatatgtctatgctgttggtgatattttggaggataagccagagctcactcctgtcgccatacagtcaggcaagctgctagctcagagactttttggggcctctttagaaaagtgtgattatattaatgttccgactacagtgtttactcctctggagtatggttgctgtggattatctgaagagaaagctattgaagtatataaaaaagagaatctagaaatatatcatactttgttctggcctcttgaatggacagtagctggcagagagaacaacacttgttaygcaaagataatctgcaataaattcgaccatgatcgggtgataggatttcatattcttggaccaaacgccggtgaggttacccaaggatttgcagctgcaatgaaatgtgggctcacaaaacagctacttgatgacaccattggaattcaccccacatgtggggaggtgttcacgactttggaaatcacaaagtcgtcaggactagacatcactcagaaaggctgctgaggctaggcctgctgctgtttagttctccttgtcatattctcatttctctcaaagataagaatgctctcggataaaatgagcctgtgctcatgacagctgctctgttactcagggaccagtgcagggctgtcttacgacacttagatgagaaagtagacaaggaaagaggacagcagtgggcatctgccttgtggtcttgmtgacagcgagaagcagtgggactgcttccttgacgccttagcttggagccccrttatgaggtgagccaaggctgactctcgcaagccaggactgagcttccctcggaaagacctttgagtggcaccattcacctaagttagcttttctggtcgctattgtttttatcccctttgctttgttgtttctgtgaaaatatattttcagttaagaaatgctataaagtagtggttttctagtgcgtgggcctagaattcacacatgctcactggtgaacagtgtctgtgggctgctgtgggctgcatttggatagctgtctgcattagcaggaagctgtacacactgtgtagggttagtcatctcttttcttttttgaggcacatttaacctactgtcaaaacgctgactcatgcttcaccctcacactcactacttggtggtgataaccttgaagctattctcccctaattaatatctcgagactgagcaaaatatctcatgtaagataaaagtacttgaattgctttttcatgttcatcttaatagtattatttccaaaagtttttaatactgtattatgtgaaatctaactaatttatctgtgaaataattccatcacagtctgtttaatgatgataaagttccataaatgaa

SEQ ID NO: 7083 - DNA, 1654 bp, Homo sapiens
ggtgagagtggccagcgagggcagcgttcgccgcccctcaggccccgtcccggcgccgcagccgcctgcgtttcggtttgtgagcaggcccggccgggccaggagcgagagcgagactctggagcggtcgccgccgcagtcgcccgggccgggaaaggcgggcgatgcccccaaccgccgctcgggccatgtccgaggggcgcgcgtgttgtcgccgccggggcgccgtgcccgcctgtcgtcccccgggcccagccgctcgtccgaggcccgcgaggagctgcgccgccacctcgtgggcctcatcgagcgcagccgggtggtgatcttcagcaagagctactgtccccatagtactcgggtgaaagaactcttttcttctttgggagtcgaatgtaatgtcttggaacttgatcaagttgatgatggggccagggttcaagaagtgctgtcagaaatcactaatcagaaaactgtgcccaatattttcgtgaataaagtgcatgtaggtggatgtgaccaaactttccaggcatatcagagtggtttgttacagaagctccttcaggaagatttgscatatgattatgatctcatcatcatcggtggtggttctggaggcctttcatgtgcgaaggaagctgccattytgggaaagaaagttatggtgctagactttgttgtyccgtcacctcagggcacatcctggggtcttggtggcacttgtgtaaatgtaggttgtattcctaagaaattgatgcatcaggctgcccttttggggcaggcattatgtgactcaaggaaatttggctgggaatataatcaacaagtgaggcacaactgggagacaatgrcaaaagcgattcagaaccacatcagctctctaaactggggctacaggttgtctctgagggaaaaggctgtggcctatgtcaattcctatggagaatttgttgaacatcataaaataaaggcaaccaataaaaaaggacaggagacttattatactgctgcacagtttgtcatagcaacgggtgaaaggccacggtatttaggaatccaaggagataaagaatactgtattactagtgatgaccttttttctctgccttattgccctggcaaaacattagtggtgggtgcctcttatgttgccctggagtgtgcagggtttctggctggctttggcctagatgtcacagttatggtacgctcaatccttctccgtggcttcgaccaagaaatggcagaaaaagtgggttcctacatggagcagcatggtgtgaagttcctacggaaattcatacctgtgatggttcaacagttggagaaaggttcacctggaaagctgaaagtgttggctaaatccactgaaggaacagaaacaattgaaggagtctataacacagttttgttagctattggtcgtgactcctgtacaaggaaaataggcttggagaagattggtgtcaaaattaatgagaagagtggaaaaatacctgtaaatgatgtggaacagaccaatgtgccatatgtctatgctgttggtgatattttggaggataagccagagctcactcctgtcgccatacagtcaggcaagctgctagctcagagactttttggggcctctttagaaaaggtaagtttctta

SEQ ID NO: 7084 - DNA, 1842 bp, Homo sapiens
acagccgcccagaaattctacccaagctccctcagcaccatgtaccgagcacttcggctcctcgcgcgctcgcgtcccctcgtgcgggctcyagccgcagccttagcttcggctcccggcttgggtggcgcggccgtgccctcgttttggcctccgaacgcggctcgaatggcaagcyaaaattccttccggatagaatatgatacctttggtgaactaaaggtgccaaatgataagtattatggcgcccagaccgtgagatctacgatgaactttaagattggaggtgtgacagaacgcatgccaaccccagttattaaagcttttggcatcttgaagcgagcggcygctgaagtaamccaggattatggtcttgatccaaagattgctaatgcaataatgaaggcagcagatgaggtagctgaaggtaaattaaatgatcattttcctctcgtggtatggcagactggatcaggaactcagacaaatatgaatgtaaatgaagtcattagcaatagagcaattgaaatgttaggaggtgaacttggcagcaagatacctgtgcatcccaacgatcrtgttaataaaagccrgagctcaaatgatacttttcccacagcaatgcacattgctgctgcaatagaagttcatgaagtactgttaccaggactacagaagttacatgatgctcttgatgcaaaatccaaagagtttgcacagatcatcargattggacrtactcatactcaggatgctgttccacttactcttgggcaggaatttagtggttatgttcaacaagtaaaatatgcaatgacaakaataaaagctgccatgccaagaatctatgagctcgcagctggaggcactgctgttggtacagktttaaatactagaattggctttgcagaaaaggttgctgcaaaagtggctgcacttacaggcttgccttttgtcactgctccraataaatttgaagctctggctgctcatgacgctctggttgagctcagtggagccatgaayactactgcctgcagtctgatgaagatagcaaatgatattygatttttgggttctggtcctcggtcaggtctgggagaattgatcttgcctgaaaatgaaccaggaagcagtatcatgccaggcaaggtgaaccctactcagtgtgaagcaatgaccatggttgcagcccaagtcatggggaaccatgttgctgtcactgtcggaggcagcaatggacattttgagttgaatgttttcaagccaatgatgattaaaaatgtgttacactcagccaggctgctgggggatgcttcagtttcctttacagaaaactgygtggtgggaatccaggccaatacagaaaggatcaacaagctgatgaatgagtctctaatgttggtgacagctctcaatcctcatatagggtatgacaaggcagcaaagattgctaagacagcacacaaaaatggatcaaccttaaaggaaactgctatcgaacttggctatctcacagcagagcagtttgacgaatrggtaaaacctaaggacatgctgggtccaaagtgatttacataaatttataatgaaaataaacatgtataaaatttaaaaaaacagactcccatttcttaaaaacggataagtttgaaaggaaactgctrttgaacttaagcatctctagcagagcaatttgatcagtatataaaaccctaggatgtgctaggtctaagatggattaaacaagtataaaataaaatacatttataaaataaaaaggaaaacagacttaaattttctcctatgttaattgacttgtattatagttgaatctatgat

SEQ ID NO: 7085 - DNA, 1845 bp, Homo sapiens
acagccgcccagaaattctacccaagctccctcagcaccatgtaccgagcacttcggctcctcgcgcgctcgcgtcccctcgtgcgggctcyagccgcagccttagcttcggctcccggcttgggtggcgcggccgtgccctcgttttggcctccgaacgcggctcgaatggcaagcyaaaattccttccggatagaatatgatacctttggtgaactaaaggtgccaaatgataagtattatggcgcccagaccgtgagatctacgatgaactttaagattggaggtgtgacagaacgcatgccaaccccagttattaaagcttttggcatcttgaagcgagcggcygctgaagtaamccaggattatggtcttgatccaaagattgctaatgcaataatgaaggcagcagatgaggtaggagctgaaggtaaattaaatgatcattttcctctcgtggtatggcagactggatcaggaactcagacaaatatgaatgtaaatgaagtcattagcaatagagcaattgaaatgttaggaggtgaacttggcagcaagatacctgtgcatcccaacgatcrtgttaataaaagccrgagctcaaatgatacttttcccacagcaatgcacattgctgctgcaatagaagttcatgaagtactgttaccaggactacagaagttacatgatgctcttgatgcaaaatccaaagagtttgcacagatcatcargattggacrtactcatactcaggatgctgttccacttactcttgggcaggaatttagtggttatgttcaacaagtaaaatatgcaatgacaakaataaaagctgccatgccaagaatctatgagctcgcagctggaggcactgctgttggtacagktttaaatactagaattggctttgcagaaaaggttgctgcaaaagtggctgcacttacaggcttgccttttgtcactgctccraataaatttgaagctctggctgctcatgacgctctggttgagctcagtggagccatgaayactactgcctgcagtctgatgaagatagcaaatgatattygatttttgggttctggtcctcggtcaggtctgggagaattgatcttgcctgaaaatgaaccaggaagcagtatcatgccaggcaaggtgaaccctactcagtgtgaagcaatgaccatggttgcagcccaagtcatggggaaccatgttgctgtcactgtcggaggcagcaatggacattttgagttgaatgttttcaagccaatgatgattaaaaatgtgttacactcagccaggctgctgggggatgcttcagtttcctttacagaaaactgygtggtgggaatccaggccaatacagaaaggatcaacaagctgatgaatgagtctctaatgttggtgacagctctcaatcctcatatagggtatgacaaggcagcaaagattgctaagacagcacacaaaaatggatcaaccttaaaggaaactgctatcgaacttggctatctcacagcagagcagtttgacgaatrggtaaaacctaaggacatgctgggtccaaagtgatttacataaatttataatgaaaataaacatgtataaaatttaaaaaaacagactcccatttcttaaaaacggataagtttgaaaggaaactgctrttgaacttaagcatctctagcagagcaatttgatcagtatataaaaccctaggatgtgctaggtctaagatggattaaacaagtataaaataaaatacatttataaaataaaaaggaaaacagacttaaattttctcctatgttaattgacttgtattatagttgaatctatgat

SEQ ID NO: 7086 - DNA, 1768 bp, Homo sapiens
aagctccctcagcaccatgtaccgagcacttcggctcctcgcgcgctcgcgtcccctcgtgcgggctcyagccgcagccttagcttcggctcccggcttgggtggcgcggccgtgccctcgttttggcctccgaacgcggctcgaatggtgccaaatgataagtattatggcgcccagaccgtgagatctacgatgaactttaagattggaggtgtgacagaacgcatgccaaccccagttattaaagcttttggcatcttgaagcgagcggcygctgaagtaamccaggattatggtcttgatccaaagattgctaatgcaataatgaaggcagcagatgaggtagctgaaggtaaattaaatgatcattttcctctcgtggtatggcagactggatcaggaactcagacaaatatgaatgtaaatgaagtcattagcaatagagcaattgaaatgttaggaggtgaacttggcagcaagatacctgtgcatcccaacgatcrtgttaataaaagccrgagctcaaatgatacttttcccacagcaatgcacattgctgctgcaatagaagttcatgaagtactgttaccaggactacagaagttacatgatgctcttgatgcaaaatccaaagagtttgcacagatcatcargattggacrtactcatactcaggatgctgttccacttactcttgggcaggaatttagtggttatgttcaacaagtaaaatatgcaatgacaakaataaaagctgccatgccaagaatctatgagctcgcagctggaggcactgctgttggtacagktttaaatactagaattggctttgcagaaaaggttgctgcaaaagtggctgcacttacaggcttgccttttgtcactgctccraataaatttgaagctctggctgctcatgacgctctggttgagctcagtggagccatgaayactactgcctgcagtctgatgaagatagcaaatgatattygatttttgggttctggtcctcggtcaggtctgggagaattgatcttgcctgaaaatgaaccaggaagcagtatcatgccaggcaaggtgaaccctactcagtgtgaagcaatgaccatggttgcagcccaagtcatggggaaccatgttgctgtcactgtcggaggcagcaatggacattttgagttgaatgttttcaagccaatgatgattaaaaatgtgttacactcagccaggctgctgggggatgcttcagtttcctttacagaaaactgygtggtgggaatccaggccaatacagaaaggatcaacaagctgatgaatgagtctctaatgttggtgacagctctcaatcctcatatagggtatgacaaggcagcaaagattgctaagacagcacacaaaaatggatcaaccttaaaggaaactgctatcgaacttggctatctcacagcagagcagtttgacgaatrggtaaaacctaaggacatgctgggtccaaagtgatttacataaatttataatgaaaataaacatgtataaaatttaaaaaaacagactcccatttcttaaaaacggataagtttgaaaggaaactgctrttgaacttaagcatctctagcagagcaatttgatcagtatataaaaccctaggatgtgctaggtctaagatggattaaacaagtataaaataaaatacatttataaaataaaaaggaaaacagacttaaattttctcctatgttaattgacttgtattatagttgaatctatgat

SEQ ID NO: 7087 - DNA, 1916 bp, Homo sapiens
gggccgaggccggggcgttttgaggtaacttcgctgctgctggcgcgcaggcccccagccccggggcgctgccctcaaggacagtgccggcgtgggcggagggtgctgggagaggggcagctcccgcaccgtcctgccccatagctgggccttgctggccggacactggccgcctgtgcatctagtggtttctgaactgtggtttgtttcgccaaggggcactgcactgctttcaggccctccaggcaagcyaaaattccttccggatagaatatgatacctttggtgaactaaaggtgccaaatgataagtattatggcgcccagaccgtgagatctacgatgaactttaagattggaggtgtgacagaacgcatgccaaccccagttattaaagcttttggcatcttgaagcgagcggcygctgaagtaamccaggattatggtcttgatccaaagattgctaatgcaataatgaaggcagcagatgaggtagctgaaggtaaattaaatgatcattttcctctcgtggtatggcagactggatcaggaactcagacaaatatgaatgtaaatgaagtcattagcaatagagcaattgaaatgttaggaggtgaacttggcagcaagatacctgtgcatcccaacgatcrtgttaataaaagccrgagctcaaatgatacttttcccacagcaatgcacattgctgctgcaatagaagttcatgaagtactgttaccaggactacagaagttacatgatgctcttgatgcaaaatccaaagagtttgcacagatcatcargattggacrtactcatactcaggatgctgttccacttactcttgggcaggaatttagtggttatgttcaacaagtaaaatatgcaatgacaakaataaaagctgccatgccaagaatctatgagctcgcagctggaggcactgctgttggtacagktttaaatactagaattggctttgcagaaaaggttgctgcaaaagtggctgcacttacaggcttgccttttgtcactgctccraataaatttgaagctctggctgctcatgacgctctggttgagctcagtggagccatgaayactactgcctgcagtctgatgaagatagcaaatgatattygatttttgggttctggtcctcggtcaggtctgggagaattgatcttgcctgaaaatgaaccaggaagcagtatcatgccaggcaaggtgaaccctactcagtgtgaagcaatgaccatggttgcagcccaagtcatggggaaccatgttgctgtcactgtcggaggcagcaatggacattttgagttgaatgttttcaagccaatgatgattaaaaatgtgttacactcagccaggctgctgggggatgcttcagtttcctttacagaaaactgygtggtgggaatccaggccaatacagaaaggatcaacaagctgatgaatgagtctctaatgttggtgacagctctcaatcctcatatagggtatgacaaggcagcaaagattgctaagacagcacacaaaaatggatcaaccttaaaggaaactgctatcgaacttggctatctcacagcagagcagtttgacgaatrggtaaaacctaaggacatgctgggtccaaagtgatttacataaatttataatgaaaataaacatgtataaaatttaaaaaaacagactcccatttcttaaaaacggataagtttgaaaggaaactgctrttgaacttaagcatctctagcagagcaatttgatcagtatataaaaccctaggatgtgctaggtctaagatggattaaacaagtataaaataaaatacatttataaaataaaaaggaaaacagacttaaattttctcctatgttaattgacttgtattatagttgaatctatgat

SEQ ID NO: 7088 - DNA, 5471 bp, Homo sapiens
atgaggaccctttagatgaaatttttgattggtcttaaccacaaaaatgatccacagatgaattatgaaaccatgtcatcttactctctaagggaggtataagatgtttttggacttcagatgagamgggctccattcatggttaatcatgaatgaaaacgaaactaagaatatatgctgtagaaaaagaagaagaaaagccacaagactgcttaaaaatttctgtgtcttacacagaagatagaaaaaatagagtgtctccaattggatggattttttaaaaaatttggttattgtaatggatttattttttcttagagctgagctgattgtactttggccaactaatgggttaatactgtcaagggaaattagccctgactaaacattgccgctggctcatgaatgcactagscttggggcagtataaaaactcagagaaatcagtgtgtaggagacacagaaatcagtgtcactcagtgacagaagcaacaataattgtgaaaaatacttcagcagttatggactcatctgtcattcaaaggaaaaaagtagctgtcattggtggyggcttggttggrtcattacaagcatgctttcttgcaaagaggaatttccagattgatgtatatgaagctagggaagatactcgagtggctaccttcacacgtggaagaagcattaacttagccctttctcatagaggacgacaagccttgaaagctgttggcctggaagatcagattgtatcccaaggtattcccatgagagcaagaatgatccactctctttcaggaaaaaagtctgcaattccctatgggacaaagtctcagtatattctttctgtaagcagagaaaatctaaacaaggatctattgactgctgctgagaaataccccaatgtgaaaatgcactttaaccacaggctgttgaaatgtaatccagaggaaggaatgatcacagtgcttggatctgacaaagttcccaaagatgtcacttgtgacctcattgtaggatgtgatggagcctattcaactgtcagatctcacctgatgaagaaacctcgctttgattacagtcagcagtacattcctcatgggtacatggagttgactattccacctaagaacggagattatgccatggaacctaattatctgcatatttggcctagaaatacctttatgatgattgcacttcctaacatgaacaaatcattcacatgtactttgttcatgccctttgaagagtttgaaaaacttctaaccagtaatgatgtggtagatttcttccagaaatactttccggatgccatccctctaattggagagaaactcctagtgcaagatttcttcctgttgcctgcccagcccatgatatctgtaaagtgctcttcatttcactttaaatctcactgtgtactgctgggagatgcagctcatgctatagtgccgttttttgggcaaggaatgaatgcgggctttgaagactgcttggtatttgatgagttaatggataaattcagtaacgaccttagtttgtgtcttcctgtgttctcaagattgagaatcccagatgatcacgcgatttcagacctatccatgtacaattacatagagatgcgagcacatgtcaactcaagctggttcatttttcagaagaacatggagagatttcttcatgcgattatgccatcgacctttatccctctctatacaatggtcactttttccagaataagataccatgaggctgtgcagcgttggcattggcaaaaaaaggtgataaacaaaggactctttttcttgggatcactgatagccatcagcagtacctacctacttatacactacatgtcaccacgatctttcctcygcttgagaagaccatggaactggatagctcacttccggaatacaacatgtttccccgcaaaggccgtggactccctagaacaaatttccaatctcattagcaggygatagaaaggttttgtggtagcaaatgcatgatttctctgtgaccaaaattaagcatgaaaaaaatgtttccattgccatatttgattcactagtggaagatagtgttctgctyataattaaactgaatgtagagtatctctgtatgttaattgcaattactggttggggggtgcattttaaaagatgaaacatgcagcttccctacattacacacactcaggttgagtcattctaactataaaagtgcaatgactaagatccttcacttctctgaaagtaaggccctagatgcctcagggaagacagtaatcatgccttttctttaaaagacacaataggactcgcaacagcattgactcaacacctaggactaaaaatcacaacttaactagcatgttaactgcacttttcattacgtgaatggaacttacctaaccacagggctcagacttactagataaaaccagaartggaaataaggaattcaggggagttccagagacttacaaaatgaactcattttattttcccaccttcaaatataagtattatcatctatctgtttatcctatctatctatctatcatctatctatctatctatctatctatctatctatctatctatctayatctatctatctatctctatttatttatgtatttagagatcaggtctcactctgttgaccaggctggagtgcagtggtgagatctgggttcactgcaacctctgcctcctgggctcaagcaatcctcccacttcagcctcccaaatagctggggctaccatggtatttttcagtagagaccgggtcttgccatgctgcccaggccagtctcaaactcctggcctcatgtgatctgcccacctcagcctcccaaagtacagggattagagttgtgagccaccgctgccagcccagagttaccctctaaagataagaaaaaggctattaatatcatactaagtgaaggacaggaaagggttttattcataaattaaatgtctacatgtgccagaatggaaaggaaacaaggggagacaacttttatagaaatacaaagccattactttattcaatttcagaccctcagaagcaatttactaatttattcttcgactacatactgcagcagaaccagcaatacacttgatttttaaaagcacatttagtgaaatgttttctttggttcatccttctttaacaggctgctgagtcactcagaaatccttcaaacatgattaattatgaagatgaaacactagagtcatataagaaataaaaattgggcaataaaataaaatgattcagtgtttcttttctatattgtcaatgaaaaccttgagttctaataatccatgttcagtttgtagggaaagaaaaaataatttttccttctacccactttaggttccttggctggggcccctataacaaaagacagattgacaagagaaaaacaaacataaatttattagcgggtatatgtaatatatatgtgggaaatacaggggaatgagcaaatctcaaagagctggcgtcttagaactccctggcttatatagcatcgacaaagaacagtaaatttttagagaaacaacaaaacaaagaaaaagagctttgagtctgtaggggcagcaatttgggggaagcaaatatatgggagtttgccttgtagattcctctggtgctggtctccaggctgacaaggattcaaagttgtytctgaaactcctctttgtcatactgcacatataaaacgtcttttgtttccaacaagaggattttctttttcattctagaattatctccttgataacttgatcagatataggacatgacactgaatagagtccaacagtacaaaaaaaattcagtatgttctagctacttcacacatgtgtacgcgacagttatttttacagtaaggtattttcgagaaaaatgcattacgtgttttggaaaatagagtaatttaaaaaatatatttgaaatgaaaatctccaacacattagaagatgatgatgttagatgcccatcgtgtgccacaagtggttttttcattatgtaaagcacccgttgaattaaaakaatttgtttttgttcaacctcttcctgaggcccaagagcatatgggcaattcggatttcctgctggaccacaaggttctgttgatattacatagaacgggtattccagacacttcttatgatgaaagtccaaaagtggcatccaatttaaggccccatctttcgttgccattcttcattcctacaaaggacgaacttggattacatcaactttggacccattggttttgtcgctgtcgtcaactgacagtgattcaycactggtgatgataaaaatgatggaagaagagttgaaagtcacttttttctttggcctgtccccatctttctgtgacatcacaatgggtctgatctgcatttcacttccagctgctggtaggtctttagcaggcctctggcacctcagcagtcggaggcacagaagctgcaaaagggatcttcgaaactgggcagagaaaaaataaagtggaatattaagtaaaagttgggcactaatctggattaacattcgaggaaatcagttgagctgaatttaagttgttttttgtttgttagcaggtgtggatgtggggttatgtggtcatgctcagatctacctaaatcaccccagagctttatgtcttttattcattctaawtcttattaaccggaatatgtaggaccatttcaataccttgtaatcctccaagcttcaatctgcacacactttctatgagggcaggtacaactattaagagattttgaacattaagtyagtccacaaatattcagtgggcatctactaggtgacagccactgtgctataattagagactttttactataagcatcaaaaacagataaggctcttcctggcagagtttacagcctggtgtacttgctaatgtctctttaattaggtgaagaattttttttttctatcgaaattactaatcagttggggaaaaaaatactatagcagacagcactaatgtcatcaacaaacattgttcttctccgtgtcctgggtacaacatcsaataatatttcttggcctcctttccgcttctcctctctgctgttcctctctacaagaacctgggrggccaacgcctaaagatcataatatcacacaatggaaggaacctagattcctaaatgactgcataggacagatcccatctcctccacccaatacattattagactgaactgtgacctgaaatgagcaataaactctgtattaattcactgaaatgttggggttgcttgttatagtagtcggtccatcatgaccagtaaaacataaatcaaaagttaatgtaattgttatcccattatttagagcgaaataaatgttgaatatrtggactttctcagattaggaaataccaattaaaaatataataaatagct

SEQ ID NO: 7089 - DNA, 5432 bp, Homo sapiens
atgaggaccctttagatgaaatttttgattggtcttaaccacaaaaatgatccacagatgaattatgaaaccatgtcatcttactctctaagggaggtataagatgtttttggacttcagatgagamgggctccattcatggttaatcatgaatgaaaacgaaactaagaatatatgctgtagaaaaagaagaagaaaagccacaagactgcttaaaaatttctgtgtcttacacagaagatagaaaaaatagagtgtctccaattggatggattttttaaaaaatttggttattgtaatggatttattttttcttagagctgagctgattgtactttggccaactaatgggttaatactgtcaagggaaattagccctgactaaacattgccgctggctcatgaatgcactagscttggggcagtataaaaactcagagaaatcagtgtgtaggagacacagaaatcagtgtcactcagtgacagaagcaacaataattgtgaaaaatacttcagcagttatggactcatctgtcattcaaaggaaaaaagtagctgtcattggtggyggcttggttggrtcattacaagcatgctttcttgcaaagaggaatttccagattgatgtatatgaagctagggaagatactcgagtggctaccttcacacgtggaagaagcattaacttagccctttctcatagaggacgacaagccttgaaagctgttggcctggaagatcagattgtatcccaaggtattcccatgagagcaagaatgatccactctctttcaggaaaaaagtctgcaattccctatgggacaaagtctcagtatattctttctgtaagcagagaaaatctaaacaaggatctattgactgctgctgagaaataccccaatgtgaaaatgcactttaaccacaggctgttgaaatgtaatccagaggaaggaatgatcacagtgcttggatctgacaaagttcccaaagatgtcacttgtgacctcattgtaggatgtgatggagcctattcaactgtcagatctcacctgatgaagaaacctcgctttgattacagtcagcagtacattcctcatgggtacatggagttgactattccacctaagaacggagattatgccatggaacctaattatctgcatatttggcctagaaatacctttatgatgattgcacttcctaacatgaacaaatcattcacatgtactttgttcatgccctttgaagagtttgaaaaacttctaaccagtaatgatgtggtagatttcttccagaaatactttccggatgccatccctctaattggagagaaactcctagtgcaagatttcttcctgttgcctgcccagcccatgatatctgtaaagtgctcttcatttcactttaaatctcactgtgtactgctgggagatgcagctcatgctatagtgccgttttttgggcaaggaatgaatgcgggctttgaagactgcttggtatttgatgagttaatggataaattcagtaacgaccttagtttgtgtcttcctgtgttctcaagattgagaatcccagatgatcacgcgatttcagacctatccatgtacaattacatagagaagaacatggagagatttcttcatgcgattatgccatcgacctttatccctctctatacaatggtcactttttccagaataagataccatgaggctgtgcagcgttggcattggcaaaaaaaggtgataaacaaaggactctttttcttgggatcactgatagccatcagcagtacctacctacttatacactacatgtcaccacgatctttcctcygcttgagaagaccatggaactggatagctcacttccggaatacaacatgtttccccgcaaaggccgtggactccctagaacaaatttccaatctcattagcaggygatagaaaggttttgtggtagcaaatgcatgatttctctgtgaccaaaattaagcatgaaaaaaatgtttccattgccatatttgattcactagtggaagatagtgttctgctyataattaaactgaatgtagagtatctctgtatgttaattgcaattactggttggggggtgcattttaaaagatgaaacatgcagcttccctacattacacacactcaggttgagtcattctaactataaaagtgcaatgactaagatccttcacttctctgaaagtaaggccctagatgcctcagggaagacagtaatcatgccttttctttaaaagacacaataggactcgcaacagcattgactcaacacctaggactaaaaatcacaacttaactagcatgttaactgcacttttcattacgtgaatggaacttacctaaccacagggctcagacttactagataaaaccagaartggaaataaggaattcaggggagttccagagacttacaaaatgaactcattttattttcccaccttcaaatataagtattatcatctatctgtttatcctatctatctatctatcatctatctatctatctatctatctatctatctatctatctatctayatctatctatctatctctatttatttatgtatttagagatcaggtctcactctgttgaccaggctggagtgcagtggtgagatctgggttcactgcaacctctgcctcctgggctcaagcaatcctcccacttcagcctcccaaatagctggggctaccatggtatttttcagtagagaccgggtcttgccatgctgcccaggccagtctcaaactcctggcctcatgtgatctgcccacctcagcctcccaaagtacagggattagagttgtgagccaccgctgccagcccagagttaccctctaaagataagaaaaaggctattaatatcatactaagtgaaggacaggaaagggttttattcataaattaaatgtctacatgtgccagaatggaaaggaaacaaggggagacaacttttatagaaatacaaagccattactttattcaatttcagaccctcagaagcaatttactaatttattcttcgactacatactgcagcagaaccagcaatacacttgatttttaaaagcacatttagtgaaatgttttctttggttcatccttctttaacaggctgctgagtcactcagaaatccttcaaacatgattaattatgaagatgaaacactagagtcatataagaaataaaaattgggcaataaaataaaatgattcagtgtttcttttctatattgtcaatgaaaaccttgagttctaataatccatgttcagtttgtagggaaagaaaaaataatttttccttctacccactttaggttccttggctggggcccctataacaaaagacagattgacaagagaaaaacaaacataaatttattagcgggtatatgtaatatatatgtgggaaatacaggggaatgagcaaatctcaaagagctggcgtcttagaactccctggcttatatagcatcgacaaagaacagtaaatttttagagaaacaacaaaacaaagaaaaagagctttgagtctgtaggggcagcaatttgggggaagcaaatatatgggagtttgccttgtagattcctctggtgctggtctccaggctgacaaggattcaaagttgtytctgaaactcctctttgtcatactgcacatataaaacgtcttttgtttccaacaagaggattttctttttcattctagaattatctccttgataacttgatcagatataggacatgacactgaatagagtccaacagtacaaaaaaaattcagtatgttctagctacttcacacatgtgtacgcgacagttatttttacagtaaggtattttcgagaaaaatgcattacgtgttttggaaaatagagtaatttaaaaaatatatttgaaatgaaaatctccaacacattagaagatgatgatgttagatgcccatcgtgtgccacaagtggttttttcattatgtaaagcacccgttgaattaaaakaatttgtttttgttcaacctcttcctgaggcccaagagcatatgggcaattcggatttcctgctggaccacaaggttctgttgatattacatagaacgggtattccagacacttcttatgatgaaagtccaaaagtggcatccaatttaaggccccatctttcgttgccattcttcattcctacaaaggacgaacttggattacatcaactttggacccattggttttgtcgctgtcgtcaactgacagtgattcaycactggtgatgataaaaatgatggaagaagagttgaaagtcacttttttctttggcctgtccccatctttctgtgacatcacaatgggtctgatctgcatttcacttccagctgctggtaggtctttagcaggcctctggcacctcagcagtcggaggcacagaagctgcaaaagggatcttcgaaactgggcagagaaaaaataaagtggaatattaagtaaaagttgggcactaatctggattaacattcgaggaaatcagttgagctgaatttaagttgttttttgtttgttagcaggtgtggatgtggggttatgtggtcatgctcagatctacctaaatcaccccagagctttatgtcttttattcattctaawtcttattaaccggaatatgtaggaccatttcaataccttgtaatcctccaagcttcaatctgcacacactttctatgagggcaggtacaactattaagagattttgaacattaagtyagtccacaaatattcagtgggcatctactaggtgacagccactgtgctataattagagactttttactataagcatcaaaaacagataaggctcttcctggcagagtttacagcctggtgtacttgctaatgtctctttaattaggtgaagaattttttttttctatcgaaattactaatcagttggggaaaaaaatactatagcagacagcactaatgtcatcaacaaacattgttcttctccgtgtcctgggtacaacatcsaataatatttcttggcctcctttccgcttctcctctctgctgttcctctctacaagaacctgggrggccaacgcctaaagatcataatatcacacaatggaaggaacctagattcctaaatgactgcataggacagatcccatctcctccacccaatacattattagactgaactgtgacctgaaatgagcaataaactctgtattaattcactgaaatgttggggttgcttgttatagtagtcggtccatcatgaccagtaaaacataaatcaaaagttaatgtaattgttatcccattatttagagcgaaataaatgttgaatatrtggactttctcagattaggaaataccaattaaaaatataataaatagct

SEQ ID NO: 7090 - DNA, 5488 bp, Homo sapiens
atgaggaccctttagatgaaatttttgattggtcttaaccacaaaaatgatccacagatgaattatgaaaccatgtcatcttactctctaagggaggtataagatgtttttggacttcagatgagamgggctccattcatggttaatcatgaatgaaaacgaaactaagaatatatgctgtagaaaaagaagaagaaaagccacaagactgcttaaaaatttctgtgtcttacacagaagatagaaaaaatagagtgtctccaattggatggattttttaaaaaatttggttattgtaatggatttattttttcttagagctgagctgattgtactttggccaactaatgggttaatactgtcaagggaaattagccctgactaaacattgccgctggctcatgaatgcactagscttggggcagtataaaaactcagagaaatcagtgtgtaggagacacagaaatcagtgtcactcagtgacagaagcaacaataattgtgaaaaatacttcagcagttatggactcatctgtcattcaaaggaaaaaagtagctgtcattggtggyggcttggttggrtcattacaagcatgctttcttgcaaagaggaatttccagattgatgtatatgaagctagggaagatactcgagtggctaccttcacacgtggaagaagcattaacttagccctttctcatagaggacgacaagccttgaaagctgttggcctggaagatcagattgtatcccaaggtattcccatgagagcaagaatgatccactctctttcaggaaaaaagtctgcaattccctatgggacaaagtctcagtatattctttctgtaagcagagaaaatctaaacaaggatctattgactgctgctgagaaataccccaatgtgaaaatgcactttaaccacaggctgttgaaatgtaatccagaggaaggaatgatcacagtgcttggatctgacaaagttcccaaagatgtcacttgtgacctcattgtaggatgtgatggagcctattcaactgtcagatctcacctgatgaagaaacctcgctttgattacagtcagcagtacattcctcatgggtacatggagttgactattccacctaagaacggagattatgccatggaacctaattatctgcatatttggcctagaaatacctttatgatgattgcacttcctaacatgaacaaatcattcacatgtactttgttcatgccctttgaagagtttgaaaaacttctaaccagtaatgatgtggtagatttcttccagaaatactttccggatgccatccctctaattggagagaaactcctagtgcaagatttcttcctgttgcctgcccagcccatgatatctgtaaagtgctcttcatttcactttaaatctcactgtgtactgctgggagatgcagctcatgctatagtgccgttttttgggcaaggaatgaatgcgggctttgaagactgcttggtatttgatgagttaatggataaattcagtaacgaccttagtttgtgtcttcctgtgttctcaagattgagaatcccagatgatcacgcgatttcagacctatccatgtacaattacatagagatgcgagcacatgtcaactcaagctggttcatttttcagaagaacatggagagatttcttcatgcgattatgccatcgacctttatccctctctatacaatggtcactttttccagaataagataccatgaggctgtgcagcgttggcattggcaaaaaaaggtgataaacaaaggactctttttcttgggatcactgatagccatcagcagtacctacctacttatacactacatgtcaccacgatctttcctcygcttgagaagaccatggaactggatagctcacttccggaatacaacatgtttccccgcaaaggccgtggactccctagaacaaatttccaatctcattagcaggygatagaaaggttttgtggtagcaaatgcatgatttctctgtgaccaaaattaagcatgaaaaaaatgtttccattgccatatttgattcactagtggaagatagtgttctgctyataattaaactgaatgtagagtatctctgtatgttaattgcaattactggttggggggtgcattttaaaagatgaaacatgcagcttccctacattacacacactcaggttgagtcattctaactataaaagtgcaatgactaagatccttcacttctctgaaagtaaggccctagatgcctcagggaagacagtaatcatgccttttctttaaaagacacaataggactcgcaacagcattgactcaacacctaggactaaaaatcacaacttaactagcatgttaactgcacttttcattacgtgaatggaacttacctaaccacagggctcagacttactagataaaaccagaartggaaataaggaattcaggggagttccagagacttacaaaatgaactcattttattttcccaccttcaaatataagtattatcatctatctgtttatcgtctatctatctatcatctatctatctatctatcatctatctatctatctatctatctatctatctatctatctatctayatctatctatctatctctatttatttatgtatttagagatcaggtctcactctgttgaccaggctggagtgcagtggtgagatctgggttcactgcaacctctgcctcctgggctcaagcaatcctcccacttcagcctcccaaatagctggggctaccatggtatttttcagtagagaccgggtcttgccatgctgcccaggccagtctcaaactcctggcctcatgtgatctgcccacctcagcctcccaaagtacagggattagagttgtgagccaccgctgccagcccagagttaccctctaaagataagaaaaaggctattaatatcatactaagtgaaggacaggaaagggttttattcataaattaaatgtctacatgtgccagaatggaaaggaaacaaggggagacaacttttatagaaatacaaagccattactttattcaatttcagaccctcagaagcaatttactaatttattcttcgactacatactgcagcagaaccagcaatacacttgatttttaaaagcacatttagtgaaatgttttctttggttcatccttctttaacaggctgctgagtcactcagaaatccttcaaacatgattaattatgaagatgaaacactagagtcatataagaaataaaaattgggcaataaaataaaatgattcagtgtttcttttctatattgtcaatgaaaaccttgagttctaataatccatgttcagtttgtagggaaagaaaaaataatttttccttctacccactttaggttccttggctggggcccctataacaaaagacagattgacaagagaaaaacaaacataaatttattagcgggtatatgtaatatatatgtgggaaatacaggggaatgagcaaatctcaaagagctggcgtcttagaactccctggcttatatagcatcgacaaagaacagtaaatttttagagaaacaacaaaacaaagaaaaagagctttgagtctgtaggggcagcaatttgggggaagcaaatatatgggagtttgccttgtagattcctctggtgctggtctccaggctgacaaggattcaaagttgtytctgaaactcctctttgtcatactgcacatataaaacgtcttttgtttccaacaagaggattttctttttcattctagaattatctccttgataacttgatcagatataggacatgacactgaatagagtccaacagtacaaaaaaaattcagtatgttctagctacttcacacatgtgtacgcgacagttatttttacagtaaggtattttcgagaaaaatgcattacgtgttttggaaaatagagtaatttaaaaaatatatttgaaatgaaaatctccaacacattagaagatgatgatgttagatgcccatcgtgtgccacaagtggttttttcattatgtaaagcacccgttgaattaaaakaatttgtttttgttcaacctcttcctgaggcccaagagcatatgggcaattcggatttcctgctggaccacaaggttctgttgatattacatagaacgggtattccagacacttcttatgatgaaagtccaaaagtggcatccaatttaaggccccatctttcgttgccattcttcattcctacaaaggacgaacttggattacatcaactttggacccattggttttgtcgctgtcgtcaactgacagtgattcaycactggtgatgataaaaatgatggaagaagagttgaaagtcacttttttctttggcctgtccccatctttctgtgacatcacaatgggtctgatctgcatttcacttccagctgctggtaggtctttagcaggcctctggcacctcagcagtcggaggcacagaagctgcaaaagggatcttcgaaactgggcagagaaaaaataaagtggaatattaagtaaaagttgggcactaatctggattaacattcgaggaaatcagttgagctgaatttaagttgttttttgtttgttagcaggtgtggatgtggggttatgtggtcatgctcagatctacctaaatcaccccagagctttatgtcttttattcattctaawtcttattaaccggaatatgtaggaccatttcaataccttgtaatcctccaagcttcaatctgcacacactttctatgagggcaggtacaactattaagagattttgaacattaagtyagtccacaaatattcagtgggcatctactaggtgacagccactgtgctataattagagactttttactataagcatcaaaaacagataaggctcttcctggcagagtttacagcctggtgtacttgctaatgtctctttaattaggtgaagaattttttttttctatcgaaattactaatcagttggggaaaaaaatactatagcagacagcactaatgtcatcaacaaacattgttcttctccgtgtcctgggtacaacatcsaataatatttcttggcctcctttccgcttctcctctctgctgttcctctctacaagaacctgggrggccaacgcctaaagatcataatatcacacaatggaaggaacctagattcctaaatgactgcataggacagatcccatctcctccacccaatacattattagactgaactgtgacctgaaatgagcaataaactctgtattaattcactgaaatgttggggttgcttgttatagtagtcggtccatcatgaccagtaaaacataaatcaaaagttaatgtaattgttatcccattatttagagcgaaataaatgttgaatatrtggactttctcagattaggaaataccaattaaaaatataataaatagct

SEQ ID NO: 7091 - DNA, 783 bp, Homo sapiens
atgcgcaaacagcacatccggtgtggtcgacgggtcctccaagagtttggggcgcggacyggagtaycttgcgtgcagttatgtcggcgtcggtagtgtctgtcatttcgcggttcttagaagagtacttgagctccactcckcagcgtctgaagttgctggacgcgtacctgctgtatatactgctgaccggggcgctgcagttcggttactgtctcctcgtggggaccttccccttcaactyttttctctcgggcttcatctcttgtgtggggagtttcatcctagcggtttgcctgagaatacagatcaacccacagaacaaagcggatttccaaggcatctccccagagcgagcctttgctgattttctctttgccagcaccatcctgcaccttgttgtcatgaactttgttggctramtcattctcatttacttaattgaggagtaggagactaaaagaatatgattagaacaaactgattaaatggcactgtcttctgcccaggtgaaatagactgaagtcacgctaacttttctcagttcactctttsaatttcctggataagagttctggagatggcagcttrttggacacatggattttcttcagatttgcacttactgctagctctgctttttatgcaggagaaaagcccagagttcactgtgtgtcagaacaactttctaacaaacatttattaatccagcctctgcctttcattaaatgtaaccttttgcyttccaaattaaagaactccatgccactcctccatatgcct

SEQ ID NO: 7092 - DNA, 711 bp, Homo sapiens
atgcgcaaacagcacatccggtgtggtcgacgggtcctccaagagtttggggcgcggacyggagtaycttgcgtgcagttatgtcggcgtcggtagtgtctgtcatttcgcggttcttagaagagtacttgagctccactcckcagcgtctgaagttgctggacgcgtacctgctgtatatactgctgaccggggcgctgcagttcggttactgtctcctcgtggggaccttccccttcaactyttttctctcgggcttcatctcttgtgtggggagtttcatcctagcggtttgcctgagaatacagatcaacccacagaacaaagcggatttccaaggcatctccccagagcgagcctttgctgattttctctttgccagcaccatcctgcaccttgttgtcatgaactttgttggctramtcattctcatttacttaattgaggagtaggagactaaaagaatgttcactctttsaatttcctggataagagttctggagatggcagcttrttggacacatggattttcttcagatttgcacttactgctagctctgctttttatgcaggagaaaagcccagagttcactgtgtgtcagaacaactttctaacaaacatttattaatccagcctctgcctttcattaaatgtaaccttttgcyttccaaattaaagaactccatgccactcctccatatgcctctggc

SEQ ID NO: 7093 - DNA, 2203 bp, Homo sapiens
ctagtctttcagccttcaggctgtttttggcttgaagctctcttggcctcctagtttctacctaatcatgtccctggtggaggccatcagcctctggaatgaaggggtgctggcagcggacaagaaggactggaagggagccctggatgccttcagtgccgtccaggacccccactcccggatttgcttcaacattggctgcatgtacactatcctgaagaacatgactgaagcagagaaggcctttaccagaagcattaacygagacaagcacttggcagtggcttacttccaacgagggatgctctactaccagacagagaaatatgatttggctatcaaagaccttaaagaagccttgattyagcttygagggaaccagctgatagactataagatcctggggctccagttcaagctgtttgcctgtgaggtgttatataacattgytttcatgtatgccaagaaggaggaatggaaaaaagctgaagaacagttagcattggccacgagcatgaagtctgagcccagacattccaaaatcgacaaggcgatggagtgtgtctggaagcagaagctatatgagccagtggtgatccctgtgggcargctgtttcgaccaaatgagagacaagtggctcagctggccaagaaggattacctaggcaaggcgacggtcgtggcatctgtggtggatcaagacagtttctctgggtttgcccctctgcaaccacaggcagctgagcctccacccagaccgaaaaccccagagatcttcagggctctggaaggggaggctcaccgtgtgctatttgggtttgtgcctgagacaaaagaagagctccaggtcatgccagggaacattgtctttgtcttgaagaagggcaatgataactgggccacggtcatgttcaacgggcagaaggggcttgttccctgcaactaccttgaaccagttgagctgcggatccaccctcagcagcagccccaggaggaaagctctccgcagtccgacatcccagctcctcctagttccaaagcccctggaagaccccagctgtcaccaggccagaaacaaaaagaagagcctaaggaagtgaagctcagtgttcccatgccctacacactcaaggtgcactacaagtacacggtagtcatgaagactcagcccgggctcccctacagccaggtccgggacatggtgtctaagaaactggagctccggctggaacacactaagctgagctatyggcctcgggacagcaatgagctggtgcccctttcagaagacagcatgaaggatgcctggggccaggtgaaaawctactgcctgactctgtggtgtgagaacacagtgggtgaccaaggctttccagatgaacccaaggaaagtgaaaaagctgatgctaataaccagacaacagaacctcagcttaagaaaggcagccaagtggaggcactcttcagttatgaggctacccaaccagaggacctggagtttcaggaaggggatataatcctggtgttatcaaaggtgaatgaagaatggctggaaggggagtgcaaagggaaggtgggcattttccccaaagtttttgttgaagactgcgcaactacagatttggaaagcactcggagagaagtctaggatgtttcacaaactacaaagctgaagaaaatgaagccctattacttgtttgtaagatttagcacccttctgctgtatactgtactgagacattacagtttggaagtgttaactatttattccctgttaaaatttaacctactagacaatgatgtgagtacccaggatgatttcctggggcacagtgggtgaggagatggggacaggtgaatggaggagttaggggagaggaaaagtggatggaagtgtctggaaagggcacgagagagtcttccaggtactgatcctgtttcttgctctgagtgctagctagccagctgtgttcacactgtaaacattcatcaagctgtacatttggtgcacttttctgtgtcataccacaataaaaaaaaacctakcatcttacaaaaacaagacacccaagtccaggcccaaggagtaagtacaaatattcctgtttctgaaccattactgtaattggctcttaaggcttgaagtaaccttataggttactcataaggcatatacaaataaacttgtttgttttcttttttc

SEQ ID NO: 7094 - DNA, 689 bp, Homo sapiens
ctagtctttcagccttcaggctgtttttggcttgaagctctcttggcctcctagtttctacctaatcatgtccctggtggaggccatcagcctctggaatgaaggggtgctggcagcggacaagaaggactggaagggagccctggatgccttcagtgccgtccaggacccccactcccggatttgcttcaacattggctgcatgtacactatcctgaagaacatgactgaagcagagaaggcctttaccagaagcattaacygagacaagcacttggcagtggcttacttccaacgagggatgctctactaccagacagagaaatatgatttggctatcaaagaccttaaagaagccttgattyagcttygagggaaccagctgatagactataagatcctggggctccagttcaagctgtttgcctgtgaggtgttatataacattgytttcatgtatgccaagaaggaggaatggaaaaaagctgaagaacagttagcattggccacgagcatgaagtctgagcccagacattccaaaatcgacaaggcgatggagtgtgtctggaagcagaagctatatgagccagtggtgatccctgtgggcargctgtttcgaccaaatgagagacaagtggctcagctggccaagaaggattacctaggcaaggcgacggtaggtgggattg

SEQ ID NO: 7095 - DNA, 1028 bp, Homo sapiens
aacggtgcgctggagcgagtgagcagcgatacctaggrcggaagtgctctcggcggaagtgatcgctgtgtgaatcgtgggtgggatggccgcgggccgcctctttctaagtcggcttcgagcacccttcagttccatggccaagagcccactcgagggcgtttcctcctccagaggcctgcacgcggggcgcgggccccgaaggctctccatcgaaggcaacattgctgtgggaaagtccacrtttgtgaagttactcacgaaaacttacccagaatggcacrtagctacagaacctgtagcaacatggcagaatatccaggctgctggcacccaaaaagcctgcactgcccaaagtcttggaaacttgctggatatgatgtaccgggagccagcacgatggtcctacacattccagacattttcctttttgagccgcctgaaagtacagctggagcccttccctgagaaactcttacaggccaggaagccagtacagatctttgaraggtctgtgtacagtgacaggtatatctttgcaaagaatctttttgaaaatggttccctcagtgacatcgagtggcatatctatcaggactggcattcttttctcctgtgggagtttgccagccggatcacattacatggcttcatctacctccaggcttctccccaggctccactttgaggctctgatgaacattccagtgctggtgttggatgtcaatgatgatttttctgaggaagtaaccaaacaagaagacctcatgagagaggtaaacacctttgtaaagaatctgtaaccaataccatgawgttcaggctgtgatctgggctccctgactttctgaagctagaaaaatgttgtgtctcccaaccacctttccatccccagcccctctcatccctggagcactctgccgctcaagagctggtttgttaattattgttagactttgccattgttttcttttgtacctgaagcattttgaaaataaagtttacttaagttatgcttgtttttctaa

SEQ ID NO: 7096 - DNA, 982 bp, Homo sapiens
aacggtgcgctggagcgagtgagcagcgatacctaggrcggaagtgctctcggcggaagtgatcgctgtgtgaatcgtgggtgggatggccgcgggccgcctctttctaagtcggcttcgagcacccttcagttccatggccaagagcccactcgagggcgtttcctcctccagaggcctgcacgcggggcgcgggccccgaaggctctccatcgaaggcaacattggcctgcactgcccaaagtcttggaaacttgctggatatgatgtaccgggagccagcacgatggtcctacacattccagacattttcctttttgagccgcctgaaagtacagctggagcccttccctgagaaactcttacaggccaggaagccagtacagatctttgaraggtctgtgtacagtgacaggtatatctttgcaaagaatctttttgaaaatgtctcctgtgggagtttgccagccggatcacattacatggcttcatctacctccaggcttctccccaggtttgtttgaagagactgtaccagagggccagggaggaggagaaaggaattgagctggcctatctagagcagctgcatggccaacacgaagcctggcttattcacaagacaacgaagctccactttgaggctctgatgaacattccagtgctggtgttggatgtcaatgatgatttttctgaggaagtaaccaaacaagaagacctcatgagagaggtaaacacctttgtaaagaatctgtaaccaataccatgawgttcaggctgtgatctgggctccctgactttctgaagctagaaaaatgttgtgtctcccaaccacctttccatccccagcccctctcatccctggagcactctgccgctcaagagctggtttgttaattattgttagactttgccattgttttcttttgtacctgaagcattttgaaaataaagtttacttaagttatgcttgtttttctaa

SEQ ID NO: 7097 - DNA, 1031 bp, Homo sapiens
aacggtgcgctggagcgagtgagcagcgatacctaggrcggaagtgctctcggcggaagtgatcgctgtgtgaatcgtgggtgggatggccgcgggccgcctctttctaagtcggcttcgagcacccttcagttccatggccaagagcccactcgagggcgtttcctcctccagaggcctgcacgcggggcgcgggccccgaaggctctccatcgaaggcaacattggcctgcactgcccaaagtcttggaaacttgctggatatgatgtaccgggagccagcacgatggtcctacacattccagacattttcctttttgagccgcctgaaagtacagctggagcccttccctgagaaactcttacaggccaggaagccagtacagatctttgaraggtctgtgtacagtgacaggtatatctttgcaaagaatctttttgaaaatggttccctcagtgacatcgagtggcatatctatcaggactggcattcttttctcctgtgggagtttgccagccggatcacattacatggcttcatctacctccaggcttctccccaggtttgtttgaagagactgtaccagagggccagggaggaggagaaaggaattgagctggcctatctagagcagctgcatggccaacacgaagcctggcttattcacaagacaacgaagctccactttgaggctctgatgaacattccagtgctggtgttggatgtcaatgatgatttttctgaggaagtaaccaaacaagaagacctcatgagagaggtaaacacctttgtaaagaatctgtaaccaataccatgawgttcaggctgtgatctgggctccctgactttctgaagctagaaaaatgttgtgtctcccaaccacctttccatccccagcccctctcatccctggagcactctgccgctcaagagctggtttgttaattattgttagactttgccattgttttcttttgtacctgaagcattttgaaaataaagtttacttaagttatgcttgtttttctaa

SEQ ID NO: 7098 - DNA, 1117 bp, Homo sapiens
aacggtgcgctggagcgagtgagcagcgatacctaggrcggaagtgctctcggcggaagtgatcgctgtgtgaatcgtgggtgggatggccgcgggccgcctctttctaagtcggcttcgagcacccttcagttccatggccaagagcccactcgagggcgtttcctcctccagaggcctgcacgcggggcgcgggccccgaaggctctccatcgaaggcaacattggtaacatcctcaagcaaatcagaatgagagcacccattcaggaaacctgaacagggaaggtgaacccctgtcctgaccaaaattgggcctgcactgcccaaagtcttggaaacttgctggatatgatgtaccgggagccagcacgatggtcctacacattccagacattttcctttttgagccgcctgaaagtacagctggagcccttccctgagaaactcttacaggccaggaagccagtacagatctttgaraggtctgtgtacagtgacaggtatatctttgcaaagaatctttttgaaaatggttccctcagtgacatcgagtggcatatctatcaggactggcattcttttctcctgtgggagtttgccagccggatcacattacatggcttcatctacctccaggcttctccccaggtttgtttgaagagactgtaccagagggccagggaggaggagaaaggaattgagctggcctatctagagcagctgcatggccaacacgaagcctggcttattcacaagacaacgaagctccactttgaggctctgatgaacattccagtgctggtgttggatgtcaatgatgatttttctgaggaagtaaccaaacaagaagacctcatgagagaggtaaacacctttgtaaagaatctgtaaccaataccatgawgttcaggctgtgatctgggctccctgactttctgaagctagaaaaatgttgtgtctcccaaccacctttccatccccagcccctctcatccctggagcactctgccgctcaagagctggtttgttaattattgttagactttgccattgttttcttttgtacctgaagcattttgaaaataaagtttacttaagttatgcttgtttttctaa

SEQ ID NO: 7099 - DNA, 1144 bp, Homo sapiens
aacggtgcgctggagcgagtgagcagcgatacctaggrcggaagtgctctcggcggaagtgatcgctgtgtgaatcgtgggtgggatggccgcgggccgcctctttctaagtcggcttcgagcacccttcagttccatggccaagagcccactcgagggcgtttcctcctccagaggcctgcacgcggggcgcgggccccgaaggctctccatcgaaggcaacattgctgtgggaaagtccacrtttgtgaagttactcacgaaaacttacccagaatggcacrtagctacagaacctgtagcaacatggcagaatatccaggctgctggcacccaaaaagcctgcactgcccaaagtcttggaaacttgctggatatgatgtaccgggagccagcacgatggtcctacacattccagacattttcctttttgagccgcctgaaagtacagctggagcccttccctgagaaactcttacaggccaggaagccagtacagatctttgaraggtctgtgtacagtgacaggtatatctttgcaaagaatctttttgaaaatggttccctcagtgacatcgagtggcatatctatcaggactggcattcttttctcctgtgggagtttgccagccggatcacattacatggcttcatctacctccaggcttctccccaggtttgtttgaagagactgtaccagagggccagggaggaggagaaaggaattgagctggcctatctagagcagctgcatggccaacacgaagcctggcttattcacaagacaacgaagctccactttgaggctctgatgaacattccagtgctggtgttggatgtcaatgatgatttttctgaggaagtaaccaaacaagaagacctcatgagagaggtaaacacctttgtaaagaatctgtaaccaataccatgawgttcaggctgtgatctgggctccctgactttctgaagctagaaaaatgttgtgtctcccaaccacctttccatccccagcccctctcatccctggagcactctgccgctcaagagctggtttgttaattattgttagactttgccattgttttcttttgtacctgaagcattttgaaaataaagtttacttaagttatgcttgtttttctaa

SEQ ID NO: 7100 - DNA, 579 bp, Homo sapiens
aacggtgcgctggagcgagtgagcagcgatacctaggrcggaagtgctctcggcggaagtgatcgctgtgtgaatcgtgggtgggatggccgcgggccgcctctttctaagtcggcttcgagcacccttcagttccatggccaagagcccactcgagggcgtttcctcctccagaggcctgcacgcggggcgcgggccccgaaggctctccatcgaaggcaacattggctccactttgaggctctgatgaacattccagtgctggtgttggatgtcaatgatgatttttctgaggaagtaaccaaacaagaagacctcatgagagaggtaaacacctttgtaaagaatctgtaaccaataccatgawgttcaggctgtgatctgggctccctgactttctgaagctagaaaaatgttgtgtctcccaaccacctttccatccccagcccctctcatccctggagcactctgccgctcaagagctggtttgttaattattgttagactttgccattgttttcttttgtacctgaagcattttgaaaataaagtttacttaagttatgcttgtttttctaa

SEQ ID NO: 7101 - DNA, 880 bp, Homo sapiens
aacggtgcgctggagcgagtgagcagcgatacctaggrcggaagtgctctcggcggaagtgatcgctgtgtgaatcgtgggtgggatggccgcgggccgcctctttctaagtcggcttcgagcacccttcagttccatggccaagagcccactcgagggcgtttcctcctccagaggcctgcacgcggggcgcgggccccgaaggctctccatcgaaggcaacattgctgtgggaaagtccacrtttgtgaagttactcacgaaaacttacccagaatggcacrtagctacagaacctgtagcaacatggcagaatatccaggctgctggcacccaaaaagcctgcactgcccaaagtcttggaaacttgctggatatgatgtaccgggagccagcacgatggtcctacacattccagacattttcctttttgagccgcctgaaagtacagctggagcccttccctgagaaactcttacaggccaggaagccagtacagatctttgaraggtctgtgtacagtgacaggctccactttgaggctctgatgaacattccagtgctggtgttggatgtcaatgatgatttttctgaggaagtaaccaaacaagaagacctcatgagagaggtaaacacctttgtaaagaatctgtaaccaataccatgawgttcaggctgtgatctgggctccctgactttctgaagctagaaaaatgttgtgtctcccaaccacctttccatccccagcccctctcatccctggagcactctgccgctcaagagctggtttgttaattattgttagactttgccattgttttcttttgtacctgaagcattttgaaaataaagtttacttaagttatgcttgtttttctaa

SEQ ID NO: 7102 - DNA, 415 bp, Homo sapiens
aacggtgcgctggagcgagtgagcagcgatacctaggrcggaagtgctctcggcggaagtgatcgctgtgtgaatcgtgggtgggatggccgcgggccgcctctttctaagtcggcttcgagcacccttcagttccatggccaagagcccactcgagggcgtttcctcctccagaggcctgcacgcggggcgcgggccccgaaggctctccatcgaaggcaacattggcctgcactgcccaaagtcttggaaacttgctggatatgatgtaccgggagccagcacgatggtcctacacattccagacattttcctttttgagccgcctgaaagtacagctggagcccttccctgagaaactcttacaggccaggaagccagtacagatctttgaraggtctgtgtacagtgacag

SEQ ID NO: 7103 - DNA, 767 bp, Homo sapiens
aacggtgcgctggagcgagtgagcagcgatacctaggrcggaagtgctctcggcggaagtgatcgctgtgtgaatcgtgggtgggatggccgcgggccgcctctttctaagtcggcttcgagcacccttcagttccatggccaagagcccactcgagggcgtttcctcctccagaggcctgcacgcggggcgcgggccccgaaggctctccatcgaaggcaacattggcctgcactgcccaaagtcttggaaacttgctggatatgatgtaccgggagccagcacgatggtcctacacattccagacattttcctttttgagccgcctgaaagtacagctggagcccttccctgagaaactcttacaggccaggaagccagtacagatctttgaraggtctgtgtacagtgacaggctccactttgaggctctgatgaacattccagtgctggtgttggatgtcaatgatgatttttctgaggaagtaaccaaacaagaagacctcatgagagaggtaaacacctttgtaaagaatctgtaaccaataccatgawgttcaggctgtgatctgggctccctgactttctgaagctagaaaaatgttgtgtctcccaaccacctttccatccccagcccctctcatccctggagcactctgccgctcaagagctggtttgttaattattgttagactttgccattgttttcttttgtacctgaagcattttgaaaataaagtttacttaagttatgcttgtttttctaa

SEQ ID NO: 7104 - DNA, 2554 bp, Homo sapiens
agtataaccgcgtgscccgcgcgcgcgcttccctcccggcgcagtcaccggcgcggtctatggctgcgacttctctaatgtctgctttggctgcccggctgctgcagcccgcgcacagctgctcccttcgccttcgccctttccacctcgcggcagttcgaaatgaagctgttgtcatttctggaaggaaactggcccagcagatcaagcaggaagtgcggcaggaggtagaagagtgggtggcctcaggcaacaaacggccacacctgagtgtgatcctggttggcgagaatcctgcaagtcactcctatgtcctcaacaaaaccagggcagctgcagttgtgggaatcaacagtgagacaattatgaaaccagcttcaatttcagaggaagaattgttgaatttaatcaataaactgaataatgatgataatgtagatggcctccttgttcagttgcctcttccagagcatattgatgagagaaggatctgcaatgctgtttctccagacaaggatgttgatggctttcatgtaattaatgtaggacgaatgtgtttggatcagtattccatgttaccggctactccatggggtgtgtgggaaataatcaagcgaactggcattccaaccctagggaagaatgtggttgtggctggaaggtcaaaaaacgttggaatgcccattgcaatgttactgcacacagatggggcgcatgaacgtcccggaggtgatgccactgttacaatatctcatcgatatactcccaaagagcagttgaagaaacatacaattcttgcagatattgtaatatctgctgcaggtattccaaatctgatcacagcagatatgatcaaggaaggagcagcagtcattgatgtgggaataaatagagttcacgatcctgtaactgccaaacccaagttggttggagatgtggattttgaaggagtcagacaaaaagctgggtatatcactccagttcctggaggtgttggccccatgacagtggcaatgctaatgaagaataccattattgctgcaaaaaaggtgctgaggcttgaagagcgagaagtgctgaagtctaaagagcttggggtagccactaattaactactgtgtcttctgtgtcacaaacagcactccaggccagctcaagaagcaaagcaggccaatagaaatgcaatatttttaatttattctactgaaatggtttaaaatgatgccttgtatttattgaaagcttaaatgggtgggtgtttctgcacatacctctgcagtacctcaccagggagcattccagtatcatgcagggtcctgtgatctagccaggagcagccattaacctagtgattaatatgggagacattaccatatggaggatggatgcttcactttgtcaagcacctcagttacacattcgccttttctaggattgcatttcccaagtgctattgcaataacagttgatactcattttaggtaccaaaccttttgagttcaactgatcaaaccaaaggaaaagtgttgctagagaaaattrgggaaaaggtgaaaaagaaaaaatggtagtaattgagcagaaaaaaattaatttatatatgtattgattggcaaccagatttatctaagtagaactgaattggctaggaaaaaagaaaaactgcatgttaatcattttcctaagctgtccttttgaggcttagtcagtttattgggaaaatgtttaggattattccttgctattagtactcattttatgtatgttacccttcagtaagttctccccattttagttttctaggactgaaaggattcttttctacattatacatgtgtgttgtcatatttggcttttgctatatactttaacttcattgttaaatttttgtattgtatagtttctttggtgtatcttaaaacctatttttgaaaaacaaacttggcttgataatcatttgggcagcttgggtaagtacgcaacttacttttccaccaaagaactgtcagcagctgcctgcttttctgtgatgtatgtatcctgttgacttttccagaaattttttaagagtttgagttactattgaatttaatcagaytttctgattaaagggttttctttcttttttaataaaacacatctgtctggtrtggtatgaatttctgaaattctgkcttcctatgactcctagttgtgacctaaccagtttttttctcatttaatcaatgtagctattcctatattcagtaacacttacttctatagccttaaatagataattttttttcttctatttttttttttttttttgtagagatggggtcttgctatgttgcctgggctggtattgaactcctggcctcaagcaatcaatcctcttgcctcagcttcccagagggctgggattacaggcctgggccacccacacccaaacagaggtttaaagagctttggagaaaccagcctcgtcctccagtctctttgtttgtttgttttgagactgagtcttgctctgttgcccaggctggagtgcagtggcatgatctcgggtcac

SEQ ID NO: 7105 - DNA, 1064 bp, Homo sapiens
agtataaccgcgtgscccgcgcgcgcgcttccctcccggcgcagtcaccggcgcggtctatggctgcgacttctctaatgtctgctttggctgcccggctgctgcagcccgcgcacagctgctcccttcgccttcgccctttccacctcgcggcagttcgaaatgaagctgttgtcatttctggaaggaaactggcccagcagatcaagcaggaagtgcggcaggaggtagaagagtgggtggcctcaggcaacaaacggccacacctgagtgtgatcctggttggcgagaatcctgcaagtcactcctatgtcctcaacaaaaccagggcagctgcagttgtgggaatcaacagtgagacaattatgaaaccagcttcaatttcagaggaagaattgttgaatttaatcaataaactgaataatgatgataatgtagatggcctccttgttcagttgcctcttccagagcatattgatgagagaaggatctgcaatgctgtttctccagacaaggatgttgatggctttcatgtaattaatgtaggacgaatgtgtttggatcagtattccatgttaccggctactccatggggtgtgtgggaaataatcaagcgaactggcattccaaccctagggaagaatgtggttgtggctggaaggtcaaaaaacgttggaatgcccattgcaatgttactgcacacagatggggcgcatgaacgtcccggaggtgatgccactgttacaatatctcatcgatatactcccaaagagcagttgaagaaacatacaattcttgcagatattgtaatatctgctgcaggtattccaaatctgatcacagcagatatgatcaaggaaggagcagcagtcattgatgtgggaataaatagagttcacgatcctgtaactgccaaacccaagttggttggagatgtggattttgaaggagtcagacaaaaagctgggtatatcactccagttcctggaggtgttggccccatgacagtggcaatgctaatgaagaataccattattgccgggcgcggtggctcacacctgtaa

SEQ ID NO: 7106 - DNA, 3928 bp, Homo sapiens
caccggcgcggtctatggctgcgacttctctaatgtctgctttggctgcccggctgctgcagcccgcgcacagctgctcccttcgccttcgccctttccacctcgcggcagttcggcaggggaatctctccctaggtcaggttggagtgcagtgctgcaatcacggcttactgcagccttgacctcctgggctcaagtgatcctcccacctcagcttaaatgaagctgttgtcatttctggaaggaaactggcccagcagatcaagcaggaagtgcggcaggaggtagaagagtgggtggcctcaggcaacaaacggccacacctgagtgtgatcctggttggcgagaatcctgcaagtcactcctatgtcctcaacaaaaccagggcagctgcagttgtgggaatcaacagtgagacaattatgaaaccagcttcaatttcagaggaagaattgttgaatttaatcaataaactgaataatgatgataatgtagatggcctccttgttcagttgcctcttccagagcatattgatgagagaaggatctgcaatgctgtttctccagacaaggatgttgatggctttcatgtaattaatgtaggacgaatgtgtttggatcagtattccatgttaccggctactccatggggtgtgtgggaaataatcaagcgaactggcattccaaccctagggaagaatgtggttgtggctggaaggtcaaaaaacgttggaatgcccattgcaatgttactgcacacagatggggcgcatgaacgtcccggaggtgatgccactgttacaatatctcatcgatatactcccaaagagcagttgaagaaacatacaattcttgcagatattgtaatatctgctgcaggtattccaaatctgatcacagcagatatgatcaaggaaggagcagcagtcattgatgtgggaataaatagagttcacgatcctgtaactgccaaacccaagttggttggagatgtggattttgaaggagtcagacaaaaagctgggtatatcactccagttcctggaggtgttggccccatgacagtggcaatgctaatgaagaataccattattgctgcaaaaaaggtgctgaggcttgaagagcgagaagtgctgaagtctaaagagcttggggtagccactaattaactactgtgtcttctgtgtcacaaacagcactccaggccagctcaagaagcaaagcaggccaatagaaatgcaatatttttaatttattctactgaaatggtttaaaatgatgccttgtatttattgaaagcttaaatgggtgggtgtttctgcacatacctctgcagtacctcaccagggagcattccagtatcatgcagggtcctgtgatctagccaggagcagccattaacctagtgattaatatgggagacattaccatatggaggatggatgcttcactttgtcaagcacctcagttacacattcgccttttctaggattgcatttcccaagtgctattgcaataacagttgatactcattttaggtaccaaaccttttgagttcaactgatcaaaccaaaggaaaagtgttgctagagaaaattrgggaaaaggtgaaaaagaaaaaatggtagtaattgagcagaaaaaaattaatttatatatgtattgattggcaaccagatttatctaagtagaactgaattggctaggaaaaaagaaaaactgcatgttaatcattttcctaagctgtccttttgaggcttagtcagtttattgggaaaatgtttaggattattccttgctattagtactcattttatgtatgttacccttcagtaagttctccccattttagttttctaggactgaaaggattcttttctacattatacatgtgtgttgtcatatttggcttttgctatatactttaacttcattgttaaatttttgtattgtatagtttctttggtgtatcttaaaacctatttttgaaaaacaaacttggcttgataatcatttgggcagcttgggtaagtacgcaacttacttttccaccaaagaactgtcagcagctgcctgcttttctgtgatgtatgtatcctgttgacttttccagaaattttttaagagtttgagttactattgaatttaatcagaytttctgattaaagggttttctttcttttttaataaaacacatctgtctggtrtggtatgaatttctgaaattctgkcttcctatgactcctagttgtgacctaaccagtttttttctcatttaatcaatgtagctattcctatattcagtaacacttacttctatagccttaaatagataattttttttcttctatttttttttttttttttgtagagatggggtcttgctatgttgcctgggctggtattgaactcctggcctcaagcaatcaatcctcttgcctcagcttcccagagggctgggattacaggcctgggccacccacacccaaacagaggtttaaagagctttggagaaaccagcctcgtcctccagtctctttgtttgtttgttttgagactgagtcttgctctgttgcccaggctggagtgcagtggctgcagtggcatgattatagctcactgcagccttgaactcctggacttaaacgatcctcctgcatcagcctctgaaatggctgggactacaggtgtgtgccagcatgcctagctaatttttaaacatttgtttagagatgggtctcactatgttgcccaggctggtcttgacctcctgacctctgctgattccccccacctctgcctcccaagtagcgggattacaggtgtgagccactgtgtctgacaagaatttatacttaagcataggagatggttctggaaattctaagaaattctgctctcagtaagagtagaggtttggagctttacctcttggcagtatcccttggaagggagctctgagattaaatgtaatcaaacacttattgagagctttctatggaccaggcactacactagacgctgggaattacagaggcaattacctgtcctatactcaaggtgttaatgatctagtgtcatttttctttaaaaaagaaagcacctgcatttgtcatcttgagcaaatatagtaactctaacctcaaggttcaagtgatttactcaaggtttaaatcatagttgttttggagaaagtaagtgtcagatgcactgtggctgtcagggtcatagtaggcattwaatcaacatggttggtgttcattaaatgtggattgaagataaaatgactgatcttaagtttcatgaggaataggtttgcttcattgaaactggtttttatcttcccaaatagttttcaatcattcctttaaagtactaggttgattaatattgcaaagttgtaatgtaaaatgtgaccttacctctgtctaacctgtattgttcacatgaatgggagtttgactttggkaataaacattgaaaatttgcagggaggacccacccaaatgtatcatgaaatgtgattccaggtatgaaaaaccagtgatactaatttaaaggatcattttgatttaacatgtggtttcaaatttcactttaacaagaactattttattttagaaacatttatccactcagatgcattggttctttcattaacagagttttggaactggcttttcaatctgggaaagccccagtcacacttctggagcaaggcccataatgcagatggttcaaactttttttttgtttggatacggagtctcactctgttgcctaggctggagtgcagtggtgccatctcagctcactgcaacttctgcctcctgggttcaagcgattctcctgcctcagcctcccgaatagctgggactacaggtgcatgccaccacacccggctaattttttgtagtttagtagagac

SEQ ID NO: 7107 - DNA, 2661 bp, Homo sapiens
agtataaccgcgtgscccgcgcgcgcgcttccctcccggcgcagtcaccggcgcggtctatggctgcgacttctctaatgtctgctttggctgcccggctgctgcagcccgcgcacagctgctcccttcgccttcgccctttccacctcgcggcagttcgaaatgaagctgttgtcatttctggaaggaaactggcccagcagatcaagcaggaagtgcggcaggaggtagaagagtgggtggcctcaggcaacaaacggccacacctgagtgtgatcctggttggcgagaatcctgcaagtcactcctatgtcctcaacaaaaccagggcagctgcagttgtgggaaacccaagcagaggaggctaatgtgattgaactgtatcccaaaactttgtcataggaaatcagactatatctttcggggtttatacagtaggacaggagatactggaatcaacagtgagacaattatgaaaccagcttcaatttcagaggaagaattgttgaatttaatcaataaactgaataatgatgataatgtagatggcctccttgttcagttgcctcttccagagcatattgatgagagaaggatctgcaatgctgtttctccagacaaggatgttgatggctttcatgtaattaatgtaggacgaatgtgtttggatcagtattccatgttaccggctactccatggggtgtgtgggaaataatcaagcgaactggcattccaaccctagggaagaatgtggttgtggctggaaggtcaaaaaacgttggaatgcccattgcaatgttactgcacacagatggggcgcatgaacgtcccggaggtgatgccactgttacaatatctcatcgatatactcccaaagagcagttgaagaaacatacaattcttgcagatattgtaatatctgctgcaggtattccaaatctgatcacagcagatatgatcaaggaaggagcagcagtcattgatgtgggaataaatagagttcacgatcctgtaactgccaaacccaagttggttggagatgtggattttgaaggagtcagacaaaaagctgggtatatcactccagttcctggaggtgttggccccatgacagtggcaatgctaatgaagaataccattattgctgcaaaaaaggtgctgaggcttgaagagcgagaagtgctgaagtctaaagagcttggggtagccactaattaactactgtgtcttctgtgtcacaaacagcactccaggccagctcaagaagcaaagcaggccaatagaaatgcaatatttttaatttattctactgaaatggtttaaaatgatgccttgtatttattgaaagcttaaatgggtgggtgtttctgcacatacctctgcagtacctcaccagggagcattccagtatcatgcagggtcctgtgatctagccaggagcagccattaacctagtgattaatatgggagacattaccatatggaggatggatgcttcactttgtcaagcacctcagttacacattcgccttttctaggattgcatttcccaagtgctattgcaataacagttgatactcattttaggtaccaaaccttttgagttcaactgatcaaaccaaaggaaaagtgttgctagagaaaattrgggaaaaggtgaaaaagaaaaaatggtagtaattgagcagaaaaaaattaatttatatatgtattgattggcaaccagatttatctaagtagaactgaattggctaggaaaaaagaaaaactgcatgttaatcattttcctaagctgtccttttgaggcttagtcagtttattgggaaaatgtttaggattattccttgctattagtactcattttatgtatgttacccttcagtaagttctccccattttagttttctaggactgaaaggattcttttctacattatacatgtgtgttgtcatatttggcttttgctatatactttaacttcattgttaaatttttgtattgtatagtttctttggtgtatcttaaaacctatttttgaaaaacaaacttggcttgataatcatttgggcagcttgggtaagtacgcaacttacttttccaccaaagaactgtcagcagctgcctgcttttctgtgatgtatgtatcctgttgacttttccagaaattttttaagagtttgagttactattgaatttaatcagaytttctgattaaagggttttctttcttttttaataaaacacatctgtctggtrtggtatgaatttctgaaattctgkcttcctatgactcctagttgtgacctaaccagtttttttctcatttaatcaatgtagctattcctatattcagtaacacttacttctatagccttaaatagataattttttttcttctatttttttttttttttttgtagagatggggtcttgctatgttgcctgggctggtattgaactcctggcctcaagcaatcaatcctcttgcctcagcttcccagagggctgggattacaggcctgggccacccacacccaaacagaggtttaaagagctttggagaaaccagcctcgtcctccagtctctttgtttgtttgttttgagactgagtcttgctctgttgcccaggctggagtgcagtggcatgatctcgggtcac

SEQ ID NO: 7108 - DNA, 3871 bp, Homo sapiens
agtataaccgcgtgscccgcgcgcgcgcttccctcccggcgcagtcaccggcgcggtctatggctgcgacttctctaatgtctgctttggctgcccggctgctgcagcccgcgcacagctgctcccttcgccttcgccctttccacctcgcggcagttcgaaatgaagctgttgtcatttctggaaggaaactggcccagcagatcaagcaggaagtgcggcaggaggtagaagagtgggtggcctcaggcaacaaacggccacacctgagtgtgatcctggttggcgagaatcctgcaagtcactcctatgtcctcaacaaaaccagggcagctgcagttgtgggaatcaacagtgagacaattatgaaaccagcttcaatttcagaggaagaattgttgaatttaatcaataaactgaataatgatgataatgtagatggcctccttgttcagttgcctcttccagagcatattgatgagagaaggatctgcaatgctgtttctccagacaaggatgttgatggctttcatgtaattaatgtaggacgaatgtgtttggatcagtattccatgttaccggctactccatggggtgtgtgggaaataatcaagcgaactggcattccaaccctagggaagaatgtggttgtggctggaaggtcaaaaaacgttggaatgcccattgcaatgttactgcacacagatggggcgcatgaacgtcccggaggtgatgccactgttacaatatctcatcgatatactcccaaagagcagttgaagaaacatacaattcttgcagatattgtaatatctgctgcaggtattccaaatctgatcacagcagatatgatcaaggaaggagcagcagtcattgatgtgggaataaatagagttcacgatcctgtaactgccaaacccaagttggttggagatgtggattttgaaggagtcagacaaaaagctgggtatatcactccagttcctggaggtgttggccccatgacagtggcaatgctaatgaagaataccattattgctgcaaaaaaggtgctgaggcttgaagagcgagaagtgctgaagtctaaagagcttggggtagccactaattaactactgtgtcttctgtgtcacaaacagcactccaggccagctcaagaagcaaagcaggccaatagaaatgcaatatttttaatttattctactgaaatggtttaaaatgatgccttgtatttattgaaagcttaaatgggtgggtgtttctgcacatacctctgcagtacctcaccagggagcattccagtatcatgcagggtcctgtgatctagccaggagcagccattaacctagtgattaatatgggagacattaccatatggaggatggatgcttcactttgtcaagcacctcagttacacattcgccttttctaggattgcatttcccaagtgctattgcaataacagttgatactcattttaggtaccaaaccttttgagttcaactgatcaaaccaaaggaaaagtgttgctagagaaaattrgggaaaaggtgaaaaagaaaaaatggtagtaattgagcagaaaaaaattaatttatatatgtattgattggcaaccagatttatctaagtagaactgaattggctaggaaaaaagaaaaactgcatgttaatcattttcctaagctgtccttttgaggcttagtcagtttattgggaaaatgtttaggattattccttgctattagtactcattttatgtatgttacccttcagtaagttctccccattttagttttctaggactgaaaggattcttttctacattatacatgtgtgttgtcatatttggcttttgctatatactttaacttcattgttaaatttttgtattgtatagtttctttggtgtatcttaaaacctatttttgaaaaacaaacttggcttgataatcatttgggcagcttgggtaagtacgcaacttacttttccaccaaagaactgtcagcagctgcctgcttttctgtgatgtatgtatcctgttgacttttccagaaattttttaagagtttgagttactattgaatttaatcagaytttctgattaaagggttttctttcttttttaataaaacacatctgtctggtrtggtatgaatttctgaaattctgkcttcctatgactcctagttgtgacctaaccagtttttttctcatttaatcaatgtagctattcctatattcagtaacacttacttctatagccttaaatagataattttttttcttctatttttttttttttttttgtagagatggggtcttgctatgttgcctgggctggtattgaactcctggcctcaagcaatcaatcctcttgcctcagcttcccagagggctgggattacaggcctgggccacccacacccaaacagaggtttaaagagctttggagaaaccagcctcgtcctccagtctctttgtttgtttgttttgagactgagtcttgctctgttgcccaggctggagtgcagtggctgcagtggcatgattatagctcactgcagccttgaactcctggacttaaacgatcctcctgcatcagcctctgaaatggctgggactacaggtgtgtgccagcatgcctagctaatttttaaacatttgtttagagatgggtctcactatgttgcccaggctggtcttgacctcctgacctctgctgattccccccacctctgcctcccaagtagcgggattacaggtgtgagccactgtgtctgacaagaatttatacttaagcataggagatggttctggaaattctaagaaattctgctctcagtaagagtagaggtttggagctttacctcttggcagtatcccttggaagggagctctgagattaaatgtaatcaaacacttattgagagctttctatggaccaggcactacactagacgctgggaattacagaggcaattacctgtcctatactcaaggtgttaatgatctagtgtcatttttctttaaaaaagaaagcacctgcatttgtcatcttgagcaaatatagtaactctaacctcaaggttcaagtgatttactcaaggtttaaatcatagttgttttggagaaagtaagtgtcagatgcactgtggctgtcagggtcatagtaggcattwaatcaacatggttggtgttcattaaatgtggattgaagataaaatgactgatcttaagtttcatgaggaataggtttgcttcattgaaactggtttttatcttcccaaatagttttcaatcattcctttaaagtactaggttgattaatattgcaaagttgtaatgtaaaatgtgaccttacctctgtctaacctgtattgttcacatgaatgggagtttgactttggkaataaacattgaaaatttgcagggaggacccacccaaatgtatcatgaaatgtgattccaggtatgaaaaaccagtgatactaatttaaaggatcattttgatttaacatgtggtttcaaatttcactttaacaagaactattttattttagaaacatttatccactcagatgcattggttctttcattaacagagttttggaactggcttttcaatctgggaaagccccagtcacacttctggagcaaggcccataatgcagatggttcaaactttttttttgtttggatacggagtctcactctgttgcctaggctggagtgcagtggtgccatctcagctcactgcaacttctgcctcctgggttcaagcgattctcctgcctcagcctcccgaatagctgggactacaggtgcatgccaccacacccggctaattttttgtagtttagtagagac

SEQ ID NO: 7109 - DNA, 2748 bp, Homo sapiens
cggaggcgsaggcgcaggcgctggctggcaggtgtcgctaaccggacggtggtcgccagggcgagaggcgggagccggagaggtgaggcaggacccgggctccactgccgcctctccgagctcttgtgacgcggacctcagtgccaggatggctcggggcgagcggcggcgccgcgcagtgccggcagagggagtgcggacagccgagagggcggctcggggaggccccgggcgacgggacggccggggcggcgggccgcgtagcacggctggaggagtggctctggccgtcgtggtcctgtctttggccctgggtatgtcggggcgctgggtgctggcgtggtaccgtgcgcggcgggcggtcacgctgcactccgcgcctcctgtgttgcctgccgactcctccagccccgccgtggccccggacctcttctggggaacctaccgccctcacgtctacttcggcatgaagacccgcagcccgaagcccctcctcaccggtaaccgggccccagggcgggcaggcaggcggactcctaatctgggcgccccagcttgaagcgagagcaagggtgggaaggaatggatcaggagagttatgaagagggatgacccggagacccggagggacaggtcccctgctctttgacttacgtggccattctacccccaggactgatgtgggcgcagcagggcaccaccccggggactcctaagctcaggcacacgtgtgagcagggggacggtgtgggtccctatggctgggagttccacgacggcctctccttcgggcgccaacacatccaggatggggccttaaggctcaccactgagttcgtcaagaggcctgggggtcagcacggaggggactggagctggagagtgactgtagagcctcaggactcaggtacttctgccctccctttggtctccctgttcttctatgtggtgacagatggcaaggaagtcctactaccagaggttrgggccaaggggcagttgaagtttatcagtgggcacaccagtsaacttggtracttccgctttacacttttgccaccaaccagtccaggggatacagcccccaagtatggcagctacaatgtcttctggacctccaacccaggactgcccctgctgacagagatggtaaagagtcgcctaaatagctggtttcagcatcggcccccaggggccycccctgaacgctacctcggcttgccaggatccctgaagtgggaggacagaggtccaagtgggcaagggcaggggcagttcttgatacagcaggtgaccctgaaaattcccatttccatagagtttgtgtttgaatcaggcagtgcccaggcaggaggaaatcaagccctgccaagactggcaggcagtctactgacccaggccctggagagccatgctgaaggctttagagagcgctttgagaagaccttccagctgaaggagaagggcctgagctctggcgagcaggytttgggtcaggctgccctcagcggcctccttggtggaattggctacttctacggacaagggctggtattgccagacatsggggtggaagggtctgagcagaaggtggacccagccctctttccacccgtacctctttttacagcagtgccctcccggtcattcttcccacgaggcttcctttgggatgaaggctttcaccagctggtggttcagcggtgggatccctccctcacccgggaagcccttggccactggctggggctgctaaatgctgatggctggattgggasggagcagatactgggggatgaggcccsagcccgggtgcctccagaattcctagtacaacgagcagtccacgccaaccccccaaccctacttttgcctgtagcccatatgctagaggttggtgaccctgacgacttggctttcctccgaaaggccttgccccgcctgcatgcctggttttcctggctccatcagagccaggcaggcccactgccactatcttaccgctggcggggacgggaccctgccttaccaaccttactgaaccccaagaccctaccctctgggctggatgactacccccgggcttcacacccttcagtaaccgagcggcacctggacctgcgatgttgggtggcactgggtgcccgtgtgctgacgcggctggcagagcatctgggtgaggctgaggtagctgctgagctgggcccactggctgcctcactggaggcagcagagagcctggatgagctgcactgggccccagagctaggagtcyttgcagactttgggaaccacacaaaagcagtacagctgaagcccaggccccctcaggggctcgttcgggtggtgggtcggccccaacctcaactgcagtatgtagatgctcttggctatgtcagtctttttcccttgctgctgcgactgctggaccccacctcatcccgccttgggcccctgctggacattctagccgacagccgccatctctggagcccctttggtttacgctcccttgcagcctccagctccttttatggccagcgcaattcagagcatgatcccccctactggcggggtgctgtgtggctcaatgtcaactacctggctttgggagcactccaccactatgggcatctggagggtcctcaccaggctcgggctgccaaactccacrgtgtctccttgctgtcatcccacatagccctggggtgaatgtgaatccagagtctatttttctaaataaattgg

SEQ ID NO: 7110 - DNA, 2889 bp, Homo sapiens
ggcgggaggcggaggcgsaggcgcaggcgctggctggcaggtgtcgctaaccggacggtggtcgccagggcgagaggcgggagccggagaggtgaggcaggacccgggctccactgccgcctctccgagctcttgtgacgcggacctcagtgccaggatggctcggggcgagcggcggcgccgcgcagtgccggcagagggagtgcggacagccgagagggcggctcggggaggccccgggcgacgggacggccggggcggcgggccgcgtagcacggctggaggagtggctctggccgtcgtggtcctgtctttggccctgggtatgtcggggcgctgggtgctggcgtggtaccgtgcgcggcgggcggtcacgctgcactccgcgcctcctgtgttgcctgccgactcctccagccccgccgtggccccggacctcttctggggaacctaccgccctcacgtctacttcggcatgaagacccgcagcccgaagcccctcctcaccggactgatgtgggcgcagcagggcaccaccccggggactcctaagctcaggcacacgtgtgagcagggggacggtgtgggtccctatggctgggagttccacgacggcctctccttcgggcgccaacacatccaggatggggccttaaggctcaccactgagttcgtcaagaggcctgggggtcagcacggaggggactggagctggagagtgactgtagagcctcaggactcaggtacttctgccctccctttggtctccctgttcttctatgtggtgacagatggcaaggaagtcctactaccagaggttrgggccaaggggcagttgaagtttatcagtgggcacaccagtsaacttggtracttccgctttacacttttgccaccaaccagtccaggggatacagcccccaagtatggcagctacaatgtcttctggacctccaacccaggactgcccctgctgacagagatggtaaagagtcgcctaaatagctggtttcagcatcggcccccaggggccycccctgaacgctacctcggcttgccaggatccctgaagtgggaggacagaggtccaagtgggcaagggcaggggcagttcttgatacagcaggtgaccctgaaaattcccatttccatagagtttgtgtttgaatcaggcagtgcccaggcaggaggaaatcaagccctgccaagactggcaggcagtctactgacccaggccctggagagccatgctgaaggctttagagagcgctttgagaagaccttccagctgaaggagaagggcctgagctctggcgagcaggytttgggtcaggctgccctcagcggcctccttggtggaattggctacttctacggacaagggctggtattgccagacatsggggtggaagggtctgagcagaaggtggacccagccctctttccacccgtacctctttttacagcagtgccctcccggtcattcttcccacgaggcttcctttgggatgaaggctttcaccagctggtggttcagcggtgggatccctccctcacccgggaagcccttggccactggctggggctgctaaatgctgatggctggattgggasggagcagatactgggggatgaggcccsagcccgggtgcctccagaattcctagtacaacgagcagtccacgccaaccccccaaccctacttttgcctgtagcccatatgctagaggttggtgaccctgacgacttggctttcctccgaaaggccttgccccgcctgcatgcctggttttcctggctccatcagagccaggcaggcccactgccactatcttaccgctggcggggacgggaccctgccttaccaaccttactgaaccccaagaccctaccctctgggctggatgactacccccgggcttcacacccttcagtaaccgagcggcacctggacctgcgatgttgggtggcactgggtgcccgtgtgctgacgcggctggcagagcatctgggtgaggctgaggtagctgctgagctgggcccactggctgcctcactggaggcagcagagagcctggatgagctgcactgggccccagagctaggagtcyttgcagactttgggaaccacacaaaagcagtacagctgaagcccaggccccctcaggggctcgttcgggtggtgggtcggccccaacctcaactgcagtatgtagatgctcttggctatgtcagtctttttcccttgctgctgcgactgctggaccccacctcatcccgccttgggcccctgctggacattctagccgacagccgccatctctggagcccctttggtttacgctcccttgcagcctccagctccttttatggccagcgcaattcagagcatgatcccccctactggcggggtgctgtgtggctcaatgtcaactacctggctttgggagcactccaccactatgggcatctggagggtcctcaccaggctcgggctgccaaactccacrgtgagctccgtgccaacgtggtaggcaatgtatggcgccagtaccaggctacaggctttctttgggagcagtacagtgaccgcgatgggcgaggcatgggctgccgccctttccacggctggaccagccttgtcttactggccatggctgaagackacwgaagggagggagaggaggggagccaagacactcatgccactctggctctgaagggacaaaggcttctggcttttgcccccagcccctwggataccagtrattcaaaccttcctcatttcatctcaggtgtctccttgctgtcatcccacatagccctggggtgaatgtgaatccagagtctatttttctaaataaattggaaaaaacattttgaactcta

SEQ ID NO: 7111 - DNA, 3020 bp, Homo sapiens
tggcgctggcgcggctccaggaaggcatccgcatcacttttccaactagtccttagagaagggaagatgagcgagtcgagctcgaagtccagccagcccttggcctccaagcagaaaaaggacggcactgagaagcggggccgtggcaggccgcgcaagcagcctccggtgagtcccaggacagcgctggtagggagtcagaaggagctcagcgaagtgccaacacctaagagacctcggggccgaccaaagggaagcaaaaacaagggtgctgccaagaccgggaaaaccaccacaactctgggaaggaaaccaaggggaagacccaaaaaactggagaaggaggaagagaagggcatctcgcaggagtcctcactggaggagcagcttccttctgggactggacagctttgatctgctcccaaccccccacctcccaccccccaccccttccctacacccaccatcaccaccgcctccagccaccaccctcatcttccacctgcaccttcaccaccacactacacaacacaccagccgctgcaggtccctatgggctgagtggagaggacttttcccctggcctcttcccatccctaccccctcctccccccgtccacccactcatacacatgtgccctcctggacaaggctaatgtcctgcttagccrcaccctgcacctgctgcgtccctgatcccttggtggtgacattgctctctgggcttttggtttgggagccacttctctgctcctccactgttgcctctggcttcccatagaggggcctgggagggttcccctggtcttaaaaggggcccaagcccccattctggcacaccccactccactgtcctggcagcagcaggtgtggccaatggaggggggtgctggcccccaggattcccccagccaaactgtckttgtcaccacgtgaggctcacacctttcatccttccccaccttccctagtccctgcactaggttggacagcccccattggctacaggaaagcgggaggggtgtgagtcccctactccctctttgcagtggccccagcccccttaccgtctgcctgggatctgagtacatattgcagtgatggagatgcagtcacctattgtccagaggcaggagaggcaggtccgagaccgcggggtgacccggtccaaggcggaaaaagtgcggccgcccactgtgccagtgccgcaggtggatattgtgcctgggcggctcagtgaggccgagtggatggcgcttacagccctcgaggagggcgagracgtcgtaggggacatcttggccgacttgctggctcgagtcatggactctgctttcaaagtctacctgactcagcagtgcattccattcaccatcagccaggcccgggaggccatgctgcagatcaccgagtggcgcttcctggcccgggacgagggagaatctgcagtagctgaggmccccacatggggtgaggacgaggagccttcggcatgcacgacggactcctgggctcagggttsagtgcccgtgctgcacgcgtccacctcggagggcctggagaacttccaaggcgaagaccctgggggcgtggaccggatccctttaggaaggtcgtggatgggtcgaggctcccaggagcagatggaatcttgggagccttctccgcagctgagagtcacgtcggcccctcctcccacatcagagctgtttcaggaggcagggcccggaggtcctgtagaggaagcggacggccagtctagaggcctctcctcggccgggtccttgagcgcgagcttccaactgtcggtggaggaggcgcctgccgacgatgccgacccttctctggatccgtacctggtagccagcccccaggcctcaactgggaggggacaccccctcggcttccatttgtcgttggaagacctctactgttgcatgcctcaactggacgcggctggggatcggctggaactcaggtcagagggggtgccctgcatcgcctcgggcgtgttggtgtcctacccctctgtgggcggcgccacccgcccctccgcgtcctgccagcagcagcgggccgggcactcggatgtgcggctgagcgcccaccaccacaggatgcgccgcaaggcggccgtgaaacgcctggaccctgcgaggctcccgtgccactgggtgcgccctctggctgaggtcctggtcccagactctcaaacacgccccttggaagcctaccgcggacgccagcggggcgagaagaccaaggcccgggccgaaccycaagccctcggccccggcacccgtgtctccccggcagcgttcttccctctccggccaggcattcctttccgtgacttggactcgggccccgcactcctgttccccactttaaatttaggcctatcgtcgccatccctcgagtcaaagctgccactcccaaactccaggatccgcttcctcaccacacacccggtgctccctgatgtggcccgcagccgcagccccaagctgtggcccagtgtcaggtggcccagcggttgggaggggaaggccgagctgctgggcgagctgtgggctggccggacccgcgtgcctccacagggtctggagctggcagacagggagggccaggatcctggcagatggcctckaaccacacccccggtccttgaagccacttcccaggtgatgtggaagccsgtgttgctgccagaagccctgaagctggcccctggtgtgagcatgtggaaccggagcacccaggtgttgctcagctctggtgtgcctgaacaagaggacaaagaaggtagcacctttcctcccgttgagcaacatcccatccagacaggtgccccaaagcccaggtgaccgtagcacagctaatgaagaactcagcccccaaagtgtggtcacgctcctctaagcctgctgcctccctctgatccctgagcctctggcagtagtaactggtccctccctctgctagccagaaataaacacctgagttgccttaggaactag

SEQ ID NO: 7112 - DNA, 3439 bp, Homo sapiens
tttttaagctcccctgagccggggctgtgctcttctaagtgggactccgagcctgggctatttctggcgctggcgcggctccaggaagttcgcccatcccagccatcacttttccaactagtccttagagaagggaagatgagcgagtcgagctcgaagtccagccagcccttggcctccaagcagaaaaaggacggcactgagaagcggggccgtggcaggccgcgcaagcagcctccggtgagtcccaggacagcgctggtagggagtcagaaggagctcagcgaagtgccaacacctaagagacctcggggccgaccaaagggaagcaaaaacaagggtgctgccaagaccgggaaaaccaccacaactctgggaaggaaaccaaggggaagacccaaaaaactggagaaggaggaagagaagggcatctcgcaggagtcctccccaccatcaccaccgcctccagccaccaccctcatcttccacctgcaccttcaccaccacactacacaacacaccagccgctgcaggtccctatgggctgagtggagaggacttttcccctggcctcttcccatccctaccccctcctccccccgtccacccactcatacacatgtgccctcctggacaaggctaatgtcctgcttagccrcaccctgcacctgctgcgtccctgatcccttggtggtgacattgctctctgggcttttggtttgggagccacttctctgctcctccactgttgcctctggcttcccatagaggggcctgggagggttcccctggtcttaaaaggggcccaagcccccattctggcacaccccactccactgtcctggcagcagcaggtgtggccaatggaggggggtgctggcccccaggattcccccagccaaactgtckttgtcaccacgtgaggctcacacctttcatccttccccaccttccctagtccctgcactaggttggacagcccccattggctacaggaaagcgggaggggtgtgagtcccctactccctctttgcagtggccccagcccccttaccgtctgcctgggatctgagtacatattgcagtgatggagatgcagtcacctattgtccagaggcaggagaggcaggtccgagaccgcggggtgacccggtccaaggcggaaaaagtgcggccgcccactgtgccagtgccgcaggtggatattgtgcctgggcggctcagtgaggccgagtggatggcgcttacagccctcgaggagggcgagracgtcgtaggggacatcttggccgacttgctggctcgagtcatggactctgctttcaaagtctacctgactcagcagtgcattccattcaccatcagccaggcccgggaggccatgctgcagatcaccgagtggcgcttcctggcccgggacgagggagaatctgcagtagctgaggmccccacatggggtgaggacgaggagccttcggcatgcacgacggactcctgggctcagggttsagtgcccgtgctgcacgcgtccacctcggagggcctggagaacttccaaggcgaagtacactcctcaggagcctctccggactcctctgccattgctcctgctctcccctttccgacatctcactgcccgagtgcatttccccaggaccctgggggcgtggaccggatccctttaggaaggtcgtggatgggtcgaggctcccaggagcagatggaatcttgggagccttctccgcagctgagagtcacgtcggcccctcctcccacatcagagctgtttcaggaggcagggcccggaggtcctgtagaggaagcggacggccagtctagaggcctctcctcggccgggtccttgagcgcgagcttccaactgtcggtggaggaggcgcctgccgacgatgccgacccttctctggatccgtacctggtagccagcccccaggcctcaactgggaggggacaccccctcggcttccatttgtcgttggaagacctctactgttgcatgcctcaactggacgcggctggggatcggctggaactcaggtcagagggggtgccctgcatcgcctcgggcgtgttggtgtcctacccctctgtgggcggcgccacccgcccctccgcgtcctgccagcagcagcgggccgggcactcggatgtgcggctgagcgcccaccaccacaggatgcgccgcaaggcggccgtgaaacgcctggaccctgcgaggctcccgtgccactgggtgcgccctctggctgaggtcctggtcccagactctcaaacacgccccttggaagcctaccgcggacgccagcggggcgagaagaccaaggcccgggccgaaccycaagccctcggccccggcacccgtgtctccccggcagcgttcttccctctccggccaggcattcctttccgtgacttggactcgggccccgcactcctgttccccactttaaatttaggcctatcgtcgccatccctcgagtcaaagctgccactcccaaactccaggatccgcttcctcaccacacacccggtgctccctgatgtggcccgcagccgcagccccaagctgtggcccagtgtcaggtggcccagcggttgggaggggaaggccgagctgctgggcgagctgtgggctggccggacccgcgtgcctccacagggtctggagctggcagacagggagggccaggatcctggcagatggcctckaaccacacccccggtccttgaagccacttcccaggtgatgtggaagccsgtgttgctgccagaagccctgaagctggcccctggtgtgagcatgtggaaccggagcacccaggtgttgctcagctctggtgtgcctgaacaagaggacaaagaaggtagcacctttcctcccgttgagcaacatcccatccagacaggcatcgggaaggttgtatcccaggacctagctcggtgtggggcccaagtgatccttacttgtcagagcagggaatgtggacagcaagccctggctgagatccaagcagcctcaaacagcaaccgcctcctgcttggcgaggtggaccttagctccatgacctctattcggagctttgcccggaggcttctacaggagaatcctgagatacatctgctggtaaacaatgctggagtcagtggattccgaagacacttaccccagggggcctggatctcacctttgtcactaactatgttgggccctttctgctcacaaatctactccaaggatctcaaacaaggtgtactcccagtcctctacttgagcttggcagaggagccgggtggtatttctggaaaatatttcagcagttcctgtgtgataactcttcccgttaaagcctctcgggatcctcatgttgcccagagcctctggaatgcctcagtccgactgacaagcctagtcaagatggac

SEQ ID NO: 7113 - DNA, 1749 bp, Homo sapiens
gtaacggagtggtgcgccaacgtgagaggaaacccgtgcgcggctgcgctttcctgtccccaagccgttctagacgcggatgaagtgcaaaacaaacttctccatagaggagttgttgcaaagttccagtttataccaaacagtaatcagattccattggaagctaaagattttgagagccttttgtactatatgcaactaacttgatttcaagcttgggaaccttttaaaaaaaacattaaaagcaaaatgaaaaatgctttctgaaagcagctcctttttgaagggtgtgatgcttggaagcattttctgtgctttgatcactatgctaggacacattaggattggtcatggaaatagaatgcaccaccatgagcatcatcacctacaagctcctaacaaagaagatatcttgaaaatttcagaggatgagcgcatggagctcagtaagagctttcgagtatactgtattatccttgtaaaacccaaagatgtgagtctttgggctgcagtaaaggagacttggaccaaacactgtgacaaagcagagttcttcagttctgaaaatgttaaagtgtttgagtcaattaatatggacacaaatgacatgtggttaatgatgagaaaagcttacaaatacgcctttgawaagtatagagaccaatacaactggttcttccttgcacgccccactacgtttgctatcattgaaaacctaaagtattttttgttaaaaaaggatccatcacagcctttctatctaggccacactataaaatctggagaccttgaatatgtgggtatggaaggaggaattgtcttaagtgtagaatcaatgaaaagacttaacagccttctcaatatcccagaaaagtgtcctgaacagggagggatgatttggaagatatctgaagataaacagctagcagtttgcctgaaatatgctggagtatttgcagaaaatgcagaagatgctgatggaaaagatgtatttaataccaaatctgttgggctttctattaaagaggcaatgacttatcaccccaaccaggtagtagaaggctgttgttcagatatggctgttacttttaatggactgactccaaatcagatgcatgtgatgatgtatggggtataccgccttagggcatttgggcatattttcaatgatgcattggttttcttacctccaaatggttctgacaatgactgagaagtggtagaaaagcgtgaatrtgatctttgtrtaggacgtgtgttgtcattatttgtagtagtaactacatatccaatacagctgtatgtttctttttcttttctaatttggtggcactggtataaccacacattaaagtcagtagtacatttttaaatgagggtggtttttttctttaaaacacatgaacattgtaaatgtgttggaaagaagtgttttaagaataataattttgcaaataaactattaataaatattatatgtgataaattctaaattatgaacattagaaatctgtggggcacatatttttgctgattggttaaaaaattttaacaggtctttagcgttctaagatatgcaaatgatatctctagttgtgaatttgtgattaaagtaaaacttttagctgtgtgttccctttacttctaatactgatttatgttctaagcctccccaagttccaatggatttgccttctcaaaatgtacaactaagcaactaaagaaaattaaagtgaaagttgaaaaata

SEQ ID NO: 7114 - DNA, 1617 bp, Homo sapiens
acgtccagtccggggcggcgcctggaggcggagccgcccgctgggctaaatggggcagaggccgggaggggtgggggttccccgcgccgcagccatggagcagcttcgcgccgccgcccgtctgcagattgttctgggccacctcggccgcccctcggccggggctgtcgtagctcatyccacttcagggactatttcctctgccagtttccatcctcaacaattccagtatactctggataataaygttctaaccctggaacagagaaaattttatgaagaaaatgggtttctagtaatcaaaaatcttgtacctgatgccgatattcaacgctttcggaatgagtttgaaaaaatctgcagaaaggaggtgaaaccattaggattaacagtaatgagagatgtgaccatttcgaaatccgaatatgctccaagtgagaagatgatcaygaaggtccaggatttccaggaagataaggagctcttcagatactgcactctccccgagattctgaaatatgtggagtkcttcactggacctaatattatggccatgcacacaatgttgataaacaaacctccagattctggtaattgcaagaagacgtcccgtcacyccctgcaccaggacctgcactatttccccttcaggcccagcgatctcatcgtttgcgccyggacggcgatgsagcacwtcagccggaacaacrgctgtctggttgtgctcccaggcacrcacaagggctccctgaagcccyacgattaccccaagtgggaggggggagttaacaaaatgttccacgggatccaggactacgaggaaaacaaggcccrggtgcacctggtgatggagaagggcgacactgtttycttccatcctttgctcatccacggatctggtcagaataaaacccagggattcyrgaaggcaatttcctgccatttcgccagtgccgattgccactacattgacgtgaagggcaccagtcaagaaaacatcgagaaggaagttgtaggaatagcacataaattctttggagctgaaaatagcgtgaacttgaaggatatttggatgtttcgagctcgacttgtgaaaggagaaagaaccaatctttgaaatagccatctgctataactctttcaacagaaaaccaaaaccaaacgaaatgtctaaggaaaatrttttcttaatgagatgatgtaaccttttctatcacttgttaaaagcagaaaacatgtatcaggtacttaattgcatagagttagttttgcagcacaatggtgttgctttaatggaaaaaaaaacagtaaaagtgaaatattactgttttaaggaaaactaatttagggtggcagccaataaaggtggttggtgtctaatttaagtgttaaatcaatttctttcattcagttagctctttacccaagaagaagtgaatgatttggagcttagggtatgttttgtatcccctttctgataaacccattccctaccaattttatgtcataagagatttttttcccccaaatctagaacaatgtataatacattcacatctagtcaagggcataggaacggtgtcatggagtccaaataaagtggatattcctgctcgg

SEQ ID NO: 7115 - DNA, 1611 bp, Homo sapiens
acgtccagtccggggcggcgcctggaggcggagccgcccgctgggctaaatggggcagaggccgggaggggtgggggttccccgcgccgcagccatggagcagcttcgcgccgccgcccgtctgcagattgttctgggccacctcggccgcccctcggccggggctgtcgtagctcatyccacttcagggactatttcctctgccagtttccatcctcaacaattccagtatactctggataataaygttctaaccctggaacagagaaaattttatgaagaaaatgggtttctagtaatcaaaaatcttgtacctgatgccgatattcaacgctttcggaatgagtttgaaaaaatctgcagaaaggaggtgaaaccattaggattaacagtaatgagagatgtgaccatttcgaaatccgaatatgctccaagtgagaagatgatcaygaaggtccaggatttccaggaagataaggagctcttcagatactgcactctccccgagattctgaaatatgtggagtkcttcactggacctaatattatggccatgcacacaatgttgataaacaaacctccagattctggcaagaagacgtcccgtcacyccctgcaccaggacctgcactatttccccttcaggcccagcgatctcatcgtttgcgccyggacggcgatgsagcacwtcagccggaacaacrgctgtctggttgtgctcccaggcacrcacaagggctccctgaagcccyacgattaccccaagtgggaggggggagttaacaaaatgttccacgggatccaggactacgaggaaaacaaggcccrggtgcacctggtgatggagaagggcgacactgtttycttccatcctttgctcatccacggatctggtcagaataaaacccagggattcyrgaaggcaatttcctgccatttcgccagtgccgattgccactacattgacgtgaagggcaccagtcaagaaaacatcgagaaggaagttgtaggaatagcacataaattctttggagctgaaaatagcgtgaacttgaaggatatttggatgtttcgagctcgacttgtgaaaggagaaagaaccaatctttgaaatagccatctgctataactctttcaacagaaaaccaaaaccaaacgaaatgtctaaggaaaatrttttcttaatgagatgatgtaaccttttctatcacttgttaaaagcagaaaacatgtatcaggtacttaattgcatagagttagttttgcagcacaatggtgttgctttaatggaaaaaaaaacagtaaaagtgaaatattactgttttaaggaaaactaatttagggtggcagccaataaaggtggttggtgtctaatttaagtgttaaatcaatttctttcattcagttagctctttacccaagaagaagtgaatgatttggagcttagggtatgttttgtatcccctttctgataaacccattccctaccaattttatgtcataagagatttttttcccccaaatctagaacaatgtataatacattcacatctagtcaagggcataggaacggtgtcatggagtccaaataaagtggatattcctgctcgg

SEQ ID NO: 7116 - DNA, 2607 bp, Homo sapiens
ctcaccctgaaggtgacagttccttggaaccttccctgatccttgtgatcccaggctccaagagtccacccttcccagctcagctcagtacctcagccacctccaagatccctacactgatcatgcttttcccaatctccatgtcggccacggagtttcttctggcctctgtcatcttctgtctggtattctgggtaatcagggcctcaagacctcaggtccccaaaggcctgaagaatccaccagggccatggggctggcctctgattgggcacatgctgaccctgggaaagaacccgcacctggcactgtcaaggatgagccagcagtatggggacgtgctgcagatccgaaytggctccacacccgtggtggtgctgagcggcctggacaccatcyrgcaggccctggtgcggcagggcgatgatttcaagggccggcccgacctctacaccttcaccctcatcagtaatggtcagagcatgtccttcagcccagactctggaccagtgtgggctgcccgccggcgcctggcccagaatggcctgaaaagtttctccattgcctctgacccagcctcctcaacctcctgctacctggaagagcatgtgagcaaggaggctgaggtcctgataagcacgttgcaggagctgatggcagggcctgggcactttaacccctacaggtatgtggtggtatcagtgaccaatgtcatctgtgccatttgctttggccggcgctatgaccacaaccaccaagaactgcttagcctagtcaacctgaataataatttcggggaggtggttggctctggaaacccagctgacttcatcyctattcttcgctacctacccaacccttccctgaatgccttcaaggacctgaatgagaagttctacagcttcatgcagaagatggtcaaggagcactacaaaacctttgagaagggccacatccgggacatcacagacagcctgattgagcactgtcaggagaagcagctggatgagaacgccaatgtccagctgtcagatgagaagatcattaacatcgtcttggacctctttggagctgggtttgacacagtcacaactgctatctcctggagcctcatgtatttggtgatgaaccccagggtacagagaaagatccaagaggagctagacacagtgattggcaggtcacggcggccccggctctctgacagatcccatctgccctatatggaggccttcatcctggagaccttccgacactcttccttmgtccccttcaccatcccccacagcacaacaagagacacaagtttgaaaggcttttacatccccaaggggcgttgtgtctttgtaaaccagtggcagatcaaccatgaccagaagctatgggtcaacccatctgagttcctacctgaacggtttctcacccctgatggtgctatcgacaaggtgttaagtgagaaggtgattatctttggcatgggcaagcggaagtgtatcggtgagamcrttgsccgctgggaggtctttctcttcctggctatcctgctgcaacgggtggaattcagcrtgccactgggcgtgaaggtggacatgacccccatctatgggctaaccatgaagcatgcctgctgtgagcacttccaaatgcagctgcgctcttaggtgcttgagagccctgaggcctagactctgtctacctggtctggttgggcagccagaccagcaggctggcctatgtggtctaagrttcagcctgaaactcatagacactgatctggctgcagttttgctatctgggctgtgggcaagcctaagggatcctgcctgcccctaccctggacttgcctytgcacaccctccagagacaacaggtaaaacagggccacatagatgctgatggagccttcccaagttgtgcttgagccaggaggcctgctagggttaggaggtccttaggcctctgagaagctctgaagaactctctggaagcccctgggcccagtayctagctggctctgtgrgggtgctgactggcttcagcaagttagaactagccaaaccaggaccctgtccaatctttgacaattgggagctgccaagagtgaagggaagagacagcccaggatactggcacagaggtagtctcactgcttgaactaggctgagcaatctgaccctatgggtctaggacacagttcctgggaacatcacattcctctgcccttcctgcaggcaggaacaaacagggctgccttcyggccttgtaagacccttattgctgtcctggaggggctggggacttgtgtctgcggggatcagagcgcacagggagtgcacatatccaggcaccaggactagggctggagtgaggggggggtatttcaattaccttctattggtctcccttctctacactcttgtaataaaatgtctatttttaatgtttgtacacaacaatccttctattctagcctgcattgagcttgcatgcttgcataagagcttaagaaccattgatttaatgtaatagggaaaattctaacccaggtatccaaaaatgtgtaagaacaactacctgagctaaataaagatattgttcagaaatcct

SEQ ID NO: 7117 - DNA, 2610 bp, Homo sapiens
ctcaccctgaaggtgacagttccttggaaccttccctgatccttgtgatcccaggctccaagagtccacccttcccagctcagctcagtacctcagcagccacctccaagatccctacactgatcatgcttttcccaatctccatgtcggccacggagtttcttctggcctctgtcatcttctgtctggtattctgggtaatcagggcctcaagacctcaggtccccaaaggcctgaagaatccaccagggccatggggctggcctctgattgggcacatgctgaccctgggaaagaacccgcacctggcactgtcaaggatgagccagcagtatggggacgtgctgcagatccgaaytggctccacacccgtggtggtgctgagcggcctggacaccatcyrgcaggccctggtgcggcagggcgatgatttcaagggccggcccgacctctacaccttcaccctcatcagtaatggtcagagcatgtccttcagcccagactctggaccagtgtgggctgcccgccggcgcctggcccagaatggcctgaaaagtttctccattgcctctgacccagcctcctcaacctcctgctacctggaagagcatgtgagcaaggaggctgaggtcctgataagcacgttgcaggagctgatggcagggcctgggcactttaacccctacaggtatgtggtggtatcagtgaccaatgtcatctgtgccatttgctttggccggcgctatgaccacaaccaccaagaactgcttagcctagtcaacctgaataataatttcggggaggtggttggctctggaaacccagctgacttcatcyctattcttcgctacctacccaacccttccctgaatgccttcaaggacctgaatgagaagttctacagcttcatgcagaagatggtcaaggagcactacaaaacctttgagaagggccacatccgggacatcacagacagcctgattgagcactgtcaggagaagcagctggatgagaacgccaatgtccagctgtcagatgagaagatcattaacatcgtcttggacctctttggagctgggtttgacacagtcacaactgctatctcctggagcctcatgtatttggtgatgaaccccagggtacagagaaagatccaagaggagctagacacagtgattggcaggtcacggcggccccggctctctgacagatcccatctgccctatatggaggccttcatcctggagaccttccgacactcttccttmgtccccttcaccatcccccacagcacaacaagagacacaagtttgaaaggcttttacatccccaaggggcgttgtgtctttgtaaaccagtggcagatcaaccatgaccagaagctatgggtcaacccatctgagttcctacctgaacggtttctcacccctgatggtgctatcgacaaggtgttaagtgagaaggtgattatctttggcatgggcaagcggaagtgtatcggtgagamcrttgsccgctgggaggtctttctcttcctggctatcctgctgcaacgggtggaattcagcrtgccactgggcgtgaaggtggacatgacccccatctatgggctaaccatgaagcatgcctgctgtgagcacttccaaatgcagctgcgctcttaggtgcttgagagccctgaggcctagactctgtctacctggtctggttgggcagccagaccagcaggctggcctatgtggtctaagrttcagcctgaaactcatagacactgatctggctgcagttttgctatctgggctgtgggcaagcctaagggatcctgcctgcccctaccctggacttgcctytgcacaccctccagagacaacaggtaaaacagggccacatagatgctgatggagccttcccaagttgtgcttgagccaggaggcctgctagggttaggaggtccttaggcctctgagaagctctgaagaactctctggaagcccctgggcccagtayctagctggctctgtgrgggtgctgactggcttcagcaagttagaactagccaaaccaggaccctgtccaatctttgacaattgggagctgccaagagtgaagggaagagacagcccaggatactggcacagaggtagtctcactgcttgaactaggctgagcaatctgaccctatgggtctaggacacagttcctgggaacatcacattcctctgcccttcctgcaggcaggaacaaacagggctgccttcyggccttgtaagacccttattgctgtcctggaggggctggggacttgtgtctgcggggatcagagcgcacagggagtgcacatatccaggcaccaggactagggctggagtgaggggggggtatttcaattaccttctattggtctcccttctctacactcttgtaataaaatgtctatttttaatgtttgtacacaacaatccttctattctagcctgcattgagcttgcatgcttgcataagagcttaagaaccattgatttaatgtaatagggaaaattctaacccaggtatccaaaaatgtgtaagaacaactacctgagctaaataaagatattgttcagaaatcct

SEQ ID NO: 7118 - DNA, 2296 bp, Homo sapiens
tgcatttctcagaacttatccctgttgttcaatgatgtgtgtctatacagtggggccataactaagacgtatgttgcccaagctggcaagatagctctgaccttctcttgggcccctcatttcccccaaacacaggttgtctgcagtcttgaccaatggctgccagggcatggactccgctgcaggggccagtgggaggccccagctcaggcaaaagcacaggcagatatttcaggagtctgctagggctggcactgagggcagagacagaggggtctccctgtcctttggagaacctcacgctgcagaaattccagactgaaccttcataccgagtaggggaggagctgtctgcgggtttgagcctgcagcaggaggaaggacgtgaacattttatcagcttctggtatggccttgagctggtagttataatcttggccctggtggcccagggctacagtcatcctagcagtccccgctgaagtggagcaggtacagtcacagctgtggggacagcatgctggccaagggtcttcccccacgctcagtcctggtcaaaggctrccagacctttctgagtgcccccagggaggggctggggcgtctcagggtgcccactggcgagggagctggcatctccacccgcagtcctcgccccttcaatgagatcccctctcctggtgacaatggctggctaaacctgtaccatttctggagggagacgggcacacacaaagtccaccttcaccatgtccagaatttccagaagtatggcccgatttacagggagaagctcggcaacgtggagtcggtttatgtcatcgaccctgaagatgtggcccttctctttaagtccgagggccccaacccagaacgattcctcatcccgccctgggtcgcctatcaccagtattaccagagacccataggagtcctgttgaagaagtcggcagcctggaagaaagaccgggtggccctgaaccaggaggtgatggctccagaggccaccaagaactttttgcccctgttggatgcagtgtctcgggacttcrtcagtgtcctgcacaggcgcatcaagaaggcgggctccggaaattactcgggggacatcagtgatgacctgttccgctttgcctttgagtccatcactaaygtcatttttggggagcgccaggggatgctggaggaagtagtgaaccccgaggcccagcgattcattgatgccatctaccagatgttccacaccagcgtccccatgctcaaccttcccccagacctgttccgtctgttcaggaccaagacctggaaggaccatgtggctgcatgggacgtgattttcagtaaagctgacatatacacccagaacttctactgggaattgagacagaaaggaagtgttcaccacgattaccgtggcatsctctacagactcctgggagacagcaagatgtccttyraggacatcaaggccaacgtcacagagatgctggcaggaggggtggacacgacgtccatgaccctgcagtggcacttgtatgagatggcacgcaacctgaaggtgcaggatatgctgygggcagaggtcttggctgcgcggcaccaggcccrgggagacatggccacgatgctacagctggtccccctcctcaaagccagcatcaaggagacactaaggcaacttcaccccatctccgtgaccctgcagagatatcttgtaaatgacttggttcttcgagattacatgattcctgccaagacactggtgcaagtggccatctatgctctgggccgagagcccaccttcttcttcgacccggaaaattttgacccaacccgatggctgagcaaagacaagaacatcacctacttccggaacttgggctttggctggggtgtgcggcagtgtctgggacggcggatcgctgagctagagatgaccatcttcctcatcaatatgctggagaacttcagagttgaaatccaacacctcagcgatgtgggcaccacattcaacctcattctgatgcctgaaaagcccatctccttcaccttctggccctttaaccaggaagcaacccagcagtgatcagagaggatggcctgcagccacatgggaggaaggcccaggggtggggcccatggggtctctgcatcttcagtcgtctgtcccaagtcctgctcctttctgcccagcctgctcagcaggttgaatgggttctcagtggtcaccttcctcagctcagctgggccactcctcttcacccaccccatggagacaataaacagctgaaccatg

SEQ ID NO: 7119 - DNA, 2293 bp, Homo sapiens
tgcatttctcagaacttatccctgttgttcaatgatgtgtgtctatacagtggggccataactaagacgtatgttgcccaagctggcaagatagctctgaccttctcttgggcccctcatttcccccaaacacaggttgtctgcagtcttgaccaatggctgccagggcatggactccgctgcaggggccagtgggaggccccagctcaggcaaaagcacaggcagatatttcaggagtctgctagggctggcactgagggcagagacagaggggtctccctgtcctttggagaacctcacgctgcagaaattccagactgaaccttcataccgagtaggggaggagctgtctgcgggtttgagcctgcagcaggaggaaggacgtgaacattttatcagcttctggtatggccttgagctggtagttataatcttggccctggtggcccagggctacagtcatcctagcagtccccgctgaagtggagcaggtacagtcacagctgtggggacagcatgctggccaagggtcttcccccacgctcagtcctggtcaaaggctrccagacctttctgagtgcccccagggaggggctggggcgtctcagggtgcccactggcgagggagctggcatctccacccgcagtcctcgccccttcaatgagatcccctctcctggtgacaatggctggctaaacctgtaccatttctggagggagacgggcacacacaaagtccaccttcaccatgtccagaatttccagaagtatggcccgatttacagggagaagctcggcaacgtggagtcggtttatgtcatcgaccctgaagatgtggcccttctctttaagtccgagggccccaacccagaacgattcctcatcccgccctgggtcgcctatcaccagtattaccagagacccataggagtcctgttgaagaagtcggcagcctggaagaaagaccgggtggccctgaaccaggaggtgatggctccagaggccaccaagaactttttgcccctgttggatgcagtgtctcgggacttcrtcagtgtcctgcacaggcgcatcaagaaggcgggctccggaaattactcgggggacatcagtgatgacctgttccgctttgcctttgagtccatcactaaygtcatttttggggagcgccaggggatgctggaggaagtagtgaaccccgaggcccagcgattcattgatgccatctaccagatgttccacaccagcgtccccatgctcaaccttcccccagacctgttccgtctgttcaggaccaagacctggaaggaccatgtggctgcatgggacgtgattttcagtaaagctgacatatacacccagaacttctactgggaattgagacagaaaggaagtgttcaccacgattaccgtggcatsctctacagactcctgggagacagcaagatgtccttyraggacatcaaggccaacgtcacagagatgctggcaggaggggtggacacgacgtccatgaccctgcagtggcacttgtatgagatggcacgcaacctgaaggtgcaggatatgctgygggcagaggtcttggctgcgcggcaccaggcccrgggagacatggccacgatgctacagctggtccccctcctcaaagccagcatcaaggagacactaagacttcaccccatctccgtgaccctgcagagatatcttgtaaatgacttggttcttcgagattacatgattcctgccaagacactggtgcaagtggccatctatgctctgggccgagagcccaccttcttcttcgacccggaaaattttgacccaacccgatggctgagcaaagacaagaacatcacctacttccggaacttgggctttggctggggtgtgcggcagtgtctgggacggcggatcgctgagctagagatgaccatcttcctcatcaatatgctggagaacttcagagttgaaatccaacacctcagcgatgtgggcaccacattcaacctcattctgatgcctgaaaagcccatctccttcaccttctggccctttaaccaggaagcaacccagcagtgatcagagaggatggcctgcagccacatgggaggaaggcccaggggtggggcccatggggtctctgcatcttcagtcgtctgtcccaagtcctgctcctttctgcccagcctgctcagcaggttgaatgggttctcagtggtcaccttcctcagctcagctgggccactcctcttcacccaccccatggagacaataaacagctgaaccatg

SEQ ID NO: 7120 - DNA, 3128 bp, Homo sapiens
gaagctccacaccagccattacaaccctgccaatctcaagcacctgcctctacagttggtacagatggcattgtcccagtctgttcccttctcggccacagagcttctcctggcctctgccatcttctgcctggtattctgggtgctcaagggtttgaggcctcgggtccccaaaggcctgaaaagtccaccaragccatggggctggcccttgctcgggcatgtgctgaccctggggaagaacccgcacctggcactgtcaaggatgagccagcgctacggggacgtcctgcagatccgcattggctccacgcccgtgctggtgctgagccgcctggacaccatccggcaggccctggtgcggcagggcgacgatttcaagggccggcctgacctctacacctccaccctcatcactgatggccagagcttgaccttcagcacagactctggaccggtgtgggctgcccgccggcrcctggcccagaatgccctcaacaccttctccatcgcctctgacccagcttcctcatcctcctgctacctggaggagcatgtgagcaaggaggctaaggccctgatcagcaggttgcaggagctgatggcagggcctgggcacttcgacccttacaatcaggtggtggtgtcagtggccaacgtcattggtgccatgtgcttcggacagcacttccctgagagtagcgatgagatgctcagcctcgtgaagaacactcatgagttcgtggagactgcctcctccgggaaccccctggacttcttccccatccttcgctacctgcctaaccctgccctgcagaggttcaaggccttcaaccagaggttcctgtggttcctgcagaaaacagtccaggagcactatcaggactttgacaagaacagtgtccgggacatcacgggtgccctgttcaagcacagcaagaaggggcctagagccagmggcaacctcatcccacaggagaagattgtcaaccttgtcaatgacatctttggagcaggatttgacacagtcaccacagccatctcctggagcctcatgtaccttgtgaccaagcctgagatacagaggaagatccagaaggagctggacactgtgattggcagggagcggcggccccggctctctgacagaccccagctgccctacttggaggccttcatcctggagaccttccgacactcctccttcttgcccttcaccatcccccacagcacaacaagggacacaacgctgaatggcttctacatccccaaraaatgctgtgtcttcgtaaaccagtggcaggtcaaccatgacccagagctgtgggaggacccctctgagttccggcctgagcggttcctcaccgccgatggcactgccattaacaagcccttgagtgagaagatgatgctgtttggcatgggcaagcgccggtgtatcggggaagtcctggccaagtgggagatcttcctcttcctggccatcctgctacagcaactggagttcagcgtgccgccgggcgtgaaagtcgacctgacccccatctacgggctgaccatgaagcacgcccgctgtgaacatgtccaggcgcggctgcgcttctccatcaaytgaagaagacaccaccattctgaggccagggagcgagtgggggccagccacggggactcagcccttgtttctcttcctttctttttttaaaaaatagcagctttagccaagtgcagggcctgtaatcccagcattttaggaggccaaggttggaggatcatttgagcccaggarttggaaagcagcctggccaacatagtgggaccctgtctctacaaaaaaaaaatttgccaagagcctgagtgacagagcaagaccccatctcaaaaaaaaaaacaaacaaacaaaaaaaaaaccatatatatacatatatatatagcagctttatggagatataattcttatgccatataattcaccttcttttttttttttttgtctgagacagaatctcagtctgtcacccaggttggagtgcagtggcgtgatctcagctcactgcaacctccacctcgcaggttcaagcaatcctcccacttcagcctcccaagcacctgggattacaagcatgagtcactacgcctggctgatttttgtagttttrgtggagatggggtttcaccatgttggccaggcttgtctcgaactcctgaccccaagttatccacctgccttggcttcccaaagtcctgggattacaggtgtgagccaccacatccagcctaacttacattcttaaagtgtcgaatgacttctagtgtagaattgtgcaaccatcaccagaattaattttattattcttattatttttgagacagagtcttactctgttgccaggctggagtgcagtggcgcgatctcagctcactacaacctccgcctcccatgttcaagcgattctcctgcctcagcctcccgagtagctgggactataggcatgcgccaccatggccagctaatttttgtatttttagtagagacgaggtttcactgtgttggccaggatggtctccatctcttgacctcgtgatccacccgcctcagcctcccaaagtgctgggattaacaggtatgaaccaccgcgcccagcctttttgttttttttttttttgagacagagtcttcctctgtctcctaagctggagtgcagtggcatcatctcagctcactgcaacctctgcctcccaggttcaagtgcttctccagcctcagcctcccaagtagctgagactacaggcacacaccaccacgcctggctaatttttgtatttttagtagagacgggtttcaccatgttggctagactagtctcaaactcctgacctcaagtgatctgcccgcctcgacctctctcaaagtgctggcattacaggtgtgagccacggtgcccggcccacaattaattttagaacattttcatcacccctaaaagaaaccctgcacccattagcagtccctccacatttccccctagcctgcctcccctgcctcaccagccctggcaactgctaatctactttctgtgtctatggatttgccttctctaaacatttcatataaatggaattacacaatg

SEQ ID NO: 7121 - DNA, 2004 bp, Homo sapiens
gctcccagcctgttgcttattcattcagagtgggaaagcgccagccgagcggccagccagtgcggggctggccatgtaaggcccacaggcggtcctgcccgcccggtgccctgcggagagcctcgtgcagccctgggcaccgcccctgccctgccctgaccccttggccttgaaatgctgtcatcggaggagccgtcccgctcgggacaaggccagcatggacaaagctagagctggggcaagcaaggagccttcctgtcctcgaggccgtgggaagagaagcacgcccagggggccactcctgagagcctctctgtccaccaggcctctgcagaggggtcaccatggctctggcccgaggcagccggcagctgggggccctggtgtggggcgcctgcctgtgcgtgctggtgcacgggcagcaggcgcagcccgggcagggctcggaccccgcccgctggcggcagctgatccagtgggagaacaacgggcaggtgtacagcttgctcaactcgggctcagagtacgtgccggccggacctcagcgctccgagagtagctcccgggtgctgctggccggcgcgccccaggcccagcagcggcgcagccacgggagcccccggcgtcggcaggcgccgtccctgcccctgccggggcgcgtgggctcggacaccgtgcgcggccaggcgcggcacccattcggctttggccaggtgcccgacaactggcgcgaggtggccgtcggggacagcacgggcatggccckggcccgcacctccgtctcccagcaacggcacggggrctccgcctcctcggtcgcggcttcggccttcgccagcacctaccgccagcagccctcctacccgcagcagttcccctacccgcaggcgcccttcgtcagccagtacgagaactacgaccccgcgtcgcggacctacgaccagggtttcgtgtactaccggcccgcgggcggcggcgtgggcgcgggggcggcggccgtggcctcggcgggggtcatctacccctaccagccccgggcgcgctacgaggagtacggcggcggcgaagagctgcccgagtggtctccctgacttggtcccagaccccaactatgtgcaagcatccacttatgtgcagagagcccacctgtactccctgcgctgtgctgcggaggagaagtgtctggccagcacagcctatgcccctgaggccaccgactacgatgtgcgggtgctactgcgcttcccccagcgcgtgaagaaccagggcacagcagacttcctccccaaccggccacggcacacctgggagtggcacagctgccaccagcattaccacagcatggacgagttcagccactacgacctactggatgcagccacaggcaagaaggtggccgagggccacaaggccagtttctgcctggaggacagcacctgtgacttcggcaacctcaagcgctatgcatgcacctctcatacccagggcctgagcccaggctgctatgacacctacaatgcggacatcgactgccagtggatcgacataaccgacgtgcagcctgggaactacatcctcaaggtgcacgtgaacccaaagtatattgttttggagtctgacttcaccaacaacgtggtgagatgcaacattcactacacaggtcgctacgtttmtgcaacaaactgcaaaattgtccaatcctgatctccgggagggacagatggccaatctctccccttccaaagcaggccctgctccccgggcagcctcccgccgaggggcccagcccccaacccacaggcasggaggggcatccctccctgccggcctcagggagcgaacgtggatgaaaaccacagggattccggaygccagaccccattttatacttcacttttctctacagtgttgttttgttgttgttggtttttattttttatactttggccataccacagagctagattgcccaggtctgggctgaataaaacaaggtttttctac

SEQ ID NO: 7122 - DNA, 4638 bp, Homo sapiens
ccccaaaccaacttgtccccatcaactccatctttctagtccccaccttccccggtgcagacacccggcgaagcccacccggttttcccagcggcatttcckatgacagcttcggggctacgtgtcctgtgctgtcggagacgcacaggaagcaaagtttgtgagaagccttgggggcgactttgccttgggcacccgcatttgtgcgtctgcgaggtgcctcggtgtgcgcggagctagtttcccagtttcccgggcccctcccttctccgagcccctctagcgatttgtttaggaaaagtgatgacatgaactagtagtggagaatcgcagcgccgctccccgccctggggagggaggggagccccggagagcctgccggtgggagctggaagcaggctcccggctgagcgccccagcccgaaaggcagggtctgggtgcgggaagagggctcggagctgccttcctgctgccttggggccgcccagatgagggaacagcccgatttgcctggttctgattctccaggctgtcgtggttgtggaatgcaaacgccagcacataatggaaacaggacctgaagacccttccagcatgccagaggaaagttcccccaggcggaccccgcagagcattccctaccaggacctccctcacctggtcaatgcagacggacagtacctcttctgcaggtactggaaacccacaggcacacccaaggccctcatctttgtgtcccatggagccggagagcacagtggccgctatgaagagctggctcggatgctgatggggctggacctgctggtgttcgcccacgaccatgttggccacggacagagcgaaggggagaggatggtagtgtctgacttccacgttttcgtcagggatgtgttgcagcatgtggattccatgcagaaagactaccctgggcttcctgtcttccttctgggccactccatgggaggcgccatcgccatcctcacggccgcagagaggccgggccacttcgccggcatggtactcatttcgcctctggttcttgccaatcctgaatctgcaacaactttcaaggtccttgctgcgaaagtgctcaaccttgtgctgccaaacttgtccctcgggcccatcgactccagcgtgctctctcggaataagacagaggtcgacatttataactcagaccccctgatctgccrggcagggctgaaggtgtgcttcggcatccaactgctgaatgccgtctcacgggtggagcgcgccctccccaagctgactgtgcccttcctgctgctccagggctctgccgatcgcctrtgtgacagcaaaggggcctacctgctcatggagttagccaagagccaggacaagactctcaagatttatgaaggtgcctaccatgttctccacaaggagcttcctgaagtcaccaactccgtcttccatgaaataaacatgtgggtctctcaaaggacagccacggcaggaactgcgtccccaccctgaatgcattggccggtgcccggctcatggtctgggggatgcaggcaggggaagggcagagatggcttctcagatatggcttgcmaaaaaaaaaaaaaaaaaaaaaatcagaaattggagaaatccttarcacaattttctaaaaaataacagacatttttgttatacattagactatcagacactggacctaccttaatggttagacactttatgcaaaaaaagagaaaggtcccaggtgattttccacaaagaatgtgctaaaatgtccactgaaaacaaagccaagcctctgccctgcctctcccagctcccacaagggttccaggaattcctggtgttcccaggacaccagactgcaataactggaggcgcctccttcctgcccacccttcgctcacgccccagcgccctctctgaccagcctccgcttggtggccttcctctggccgtgtgatgaggtggttgctgtctccataggggccagctccccagggcagactcacgtgcccctctgaggctcagaaaatgcccagcccttcctcaaaatgagcagccacccatgactttgtgggctccttgttagcctgagaccaggctttgcagaggggcggggggtgaggcttakcccagaaggagaactgagcaggaaaccaaggctcttctctgtcccctgcccttcccctcctgccagggggaggctcaggttggtccccgagtgccgcctgtactcacaaaggctgcctttcctctagagtcactaattttacctgatgctatgagagaatcatattgaagatgaaatgtctaatatataatgtatattttaaagcagagactattttggtggataggtgggagggagcaaggggagtttgagggaatcagagcttgatgctactgtacagaactggacaggttgggccggcagtggtggggccagagggctctgtgctctaggagctaagccagcagcccccgagaggggacttggctgggcctttcctatgggcaaggcccagtgctcttcctgcccaccagggaccatggagcagtggcaccctatggggctatgatccctaggcctgggcctgggcctgcctrtggcccagagctaccctgggagtgtcagtgctagcagcacagctacctctggtggcaggagaagagaggcccagcacagcagcaggccaggccttcctgtccaggtctgcatggagcactcggtgacccagagcagggactggaggcacccccagccctgccccaggccacagcaggacaggccgggacaggcctcacccaaggccaaggctggcatcagccaatcattcagagctgaggccctgggcctagcctgcccttctcaggtgccaataccaccccagccctgcccttggcctcactttttcccagcaataagtggggttcaccacccgcctcgggaatactttccccttctaaatgggacttgctgttacctcaggaggctccttagtgcaaatatgaccctggtcagggctttgccaccgttgaagccctgcagaaggtgcaatgtaggggttctggggccacagaggagaggccacttcccaccaggacccccaacatgaagtctaggcctcaggggctcccgcccttcttcctccagcagcgggaactgccactgctctcccaggccctgttctggaggctaaccttggttcctggagagtgtgcccctccaccctccctccagcagccctgatcacaccatgagagccaggaacgggtcaccctgctgaagatcactctgtgccctgggggaggagccaagccctcaccccacaaggggcaggtgggggcttggttgctgacccggcccaagtccccacagagcaccttctgtagctccagcttgtctccctggcttctctttgaaggagaaaaatgtaaaatatgcactgagaaagccagccccgcctgcttagtcagccccggcagcagggcagccatgggaactcaggaaaagcaggaaccctttccaaaagcccagagatgccctgggctcagatctgtaattctcccaggagctgtgatagagcaggccacacaaagtccctacgcctccctgctgcctcccccagatgcatgtgrtggcatcaccattccccaaattgaatatcagcatgcggcctgaccagggactctttagatgcatgaatttatttatatgaaggctctcacagagacacacacagcacttcagtagcatttgcattcctggttaaagaatcaccaatatttaaaataaaaactttcctgaaattgggactgtcatgttatccagaagggctggtacatccgcccaccatgtccccctgctgggtcaggagccaacacaggaccctgcgtgtgagcgtgcctgacatctcacgcacggccactccagagccggtccctgtccttggaaagctgtgaagccttgcgttgagttccttctcgatactgacggctccgtgctgacattctgagctctggagtcacaccagcgcaggggcgtggaggaactgaggtttggaaggaatgccaggtctcgcacagcttggcctcgagaaggtgagaggaaggcaaaggccagggaggggacccagagaggcctggcacacaaggcccaagcaccaccgtcaacacagcccagtccatacagaaatgggtttcatgcctgaaaagctttttacagaaagatgccgcctgtagccagtgacagccgcaaccctacaggcctcagttccttgcagaggtgaggggtagagagtcagcctcyctcccttccagcagcgacccagcttccctccacttccaggtggtgctgggctcaccragggagcactggtgggtgctctgaaaacccacaggatcccacctccaggcccacctgggtcccatctcactctcttcttctttcaccaattgctaacatagaccttgttgggatcacgatggcttcacaagccagctgttgggtttgctatgtcactgtggctcagtcacatccctgcgtgtatactgtctgcggggcacatatgtatccatttagagctaaaggaatcagtgtacactacagctaatcctaataaatccgatgttttcgg

SEQ ID NO: 7123 - DNA, 4589 bp, Homo sapiens
ccccaaaccaacttgtccccatcaactccatctttctagtccccaccttccccggtgcagacacccggcgaagcccacccggttttcccagcggcatttcckatgacagcttcggggctacgtgtcctgtgctgtcggagacgcacaggaagcaaagtttgtgagaagccttgggggcgactttgccttgggcacccgcatttgtgcgtctgcgaggtgcctcggtgtgcgcggagctagtttcccagtttcccgggcccctcccttctccgagcccctctagcgatttgtttaggaaaagtgatgacatgaactagtagtggagaatcgcagcgccgctccccgccctggggagggaggggagccccggagagcctgccggtgggagctggaagcaggctcccggctgagcgccccagcccgaaaggcagggtctgggtgcgggaagagggctcggagctgccttcctgctgccttggggccgcccagatgagggaacagcccgatttgcctggttctgattctccaggctgtcgtggttgtggaatgcaaacgccagcacataatggaaacaggacctgaagacccttccagcatgccagaggaaagttcccccaggcggaccccgcagagcattccctaccaggacctccctcacctggtcaatgcagacggacagtacctcttctgcaggtactggaaacccacaggcacacccaaggccctcatctttgtgtcccatggagccggagagcacagtggccgctatgaagagctggctcggatgctgatggggctggacctgctggtgttcgcccacgaccatgttggccacggacagagcgaaggggagaggatggtagtgtctgacttccacgttttcgtcagggatgtgttgcagcatgtggattccatgcagaaagactaccctgggcttcctgtcttccttctgggccactccatgggaggcgccatcgccatcctcacggccgcagagaggccgggccacttcgccggcatggtactcatttcgcctctggttcttgccaatcctgaatctgcaacaactttcaaggtccttgctgcgaaagtgctcaaccttgtgctgccaaacttgtccctcgggcccatcgactccagcgtgctctctcggaataagacagaggtcgacatttataactcagaccccctgatctgccrggcagggctgaaggtgtgcttcggcatccaactgctgaatgccgtctcacgggtggagcgcgccctccccaagctgactgtgcccttcctgctgctccagggctctgccgatcgcctrtgtgacagcaaaggggcctacctgctcatggagttagccaagagccaggacaagactctcaagatttatgaaggtgcctaccatgttctccacaaggagcttcctgaagtcaccaactccgtcttccatgaaataaacatgtgggtctctcaaaggacagccacggcaggaactgcgtccccaccctgaatgcattggccggtgcccggctcatggtctgggggatgcaggcaggggaagggcagagatggcttctcagatatggcttgcmaaaaaaaaaaaaaaaaaaaaaatcagaaattggagaaatccttarcacaattttctaaaaaataacagacatttttgttatacattagactatcagacactggacctaccttaatggttagacactttatgcaaaaaaagagaaaggtcccaggtgattttccacaaagaatgtgctaaaatgtccactgaaaacaaagccaagcctctgccctgcctctcccagctcccacaagggttccaggaattcctggtgttcccaggacaccagactgcaataactggaggcgcctccttcctgcccacccttcgctcacgccccagcgccctctctgaccagcctccgcttggtggccttcctctggccgtgtgatgaggtggttgctgtctccataggggccagctccccagggcagactcacgtgcccctctgaggctcagaaaatgcccagcccttcctcaaaatgagcagccacccatgactttgtgggctccttgttagcctgagaccaggctttgcagaggggcggggggtgaggcttakcccagaaggagaactgagcaggaaaccaaggctcttctctgtcccctgcccttcccctcctgccagggggaggctcaggttggtccccgagtgccgcctgtactcacaaaggctgcctttcctctagagtcactaattttacctgatgctatgagagaatcatattgaagatgaaatgtctaatatataatgtatattttaaagcagagactattttggtggataggtgggagggagcaaggggagtttgagggaatcagagcttgatgctactgtacagaactggacaggttgggccggcagtggtggggccagagggctctgtgctctaggagctaagccagcagcccccgagaggggacttggctgggcctttcctatgggcaaggcccagtgctcttcctgcccaccagggaccatggagcagtggcaccctatggggctatgatccctaggcctgggcctgggcctgcctrtggcccagagctaccctgggagtgtcagtgctagcagcacagctacctctggtggcaggagaagagaggcccagcacagcagcaggccaggccttcctgtccaggtctgcatggagcactcggtgacccagagcagggactggaggcacccccagccctgccccaggccacagcaggacaggccgggacaggcctcacccaaggccaaggctggcatcagccaatcattcagagctgaggccctgggcctagcctgcccttctcaggtgccaataccaccccagccctgcccttggcctcactttttcccagcaataagtggggttcaccacccgcctcgggaatactttccccttctaaatgggacttgctgttacctcaggaggctccttagtgcaaatatgaccctggtctggggccacagaggagaggccacttcccaccaggacccccaacatgaagtctaggcctcaggggctcccgcccttcttcctccagcagcgggaactgccactgctctcccaggccctgttctggaggctaaccttggttcctggagagtgtgcccctccaccctccctccagcagccctgatcacaccatgagagccaggaacgggtcaccctgctgaagatcactctgtgccctgggggaggagccaagccctcaccccacaaggggcaggtgggggcttggttgctgacccggcccaagtccccacagagcaccttctgtagctccagcttgtctccctggcttctctttgaaggagaaaaatgtaaaatatgcactgagaaagccagccccgcctgcttagtcagccccggcagcagggcagccatgggaactcaggaaaagcaggaaccctttccaaaagcccagagatgccctgggctcagatctgtaattctcccaggagctgtgatagagcaggccacacaaagtccctacgcctccctgctgcctcccccagatgcatgtgrtggcatcaccattccccaaattgaatatcagcatgcggcctgaccagggactctttagatgcatgaatttatttatatgaaggctctcacagagacacacacagcacttcagtagcatttgcattcctggttaaagaatcaccaatatttaaaataaaaactttcctgaaattgggactgtcatgttatccagaagggctggtacatccgcccaccatgtccccctgctgggtcaggagccaacacaggaccctgcgtgtgagcgtgcctgacatctcacgcacggccactccagagccggtccctgtccttggaaagctgtgaagccttgcgttgagttccttctcgatactgacggctccgtgctgacattctgagctctggagtcacaccagcgcaggggcgtggaggaactgaggtttggaaggaatgccaggtctcgcacagcttggcctcgagaaggtgagaggaaggcaaaggccagggaggggacccagagaggcctggcacacaaggcccaagcaccaccgtcaacacagcccagtccatacagaaatgggtttcatgcctgaaaagctttttacagaaagatgccgcctgtagccagtgacagccgcaaccctacaggcctcagttccttgcagaggtgaggggtagagagtcagcctcyctcccttccagcagcgacccagcttccctccacttccaggtggtgctgggctcaccragggagcactggtgggtgctctgaaaacccacaggatcccacctccaggcccacctgggtcccatctcactctcttcttctttcaccaattgctaacatagaccttgttgggatcacgatggcttcacaagccagctgttgggtttgctatgtcactgtggctcagtcacatccctgcgtgtatactgtctgcggggcacatatgtatccatttagagctaaaggaatcagtgtacactacagctaatcctaataaatccgatgttttcgg

SEQ ID NO: 7124 - DNA, 4206 bp, Homo sapiens
ccgcggggtaccggcgtcgccacccacctcgggccgcccccgccgcgagcccggcccagggataaagtggcggcgcagacgccgcaccctgtcgccgcgaagccggtcgcgcgcagctcgtcccggccctggcccgccgcaaacgaggatccgctgcgctcggggaacgcgacagcggcgctcgtggccccggacctgaagacccttccagcatgccagaggaaagttcccccaggcggaccccgcagagcattccctaccaggacctccctcacctggtcaatgcagacggacagtacctcttctgcaggtactggaaacccacaggcacacccaaggccctcatctttgtgtcccatggagccggagagcacagtggccgctatgaagagctggctcggatgctgatggggctggacctgctggtgttcgcccacgaccatgttggccacggacagagcgaaggggagaggatggtagtgtctgacttccacgttttcgtcagggatgtgttgcagcatgtggattccatgcagaaagactaccctgggcttcctgtcttccttctgggccactccatgggaggcgccatcgccatcctcacggccgcagagaggccgggccacttcgccggcatggtactcatttcgcctctggttcttgccaatcctgaatctgcaacaactttcaaggtccttgctgcgaaagtgctcaaccttgtgctgccaaacttgtccctcgggcccatcgactccagcgtgctctctcggaataagacagaggtcgacatttataactcagaccccctgatctgccrggcagggctgaaggtgtgcttcggcatccaactgctgaatgccgtctcacgggtggagcgcgccctccccaagctgactgtgcccttcctgctgctccagggctctgccgatcgcctrtgtgacagcaaaggggcctacctgctcatggagttagccaagagccaggacaagactctcaagatttatgaaggtgcctaccatgttctccacaaggagcttcctgaagtcaccaactccgtcttccatgaaataaacatgtgggtctctcaaaggacagccacggcaggaactgcgtccccaccctgaatgcattggccggtgcccggctcatggtctgggggatgcaggcaggggaagggcagagatggcttctcagatatggcttgcmaaaaaaaaaaaaaaaaaaaaaatcagaaattggagaaatccttarcacaattttctaaaaaataacagacatttttgttatacattagactatcagacactggacctaccttaatggttagacactttatgcaaaaaaagagaaaggtcccaggtgattttccacaaagaatgtgctaaaatgtccactgaaaacaaagccaagcctctgccctgcctctcccagctcccacaagggttccaggaattcctggtgttcccaggacaccagactgcaataactggaggcgcctccttcctgcccacccttcgctcacgccccagcgccctctctgaccagcctccgcttggtggccttcctctggccgtgtgatgaggtggttgctgtctccataggggccagctccccagggcagactcacgtgcccctctgaggctcagaaaatgcccagcccttcctcaaaatgagcagccacccatgactttgtgggctccttgttagcctgagaccaggctttgcagaggggcggggggtgaggcttakcccagaaggagaactgagcaggaaaccaaggctcttctctgtcccctgcccttcccctcctgccagggggaggctcaggttggtccccgagtgccgcctgtactcacaaaggctgcctttcctctagagtcactaattttacctgatgctatgagagaatcatattgaagatgaaatgtctaatatataatgtatattttaaagcagagactattttggtggataggtgggagggagcaaggggagtttgagggaatcagagcttgatgctactgtacagaactggacaggttgggccggcagtggtggggccagagggctctgtgctctaggagctaagccagcagcccccgagaggggacttggctgggcctttcctatgggcaaggcccagtgctcttcctgcccaccagggaccatggagcagtggcaccctatggggctatgatccctaggcctgggcctgggcctgcctrtggcccagagctaccctgggagtgtcagtgctagcagcacagctacctctggtggcaggagaagagaggcccagcacagcagcaggccaggccttcctgtccaggtctgcatggagcactcggtgacccagagcagggactggaggcacccccagccctgccccaggccacagcaggacaggccgggacaggcctcacccaaggccaaggctggcatcagccaatcattcagagctgaggccctgggcctagcctgcccttctcaggtgccaataccaccccagccctgcccttggcctcactttttcccagcaataagtggggttcaccacccgcctcgggaatactttccccttctaaatgggacttgctgttacctcaggaggctccttagtgcaaatatgaccctggtctggggccacagaggagaggccacttcccaccaggacccccaacatgaagtctaggcctcaggggctcccgcccttcttcctccagcagcgggaactgccactgctctcccaggccctgttctggaggctaaccttggttcctggagagtgtgcccctccaccctccctccagcagccctgatcacaccatgagagccaggaacgggtcaccctgctgaagatcactctgtgccctgggggaggagccaagccctcaccccacaaggggcaggtgggggcttggttgctgacccggcccaagtccccacagagcaccttctgtagctccagcttgtctccctggcttctctttgaaggagaaaaatgtaaaatatgcactgagaaagccagccccgcctgcttagtcagccccggcagcagggcagccatgggaactcaggaaaagcaggaaccctttccaaaagcccagagatgccctgggctcagatctgtaattctcccaggagctgtgatagagcaggccacacaaagtccctacgcctccctgctgcctcccccagatgcatgtgrtggcatcaccattccccaaattgaatatcagcatgcggcctgaccagggactctttagatgcatgaatttatttatatgaaggctctcacagagacacacacagcacttcagtagcatttgcattcctggttaaagaatcaccaatatttaaaataaaaactttcctgaaattgggactgtcatgttatccagaagggctggtacatccgcccaccatgtccccctgctgggtcaggagccaacacaggaccctgcgtgtgagcgtgcctgacatctcacgcacggccactccagagccggtccctgtccttggaaagctgtgaagccttgcgttgagttccttctcgatactgacggctccgtgctgacattctgagctctggagtcacaccagcgcaggggcgtggaggaactgaggtttggaaggaatgccaggtctcgcacagcttggcctcgagaaggtgagaggaaggcaaaggccagggaggggacccagagaggcctggcacacaaggcccaagcaccaccgtcaacacagcccagtccatacagaaatgggtttcatgcctgaaaagctttttacagaaagatgccgcctgtagccagtgacagccgcaaccctacaggcctcagttccttgcagaggtgaggggtagagagtcagcctcyctcccttccagcagcgacccagcttccctccacttccaggtggtgctgggctcaccragggagcactggtgggtgctctgaaaacccacaggatcccacctccaggcccacctgggtcccatctcactctcttcttctttcaccaattgctaacatagaccttgttgggatcacgatggcttcacaagccagctgttgggtttgctatgtcactgtggctcagtcacatccctgcgtgtatactgtctgcggggcacatatgtatccatttagagctaaaggaatcagtgtacactacagctaatcctaataaatccgatgttttcgg

SEQ ID NO: 7125 - DNA, 2255 bp, Homo sapiens
agtcctgcgatttcgggtgtagagggagcaggggcctgcggggacctggtgtgggtggagtggggacaagcggtggagaagggtacgccagggtcgctgagagactctgttytccctggagggactggttgccatgagagcagccgtctgaggggacgcagcctgcactacgcgccccaagaggctgtgcgtggcgagcaggtcacgtgacgggagcgcgggctttggaaggcggctgaacgtcaggccacccgccgctaagctgagaagggagagcgagcttaggaccgcctgcccggggcaaccccgaaccaagctttagccgccgaggccgcgtgtcccaaaggccagtcatccctcctctgtgttgccatgggaattcaaggcctggccaaactaattgctgatgtggcccccagtgccatccgggagaatgacatcaagagctactttggccgtaaggtggccattgatgcctctatgagcatttatcagttcctgattgctgttcgccagggtggggatgtgctgcagaatgaggagggtgagaccaccagccacctgatgggcatgttctaccgcaccattcgcatgatggagaacggcatcaagcccgtgtatgtctttgatggcaagccgccacagctcaagtcaggcgagctggccaaacgcagtgagcggcgggctgaggcagagaagcagctgcagcaggctcaggctgctggggccgagcaggaggtggaaaaattcactaagcggctggtgaaggtcactaagcagcacaatgatgagtgcaaacatctgctgagcctcatgggcatcccttatcttgatgcacccagtgaggcagaggccagctgtgctgccctggtgaaggctggcaaagtctatgctgcggctaccgaggacatggactgcctcaccttcggcagccctgtgctaatgcracacctgactgccagtgaagccaaaaagctgccaatccaggaattccacctgagcyggattctgcaggagctgggccwgaaccaggaacagtttgtggatctgtgcatcctgctaggcagtgactactgtgagagtatccggggtattgggcccaagcgggctgtggacctcatccagaagcacaagagcatcgaggagatcgtgcggcgacttgaccccaacaagtaccctgtgccagaaaattggctccacaaggaggctcaccagctcttcttggaacctgaggtgctggacccagagtctgtggagctgaagtggagcgagccaaatgaagaagagctgatcaagttcatgtgtggtgaaaagcagttctctgaggagcgaatccgcagtggggtcaagaggctgagtaagagccgccaaggcagcacccagggccgcctggatgatttcttcaaggtgaccggctcactctcttcagctaagcgcaaggakccagaacccaagggatccactaagaagaaggcaaagactggggcagcagggaagtttaaaaggggaaaataaatgtgtttccccattatacctccttcaccscagaatatttgccgtcttgtacccttaagagctacagctagagaaaccttcabggggtggagagaggattctaaggyttttctagcgtgacccttttcagtagtgctagtcccttttttacttgatcttaatggcaagaaggccacagaggtacttttccttttttagctcaggaaaatatgtcaggctcaaaccacttctcaggcagtttaatggacactaagtccattgttacatgaaagtgatagatagcaacaagttttggagaagagagagggagataaaagggggakacaaaagatgtacagaaatgatttcctggctggccaactggtggccagtgggaggtgatggtggacctagactgtgcttttctgtcttgttcagccttgacccaccttgagagagagccaccaggaaggcgcatcttagcagatgggaggaactgctgagagaagatgggcagaaagctggagcccctggagttggctgtgtctgtgtttgtgactgattactggctgtgtcttgggtgggcagaaactcgaacttgctatgtaatttgtgtctagttattcagaggagtaagatggtgatgttcacctggcaatcagctgagttgagactttggaataagacactggttttcatgcgctgtttttgtttyaaagttatgaagaaaaaagtcaataaaattctaaaagtaaccaaaa

SEQ ID NO: 7126 - DNA, 4917 bp, Homo sapiens
agacccaccgggggacgggatctcgctccccgcgccacgaggctcggccaatgggaacgcgcgctgcgaggcccgccggtctgccctgcggtgctgaaaacccggcgcgcaggcggctggctctgggcgcgcgccagcaaatccactcctggagcccgcggaccccgagcacgcgcctgacagcccctgctggcccggcgcgcggcgtcgccaggccagctatggcccccgacccggtggccgccgagaccgcggctcagggacctaccccgcgctacttcacctgggacgaggtggcccagcgctcagggtgcgaggagcggtggctagtgatcgaccgtaaggtgtacaacatcagcgagttcacccgccggcatccagggggctcccgggtcatcagccactacgccgggcaggatgccacggatccctttgtggccttccacatcaacaagggccttgtgaagaagtatatgaactctctcctgattggagaactgtctccagagcagcccagctttgagcccaccaagaataaagagctgacagatgagttccgggagctgcgggccacagtggagcggatggggctcatgaaggccaaccatgtcttcttcctgctgtacctgctgcacatcttgctgctggatggtgcagcctggctcaccctttgggtctttgggacgtcctttttgcccttcctcctctgtgcggtgctgctcagtgcagttcaggcccaggctggctggctgcagcatgactttgggcacctgtcggtcttcagcacctcaaagtggaaccatctgctacatcattttgtgattggccacctgaagggggcccccgccagttggtggaaccacatgcacttccagcaccatgccaagcccaactgcttccgcaaagacccagacatcaacatgcatcccttcttctttgccttggggaagatcctctctgtggagcttgggaaacagaagaaaaaatatatgccgtacaaccaccagcacaaatacttcttcctaattgggcccccagccttgctgcctctctacttccagtggtatattttctattttgttatccagcgaaagaagtgggtggacttggcctggatgattaccttctacgtccgcttcttcctcacttatgtgccactattggggctgaaagccttcctgggccttttcttcatagtcaggttcctggaaagcaactggtttgtgtgggtgacacagatgaaccatattcccatgcacattgatcatgaccggaacatggactgggtttccacccagctccaggccacatgcaatgtccacaagtctgccttcaatgactggttcagtggacacctcaacttccagattgagcaccatctttttcccacgatgcctcgacacaattaccacaaagtggctcccctggtgcagtccttgtgtgccaagcatggcatagagtaccagtccaagcccctgctgtcagccttcgccgacatcatccactcactaaaggagtcagggcagctctggctagatgcctatcttcaccaataacaacagccaccctgcccagtctggaagaagaggaggaagactctggagccaargcagaggggagcttgagggacaatgccactatagtttaatactcagagggggttgggtttggggacataaagcctctgactcaaactcctcccttttatcttctagccacagttctaagacccaaagtggggggtggacacagaagtccctaggagggaaggagctgttggggcaggggtgtaaattatttcctttttctagtttggcacatgcaggtagttggtgaacagagagaaccaggagggtaacagaagaggagggacctactgaacccagagtcaggaagagatttaacactaaaattccactcatgccgggcgtggtggcacgcgcctgtaatcccagctacccaggaggctgaggcaggagaatcgcttgaaccggggaggtggaggttgcagtgagctgagatcacgccattgtactccagcctgggcgacagagcaagactccatttcaaaaaaaaaaaaaaaatccactcatataaaaggtgagctcagctcactggtccatttctcagtgscttctccatcmtcatttgcaaacctcagagggataaggcagttgaacctgatgagcaagaattataacagcaaggaaacattaatgcttagaattctgagatccagcacaactcagtctgtgggagctcagctcgctgcccagggataggtatgacctatgtctgccttaggctgctgggagatgccattctccagtttcagaagcaggcagggcaaaggtcaagactgtggtattggggtcttttggctctgaaggatcctggaaccactgattttggtttattccctccagggtctaaagagaacaagaggtgctagctcttaccaaaacagatggtagagagagttgctggctatttaaaaagctctttcatcttttaattcacctcttcttttcacctctttaaccactcctcaggaacagaacacttctargactgggggtcttttagctccataagcaagtgagcagatgggacaagttagtcttttctccctagaaacaaaggggatgcccagtggtttccctttgcttyccaacctaaaatttcaagtttaataaaatagcaattagcagaagtgaccaaattgggagataattatcagtcatgaggaaagacacagatttcggtcataaagaatgtaagggctataagtagaaactttctataacctaaatgatgttatagaattatttttgagcaggagcagaaagattaaatatgatcacttcatacttctaaatcagaaataggaagattaaaaccacagaacagtttgtgatttctattgctgtagctaggtatcttactctgtccactcttgttcaagtatctaactcttctggaaaccaaataggctttagaagagattatcctatattcctatcagtataatactaaaatgtaactttttaatcatctggtttttaaaagataaacagtttagcccatctctccagagagcaaacataggaatatgactcaggagcctcctagggcttatcatcagccctcacacccgcttccccctccaacccacagcctttgcttccaggtggcaggattactactttgcctcttcagcagcatctactctaggcatattgatcattttagacactgggagaagagaacctcaaactaggaggaaaagacagagcctccacttagttttgggaggggatggcagacagtcaaggagatgagcgtcctaaggcatgttgggatagggtcagatgcaccacccatggagaggtttgtcaacacaaagacatggaaggttagaggtttgtcaacaaaaagacatggaaggttaggtttgtcaacacaaagacatggaagattagaggtttgtcaacacaaagayacaggaagaatgggctgcagaagatttagatgttttccatttgggcacattttacttagctggagaactaggtttaaaacagcctgggtaggaaaattagaagcaagctggatgcagtggctcatgcctgtaatcccaacacttttgggaggtccaggcaggaggatcacttgggcccaggagktcaagcctgcagcgagctgagatcacrccactgcactccagcctggggtgatrgarcaagacyctgtctcmaaaaaaaaaaaaacaacaaaaacttagaattgaggagttgtacctccattggcttcctcactccaaaataggtgctgatccttcctattcctattctttgccaccttttgggtgtggtgtcaccagcctgtttagccaagtagctttgggcataggctgcccaatctgagcaaacaccagtgaggctctattgagccaagaccaagtcctcaaagcacctgaaccactgtggccttctcagcctacagcagtgtggtctcttacatggccacaaagggacacacagtgacaaaaggctcggaatgttacaatggtaaaatgagtgatctcaaatccactgacagatataaaataggcttagagaggaaaagctgcctctggtcaagtagatcatggcagcatgaattccaactcacttttttacaactccaacttctatgtttatctttgttactttcacttttttacaacctggccagaggcattttttaaatcaggcccaatatcagtattctttttgtgtgtgccaattttgttatcacatcccyatgaagttgaaaaataaagttaattttgaccaaaagacttcatttgtaacccatgatgttcatctgtgtgtgcacaggattcctgagtgcctctgctacgaagctactgcactgaggcaataactcctaagaaatcttaacatttcgccaggcaaggtggctcatcctgtaatcccagcactgggagagaatggcacacgtratcctagcctttaggaggccaaggcgggaggattgcttgagcccaggagtttaagaccagcctgggcaacagtgagatcccatctttacaaaaaattgaaaaatcatccaggcatggtggcctgtgcctgtaatcccagctgcttgggaggctgaggtgggagaatcacttgagcccaggaggctgaggctgcagtgagccaagatcgcactactgaactccagcctgggtgacagagcaagagactctgtctcaaaaaaaaaaaaaakgggatagaactttttgtcaacaccagttttcaaaaagtaccctagttatgaggccgttgctgggtraactttatcccattccagcttcaaccagaggaacctgtacatcctaaagtttcacataagattacacttgaagaa

SEQ ID NO: 7127 - DNA, 4406 bp, Homo sapiens
agacccaccgggggacgggatctcgctccccgcgccacgaggctcggccaatgggaacgcgcgctgcgaggcccgccggtctgccctgcggtgctgaaaacccggcgcgcaggcggctggctctgggcgcgcgccagcaaatccactcctggagcccgcggaccccgagcacgcgcctgacagcccctgctggcccggcgcgcggcgtcgccaggccagctatggcccccgacccggtggccgccgagaccgcggctcagggacctaccccgcgctacttcacctgggacgaggtggcccagcgctcagggtgcgaggagcggtggctagtgatcgaccgtaaggtgtacaacatcagcgagttcacccgccggcatccagggggctcccgggtcatcagccactacgccgggcaggatgccacggatccctttgtggccttccacatcaacaagggccttgtgaagaagtatatgaactctctcctgattggagaactgtctccagagcagcccagctttgagcccaccaagaataaagagctgacagatgagttccgggagctgcgggccacagtggagcggatggggctcatgaaggccaaccatgtcttcttcctgctgtacctgctgcacatcttgctgctggatggtgcagcctggctcaccctttgggtctttgggacgtcctttttgcccttcctcctctgtgcggtgctgctcagtgcagttcaggcccaggctggctggctgcagcatgactttgggcacctgtcggtcttcagcacctcaaagtggaaccatctgctacatcattttgtgattggccacctgaagggggcccccgccagttggtggaaccacatgcacttccagcaccatgccaagcccaactgcttccgcaaagacccagacatcaacatgcatcccttcttctttgccttggggaagatcctctctgtggagcttgggaaacagaagaaaaaatatatgccgtacaaccaccagcacaaatacttcttcctaattgggcccccagccttgctgcctctctacttccagtggtatattttctattttgttatccagcgaaagaagtgggtggacttggcctggatgattaccttctacgtccgcttcttcctcacttatgtgccactattggggctgaaagccttcctgggccttttcttcatagtcaggttcctggaaagcaactggtttgtgtgggtgacacagatgaaccatattcccatgcacattgatcatgaccggaacatggactgggtttccacccagctccaggccacatgcaatgtccacaagtctgccttcaatgactggttcagtggacacctcaacttccagattgagcaccatctttttcccacgatgcctcgacacaattaccacaaagtggctcccctggtgcagtccttgtgtgccaagcatggcatagagtaccagtccaagcccctgctgtcagccttcgccgacatcatccactcactaaaggagtcagggcagctctggctagatgcctatcttcaccaataacaacagccaccctgcccagtctggaagaagaggaggaagactctggagccaargcagaggggagcttgagggacaatgccactatagtttaatactcagagggggttgggtttggggacataaagcctctgactcaaactcctcccttttatcttctagccacagttctaagacccaaagtggggggtggacacagaagtccctaggagggaaggagctgttggggcaggggtgtaaattatttcctttttctagtttggcacatgcaggtagttggtgaacagagagaaccaggagggtaacagaagaggagggacctactgaacccagagtcaggaagagatttaacactaaaattccactcatgccgggcgtggtggcacgcgcctgtaatcccagctacccaggaggctgaggcaggagaatcgcttgaaccggggaggtggaggttgcagtgagctgagatcacgccattgtactccagcctgggcgacagagcaagactccatttcaaaaaaaaaaaaaaaatccactcatataaaaggtgagctcagctcactggtccatttctcagtgscttctccatcmtcatttgcaaacctcagagggataaggcagttgaacctgatgagcaagaattataacagcaaggaaacattaatgcttagaattctgagatccagcacaactcagtctgtgggagctcagctcgctgcccagggataggtatgacctatgtctgccttaggctgctgggagatgccattctccagtttcagaagcaggcagggcaaaggtcaagactgtggtattggggtcttttggctctgaaggatcctggaaccactgattttggtttattccctccagggtctaaagagaacaagaggtgctagctcttaccaaaacagatggtagagagagttgctggctatttaaaaagctctttcatcttttaattcacctcttcttttcacctctttaaccactcctcaggaacagaacacttctargactgggggtcttttagctccataagcaagtgagcagatgggacaagttagtcttttctccctagaaacaaaggggatgcccagtggtttccctttgcttyccaacctaaaatttcaagtttaataaaatagcaattagcagaagtgaccaaattgggagataattatcagtcatgaggaaagacacagatttcggtcataaagaatgtaagggctataagtagaaactttctataacctaaatgatgttatagaattatttttgagcaggagcagaaagattaaatatgatcacttcatacttctaaatcagaaataggaagattaaaaccacagaacagtttgtgatttctattgctgtagctaggtatcttactctgtccactcttgttcaagtatctaactcttctggaaaccaaataggctttagaagagattatcctatattcctatcagtataatactaaaatgtaactttttaatcatctggtttttaaaagataaacagtttagcccatctctccagagagcaaacataggaatatgactcaggagcctcctagggcttatcatcagccctcacacccgcttccccctccaacccacagcctttgcttccaggtggcaggattactactttgcctcttcagcagcatctactctaggcatattgatcattttagacactgggagaagagaacctcaaactaggaggaaaagacagagcctccacttagttttgggaggggatggcagacagtcaaggagatgagcgtcctaaggcatgttgggatagggtcagatgcaccacccatggagaggtttgtcaacacaaagacatggaaggttagaggtttgtcaacaaaaagacatggaaggttaggtttgtcaacacaaagacatggaagattagaggtttgtcaacacaaagayacaggaagaatgggctgcagaagatttagatgttttccatttgggcacattttacttagctggagaactaggtttaaaacagcctgggtaggaaaattagaagcaagctggatgcagtggctcatgcctgtaatcccaacacttttgggaggtccaggcaggaggatcacttgggcccaggagktcaagcctgcagcgagctgagatcacrccactgcactccagcctggggtgatrgarcaagacyctgtctcmaaaaaaaaaaaaacaacaaaaacttagaattgaggagttgtacctccattggcttcctcactccaaaataggtgctgatccttcctattcctattctttgccaccttttgggtgtggtgtcaccagcctgtttagccaagtagctttgggcataggctgcccaatctgagcaaacaccagtgaggctctattgagccaagaccaagtcctcaaagcacctgaaccactgtggccttctcagcctacagcagtgtggtctcttacatggccacaaagggacacacagtgacaaaaggctcggaatgttacaatggtaaaatgagtgatctcaaatccactgacagatataaaataggcttagagaggaaaagctgcctctggtcaagtagatcatggcagcatgaattccaactcacttttttacaactccaacttctatgtttatctttgttactttcacttttttacaacctggccagaggcattttttaaatcaggcccaatatcagtattctttttgtgtgtgccaattttgttatcacatcccyatgaagttgaaaaataaagttaattttgaccaaaagacttcatttgtaacccatgatgttcatctgtgtgtgcacaggattcctgagtgcctctgctacga

SEQ ID NO: 7128 - DNA, 1665 bp, Homo sapiens
gccgggaggcgcacgctcgctcgtacggcggccgcggcggcagggcggggccggagcagcgggcggcggcggaggcggcgcccgggagcgctcttcgcttccctcggggtcttgctcggacctcggccaccgcctgggatccccaggactcgtgcgtgcagcatgggcggcgtcggggagccgggaccgcgggagggacccgcgcagccgggggcrccgctgcccaccttctgctgggagcagatccgcgcgcacgamcagcccggcgacaagtggctggtcatcgagcgccgcgtctacgacatcagccgctgggcacagcggcacccagggggcagccgcctcatcggccaccacggcgctgaggacgccacggatgccttccrtgccttccatcaagatctcaattttgtgcgcaagttcctacagcccctgttgattggagagctggctccggaagaacccagccaggatggacccctgaatgcgcagctggtcgaggacttccgagccctgcaccaggcagccgaggacatgaagctgtttgatgccagtcccaccttctttgctttcctactgggccacatcctggccatggaggtgctggcctggctccttatctacctcctgggtcctggctgggtgcccagtgccctggccgccttcatcctggccatctctcaggctcagtcctggtgtctgcagcatgacctgggccatgcctccatcttcaagaaktcctggtggaaccacgtggcccagaagttcgtgatggggcagctaaagggcttctccgcccactggtggaasttccgccacttccagcaccacgccaagcccaacatcttccacaaagacccagacgtgacggtggcgcccgtcttcctcctgggggagtcatccgtcgagtatggcaagaagaaacgcagatacctaccctacaaccagcagcacctgtacttcttcctgatcggcccgccgctgctcaccctggtgaactttgaagtggaaaatctggcgtacatgctggtgtgcatgcagtgggcggatttgctctgggccgccagcttctatgcccgcttcttcttatcctacctccccttctacggcgtccctggggtgctgctcttctttgttgctgtcagggtcctggaaagccactggttcgtgtggatcacacagatgaaccacatccccaaggagatcggccacgagaagcaccgggactgggtcagctctcagctggcagccacctgcaacgtggagccctcacttttcaccaactggttcagcgggcacctcaacttccagatcgagcaccacctcttccccaggatgccgagacacaactacagccgggtggccccgctggtcaagtcgctgtgtgccaagcacggcctcagctacgaagtgaagcccttcctcaccgcgctggtggacatcgtcaggtccctgaagaagtctggtgacatctggctggacgcctacctccatcagtgaaggcaacacccaggcgggcagagaagggctcagggcaccacagccctatggccttggctctgggcctgatgggacaggggtagagggaaggtgagcatagcacattttcctagagcgagaattgggggaaagctgttatttttatattaaaatacattcagatgt

SEQ ID NO: 7129 - DNA, 1808 bp, Homo sapiens
tccacgcgccagtgccctcctgctcccctacctcccccttggccacccctgggcatccccagccctgcagcgccgagggcggaggggaggccacccgcccccagcagagggctccgagagagctgcagcggcggtgggggccccgcagagattggggcccatggtttgaaggctgttcacaggcaccccgagacagcgtcccccctctgggcgcactggatttgacgttgcaggacgcgcggctggaagccccccaggccccgctgctcacagaccgggactccgcctccggttcccgagggcgtggcgaggcgctgcgggacgcccaacaggatgccttccrtgccttccatcaagatctcaattttgtgcgcaagttcctacagcccctgttgattggagagctggctccggaagaacccagccaggatggacccctgaatgcgcagctggtcgaggacttccgagccctgcaccaggcagccgaggacatgaagctgtttgatgccagtcccaccttctttgctttcctactgggccacatcctggccatggaggtgctggcctggctccttatctacctcctgggtcctggctgggtgcccagtgccctggccgccttcatcctggccatctctcaggctcagtcctggtgtctgcagcatgacctgggccatgcctccatcttcaagaaktcctggtggaaccacgtggcccagaagttcgtgatggggcagctaaagggcttctccgcccactggtggaasttccgccacttccagcaccacgccaagcccaacatcttccacaaagacccagacgtgacggtggcgcccgtcttcctcctgggggagtcatccgtcgagtatggcaagaagaaacgcagatacctaccctacaaccagcagcacctgtacttcttcctgatcggcccgccgctgctcaccctggtgaactttgaagtggaaaatctggcgtacatgctggtgtgcatgcagtgggcggatttgctctgggccgccagcttctatgcccgcttcttcttatcctacctccccttctacggcggtcctggaaagccactggttcgtgtggatcacacagatgaaccacatccccaaggagatcggccacgagaagcaccgggactgggtcagctctcagctggcagccacctgcaacgtggagccctcacttttcaccaactggttcagcgggcacctcaacttccagatcgagcaccacctcttccccaggatgccgagacacaactacagccgggtggccccgctggtcaagtcgctgtgtgccaagcacggcctcagctacgaagtgaagcccttcctcaccgcgctggtggacatcgtcaggtgaggctgcagcccggcccctctgttctggtggcttccccagggcctatgcctacccttgtccaggtcagcctcatgctgagcccccagggtccctgagcctttctgtccacgtcccatgcccttcctcccttccccagccttcacgcacacagtgagaatttctggagcacctactgcagactcacaaacagcagtgcctgcggtgagcaggtctatgcaaacctacccccaaaggctgagggaaaaaagctaacagatccagtttctcagaaggaaacacttaacagggactcataaacagaagccatgtctcagggccgggtgcggtggctcacgcctgtaattccagcacttggggaggctgaggtgggcggatcacttgaggtcaggagttcgagaccagcctggccaacatggtgaaaccccgtctctact

SEQ ID NO: 7130 - DNA, 1796 bp, Homo sapiens
gccgggaggcgcacgctcgctcgtacggcggccgcggcggcagggcggggccggagcagcgggcggcggcggaggcggcgcccgggagcgctcttcgcttccctcggggtcttgctcggacctcggccaccgcctgggatccccaggactcgtgcgtgcagcatgggcggcgtcggggagccgggaccgcgggagggacccgcgcagccgggggcrccgctgcccaccttctgctgggagcagatccgcgcgcacgamcagcccggcgacaagtggctggtcatcgagcgccgcgtctacgacatcagccgctgggcacagcggcacccagggggcagccgcctcatcggccaccacggcgctgaggacgccacggatgccttccrtgccttccatcaagatctcaattttgtgcgcaagttcctacagcccctgttgattggagagctggctccggaagaacccagccaggatggacccctgaatgcgcagctggtcgaggacttccgagccctgcaccaggcagccgaggacatgaagctgtttgatgccagtcccaccttctttgctttcctactgggccacatcctggccatggaggtgctggcctggctccttatctacctcctgggtcctggctgggtgcccagtgccctggccgccttcatcctggccatctctcaggctcagtcctggtgtctgcagcatgacctgggccatgcctccatcttcaagaaktcctggtggaaccacgtggcccagaagttcgtgatggggcagctaaagggcttctccgcccactggtggaasttccgccacttccagcaccacgccaagcccaacatcttccacaaagacccagacgtgacggtggcgcccgtcttcctcctgggggagtcatccgtcgagtatggcaagaagaaacgcagatacctaccctacaaccagcagcacctgtacttcttcctgatcggcccgccgctgctcaccctggtgaactttgaagtggaaaatctggcgtacatgctggtgtgcatgcagtgggcggatttgctctgggccgccagcttctatgcccgcttcttcttatcctacctccccttctacggcgtccctggggtgctgctcttctttgttgctgtcagggtcctggaaagccactggttcgtgtggatcacacagatgaaccacatccccaaggagatcggccacgagaagcaccgggactgggtcagctctcagctggcagccacctgcaacgtggagccctcacttttcaccaactggttcagcgggcacctcaacttccagatcgagcaccacctcttccccaggatgccgagacacaactacagccgggtggccccgctggtcaagtcgctgtgtgccaagcacggcctcagctacgaagtgaagcccttcctcaccgcgctggtggacatcgtcaggtccctgaagaagtctggtgacatctggctggacgcctacctccatcagtgaaggcaacacccaggcgggcagagaagggctcagggcaccagcaaccaagccagcccccggcgggatcgatacccccacccctccactggccagcctgggggtgccctgcctgccctcctggtactgttgtcttcccctcggccccctcacatgtgtattcagcagccctatggccttggctctgggcctgatgggacaggggtagagggaaggtgagcatagcacattttcctagagcgagaattgggggaaagctgttatttttatattaaaatacattcagatgtattatggag

SEQ ID NO: 7131 - DNA, 2545 bp, Homo sapiens
gtgctgctgctgcctccactgtactcagacccaggtagcacaggattgtccatcctccagcagctcagtgcaacggtgtgaactcagcctgtttcagagcctccacaccatgacctccaagaagctggtgaactcggtggctggctgtgctgatgacgctcttgctggcctggtggcctgcaaccccaacctgcagctcctgcagggccaccgcgtggccctccgttctgacctggacagcctcaagggccgggtggcactgctgtcgggtgggggctctggccatgagcctgcccatgctggtttcatagggaaggggatgctgactggggtcatcgcgggagctgtgttcacctccccggcagtgggcagcatcctggcagccatcagggccgtggcccaggccggcacagtggggacgctccttatcgtgaagaactacactggggatcggctcaacttcggcctggcccgggagcaggcccgggctgaaggcatcccggtggagatggtggtgattggggacgacagcgccttcactgtcctgaagaaggcaggccggcgggggctgtgcggcacsgtgcttatacacaaggtggcaggtgctctggctgaggctggtgtggggctggaggagatcgcaaagcaggtgaacgtggtcrccaaggccatgggtaccctgggggtgagcttatcctcctgcagcgtccctggttccaaacccaccttcgagctctcagccgacgaggtggagctgggcctggggatccacggggaagctggtgtgcgccggataaagatggcaaccgccgatgagattgtgaaactcatgctcgaccacatgacaaacaccaccaacgcgtcccatgtgcctgtgcagcccggctcctcagttgtgatgatggtcaacaacctgggtggcctgtcattcctggaactgggcatcatagccgacgctaccgtccgctccctggagggccgcggggtgaagattgcccgtgccctsgtgggcaccttcatgtcagcactggagatgcctggcatttctctcaccctcctgctggtggatgagcctctcctgaaactgatagatgctgaaaccactgcagsagcctggcctaacgtggctgcagtctccattactgggcggaagcggagccgggkagcccctgccgagccccaggaggcccctgattccactgctgcaggaggctcagcctcgaagcggatggcgctggtgctggaacgggtgtgcagcactctcctgggcctggaggaacacctgaatgccctggaccgggctgctggtgacggcgactgtggcaccacccacagccgtgcggccagagcaatccaggagtggctgaaggagggcccaccccctgccagccctgcccagctgctctccaagttgtctgtyctgctcctggagaagatgggaggctcatctggggcgctctatggcctgttcctgactgcggctgcacagcccctgaaggccaagaccagcctcccagcctggtctgctgycatggatgccggcctggaagcsatgcagaagtatggcaaggctgctccaggggacaggactatgctgrattctctgtgggcagcggggcaggagctccaagcctggaagagcccaggagctgatctgttacaagtcctgaccaaagcagtcaagagtgccgaagctgcagccgaggccaccaagaatatggaagctggagccggaagagccagttatatcagctcagcacggctggagcagccagaccccggggcggtggcagctgctgccatcctccgggccatcttggaggtcttgcagagctagggtgtgtgactgcctcccttggcctcagytcctctcactgctgtgctgaggtggcctttgtcacttccttctgccttccaaccctcaccttcccccggcctggccccattggcccaccctctaagttgagcaggaaatcctccaccaagcttccagaactacagacagcacccagagtgagctggagtgggtccccatgcctctccagcatgccctttccctttgcaggagggtggagtccctgggtcatgccctcccctgccagctctgggcttcagagataaggcattttccttgtgcagcctttacctggcaatcctaatttggttttaagactccctgtgaaatgctttccgcaccttaaccccagtgagcgtgaaaaagaaagttaataaactataatacatggaagcaagaaagacactgcctcctctgagggaccttttcccaagcatgtaaacaagggggcccacagccctggctgcaggcatcatgacccatcttctaccaggcagatctttattacctgagcccctaaggcagtgtctcctcagctgggctgcttccactgagacccccgacccatcccctttccagtacacacacctgatgcatgtaagaatggtagaggggcttttctyagcattgaattaataattcagtggctcctcgggagtcgaatgggcatttgggacaccagaaggaaaa

SEQ ID NO: 7132 - DNA, 2665 bp, Homo sapiens
accgcctcgcctctttccgccagcgcccgcaggacccggatgagagcgcacgcttcggrgtctccgggaagtcgcggcgccttcggatgtggcggatgcggccgtgagccggcgggggaggtgctgctgctgcctccactgtactcagacccaggtagcacaggattgtccatcctccagcagctcagtgcaacggtgtgaactcagcctgtttcagagcctccacaccatgacctccaagaagctggtgaactcggtggctggctgtgctgatgacgctcttgctggcctggtggcctgcaaccccaacctgcagctcctgcagggccaccgcgtggccctccgttctgacctggacagcctcaagggccgggtggcactgctgtcgggtgggggctctggccatgagcctgcccatgctggtttcatagggaaggggatgctgactggggtcatcgcgggagctgtgttcacctccccggcagtgggcagcatcctggcagccatcagggccgtggcccaggccggcacagtggggacgctccttatcgtgaagaactacactggggatcggctcaacttcggcctggcccgggagcaggcccgggctgaaggcatcccggtggagatggtggtgattggggacgacagcgccttcactgtcctgaagaaggcaggccggcgggggctgtgcggcacsgtgcttatacacaaggtggcaggtgctctggctgaggctggtgtggggctggaggagatcgcaaagcaggtgaacgtggtcrccaaggccatgggtaccctgggggtgagcttatcctcctgcagcgtccctggttccaaacccaccttcgagctctcagccgacgaggtggagctgggcctggggatccacggggaagctggtgtgcgccggataaagatggcaaccgccgatgagattgtgaaactcatgctcgaccacatgacaaacaccaccaacgcgtcccatgtgcctgtgcagcccggctcctcagttgtgatgatggtcaacaacctgggtggcctgtcattcctggaactgggcatcatagccgacgctaccgtccgctccctggagggccgcggggtgaagattgcccgtgccctsgtgggcaccttcatgtcagcactggagatgcctggcatttctctcaccctcctgctggtggatgagcctctcctgaaactgatagatgctgaaaccactgcagsagcctggcctaacgtggctgcagtctccattactgggcggaagcggagccgggkagcccctgccgagccccaggaggcccctgattccactgctgcaggaggctcagcctcgaagcggatggcgctggtgctggaacgggtgtgcagcactctcctgggcctggaggaacacctgaatgccctggaccgggctgctggtgacggcgactgtggcaccacccacagccgtgcggccagagcaatccaggagtggctgaaggagggcccaccccctgccagccctgcccagctgctctccaagttgtctgtyctgctcctggagaagatgggaggctcatctggggcgctctatggcctgttcctgactgcggctgcacagcccctgaaggccaagaccagcctcccagcctggtctgctgycatggatgccggcctggaagcsatgcagaagtatggcaaggctgctccaggggacaggactatgctgrattctctgtgggcagcggggcaggagctccaagcctggaagagcccaggagctgatctgttacaagtcctgaccaaagcagtcaagagtgccgaagctgcagccgaggccaccaagaatatggaagctggagccggaagagccagttatatcagctcagcacggctggagcagccagaccccggggcggtggcagctgctgccatcctccgggccatcttggaggtcttgcagagctagggtgtgtgactgcctcccttggcctcagytcctctcactgctgtgctgaggtggcctttgtcacttccttctgccttccaaccctcaccttcccccggcctggccccattggcccaccctctaagttgagcaggaaatcctccaccaagcttccagaactacagacagcacccagagtgagctggagtgggtccccatgcctctccagcatgccctttccctttgcaggagggtggagtccctgggtcatgccctcccctgccagctctgggcttcagagataaggcattttccttgtgcagcctttacctggcaatcctaatttggttttaagactccctgtgaaatgctttccgcaccttaaccccagtgagcgtgaaaaagaaagttaataaactataatacatggaagcaagaaagacactgcctcctctgagggaccttttcccaagcatgtaaacaagggggcccacagccctggctgcaggcatcatgacccatcttctaccaggcagatctttattacctgagcccctaaggcagtgtctcctcagctgggctgcttccactgagacccccgacccatcccctttccagtacacacacctgatgcatgtaagaatggtagaggggcttttctyagcattgaattaataattcagtggctcctcgggagtcgaatgggcatttgggacaccagaaggaaaa

SEQ ID NO: 7133 - DNA, 1703 bp, Homo sapiens
cctgccaggaggaaatcaggacatctccctcccgacctcagagccccagcttccaaggtccttgcttttctgttgttttctttccctgatgcccatttttcccttttggactgccacactctggtattgcagagggccgcggggtgaagattgcccgtgccctsgtgggcaccttcatgtcagcactggagatgcctggcatttctctcaccctcctgctggtggatgagcctctcctgaaactgatagatgctgaaaccactgcagsagcctggcctaacgtggctgcagtctccattactgggcggaagcggagccgggkagcccctgccgagccccaggaggcccctgattccactgctgcaggaggctcagcctcgaagcggatggcgctggtgctggaacgggtgtgcagcactctcctgggcctggaggaacacctgaatgccctggaccgggctgctggtgacggcgactgtggcaccacccacagccgtgcggccagagcaatccaggagtggctgaaggagggcccaccccctgccagccctgcccagctgctctccaagttgtctgtyctgctcctggagaagatgggaggctcatctggggcgctctatggcctgttcctgactgcggctgcacagcccctgaaggccaagaccagcctcccagcctggtctgctgycatggatgccggcctggaagcsatgcagaagtatggcaaggctgctccaggggacaggactatgctgrattctctgtgggcagcggggcaggagctccaagcctggaagagcccaggagctgatctgttacaagtcctgaccaaagcagtcaagagtgccgaagctgcagccgaggccaccaagaatatggaagctggagccggaagagccagttatatcagctcagcacggctggagcagccagaccccggggcggtggcagctgctgccatcctccgggccatcttggaggtcttgcagagctagggtgtgtgactgcctcccttggcctcagytcctctcactgctgtgctgaggtggcctttgtcacttccttctgccttccaaccctcaccttcccccggcctggccccattggcccaccctctaagttgagcaggaaatcctccaccaagcttccagaactacagacagcacccagagtgagctggagtgggtccccatgcctctccagcatgccctttccctttgcaggagggtggagtccctgggtcatgccctcccctgccagctctgggcttcagagataaggcattttccttgtgcagcctttacctggcaatcctaatttggttttaagactccctgtgaaatgctttccgcaccttaaccccagtgagcgtgaaaaagaaagttaataaactataatacatggaagcaagaaagacactgcctcctctgagggaccttttcccaagcatgtaaacaagggggcccacagccctggctgcaggcatcatgacccatcttctaccaggcagatctttattacctgagcccctaaggcagtgtctcctcagctgggctgcttccactgagacccccgacccatcccctttccagtacacacacctgatgcatgtaagaatggtagaggggcttttctyagcattgaattaataattcagtggctcctcgggagtcgaatgggcatttgggacaccagaaggaaaa

SEQ ID NO: 7134 - DNA, 279 bp, Homo sapiens
atggaggtggcggtcgcggcggcgggccgagccctgcggcgggcgggagaggacagtcctgagcatggccccggcagctgtgaagtcctgcaggagtggcccaagcaggaggaagcactttgcttgggcagcaracgtgcctcattgccagggaaagacccaggaaactgccttatctgtgaggacctctttgctgctgaggaaggagtccagggagatgccgtggaggggattggtgtgaccacgggtgaaccctattcagcaggcttccggcagcaa

SEQ ID NO: 7135 - DNA, 5144 bp, Homo sapiens
gccggcgccctgcggaagcggcgttagtgaatcggggccttggggagcccaggatggaggtggcggtcgcggcggcgggccgagccctgcggcgggcgggaggaggtgagcaccaggcccactgagcctctgcagagccaccagccatgcccgggatcgtggtgttccggcggcgctggtctgtgggcagtgatgacctcgtcctaccrgccatcttcctctttctcctgcataccacctggtttgtgatcctgtccgtggtgctcttcggcctggtctataacccgcacgaggcctgctccctgaacctggtggaccacggccgcggctacctgggcatcctgctgagctgcatgatcgctgagatggccatcatctggctgagcatgcgcgggggcatcctctacacggagccccgtgactccatgcagtacgtgctctacgtgcgcctggccatcctggtgatcgagttcatctacgccatcgtgggcatcgtctggctcactcagtactacacctcctgcaacgacctcactgccaagaatgtcaccctcggaatggttgtctgcaactgggtagtcatcctcagtgtgtgcatcactgtcctctgcgtcttcgaccccacgggccgcacctttgtcaagctgagagccaccaagaggaggcagcgtaacctgcggacctacaacctgcggcaccgcttagaggagggtcaagccaccagctggtcgcgccggctcaaagtgttcctctgctgcacgcggacgaaggactcccagtcagatgcctactcagaaatcgcctacctctttgcggagttcttccgggaccttgacattgtgccatccgacatcattgctggcctggtgctgctccggcagcggcagcgggccaagcgcaacgccgtgctggacgaggcaaacaatgacatcttggccttcctgtctgggatgccggtgaccagaaacaccaagtacctcgacctcaagaattcacaagagatgctccgctacaaagaggtctgctactacatgctctttgccctggctgcctacgggtggcccatgtacctgatgcggaagcccgcctgcggcctctgccaactggctcggtcctgctcgtgttgcctgtgtcctgcgaggccgcggttcgcccctggagtcaccatcgaggaagacaactgctgtggctgtaatgccattgccatccggcgccacttcctggacgagaacatgactgcggtggacatcgtctatacctcctgccatgatgcggtctatgaaacgcccttctacgtggcggtggaccatgacaagaagaaagtggtgatcagtatccgggggaccctgtcccccaaggatgccctgactgacctgacgggtgatgctgagcgcctccccgtggaggggcaccacggcacctggctgggccacaagggtatggtcctctcagctgagtacatcaagaagaaactggagcaggagatggtcctgtcccaggcctttgggcgagacctgggccgcggaaccaaacactacggcctgattgtggtgggccactccctgggcgcgggcactgctgccatcctctccttccttctgcgcccacagtatccgaccctcaagtgctttgcctactccccgccagggggcctgctgagtgaggatgcratggagtattccaaggagttcgtgactgctgtggttctgggcaaagacctcgtccccaggattggcctctctcagctggaaggcttccgcagacagctcctggatgtcctgcagcgaagcaccaagcccaaatggcggatcatcgtgggggccaccaaatgcatccccaagtcggagctgcctgaggaggtagaggtgaccaccctggccagcacgcggctctggacccaccccagcgacctaactatagccctctcagccagcactccactctacccgcccggccgcatcatccacgtggtccacaaccaccctgcagagcagtgctgctgctgtgagcaggaggagcccacatactttgccatctggggcgacaacaaggccttcaatgaggtgatcatctcgccagccatgctgcatgagcacctgccctatgtggtcatggaggggctcaacaaggtgctggagaactacaacaaggggaagaccgctctgctctctgcagccaaggtcatggtgagccctaccgaggtggacctgactcctgagctcatcttccagcagcagccactccccacggggccgcccatgcccactggccttgccctggagctgccgactgcagaccaccgcaacagcagcgtcaggagcaagtcccagtctgagatgagcctggaggkcttctcggaggggcggctgctgtcgccagtggttgcggcggcggcccgccaggacccggtggagctgctgctgctgtctacccaggagcggctggcrgcggagctgcaggcccggcgggcaccactggccaccatggagagcctctcggacactgagtccctgtacagcttcgactcgcgccgctcctcaggcttccgcagcatccggggctcccccagcctccacgctgtgctrgagcgtgatgaaggccacctcttctacattgaccctgccatccccgaggaaaacccatccctgagctcgcgcactgagctgctggcggccgacagcctgtccaagcactcacaggacacgcagcccctggaggcggccctgggcagtggcggcgtcactcctgagcggccccccagtgctgcggccaatgacgaggaggaagaggttggcggtgggggtggcgggcyggcctcccgcggggagctggcgctgcacaatgggcgcctgggggactcgcccagtcctcaggtgctggaattcgccgagttcatcgacagcctcttcaacctggacagcaagagcagctccttccaagacctctactgcatggtggtgcccgagagccccaccagtgastacgctgagggccccaagtcccccagccagcaagagatcctgctccgtgcccagttcgagcccaacctggtgcccaagcccccacggctctttgccggctcagccgacccctcctcgggcatctcactctcgccctccttcccgctcagctcctcgggtgagctcatggacctgacgcccacgggcctcagtagccaggaatgcctggcggctgacaagatccggacttctacccccactggccacggagccagccccgccaagcaagatgagctggtcatctcagcacgctagcaccccagttgcgtggccagccgggcccaggcaggagcaggtggccctgtgggcacctggtgcctgccccctgcygggcagctttaaggacagacccccaggggcagtttagcctcaggcacaggcatcgctgctgagctgggggtccgcatccctacctcagcttaggacccccagagccaaggtggctgggatctggccccacagatggggaaagatggggaagggtgtggagtggggaggagcctgggcagcctgctgggtgggccacactcagcctgactgccctccatgggggcattctggcaccccctgctccaggacaggccatgggcaagctgcctcccatcactgcctgctggctgctctcccaggggccaggtggagagcagtgccccccgacacatgtattctcatctgtggtccaggccggcatcgtcctggccaccccccagatctggtgcctgctggccggccccctggggtgcccctgccgaggtggcctgcagtgctgtacatgtttacagaagctgctgggcttggctcaggatgtgttctgggcttgcaagccccccgcccaatcatgtgttcagtagccrtcctctgagcagggcccaaggcagccaggggcctggaggggccagaggagggtggggtcagggccgccccttctctgccttgtgcctctcatgctgcctcctctgcccatgggtcctgggcacccaggcctgccctgcctgctggctacttcctggcttaccttctacccccaaggatcctcaccacccaaagggtggtgggcactgctgtgaccaccccagctgcagagtcagtgccctgggtggaaggaaggcactgagagcccccttcctctgagggccccacctcaccccttggtgtcacccccaccacgcctaggcagctctgggccctgggatctggaaccaacacacccctgttcccctcagctttccctcctcgctggcctgggcaccctcctgggagcaggccttcctccctcccacccccaatgtcctgttggtaggaggtggggccaagagtggggtatggtgggccttggctggagacctctgtccactgcccagggaggggcctggggctgggagcagtcccggtttagcctgaggtccccatagggcttcctcccctgctgggtttgggaagcagttagggagatagcgacccggagtttccccagaagcggggtgggagggtgtgcatgctagtgttggcgcgtatgcatgtgcatgagtgtgcaccgttcctaaggaaggggcctctggggctgcccaccctacctgccctgcctgcctgctgcccctcccagcctgccaagaaaacggtaggggagcatgatggggcctttgaggcagggtcgcagggacaagctcagctttaggcaccatctgttcccatcgcgcctgctgctgtgacccgttttggaaaactggtgtgtaccgaggcgctgactgcacggctgaccgcctgctcgtgccttcattctgcagcggcatggtccctcccattctggctccacctgcagcctccctgggtggcctaggctcccccgaccaagagacctccctctcatgatcactggtacctgggggcctgaattctggcccccggctccccacacagctgggactggcctggatggctgtcctgggagcccctgcccaccctgacagagggagctgggcctcccctcatcctctgtaactcccgccttcaccagactcraggacaccctggccctgctgaggcatacagagcttgaaagatctgacaagcaccgtggccagtcacagggagagacttgatgtctggccttttaattcctcctct

SEQ ID NO: 7136 - DNA, 5791 bp, Homo sapiens
gccggcgccctgcggaagcggcgttagtgaatcggggccttggggagcccaggatggaggtggcggtcgcggcggcgggccgagccctgcggcgggcgggaggaggtgagcaccaggcccactgagcctctgcagagccaccagccatgcccgggatcgtggtgttccggcggcgctggtctgtgggcagtgatgacctcgtcctaccrgccatcttcctctttctcctgcataccacctggtttgtgatcctgtccgtggtgctcttcggcctggtctataacccgcacgaggcctgctccctgaacctggtggaccacggccgcggctacctgggcatcctgctgagctgcatgatcgctgagatggccatcatctggctgagcatgcgcgggggcatcctctacacggagccccgtgactccatgcagtacgtgctctacgtgcgcctggccatcctggtgatcgagttcatctacgccatcgtgggcatcgtctggctcactcagtactacacctcctgcaacgacctcactgccaagaatgtcaccctcggaatggttgtctgcaactgggtagtcatcctcagtgtgtgcatcactgtcctctgcgtcttcgaccccacgggccgcacctttgtcaagctgagagccaccaagaggaggcagcgtaacctgcggacctacaacctgcggcaccgcttagaggagggtcaagccaccagctggtcgcgccggctcaaagtgttcctctgctgcacgcggacgaaggactcccagtcagatgcctactcagaaatcgcctacctctttgcggagttcttccgggaccttgacattgtgccatccgacatcattgctggcctggtgctgctccggcagcggcagcgggccaagcgcaacgccgtgctggacgaggcaaacaatgacatcttggccttcctgtctgggatgccggtgaccagaaacaccaagtacctcgacctcaagaattcacaagagatgctccgctacaaagaggtctgctactacatgctctttgccctggctgcctacgggtggcccatgtacctgatgcggaagcccgcctgcggcctctgccaactggctcggtcctgctcgtgttgcctgtgtcctgcgaggccgcggttcgcccctggagtcaccatcgaggaagacaactgctgtggctgtaatgccattgccatccggcgccacttcctggacgagaacatgactgcggtggacatcgtctatacctcctgccatgatgcggtctatgaaacgcccttctacgtggcggtggaccatgacaagaagaaagtggtgatcagtatccgggggaccctgtcccccaaggatgccctgactgacctgacgggtgatgctgagcgcctccccgtggaggggcaccacggcacctggctgggccacaagggtatggtcctctcagctgagtacatcaagaagaaactggagcaggagatggtcctgtcccaggcctttgggcgagacctgggccgcggaaccaaacactacggcctgattgtggtgggccactccctgggcgcgggcactgctgccatcctctccttccttctgcgcccacagtatccgaccctcaagtgctttgcctactccccgccagggggcctgctgagtgaggatgcratggagtattccaaggagttcgtgactgctgtggttctgggcaaagacctcgtccccaggattggcctctctcagctggaaggcttccgcagacagctcctggatgtcctgcagcgaagcaccaagcccaaatggcggatcatcgtgggggccaccaaatgcatccccaagtcggagctgcctgaggaggtagaggtgaccaccctggccagcacgcggctctggacccaccccagcgacctaactatagccctctcagccagcactccactctacccgcccggccgcatcatccacgtggtccacaaccaccctgcagagcagtgctgctgctgtgagcaggaggagcccacatactttgccatctggggcgacaacaaggccttcaatgaggtgatcatctcgccagccatgctgcatgagcacctgccctatgtggtcatggaggggctcaacaaggtgctggagaactacaacaaggggaagaccgctctgctctctgcagccaaggtcatggtgagccctaccgaggtggacctgactcctgagctcatcttccagcagcagccactccccacggggccgcccatgcccactggccttgccctggagctgccgactgcagaccaccgcaacagcagcgtcaggagcaagtcccagtctgagatgagcctggaggkcttctcggaggggcggctgctgtcgccagtggttgcggcggcggcccgccaggacccggtggagctgctgctgctgtctacccaggagcggctggcrgcggagctgcaggcccggcgggcaccactggccaccatggagagcctctcggacactgagtccctgtacagcttcgactcgcgccgctcctcaggcttccgcagcatccggggctcccccagcctccacgctgtgctrgagcgtgatgaaggccacctcttctacattgaccctgccatccccgaggaaaacccatccctgagctcgcgcactgagctgctggcggccgacagcctgtccaagcactcacaggacacgcagcccctggaggcggccctgggcagtggcggcgtcactcctgagcggccccccagtgctgcggccaatgacgaggaggaagaggttggcggtgggggtggcgggcyggcctcccgcggggagctggcgctgcacaatgggcgcctgggggactcgcccagtcctcaggtgctggaattcgccgagttcatcgacagcctcttcaacctggacagcaagagcagctccttccaagacctctactgcatggtggtgcccgagagccccaccagtgastacgctgagggccccaagtcccccagccagcaagagatcctgctccgtgcccagttcgagcccaacctggtgcccaagcccccacggctctttgccggctcagccgacccctcctcgggcatctcactctcgccctccttcccgctcagctcctcgggtgagctcatggacctgacgcccacgggcctcagtagccaggaatgcctggcggctgacaagatccggacttctacccccactggccacggagccagccccgccaagcaagatgagctggtcatctcagcacgctagcaccccagttgcgtggccagccgggcccaggcaggagcaggtggccctgtgggcacctggtgcctgccccctgcygggcagctttaaggacagacccccaggggcagtttagcctcaggcacaggcatcgctgctgagctgggggtccgcatccctacctcagcttaggacccccagagccaaggtggctgggatctggccccacagatggggaaagatggggaagggtgtggagtggggaggagcctgggcagcctgctgggtgggccacactcagcctgactgccctccatgggggcattctggcaccccctgctccaggacaggccatgggcaagctgcctcccatcactgcctgctggctgctctcccaggggccaggtggagagcagtgccccccgacacatgtattctcatctgtggtccaggccggcatcgtcctggccaccccccagatctggtgcctgctggccggccccctggggtgcccctgccgaggtggcctgcagtgctgtacatgtttacagaagctgctgggcttggctcaggatgtgttctgggcttgcaagccccccgcccaatcatgtgttcagtagccrtcctctgagcagggcccaaggcagccaggggcctggaggggccagaggagggtggggtcagggccgccccttctctgccttgtgcctctcatgctgcctcctctgcccatgggtcctgggcacccaggcctgccctgcctgctggctacttcctggcttaccttctacccccaaggatcctcaccacccaaagggtggtgggcactgctgtgaccaccccagctgcagagtcagtgccctgggtggaaggaaggcactgagagcccccttcctctgagggccccacctcaccccttggtgtcacccccaccacgcctaggcagctctgggccctgggatctggaaccaacacacccctgttcccctcagctttccctcctcgctggcctgggcaccctcctgggagcaggccttcctccctcccacccccaatgtcctgttggtaggaggtggggccaagagtggggtatggtgggccttggctggagacctctgtccactgcccagggaggggcctggggctgggagcagtcccggtttagcctgaggtccccatagggcttcctcccctgctgggtttgggaagcagttagggagatagcgacccggagtttccccagaagcggggtgggagggtgtgcatgctagtgttggcgcgtatgcatgtgcatgagtgtgcaccgttcctaaggaaggggcctctggggctgcccaccctacctgccctgcctgcctgctgcccctcccagcctgccaagaaaacggtaggggagcatgatggggcctttgaggcagggtcgcagggacaagctcagctttaggcaccatctgttcccatcgcgcctgctgctgtgacccgttttggaaaactggtgtgtaccgaggcgctgactgcacggctgaccgcctgctcgtgccttcattctgcagcggcatggtccctcccattctggctccacctgcagcctccctgggtggcctaggctcccccgaccaagagacctccctctcatgatcactggtacctgggggcctgaattctggcccccggctccccacacagctgggactggcctggatggctgtcctgggagcccctgcccaccctgacagagggagctgggcctcccctcatcctctgtaactcccgccttcaccagactcraggacaccctggccctgctgaggcatacagagcttcagcccagcacagaagcaagacaaaatcagtggctcttagagtttagaaaacaagacagactctcagatgaaagatctgacaagcaccgtggccagtcacagggagagacttgatgtctggccttttaattcctcctctgccagggtgggtcctgggacctctaatgtgggcatgtcgtccaccccaggacragccatcagggacagaccccccacccccaaggctgcagccacaccatgtttcaggcttggggctggggcaggcttgggctcaatcctgggcacccaggggcagcccacccctaacctggctcctacccacctygcccttgaaggatgggcctgctgcacgtctccctcctccaccccatacmacactggggggtctgagccacccccctcagccccgttcggctcagaccgacccccactccatccccagacctgcagcacaagtgcgcgggcctgtcctcccaggggcctgggcgactccatatgcaatcagtagcgagcagccgggccccacagaccctcatgcactctcttacgtgccattctccccagactttttttgtacttaatgtatgaaagatccaaactaatattgctgtaaaaaggagagacaaattaatatagcttattctataaatatatctgtatataaaggtttctgtatattgtatagagctgtgtataaactggatgtagaagcacgct

SEQ ID NO: 7137 - DNA, 1836 bp, Homo sapiens
atgaggggactgaccaagaagaccaccggggcagaggccagcctctcggccactgggaagaaggggaaggatcctggagcctgcagtttcaccagtgcagagaggttaactcgctaccacagtcctgcagccacagtgaacagctggaatctcaccacgaccaaagcctgtgctaaagagagcaggacctgtctgccagcccagcgaggccagacagcgacctgctggggctcctggcagccccgacagccccctgagcccgacccagcgctgcaccttaccctctgtgagctacttggagacagggagggggcggcaataccagctgttggcagctctgttctgccccagcccaactgccacccacggtgccccagcccccsctcctgtcctatcgtgtccaaccctaatctgaagctggaggtgagcaccaggcccactgagcctctgcagagccaccagccatgcccgggatcgtggtgttccggcggcgctggtctgtgggcagtgatgacctcgtcctaccrgccatcttcctctttctcctgcataccacctggcattcgatgccaggtggacaatggtcttatggaggaggtgcctgctgccagccctccttccactgaatctgggctggggaagggcctgcctgctagtagcatctcgaggtttgtgatcctgtccgtggtgctcttcggcctggtctataacccgcacgaggcctgctccctgaacctggtggaccacggccgcggctacctgggcatcctgctgagctgcatgatcgctgagatggccatcatctggctgagcatgcgcgggggcatcctctacacggagccccgtgactccatgcagtacgtgctctacgtgcgcctggccatcctggtgatcgagttcatctacgccatcgtgggcatcgtctggctcactcagtactacacctcctgcaacgacctcactgccaagaatgtcaccctcggaatggttgtctgcaactgggtagtcatcctcagtgtgtgcatcactgtcctctgcgtcttcgaccccacgggccgcacctttgtcaagctgagagccaccaagaggaggcagcgtaacctgcggacctacaacctgcggcaccgcttagaggagggtcaagccaccagctggtcgcgccggctcaaagtgttcctctgctgcacgcggacgaaggactcccagtcagatgcctactcagaaatcgcctacctctttgcggagttcttccgggaccttgacattgtgccatccgacatcattgctggcctggtgctgctccggcagcggcagcgggccaagcgcaacgccgtgctggacgaggctttccgtgactactactctagggactttctgggtcgtgcatggctgcctctggggctggccctcaaaggacttctaaccacaggcttagtggacgtggcaaacaatgacatcttggccttcctgtctgggatgccggtgaccagaaacaccaagtacctcgacctcaagaattcacaagagatgctccgctacaaagaggtctgctactacatgctctttgccctggctgcctacgggtggcccatgtacctgatgcggaagcccgcctgcggcctctgccaactggctcggtcctgctccagttctcagcccatgcagagcacagcgagccaggcctgcttctggcttggccctagccctgccctggatgagccccagggccctcccatccggggtgctggccctgctcccctgactggtcctcctggcccacacatcactgactcagaggyagccctgtcaccggagaagcgaggagccactcgttat

SEQ ID NO: 7138 - DNA, 1449 bp, Homo sapiens
atgcctccaatctcagacgctatgtccaccaaaggctccgtggttctggcctacagtggcagcctggacacctcctgcaccctcctgtggctgaaggaacaaggctatgacgtcattgcctacctggccaacattggccagaaggaagacttcgaggaagccaggaagaatgcactgaagtttggggctaaaaaggtgttcattgaggatgtcggcagggagtttgtggaggagttcatctggccggccatccagtccagtgcactgtatgaggaccgctaccttctgggcacctctcgccaggccctgcatcgcctgcaaacaaatggaaatcacccagtggaagggggccaagtatatgtcccacagcaccacgggaaatgggaacaatcagccccccagataaaggtcattgctccctggaggatgcccaaattctacaaccagctcaagggccdcaatgacctgatggaatatgcaaagcaacacaggattcccatcccggtcacacccaagaactcgtggagcatggacgagaacctcatgcatatcagctacgagtctggaatcctggagaaccctaagaaccaagcacctccagaccaggacccggccaaagcccccaacacccctgacattctcgagatygagttcaaaaaaggagtcccygtgaaggtgaccaacgtcaaggatggcaccacccaccagacctcattggagctcttcatgtacctgaacgaagtcgtgggcaagcagggtgtgggctgtattgacatcatggagaaccgcttcattggaatgaagtcccgagggatctaccaggccccagcaagcaccatcctttacctcgctcatttagacaccaaggccttcaccatgggccaggaagtgcgcaaaatcaaacaaggcctgggcttgaaatttgttgagctggtggataccggtttctggtacagccctgagtgtgaatttgtctgccactgcatcgccaagtcccaggagcaagtggaagggaaagtgcaggtgtccgtcctcgagggccaggtgtacatccttggccaggagtccccactgtctctctacaaggaggagccggtgagcatgaacgtgcagggtgattatcagycaattgatgccaccgggttcatcaacatcaattccctcaggctgaaggaatatcatcgtctccagagcaaggtcactgccaaatagccccctgtacaatgaggagctggggcctccttaatttgctgatcccccaagtacaggagctaattgttgtgataatttgtaattgtgacttgttctcctcggctggcagcgtagtggggctgccaggccccagctttgttctctggtccccctgaagcctgcaaacgttgtcatcaaagggaagggtggggggcagctgtggtggggagctataaaatgacaattaaaagatttaaa

SEQ ID NO: 7139 - DNA, 1433 bp, Homo sapiens
ccaatctcagacgctatgtccaccaaaggctccgtggttctggcctacagtggcagcctggacacctcctgcaccctcctgtggctgaaggaacaaggctatgacgtcattgcctacctggccaacattggccagaaggaagacttcgaggaagccaggaagaatgcactgaagtttggggctaaaaaggtgttcattgaggatgtcggcagggagtttgtggaggagttcatctggccggccatccagtccagtgcactgtatgaggaccgctaccttctgggcacctctcgccaggccctgcatcgcctgcaaacaaatggaaatcacccagtggaagggggccaagtatatgtcccacagcaccacgggaaatgggtcattgctccctggaggatgcccaaattctacaaccagctcaagggccdcaatgacctgatggaatatgcaaagcaacacaggattcccatcccggtcacacccaagaactcgtggagcatggacgagaacctcatgcatatcagctacgagtctggaatcctggagaaccctaagaaccaagcacctccaggtctctacacgaagaccaggacccggccaaagcccccaacacccctgacattctcgagatygagttcaaaaaaggagtcccygtgaaggtgaccaacgtcaaggatggcaccacccaccagacctcattggagctcttcatgtacctgaacgaagtcgtgggcaagcagggtgtgggctgtattgacatcatggagaaccgcttcattggaatgaagtcccgagggatctaccaggccccagcaagcaccatcctttacctcgctcatttagacaccaaggccttcaccatgggccaggaagtgcgcaaaatcaaacaaggcctgggcttgaaatttgttgagctggtggataccggtttctggtacagccctgagtgtgaatttgtctgccactgcatcgccaagtcccaggagcaagtggaagggaaagtgcaggtgtccgtcctcgagggccaggtgtacatccttggccaggagtccccactgtctctctacaaggaggagccggtgagcatgaacgtgcagggtgattatcagycaattgatgccaccgggttcatcaacatcaattccctcaggctgaaggaatatcatcgtctccagagcaaggtcactgccaaatagccccctgtacaatgaggagctggggcctccttaatttgctgatcccccaagtacaggagctaattgttgtgataatttgtaattgtgacttgttctcctcggctggcagcgtagtggggctgccaggccccagctttgttctctggtccccctgaagcctgcaaacgttgtcatcaaagggaagggtggggggcagctgtggtggggagctataaaatgacaattaaaagatttaaa

SEQ ID NO: 7140 - DNA, 1480 bp, Homo sapiens
agacgctatgtccaccaaaggctccgtggttctggcctacagtggcagcctggacacctcctgcaccctcctgtggctgaaggaacaaggctatgacgtcattgcctacctggccaacattggccagaaggaagacttcgaggaagccaggaagaatgcactgaagtttggggctaaaaaggtgttcattgaggatgtcggcagggagtttgtggaggagttcatctggccggccatccagtccagtgcactgtatgaggaccgctaccttctgggcacctctcgccaggccctgcatcgcctgcaaacaaatggaaatcacccagtggaagggggccaagtatatgtcccacagcaccacgggaaatgggaacaatcaggtccggtttgagctcatttgctactcactagccccccagataaaggtcattgctccctggaggatgcccaaattctacaaccagctcaagggccdcaatgacctgatggaatatgcaaagcaacacaggattcccatcccggtcacacccaagaactcgtggagcatggacgagaacctcatgcatatcagctacgagtctggaatcctggagaaccctaagaaccaagcacctccaggtctctacacgaagaccaggacccggccaaagcccccaacacccctgacattctcgagatygagttcaaaaaaggagtcccygtgaaggtgaccaacgtcaaggatggcaccacccaccagacctcattggagctcttcatgtacctgaacgaagtcgtgggcaagcagggtgtgggctgtattgacatcatggagaaccgcttcattggaatgaagtcccgagggatctaccaggccccagcaagcaccatcctttacctcgctcatttagacaccaaggccttcaccatgggccaggaagtgcgcaaaatcaaacaaggcctgggcttgaaatttgttgagctggtggataccggtttctggtacagccctgagtgtgaatttgtctgccactgcatcgccaagtcccaggagcaagtggaagggaaagtgcaggtgtccgtcctcgagggccaggtgtacatccttggccaggagtccccactgtctctctacaaggaggagccggtgagcatgaacgtgcagggtgattatcagycaattgatgccaccgggttcatcaacatcaattccctcaggctgaaggaatatcatcgtctccagagcaaggtcactgccaaatagccccctgtacaatgaggagctggggcctccttaatttgctgatcccccaagtacaggagctaattgttgtgataatttgtaattgtgacttgttctcctcggctggcagcgtagtggggctgccaggccccagctttgttctctggtccccctgaagcctgcaaacgttgtcatcaaagggaagggtggggggcagctgtggtggggagctataaaatgacaattaaaagatttaaa

SEQ ID NO: 7141 - DNA, 432 bp, Homo sapiens
atgacaagggacatcrcccccaggatcggatatcctaaacccgtcctgctgcattcttccttcttctctgacctgcagggcatccagaacaaaatgagtgccagtgaccccagctcttttatcttcctcaccaacatggccatgcagatcaagaccaagatcagtaagcatgcattttctggagagagagacaccatcgaggagcacaggcactttgggggcaactgtgttgtggacgtgtctttcatgtacttgaccttcctcaaggatgaagacaagctcgagcagatgaggaaggatgacaccagcagagacatgctcactggtgacctcaagaagatgctcatagaggttctccagccygtgattacagagcaccaagcccagtgcaaggaggtcatggacgagttagtgaaagagttcactaacgaa

SEQ ID NO: 7142 - DNA, 2934 bp, Homo sapiens
atgaggtctgacaagtcagctttggtatttctgctcctgcagctcttctgtgttggctgtggattctgtgggaaagtcctggtgtggccctgtgacatgagccattggcttaatgtcaaggtcattctagaagagctcatagtgagaggccatgaggtaacagtattgactcactcaaagccttcgttaattgactacaggaagccttctgcattgaaatttgaggtggtccatatgccacaggacagaacagaagaaaatgaaatatttgttgacctagctctgaatgtcttgccaggcttatcaacctggcaatcagttataaaattaaatgatttttttgttgaaataagaggaactttaaaaatgatgtgtgagagctttatctacaatcagacrcttatgaagaagctacaggaaaccaactacgatgtaatgcttatagaccctgtgattccctgtggagacctgatggctgagttgcttgcagtcccttttgtgctcacacttagaatttctgtaggaggcaatatggagcgaagctgtgggaaacttccagctccactttcctatgtacctgtgcctatgacaggactaacagacagaatgacctttctggaaagagtaaaaaattcaatgctttcagttttgttccacttctggattcaggattacgactatcatttttgggaagagttttatagtaaggcattaggaaggcccactacattatgtgagactgtgggaaaagctgagatatggctaataygaacatatkgggattttgaatttcctcaaccataccaacctaactttgagtttgttggaggattgcactgtaaacctgccaaagctttgcctaaggaaatggaaaattttgtccagagttcaggggaagatggtattgtggtgttttctctggggtcactgtttcaaaatgttacagaagaaaaggctaatatcrttgcttcagcccttgcccagatcccacagaaggtgttatggaggtacaaaggaaaaaaaccatccacattaggagccaatactcggctgtatgattggataccccagaatgatcttcttggtcatcccaaaaccaaagcttttatcactcatggtggaatgaatgggatctatgaagctatttaccatggggtccctatggtgggagttcccatatttggtgatcagcttgataacatagctcacatgaaggccaaaggagcagctgtagaaataaacttcaaaactatgacaagcgaagatttactgagggctttgagaacagtcattaccgattcctcttataaagagaatgctatgagattatcaagaattcaccatgatcaacctgtaaagcccctagatcgagcagtcttctggatcgagtttgtcatgcgccacaaaggagccaagcacctgcgatcagctgcccatgacctcacctggttccagcactactctatagatgtgattgggktcctgctgrcctgtgtggcaactgctatattcttgttcacaaaatgttttttattttcctgtcaaaaatttaataaaactagaaagatagaaaagagggaatagatctttccaaattcaagaaagacstgatggggtaatcctgttaattccagccacatagaatttggtgaaaaccttgctattttcatattatctattctgttattttatcttagctatatagcctagaattccaygatcatgaggttgtgagtatatctcattctttcgttgyattttcctaggtgtctttactctcttctctcactttgtgacacaaggacatgaatacatctaaattttcctatttctgatatgactgttttgatgatgtcattacttctataaccttaagtgatagggtgacatgcaatatgattattcctggtgtgcgcccaaacacatggatataaagaggtaaaaaacttaaaattcacaaaattcagtaaaccacacaaatcaggtaagtgttctatgagattagctggctatgagaaacataatgatgtttctttttcaatttaaataagccyttctacatagccagcatcagtgatctcagaaaataaattgctaataatgatgacatggcattatgcttagaaaagtttgctgtatttccatagacctcatctagatgtcatggcctacatttctgccatcactcaaccaatacttttttctgttttcttgatgataaaaagacctttctcatgattgccatcaaataacaaaagaaactattttttttctcacatagagaacatgtcagtaagatattcaaggtgaacagattatttttgggattagtaactatttgaaatatgtggtgataattactgagtttataaaatttatttgatagtacacttaaagaagatttatatgtttattctttaaaaatgatgaatactcataattcttatctctataatcaaaagtataatttactgtagaaaaataaagagatgcttgttctgaaagtaagatcagtgaactgcttttcagtctcaatctttgagaattgtaaattcatcaaataattgcttacatagtaaaaatttaaggtattagaaaacctgcataacaaatagtattatatattaaatattttgatatgtaaagctctacacaaagctaaatatagtgtaataatgtttacactartaagcaaatatgttaatcttctcatttttttactgtcatataatcttagtgatatgcctattaatagttttaaataaataaattggctyatctggctttttgaaaattttgaaattcttacagatgttgattaggtatatctacaaattaatttcaattttaaaatgatgatataaaaataaatataagtatttttcttgtgtatgtatacaataaatataaataaaattgtttactgttttgaaa

SEQ ID NO: 7143 - DNA, 3031 bp, Homo sapiens
atgaggtctgacaagtcagctttggtatttctgctcctgcagctcttctgtgttggctgtggattctgtgggaaagtcctggtgtggccctgtgacatgagccattggcttaatgtcaaggtcattctagaagagctcatagtgagaggccatgaggtaacagtattgactcactcaaagccttcgttaattgactacaggaagccttctgcattgaaatttgaggtggtccatatgccacaggacagaacagaagaaaatgaaatatttgttgacctagctctgaatgtcttgccaggcttatcaacctggcaatcagttataaaattaaatgatttttttgttgaaataagaggaactttaaaaatgatgtgtgagagctttatctacaatcagacrcttatgaagaagctacaggaaaccaactacgatgtaatgcttatagaccctgtgattccctgtggagacctgatggctgagttgcttgcagtcccttttgtgctcacacttagaatttctgtaggaggcaatatggagcgaagctgtgggaaacttccagctccactttcctatgtacctgtgcctatgacaggactaacagacagaatgacctttctggaaagagtaaaaaattcaatgctttcagttttgttccacttctggattcaggattacgactatcatttttgggaagagttttatagtaaggcattaggaaggcccactacattatgtgagactgtgggaaaagctgagatatggctaataygaacatatkgggattttgaatttcctcaaccataccaacctaactttgagtttgttggaggattgcactgtaaacctgccaaagctttgcctaaggaaagttataccagaaaaccaagctctcttaagccatggcatctgtatctaaaatagaaatacagaaggagagctgacaatttccatcattctctaggaaatggaaaattttgtccagagttcaggggaagatggtattgtggtgttttctctggggtcactgtttcaaaatgttacagaagaaaaggctaatatcrttgcttcagcccttgcccagatcccacagaaggtgttatggaggtacaaaggaaaaaaaccatccacattaggagccaatactcggctgtatgattggataccccagaatgatcttcttggtcatcccaaaaccaaagcttttatcactcatggtggaatgaatgggatctatgaagctatttaccatggggtccctatggtgggagttcccatatttggtgatcagcttgataacatagctcacatgaaggccaaaggagcagctgtagaaataaacttcaaaactatgacaagcgaagatttactgagggctttgagaacagtcattaccgattcctcttataaagagaatgctatgagattatcaagaattcaccatgatcaacctgtaaagcccctagatcgagcagtcttctggatcgagtttgtcatgcgccacaaaggagccaagcacctgcgatcagctgcccatgacctcacctggttccagcactactctatagatgtgattgggktcctgctgrcctgtgtggcaactgctatattcttgttcacaaaatgttttttattttcctgtcaaaaatttaataaaactagaaagatagaaaagagggaatagatctttccaaattcaagaaagacstgatggggtaatcctgttaattccagccacatagaatttggtgaaaaccttgctattttcatattatctattctgttattttatcttagctatatagcctagaattccaygatcatgaggttgtgagtatatctcattctttcgttgyattttcctaggtgtctttactctcttctctcactttgtgacacaaggacatgaatacatctaaattttcctatttctgatatgactgttttgatgatgtcattacttctataaccttaagtgatagggtgacatgcaatatgattattcctggtgtgcgcccaaacacatggatataaagaggtaaaaaacttaaaattcacaaaattcagtaaaccacacaaatcaggtaagtgttctatgagattagctggctatgagaaacataatgatgtttctttttcaatttaaataagccyttctacatagccagcatcagtgatctcagaaaataaattgctaataatgatgacatggcattatgcttagaaaagtttgctgtatttccatagacctcatctagatgtcatggcctacatttctgccatcactcaaccaatacttttttctgttttcttgatgataaaaagacctttctcatgattgccatcaaataacaaaagaaactattttttttctcacatagagaacatgtcagtaagatattcaaggtgaacagattatttttgggattagtaactatttgaaatatgtggtgataattactgagtttataaaatttatttgatagtacacttaaagaagatttatatgtttattctttaaaaatgatgaatactcataattcttatctctataatcaaaagtataatttactgtagaaaaataaagagatgcttgttctgaaagtaagatcagtgaactgcttttcagtctcaatctttgagaattgtaaattcatcaaataattgcttacatagtaaaaatttaaggtattagaaaacctgcataacaaatagtattatatattaaatattttgatatgtaaagctctacacaaagctaaatatagtgtaataatgtttacactartaagcaaatatgttaatcttctcatttttttactgtcatataatcttagtgatatgcctattaatagttttaaataaataaattggctyatctggctttttgaaaattttgaaattcttacagatgttgattaggtatatctacaaattaatttcaattttaaaatgatgatataaaaataaatataagtatttttcttgtgtatgtatacaataaatataaataaaattgtttactgttttgaaa

SEQ ID NO: 7144 - DNA, 1754 bp, Homo sapiens
ttgggaggagtgatggagggtggaaagcggaagaaaaaagcaagatgggaccgcaagctggacgtgactgtaaggggtcatggctgcggaatccagcaggggcattggggttgacgtgcactcagcgccgagcttcttcgtagttcctcacccccttggctactatgggctggtccggaaggtcaggcawggggaagctgcgcaggcgcastgtgagcggcaacatggcgtccaggtctaagcggcgtgccgtggaaagtggggttccgcagccgccggatcccccagtccagcgcgacgaggaagaggaaaaagaagtcgaaaatgaggatgaagacgatgatgacagtgacaaggaaaaggatgaagaggacgaggtcattgacgaggaagtgaatattgaatttgaagcttattccctatcagataatgattatgacggaattaagaaattactgcagcagctttttctaaaggctcctgtgaacactgcagaactaacagatctcttaattcaacagaaccatattgggagtgtgattaagcaaacggatgtttcagaagacagcaatgatgatatggatgaagatgaggtttttggtttcataagccttttaaatttaactgaaagaaagggtacccagtgtgttgaacaaattcaagagttggttctacgcttctgtgagaagaactgtgaaaagagcatggttgaacagctggacaagtttttaaatgacaccaccaagcctgtgggccttctcctaagtgaaagattcattaatgtccctccacagatcgctctgcccatgtaccagcagcttcagaaagaactggcgggggcacacagaaccaataagccatgtgggaagtgctacttttaccttctgattagtaagacatttgtggaagcaggaaaaaacawttccaaaaagaaacctagcaacaaaaagaaagctgcgttaatgtttgcaaatgcagaggaagaatttttctatgagaaggcaattctcaagttcaactactcagtgcaggaggagagcgacacttgtctgggaggcaaatggtcttttgatgacgtaccaatgacgcccttgcgaactgtgatgttaattccaggcgacaagatgaacgaaatcatggataaactgaaagaatatctatctgtctaacccatttccaatggacagtgatgggcttgtttttgtaaaattaccagaaaactcagtggagatttactgaaaaactcagactttattcagattaagttcctctacaaaaagtagggttctgtcccatgtgtctctgacacatttacaaaataccagttttttaaaattttggtcaaattatgagtggttgatttaaaaacttttccaagaagaagaaaagcatggagtmgtaatttaaagaactcaataaaaacttctattttttattttaaaataatatacacagtgttattttcttcaagaccgtcctgtggatgtgaaatccgtcttcgcgtcatgtatctcccatatccagcagttcagccatccagctacctttgggaccctgctgcaccttgtgtttgytggggagtcactggagagtgcatmtctgttcagtttcagggcacgtctcacacatttgctgttccttattcattgttgacacaggggataggtgatccactacttgctgtagaatgtccttactttcactaggaggcagattactraaatagtattgtggtaccagctgcataaatctgt

SEQ ID NO: 7145 - DNA, 2550 bp, Homo sapiens
ttgggaggagtgatggagggtggaaagcggaagaaaaaagcaagatgggaccgcaagctggacgtgactgtaaggggtcatggctgcggaatccagcaggggcattggggttgacgtgcactcagcgccgagcttcttcgtagttcctcacccccttggctactatgggctggtccggaaggtcaggcawggggaagctgcgcaggcgcastgtgagcggcaacatggcgtccaggtctaagcggcgtgccgtggaaagtggggttccgcagccgccggatcccccagtccagcgcgacgaggaagaggaaaaagaagtcgaaaatgaggatgaagacgatgatgacagtgacaaggaaaaggatgaagaggacgaggtcattgacgaggaagtgaatattgaatttgaagcttattccctatcagataatgattatgacggaattaagaaattactgcagcagctttttctaaaggctcctgtgaacactgcagaactaacagatctcttaattcaacagaaccatattgggagtgtgattaagcaaacggatgtttcagaagacagcaatgatgatatggatgaagatgaggtttttggtttcataagccttttaaatttaactgaaagaaagggtacccagtgtgttgaacaaattcaagagttggttctacgcttctgtgagaagaactgtgaaaagagcatggttgaacagctggacaagtttttaaatgacaccaccaagcctgtgggccttctcctaagtgaaagattcattaatgtccctccacagatcgctctgcccatgtaccagcagcttcagaaagaactggcgggggcacacagaaccaataagccatgtgggaagtgctacttttaccttctgattagtaagacatttgtggaagcaggaaaaaacawttccaaaaagaaacctagcaacaaaaagaaagctgcgttaatgtttgcaaatgcagaggaagaatttttctatgaggagcagggaaaacctgaggtgcttggaggtccagacacaagaagaggattggaaccagttccgatacagcacaatggttggtctgttcccccagtattagaataaattaaaacatacaagccaggatgaatgaagccaataggaaataaaaaacaggcacacaacattatttggggaaaaacacctctagtgacacattttcttcatctgcactgattatttcagcaaaagaaatctagtatgttttcatacatctgatgtataaatttgctgaactttgagttagttttcttaagataatttttcatattaagaaaattttccttttctaacctattaaaatacctcactatcatttcaaaaggttaaatgagttgatcactatctctgctctgtgctcctcaaaatataatttcaaatggatccgatctaaatctatacctagtgcagatttgcaaaaaaagaaaaggaatagtcattaaggatacctgttaccatggcygcgattgttagcacttcatctacacagtcaaattcacaggacgctaagatagacttcgagagttgtggatcaagaggaaactctgacatgatgattccaaattcagaaagatttccatcattatccagtgctgccagataatctaagtcttccaatgcctgcatcaaactttctggtgctaggaaaggaaaaaaataataatttaagagtctcatatggctaagatggagaaacaggtactggacttttccctcctgcatgaaacaagcaaacaatggacaaaatatgtgaaacaacggtttgcaagccaccaaataccagggagtgaaggatagtgattcttgagagggcaaactcaggaggggagccctgtgattgtccagctcatgctccgaggagggtcccagctgcagtgtgcatgcggggggaacccaggtggagcctgccagcctccctgcagtaggaaaacaatgccagggatccagggagactaaggtggccggaactcgcggtcacagtactggagagagacacacagatctaagtcgggggccagagggagctccctcaactaggcagcacagccctactgatcagcgcatgtgtgtaaggaaccacctcaggccagagaaagagccatgtgagaagattagaaggaacagtggtgctgacacaggacctagggtagggcctgttcccaccaccctagctggaaaacctcatgatttatggggcactgggtagaaaacacaagtgagaaaccctagatgggcactgccacctgacacagctatacagcaggacctgaaaggatcacactgcatcctaggacaaagctcaaaagtacctctgggactacaaaaatattcagtgcccaagaaggtaaaatgtacaatgtctagcatccagtagagaggcatgaaaagcaggaaaatacattgcataatacagagaaaaattaatcacaactgacctggatctcagatgctagaaatagtagacaaagatgttatttcccagtgcaaataaagaaataaagatagcaagctg

SEQ ID NO: 7146 - DNA, 3271 bp, Homo sapiens
acactgctcctgaagcccggtcaggcggtcgcgccctccctggcggcccccgcggcccsgcaggacctgtgccccgacgtcgccgacccgcggtccccgctgtcgccgacccgcggcgtccgtcgggcgagtgggcctgcccgcgggtaaggcgccggccctgggccgccctcccgggaatcgggagccgccgctgcagtgtggtttattgacaatcatttacaatgccgaagagtgctgtagtgagccagcacagtgggtaacacagcaacggagaacagatgcaggtttgaggaatttaacttgctaaaaccttgaactgaagtcttagagattggaacatacgggtttgtataaataggcttttaagccctgtttgcaatgggttactgataggagaaacttgcttgtggaatgtcagctgcgtgagctcactgtcagacaagatggaagaagaagggctggagtgtccaaactcttcctctgaaaaacgctattttcctgaatccctggattccagcgatggggatgaggaagaggttttggcctgtgaggatttggaacttaacccctttgatggattgccatattcatcacgttattataaacttctgaaagaaagagaagatcttcctatatggaaagaaaaatactcctttatggagaacctgcttcaaaatcaaatcgtgattgtttcaggagatgctaaatgtggtaagagcgctcaggttcctcagtggtgtgctgaatattgtctttccatccactaccagcacgggggcgtgatatgcacacaggtccacaagcagactgtggtccagctcgccctgcgggtggcggatgaaatggatgttaacattggtcatgaggttggctacgtgatccctttcgagaactgctgtaccaacgaaacaatcctgaggtattgtactgatgatatgctgcaaagagaaatgatgtccaatccttttttgggtagctatggggtcatcatcttagatgatattcatgaaagaagcattgcaactgatgtgttacttggacttcttaaagatgttttactagcaagaccagaactgaagctcataattaactcctcacctcacctgatcagcaaactcaattcttattatggaaacgtgcctgtcatagaagtgaaaaataaacaccctgtggaggttgtgtaccttagtgaggctcaaaaggattcttttgagtctattttacgccttatctttgaaattcaccactcgggtgagaaaggtgacattgtagtctttctggcctgtgaacaagatattgagaaagtctgtgmaactgtctatcaaggatctaacctaaacccagmtcttggagaactggtggttgttcctttgtatccaaaagagaaatgttcattgttcaagccactcgatgaaacagaaaaaagatgccaagtttatcaaagaagagtggtgttaactactagctctggagagtttttgatctggagcaactcagtcagatttgttatcgatgtgggtgtggaaagaagaaaggtgtacaacccgagaataagagcaaactcgctcgtcatgcagcccatcagccagagccaggcagagatacgcaagcagattcttggctcatcttcttcaggaaaatttttctgcctgtacactgaagaatttgcctccaaagacatgacgccactgaagccagcagaaatgcaggaagccaacctaacaagcatggtgctttttatgaagaggatagacattgcgggcctaggccactgtgacttcatgaacagaccagcaccagaaagtttgatgcaggcattggaagacttagattatctggcagcactggataatgatggaaatctttctgaatttggaatcatcatgtcagagtttcctcttgatccacaactctcgaagtctatcttagcgtcctgtgaatttgactgtgtagatgaagtgctaacaatcgcrgccatggtaacagctccaaattgcttttcacatgtgccacatggagctgaagaggctgccttgacttgttggaagacatttttacatcccgaaggagatcactttaccctcatcagcatttacaaggcttaccaagacacmactctgaattctagcagtgagtactgtgtggaaaagtggtgtcgtgattacttcctcaactgttcagcactcagaatggcagatgttattcgagctgaactcttagaaattatcaagcgaatcgagcttccctatgcagaacctgcttttggctccaaggaaaacactctaaacataaagaaagctcttctgtccggttactttatgcagattgctcgggatgttgatggatcaggtaactacttaatgctgacacataagcaggttgctcagctgcatcccctgtctggttactcaatcaccaagaagatgccagagtgggtcctcttccataaattcagcatttctgagaacaactacatcaggattacctcagaaatctctcctgaactatttatgcagctggtaccacaatactatttyagtaatctgcctcctagtgaaagtaaggacattctacagcaagtagtggatcacctatcccctgtgtcaacaatgaataaggaacagcaaatgtgtgagacgtgccctgaaactgaacagakatgcactctccagtgactccccarcaaacacaaggtgcagcagggtcccaaaggtagctggatggctgaactgctggatatgggagatacatgacgcgaagacggatttcacatccacaggacggtcttgaagaaaataacactgtgtatattattttaaaataaaaaatagaagtttttattgagttctttaaattackactccatgcttttcttcttcttggaaaagtttttaaatcaaccactcataatttgaccaaaattttaaaaaactggtattttgtaaatgtgtcagagacacatgggacagaaccctactttttgtagaggaacttaatctgaataaagtctgagtttttcagtaaatctccactgagttttctggtaattttacaaaaacaagcccatcactgtccattggaaatgggttagacagatagatattctttcagtttatccatgatttcgttcatcttgtcgcctggaattaacatcacagttcgcaagggcgtcattggtacgtcatcaaaagaccatttgcctcccagacaagtgtcgctctcctcctgcactgagtagttgaacttgagaattgccttctaaaccaaa

SEQ ID NO: 7147 - DNA, 3317 bp, Homo sapiens
caggcagagagcacgaggcycagtgcagaatcattttctgaaccagccaggaaataccggaacccaccaaactttaaacaccagcctaaattattcctgttcttttaagcaggcagcagaaatgacagaaacccgttaacagaaaaaaaaaaaataatgcttttcatttgaactcctgtgcattttctttttaacttatatgtgttcctaattttccttactctttttgtttgtttgtttcttagtgtggtttattgacaatcatttacaatgccgaagagtgctgtagtgagccagcacagtgggtaacacagcaacggagaacagatgcaggtttgaggaatttaacttgctaaaaccttgaactgaagtcttagagattggaacatacgggtttgtataaataggcttttaagccctgtttgcaatgggttactgataggagaaacttgcttgtggaatgtcagctgcgtgagctcactgtcagacaagatggaagaagaagggctggagtgtccaaactcttcctctgaaaaacgctattttcctgaatccctggattccagcgatggggatgaggaagaggttttggcctgtgaggatttggaacttaacccctttgatggattgccatattcatcacgttattataaacttctgaaagaaagagaagatcttcctatatggaaagaaaaatactcctttatggagaacctgcttcaaaatcaaatcgtgattgtttcaggagatgctaaatgtggtaagagcgctcaggttcctcagtggtgtgctgaatattgtctttccatccactaccagcacgggggcgtgatatgcacacaggtccacaagcagactgtggtccagctcgccctgcgggtggcggatgaaatggatgttaacattggtcatgaggttggctacgtgatccctttcgagaactgctgtaccaacgaaacaatcctgaggtattgtactgatgatatgctgcaaagagaaatgatgtccaatccttttttgggtagctatggggtcatcatcttagatgatattcatgaaagaagcattgcaactgatgtgttacttggacttcttaaagatgttttactagcaagaccagaactgaagctcataattaactcctcacctcacctgatcagcaaactcaattcttattatggaaacgtgcctgtcatagaagtgaaaaataaacaccctgtggaggttgtgtaccttagtgaggctcaaaaggattcttttgagtctattttacgccttatctttgaaattcaccactcgggtgagaaaggtgacattgtagtctttctggcctgtgaacaagatattgagaaagtctgtgmaactgtctatcaaggatctaacctaaacccagmtcttggagaactggtggttgttcctttgtatccaaaagagaaatgttcattgttcaagccactcgatgaaacagaaaaaagatgccaagtttatcaaagaagagtggtgttaactactagctctggagagtttttgatctggagcaactcagtcagatttgttatcgatgtgggtgtggaaagaagaaaggtgtacaacccgagaataagagcaaactcgctcgtcatgcagcccatcagccagagccaggcagagatacgcaagcagattcttggctcatcttcttcaggaaaatttttctgcctgtacactgaagaatttgcctccaaagacatgacgccactgaagccagcagaaatgcaggaagccaacctaacaagcatggtgctttttatgaagaggatagacattgcgggcctaggccactgtgacttcatgaacagaccagcaccagaaagtttgatgcaggcattggaagacttagattatctggcagcactggataatgatggaaatctttctgaatttggaatcatcatgtcagagtttcctcttgatccacaactctcgaagtctatcttagcgtcctgtgaatttgactgtgtagatgaagtgctaacaatcgcrgccatggtaacagctccaaattgcttttcacatgtgccacatggagctgaagaggctgccttgacttgttggaagacatttttacatcccgaaggagatcactttaccctcatcagcatttacaaggcttaccaagacacmactctgaattctagcagtgagtactgtgtggaaaagtggtgtcgtgattacttcctcaactgttcagcactcagaatggcagatgttattcgagctgaactcttagaaattatcaagcgaatcgagcttccctatgcagaacctgcttttggctccaaggaaaacactctaaacataaagaaagctcttctgtccggttactttatgcagattgctcgggatgttgatggatcaggtaactacttaatgctgacacataagcaggttgctcagctgcatcccctgtctggttactcaatcaccaagaagatgccagagtgggtcctcttccataaattcagcatttctgagaacaactacatcaggattacctcagaaatctctcctgaactatttatgcagctggtaccacaatactatttyagtaatctgcctcctagtgaaagtaaggacattctacagcaagtagtggatcacctatcccctgtgtcaacaatgaataaggaacagcaaatgtgtgagacgtgccctgaaactgaacagakatgcactctccagtgactccccarcaaacacaaggtgcagcagggtcccaaaggtagctggatggctgaactgctggatatgggagatacatgacgcgaagacggatttcacatccacaggacggtcttgaagaaaataacactgtgtatattattttaaaataaaaaatagaagtttttattgagttctttaaattackactccatgcttttcttcttcttggaaaagtttttaaatcaaccactcataatttgaccaaaattttaaaaaactggtattttgtaaatgtgtcagagacacatgggacagaaccctactttttgtagaggaacttaatctgaataaagtctgagtttttcagtaaatctccactgagttttctggtaattttacaaaaacaagcccatcactgtccattggaaatgggttagacagatagatattctttcagtttatccatgatttcgttcatcttgtcgcctggaattaacatcacagttcgcaagggcgtcattggtacgtcatcaaaagaccatttgcctcccagacaagtgtcgctctcctcctgcactgagtagttgaacttgagaattgccttctaaaccaaa

SEQ ID NO: 7148 - DNA, 6136 bp, Homo sapiens
ctccagtgctgtggacatgggtctgaacgaattgatcacctaggggctactgagaacgcggtgctctgtaattagtgggtgcagcacaccaacatggcacatgtatacatatgtaacaaaactgcacgttgtgcacatgtaccctagaacttaaagtataaatatatatatacatataaaaaatggggacagacccgggctccagctggtggacaggctttgaattctgcaggttgtcgcccattgctggtcatgtcaggaaaatcacctgtggctctcctgagcacttccggacctcagtgtctaacagatgaacaaaatgatctttgtctttctcaagggtgtcggcctcctcttagatcactgagcatttggagaggagggttattaaattaatgcatgagataagaaaatgtttcaactaggaattctgcatctctggaattgtattaaaccaattaatactccccaatcaattactctgtaatttactcaagtatattaaaagtattgtggcagtgtgcaataccagatttttaaaaacagtgtgtgcctctgtgggcagagctgcctgtcgtagaagggccagggcagcatgcagcgggggtgagggcttctgtctccagggttcctgggttcaaatcacagttcctccatatcctccagcctgactttgggccagttctctatccttcgggaacctctgtttctcagccctgtggggttattgtgcggataatacagatataaaatacccagcatatagtaggtgctcatggaattatttgtgtatgtggctcattttacaaatctaaaatgtgtgttttggaaataaaaaaaagagggaagaagtgccactgcccacctgcacctgccagtgagcctctagtgaggggtttccacagcaccaagcagtcactgccacatttagcgatgctctgatgttttggcaaaatggagtgccaggtgaagatctgaggtgatggcccacaggtcctcagcatgaaagagcctttttctgtgctgagccactttacaatctgcgtctgcccctgggcattcccaccccctacccccaataaatacctgcatcccagggtactcaattggctctgtcaagatgagtggaccgtggctccatcctcgcagaggcagcttacctccacctctctgcaggtccaccatggagcccttgtgtccactcctgctggtgggttttagcttgccgctcgccagggctctcaggggcaacgagaccactgccgacagcaacgagacaaccacgacctcaggccctccggacccgggcgcctcccagccgctgctggcctggctgctactgccgctgctgctcctcctcctcgtgctccttctcgccgcctacttcttcaggttcaggaagcagaggaaagctgtggtcagcaccagcgacaagaagatgcccaacggaatcttggaggagcaagtcattgccatctggacacatacaaggaacttttgaactggcaaataaagaagaaaacagagaaaaaaacagatatcccaacatccttcccaatgaccattctagggtgattctgagccaactggatggaattccctgttcagactacatcaatgcttcctacatagatggttacaaagagaagaataaattcatagcagctcaaggtcccaaacaggaaacggttaacgacttctggagaatggtctgggagcaaaagtctgcgaccatcgtcatgttaacaaacttgaaagaaaggaaagaggaaaagtgccatcagtactggcccgaccaaggctgctggacctatggaaacatccgggtgtgcgtggaggactgcgtggttttggtcgactacaccatccggaagttctgcatacagccacagctccccgacggctgcaaagcccccaggctggtctcacagctgcacttcaccagctggcccgacttcggagtgccttttacccccattgggatgctgaagttcctcaagaaagtaaagacgctcaaccccgtgcacgctgggcccatcgtggtccactgtagcgcgggcgtgggccggacgggcaccttcattgtgatcgatgccatgatggccatgatgcacgcggagcagaaggtggatgtgtttgaatttgtgtctcgaatccgtaatcagcgccctcagatggttcaaacggatatgcagtacacgttcatctaccaagccttactcgagtactacctctacggggacacagagctggacgtgtcctccctggagaagcacctgcagaccatgcacggcaccaccacccacttcgacaagatcgggctggaggaggagttcaggaaattgacaaatgtccggatcatgaaggagaacatgaggacgggcaacttgccggcaaacatgaagaaggccagggtcatccagatcatcccgtatgacttcaaccgagtgatcctttccatgaaaaggggtcaagaatacacagactacatcaacgcatccttcatagacggctaccgacagaaggactatttcatcgccacccaggggccactggcacacacggttgaggacttctggaggatgatctgggaatggaartcccacactatcgtgatgctgacggaggtgcaggagagagagcaggataaatgctaccagtattggccaaccgagggctcagttactcatggagaaataacgattgagataaagaatgataccctttcagaagccatcagtatacgagactttctggtcactctcaatcagccccaggcccgccaggaggagcaggtccgagtagtgcgccagtttcacttccacggctggcctgagatcgggattcccgccgagggcaaaggcatgattgacctcatcgcagccgtgcagaagcagcagcagcagacaggcaaccaccccatcaccgtgcactgcagtgccggagctgggcgaacaggtacattcatagccctcagcaacattttggagcgagtaaaagccgagggacttttagatgtatttcaagctgtgaagagtttacgacttcagagaccacatatggtgcaaaccctggaacagtatgaattctgctacaaagtggtacaagattttattgatatattttctgattatgctaatttcaaatgaagattcctgccttaaaatattttttaatttaatggtcagtatattttgtaaaaatcatgttaatttatttcatagttgacattaatatcttccctaatttctttgtatatattttgttatgccttaaaggccacctgctatacagttgttaaatcttaaatatgctttttaaaaattggaataatgtattaaggtcaaataatatcccataaaatatatatttctgctaatattagtaaatatcttaatttttcattagattcatatcatttaatttcacatattcaacacctttaaatgttgtaatcttaatatgcgaagtgtgcctctgcaagatactaacacaaagctcatgttaagaaaacagttgaggactcagaagtcagttgaaaatgcactttcctaacagtgaattcacaaccctgaacagcagcatttttggaaggcaaactgttcgtgatggtacaatgtaaatggggacttctgtaaagttctcagtttcggtccatgtggtttatctttacattttgaagatcaaagaagtctttacaacctgaatccaggtctaaaacacactagagtagctggtgactataaataatatttwaaaatgctgtgtctacaccatcaagactgtgtctacactatcttggctgaacgagaagagatgtaaatgctgggtggtcccgttgacccacggcgttgggtacaacaaaaccagccatcggagttacaccccaaagcaccatttgctgtccagctgcctgtcgtttggcccagaccaccctcagaaaaaaamcagctgcctctcccattctsccctcccgttctgccacagcggcctgggctggtccagtgctatgcctggaggctcaacacaaaacttcccatccaaacattcagatgaactgagcgtcttacacacgsagtacagaggagcacacattrggatagaaacagtagaataaccacgggcaattaaactttaaattttctgagcagcattttggtatttaaacatttcttgtaaaaagctgagacagtttgtaagaaaagaatccttaaaatctagatttataccattttttaaagtcccacctttcaatgtttaataaaacaaaaagagaaatccttaatctaaaagctaaattatttttgaatggaaatactactgagaccattgacactggataacagtaatgatcccattaccagataagattgactgayggggaaaaaaaaaaaaaagaatggggtgtgaatgtaccaacactgaatcttacagcagttatctttctatggccattaggtacctagcagatgtgcacaatataaacaaaaagatatctggcctaccttactactaaaagcatttaacacrtgcatttttggtactttyttttgttttctaaaagctacataaaggccttatttgacattttcactgataactgatcgcaccctcrtgttgcagtgttcgtcccctattcattaacagtgtgtgcaaatgcaaccccaggacacrttattgttctgatagatgctcacagggaatcaagcttctcgcccactccacggctctgagccccatccaagggcaagacttggtgcccagctggaaggacgaaagcacactttgtgaccgccatcctcaccagctgcatgcctgggctgcacactgctgaacgtgctcctctctccttctctgtacaatgattcagcatctcggcggaagaggaaaatggagctttttgaggctcgccaggtcccttttgttttcaccattaaaattccaaacccaaagcctttgtttgactgaaggagaagagagggaagtaagcttctgttcagcacctgaaccctagaaaaagagccagtttgctacgatgaaggtgacatttctctggtcattwgagagttcgaagtcaaagycgaggggcacmggctttggttcatgtctaggagccctctgtcagaatccttgaagccctttaatggtctaactggcatctcttgtatcaagaagtacctttaaggtagaccytttcagggtgccctcaggaaagggccctgctcatgtttttttcctgtccccttagaccaaccccaggtktccactgcaggggttctgcctgttcccaaactttttccattccaggaacaaaggagaagccactttccccaggacgcargactctcccctccactgtccgggacagcgttcgccctttagcggggaggtcattacagcctcatggcctctaccaaggccccagatcacaggatctcctgggccttggagcacctcacgctgggggaatcmatccctgagggactcagaatcttctccgtgcaacctggaaagttcatctcttgtttccttcagtcaaagaaagtccattgtacataacaaaacagcccccaaacagcccagtgccgacaccattgttcctttcacactttcctttgttgcatgcagttgggttcaaatgccaaatagtgattagaagacgaccattctgatctgtgtgtgatctggtcactatgtgactgcctttayggtttctctccatgtgctatatgaatgaagaatgcataccartgttttaaaaggtatttttatgtgtttttaaacacttttttaaatgagcctgacacctgtgtttcagcatttggagacatccccatgttattcttttaagtgtataattactgatacttttttgtttgtttgtttaactaagttgtgtttaayttatgtgcagtctttataatgtatgtatgttattacagtttcaactatcatattttctttgattacatttataatttgatcttgctctgattataatgccagtgaatgttgctgaactctttgtatatgcaaattgcaagatttaaaccattctgatgcaaggataaacctttactttgactaccagcctgtgtttttgtctttaaatctcttaatttcattcctctgcaaa

SEQ ID NO: 7149 - DNA, 5375 bp, Homo sapiens
agccacagccggagctggagccgaggcggcggcgggacgcggccggccggacaaatttcctgctaggctgcggacagcgggcggcaggagccggcgcgagcggcttcaggaacccacggcctctgcgcgtccccgcgacccttcttcgcgcccggcgaagacagccgggcgccccggagggcggcgggcaggcgcccgggagatgcggagcctccgctgcagcgcgatctgcgcgaccagaccggcccccccgagactatagccttcactttccctcggtccaccatggagcccttgtgtccactcctgctggtgggttttagcttgccgctcgccagggctctcaggggcaacgagaccactgccgacagcaacgagacaaccacgacctcaggccctccggacccgggcgcctcccagccgctgctggcctggctgctactgccgctgctgctcctcctcctcgtgctccttctcgccgcctacttcttcaggttcaggaagcagaggaaagctgtggtcagcaccagcgacaagaagatgcccaacggaatcttggaggagcaagagcagcaaagggtgatgctgctcagcaggtcaccctcagggcccaagaagtattttcccatccccgtggagcacctggaggaggagatccgtatcwgatccgccgacgactgcaagcagtttcgggaggagttcaactcattgccatctggacacatacaaggaacttttgaactggcaaataaagaagaaaacagagaaaaaaacagatatcccaacatccttcccaatgaccattctagggtgattctgagccaactggatggaattccctgttcagactacatcaatgcttcctacatagatggttacaaagagaagaataaattcatagcagctcaaggtcccaaacaggaaacggttaacgacttctggagaatggtctgggagcaaaagtctgcgaccatcgtcatgttaacaaacttgaaagaaaggaaagaggaaaagtgccatcagtactggcccgaccaaggctgctggacctatggaaacatccgggtgtgcgtggaggactgcgtggttttggtcgactacaccatccggaagttctgcatacagccacagctccccgacggctgcaaagcccccaggctggtctcacagctgcacttcaccagctggcccgacttcggagtgccttttacccccattgggatgctgaagttcctcaagaaagtaaagacgctcaaccccgtgcacgctgggcccatcgtggtccactgtagcgcgggcgtgggccggacgggcaccttcattgtgatcgatgccatgatggccatgatgcacgcggagcagaaggtggatgtgtttgaatttgtgtctcgaatccgtaatcagcgccctcagatggttcaaacggatatgcagtacacgttcatctaccaagccttactcgagtactacctctacggggacacagagctggacgtgtcctccctggagaagcacctgcagaccatgcacggcaccaccacccacttcgacaagatcgggctggaggaggagttcaggaaattgacaaatgtccggatcatgaaggagaacatgaggacgggcaacttgccggcaaacatgaagaaggccagggtcatccagatcatcccgtatgacttcaaccgagtgatcctttccatgaaaaggggtcaagaatacacagactacatcaacgcatccttcatagacggctaccgacagaaggactatttcatcgccacccaggggccactggcacacacggttgaggacttctggaggatgatctgggaatggaartcccacactatcgtgatgctgacggaggtgcaggagagagagcaggataaatgctaccagtattggccaaccgagggctcagttactcatggagaaataacgattgagataaagaatgataccctttcagaagccatcagtatacgagactttctggtcactctcaatcagccccaggcccgccaggaggagcaggtccgagtagtgcgccagtttcacttccacggctggcctgagatcgggattcccgccgagggcaaaggcatgattgacctcatcgcagccgtgcagaagcagcagcagcagacaggcaaccaccccatcaccgtgcactgcagtgccggagctgggcgaacaggtacattcatagccctcagcaacattttggagcgagtaaaagccgagggacttttagatgtatttcaagctgtgaagagtttacgacttcagagaccacatatggtgcaaaccctggaacagtatgaattctgctacaaagtggtacaagattttattgatatattttctgattatgctaatttcaaatgaagattcctgccttaaaatattttttaatttaatggtcagtatattttgtaaaaatcatgttaatttatttcatagttgacattaatatcttccctaatttctttgtatatattttgttatgccttaaaggccacctgctatacagttgttaaatcttaaatatgctttttaaaaattggaataatgtattaaggtcaaataatatcccataaaatatatatttctgctaatattagtaaatatcttaatttttcattagattcatatcatttaatttcacatattcaacacctttaaatgttgtaatcttaatatgcgaagtgtgcctctgcaagatactaacacaaagctcatgttaagaaaacagttgaggactcagaagtcagttgaaaatgcactttcctaacagtgaattcacaaccctgaacagcagcatttttggaaggcaaactgttcgtgatggtacaatgtaaatggggacttctgtaaagttctcagtttcggtccatgtggtttatctttacattttgaagatcaaagaagtctttacaacctgaatccaggtctaaaacacactagagtagctggtgactataaataatatttwaaaatgctgtgtctacaccatcaagactgtgtctacactatcttggctgaacgagaagagatgtaaatgctgggtggtcccgttgacccacggcgttgggtacaacaaaaccagccatcggagttacaccccaaagcaccatttgctgtccagctgcctgtcgtttggcccagaccaccctcagaaaaaaamcagctgcctctcccattctsccctcccgttctgccacagcggcctgggctggtccagtgctatgcctggaggctcaacacaaaacttcccatccaaacattcagatgaactgagcgtcttacacacgsagtacagaggagcacacattrggatagaaacagtagaataaccacgggcaattaaactttaaattttctgagcagcattttggtatttaaacatttcttgtaaaaagctgagacagtttgtaagaaaagaatccttaaaatctagatttataccattttttaaagtcccacctttcaatgtttaataaaacaaaaagagaaatccttaatctaaaagctaaattatttttgaatggaaatactactgagaccattgacactggataacagtaatgatcccattaccagataagattgactgayggggaaaaaaaaaaaaaagaatggggtgtgaatgtaccaacactgaatcttacagcagttatctttctatggccattaggtacctagcagatgtgcacaatataaacaaaaagatatctggcctaccttactactaaaagcatttaacacrtgcatttttggtactttyttttgttttctaaaagctacataaaggccttatttgacattttcactgataactgatcgcaccctcrtgttgcagtgttcgtcccctattcattaacagtgtgtgcaaatgcaaccccaggacacrttattgttctgatagatgctcacagggaatcaagcttctcgcccactccacggctctgagccccatccaagggcaagacttggtgcccagctggaaggacgaaagcacactttgtgaccgccatcctcaccagctgcatgcctgggctgcacactgctgaacgtgctcctctctccttctctgtacaatgattcagcatctcggcggaagaggaaaatggagctttttgaggctcgccaggtcccttttgttttcaccattaaaattccaaacccaaagcctttgtttgactgaaggagaagagagggaagtaagcttctgttcagcacctgaaccctagaaaaagagccagtttgctacgatgaaggtgacatttctctggtcattwgagagttcgaagtcaaagycgaggggcacmggctttggttcatgtctaggagccctctgtcagaatccttgaagccctttaatggtctaactggcatctcttgtatcaagaagtacctttaaggtagaccytttcagggtgccctcaggaaagggccctgctcatgtttttttcctgtccccttagaccaaccccaggtktccactgcaggggttctgcctgttcccaaactttttccattccaggaacaaaggagaagccactttccccaggacgcargactctcccctccactgtccgggacagcgttcgccctttagcggggaggtcattacagcctcatggcctctaccaaggccccagatcacaggatctcctgggccttggagcacctcacgctgggggaatcmatccctgagggactcagaatcttctccgtgcaacctggaaagttcatctcttgtttccttcagtcaaagaaagtccattgtacataacaaaacagcccccaaacagcccagtgccgacaccattgttcctttcacactttcctttgttgcatgcagttgggttcaaatgccaaatagtgattagaagacgaccattctgatctgtgtgtgatctggtcactatgtgactgcctttayggtttctctccatgtgctatatgaatgaagaatgcataccartgttttaaaaggtatttttatgtgtttttaaacacttttttaaatgagcctgacacctgtgtttcagcatttggagacatccccatgttattcttttaagtgtataattactgatacttttttgtttgtttgtttaactaagttgtgtttaayttatgtgcagtctttataatgtatgtatgttattacagtttcaactatcatattttctttgattacatttataatttgatcttgctctgattataatgccagtgaatgttgctgaactctttgtatatgcaaattgcaagatttaaaccattctgatgcaaggataaacctttactttgactaccagcctgtgtttttgtctttaaatctcttaatttcattcctctgcaaa

SEQ ID NO: 7150 - DNA, 1823 bp, Homo sapiens
cagcagagggcagctgagaggctgggtggctgggcctgggagacacacagaggccaggccttagcgyggctcagccatgagcaacaggagtagcttttcccggctcacctggttcaggaagcagaggaaagctgtggtcagcaccagcgacaagaagatgcccaacggaatcttggaggagcaagagcagcaaagggtgatgctgctcagcaggtcaccctcagggcccaagaagtattttcccatccccgtggagcacctggaggaggagatccgtatcwgatccgccgacgactgcaagcagtttcgggaggagttcaactcattgccatctggacacatacaaggaacttttgaactggcaaataaagaagaaaacagagaaaaaaacagatatcccaacatccttcccaatgaccattctagggtgattctgagccaactggatggaattccctgttcagactacatcaatgcttcctacatagatggttacaaagagaagaataaattcatagcagctcaaggtcccaaacaggaaacggttaacgacttctggagaatggtctgggagcaaaagtctgcgaccatcgtcatgttaacaaacttgaaagaaaggaaagaggaaaagtgccatcagtactggcccgaccaaggctgctggacctatggaaacatccgggtgtgcgtggaggactgcgtggttttggtcgactacaccatccggaagttctgcatacagccacagctccccgacggctgcaaagcccccaggctggtctcacagctgcacttcaccagctggcccgacttcggagtgccttttacccccattgggatgctgaagttcctcaagaaagtaaagacgctcaaccccgtgcacgctgggcccatcgtggtccactgtagcgcgggcgtgggccggacgggcaccttcattgtgatcgatgccatgatggccatgatgcacgcggagcagaaggtggatgtgtttgaatttgtgtctcgaatccgtaatcagcgccctcagatggttcaaacggatatgcagtacacgttcatctaccaagccttactcgagtactacctctacggggacacagagctggacgtgtcctccctggagaagcacctgcagaccatgcacggcaccaccacccacttcgacaagatcgggctggaggaggagttcaggaaattgacaaatgtccggatcatgaaggagaacatgaggacgggcaacttgccggcaaacatgaagaaggccagggtcatccagatcatcccgtgtaaggcacccgtggcgtggcttgggcagggctggggcggggctggtgccggaggctttcatcctggagaagccattgaccgcttacccctgtgcaccagggtcaaaagcagggtgtcctctggcctcaggctaagggctcctgtgtgctgtaccaaatgtcaggtagaaaagacacctgtgaagcaccagctgacccagacagtcctgcatgggtctcaggcaagctgcttsggatatgagcttgcagatgcgggagggcagccgaggctgatttcaggggagggcttcacagaagctggagatttgcggcaggcacgacttgggattccttgtctcattccttgtctccccaagcctgggcagaggcccgcctcccccttacacagaggggcctgagccacccagccgaggccatgcaggtgaactcagctgagaccacctaggaaaaggctgtggccttgaggaggacaagaaatgggcctagggtagagtcaggacactggtctgccacccaggtcatgggagagggaag

SEQ ID NO: 7151 - DNA, 5127 bp, Homo sapiens
acctctgagcctgtccctgcctctctgcaggtccaccatggagcccttgtgtccactcctgctggtgggttttagcttgccgctcgccagggctctcaggggcaacgagaccactgccgacagcaacgagacaaccacgacctcaggccctccggacccgggcgcctcccagccgctgctggcctggctgctactgccgctgctgctcctcctcctcgtgctccttctcgccgcctacttcttcaggttcaggaagcagaggaaagctgtggtcagcaccagcgacaagaagatgcccaacggaatcttggaggagcaagagcagcaaagggtgatgctgctcagcaggtcaccctcagggcccaagaagtattttcccatccccgtggagcacctggaggaggagatccgtatcwgatccgccgacgactgcaagcagtttcgggaggagttcaactcattgccatctggacacatacaaggaacttttgaactggcaaataaagaagaaaacagagaaaaaaacagatatcccaacatccttcccaatgaccattctagggtgattctgagccaactggatggaattccctgttcagactacatcaatgcttcctacatagatggttacaaagagaagaataaattcatagcagctcaaggtcccaaacaggaaacggttaacgacttctggagaatggtctgggagcaaaagtctgcgaccatcgtcatgttaacaaacttgaaagaaaggaaagaggaaaagtgccatcagtactggcccgaccaaggctgctggacctatggaaacatccgggtgtgcgtggaggactgcgtggttttggtcgactacaccatccggaagttctgcatacagccacagctccccgacggctgcaaagcccccaggctggtctcacagctgcacttcaccagctggcccgacttcggagtgccttttacccccattgggatgctgaagttcctcaagaaagtaaagacgctcaaccccgtgcacgctgggcccatcgtggtccactgtagcgcgggcgtgggccggacgggcaccttcattgtgatcgatgccatgatggccatgatgcacgcggagcagaaggtggatgtgtttgaatttgtgtctcgaatccgtaatcagcgccctcagatggttcaaacggatatgcagtacacgttcatctaccaagccttactcgagtactacctctacggggacacagagctggacgtgtcctccctggagaagcacctgcagaccatgcacggcaccaccacccacttcgacaagatcgggctggaggaggagttcaggaaattgacaaatgtccggatcatgaaggagaacatgaggacgggcaacttgccggcaaacatgaagaaggccagggtcatccagatcatcccgtatgacttcaaccgagtgatcctttccatgaaaaggggtcaagaatacacagactacatcaacgcatccttcatagacggctaccgacagaaggactatttcatcgccacccaggggccactggcacacacggttgaggacttctggaggatgatctgggaatggaartcccacactatcgtgatgctgacggaggtgcaggagagagagcaggataaatgctaccagtattggccaaccgagggctcagttactcatggagaaataacgattgagataaagaatgataccctttcagaagccatcagtatacgagactttctggtcactctcaatcagccccaggcccgccaggaggagcaggtccgagtagtgcgccagtttcacttccacggctggcctgagatcgggattcccgccgagggcaaaggcatgattgacctcatcgcagccgtgcagaagcagcagcagcagacaggcaaccaccccatcaccgtgcactgcagtgccggagctgggcgaacaggtacattcatagccctcagcaacattttggagcgagtaaaagccgagggacttttagatgtatttcaagctgtgaagagtttacgacttcagagaccacatatggtgcaaaccctggaacagtatgaattctgctacaaagtggtacaagattttattgatatattttctgattatgctaatttcaaatgaagattcctgccttaaaatattttttaatttaatggtcagtatattttgtaaaaatcatgttaatttatttcatagttgacattaatatcttccctaatttctttgtatatattttgttatgccttaaaggccacctgctatacagttgttaaatcttaaatatgctttttaaaaattggaataatgtattaaggtcaaataatatcccataaaatatatatttctgctaatattagtaaatatcttaatttttcattagattcatatcatttaatttcacatattcaacacctttaaatgttgtaatcttaatatgcgaagtgtgcctctgcaagatactaacacaaagctcatgttaagaaaacagttgaggactcagaagtcagttgaaaatgcactttcctaacagtgaattcacaaccctgaacagcagcatttttggaaggcaaactgttcgtgatggtacaatgtaaatggggacttctgtaaagttctcagtttcggtccatgtggtttatctttacattttgaagatcaaagaagtctttacaacctgaatccaggtctaaaacacactagagtagctggtgactataaataatatttwaaaatgctgtgtctacaccatcaagactgtgtctacactatcttggctgaacgagaagagatgtaaatgctgggtggtcccgttgacccacggcgttgggtacaacaaaaccagccatcggagttacaccccaaagcaccatttgctgtccagctgcctgtcgtttggcccagaccaccctcagaaaaaaamcagctgcctctcccattctsccctcccgttctgccacagcggcctgggctggtccagtgctatgcctggaggctcaacacaaaacttcccatccaaacattcagatgaactgagcgtcttacacacgsagtacagaggagcacacattrggatagaaacagtagaataaccacgggcaattaaactttaaattttctgagcagcattttggtatttaaacatttcttgtaaaaagctgagacagtttgtaagaaaagaatccttaaaatctagatttataccattttttaaagtcccacctttcaatgtttaataaaacaaaaagagaaatccttaatctaaaagctaaattatttttgaatggaaatactactgagaccattgacactggataacagtaatgatcccattaccagataagattgactgayggggaaaaaaaaaaaaaagaatggggtgtgaatgtaccaacactgaatcttacagcagttatctttctatggccattaggtacctagcagatgtgcacaatataaacaaaaagatatctggcctaccttactactaaaagcatttaacacrtgcatttttggtactttyttttgttttctaaaagctacataaaggccttatttgacattttcactgataactgatcgcaccctcrtgttgcagtgttcgtcccctattcattaacagtgtgtgcaaatgcaaccccaggacacrttattgttctgatagatgctcacagggaatcaagcttctcgcccactccacggctctgagccccatccaagggcaagacttggtgcccagctggaaggacgaaagcacactttgtgaccgccatcctcaccagctgcatgcctgggctgcacactgctgaacgtgctcctctctccttctctgtacaatgattcagcatctcggcggaagaggaaaatggagctttttgaggctcgccaggtcccttttgttttcaccattaaaattccaaacccaaagcctttgtttgactgaaggagaagagagggaagtaagcttctgttcagcacctgaaccctagaaaaagagccagtttgctacgatgaaggtgacatttctctggtcattwgagagttcgaagtcaaagycgaggggcacmggctttggttcatgtctaggagccctctgtcagaatccttgaagccctttaatggtctaactggcatctcttgtatcaagaagtacctttaaggtagaccytttcagggtgccctcaggaaagggccctgctcatgtttttttcctgtccccttagaccaaccccaggtktccactgcaggggttctgcctgttcccaaactttttccattccaggaacaaaggagaagccactttccccaggacgcargactctcccctccactgtccgggacagcgttcgccctttagcggggaggtcattacagcctcatggcctctaccaaggccccagatcacaggatctcctgggccttggagcacctcacgctgggggaatcmatccctgagggactcagaatcttctccgtgcaacctggaaagttcatctcttgtttccttcagtcaaagaaagtccattgtacataacaaaacagcccccaaacagcccagtgccgacaccattgttcctttcacactttcctttgttgcatgcagttgggttcaaatgccaaatagtgattagaagacgaccattctgatctgtgtgtgatctggtcactatgtgactgcctttayggtttctctccatgtgctatatgaatgaagaatgcataccartgttttaaaaggtatttttatgtgtttttaaacacttttttaaatgagcctgacacctgtgtttcagcatttggagacatccccatgttattcttttaagtgtataattactgatacttttttgtttgtttgtttaactaagttgtgtttaayttatgtgcagtctttataatgtatgtatgttattacagtttcaactatcatattttctttgattacatttataatttgatcttgctctgattataatgccagtgaatgttgctgaactctttgtatatgcaaattgcaagatttaaaccattctgatgcaaggataaacctttactttgactaccagcctgtgtttttgtctttaaatctcttaatttcattcctctgcaaa

SEQ ID NO: 7152 - DNA, 4992 bp, Homo sapiens
cagcagagggcagctgagaggctgggtggctgggcctgggagacacacagaggccaggccttagcgyggctcagccatgagcaacaggagtagcttttcccggctcacctggttcaggaagcagaggaaagctgtggtcagcaccagcgacaagaagatgcccaacggaatcttggaggagcaagagcagcaaagggtgatgctgctcagcaggtcaccctcagggcccaagaagtattttcccatccccgtggagcacctggaggaggagatccgtatcwgatccgccgacgactgcaagcagtttcgggaggagttcaactcattgccatctggacacatacaaggaacttttgaactggcaaataaagaagaaaacagagaaaaaaacagatatcccaacatccttcccaatgaccattctagggtgattctgagccaactggatggaattccctgttcagactacatcaatgcttcctacatagatggttacaaagagaagaataaattcatagcagctcaaggtcccaaacaggaaacggttaacgacttctggagaatggtctgggagcaaaagtctgcgaccatcgtcatgttaacaaacttgaaagaaaggaaagaggaaaagtgccatcagtactggcccgaccaaggctgctggacctatggaaacatccgggtgtgcgtggaggactgcgtggttttggtcgactacaccatccggaagttctgcatacagccacagctccccgacggctgcaaagcccccaggctggtctcacagctgcacttcaccagctggcccgacttcggagtgccttttacccccattgggatgctgaagttcctcaagaaagtaaagacgctcaaccccgtgcacgctgggcccatcgtggtccactgtagcgcgggcgtgggccggacgggcaccttcattgtgatcgatgccatgatggccatgatgcacgcggagcagaaggtggatgtgtttgaatttgtgtctcgaatccgtaatcagcgccctcagatggttcaaacggatatgcagtacacgttcatctaccaagccttactcgagtactacctctacggggacacagagctggacgtgtcctccctggagaagcacctgcagaccatgcacggcaccaccacccacttcgacaagatcgggctggaggaggagttcaggaaattgacaaatgtccggatcatgaaggagaacatgaggacgggcaacttgccggcaaacatgaagaaggccagggtcatccagatcatcccgtatgacttcaaccgagtgatcctttccatgaaaaggggtcaagaatacacagactacatcaacgcatccttcatagacggctaccgacagaaggactatttcatcgccacccaggggccactggcacacacggttgaggacttctggaggatgatctgggaatggaartcccacactatcgtgatgctgacggaggtgcaggagagagagcaggataaatgctaccagtattggccaaccgagggctcagttactcatggagaaataacgattgagataaagaatgataccctttcagaagccatcagtatacgagactttctggtcactctcaatcagccccaggcccgccaggaggagcaggtccgagtagtgcgccagtttcacttccacggctggcctgagatcgggattcccgccgagggcaaaggcatgattgacctcatcgcagccgtgcagaagcagcagcagcagacaggcaaccaccccatcaccgtgcactgcagtgccggagctgggcgaacaggtacattcatagccctcagcaacattttggagcgagtaaaagccgagggacttttagatgtatttcaagctgtgaagagtttacgacttcagagaccacatatggtgcaaaccctggaacagtatgaattctgctacaaagtggtacaagattttattgatatattttctgattatgctaatttcaaatgaagattcctgccttaaaatattttttaatttaatggtcagtatattttgtaaaaatcatgttaatttatttcatagttgacattaatatcttccctaatttctttgtatatattttgttatgccttaaaggccacctgctatacagttgttaaatcttaaatatgctttttaaaaattggaataatgtattaaggtcaaataatatcccataaaatatatatttctgctaatattagtaaatatcttaatttttcattagattcatatcatttaatttcacatattcaacacctttaaatgttgtaatcttaatatgcgaagtgtgcctctgcaagatactaacacaaagctcatgttaagaaaacagttgaggactcagaagtcagttgaaaatgcactttcctaacagtgaattcacaaccctgaacagcagcatttttggaaggcaaactgttcgtgatggtacaatgtaaatggggacttctgtaaagttctcagtttcggtccatgtggtttatctttacattttgaagatcaaagaagtctttacaacctgaatccaggtctaaaacacactagagtagctggtgactataaataatatttwaaaatgctgtgtctacaccatcaagactgtgtctacactatcttggctgaacgagaagagatgtaaatgctgggtggtcccgttgacccacggcgttgggtacaacaaaaccagccatcggagttacaccccaaagcaccatttgctgtccagctgcctgtcgtttggcccagaccaccctcagaaaaaaamcagctgcctctcccattctsccctcccgttctgccacagcggcctgggctggtccagtgctatgcctggaggctcaacacaaaacttcccatccaaacattcagatgaactgagcgtcttacacacgsagtacagaggagcacacattrggatagaaacagtagaataaccacgggcaattaaactttaaattttctgagcagcattttggtatttaaacatttcttgtaaaaagctgagacagtttgtaagaaaagaatccttaaaatctagatttataccattttttaaagtcccacctttcaatgtttaataaaacaaaaagagaaatccttaatctaaaagctaaattatttttgaatggaaatactactgagaccattgacactggataacagtaatgatcccattaccagataagattgactgayggggaaaaaaaaaaaaaagaatggggtgtgaatgtaccaacactgaatcttacagcagttatctttctatggccattaggtacctagcagatgtgcacaatataaacaaaaagatatctggcctaccttactactaaaagcatttaacacrtgcatttttggtactttyttttgttttctaaaagctacataaaggccttatttgacattttcactgataactgatcgcaccctcrtgttgcagtgttcgtcccctattcattaacagtgtgtgcaaatgcaaccccaggacacrttattgttctgatagatgctcacagggaatcaagcttctcgcccactccacggctctgagccccatccaagggcaagacttggtgcccagctggaaggacgaaagcacactttgtgaccgccatcctcaccagctgcatgcctgggctgcacactgctgaacgtgctcctctctccttctctgtacaatgattcagcatctcggcggaagaggaaaatggagctttttgaggctcgccaggtcccttttgttttcaccattaaaattccaaacccaaagcctttgtttgactgaaggagaagagagggaagtaagcttctgttcagcacctgaaccctagaaaaagagccagtttgctacgatgaaggtgacatttctctggtcattwgagagttcgaagtcaaagycgaggggcacmggctttggttcatgtctaggagccctctgtcagaatccttgaagccctttaatggtctaactggcatctcttgtatcaagaagtacctttaaggtagaccytttcagggtgccctcaggaaagggccctgctcatgtttttttcctgtccccttagaccaaccccaggtktccactgcaggggttctgcctgttcccaaactttttccattccaggaacaaaggagaagccactttccccaggacgcargactctcccctccactgtccgggacagcgttcgccctttagcggggaggtcattacagcctcatggcctctaccaaggccccagatcacaggatctcctgggccttggagcacctcacgctgggggaatcmatccctgagggactcagaatcttctccgtgcaacctggaaagttcatctcttgtttccttcagtcaaagaaagtccattgtacataacaaaacagcccccaaacagcccagtgccgacaccattgttcctttcacactttcctttgttgcatgcagttgggttcaaatgccaaatagtgattagaagacgaccattctgatctgtgtgtgatctggtcactatgtgactgcctttayggtttctctccatgtgctatatgaatgaagaatgcataccartgttttaaaaggtatttttatgtgtttttaaacacttttttaaatgagcctgacacctgtgtttcagcatttggagacatccccatgttattcttttaagtgtataattactgatacttttttgtttgtttgtttaactaagttgtgtttaayttatgtgcagtctttataatgtatgtatgttattacagtttcaactatcatattttctttgattacatttataatttgatcttgctctgattataatgccagtgaatgttgctgaactctttgtatatgcaaattgcaagatttaaaccattctgatgcaaggataaacctttactttgactaccagcctgtgtttttgtctttaaatctcttaatttcattcctctgcaaa

SEQ ID NO: 7153 - DNA, 616 bp, Homo sapiens
caaaagagtctcgccggcgtccccgcccgcacactcgcgcacactcgcgctcgggcgcacacggagcagggaccggcgcccggagcgagccagggagcggctaaccggggacccaccgcgcggagccagcctagctgccagcgagcccaacccgcgacgacccacgcccctgagccccgcagccgacccctgccggccggtgtccccaccgccatccctgacccatggcgctgaagaggattcagaaagaattgagtgatctacagcgcgatccacctgctcactgttcagctggacctgtgggagatgacttgttccactggcaagccactattatggggcctcctgatagcgcatatcaaggtggagtcttctttctcactgtacattttccgacagattatccttttaaaccaccaaagattgctttcacaacaaaaatttaccatccaaacataaacagtaatggaagtatttgtctcgatattctgaggtcacaatggtcaccagctctgactgtatcaaaaggctgwagtggaggattgcttgagcccgagttcgagaccggcctgggcaacataggagaccccatctctgcaaaagaagagagagaata

SEQ ID NO: 7154 - DNA, 1625 bp, Homo sapiens
gaagctactgtgagggctgttgaatttttctccaaagctcagatgcccagtattcctagtcttcgaaagagagagaggaagattgagagagagagagagagagagagagagagaagaagttttcttaatcagagatttctctttactttcaactaattgcagatgctgatcttctggacaatcacacttttcctgctgggagcagccaaaggaaaagaagtttgctatgaggacctcgggtgcttttctgacactgagccctggggcgggacagcaatcaggcccctgaaaattctcccctggagccctgagaagatcggcacccgcttcctgctgtacaccaatgaaaacccaaacaactttcaarttctcctcctctctgatccatcaacaattgaggcatcaaattttcaaatggacagaaagacccggttcatcatccatggcttcatagacaaaggagatgagagctgggtgacagacatgtgcaagaaactgttsgaggtggaggaggtgaactgcatctgcgtggactggaagaagggctcccaagccacctacacacargctgccaacaacgtgcgagtggtgggcgcccaggtggcccagatgctcgacatcctcttgacagagtatagctaccccccytccaaagttcacctcattggccacagcctgggagcccacgtggctggagaggcaggaagcaagactccaggcctgagcaggattacagggttggatcctgtagaagcaagtttcgagagtactcctgaagaggtgcgacttgatccctctgatgctgactttgytgatgtgattcacacggatgcagctcccctgatcccattcttgggttttggaacgaaccaacagatgggtcatcttgacttcttccccaatggaggagagagcatgccgggatgcaagaagaatgccctgtctcagatcgtggatctagatggcatctgggcgggaacccgggactttgtggcttgcaatcacctaagaagctacaagtattacttggaaagcatcctcaatcccgatgggtttgctgcatatccctgcacttcctacaagtcctttgagtctgacaagtgcttcccgtgtccagatcaaggatgcccacagatgggtcactatgctgataaatttgctggyaggacaagtgaagagcagcagaaattcttcttgaacacaggagaggctagcaatttcgctcgctggagatatggggtttccatcacactgtctggaagaacagccactggtcagatcaaagttgctttgtttggaaataagggaaacactcaccagtacagtatcttcagggggattctcaaaccaggctcaacccattcctatgagtttgatgcaaagctggatgttggaacaattgagaaagtcaagtttctttggaataacaatgtgataaatccaaccctccccaaagtgggtgccaccaagatcactgtgcaaaagggagaagagaagacagtgtacaacttctgtagcgaagacacagtgcgggaagacacgctgctcaccctcacgccctgctaagctcccggggcgacgaggctgctgcgttcacactaataaaatccactggtgcatctgta

SEQ ID NO: 7155 - DNA, 1463 bp, Homo sapiens
  misc_feature (1)...(1463): n = A,T,C or G
atgctgatcttctggacaatcacacttttcctgctgggagcagccaaaggaaaagaagtttgctatgaggacctcgggtgcttttytgacactgagccctggggcgggacagcaatcaggcccctgaaaattctcccctggagccctgagaagatcggcacccgcttcctgctgtacaccaatgaaaacccaaacaactttcaaattctcctcctctctgatccatcaacaattgaggcatcaaattttcaaatggacagaaagacccggttcatcatccatggcttcatagacaaaggagatgagagctgggtgacagacatgtgcaagaaactgttcgaggtggaggaggtgaactgcatctgcrtggactggaagaagggctcccaagccacctacacacaggctgccaacaacgtgcgagtggtgggcgcccaggtggcccagatgctcgacatcctcttgacagagtatagctaccccccttccaaagttcacctsattggccacagcctgggagcccacgtggctggagaggcaggaagcaagactccaggcctgagcagrattacagggttggatcctgtagaagcaagtttcgagagtactcctgaagaggtgcgacttgatccctctgatgctgacttygttgatgtgattcacacggatgcagctcccctgatcccattcttgggttttggaacgaaccaacagatgggtcatcttgacttcttccccaatggaggagagagcatgccgggatgcaagaagaatgccctgtctcagatcgtggatctagatggcatctgggygggaacccgggactttgtggcttgcaatcacctaagaagctacaagtattacttggaaagcatcctcaatcccgatgggtttgctgcatatccctgcacttcctacaagtcctttgagtctgacaagtgcttcccgtgtccagatcaaggatgcccacagatgggtcactatgctgataaatttgctggcaggacaagtgaagagcagcagaaattcttcttgaacacaggagaggctagcaatttcgctcgctggagatatggggtttccatcacactgtctggaagaacagccactggtcagatcaaagttgctttgtttggaaataagggaaacactcaccagtacagyatcttcagggggattctcaaaccaggctcaacccattcctatgagtttgatgcaaagctggatgttggaacaattgasaaagtcaagtttctttggaataacaatgtgataaatccaaccctccccaaagtgggtgccaccaagatcactgtgcaaaagggagaagagaagacagtgtacaacttctgtagcgaagacacagtgcgggaagacacgcngctcaccctcacgccctgctaagctcccggggcgacgaggctgctgcgttcacactaataaaatccactggtgcatctgta

SEQ ID NO: 7156 - DNA, 4287 bp, Homo sapiens
cactgcagctggcattggccgggactggaagtgcgggcttctgcagcagccgaagctggagctgctagggcagcagcggctcccctgttgtatggacattctgcacccgaaactgatagctgagtcctgaagttttatgttatgaaacagaagaactttcatcccagcacatgatttgggaattacactttgtgacatggatgaatctgcactgacccttggtacaatagatgtttcttatctgccacattcatcagaatacagtgttggtcgatgtaagcacacaagtgaggaatggggtgagtgtggctttagacccaccrtcttcagatctgcaactttaaaatggaaagaaagcctaatgagtcggaaaaggccatttgttggaagatgttgttactcctgcactccccagagctgggacaaatttttcaaccccagtatcccgtctttgggtttgcggaatgttatttatatcaatgaaactcacacaagacaccgcggatggcttgcaagacgcctttcttacgttctttttrttcaagagcgagatgtgcataagggcatgtttgccaccaatgtgactgraaatgtgctgaacagcagtagagtacaagaggcaattgcagaagtggctgctgaattaaaccctgatggttctgcccagcagcaatcaaaagcmgttaacaaagtgaaaaagaaagctaaaaggattcttcaagaaatggttgccactgtctcaccggcaatgatcagactgactgggtgggtgctgctaaaactgttcaacagcttcttttggaacattcaaattcacaaaggtcaacttgagatggttaaagctgcaactgaggcaagaatttctacgaatttgccgcttctgtttctaccagttcatagatcccatattgactatctgctgctcactttcattctcttctgccataacatcaaagcaccatacattgcttcaggcaataatctcaacatcccaatcttcagtaccttgatccataagcttgggggcttcttcatacgacgaaggctcgatgaaacaccagatggacggaaagatgttctctatagagctttgctccatgggcatatagttgaattacttcgacagcagcaattcttggagatcttcctggaaggcacacgttctaggagtggaaaaacctcttgtgctcgggcaggacttttgtcagttgtggtagatactctgtctaccaatgtcatcccagacatcttgataatacctgttggaatctcctatgatcgcattatcgaaggtcactacaatggtgaacaactgggcaaacctaagaagaatgagagcctgtggagtgtagcaagaggtgttaytagaatgttacgaaaaaactatggttgtgtccgagtggaytttgcacagccattttccttaaaggaatatttagaaagccaaagtcagaaaccggtgtctgctctactttccctggagcaagcgttgttaccagctatacttccttcaagacccagtgatgctgctgatgaaggtagagacacgtccattaatgagtccagaaatgcaacagatgaatccctacgaaggaggttgattgcaaatctggctgagcatattctattcactgctagcaagtcctgtgccattatgtccacacacattgtggcttgcctgctcctctacagacacaggcagggaattgatctctccacattggtcgaagacttctttgtgatgaaagaggaagtcctggctcgtgattttgacctggggttctcaggaaattcagaagatgtagtaatgcatgccatacagctgctgggaaattgtgtcacaatcacccacactagcaggaaygatgagttttttatcacccccagcacaactgtcccatcagtcttcgaactcaacttctacagcaatggggtacttcatgtctttatcatggaggccatcatagcttgcagcctttatgcagttctgaacaagaggggactggggggtcccactagcaccccacctaacctgatcagccaggagcagctggtgcggaaggcggccagcctgtgctaccttctctccaatgaaggcaccatctcactgccttgccagacattttaccaagtctgccatgaaacagtaggaaagtttatccagtatggcattcttacagtggcagagcacgatgaccaggaagatatcagtcctagtcttgctgagcagcagtgggacaagaagcttccwgaacctttgtcttggagaagtgatgaagaagatgaagacagtgactttggggaggaacagcgagattgctacctgaaggtgagccaatccaaggagcaccagcagtttatcaccttcttacagagactccttgggcctttgctggaggcctacagctctgctgccatctttgttcacaacttcagtggtcctgttccagaacctgagtatctgcaaaagttgcacaaatacctaataaccagaacagaaagaaatgttgcagtatatgctgagagtgccacatattgtcttgtgaagaatgctgtgaaaatgtttaaggatattggggttttcaaggagaccaaacaaaagagagtgtctgttttagaactgagcagcacttttctacctcaatgcaaccgacaaaaacttctagaatatattctgagttttgtggtgctgtaggtaacgtgtggcactgctggcaaatgaaggtcatgagatgagttccttgtaggtaccagcttctggctcaagagttgaaggtgccrtcgcagggtcaggcctgccctgtcccgaagtgatctcctggaagacaagtgccttctccctccatggatctgtgatcttcccagctctgcatcaacacagcagcctgcagataacacttggggggacctcagcctctattcgcaactcataatccgtagactacaagatgaaatctcaataaattatttttgagtttattaaagattgacattttaagtacaacttttaaggactaattactgtgatggacacagaaatgtagctgtgttctggaactgaatcttacatggtatacttagtgctgctgggtaatttgttggtatattatctggttagtggttaatgcttcctttaaaaataattgagtcatccattcactctttttcagttttatctgtcaatagtagctacatttttaatgggagcaccttttatcccaaagtgctttataaattgagtggactgatatatatcacacccaggtatcactgtgctgtcctttgctgtcagatttagaaatgtttttaagagctatgtgaaaacagacaatattagtttaggtcgggaactgagatattgtaatcaaatagttaacatcaggaagttaatttggctggcaaaattctagggaaacttggccagaaaactggtgttgaaggcttttgctcatataaacaagtgccattgagtttcaaatgaccagcaaatatatttagaacccttcctgttttatgtctgtacctcgtccacccctcaggtaatacctgcctctcacaggtacagctgtttcttggaaatcctccaaccaaatagcagttttcctaacttgattagcttgagctgacagactgttagaatacagttctctggccacagctgatgagggctttctgtactgcacacagattgtgtactgcaccccagtccaggtgactggtacccactcgagttgtgccgtgcacaacctgtccagtatatgcatgtggtggccctactgactggtaatggttagaggcatttatggatttttagctttgaggaaaaaccatgacttttaacaaatttttatgggttatatgcctaaacccttatgccacatagtggtaaataattatgaaaaatggtctgttcataattggtaggtgccttttgtgagcagggagcataattattggtttattatggtaattatggtgattttttaaatatcatgtaatgttaaaacgttttctaacagtttactgttgcttatctccaagatattatggaattaagaatttttccagatgagtgttacatagattctttgaatttagtataaaagtactgagaattaagtttgtacttccataagcttggattttaaacactgatagtatctcatgagtaatgtgtgttttgggagagggagggatgctgattgatatttcacattgtatgaaataccatgtttgaaactcatagcaataatgctatgctgttgtgatccctctcaagttctgcat

SEQ ID NO: 7157 - DNA, 2795 bp, Homo sapiens
aacttgaagccaccatgggagatgaagattgggaagcagaaatcaaccctcatatgtcttcctatgttcccatatttgagaaggataggtattctggagaaaatggagacaattttaacaggactccagcttcatcatcagaaatggatgatggaccttctcgaagagatcatttcatgaaaagtggatttgcctctgggcggaattttggaaacagagatgctggtgagtgtaataagcgagataatacatccacaatgggtggttttggagttggaaagagttttggaaacagaggtttttcaaacagcaggtttgaagatggtgatagctctggtttctggagagagtctagtaatgactgcgaagataatccaacacggaacagagggttttccaagagaggcggctatcgagatggaaataattcagaagcttcagggccatacagaagagrtggaagaggtagtttccgaggttgccgtggaggatttggtctaggaagtccaaataatgacttagacccagacgaatgtatgcagcgcactggtggcctttttggttctagaagaccagtattaagtggcacaggtaatggtgatacttctcaaagcagaagtggcagtggaagtgaacgaggtggttacaaaggtttaaatgaagaagtaataacaggctctggaaagaattcttggaagtyagaagcagaaggaggagaaagtagtgatactcaaggaccaaaagtgacctacatmccccctcctccacctgaggatgaggactccatctttgcacattatcagacaggcataaacttcgacaaatacgacactattcttgtggaagtgtctggacrtgatgcaccaccagcarttctgacttttgaagaagctaatctctgtcagacactgaataacaacattgctaaagctggttatactaagcttactcctgtgcaaaaatacagtattcctatcatacttgcaggacgagatttgatggcttgygctcaaacagggtctgggaagactgcggcttttctcctaccaattttggctcatatgatgcatgatggaataactgccagtcgttttaaagagttgcaggaaccagagtgtattattgtagcaccaactcgagaattggtcaaccagatttatttggaagccagaaaattttcttttgggacttgtgtaagagctgttgttatatatgggggaacccagctgggacattcaattcgacaaatagtacaaggctgtaatatattatgtgctactcctggaagactgatggatatcataggcaaagaaaagattggtctcaaacagatcaaatacttagttttggatgaagctgatcgcatgttggatatgggttttggtccagaaatgaagaagttaatttcttgcccaggaatgccatcaaaggaacagcgccaaacccttatgttcagtgcaacttttccagaggaaattcaaaggttggctgcagagtttttaaagtcaaattatctgtttgttgctgttggacaagtgggtggagcatgtagagatgttcagcagaccgttctccaagttggccagttctcaaaaagagaaaagctcgttgaaattctgcgaaacataggggatgaaagaactatggtctttgttgaaactaagaaaaaagcagattttattgcaacttttctttgtcaagaaaaaatatcaactacaagtattcatggtgatcgggaacagagagagcgggagcaagctcttggagattttcgctttggaaagtgcccagttcttgttgctacttcagtagctgccagagggctggatattgaaaatgtgcaacatgttatcaattttgatcttccttctaccattgatgaatatgttcatcgaattgggcgtactggtcgttgtgggaatactggcagagcaatttccttttttgatcttgaatcggataaccatttagcacagcctctagtaaaagtattgacagatgctcaacaggatgttcctgcatggttggaagaaattgcctttagtacatacattcctggcttcagtggtagtacaagaggaaacgtgtttgcatcagttgataccagaaagggcaagagcactttgaacacagctgggttttcttcttcacaagctcccaatccagtagatgatgagtcatgggattaaagccaaaacatccttcaagtctgtggttttgatgcagagaagaaaatagttttgatttttgagtttttaacagaagtataaaacttaacattctcatagctcctgtccttgtattctcactcctacacttaaaaaaaaaatccttactgactagttatgtgagatgctaaaacttacaacattgcagttactgatacaaatggtgttaactgggaatattaaagcattctaaatgtctttcttatttctggtatattctttagggggcttagacatgtttaatgtttaaatgccaagtcttactatagtgtttattgatcttataaaacaagcaaataggatatgatacacttttggttaaaaattactgggtctcatttttacttgagtctttaaaacagtagtgtgtcactataatgtgataatctttaagagaaagtagaatacttaagcctttcaaagtgattttgatttttagatcatcagatgtatgatgaaaatggttaaatgtttgtgatgggagctctgtactcaatggcataacaatgtttatttttataatatacaatctttccttgaaataaaggatgaaacacttttccctta

SEQ ID NO: 7158 - DNA, 2735 bp, Homo sapiens
aacttgaagccaccatgggagatgaagattgggaagcagaaatcaaccctcatatgtcttcctatgttcccatatttgagaaggataggtattctggagaaaatggagacaattttaacaggactccagcttcatcatcagaaatggatgatggaccttctcgaagagatcatttcatgaaaagtggatttgcctctgggcggaattttggaaacagagatgctggtgagtgtaataagcgagataatacatccacaatgggtggttttggagttggaaagagttttggaaacagaggtttttcaaacagcaggtttgaagatggtgatagctctggtttctggagagagtctagtaatgactgcgaagataatccaacacggaacagagggttttccaagagaggcggctatcgagatggaaataattcagaagcttcagggccatacagaagagrtggaagaggtagtttccgaggttgccgtggaggatttggtctaggaagtccaaataatgacttagacccagacgaatgtatgcagcgcactggtggcctttttggttctagaagaccagtattaagtggcacaggtaatggtgatacttctcaaagcagaagtggcagtggaagtgaacgaggtggttacaaaggtttaaatgaagaagtaataacaggctctggaaagaattcttggaagtyagaagcagaaggaggagaaagtagtgatactcaaggaccaaaagtgacctacatmccccctcctccacctgaggatgaggactccatctttgcacattatcagacaggcataaacttcgacaaatacgacactattcttgtggaagtgtctggacrtgatgcaccaccagcarttctgacttttgaagaagctaatctctgtcagacactgaataacaacattgctaaagctggttatactaagcttactcctgtgcaaaaatacagtattcctatcatacttgcaggacgagatttgatggcttgygctcaaacagggtctgggaagactgcggcttttctcctaccaattttggctcatatgatgcatgatggaataactgccagtcgttttaaagagttgcaggaaccagagtgtattattgtagcaccaactcgagaattggtcaaccagatttatttggaagccagaaaattttcttttgggacttgtgtaagagctgttgttatatatgggggaacccagctgggacattcaattcgacaaatagtacaaggctgtaatatattatgtgctactcctggaagactgatggatatcataggcaaagaaaagattggtctcaaacagatcaaatacttagttttggatgaagctgatcgcatgttggatatgggttttggtccagaaatgaagaagttaatttcttgcccaggaatgccatcaaaggaacagcgccaaacccttatgttcagtgcaacttttccagaggaaattcaaaggttggctgcagagtttttaaagtcaaattatctgtttgttgctgttggacaagtgggtggagcatgtagagatgttcagcagaccgttctccaagttggccagttctcaaaaagagaaaagctcgttgaaattctgcgaaacataggggatgaaagaactatggtctttgttgaaactaagaaaaaagcagattttattgcaacttttctttgtcaagaaaaaatatcaactacaagtattcatggtgatcgggaacagagagagcgggagcaagctcttggagattttcgctttggaaagtgcccagttcttgttgctacttcagtagctgccagagggctggatattgaaaatgtgcaacatgttatcaattttgatcttccttctaccattgatgaatatgttcatcgaattgggcgtactggtcgttgtgggaatactggcagagcaatttccttttttgatcttgaatcggataaccatttagcacagcctctagtaaaagtattgacagatgctcaacaggatgttcctgcatggttggaagaaattgcctttagtacatacattcctggcttcagtggtagtacaagaggaaacgtgtttgcatcagttgataccagaaagggcaagagcactttgaacacagctgggttttcttcttcacaagctcccaatccagtagatgatgagtcatgggattaaagccaaaacatccttcaagtctgtggttttgatgcagagaagaaaatagttttgatttttgagtttttaacagaagtataaaacttaacattctcatagctcctgtccttgtattctcactcctacattactgatacaaatggtgttaactgggaatattaaagcattctaaatgtctttcttatttctggtatattctttagggggcttagacatgtttaatgtttaaatgccaagtcttactatagtgtttattgatcttataaaacaagcaaataggatatgatacacttttggttaaaaattactgggtctcatttttacttgagtctttaaaacagtagtgtgtcactataatgtgataatctttaagagaaagtagaatacttaagcctttcaaagtgattttgatttttagatcatcagatgtatgatgaaaatggttaaatgtttgtgatgggagctctgtactcaatggcataacaatgtttatttttataatatacaatctttccttgaaataaaggatgaaacacttttccctta

SEQ ID NO: 7159 - DNA, 2815 bp, Homo sapiens
acgcagtgggcgtcttgcacgtgcagccgtttaagtcgcgtgggcgcctgcgagggcttgggagagcaagccgcggagagaacttgaagccaccatgggagatgaagattgggaagcagaaatcaaccctcatatgtcttcctatgttcccatatttgagaaggataggtattctggagaaaatggagacaattttaacaggactccagcttcatcatcagaaatggatgatggaccttctcgaagagatcatttcatgaaaagtggatttgcctctgggcggaattttggaaacagagatgctggtgagtgtaataagcgagataatacatccacaatgggtggttttggagttggaaagagttttggaaacagaggtttttcaaacagcaggtttgaagatggtgatagctctggtttctggagagagtctagtaatgactgcgaagataatccaacacggaacagagggttttccaagagaggcggctatcgagatggaaataattcagaagcttcagggccatacagaagagrtggaagaggtagtttccgaggttgccgtggaggatttggtctaggaagtccaaataatgacttagacccagacgaatgtatgcagcgcactggtggcctttttggttctagaagaccagtattaagtggcacaggtaatggtgatacttctcaaagcagaagtggcagtggaagtgaacgaggtggttacaaaggtttaaatgaagaagtaataacaggctctggaaagaattcttggaagtyagaagcagaaggaggagaaagtagtgatactcaaggaccaaaagtgacctacatmccccctcctccacctgaggatgaggactccatctttgcacattatcagacaggcataaacttcgacaaatacgacactattcttgtggaagtgtctggacrtgatgcaccaccagcarttctgacttttgaagaagctaatctctgtcagacactgaataacaacattgctaaagctggttatactaagcttactcctgtgcaaaaatacagtattcctatcatacttgcaggacgagatttgatggcttgygctcaaacagggtctgggaagactgcggcttttctcctaccaattttggctcatatgatgcatgatggaataactgccagtcgttttaaagagttgcaggaaccagagtgtattattgtagcaccaactcgagaattggtcaaccagatttatttggaagccagaaaattttcttttgggacttgtgtaagagctgttgttatatatgggggaacccagctgggacattcaattcgacaaatagtacaaggctgtaatatattatgtgctactcctggaagactgatggatatcataggcaaagaaaagattggtctcaaacagatcaaatacttagttttggatgaagctgatcgcatgttggatatgggttttggtccagaaatgaagaagttaatttcttgcccaggaatgccatcaaaggaacagcgccaaacccttatgttcagtgcaacttttccagaggaaattcaaaggttggctgcagagtttttaaagtcaaattatctgtttgttgctgttggacaagtgggtggagcatgtagagatgttcagcagaccgttctccaagttggccagttctcaaaaagagaaaagctcgttgaaattctgcgaaacataggggatgaaagaactatggtctttgttgaaactaagaaaaaagcagattttattgcaacttttctttgtcaagaaaaaatatcaactacaagtattcatggtgatcgggaacagagagagcgggagcaagctcttggagattttcgctttggaaagtgcccagttcttgttgctacttcagtagctgccagagggctggatattgaaaatgtgcaacatgttatcaattttgatcttccttctaccattgatgaatatgttcatcgaattgggcgtactggtcgttgtgggaatactggcagagcaatttccttttttgatcttgaatcggataaccatttagcacagcctctagtaaaagtattgacagatgctcaacaggatgttcctgcatggttggaagaaattgcctttagtacatacattcctggcttcagtggtagtacaagaggaaacgtgtttgcatcagttgataccagaaagggcaagagcactttgaacacagctgggttttcttcttcacaagctcccaatccagtagatgatgagtcatgggattaaagccaaaacatccttcaagtctgtggttttgatgcagagaagaaaatagttttgatttttgagtttttaacagaagtataaaacttaacattctcatagctcctgtccttgtattctcactcctacattactgatacaaatggtgttaactgggaatattaaagcattctaaatgtctttcttatttctggtatattctttagggggcttagacatgtttaatgtttaaatgccaagtcttactatagtgtttattgatcttataaaacaagcaaataggatatgatacacttttggttaaaaattactgggtctcatttttacttgagtctttaaaacagtagtgtgtcactataatgtgataatctttaagagaaagtagaatacttaagcctttcaaagtgattttgatttttagatcatcagatgtatgatgaaaatggttaaatgtttgtgatgggagctctgtactcaatggcataacaatgtttatttttataatatacaatctttccttgaaataaaggatgaaacacttttccctta

SEQ ID NO: 7160 - DNA, 2875 bp, Homo sapiens
acgcagtgggcgtcttgcacgtgcagccgtttaagtcgcgtgggcgcctgcgagggcttgggagagcaagccgcggagagaacttgaagccaccatgggagatgaagattgggaagcagaaatcaaccctcatatgtcttcctatgttcccatatttgagaaggataggtattctggagaaaatggagacaattttaacaggactccagcttcatcatcagaaatggatgatggaccttctcgaagagatcatttcatgaaaagtggatttgcctctgggcggaattttggaaacagagatgctggtgagtgtaataagcgagataatacatccacaatgggtggttttggagttggaaagagttttggaaacagaggtttttcaaacagcaggtttgaagatggtgatagctctggtttctggagagagtctagtaatgactgcgaagataatccaacacggaacagagggttttccaagagaggcggctatcgagatggaaataattcagaagcttcagggccatacagaagagrtggaagaggtagtttccgaggttgccgtggaggatttggtctaggaagtccaaataatgacttagacccagacgaatgtatgcagcgcactggtggcctttttggttctagaagaccagtattaagtggcacaggtaatggtgatacttctcaaagcagaagtggcagtggaagtgaacgaggtggttacaaaggtttaaatgaagaagtaataacaggctctggaaagaattcttggaagtyagaagcagaaggaggagaaagtagtgatactcaaggaccaaaagtgacctacatmccccctcctccacctgaggatgaggactccatctttgcacattatcagacaggcataaacttcgacaaatacgacactattcttgtggaagtgtctggacrtgatgcaccaccagcarttctgacttttgaagaagctaatctctgtcagacactgaataacaacattgctaaagctggttatactaagcttactcctgtgcaaaaatacagtattcctatcatacttgcaggacgagatttgatggcttgygctcaaacagggtctgggaagactgcggcttttctcctaccaattttggctcatatgatgcatgatggaataactgccagtcgttttaaagagttgcaggaaccagagtgtattattgtagcaccaactcgagaattggtcaaccagatttatttggaagccagaaaattttcttttgggacttgtgtaagagctgttgttatatatgggggaacccagctgggacattcaattcgacaaatagtacaaggctgtaatatattatgtgctactcctggaagactgatggatatcataggcaaagaaaagattggtctcaaacagatcaaatacttagttttggatgaagctgatcgcatgttggatatgggttttggtccagaaatgaagaagttaatttcttgcccaggaatgccatcaaaggaacagcgccaaacccttatgttcagtgcaacttttccagaggaaattcaaaggttggctgcagagtttttaaagtcaaattatctgtttgttgctgttggacaagtgggtggagcatgtagagatgttcagcagaccgttctccaagttggccagttctcaaaaagagaaaagctcgttgaaattctgcgaaacataggggatgaaagaactatggtctttgttgaaactaagaaaaaagcagattttattgcaacttttctttgtcaagaaaaaatatcaactacaagtattcatggtgatcgggaacagagagagcgggagcaagctcttggagattttcgctttggaaagtgcccagttcttgttgctacttcagtagctgccagagggctggatattgaaaatgtgcaacatgttatcaattttgatcttccttctaccattgatgaatatgttcatcgaattgggcgtactggtcgttgtgggaatactggcagagcaatttccttttttgatcttgaatcggataaccatttagcacagcctctagtaaaagtattgacagatgctcaacaggatgttcctgcatggttggaagaaattgcctttagtacatacattcctggcttcagtggtagtacaagaggaaacgtgtttgcatcagttgataccagaaagggcaagagcactttgaacacagctgggttttcttcttcacaagctcccaatccagtagatgatgagtcatgggattaaagccaaaacatccttcaagtctgtggttttgatgcagagaagaaaatagttttgatttttgagtttttaacagaagtataaaacttaacattctcatagctcctgtccttgtattctcactcctacacttaaaaaaaaaatccttactgactagttatgtgagatgctaaaacttacaacattgcagttactgatacaaatggtgttaactgggaatattaaagcattctaaatgtctttcttatttctggtatattctttagggggcttagacatgtttaatgtttaaatgccaagtcttactatagtgtttattgatcttataaaacaagcaaataggatatgatacacttttggttaaaaattactgggtctcatttttacttgagtctttaaaacagtagtgtgtcactataatgtgataatctttaagagaaagtagaatacttaagcctttcaaagtgattttgatttttagatcatcagatgtatgatgaaaatggttaaatgtttgtgatgggagctctgtactcaatggcataacaatgtttatttttataatatacaatctttccttgaaataaaggatgaaacacttttccctta

SEQ ID NO: 7161 - DNA, 3706 bp, Homo sapiens
ctgctcccaaaaatggcggacgcattyggagatgagctgttcagcgtgttcgagggcgactcgaccackgcggcgggaaccaaaaaagacaaggaaaaggacaaggggaaatggaaggggcctccagggtctgcagacaaggcagggaaacgttttgatggtaaattacaatcagaatcaactaataatggaaaaaataagagagatgtagatttcgaaggtacagatgaacccatttttggaaagaagcccaggatagaagagtcaataactgaagacttaagtttggcagacctgatgcccagagtcaaggtacaatcagttgaaactgttgaagggtgtacacatgaggttgcacttcctgcagaagaggattatttaccacttaaaccacgagttggaaaagctgctaaggaatacccgttcattcttgatgcttttcaaagagaggccattcagtgtgttgacaataatcagtctgttctagtatctgcacatacctcagcgggaaaaacagtatgcgccgagtatgccattgcattggccttaagggaaaagcagcgtgtaatatttaccagcccaattaaggctctgagtaaccaaaaataccgtgaaatgtatgaagaatttcaagatgttggtttgatgactggtgatgttactattaatcctacggcatcttgtcttgttatgaccacagagattttgagaagtatgctttacagaggttccgaagttatgagagaagttgcttgggttatatttgatgaaattcattatatgagagattcagaacgtggtgtagtatgggaagaaactattattttgcttcctgataacgtccactatgtctttctttcggctactattccaaatgcccgacagtttgctgaatggatttgccatttacataaacagccttgtcatgttatttacacagattatcggcccactccattgcaacactacatttttccagcagggggagatggcctgcatcttgtggttgatgaaaatggtgacttcagagaagataattttaatactscaatgcaagtgcttcgagatgcaggtgatttggccaaaggagaccagaaagggcggaaaggaggaacaaaaggaccatcaaatgttttcaaaattgtgaagatgattatggaaagaaatttccaacctgtgattattttcagttttagtaagaaagattgtgaagcctatgcacttcaaatgaccaaattagatttcaacacagatgaagaaaaraagatggttgaagaagtattcagtaatgcaattgattgcttatccgatgaagataaaaaactccctcaggtagaacatgtacttcctcttttgaagaggggaattggtattcaccatggtggtttacttcctattttgaaagaaactatagaaattctcttttctgaaggattgataaaggccttatttgccacggagacctttgctatgggaattaacatgccagctagaactgttttatttacaaatgcccgcaaatttgatgggaaggatttccgatggatttcttctggtgaatacattcagatgtctggtcgtgctggaaggagaggaatggatgatagaggaattgtaattcttatggtagatgaaaagatgagcccaacaattggaaaacaattacttaagggctccgctgatcctctaaatagtgctttccatttgacctacaacatggttttgaacttactacgtgtagaagaaattaatcctgagtacatgttggaaaaatccttctaccagtttcagcattatagagcaattccaggagtagtagagaaggtaaagaattcagaagaacagtataataaaatagtaattcccaatgaagaaagtgtggttatctattataagattagacagcagcttgccaaattgggtaaagaaattgaagaatatattcacaaaccaaaatactgcttaccttttctacarccaggtcgtttggtaaaggtaaagaatgaaggagatgactttggctggggagtagtggtgaatttctcaaaaaagtcaaatgttaagcctaactctggtgaactggatcctttgtatgtagtagaagtacttctgcgctgtagcaaagagagcttgaaaaattcagctacagaagctgcaaaaccagctaaacctgatgagaaaggagagatgcaggttgtcccagttttggtgcatctcctgtctgctatcagcagtgttaggctttacattcctaaagaccttcggccggtggacaatagacagagtgttttaaaatcaatacaggaagttcagaaacgttttcctgacggcatccccttattagaccctattgatgatatgggcattcaagatcaagggctgaaaaaagtcattcagaaagtagaagcttttgagcatcgaatgtattctcatccacttcacaatgatccaaatttggaaactgtgtatacgctttgtgaaaaaaaagcacagattgcaatagatattaaatctgcaaagcgagaactgaagaaagcaagaacagtcctacaaatggatgaactcaaatgtcgcaaacgtgttttaagaaggttgggatttgctacttcttctgatgtaatagagatgaaaggacgagtggcttgtgagataagcagtgctgatgagctccttctaactgagatgatgtttaatggccttttcaatgacctttctgcagaacaggcaacagcattattaagctgctttgtgtttcaagagaattctagtgagatgcccaaattaacagaacaattagcaggaccacttcgtcaaatgcaggaatgtgctaaaagaattgcaaaagtttcagcagaagccaaattggaaattgatgaggaaacttatctaagctcatttaaacctcacttaatggatgtagtatatacctgggcaactggagctacatttgcccatatctgcaaaatgacagatgtctttgaaggcagcataattcgttgtatgaggcgcctggaagaattgcttcgacaaatgtgtcaagcagcaaaagccattggaaacactgagctggaaaataaatttgcagaaggaatcaccaaaatcaagagagatattgtgtttgctgccagcctctacttgtagagtcagctaaaggaatgtgagattttaaattattgaccacctgtttgattacagttgactacaaatgcctgcaagtgtggatttggttctcccatacattttaatatgtattatatttaaatcaaacatcattcatagaaagcatattacatacatgtttatacataagcattacatttttttaataaaaatgtatacaggtggggcactgttttggtrgaaggcttggagtttttttaatgagtttagagctattarataaccactgagttaaaggtaactatgtacacacaaagtgtgcatccaagaggcatagcagcagyagaagtctttaaaggcttgtacaccaggaagaaagatgcatcctcttgccttgtggcaatcattttcctttagaaaacaggccagcttcacctgggcaccctgctgcctttcaaggctggtgattgctcggatagtgattcccagttgttggtgtttcatgcagagttgtatgagagtcctcctcttttctttctttaaaagaagttctttctttgaagaaatccgatacatatacagccta

SEQ ID NO: 7162 - DNA, 3705 bp, Homo sapiens
tgctcccaaaaatggcggacgcattyggagatgagctgttcagcgtgttcgagggcgactcgaccackgcggcgggaaccaaaaaagacaaggaaaaggacaaggggaaatggaaggggcctccagggtctgcagacaaggcagggaaacgttttgatggtaaattacaatcagaatcaactaataatggaaaaaataagagagatgtagatttcgaaggtacagatgaacccatttttggaaagaagcccaggatagaagagtcaataactgaagacttaagtttggcagacctgatgcccagagtcaaggtacaatcagttgaaactgttgaagggtgtacacatgaggttgcacttcctgcagaagaggattatttaccacttaaaccacgagttggaaaagctgctaaggaatacccgttcattcttgatgcttttcaaagagaggccattcagtgtgttgacaataatcagtctgttctagtatctgcacatacctcagcgggaaaaacagtatgcgccgagtatgccattgcattggccttaagggaaaagcagcgtgtaatatttaccagcccaattaaggctctgagtaaccaaaaataccgtgaaatgtatgaagaatttcaagatgttggtttgatgactggtgatgttactattaatcctacggcatcttgtcttgttatgaccacagagattttgagaagtatgctttacagaggttccgaagttatgagagaagttgcttgggttatatttgatgaaattcattatatgagagattcagaacgtggtgtagtatgggaagaaactattattttgcttcctgataacgtccactatgtctttctttcggctactattccaaatgcccgacagtttgctgaatggatttgccatttacataaacagccttgtcatgttatttacacagattatcggcccactccattgcaacactacatttttccagcagggggagatggcctgcatcttgtggttgatgaaaatggtgacttcagagaagataattttaatactscaatgcaagtgcttcgagatgcaggtgatttggccaaaggagaccagaaagggcggaaaggaggaacaaaaggaccatcaaatgttttcaaaattgtgaagatgattatggaaagaaatttccaacctgtgattattttcagttttagtaagaaagattgtgaagcctatgcacttcaaatgaccaaattagatttcaacacagatgaagaaaaraagatggttgaagaagtattcagtaatgcaattgattgcttatccgatgaagataaaaaactccctcaggtagaacatgtacttcctcttttgaagaggggaattggtattcaccatggtggtttacttcctattttgaaagaaactatagaaattctcttttctgaaggattgataaaggccttatttgccacggagacctttgctatgggaattaacatgccagctagaactgttttatttacaaatgcccgcaaatttgatgggaaggatttccgatggatttcttctggtgaatacattcagatgtctggtcgtgctggaaggagaggaatggatgatagaggaattgtaattcttatggtagatgaaaagatgagcccaacaattggaaaacaattacttaagggctccgctgatcctctaaatagtgctttccatttgacctacaacatggttttgaacttactacgtgtagaagaaattaatcctgagtacatgttggaaaaatccttctaccagtttcagcattatagagcaattccaggagtagtagagaaggtaaagaattcagaagaacagtataataaaatagtaattcccaatgaagaaagtgtggttatctattataagattagacagcagcttgccaaattgggtaaagaaattgaagaatatattcacaaaccaaaatactgcttaccttttctacarccaggtcgtttggtaaaggtaaagaatgaaggagatgactttggctggggagtagtggtgaatttctcaaaaaagtcaaatgttaagcctaactctggtgaactggatcctttgtatgtagtagaagtacttctgcgctgtagcaaagagagcttgaaaaattcagctacagaagctgcaaaaccagctaaacctgatgagaaaggagagatgcaggttgtcccagttttggtgcatctcctgtctgctatcagcagtgttaggctttacattcctaaagaccttcggccggtggacaatagacagagtgttttaaaatcaatacaggaagttcagaaacgttttcctgacggcatccccttattagaccctattgatgatatgggcattcaagatcaagggctgaaaaaagtcattcagaaagtagaagcttttgagcatcgaatgtattctcatccacttcacaatgatccaaatttggaaactgtgtatacgctttgtgaaaaaaaagcacagattgcaatagatattaaatctgcaaagcgagaactgaagaaagcaagaacagtcctacaaatggatgaactcaaatgtcgcaaacgtgttttaagaaggttgggatttgctacttcttctgatgtaatagagatgaaaggacgagtggcttgtgagataagcagtgctgatgagctccttctaactgagatgatgtttaatggccttttcaatgacctttctgcagaacaggcaacagcattattaagctgctttgtgtttcaagagaattctagtgagatgcccaaattaacagaacaattagcaggaccacttcgtcaaatgcaggaatgtgctaaaagaattgcaaaagtttcagcagaagccaaattggaaattgatgaggaaacttatctaagctcatttaaacctcacttaatggatgtagtatatacctgggcaactggagctacatttgcccatatctgcaaaatgacagatgtctttgaaggcagcataattcgttgtatgaggcgcctggaagaattgcttcgacaaatgtgtcaagcagcaaaagccattggaaacactgagctggaaaataaatttgcagaaggaatcaccaaaatcaagagagatattgtgtttgctgccagcctctacttgtagagtcagctaaaggaatgtgagattttaaattattgaccacctgtttgattacagttgactacaaatgcctgcaagtgtggatttggttctcccatacattttaatatgtattatatttaaatcaaacatcattcatagaaagcatattacatacatgtttatacataagcattacatttttttaataaaaatgtatacaggtggggcactgttttggtrgaaggcttggagtttttttaatgagtttagagctattarataaccactgagttaaaggtaactatgtacacacaaagtgtgcatccaagaggcatagcagcagyagaagtctttaaaggcttgtacaccaggaagaaagatgcatcctcttgccttgtggcaatcattttcctttagaaaacaggccagcttcacctgggcaccctgctgcctttcaaggctggtgattgctcggatagtgattcccagttgttggtgtttcatgcagagttgtatgagagtcctcctcttttctttctttaaaagaagttctttctttgaagaaatccgatacatatacagccta

SEQ ID NO: 7163 - DNA, 1942 bp, Homo sapiens
rgctctctccagctccagctggacctgaagtctcagagctgccaccagcagcaggctcagacactgggctcccagctggggactgctccayggccatggagatagacagcaggcctggggggctccccggcagtagctgcaacctaggtgcagcccgagaacacatgcaggcggtcacccgaaactacatcacccacccccgtgtcacctacaggactgtgtgcagygtgaacgggcccctggtggtgctggaccgggtcaagtttgcccagtatgcggagatcgtccacttcaccctcccagatgggactcagagkagcgggcaggtgcttgaggtggctggcaccaaggcgattgttcaggtgtttgaagggacatcagggatcgatgccaggaagaccacttgcgaatttacaggggacatcctacgaactccggtgtcagaggacatgctgggtcgggttttcaatggctccggcaagcccattgacaaggggccagtggtcatggcggaggactttctggatatcaatggccagcccatcaacccgcactcccgcatctaccccgaggagatgattcagacgggcatttctcctattgacgtcakgaacagcattgcccgcggccagaagatccccatcttctcagcagccgggctcccccacaatgagattgccgctcagatctgccgccaggcggggctggtgaagaagtccaaggctgtgctggattaccatgacgacaacttcgccatcgtctttgcagccatgggggtgaacatggagacagccagattcttcaagtctgactttgagcagaatggaaccatggggaacgtctgcctcttcctgaacttggccaatgaccccacgatcgagcggatcatcaccccgcgcctggcgctgaccactgctgaattccttgcctaccagtgtgagaagcatgtgctggtcatactgacggacatgagttcctatgcagaggccttgcgggaggtctctgctgctagagaggaggtgcctgggcgccgagggtttcctggatatatgtacacagacctggccaccatctacgagcgggcgggccgygtggagggtcggggaggatccatcacacagatccccatcctcaccatgcccaacgacgatatcacccaccctatcccagacttgacgggcttcatcacagagggacagatctacgtggacagacagcttcacaacagacagatctacccccccatcaacgtgctcccttccctgtcgcggctgatgaagtcagccattggggaaggcatgacaagaaaggaccatggagatgtctccaaccagctgtacgcctgctatgccatcgggaaggacgtgcaggccatgaaggcagtagttggggaggaggcgctcacctctgaggacctgctctacctggaattcctgcagaagtttgagaagaacttcatcaatcagggcccctacgagaaccgctcggtgttcgagtcgctggacctgggctggaagctgctgcgcatcttccccaaggagatgctgaagcgcattccgcaggccgtgatcgacgagttctattcccgcgagggggcgctgcaggacctcgcgcctgacactgcgctctagccccgcgcgccgtggcaccccaacaccggcagggaacctaccctcggctcccgggtctcccctccctcgccaccccaaccagcggcttytgcgccgccctccgccctccgctggctccgaggtggtgggggcgccgcacgctccatccctttccctcgctcgattccttttcccgcgctccatgcctccccctcgactcccggtgctgcggaagaactgaaggttgcgatgccttactctgacgggagcatctgtatttttatgttaaaagcccacaaaataaaaataaaaagtaactgagatgaatttac

SEQ ID NO: 7164 - DNA, 1883 bp, Homo sapiens
gtccatgggcgcaggtccctgagcccacagcttcgcgggggtctggccgagcatgcgtcacaacctacgcggccaagagcagtgcgcacgcgcaacctaacgcgggactgccagcaacttccgggcgtttacaggcaggcaggtcagtgatgtgtcctaagggtccgaccgacctagatacccctctttgattcctcctcttgggattagtgtccatctctggaagcaggatccaggaggacgggaggggccgctgcggaccgcagtcgctccacctggaggagacaccagaaggaagacagcctgagggacgcagccayccccggctcctaccggcgccccgccccgcgcatgcgcacgcgcacagggagtcagctggctgcgcgggaggtcacgggaagtggggcggtgcccagacagctggagggaaggaggtgtcaggcggggagagacgcaaacggcgggaccagcagcgacggtagcagcagcatggccgcgatctatgrgggtgtagaggggggaggcacacgatccgaggtccttttagtctcagaggatgggaagatcctggcagaagcagayggactgagcacaaaccactggctgatcgggacagacaagtgtgtggagaggatcaatgagatggtgaacagggccaaacggaaagcaggggtggatccwctrgtaccgctgcgaagcttgggcctatctctgagcggtggggaccaggaggacgcggggaggatcctgatcgaggagctgagggaccgatttccctacctgagtgaaagctacttaatcaccaccgatgccgccggctccatcgccacagctacaccggatggtggagttgtgctcatatctggaacaggctccaactgcaggctcatcaaccctgatggctccgagagtggswgcggcggctggggccatatgatgggtgatgagggttcagcctactggatcgcacaccaagcagtgaaaatagtgtttgactccattgacaacctagaggcggctcctcatgatatcggctacgtcaaacaggccatgttccactatttccaggtgccagatcggctagggatactcactcacctgtatagggactttgataaatgcaggtttgctgggttttgccggaaaattgcagaaggtgctcagcagggagaccccctttcccgctatatcttcaggaaggctggggagatgctgggcagacacatcgtagcagtgttgcccgagattgacccggtcttgttccagggcaagattggactccccatcctgtgcgtgggctctgtrtggaagagctgggagctgctgaaggaaggttttcttytggcgctgacccagggcagagagatccaggctcagaacttcttctccagcttcaycctgatgaagctgaggcactcctccgctctgggtggggccagcctaggggccaggcacatcgggcacctcctccccatggactatagcgccaatgccattgccttctattcctacaccttttcctagggggctggtcccggctccaccccctccaagctcagtggacactgggtctgaaaggaaggagtcttttgcttcctttctcctttttacaaaaacaaacatagaagaaaataaatgcactttatccactccccaattggactgcattatcaaacacatgtgctatgtacatcctcagtgcacctgccagcagatatcctggagggctcatgagtgaatttagtccaagatttaaagccctgcccccaggtgctcagcctgtgatctgtatccactcagcatgcacttgggcagatgatttgtctgtgtgctacccttccccccatattaccatacatatgcactgtgtggctgccagttaa

SEQ ID NO: 7165 - DNA, 2067 bp, Homo sapiens
agtcccgtaggctgtctttcccttgctttgcagatgccagccccagagtcccacctccaccgttgtaagtctttgaaatcctgtgtgtattctacattgacgggacatctcattttggactaaccacatttcaagtgctcagtattcacatatggatactgtgcaggacagcacacactaattggtccatgggcgcaggtccctgagcccacagcttcgcgggggtctggccgagcatgcgtcacaacctacgcggccaagagcagtgcgcacgcgcaacctaacgcgggactgccagcaacttccgggcgtttacaggcaggcaggtcagtgatgtgtcctaagggtccgaccgacctagatacccctctttgattcctcctcttgggattagtgtccatctctggaagcaggatccaggaggacgggaggggccgctgcggaccgcagtcgctccacctggaggagacaccagaaggaagacagcctgagggacgcagccayccccggctcctaccggcgccccgccccgcgcatgcgcacgcgcacagggagtcagctggctgcgcgggaggtcacgggaagtggggcggtgcccagacagctggagggaaggaggtgtcaggcggggagagacgcaaacggcgggaccagcagcgacggtagcagcagcatggccgcgatctatgrgggtgtagaggggggaggcacacgatccgaggtccttttagtctcagaggatgggaagatcctggcagaagcagayggactgagcacaaaccactggctgatcgggacagacaagtgtgtggagaggatcaatgagatggtgaacagggccaaacggaaagcaggggtggatccwctrgtaccgctgcgaagcttgggcctatctctgagcggtggggaccaggaggacgcggggaggatcctgatcgaggagctgagggaccgatttccctacctgagtgaaagctacttaatcaccaccgatgccgccggctccatcgccacagctacaccggatggtggagttgtgctcatatctggaacaggctccaactgcaggctcatcaaccctgatggctccgagagtggswgcggcggctggggccatatgatgggtgatgagggttcagcctactggatcgcacaccaagcagtgaaaatagtgtttgactccattgacaacctagaggcggctcctcatgatatcggctacgtcaaacaggccatgttccactatttccaggtgccagatcggctagggatactcactcacctgtatagggactttgataaatgcaggtttgctgggttttgccggaaaattgcagaaggtgctcagcagggagaccccctttcccgctatatcttcaggaaggctggggagatgctgggcagacacatcgtagcagtgttgcccgagattgacccggtcttgttccagggcaagattggactccccatcctgtgcgtgggctctgtrtggaagagctgggagctgctgaaggaaggttttcttytggcgctgacccagggcagagagatccaggctcagaacttcttctccagcttcaycctgatgaagctgaggcactcctccgctctgggtggggccagcctaggggccaggcacatcgggcacctcctccccatggactatagcgccaatgccattgccttctattcctacaccttttcctagggggctggtcccggctccaccccctccaagctcagtggacactgggtctgaaaggaaggagtcttttgcttcctttctcctttttacaaaaacaaacatagaagaaaataaatgcactttatccactccccaattggactgcattatcaaacacatgtgctatgtacatcctcagtgcacctgccagcagatatcctggagggctcatgagtgaatttagtccaagatttaaagccctgcccccaggtgctcagcctgtgatctgtatccactcagcatgcacttgggcagatgatttgtctgtgtgctacccttccccccatattaccatacatatgcactgtgtggctgccagttaa

SEQ ID NO: 7166 - DNA, 1437 bp, Homo sapiens
ccgcgcgttgcggtcaagatggcgctggtggcttctgtgcgagtcccggcgcgcgttctgctccgcgcgggggcccggctcccgggcgcggccytcgggcggacggagcgggcggccggcggcggagacggcgcgcggcgcttcgggagccagcgggtgctggtggagccggacgcgggcgcaggggtcgctgtgatgaaattcaagaaccccccagtgaacagcctgagcctggagtttctgacggagctggtcatcagcctggagaagctggagaatgacaagagcttccgcggtgtcattctgacctcggaccgcccgggtgtcttctcggccggcctggacctgacggagatgtgtgggaggagccccgcccactacgctgggtactggaaggccgttcaggagctgtggctgcggttgtaccagtccaacctggtgctggtctccgccatcaacggagcctgccccgctggaggctgcctggtggccctgacctgtgactaccgcatcctggcggacaaccccaggtactgcataggactcaatgagacccagctgggcatcatcgcccctttctggttgaaagacaccctggagaacaccatcgggcaccgggcggcggagcgtgccctgcagctggggctgctcttcccgccggcggaggccctgcaggtgggcatagtggaccaggtggtcccggaggagcaggtgcagagcactgcgctgtcagcgatagcccagtggatggccattccagaccatgctcgacagctgaccaaggccatgatgcgaaaggccacggcyagccgcctggtcacgcagcgcgatgcggacgtgcagaacttcgtcagcttcatctccaaagactccatccagaagtccctgcagatgtacttagagaggctcaaagaagaaaaaggctaacgattgggctgccasaggcttacggccacacgtgcccctgtgggtcccagggaggtcttaaacaaggtatttttcaacttaaaagtactgccagcgtttcattttgctgatgttacgtagaagttcctgttcctcatagcccagtggcccaaggcccagccacacacaaacacacatgggtgcctgtgcccgtcaggcaaggggagttggagggcagccttttgacttgggattgtgactggcaggggatgccattctggacctggtgaggttgccacggagtgtctctgttcccaaggcagaatcgtaagtcaagtccctggtcatccattctggcctttggactgcctgctcttaggtgtaaggccaggtggtcttggcccccatgacccacacagaactccccagggaaaagccctttggtcactgcccttactcatcaggatgaagagcgcacagtgaatcagagcaactgggggatcctgagccagcgggagtgggactctggag

SEQ ID NO: 7167 - DNA, 1386 bp, Homo sapiens
ccgcgcgttgcggtcaagatggcgctggtggcttctgtgcgagtcccggcgcgcgttctgctccgcgcgggggcccggctcccgggcgcggccytcgggcggacggagcgggcggccggcggcggagacggcgcgcggcgcttcgggagccagcgggtgctggtggagccggacgcgggcgcaggggtcgctgtgatgaaattcaagaaccccccagtgaacagcctgagcctggagtttctgacggagctggtcatcagcctggagaagctggagaatgacaagagcttccgcggtgtcattctgacctcggaccgcccgggtgtcttctcggccggcctggacctgacggagatgtgtgggaggagccccgcccactacgctgggtactggaaggccgttcaggagctgtggctgcggttgtaccagtccaacctggtgctggtctccgccatcaacggagcctgccccgctggaggctgcctggtggccctgacctgtgactaccgcatcctggcggacaaccccaggttgaaagacaccctggagaacaccatcgggcaccgggcggcggagcgtgccctgcagctggggctgctcttcccgccggcggaggccctgcaggtgggcatagtggaccaggtggtcccggaggagcaggtgcagagcactgcgctgtcagcgatagcccagtggatggccattccagaccatgctcgacagctgaccaaggccatgatgcgaaaggccacggcyagccgcctggtcacgcagcgcgatgcggacgtgcagaacttcgtcagcttcatctccaaagactccatccagaagtccctgcagatgtacttagagaggctcaaagaagaaaaaggctaacgattgggctgccasaggcttacggccacacgtgcccctgtgggtcccagggaggtcttaaacaaggtatttttcaacttaaaagtactgccagcgtttcattttgctgatgttacgtagaagttcctgttcctcatagcccagtggcccaaggcccagccacacacaaacacacatgggtgcctgtgcccgtcaggcaaggggagttggagggcagccttttgacttgggattgtgactggcaggggatgccattctggacctggtgaggttgccacggagtgtctctgttcccaaggcagaatcgtaagtcaagtccctggtcatccattctggcctttggactgcctgctcttaggtgtaaggccaggtggtcttggcccccatgacccacacagaactccccagggaaaagccctttggtcactgcccttactcatcaggatgaagagcgcacagtgaatcagagcaactgggggatcctgagccagcgggagtgggactctggag

SEQ ID NO: 7168 - DNA, 1535 bp, Homo sapiens
ggcggggagggcgccgcggcgggcggctgcgaggagcggccggcgggcggcggcggccggcgggcggcgatggcggcggcggaggccggtggcgacgacgcccgctgcgtgcggctgagcgccgagcgggcacaggcgctgctggccgacgtggacacgctgctgttcgactgcgacggcgtgctgtggcgcggggagaccgccgtgcctggcgcgcccgaggccctgcgggcgctgcgagcccgcggcaagcgcctgggcttcatcaccaacaacagcagcaagacccgcgctgcctacgccgagaagctgcggcgcctgggcttcggcggccccgcggggcccggcgccagcctggaggtcttcggcacggcctactgcaccgcgctctacctgcgccagcgcctggccggcgcccccgcgcccaaggcctacgtgctgggcagcccagccctggccgcggagctggaggccgtgggcgtcgccagcgtgggcgtggggcccgagccactgcagggcgagggtcccggcgactggctgcacgcgccgctggagcccgacgtgcgcgcggtggtggtgggctttgacccgcacttcagctacatgaagctcaccaaggccctgcgctacctgcagcagcccggctgcctgctcgtgggcaccaacatggacaaccggcttccgcttgagaacggccgcttcatcgcgggtaccgggtgtctggtccgagccgtggagatggccgcccagcgccaggccgacatcatcgggaagcccagccgcttcattttcgactgcgtgtcccaggaatacggcatcaaccccgagcgcaccgtcatggtgggagaccgcctggacacagacatcctcctaggcgccacctgtggcctgaagaccatcctgaccctcaccggagtctccactctaggggatgtgaagaataatcaggaaagtgactgcgtgtctaagaagaaaatggtccctgacttctatgttgacagcatagccgaccttttgcctgcccttcaaggttaaagattgagtgtctttaatctgcagaataaaaaaaaagaaattgaaaaccagttacccaaattaataggtggggcttaagcatctgctcggctaagtggcttcaaagagtgtaattggagttaagcaaaggcattcattgttaaccttgtaagtacacgtttgggggacgattttgtttacagatgcttgtaatcgaagatgcacttttaggcytggaaggcrttgtgggctgggttctgggccttgggtggggttggcaggggcaggctctgcacctgtccgggattcaggtaaccagggcctgccgatgggactgaggcgggtctaggggtgtgtgtcctgtattttattgaaaaactcattcagggatccagcccctcagggggcagagggactgattattctgactgttgggagaggcttgcatggaccagagccccatcagtatgactgaaagtccagcggagccttctgtgtccctgtgcctcccagcagggtgg

SEQ ID NO: 7169 - DNA, 2795 bp, Homo sapiens
attttcttcctcagagattttggcctagatttgcaaaatgatgaccacatctttgatttgggggattgctatagcagcatgctgttgtctatggcttattcttggaattaggagaaggcaaacgggtgaaccacctctagagaatggattaattccatacctgggctgtgctctgcaatttggtgccaatcctcttgagttcctcagagcaaatcaaaggaaacatggtcatgtttttacctgcaaactaatgggaaaataygtccatttcatcacaaatcccttgtcatacmataaggtgttgtgccacggaaaatattttgattggaaaaaatttcactttgctacttctgcgaaggcatttgggcacagaagcattgacccgatggatggaaataccactgaaaacataaacgacactttcatcaaaaccctgcagggccatgccttgaattccctcacggaaagcatgatctgcctgggtgacagaagggatgtattctttctgctaccgagtgatgtttgaagctgggtatttaactatctttggcagagatcttacaaggcgggacacacagaaagcacatattctaaacaatcttgacaacttcaagcaattcgacaaagtctttccagccctggtagcaggcctccccattcacatgttcaggactgcgcacaatgcccgggagaaactggcagagagcttgaggcacgagaacctccaaaagagggaaagcatctcagaactgatcagcctgcgcatgtttctcaatgacactttgtccacctttgatgatctggagaaggccaagacacacctcgtggtcctctgggcatcgcaagcaaacaccattccagcgactttctggagtttatttcaaatgattaggaacccagaagcaatgaaagcagctactgaagaagtgaaaagaacattagagaatgctggtcaaaaagtcagcttggaaggcaatcctatttgtttgagtcaagcagaactgaatgacctgccagtattagatagtataatcaaggaatcgctgaggctttccagtgcctccctcaacatccggacagctaaggaggatttcactttgcaccttgaggacggttcctacaacatccgaaaagatgacatcatagctctttacccacagttaatgcacttagatccagaaatctacccagaccctttgacttttaaatatgataggtatcttgatgaaaacgggaagacaaagactaccttctattgtaatggactcaagttaaagtattactacatgccctttggatcgggagctacaatatgtcctggaagattgttcgctatccacgaaatcaagcaatttttgattctgatgctttcttattttgaattggagcttatagagggccaagctaaatgtccacctttggaccagtcccgggcaggcttgggcattttgccgccattgaatgatattgaatttaaatataaattcaagcatttgtgaatacatggctggaataagaggacactagatgatattacaggactgcagaacaccctcaccacacagtccctttggacaaatgcatttagtggtggtagaaatgattcaccaggtccaatgttgttcaccagtgcttgcttgtgaatcttaacattttggtgacagtttccagatgctatcacagactctgctagtgaaaagaactagtttctaggagcacaataatttgttttcatttgtataagtccatgaatgttcatatagccagggattgaagtttattattttcaaaggaaaacacctttattttattttttttcaaaatgaagatacacattacagccaggtgtggtagcaggcacctgtagtcttagctactcgagaggccaaagaaggaggatggcttgagcccaggagttcaagaccagcctggacagcttagtgagatcccgtctccgaagaaaagatatgtattctaattggcagattgttttttcctaaggaaactgctttatttttataaaactgcctgacaattatgaaaaaatgttcaaattcacgttctagtgaaactgcattatttgttgactagatggtggggttcttcgggtgtgatcatatatcataaaggatatttcaaatgattatgattagttatgtcttttaataaaaaggaaatatttttcaacttcttctatatccaaaattcagggctttaaacatgattatcttgatttcccaaaaacactaaaggtggttttattttcccttcatgttttaacttattgttgctgaaaactctatgtccggctttaactatcttctctatatttttatttcattcacattaatgagaagagttttctcagagattaaaaaaggtagtttttctgtcattgttaaatacacattatcactgaaaaaatgtagcttttatgtgatatgttttaaagttaaaactggatggaaatagccatttggaagctttggttatgaaacatgtggagtgtattaagtgcagcttgacattatgttttatttaaatgctttttatcgctaaatgacttgcagatgaaaaaaactaaggtgactcgagtgtttaaatgctgtgtacaacaatgctttgataaaatattttaagtatgagttatcagctctatgtcaattgatatttctgtgtagtatttatatttaaattatatttacctttttgcttattttacaaatattaagaaaatattctaacatttgataattttgaaatgattcatctttcagaaataaaagtatgaatct

SEQ ID NO: 7170 - DNA, 2807 bp, Homo sapiens
ctttctaatcagagattttcttcctcagagattttggcctagatttgcaaaatgatgaccacatctttgatttgggggattgctatagcagcatgctgttgtctatggcttattcttggaattaggagaaggcaaacgggtgaaccacctctagagaatggattaattccatacctgggctgtgctctgcaatttggtgccaatcctcttgagttcctcagagcaaatcaaaggaaacatggtcatgtttttacctgcaaactaatgggaaaataygtccatttcatcacaaatcccttgtcatacmataaggtgttgtgccacggaaaatattttgattggaaaaaatttcactttgctacttctgcgaaggcatttgggcacagaagcattgacccgatggatggaaataccactgaaaacataaacgacactttcacctccaacgtatcatgagacctccagtctcctctaactcaaagaccgctgcctgggtgacagaagggatgtattctttctgctaccgagtgatgtttgaagctgggtatttaactatctttggcagagatcttacaaggcgggacacacagaaagcacatattctaaacaatcttgacaacttcaagcaattcgacaaagtctttccagccctggtagcaggcctccccattcacatgttcaggactgcgcacaatgcccgggagaaactggcagagagcttgaggcacgagaacctccaaaagagggaaagcatctcagaactgatcagcctgcgcatgtttctcaatgacactttgtccacctttgatgatctggagaaggccaagacacacctcgtggtcctctgggcatcgcaagcaaacaccattccagcgactttctggagtttatttcaaatgattaggaacccagaagcaatgaaagcagctactgaagaagtgaaaagaacattagagaatgctggtcaaaaagtcagcttggaaggcaatcctatttgtttgagtcaagcagaactgaatgacctgccagtattagatagtataatcaaggaatcgctgaggctttccagtgcctccctcaacatccggacagctaaggaggatttcactttgcaccttgaggacggttcctacaacatccgaaaagatgacatcatagctctttacccacagttaatgcacttagatccagaaatctacccagaccctttgacttttaaatatgataggtatcttgatgaaaacgggaagacaaagactaccttctattgtaatggactcaagttaaagtattactacatgccctttggatcgggagctacaatatgtcctggaagattgttcgctatccacgaaatcaagcaatttttgattctgatgctttcttattttgaattggagcttatagagggccaagctaaatgtccacctttggaccagtcccgggcaggcttgggcattttgccgccattgaatgatattgaatttaaatataaattcaagcatttgtgaatacatggctggaataagaggacactagatgatattacaggactgcagaacaccctcaccacacagtccctttggacaaatgcatttagtggtggtagaaatgattcaccaggtccaatgttgttcaccagtgcttgcttgtgaatcttaacattttggtgacagtttccagatgctatcacagactctgctagtgaaaagaactagtttctaggagcacaataatttgttttcatttgtataagtccatgaatgttcatatagccagggattgaagtttattattttcaaaggaaaacacctttattttattttttttcaaaatgaagatacacattacagccaggtgtggtagcaggcacctgtagtcttagctactcgagaggccaaagaaggaggatggcttgagcccaggagttcaagaccagcctggacagcttagtgagatcccgtctccgaagaaaagatatgtattctaattggcagattgttttttcctaaggaaactgctttatttttataaaactgcctgacaattatgaaaaaatgttcaaattcacgttctagtgaaactgcattatttgttgactagatggtggggttcttcgggtgtgatcatatatcataaaggatatttcaaatgattatgattagttatgtcttttaataaaaaggaaatatttttcaacttcttctatatccaaaattcagggctttaaacatgattatcttgatttcccaaaaacactaaaggtggttttattttcccttcatgttttaacttattgttgctgaaaactctatgtccggctttaactatcttctctatatttttatttcattcacattaatgagaagagttttctcagagattaaaaaaggtagtttttctgtcattgttaaatacacattatcactgaaaaaatgtagcttttatgtgatatgttttaaagttaaaactggatggaaatagccatttggaagctttggttatgaaacatgtggagtgtattaagtgcagcttgacattatgttttatttaaatgctttttatcgctaaatgacttgcagatgaaaaaaactaaggtgactcgagtgtttaaatgctgtgtacaacaatgctttgataaaatattttaagtatgagttatcagctctatgtcaattgatatttctgtgtagtatttatatttaaattatatttacctttttgcttattttacaaatattaagaaaatattctaacatttgataattttgaaatgattcatctttcagaaataaaagtatgaatct

SEQ ID NO: 7171 - DNA, 2822 bp, Homo sapiens
gtggcatccttccctttctaatcagagattttcttcctcagagattttggcctagatttgcaaaatgatgaccacatctttgatttgggggattgctatagcagcatgctgttgtctatggcttattcttggaattaggagaaggcaaacgggtgaaccacctctagagaatggattaattccatacctgggctgtgctctgcaatttggtgccaatcctcttgagttcctcagagcaaatcaaaggaaacatggtcatgtttttacctgcaaactaatgggaaaataygtccatttcatcacaaatcccttgtcatacmataaggtgttgtgccacggaaaatattttgattggaaaaaatttcactttgctacttctgcgaaggcatttgggcacagaagcattgacccgatggatggaaataccactgaaaacataaacgacactttcatcaaaaccctgcagggccatgccttgaattccctcacggaaagcatgatggaaaacctccaacgtatcatgagacctccagtctcctctaatgatgtttgaagctgggtatttaactatctttggcagagatcttacaaggcgggacacacagaaagcacatattctaaacaatcttgacaacttcaagcaattcgacaaagtctttccagccctggtagcaggcctccccattcacatgttcaggactgcgcacaatgcccgggagaaactggcagagagcttgaggcacgagaacctccaaaagagggaaagcatctcagaactgatcagcctgcgcatgtttctcaatgacactttgtccacctttgatgatctggagaaggccaagacacacctcgtggtcctctgggcatcgcaagcaaacaccattccagcgactttctggagtttatttcaaatgattaggaacccagaagcaatgaaagcagctactgaagaagtgaaaagaacattagagaatgctggtcaaaaagtcagcttggaaggcaatcctatttgtttgagtcaagcagaactgaatgacctgccagtattagatagtataatcaaggaatcgctgaggctttccagtgcctccctcaacatccggacagctaaggaggatttcactttgcaccttgaggacggttcctacaacatccgaaaagatgacatcatagctctttacccacagttaatgcacttagatccagaaatctacccagaccctttgacttttaaatatgataggtatcttgatgaaaacgggaagacaaagactaccttctattgtaatggactcaagttaaagtattactacatgccctttggatcgggagctacaatatgtcctggaagattgttcgctatccacgaaatcaagcaatttttgattctgatgctttcttattttgaattggagcttatagagggccaagctaaatgtccacctttggaccagtcccgggcaggcttgggcattttgccgccattgaatgatattgaatttaaatataaattcaagcatttgtgaatacatggctggaataagaggacactagatgatattacaggactgcagaacaccctcaccacacagtccctttggacaaatgcatttagtggtggtagaaatgattcaccaggtccaatgttgttcaccagtgcttgcttgtgaatcttaacattttggtgacagtttccagatgctatcacagactctgctagtgaaaagaactagtttctaggagcacaataatttgttttcatttgtataagtccatgaatgttcatatagccagggattgaagtttattattttcaaaggaaaacacctttattttattttttttcaaaatgaagatacacattacagccaggtgtggtagcaggcacctgtagtcttagctactcgagaggccaaagaaggaggatggcttgagcccaggagttcaagaccagcctggacagcttagtgagatcccgtctccgaagaaaagatatgtattctaattggcagattgttttttcctaaggaaactgctttatttttataaaactgcctgacaattatgaaaaaatgttcaaattcacgttctagtgaaactgcattatttgttgactagatggtggggttcttcgggtgtgatcatatatcataaaggatatttcaaatgattatgattagttatgtcttttaataaaaaggaaatatttttcaacttcttctatatccaaaattcagggctttaaacatgattatcttgatttcccaaaaacactaaaggtggttttattttcccttcatgttttaacttattgttgctgaaaactctatgtccggctttaactatcttctctatatttttatttcattcacattaatgagaagagttttctcagagattaaaaaaggtagtttttctgtcattgttaaatacacattatcactgaaaaaatgtagcttttatgtgatatgttttaaagttaaaactggatggaaatagccatttggaagctttggttatgaaacatgtggagtgtattaagtgcagcttgacattatgttttatttaaatgctttttatcgctaaatgacttgcagatgaaaaaaactaaggtgactcgagtgtttaaatgctgtgtacaacaatgctttgataaaatattttaagtatgagttatcagctctatgtcaattgatatttctgtgtagtatttatatttaaattatatttacctttttgcttattttacaaatattaagaaaatattctaacatttgataattttgaaatgattcatctttcagaaataaaagtatgaatct

SEQ ID NO: 7172 - DNA, 2794 bp, Homo sapiens
attttcttcctcagagattttggcctagatttgcaaaatgatgaccacatctttgatttgggggattgctatagcagcatgctgttgtctatggcttattcttggaattaggagaaggcaaacgggtgaaccacctctagagaatggattaattccatacctgggctgtgctctgcaatttggtgccaatcctcttgagttcctcagagcaaatcaaaggaaacatggtcatgtttttacctgcaaactaatgggaaaataygtccatttcatcacaaatcccttgtcatacmataaggtgttgtgccacggaaaatattttgattggaaaaaatttcactttgctacttctgcgaaggcatttgggcacagaagcattgacccgatggatggaaataccactgaaaacataaacgacactttcatcaaaaccctgcagggccatgccttgaattccctcacggaaagcaccgctgcctgggtgacagaagggatgtattctttctgctaccgagtgatgtttgaagctgggtatttaactatctttggcagagatcttacaaggcgggacacacagaaagcacatattctaaacaatcttgacaacttcaagcaattcgacaaagtctttccagccctggtagcaggcctccccattcacatgttcaggactgcgcacaatgcccgggagaaactggcagagagcttgaggcacgagaacctccaaaagagggaaagcatctcagaactgatcagcctgcgcatgtttctcaatgacactttgtccacctttgatgatctggagaaggccaagacacacctcgtggtcctctgggcatcgcaagcaaacaccattccagcgactttctggagtttatttcaaatgattaggaacccagaagcaatgaaagcagctactgaagaagtgaaaagaacattagagaatgctggtcaaaaagtcagcttggaaggcaatcctatttgtttgagtcaagcagaactgaatgacctgccagtattagatagtataatcaaggaatcgctgaggctttccagtgcctccctcaacatccggacagctaaggaggatttcactttgcaccttgaggacggttcctacaacatccgaaaagatgacatcatagctctttacccacagttaatgcacttagatccagaaatctacccagaccctttgacttttaaatatgataggtatcttgatgaaaacgggaagacaaagactaccttctattgtaatggactcaagttaaagtattactacatgccctttggatcgggagctacaatatgtcctggaagattgttcgctatccacgaaatcaagcaatttttgattctgatgctttcttattttgaattggagcttatagagggccaagctaaatgtccacctttggaccagtcccgggcaggcttgggcattttgccgccattgaatgatattgaatttaaatataaattcaagcatttgtgaatacatggctggaataagaggacactagatgatattacaggactgcagaacaccctcaccacacagtccctttggacaaatgcatttagtggtggtagaaatgattcaccaggtccaatgttgttcaccagtgcttgcttgtgaatcttaacattttggtgacagtttccagatgctatcacagactctgctagtgaaaagaactagtttctaggagcacaataatttgttttcatttgtataagtccatgaatgttcatatagccagggattgaagtttattattttcaaaggaaaacacctttattttattttttttcaaaatgaagatacacattacagccaggtgtggtagcaggcacctgtagtcttagctactcgagaggccaaagaaggaggatggcttgagcccaggagttcaagaccagcctggacagcttagtgagatcccgtctccgaagaaaagatatgtattctaattggcagattgttttttcctaaggaaactgctttatttttataaaactgcctgacaattatgaaaaaatgttcaaattcacgttctagtgaaactgcattatttgttgactagatggtggggttcttcgggtgtgatcatatatcataaaggatatttcaaatgattatgattagttatgtcttttaataaaaaggaaatatttttcaacttcttctatatccaaaattcagggctttaaacatgattatcttgatttcccaaaaacactaaaggtggttttattttcccttcatgttttaacttattgttgctgaaaactctatgtccggctttaactatcttctctatatttttatttcattcacattaatgagaagagttttctcagagattaaaaaaggtagtttttctgtcattgttaaatacacattatcactgaaaaaatgtagcttttatgtgatatgttttaaagttaaaactggatggaaatagccatttggaagctttggttatgaaacatgtggagtgtattaagtgcagcttgacattatgttttatttaaatgctttttatcgctaaatgacttgcagatgaaaaaaactaaggtgactcgagtgtttaaatgctgtgtacaacaatgctttgataaaatattttaagtatgagttatcagctctatgtcaattgatatttctgtgtagtatttatatttaaattatatttacctttttgcttattttacaaatattaagaaaatattctaacatttgataattttgaaatgattcatctttcagaaataaaagtatgaatct

SEQ ID NO: 7173 - DNA, 2795 bp, Homo sapiens
attttcttcctcagagattttggcctagatttgcaaaatgatgaccacatctttgatttgggggattgctatagcagcatgctgttgtctatggcttattcttggaattaggagaaggcaaacgggtgaaccacctctagagaatggattaattccatacctgggctgtgctctgcaatttggtgccaatcctcttgagttcctcagagcaaatcaaaggaaacatggtcatgtttttacctgcaaactaatgggaaaataygtccatttcatcacaaatcccttgtcatacmataaggtgttgtgccacggaaaatattttgattggaaaaaatttcactttgctacttctgcgaaggcatttgggcacagaagcattgacccgatggatggaaataccactgaaaacggaaagcatgatggaaaacctccaacgtatcatgagacctccagtctcctctaactcaaagaccgctgcctgggtgacagaagggatgtattctttctgctaccgagtgatgtttgaagctgggtatttaactatctttggcagagatcttacaaggcgggacacacagaaagcacatattctaaacaatcttgacaacttcaagcaattcgacaaagtctttccagccctggtagcaggcctccccattcacatgttcaggactgcgcacaatgcccgggagaaactggcagagagcttgaggcacgagaacctccaaaagagggaaagcatctcagaactgatcagcctgcgcatgtttctcaatgacactttgtccacctttgatgatctggagaaggccaagacacacctcgtggtcctctgggcatcgcaagcaaacaccattccagcgactttctggagtttatttcaaatgattaggaacccagaagcaatgaaagcagctactgaagaagtgaaaagaacattagagaatgctggtcaaaaagtcagcttggaaggcaatcctatttgtttgagtcaagcagaactgaatgacctgccagtattagatagtataatcaaggaatcgctgaggctttccagtgcctccctcaacatccggacagctaaggaggatttcactttgcaccttgaggacggttcctacaacatccgaaaagatgacatcatagctctttacccacagttaatgcacttagatccagaaatctacccagaccctttgacttttaaatatgataggtatcttgatgaaaacgggaagacaaagactaccttctattgtaatggactcaagttaaagtattactacatgccctttggatcgggagctacaatatgtcctggaagattgttcgctatccacgaaatcaagcaatttttgattctgatgctttcttattttgaattggagcttatagagggccaagctaaatgtccacctttggaccagtcccgggcaggcttgggcattttgccgccattgaatgatattgaatttaaatataaattcaagcatttgtgaatacatggctggaataagaggacactagatgatattacaggactgcagaacaccctcaccacacagtccctttggacaaatgcatttagtggtggtagaaatgattcaccaggtccaatgttgttcaccagtgcttgcttgtgaatcttaacattttggtgacagtttccagatgctatcacagactctgctagtgaaaagaactagtttctaggagcacaataatttgttttcatttgtataagtccatgaatgttcatatagccagggattgaagtttattattttcaaaggaaaacacctttattttattttttttcaaaatgaagatacacattacagccaggtgtggtagcaggcacctgtagtcttagctactcgagaggccaaagaaggaggatggcttgagcccaggagttcaagaccagcctggacagcttagtgagatcccgtctccgaagaaaagatatgtattctaattggcagattgttttttcctaaggaaactgctttatttttataaaactgcctgacaattatgaaaaaatgttcaaattcacgttctagtgaaactgcattatttgttgactagatggtggggttcttcgggtgtgatcatatatcataaaggatatttcaaatgattatgattagttatgtcttttaataaaaaggaaatatttttcaacttcttctatatccaaaattcagggctttaaacatgattatcttgatttcccaaaaacactaaaggtggttttattttcccttcatgttttaacttattgttgctgaaaactctatgtccggctttaactatcttctctatatttttatttcattcacattaatgagaagagttttctcagagattaaaaaaggtagtttttctgtcattgttaaatacacattatcactgaaaaaatgtagcttttatgtgatatgttttaaagttaaaactggatggaaatagccatttggaagctttggttatgaaacatgtggagtgtattaagtgcagcttgacattatgttttatttaaatgctttttatcgctaaatgacttgcagatgaaaaaaactaaggtgactcgagtgtttaaatgctgtgtacaacaatgctttgataaaatattttaagtatgagttatcagctctatgtcaattgatatttctgtgtagtatttatatttaaattatatttacctttttgcttattttacaaatattaagaaaatattctaacatttgataattttgaaatgattcatctttcagaaataaaagtatgaatct

SEQ ID NO: 7174 - DNA, 2821 bp, Homo sapiens
gtggcatccttccctttctaatcagagattttcttcctcagagattttggcctagatttgcaaaatgatgaccacatctttgatttgggggattgctatagcagcatgctgttgtctatggcttattcttggaattaggagaaggcaaacgggtgaaccacctctagagaatggattaattccatacctgggctgtgctctgcaatttggtgccaatcctcttgagttcctcagagcaaatcaaaggaaacatggtcatgtttttacctgcaaactaatgggaaaataygtccatttcatcacaaatcccttgtcatacmataaggtgttgtgccacggaaaatattttgattggaaaaaatttcactttgctacttctgcgaaggcatttgggcacagaagcattgacccgatggatggaaataccactgaaaacataaacgacactttcatcaaaaccctgcagggccatgccttgaattccctcacggaaagcatgatggaaaacctccaacgtatcatgagacctccagtctcctctaactcaaagaccgctgcctgggtgacagaagggatgtattctttctgctaccgagtgatgtttgaagctgggtatttaactatctttggcagagatcttacaaggcgggacacacagaaagcacatattctaaacaatcttgacaacttcaagcaattcgacaaagtctttccagccctggtagcaggcctccccattcacatgttcaggactgcgcacaatgcccgggagaaactggcagagagcttgaggcacgagaacctccaaaagagggaaagcatctcagaactgatcagcctgcgcatgtttctcaatgacactttgtccacctttgatgatctggagaaggccaagacacacctcgtggtcctctgggcatcgcaagcaaacaccattccagcgactttctggagtttatttcaaatgattaggaacccagaagcaatgaaagcagctactgaagaagtgaaaagaacattagagaatgctggtcaaaaagtcagcttggaaggcaatcctatttgtttgagtcaagcagaactgaatgacctgccagtattagatagtataatcaaggaatcgctgaggctttccagtgcctccctcaacatccggacagctaaggaggatttcactttgcaccttgaggacggttcctacaacatccgaaaagatgacatcatagctctttacccacagttaatgcacttagatccagaaatctacccagaccctttgacttttaaatatgataggtatctttattactacatgccctttggatcgggagctacaatatgtcctggaagattgttcgctatccacgaaatcaagcaatttttgattctgatgctttcttattttgaattggagcttatagagggccaagctaaatgtccacctttggaccagtcccgggcaggcttgggcattttgccgccattgaatgatattgaatttaaatataaattcaagcatttgtgaatacatggctggaataagaggacactagatgatattacaggactgcagaacaccctcaccacacagtccctttggacaaatgcatttagtggtggtagaaatgattcaccaggtccaatgttgttcaccagtgcttgcttgtgaatcttaacattttggtgacagtttccagatgctatcacagactctgctagtgaaaagaactagtttctaggagcacaataatttgttttcatttgtataagtccatgaatgttcatatagccagggattgaagtttattattttcaaaggaaaacacctttattttattttttttcaaaatgaagatacacattacagccaggtgtggtagcaggcacctgtagtcttagctactcgagaggccaaagaaggaggatggcttgagcccaggagttcaagaccagcctggacagcttagtgagatcccgtctccgaagaaaagatatgtattctaattggcagattgttttttcctaaggaaactgctttatttttataaaactgcctgacaattatgaaaaaatgttcaaattcacgttctagtgaaactgcattatttgttgactagatggtggggttcttcgggtgtgatcatatatcataaaggatatttcaaatgattatgattagttatgtcttttaataaaaaggaaatatttttcaacttcttctatatccaaaattcagggctttaaacatgattatcttgatttcccaaaaacactaaaggtggttttattttcccttcatgttttaacttattgttgctgaaaactctatgtccggctttaactatcttctctatatttttatttcattcacattaatgagaagagttttctcagagattaaaaaaggtagtttttctgtcattgttaaatacacattatcactgaaaaaatgtagcttttatgtgatatgttttaaagttaaaactggatggaaatagccatttggaagctttggttatgaaacatgtggagtgtattaagtgcagcttgacattatgttttatttaaatgctttttatcgctaaatgacttgcagatgaaaaaaactaaggtgactcgagtgtttaaatgctgtgtacaacaatgctttgataaaatattttaagtatgagttatcagctctatgtcaattgatatttctgtgtagtatttatatttaaattatatttacctttttgcttattttacaaatattaagaaaatattctaacatttgataattttgaaatgattcatctttcagaaataaaagtatgaatct

SEQ ID NO: 7175 - DNA, 2875 bp, Homo sapiens
gtggcatccttccctttctaatcagagattttcttcctcagagattttggcctagatttgcaaaatgatgaccacatctttgatttgggggattgctatagcagcatgctgttgtctatggcttattcttggaattaggagaaggcaaacgggtgaaccacctctagagaatggattaattccatacctgggctgtgctctgcaatttggtgccaatcctcttgagttcctcagagcaaatcaaaggaaacatggtcatgtttttacctgcaaactaatgggaaaataygtccatttcatcacaaatcccttgtcatacmataaggtgttgtgccacggaaaatattttgattggaaaaaatttcactttgctacttctgcgaaggcatttgggcacagaagcattgacccgatggatggaaataccactgaaaacataaacgacactttcatcaaaaccctgcagggccatgccttgaattccctcacggaaagcatgatggaaaacctccaacgtatcatgagacctccagtctcctctaactcaaagaccgctgcctgggtgacagaagggatgtattctttctgctaccgagtgatgtttgaagctgggtatttaactatctttggcagagatcttacaaggcgggacacacagaaagcacatattctaaacaatcttgacaacttcaagcaattcgacaaagtctttccagccctggtagcaggcctccccattcacatgttcaggactgcgcacaatgcccgggagaaactggcagagagcttgaggcacgagaacctccaaaagagggaaagcatctcagaactgatcagcctgcgcatgtttctcaatgacactttgtccacctttgatgatctggagaaggccaagacacacctcgtggtcctctgggcatcgcaagcaaacaccattccagcgactttctggagtttatttcaaatgattaggaacccagaagcaatgaaagcagctactgaagaagtgaaaagaacattagagaatgctggtcaaaaagtcagcttggaaggcaatcctatttgtttgagtcaagcagaactgaatgacctgccagtattagatagtataatcaaggaatcgctgaggctttccagtgcctccctcaacatccggacagctaaggaggatttcactttgcaccttgaggacggttcctacaacatccgaaaagatgacatcatagctctttacccacagttaatgcacttagatccagaaatctacccagaccctttgacttttaaatatgataggtatcttgatgaaaacgggaagacaaagactaccttctattgtaatggactcaagttaaagtattactacatgccctttggatcgggagctacaatatgtcctggaagattgttcgctatccacgaaatcaagcaatttttgattctgatgctttcttattttgaattggagcttatagagggccaagctaaatgtccacctttggaccagtcccgggcaggcttgggcattttgccgccattgaatgatattgaatttaaatataaattcaagcatttgtgaatacatggctggaataagaggacactagatgatattacaggactgcagaacaccctcaccacacagtccctttggacaaatgcatttagtggtggtagaaatgattcaccaggtccaatgttgttcaccagtgcttgcttgtgaatcttaacattttggtgacagtttccagatgctatcacagactctgctagtgaaaagaactagtttctaggagcacaataatttgttttcatttgtataagtccatgaatgttcatatagccagggattgaagtttattattttcaaaggaaaacacctttattttattttttttcaaaatgaagatacacattacagccaggtgtggtagcaggcacctgtagtcttagctactcgagaggccaaagaaggaggatggcttgagcccaggagttcaagaccagcctggacagcttagtgagatcccgtctccgaagaaaagatatgtattctaattggcagattgttttttcctaaggaaactgctttatttttataaaactgcctgacaattatgaaaaaatgttcaaattcacgttctagtgaaactgcattatttgttgactagatggtggggttcttcgggtgtgatcatatatcataaaggatatttcaaatgattatgattagttatgtcttttaataaaaaggaaatatttttcaacttcttctatatccaaaattcagggctttaaacatgattatcttgatttcccaaaaacactaaaggtggttttattttcccttcatgttttaacttattgttgctgaaaactctatgtccggctttaactatcttctctatatttttatttcattcacattaatgagaagagttttctcagagattaaaaaaggtagtttttctgtcattgttaaatacacattatcactgaaaaaatgtagcttttatgtgatatgttttaaagttaaaactggatggaaatagccatttggaagctttggttatgaaacatgtggagtgtattaagtgcagcttgacattatgttttatttaaatgctttttatcgctaaatgacttgcagatgaaaaaaactaaggtgactcgagtgtttaaatgctgtgtacaacaatgctttgataaaatattttaagtatgagttatcagctctatgtcaattgatatttctgtgtagtatttatatttaaattatatttacctttttgcttattttacaaatattaagaaaatattctaacatttgataattttgaaatgattcatctttcagaaataaaagtatgaatct

SEQ ID NO: 7176 - DNA, 2755 bp, Homo sapiens
ttctaatcagagattttcttcctcagagattttggcctagatttgcaaaatgatgaccacatctttgatttgggggattgctatagcagcatgctgttgtctatggcttattcttggaattaggagaaggcaaacgggtgaaccacctctagagaatggattaattccatacctgggctgtgctctgcaatttggtgccaatcctcttgagttcctcagagcaaatcaaaggaaacatggtcatgtttttacctgcaaactaatgggaaaataygtccatttcatcacaaatcccttgtcatacmataaggtgttgtgccacggaaaatattttgattggaaaaaatttcactttgctacttctgcgaaggcatttgggcacagaagcattgacccgatggatggaaataccacttccctcacggaaagcatgatggaaaacctccaacgtatcatgagacctccagtctcctctaactcaaagaccgctgcctgggtgacagaagggatgtattctttctgctaccgagtgatgtttgaagctgggtatttaactatctttggcagagatcttacaaggcgggacacacagaaagcacatattctaagcctccccattcacatgttcaggactgcgcacaatgcccgggagaaactggcagagagcttgaggcacgagaacctccaaaagagggaaagcatctcagaactgatcagcctgcgcatgtttctcaatgacactttgtccacctttgatgatctggagaaggccaagacacacctcgtggtcctctgggcatcgcaagcaaacaccattccagcgactttctggagtttatttcaaatgattaggaacccagaagcaatgaaagcagctactgaagaagtgaaaagaacattagagaatgctggtcaaaaagtcagcttggaaggcaatcctatttgtttgagtcaagcagaactgaatgacctgccagtattagatagtataatcaaggaatcgctgaggctttccagtgcctccctcaacatccggacagctaaggaggatttcactttgcaccttgaggacggttcctacaacatccgaaaagatgacatcatagctctttacccacagttaatgcacttagatccagaaatctacccagaccctttgacttttaaatatgataggtatcttgatgaaaacgggaagacaaagactaccttctattgtaatggactcaagttaaagtattactacatgccctttggatcgggagctacaatatgtcctggaagattgttcgctatccacgaaatcaagcaatttttgattctgatgctttcttattttgaattggagcttatagagggccaagctaaatgtccacctttggaccagtcccgggcaggcttgggcattttgccgccattgaatgatattgaatttaaatataaattcaagcatttgtgaatacatggctggaataagaggacactagatgatattacaggactgcagaacaccctcaccacacagtccctttggacaaatgcatttagtggtggtagaaatgattcaccaggtccaatgttgttcaccagtgcttgcttgtgaatcttaacattttggtgacagtttccagatgctatcacagactctgctagtgaaaagaactagtttctaggagcacaataatttgttttcatttgtataagtccatgaatgttcatatagccagggattgaagtttattattttcaaaggaaaacacctttattttattttttttcaaaatgaagatacacattacagccaggtgtggtagcaggcacctgtagtcttagctactcgagaggccaaagaaggaggatggcttgagcccaggagttcaagaccagcctggacagcttagtgagatcccgtctccgaagaaaagatatgtattctaattggcagattgttttttcctaaggaaactgctttatttttataaaactgcctgacaattatgaaaaaatgttcaaattcacgttctagtgaaactgcattatttgttgactagatggtggggttcttcgggtgtgatcatatatcataaaggatatttcaaatgattatgattagttatgtcttttaataaaaaggaaatatttttcaacttcttctatatccaaaattcagggctttaaacatgattatcttgatttcccaaaaacactaaaggtggttttattttcccttcatgttttaacttattgttgctgaaaactctatgtccggctttaactatcttctctatatttttatttcattcacattaatgagaagagttttctcagagattaaaaaaggtagtttttctgtcattgttaaatacacattatcactgaaaaaatgtagcttttatgtgatatgttttaaagttaaaactggatggaaatagccatttggaagctttggttatgaaacatgtggagtgtattaagtgcagcttgacattatgttttatttaaatgctttttatcgctaaatgacttgcagatgaaaaaaactaaggtgactcgagtgtttaaatgctgtgtacaacaatgctttgataaaatattttaagtatgagttatcagctctatgtcaattgatatttctgtgtagtatttatatttaaattatatttacctttttgcttattttacaaatattaagaaaatattctaacatttgataattttgaaatgattcatctttcagaaataaaagtatgaatct

SEQ ID NO: 7177 - DNA, 2823 bp, Homo sapiens
gtggcatccttccctttctaatcagagattttcttcctcagagattttggcctagatttgcaaaatgatgaccacatctttgatttgggggattgctatagcagcatgctgttgtctatggcttattcttggaattaggagaaggcaaacgggtgaaccacctctagagaatggattaattccatacctgggctgtgctctgcaatttggtgccaatcctcttgagttcctcagagcaaatcaaaggaaacatggtcatgtttttacctgcaaactaatgggaaaataygtccatttcatcacaaatcccttgtcatacmataaggtgttgtgccacggaaaatattttgattggaaaaaatttcactttgctacttctgcgaaggcatttgggcacagaagcattgacccgatggatggaaataccactgaaaacataaacgacactttcatcaaaaccctgcagggccatgccttgaattccctcacggaaagcatgatggaaaacctccaacgtatcatgagacctccagtctcctctaactcaaagaccgctgcctgggtgacagaagggatgtattctttctgctaccgagtgatgtttgaagctgggtatttaactatctttggcagagatcttacaaggcgggacacacagaaagcacatattctaaacaatcttgacaacttcaagcaattcgacaaagtctttccagccctggtagcaggcctccccattcacatgttcaggactgcgcacaatgcccgggagaaactggcagagagcttgaggcacgagaacctccaaaagagggaaagcatctcagaactgatcagcctgcgcatgtttctcaatgacactttgtccacctttgatgatctggagaaggccaagacacacctcgtggtcctctgggcatcgcaagcaaacaccattccagcgactttctggagtttatttcaaatgattaggaacccagaagcaatgaaagcagctactgaagaagtgaaaagaacattagagaatgctggtcaaaaagtcagcttggaaggcaatcctatttgtttgagtcaagcagaactgaatgacctgccagtattagatagtataatcaaggaatcgctgaggctttccagtgcctccctcaacatccggacagctaaggaggatttcactttgcaccttgaggacggttcctacaacatccgaaaagatgacatcatagctctttacccacagttaatgcacttagatccagaaatctacccagaccctttgacttttaaatatgataggtatcttgatgaaaatacatgccctttggatcgggagctacaatatgtcctggaagattgttcgctatccacgaaatcaagcaatttttgattctgatgctttcttattttgaattggagcttatagagggccaagctaaatgtccacctttggaccagtcccgggcaggcttgggcattttgccgccattgaatgatattgaatttaaatataaattcaagcatttgtgaatacatggctggaataagaggacactagatgatattacaggactgcagaacaccctcaccacacagtccctttggacaaatgcatttagtggtggtagaaatgattcaccaggtccaatgttgttcaccagtgcttgcttgtgaatcttaacattttggtgacagtttccagatgctatcacagactctgctagtgaaaagaactagtttctaggagcacaataatttgttttcatttgtataagtccatgaatgttcatatagccagggattgaagtttattattttcaaaggaaaacacctttattttattttttttcaaaatgaagatacacattacagccaggtgtggtagcaggcacctgtagtcttagctactcgagaggccaaagaaggaggatggcttgagcccaggagttcaagaccagcctggacagcttagtgagatcccgtctccgaagaaaagatatgtattctaattggcagattgttttttcctaaggaaactgctttatttttataaaactgcctgacaattatgaaaaaatgttcaaattcacgttctagtgaaactgcattatttgttgactagatggtggggttcttcgggtgtgatcatatatcataaaggatatttcaaatgattatgattagttatgtcttttaataaaaaggaaatatttttcaacttcttctatatccaaaattcagggctttaaacatgattatcttgatttcccaaaaacactaaaggtggttttattttcccttcatgttttaacttattgttgctgaaaactctatgtccggctttaactatcttctctatatttttatttcattcacattaatgagaagagttttctcagagattaaaaaaggtagtttttctgtcattgttaaatacacattatcactgaaaaaatgtagcttttatgtgatatgttttaaagttaaaactggatggaaatagccatttggaagctttggttatgaaacatgtggagtgtattaagtgcagcttgacattatgttttatttaaatgctttttatcgctaaatgacttgcagatgaaaaaaactaaggtgactcgagtgtttaaatgctgtgtacaacaatgctttgataaaatattttaagtatgagttatcagctctatgtcaattgatatttctgtgtagtatttatatttaaattatatttacctttttgcttattttacaaatattaagaaaatattctaacatttgataattttgaaatgattcatctttcagaaataaaagtatgaatct

SEQ ID NO: 7178 - DNA, 700 bp, Homo sapiens
cgcggtgtccggcagtagagctcgctgcagatccgggctctgaccatgatttggcgccgcgcggcgctggcggggacgcggctggtttggagcaggagcggctcggcaggctggcttgacagggcggcgggagctgcgggagctgcggcagctgcggcctctgggatggagagcaatacatcatcatctttggagaatttagcgacggcgcctgtgaaccagatccaagaaacaatttctgataattgtgtggtgattttctcaaaaacatcctgttcttactgtacaatggcaaaaaagcttttccatgacatgaatgttaactataaagtggtggaactggacctgcttgaatatggaaaccagttccaagatgctctttacaaaatgactggtgaaagaactgttccaagaatatttgtcaatggtacttttattggaggtgcaactgacactcataggcttcacaaagaaggaaaattgctcccactagttcatcagtgttatttaaaaaaaagtaagaggaargaatttcagtgatgtttatactaataagtttgctagtacagtgtcagttatttaaagtggtaatgcccgataatgtcttttaaatgtttgaggatgttttaaatacatgcattgtcttcacgaagaagatgtaaaaataatgaacaataaattgcggtggaaacctcttctt

SEQ ID NO: 7179 - DNA, 1136 bp, Homo sapiens
aaggctattattaccaccactgagtggcttaaataatcctgtcaacagcaatcgcccatttccaaagccatggtgaaacatctctgtgctaatttcttttgttttgtttcctaattttttttttttttggcaggtggtrggaaataatctttgtcttctttggagtaaaccttcaacaccggattttttcttttaattatggatgtaaaccccaatatccccataatttacattgggtctcgaccaattgcctaattataagaggatatatttaggctcttatttcatccacacaaaaacttgtgtaacaggtagttggaaacatctgaggcaccactttgattctgttttggatggtcatgttttttctcctccgtttccccagcatgtctgccaccatcctcatgcactgcttccaagtgcctgggagcctttatgagcgtccctaaacctaaaagaatccagaggcggggctcggatgaaccctcgagataagcaagtgagccgcttctcccctstaaaggatgtttacacgtgggtggcactcgctggaakccagcgctcgggcagccctgggaggacgcgctcagctgcgtggaggatggagagcaatacatcatcatctttggagaatttagcgacggcgcctgtgaaccagatccaagaaacaatttctgataattgtgtggtgattttctcaaaaacatcctgttcttactgtacaatggcaaaaaagcttttccatgacatgaatgttaactataaagtggtggaactggacctgcttgaatatggaaaccagttccaagatgctctttacaaaatgactggtgaaagaactgttccaagaatatttgtcaatggtacttttattggaggtgcaactgacactcataggcttcacaaagaaggaaaattgctcccactagttcatcagtgttatttaaaaaaaagtaagaggaargaatttcagtgatgtttatactaataagtttgctagtacagtgtcagttatttaaagtggtaatgcccgataatgtcttttaaatgtttgaggatgttttaaatacatgcattgtcttcacgaagaagatgtaaaaataatgaacaataaattgcggtggaaacctcttctt

SEQ ID NO: 7180 - DNA, 3585 bp, Homo sapiens
agcccacatttaaactgctgcctgcctgtgcagcagctgaggaaccgtggatttcatattatagactaaaaccccattaaaactgctcaaaatccttcctgcagctgccaggcaacaacgaaagaagagaggtaaatcctattcttttccaatacaactgaagcactacattttagctctggctgctttacattgcagctcagtgttattagtagaaatayggatactgagacgagaacacagcactgcattgtccagccaggaaaatagcagatgtaaaaagcttcaatgcatcaactgtcgggaagagtcaacagtgctacaagcagaacgggcaactacagctcttttgtttaacgaaagagagaaaatgaaagaaagggaaaatttcagaagactaggacccatatgaacaaggagggtaactcgaagacaagcagacagatggacactttggatactgtgaaaagcaatcgcaggaggcagactgttgggggatgtgcgcatgttcgatagcatcttttttgctgaagtgatggcgtgccaaaagtattttcagtgggcataatcctcttcacataaatggcctgaccaaggaagaatgactacaagagagacaatgtgactgaattagaaaatgattgccaaagaatagtattaaggagaagaaaacatttttggtcaccaatctctcatataccactactggatatttacaacatgcttcagtggaggagaagacactgctgctttgcaaagatgacctggaatgccaaaaggtctctgttccgcactcatcttattggagtactttctctagtgtttctttttgctatgtttttgtttttcaatcatcatgactggctgccaggcagagctggattcaaagaaaaccctgtgacatacactttccgaggatttcggtcaacaaaaagtgagacaaaccacagctcccttcggaacatttggaaagaaacagtccctcaaaccctgaggcctcaaacagcaactaactctaataacacagacctgtcaccacaaggagttacaggcctggagaatacacttagtgccaatggaagtatttacaatgaaaaaggtactggacatccaaattcttaccatttcaaatatattattaatgagcctgaaaaatgccaagagaaaagtccttttttaatactactaatagcygcagagcctggacaaatagaagctagaagagctattcggcaaacttggggcaatgaaagtctagcacctggtattcaaatcacaagaatatttttgttgggcttaagtattaagctaaatggctaccttcaacgtgcaatactggaagaaagcagacartatcatgatataattcaacaggaatacttagatacgtactataatttgaccattaaaacactaatgggcatgaactgggttgcaacatactgtccacatattccatatgttatgaaaactgacagtgacatgtttgtcaacactgaatatttaatcaataagttactgaagccagatctgcctcccagacataactatttcactggttacctaatgcgaggatatgcacccaatcgaaacaaagatagcaagtggtacatgccaccagacctctacccaagtgagcgttatcctgtcttctgttctggaactggttatgttttttctggagatctggcagaaaagatttttaaagtttctttaggtatccgccgtttgcacttggaagatgtatatgtagggatctgtcttgccaagttgagaattgatcctgtaccccctcccaatgagtttgtgttcaatcactggcgagtctcttattcgagctgtaaatacagccacctaattacctctcatcagttccagcctagtgaactgataaaatactggaaccatttacaacaaaataagcacaatgcctgtgccaacgcagcaaaagaaaaggcaggcaggtatcgccaccgtaaactacattagaaaagacaattttttttcaaatgtgcaatttgtaaatattgctaaaagcatgtatagttagaactgattacatccgtaggacaagttttagttaaaactcatcacataaagaaattcaagaagtatttttttaatttctgaagaagttaattcttaaaactataacattatataacaaaaaaggtttcccaaaacaatctatttaaaaaactgtataaggagattctgtgtattaacaygcaataacaagcatgcataaatcaatggttcaagtcttctgttaggggccaataaaatgtatctgcatatgttttccacataaattttaattcaagaaatgacagtcaaaagatccttcattttagattaagcttttcattttaatatataatttaatgtaaataaaacatcactatcaattttaaggaaactttttaattgtgcaaaggataaattttttgacctattttagggttctaaatgcaataagatttagttgagttattccacaaacacattataaagttcagatgtttcatcaatgcagttctcacgaaagtatttactttttaaaaataactgagatattattttaaatttcttttattaatactttcttttattaatatatgggggaaaattattttgacatgacgtggtaaaatgtgaaaaactaatgtgtctcaggctcaagtttttatagttattaaatgtttcaaaatagacaagttttgtttcctcattgatgttaagaaccaaactcctatttcaatgagttattggattagaccaattactgcactcttaaacagcaccaccatttaatttcatgtatatctaacttcgaatatatctgtaaagataatcgaagcaaaagtaatcacttaaaggcacaaataggatgtactgttgaaaaagataaagagtgcaggtgcagtttcattcaacacatttttaagatgcatgtctgccaaaatgcaacatacgggaagtttatttcctgacagcaggtgtacacatgccaacacttaatcattttatggcmcctatttctttcttggagtgccaagtttgcaaacctgcagtttttaatttggtagatgacaaatattctgaatcaccaattaaaaacctttttgggagggatggggaaaactacaaacgtttgacaaacacaattctaggatgaacaatgtatacaatgcacttttatgaagtttttaaaaataaaggaaaacaaaaaactttactgagtgttataagtattttcacaataattttgtttgactccatcatgaattttaaaatcaagaaataccaacctactaactaaaatagtgtttttattccatacaagtatgtaaatctgtcaatcttaatttagtcagaatgtttcttaattctaataacaatcatttttacctcttattctattattaagggataaatcaccagaagagaattgtaacatttgtgaaacttgaaaacactaaaactgtttaagtgcttatctccatttcaaatcagtagcctaagtgttctactctaaatcaagtgattctgagagctgatctatgtaacacaccccagctcttg

SEQ ID NO: 7181 - DNA, 2174 bp, Homo sapiens
gactacgtgggtctggagctgactgccgtcctgacacgtcctagagctgcaagtcctgccagagagccaccatgacctctcagcctctcaggctagcagaagagtatggcccaagtcctggggagtctgaactggctgtgaacccctttgatgggcttcccttctcttcccgctactatgagctgctgaagcagcgccaagccttgcccatctgggctgctcgctttaccttcttggagcagttggagagtaaccccactggagtggtgctggtgtctggggagcctggttctggcaagagcacccagatccctcagtggtgtgcagagtttgcgctggccagagggttccagaaaggacaggttactgttactcagccctaccctcttgcagcccggagcctggctctgcgggttgctgatgagatggacctgaccctgggtcatgaggttggatacagcatcccccaggaggactgcacggggcccaacaccctgctcaggttctgctgggacaggctgcttctgcaggaggtggcctcgacscgaggcactggagcctggggcgtgctggtactagatgaggctcaggagcggtcggtggcatcagattcactccaggggctactgcaagatgccaggctggaaaaacttycgggggacctcagagtggttgtggttactgacccagcccttgaacctaagctccgagctttctggggcaatcctcctattgtgcatatacccagagagcctggtgagagaccttcccccatctactgggacaccatcccacctgatcgggtggaagctgcctgccaagcagtgcttgaattgtgtcggaaggagcttccaggagatgtgctagtgttcctgcccagtgaggaggaaatttccctgtgctgtgaatccttgtccagggaggtagagtccttgcttctccaagggcttccaccacgagtactgccccttcacccagactgtggacgagccgttcaggctgtgtatgaggacatggatgcccgaaaggttgtggtcactcactggctggctgacttctccttctccctcccttccatccaacatgtcatcgactcaggactggagctccgaagtgtttacaatcctaggatccgagcagaattccaagtgttgaggccaatcagcaagtgtcaggcagaggcaagacgattgcgagcaagagggttcccaccaggatcctgcctctgcctgtatcctaagtccttcttagaactagaagctccaccattgccacaacccagggtgtgtgaggagaatctgagctccctggtgttactactaaaaaggagacagattgcagagccaggggagtgtcacttcctggaccagcctgctccagaagcactgatgcaagccctggaagatttagactatctggcagccctggatgatgatggggacctgtcagatctgggtgtcatactatcagaattccctctggcccctgagctggccaaagccctgctggcctcatgcgagtttgactgtgtggacgagatgctcaccctggctgccatgctcacagctgcccctgggtttacccgtcctccactcagtgcagaagaagctgccctgcgtcgggccctggaacacacggatggtgaccacagttctctgatccaggtgtatgaagcctttatacaaagtggagcagatgaggcttggtgccaggctcgaggtctgaattgggcagcattgtgccaagcccataaacttcggggagaactcctagaactcatgcaacgaattgaacttcccttgtccctaccagcctttggctctgagcagaatcgcagagaccttcagaaagcactggtgtcaggatactttctcaaggtggccagagacacagacgggactggaaattacctwctcctaacccataagcatgtggcccagctctcctcatactgctgctaccgaagccgcagagctcctgccagacccccaccatgggtgctctaccacaatttcaccatatccaaagacaactgcctttccattgtttctgagattcaaccacagattgagagcagagaccttctgaaccagctaagggaaggaatggcagattctacagcagggagcaaatcatcctcagcccaggagttcagagatccctgtgtcctgcag

SEQ ID NO: 7182 - DNA, 2540 bp, Homo sapiens
gactacgtgggtctggagctgactgccgtcctgacacgtcctagagctgcaagtcctgccagagagccaccatgacctctcagcctctcaggctagcagaagagtatggcccaagtcctggggagtctgaactggctgtgaacccctttgatgggcttcccttctcttcccgctactatgagctgctgaagcagcgccaagccttgcccatctgggctgctcgctttaccttcttggagcagttggagagtaaccccactggagtggtgctggtgtctggggagcctggttctggcaagagcacccagatccctcagtggtgtgcagagtttgcgctggccagagggttccagaaaggacaggttactgttactcagccctaccctcttgcagcccggagcctggctctgcgggttgctgatgagatggacctgaccctgggtcatgaggttggatacagcatcccccaggaggactgcacggggcccaacaccctgctcaggttctgctgggacaggctgcttctgcaggaggtggcctcgacscgaggcactggagcctggggcgtgctggtactagatgaggctcaggagcggtcggtggcatcagattcactccaggggctactgcaagatgccaggctggaaaaacttycgggggacctcagagtggttgtggttactgacccagcccttgaacctaagctccgagctttctggggcaatcctcctattgtgcatatacccagagagcctggtgagagaccttcccccatctactgggacaccatcccacctgatcgggtggaagctgcctgccaagcagtgcttgaattgtgtcggaaggagcttccaggagatgtgctagtgttcctgcccagtgaggaggaaatttccctgtgctgtgaatccttgtccagggaggtagagtccttgcttctccaagggcttccaccacgagtactgccccttcacccagactgtggacgagccgttcaggctgtgtatgaggacatggatgcccgaaaggttgtggtcactcactggctggctgacttctccttctccctcccttccatccaacatgtcatcgactcaggactggagctccgaagtgtttacaatcctaggatccgagcagaattccaagtgttgaggccaatcagcaagtgtcaggcagaggcaagacgattgcgagcaagagggttcccaccaggatcctgcctctgcctgtatcctaagtccttcttagaactagaagctccaccattgccacaacccagggtgtgtgaggagaatctgagctccctggtgttactactaaaaaggagacagattgcagagccaggggagtgtcacttcctggaccagcctgctccagaagcactgatgcaagccctggaagatttagactatctggcagccctggatgatgatggggacctgtcagatctgggtgtcatactatcagaattccctctggcccctgagctggccaaagccctgctggcctcatgcgagtttgactgtgtggacgagatgctcaccctggctgccatgctcacagctgcccctgggtttacccgtcctccactcagtgcagaagaagctgccctgcgtcgggccctggaacacacggatggtgaccacagttctctgatccaggtgtatgaagcctttatacaaagtggagcagatgaggcttggtgccaggctcgaggtctgaattgggcagcattgtgccaagcccataaacttcggggagaactcctagaactcatgcaacgaattgaacttcccttgtccctaccagcctttggctctgagcagaatcgcagagaccttcagaaagcactggtgtcaggatactttctcaaggtggccagagacacagacgggactggaaattacctwctcctaacccataagcatgtggcccagctctcctcatactgctgctaccgaagccgcagagctcctgccagacccccaccatgggtgctctaccacaatttcaccatatccaaagacaactgcctttccattgtttctgagattcaaccacagatgctggtggaattggcccctccatacttcctgagtaacttgcctcccagtgagagcagagaccttctgaaccagctaagggaaggaatggcagattctacagcagggagcaaatcatcctcagcccaggagttcagagatccctgtgtcctgcagtgacctgcctgcctatggaatggagctgggttcatctcatcacattagattatccctcagggtgacaccaaagcacccagacagatttagaagcccaaagtttagggtcaaatgtaaaccctggaacctgagtcccaagaaatggtagactgggaatggaaagaatggggtaaaccacagtctacatagggaaggactctttccttagccttctcttattgattggagagggactgacatgctcctcattctcttaactttgccaaacccattcttgtactccsttgtgatctataaaagatttttctatgatgccaa

SEQ ID NO: 7183 - DNA, 5757 bp, Homo sapiens
cggccgcgcccgcgagccgtgagcgatgattggctgcgccacggcggcgggcggtccgtgggcgcacacaccctccccgcgcagccaatgggcgtgcgcacgtcwctgatccggaggcccgcgggccggcagcccctcaataagccacattgttgcatgaaactccggcgcaggagtcccgggctgccgctggcaacatcgtgtcacccagctaagaaaatccgcgggcccgagccacgcgcctgtgaatcggagaggtcccactgcccgagtggagccgggctgagattcttctcaagttgagcctcagtgatcctgtggccgaagttagcgccttgacgtgggacaaccggacacgtcgccaggasagaactgaggcgccttctagcagttgtgacgccaaaatcacgtctccggagacccgcgccctccgccagccgggcgcaccctcgccggtagccttctttgtgcgccgtccggactcccagctcccggcccggcagccgagccccagcacaaagcagtcggaccgcgccgcccgcctcccctctcgcgtctccgcctcggtttcccaactctgcgccgtcgggccgcggcaggatgattgcctcgcatctgcttgcctacttcttcacggagctcaaccatgaccaagtgcagaaggttgaccagtatctctaccacatgcgcctctctgatgagaccctcttggagatctctaagcggttccgcaaggagatggagaaagggcttggagccaccactcaccctactgcagcagtgaagatgctgcccacctttgtgaggtccactccagatgggacagaacacggagagttcctggctctggatcttggagggaccaacttccgtgtgctttgggtgaaagtaacggacaatgggctccagaaggtggagatggagaatcagatctatgccatccctgaggacatcatgcgaggcagtggcacccagctgtttgaccacattgccgaatgcctggctaacttcatggataagctacawatcaaagacaagaagcycccactgggttttaccttctcgttcccctgccaccagactaaactagacgagagtttcctggtctcatggaccaagggattcaagtccagtggagtggaaggcagagacgttgtggctctgatccggaaggccatccagaggagaggggactttgatatcgacattgtggctgtggtgaatgacacagttgggaccatgatgacctgtggttatgatgaccacaactgtgagattggtctcattgtgggcacgggcagcaacgcctgctacatggaagagatgcgccacatcgacatggtggaaggcgaygaggggcggatgtgtatcaatatggagtggggggccttcggggacgatggctcgctcaacgacattcgcactgagtttgaccaggagattgacatgggctcactgaacccgggaaagcaactgtttgagaagatgatcagtgggatgtacatgggggagctggtgaggcttatcctggtgaagatggycaaggaggagctgctctttgrggggaagctcagcccagagcttctcaacaccrgtcgctttgagaccaaagacatctcagacattgaaggggagaaggatggcatccggaaggcccgtgaggtcctgatgcggttgggcctggacccgactcaggaggactgcgtggccactcaccggatctgccagatcgtgtccacacgctccgccagcctgtgckcagccaccctggccgccgtgctgcagcgcatcaaggagaacaaaggcgaggagcggctgcgctctactattggggtcgacggttccgtctacaagaaacacccccattttgccaagcgtctacataagaccgtgcggcggctggtgcccggctgcgatgtccgcttcctccgctccgaggatggcagtggcaaaggtgcagccatggtgacagcagtggcttaccggctggccgatcaacaccgtgcccgccagaagacattagagcatctgcagctgagccatgaccagctgctggaggtcaagaggaggatgaaggtagaaatggagcraggtctgagcaaggagactcatgccagtgcccccgtcaagatgctgcccacctacgtgtgtgctaccccggacggcacagagaaaggggacttcttggccttggaccttggaggaacaaatttccgggtcctgctggtccrtgttcggaatgggaagtggggtggagtggagatgcacaacaagatctacgccatcccgcaggaggtcatgcacggcaccggggacgagctctttgaccacattgtccagtgcatcgcggacttcctcgagtacatgggcatgaagggcgtgtccctgcctctgggttttaccttctccttcccctgccagcagaacagcctggacgagagcatcctcctcaagtggacaaaaggcttcaaggcatctggctgcgagggcgaggacgtggtgaccctgctgaaggaagcgatccaccggcgagaggagtttgacctggatgtggttgctgtggtgaacgacacagtcggaactatgatgacctgtggctttgaagaccctcactgtgaagttggcctcattgttggcacgggcagcaatgcctgctacatggaggagatgcgcaaygtggaactggtggaaggagaagaggggcggatgtgtgtgaacatggaatggggggccttcggggacaatggatgcctagatgacttccgcacagaatttgatgtggctgtggatgagctttcactcaacccsggcaagcagaggttcgagaaaatgatcagtggaatgtacctgggtgagattgtccgtaacattctcatcgatttcaccaagcgtggactrctcttccgaggccgcatctcagagcrgctcaagacaaggggcatctttgaaaccaagttcttgtctcagattgagaggtgagagcttaggccatcctgcaacacttagggcttgagagcacctgtgacgacagcatcattgttaaggaggtgtgcactgtggtggcccggcgggcagcccagctctgtggcgcaggcatggccgctgtggtggacargatacgagaaaaccgtgggctggacgctctcaaagtgacagtgggtgtggatgggaccctctacaagctacatcctcactttgccaaagtcatgcatgagacagtgaaggacctggctccgaaatgtgatgtgtctttcctgcagtcagaggatggcagcgggaagggggcggcgctcatcactgctgtggcctgccgcatccgtgaggctggacagcgatagaacccctgaaatcggaagggacttcctctttctctccttcttccctgttttaaattataagatgtcatccccttgtgtcagagacagaccccttggcttttgcttggcagagaggaccccactggactgggttttgtctctgcatctcattgtagagcttggtggctgagcttggccctattaagataaatagagttccaaataaggatttgttcacatgcatcataaccattcccattggttctcctaaaacrtgaaaatkatctcccttagtaatcccccttgccaaattccatgtccctgtataattctacaggatggggacactaatgaagatacggttgcttcaccttggagcctgaacatgacatttctaagtggggtgcatcccccagcactgatgttgttactgattctcctgtcagagatctgggaggtctccactgaggatgtgagcctgattatcctataggcagacgtggggagggtggaggggtgacagtggaggaaaatccatggatatccacgcagcagcccctctttaacctcatmtacaagcatttgccctgtggattccagcatttgccattcctggaatcaaggaatcctgagtctgggcaatgaaaccaaagccaggagttgacgcatcctgcagttgggccagctgtygcatctcagcggggcgcacatgttatccacaagcaatggacctttggggaagggggagtttttagtttgttttacaaatttttcctgcaaaagtggaatcactgtattttcattttaatttatatttgaaattttatttagttcttgagtagatctgcttcttcatcttgacatgtaatgaatggtcagttgtacgtaatgtatttatatgttaatttgttatgtatatagatgtgcaagtcttgtcagaattggcctcagtgtagttaaagggcagaaggggaagatactgactagtcatagaaatacctcattcgcctgtgggaagagaagggaagcctcttcagggtgagtgaatggcaaagcggttgcttctggctcctccttcccctgtggtcttggaagtgtgtggaaggcagggacagagatggaggccgagccaatagactgaagagaccacagcaattggctcctccatctagagattttcttggcagtattccatgggatgttaagcaaaggaaaccaaaggaatcgtttcaaatggactcatggcttagaaatctttattcttagggcagtcagtagtattctaaagctttctgacaagataaaggaagtcaccaaaatttctttttttaaattgtatctaatcctcaacaacaaaccaaaacagaacaattaaacagccaaataaaacctcagggacaacatttttggtgtatttgagccctcccagcaagtttcaycttgggtttgtattttaaatgttttacaagaattgtccatgtgcttccctaggctgagctggcattggtctgctgacctgtttttgtgtttttcttttttttatacacaacatttatttcaaactattgggagggatgagagtggcttaaaaacttccatccctacttttcaagagtgcagttgattctgaatctgaaagcccgcctctgtcctaaaatacaaacaagcacagacattaaacctggatactatatgataaagagggatgtaactattgaattggatacaaggatcagaatggaaagaaactcacgatgaaattgaacctggtttttgtatatttatcaaacttgtgctgagaatagtgtctgattatacgacttttaagcaaagttgggtgtaattaggtgaaaacagcccaggtcctcccgggagcacagaggggctaggggctggtccttctcgtttgctctagtcttgctttgctgtctggtgtagctcctctgctgctcccatctgcactaattgacccaaaacgtgggtatttcctgctacacaaaagccaaaaggtttcatgtagattttagttcactaaagggtgcccacaaaatagagattaattttaacttaaattttaagcttgaagattaggtactatctgtgaagttacacttttttttttttttttaaaggtagagatgtgtgtgtgtgtaggtattaaagatgtgttgttggtttccaaaaaggaacmctggaaaataaattttgaatgtttatgttctcagaatcaggttgacagtcccttgctgacatggctttgctttgtgtaaatacagtggatctcaatcttcggggtgtgatgaatagcgaatcatctcaaatccttgagcactcagtctagtgaagatgttgtcattatgtacaatacataactagtttaattaactatgtgatgttaactattattaataaattttaacattttccaaaataatcaaat

SEQ ID NO: 7184 - DNA, 5585 bp, Homo sapiens
tgttgcatgaaactccggcgcaggagtcccgggctgccgctggcaacatcgtgtcacccagctaagaaagtcccactgcccgagtggagccgggctgagattcttctcaagttgagcctcagtgatcctgtggccgaagttagcgccttgacgtgggacaaccggacacgtcgccaggasagaactgaggcgccttctagcagttgtgacgccaaaatcacgtctccggagacccgcgccctccgccagccgggcgcaccctcgccggtagccttctttgtgcgccgtccggactcccagctcccggcccggcagccgagccccagcacaaagcagtcggaccgcgccgcccgcctcccctctcgcgtctccgcctcggtttcccaactctgcgccgtcgggccgcggcaggatgattgcctcgcatctgcttgcctacttcttcacggagctcaaccatgaccaagtgcagaaggttgaccagtatctctaccacatgcgcctctctgatgagaccctcttggagatctctaagcggttccgcaaggagatggagaaagggcttggagccaccactcaccctactgcagcagtgaagatgctgcccacctttgtgaggtccactccagatgggacagaacacggagagttcctggctctggatcttggagggaccaacttccgtgtgctttgggtgaaagtaacggacaatgggctccagaaggtggagatggagaatcagatctatgccatccctgaggacatcatgcgaggcagtggcacccagctgtttgaccacattgccgaatgcctggctaacttcatggataagctacawatcaaagacaagaagcycccactgggttttaccttctcgttcccctgccaccagactaaactagacgagagtttcctggtctcatggaccaagggattcaagtccagtggagtggaaggcagagacgttgtggctctgatccggaaggccatccagaggagaggggactttgatatcgacattgtggctgtggtgaatgacacagttgggaccatgatgacctgtggttatgatgaccacaactgtgagattggtctcattgtgggcacgggcagcaacgcctgctacatggaagagatgcgccacatcgacatggtggaaggcgaygaggggcggatgtgtatcaatatggagtggggggccttcggggacgatggctcgctcaacgacattcgcactgagtttgaccaggagattgacatgggctcactgaacccgggaaagcaactgtttgagaagatgatcagtgggatgtacatgggggagctggtgaggcttatcctggtgaagatggycaaggaggagctgctctttgrggggaagctcagcccagagcttctcaacaccrgtcgctttgagaccaaagacatctcagacattgaaggggagaaggatggcatccggaaggcccgtgaggtcctgatgcggttgggcctggacccgactcaggaggactgcgtggccactcaccggatctgccagatcgtgtccacacgctccgccagcctgtgckcagccaccctggccgccgtgctgcagcgcatcaaggagaacaaaggcgaggagcggctgcgctctactattggggtcgacggttccgtctacaagaaacacccccattttgccaagcgtctacataagaccgtgcggcggctggtgcccggctgcgatgtccgcttcctccgctccgaggatggcagtggcaaaggtgcagccatggtgacagcagtggcttaccggctggccgatcaacaccgtgcccgccagaagacattagagcatctgcagctgagccatgaccagctgctggaggtcaagaggaggatgaaggtagaaatggagcraggtctgagcaaggagactcatgccagtgcccccgtcaagatgctgcccacctacgtgtgtgctaccccggacggcacagagaaaggggacttcttggccttggaccttggaggaacaaatttccgggtcctgctggtccrtgttcggaatgggaagtggggtggagtggagatgcacaacaagatctacgccatcccgcaggaggtcatgcacggcaccggggacgagctctttgaccacattgtccagtgcatcgcggacttcctcgagtacatgggcatgaagggcgtgtccctgcctctgggttttaccttctccttcccctgccagcagaacagcctggacgagagcatcctcctcaagtggacaaaaggcttcaaggcatctggctgcgagggcgaggacgtggtgaccctgctgaaggaagcgatccaccggcgagaggagtttgacctggatgtggttgctgtggtgaacgacacagtcggaactatgatgacctgtggctttgaagaccctcactgtgaagttggcctcattgttggcacgggcagcaatgcctgctacatggaggagatgcgcaaygtggaactggtggaaggagaagaggggcggatgtgtgtgaacatggaatggggggccttcggggacaatggatgcctagatgacttccgcacagaatttgatgtggctgtggatgagctttcactcaacccsggcaagcagaggttcgagaaaatgatcagtggaatgtacctgggtgagattgtccgtaacattctcatcgatttcaccaagcgtggactrctcttccgaggccgcatctcagagcrgctcaagacaaggggcatctttgaaaccaagttcttgtctcagattgagagtgactgcctggccctgctgcaagtccgagccatcctgcaacacttagggcttgagagcacctgtgacgacagcatcattgttaaggaggtgtgcactgtggtggcccggcgggcagcccagctctgtggcgcaggcatggccgctgtggtggacargatacgagaaaaccgtgggctggacgctctcaaagtgacagtgggtgtggatgggaccctctacaagctacatcctcactttgccaaagtcatgcatgagacagtgaaggacctggctccgaaatgtgatgtgtctttcctgcagtcagaggatggcagcgggaagggggcggcgctcatcactgctgtggcctgccgcatccgtgaggctggacagcgatagaacccctgaaatcggaagggacttcctctttctctccttcttccctgttttaaattataagatgtcatccccttgtgtcagagacagaccccttggcttttgcttggcagagaggaccccactggactgggttttgtctctgcatctcattgtagagcttggtggctgagcttggccctattaagataaatagagttccaaataaggatttgttcacatgcatcataaccattcccattggttctcctaaaacrtgaaaatkatctcccttagtaatcccccttgccaaattccatgtccctgtataattctacaggatggggacactaatgaagatacggttgcttcaccttggagcctgaacatgacatttctaagtggggtgcatcccccagcactgatgttgttactgattctcctgtcagagatctgggaggtctccactgaggatgtgagcctgattatcctataggcagacgtggggagggtggaggggtgacagtggaggaaaatccatggatatccacgcagcagcccctctttaacctcatmtacaagcatttgccctgtggattccagcatttgccattcctggaatcaaggaatcctgagtctgggcaatgaaaccaaagccaggagttgacgcatcctgcagttgggccagctgtygcatctcagcggggcgcacatgttatccacaagcaatggacctttggggaagggggagtttttagtttgttttacaaatttttcctgcaaaagtggaatcactgtattttcattttaatttatatttgaaattttatttagttcttgagtagatctgcttcttcatcttgacatgtaatgaatggtcagttgtacgtaatgtatttatatgttaatttgttatgtatatagatgtgcaagtcttgtcagaattggcctcagtgtagttaaagggcagaaggggaagatactgactagtcatagaaatacctcattcgcctgtgggaagagaagggaagcctcttcagggtgagtgaatggcaaagcggttgcttctggctcctccttcccctgtggtcttggaagtgtgtggaaggcagggacagagatggaggccgagccaatagactgaagagaccacagcaattggctcctccatctagagattttcttggcagtattccatgggatgttaagcaaaggaaaccaaaggaatcgtttcaaatggactcatggcttagaaatctttattcttagggcagtcagtagtattctaaagctttctgacaagataaaggaagtcaccaaaatttctttttttaaattgtatctaatcctcaacaacaaaccaaaacagaacaattaaacagccaaataaaacctcagggacaacatttttggtgtatttgagccctcccagcaagtttcaycttgggtttgtattttaaatgttttacaagaattgtccatgtgcttccctaggctgagctggcattggtctgctgacctgtttttgtgtttttcttttttttatacacaacatttatttcaaactattgggagggatgagagtggcttaaaaacttccatccctacttttcaagagtgcagttgattctgaatctgaaagcccgcctctgtcctaaaatacaaacaagcacagacattaaacctggatactatatgataaagagggatgtaactattgaattggatacaaggatcagaatggaaagaaactcacgatgaaattgaacctggtttttgtatatttatcaaacttgtgctgagaatagtgtctgattatacgacttttaagcaaagttgggtgtaattaggtgaaaacagcccaggtcctcccgggagcacagaggggctaggggctggtccttctcgtttgctctagtcttgctttgctgtctggtgtagctcctctgctgctcccatctgcactaattgacccaaaacgtgggtatttcctgctacacaaaagccaaaaggtttcatgtagattttagttcactaaagggtgcccacaaaatagagattaattttaacttaaattttaagcttgaagattaggtactatctgtgaagttacacttttttttttttttttaaaggtagagatgtgtgtgtgtgtaggtattaaagatgtgttgttggtttccaaaaaggaacmctggaaaataaattttgaatgtttatgttctcagaatcaggttgacagtcccttgctgacatggctttgctttgtgtaaatacagtggatctcaatcttcggggtgtgatgaatagcgaatcatctcaaatccttgagcactcagtctagtgaagatgttgtcattatgtacaatacataactagtttaattaactatgtgatgttaactattattaataaattttaacattttccaaaataatcaaat

SEQ ID NO: 7185 - DNA, 5773 bp, Homo sapiens
cggccgcgcccgcgagccgtgagcgatgattggctgcgccacggcggcgggcggtccgtgggcgcacacaccctccccgcgcagccaatgggcgtgcgcacgtcwctgatccggaggcccgcgggccggcagcccctcaataagccacattgttgcatgaaactccggcgcaggagtcccgggctgccgctggcaacatcgtgtcacccagctaagaaaatccgcgggcccgagccacgcgcctgtgaatcggagaggtcccactgcccgagtggagccgggctgagattcttctcaagttgagcctcagtgatcctgtggccgaagttagcgccttgacgtgggacaaccggacacgtcgccaggasagaactgaggcgccttctagcagttgtgacgccaaaatcacgtctccggagacccgcgccctccgccagccgggcgcaccctcgccggtagccttctttgtgcgccgtccggactcccagctcccggcccggcagccgagccccagcacaaagcagtcggaccgcgccgcccgcctcccctctcgcgtctccgcctcggtttcccaactctgcgccgtcgggccgcggcaggatgattgcctcgcatctgcttgcctacttcttcacggagctcaaccatgaccaagtgcagaaggttgaccagtatctctaccacatgcgcctctctgatgagaccctcttggagatctctaagcggttccgcaaggagatggagaaagggcttggagccaccactcaccctactgcagcagtgaagatgctgcccacctttgtgaggtccactccagatgggacagaacacggagagttcctggctctggatcttggagggaccaacttccgtgtgctttgggtgaaagtaacggacaatgggctccagaaggtggagatggagaatcagatctatgccatccctgaggacatcatgcgaggcagtggcacccagctgtttgaccacattgccgaatgcctggctaacttcatggataagctacawatcaaagacaagaagcycccactgggttttaccttctcgttcccctgccaccagactaaactagacgagagtttcctggtctcatggaccaagggattcaagtccagtggagtggaaggcagagacgttgtggctctgatccggaaggccatccagaggagaggggactttgatatcgacattgtggctgtggtgaatgacacagttgggaccatgatgacctgtggttatgatgaccacaactgtgagattggtctcattgtgggcacgggcagcaacgcctgctacatggaagagatgcgccacatcgacatggtggaaggcgaygaggggcggatgtgtatcaatatggagtggggggccttcggggacgatggctcgctcaacgacattcgcactgagtttgaccaggagattgacatgggctcactgaacccgggaaagcaactgtttgagaagatgatcagtgggatgtacatgggggagctggtgaggcttatcctggtgaagatggycaaggaggagctgctctttgrggggaagctcagcccagagcttctcaacaccrgtcgctttgagaccaaagacatctcagacattgaaggggagaaggatggcatccggaaggcccgtgaggtcctgatgcggttgggcctggacccgactcaggaggactgcgtggccactcaccggatctgccagatcgtgtccacacgctccgccagcctgtgckcagccaccctggccgccgtgctgcagcgcatcaaggagaacaaaggcgaggagcggctgcgctctactattggggtcgacggttccgtctacaagaaacacccccattttgccaagcgtctacataagaccgtgcggcggctggtgcccggctgcgatgtccgcttcctccgctccgaggatggcagtggcaaaggtgcagccatggtgacagcagtggcttaccggctggccgatcaacaccgtgcccgccagaagacattagagcatctgcagctgagccatgaccagctgctggaggtcaagaggaggatgaaggtagaaatggagcraggtctgagcaaggagactcatgccagtgcccccgtcaagatgctgcccacctacgtgtgtgctaccccggacggcacagagaaaggggacttcttggccttggaccttggaggaacaaatttccgggtcctgctggtccrtgttcggaatgggaagtggggtggagtggagatgcacaacaagatctacgccatcccgcaggaggtcatgcacggcaccggggacgagctctttgaccacattgtccagtgcatcgcggacttcctcgagtacatgggcatgaagggcgtgtccctgcctctgggttttaccttctccttcccctgccagcagaacagcctggacgagagcatcctcctcaagtggacaaaaggcttcaaggcatctggctgcgagggcgaggacgtggtgaccctgctgaaggaagcgatccaccggcgagaggagtttgacctggatgtggttgctgtggtgaacgacacagtcggaactatgatgacctgtggctttgaagaccctcactgtgaagttggcctcattgttggcacgggcagcaatgcctgctacatggaggagatgcgcaaygtggaactggtggaaggagaagaggggcggatgtgtgtgaacatggaatggggggccttcggggacaatggatgcctagatgacttccgcacagaatttgatgtggctgtggatgagctttcactcaacccsggcaagcagaggttcgagaaaatgatcagtggaatgtacctgggtgagattgtccgtaacattctcatcgatttcaccaagcgtggactrctcttccgaggccgcatctcagagcrgctcaagacaaggggcatctttgaaaccaagttcttgtctcagattgagagtgactgcctggccctgctgcaagtccgagccatcctgcaacacttagggcttgagagcacctgtgacgacagcatcattgttaaggaggtgtgcactgtggtggcccggcgggcagcccagctctgtggcgcaggcatggccgctgtggtggacargatacgagaaaaccgtgggctggacgctctcaaagtgacagtgggtgtggatgggaccctctacaagctacatcctcactttgccaaagtcatgcatgagacagtgaaggacctggctccgaaatgtgatgtgtctttcctgcagtcagaggatggcagcgggaagggggcggcgctcatcactgctgtggcctgccgcatccgtgaggctggacagcgatagaacccctgaaatcggaagggacttcctctttctctccttcttccctgttttaaattataagatgtcatccccttgtgtcagagacagaccccttggcttttgcttggcagagaggaccccactggactgggttttgtctctgcatctcattgtagagcttggtggctgagcttggccctattaagataaatagagttccaaataaggatttgttcacatgcatcataaccattcccattggttctcctaaaacrtgaaaatkatctcccttagtaatcccccttgccaaattccatgtccctgtataattctacaggatggggacactaatgaagatacggttgcttcaccttggagcctgaacatgacatttctaagtggggtgcatcccccagcactgatgttgttactgattctcctgtcagagatctgggaggtctccactgaggatgtgagcctgattatcctataggcagacgtggggagggtggaggggtgacagtggaggaaaatccatggatatccacgcagcagcccctctttaacctcatmtacaagcatttgccctgtggattccagcatttgccattcctggaatcaaggaatcctgagtctgggcaatgaaaccaaagccaggagttgacgcatcctgcagttgggccagctgtygcatctcagcggggcgcacatgttatccacaagcaatggacctttggggaagggggagtttttagtttgttttacaaatttttcctgcaaaagtggaatcactgtattttcattttaatttatatttgaaattttatttagttcttgagtagatctgcttcttcatcttgacatgtaatgaatggtcagttgtacgtaatgtatttatatgttaatttgttatgtatatagatgtgcaagtcttgtcagaattggcctcagtgtagttaaagggcagaaggggaagatactgactagtcatagaaatacctcattcgcctgtgggaagagaagggaagcctcttcagggtgagtgaatggcaaagcggttgcttctggctcctccttcccctgtggtcttggaagtgtgtggaaggcagggacagagatggaggccgagccaatagactgaagagaccacagcaattggctcctccatctagagattttcttggcagtattccatgggatgttaagcaaaggaaaccaaaggaatcgtttcaaatggactcatggcttagaaatctttattcttagggcagtcagtagtattctaaagctttctgacaagataaaggaagtcaccaaaatttctttttttaaattgtatctaatcctcaacaacaaaccaaaacagaacaattaaacagccaaataaaacctcagggacaacatttttggtgtatttgagccctcccagcaagtttcaycttgggtttgtattttaaatgttttacaagaattgtccatgtgcttccctaggctgagctggcattggtctgctgacctgtttttgtgtttttcttttttttatacacaacatttatttcaaactattgggagggatgagagtggcttaaaaacttccatccctacttttcaagagtgcagttgattctgaatctgaaagcccgcctctgtcctaaaatacaaacaagcacagacattaaacctggatactatatgataaagagggatgtaactattgaattggatacaaggatcagaatggaaagaaactcacgatgaaattgaacctggtttttgtatatttatcaaacttgtgctgagaatagtgtctgattatacgacttttaagcaaagttgggtgtaattaggtgaaaacagcccaggtcctcccgggagcacagaggggctaggggctggtccttctcgtttgctctagtcttgctttgctgtctggtgtagctcctctgctgctcccatctgcactaattgacccaaaacgtgggtatttcctgctacacaaaagccaaaaggtttcatgtagattttagttcactaaagggtgcccacaaaatagagattaattttaacttaaattttaagcttgaagattaggtactatctgtgaagttacacttttttttttttttttaaaggtagagatgtgtgtgtgtgtaggtattaaagatgtgttgttggtttccaaaaaggaacmctggaaaataaattttgaatgtttatgttctcagaatcaggttgacagtcccttgctgacatggctttgctttgtgtaaatacagtggatctcaatcttcggggtgtgatgaatagcgaatcatctcaaatccttgagcactcagtctagtgaagatgttgtcattatgtacaatacataactagtttaattaactatgtgatgttaactattattaataaattttaacattttccaaaataatcaaat

SEQ ID NO: 7186 - DNA, 2102 bp, Homo sapiens
actttaaccatgtcactccatggggacgctgtcttgagcctttggtaagcctcattctccaggaccacacggcaggcgcgacagccctaggtccaccccaccccgtaagcgctccctccgggaggagacagaaacccaggacagctccggggcaaggccgaggaaggagggacgacggggcagggaggcccgaagagtccccgccttttgggatagtcgccacccttggaccccctcacccttggggacgttgaggagtgttaaaatctccaagacgcgagtcaccggtacgaagccacagccatttcgctgcttgctcggtgcaagtgcagaaggtcctagtagccgagcgtggagtcgagctcgtgggcggcgtcgggcaccttcggccgcgccctcagctgcacccgccggtgggcggggcccgagcccgtctctaaagccacgaggccgcccgctccgagcctggtgcttccgaccgctgcgcgcggctcctgggctgtcacagtctcccgttgccgccgtcatgtcccggcagctgtcgcgggcccggccagccacggtgctgggcgccatggagatggggcgccgcatggacgcgcccaccagcgccgcagtcacgcgcgccttcctggagcgcggccacaccgagatagacacggccttcgtgtacagcgagggccagtccgagaccatccttggcggcctggggctccggctgggcggcagcgactgcagagtgaaaattgataccaaggccattccactgtttgggaactccctgaagcctgacagtctccggttccagctggagacgtcactgaagcggctgcagtgtccccgagtggacctcttctacctgcatatgccagaccacagcacyccggkggaagagacactgcgtgcctgccaccagctgcaccaggagggcaagttcgtggagcttggcctctccaactatgcagcctgggaagtggccgagatctgtaccctctgcaagagcaacggctggatcctgcccactgtgtaccagggcatgtacaatgccatcacccggcaggtggaaacggagctcttcccctgcctcaggcactttggactgaggttctatgccttcaaccctctggctgaccagagccctgagggatgtggcagcttctggggcactctaggccccggggctgattgctgctttccctcagggggcctgctgaccggcaagtacaagtatgaggacaagraygggaaacagccygtgggccgcttctttgggaatacctgggcagagatgtacaggaatcgctactggaaggagcaccactttgagggcattgccctggtggagaaggccctgcaggccgcgtatggcgccagcgcccccagcatgacctcggccaccctccggtggatgtaccaccactcacagctgcagggtgcccayggggacgcggtcatcctgggcatgtccagcctggagcagctggagcagaacttggcagcggcagaggaagggcccctggagccggctgtcgtggaygcctttaatcaagcctggcatttggttrcycacgaatgtcccaactacttccgctaggcccatcgtttytcaggctgyccaaggctyttytgtaacatcttttgttactcacattttctttaatttagaactgcctcagtaaattyttagggatggaagtatttggacaaaaacctaatagaagagtcaccaccaaatgaagaataaaactcccagggtgctgtgtgttagtctgtttgcgttgctataaaagaatacctgagactgggtcatttataaagaaaagaggtttatttggctcaccactctgcagtctgtacaagggggtgtggtgccggcatctgctcttggtgagggcctcaggaagcttacagtcatggcagagggggaagcggcgccagcgtgtcacatggtgagagagggagcaagagacagacaggggaggaaattccaggctcttttaaacaaccagatcctgtgtgaactcatagagctggaactcactcattactrtacagatggcaccaagccattcatgtgggatttgcccccataccctaacccc

SEQ ID NO: 7187 - DNA, 2030 bp, Homo sapiens
actttaaccatgtcactccatggggacgctgtcttgagcctttggtaagcctcattctccaggaccacacggcaggcgcgacagccctaggtccaccccaccccgtaagcgctccctccgggaggagacagaaacccaggacagctccggggcaaggccgaggaaggagggacgacggggcagggaggcccgaagagtccccgccttttgggatagtcgccacccttggaccccctcacccttggggacgttgaggagtgttaaaatctccaagacgcgagtcaccggtacgaagccacagccatttcgctgcttgctcggtgcaagtgcagaaggtcctagtagccgagcgtggagtcgagctcgtgggcggcgtcgggcaccttcggccgcgccctcagctgcacccgccggtgggcggggcccgagcccgtctctaaagccacgaggccgcccgctccgagcctggtgcttccgaccgctgcgcgcggctcctgggctgtcacagtctcccgttgccgccgtcatgtcccggcagctgtcgcgggcccggccagccacggtgctgggcgccatggagatggggcgccgcatggacgcgcccaccagcgccgcagtcacgcgcgccttcctggagcgcggccacaccgagatagacacggccttcgtgtacagcgagggccagtccgagaccatccttggcggcctggggctccggctgggcggcagcgactgcagagtgaaaattgataccaaggccattccactgtttgggaactccctgaagcctgacagtctccggttccagctggagacgtcactgaagcggctgcagtgtccccgagtggacctcttctacctgcatatgccagaccacagcacyccggkggaagagacactgcgtgcctgccaccagctgcaccaggagggcaagttcgtggagcttggcctctccaactatgcagcctgggaagtggccgagatctgtaccctctgcaagagcaacggctggatcctgcccactgtgtaccagggcatgtacaatgccatcacccggcaggtggaaacggagctcttcccctgcctcaggcactttggactgaggttctatgccttcaaccctctggctgggggcctgctgaccggcaagtacaagtatgaggacaagraygggaaacagccygtgggccgcttctttgggaatacctgggcagagatgtacaggaatcgctactggaaggagcaccactttgagggcattgccctggtggagaaggccctgcaggccgcgtatggcgccagcgcccccagcatgacctcggccaccctccggtggatgtaccaccactcacagctgcagggtgcccayggggacgcggtcatcctgggcatgtccagcctggagcagctggagcagaacttggcagcggcagaggaagggcccctggagccggctgtcgtggaygcctttaatcaagcctggcatttggttrcycacgaatgtcccaactacttccgctaggcccatcgtttytcaggctgyccaaggctyttytgtaacatcttttgttactcacattttctttaatttagaactgcctcagtaaattyttagggatggaagtatttggacaaaaacctaatagaagagtcaccaccaaatgaagaataaaactcccagggtgctgtgtgttagtctgtttgcgttgctataaaagaatacctgagactgggtcatttataaagaaaagaggtttatttggctcaccactctgcagtctgtacaagggggtgtggtgccggcatctgctcttggtgagggcctcaggaagcttacagtcatggcagagggggaagcggcgccagcgtgtcacatggtgagagagggagcaagagacagacaggggaggaaattccaggctcttttaaacaaccagatcctgtgtgaactcatagagctggaactcactcattactrtacagatggcaccaagccattcatgtgggatttgcccccataccctaacccc

SEQ ID NO: 7188 - DNA, 2152 bp, Homo sapiens
gaattcaatgccaacagttcttttctttcaagactttaaccatgtcactccacggggacgctgttttgagcctttggtaagcctcatcctccaggaccacacggcaggcaggcaggacagcccttacttaggtccaccacacccgttaagctccctcctggaggagacagagacctgggacagctccggggcgggcgaggccgagggatgggggacgacggggcagggaggagtcccagacctttgggatcttcgccacccttggaccccctcacccttgcggacttgaggagtgttaaaatctccaagacgcgagtcaccggtacgaagccacagccatttcgctgcttgctcggtgcaagtgcagacggtcctcgtggttgagagcggagtccagcgcgtgggcggcgttgggcacctttggccgcgccctccgctccaccaccggtgggcgcggcccgagccagtccctaaagccacgaggccgcccgctccgagcctggtgcttccgaccgctgcgcgcggctcctgggctgtcacagtctcccgttgccgccgtcatgtcccggcagctgtcgcgggcccggccagccacggtgctgggcgccatggagatggggcgccgcatggacgcgcccaccagcgccgcagtcacgcgcgccttcctggagcgcggccacaccgagatagacacggccttcctgtacagcgacggccagtccgagaccatccttggcggcctggggctccgaatgggcagcagcgactgcagagtgaaaattgctaccaaggccaatccatggattgggaactccctgaagcctgacagtgtccgatcccagctggagacgtcactgaagcggctgcagtgtccctgagtggacctcttctatctacatgcacctgaccacagcgccccggtggaagagacactgcgtgcctgccaccagctgcaccaggagggcaagttcgtggagcttggcctctccaactatgccgcctgggaagtggccgagatctgtaccctctgcaagagcaacggctggatcctgcccactgtgtaccagggcatgtacagcgccaccacccggcaggtggaaacggagctcttcccctrcctcaggcactttggactgaggttctatgcctacaaccctctggctgggggcctgctgaccggcaagtacaagtatgaggacaaggacgggaaacagcccgtgggccgcttctttgggactcagtgggcagagatctacaggaatcacttctggaaggagcaccacttcgagggcattgccctggtggagaaggccctgcaggccrcgtatggcgccagcgctcccagcatgacctcggccgccctccggtggatgtaccaccactcacagctgcagggtgcccayggggacgcggtcatcctgggcatgtccagcctggagcagctggagcagaacttggcagcggcagaggaagggcccctggagccggctgtcgtggacgcctttaatcaagcctggcatttgkttgcccacgaatgtcccaactacttcatctaagctcattgtggctcaggctgcccaaggcttttctgtcaactcttttgctctctcccgctttgtctaatttagaactgcctcactaaattcttagggatggaagtatttggaaaaaaacctaacagtagagtcaccacctaaggaagaataaaatctcccagggtgctgtgtgttagtctgtttgcgttgctataaaagaatacctgagactgggtcatgtataaagaaaagaggtttctttggctcacagttctgcagtctgtacaagagggtgtggtgccggcatctgctcttggtgagggcctcaggaagcttagaatcatggcagaaggggaaacggagccagcgtgtcacatggtgagagagggagcaagagacagacaggggaggaaattcacacactgatggtggggatgtaaaatggtacaaccagtttggaaaacagtttggcagtttctcaaaggattaaacataaaattaccataggattcagcagttccacttgtgggtatgtagccaagagaaatgaaaacatatctccccacaaaaaaacttgggtatgagatttcacattatcattgctcataatagccart

SEQ ID NO: 7189 - DNA, 2063 bp, Homo sapiens
gatagagatgggagctggggagcagggctccactctgggaggggggcagccttgccggatccaggggagagagttgagcggccccagctctgctttcccagagctgccgggaacccggggaatggtgtggaggttccagggagccctgcccctacctggcaaccgcagtgcagcaggcaccaagttctcctgcacattgcgacagtgtgaccctgggctctggcgggyggtaggtggggcctttggacctactagcagtgagggagttaacacagcagctgactcctctaggcaaggaaaactcccctcagacgctttgctgcctggcctcctgccagcaacaagcaggagctgaaaaccagaagttgaggcgtgagtttggccactccgtagtgtgcacttggtgagggcagcagctcgccacagctgccagccrtctgtccattcacccatctgtccatctggcagcccgctgttcagacctgtctgtctgtccgcccatctgtaagcccatctctgtcccattgtctatctgaccatctttctcttactgtcctctttgtctagctatctggcctatctgtcgatccatcttcgtgtctgtcttcagcccccacctgtttgtccatctgtccaattacctgtgactctgtgcatcttcttgtccattcatctgcccacccatccgtccctccgtctgcccaccagccgcccctctcctcctgggctgcagagccatggcccggggctacggggccacggtcrgcctagtcctgctgggtctggggctggcgctggctgtcatygtgctggctgtggtcctctctcgacaccaggccccatgtggcccccaggcctttgcccacgctgctgttgccgccgactccaaggtctgctcggatattggacgagccatcctccagcagcagggctcacccgtggatgccaccatcgcggctctggtctgcacyagcgtcgtcaaccctcagagcatgggcctgggcggaggggtcatcttcaccatctacaatgtgacaacaggggcccagtggatcggggtgcccggggagctccgtggctatgccgaggcccaccgccgycatggccgcctgccctgggygcagctgttccagcccaccatcgcgctgctccgaggggggcatgtkgtggcccctgtcctcagccgtttcctgcacaacagcatcctgcggccttccttgcaggcgtcaaccctgcgccagctcttcttcaaygggacagaacccctgaggcctcaggacccactcccatggcctgcactggccaccaccctggagaccgtggccacagagggcgtggaggtcttctacacggggaggctgggccagatgctggtggaggacattgccaaggaagggagccagctgacgctgcaggacctggccaagttccagcccgaggtggtggatgccctggaggtgcccctgggggactataccctgtactcaccaccgccgcctgcagggggtgccattctcagctttatcctcaacgtgctaagagggttcaacttctcaacagagtctatggccaggcctgaagggagggtgaacgtgtaccaccaccttgtagagacgctcaartttgccarggggcagaggtggaggctgggggaccctcgaagccacccgaagctccagaatgcctcccgggacctgctgggggagaccctggcccagctcatccgccaacagatcgatggccggggggaccaccagctcagccactacagcttggccgaggcctggggccacgggacaggcacgtcccatgtgtctgtgctgggggaggatggcagcgccgtggctgccaccagcaccatcaacacaccctttggagcgatggtgtattcaccayggacaggcatcatcctcaacaacgagctcctggacttatgcgagcgatgcccccggggttccggcaccaccccctcacctgtggagacagggtgggtggagctcccggaaggtgctggcccccagttccaggcgagcgttccccatcctccatggtgccctccrtct

SEQ ID NO: 7190 - DNA, 2813 bp, Homo sapiens
gatagagatgggagctggggagcagggctccactctgggaggggggcagccttgccggatccaggggagagagttgagcggccccagctctgctttcccagagctgccgggaacccggggaatggtgtggaggttccagggagccctgcccctacctggcaaccgcagtgcagcaggcaccaagttctcctgcacattgcgacagtgtgaccctgggctctggcgggyggtaggtggggcctttggacctactagcagtgagggagttaacacagcagctgactcctctaggcaaggaaaactcccctcagacgctttgctgcctggcctcctgccagcaacaagcaggagctgaaaaccagaagttgaggcgtgagtttggccactccgtagtgtgcacttggtgagggcagcagctcgccacagctgccagccrtctgtccattcacccatctgtccatctggcagcccgctgttcagacctgtctgtctgtccgcccatctgtaagcccatctctgtcccattgtctatctgaccatctttctcttactgtcctctttgtctagctatctggcctatctgtcgatccatcttcgtgtctgtcttcagcccccacctgtttgtccatctgtccaattacctgtgactctgtgcatcttcttgtccattcatctgcccacccatccgtccctccgtctgcccaccagccgcccctctcctcctgggctgcagagccatggcccggggctacggggccacggtcrgcctagtcctgctgggtctggggctggcgctggctgtcatygtgctggctgtggtcctctctcgacaccaggccccatgtggcccccaggcctttgcccacgctgctgttgccgccgactccaaggtctgctcggatattggacgagccatcctccagcagcagggctcacccgtggatgccaccatcgcggctctggtctgcacyagcgtcgtcaaccctcagagcatgggcctgggcggaggggtcatcttcaccatctacaatgtgacaacagggaaggtggaggtcatcaatgcccgggagacggtgccggccagccacgccccgagcctgctggaccagtgtgcacaggctctgccactgggcacaggggcccagtggatcggggtgcccggggagctccgtggctatgccgaggcccaccgccgycatggccgcctgccctgggygcagctgttccagcccaccatcgcgctgctccgaggggggcatgtkgtggcccctgtcctcagccgtttcctgcacaacagcatcctgcggccttccttgcaggcgtcaaccctgcgccagctcttcttcaaygggacagaacccctgaggcctcaggacccactcccatggcctgcactggccaccaccctggagaccgtggccacagagggcgtggaggtcttctacacggggaggctgggccagatgctggtggaggacattgccaaggaagggagccagctgacgctgcaggacctggccaagttccagcccgaggtggtggatgccctggaggtgcccctgggggactataccctgtactcaccaccgccgcctgcagggggtgccattctcagctttatcctcaacgtgctaagagggttcaacttctcaacagagtctatggccaggcctgaagggagggtgaacgtgtaccaccaccttgtagagacgctcaartttgccarggggcagaggtggaggctgggggaccctcgaagccacccgaagctccagaatgcctcccgggacctgctgggggagaccctggcccagctcatccgccaacagatcgatggccggggggaccaccagctcagccactacagcttggccgaggcctggggccacgggacaggcacgtcccatgtgtctgtgctgggggaggatggcagcgccgtggctgccaccagcaccatcaacacaccctttggagcgatggtgtattcaccayggacaggcatcatcctcaacaacgagctcctggacttatgcgagcgatgcccccggggttccggcaccaccccctcacctgtgagtggagacagggtgggtggagctcccggaaggtgctggcccccagttccaggcgagcgttccccatcctccatggtgccctccrtcttgatcaacaaagcccaggggtcgaagctagtgattggcggggctggcggggagctcatcatctctgctgtggcccaggccatcatgagcaagctgtggcttggctttgacctgagagcggccattgcagcccccatcctgcatgtcaacagcaagggctgtgtggagtacgagcccaacttcagccaggaggtgcagaggggactccaagaccgtggccagaaccagacccagaggcccttcttcctgaacgtggtccaggctgtgtcccaggagggggcctgtgtgtacgccgtctcggacctgaggaagagtggggaggccgcaggctactaagacactgctctgcccagagctgaagtctggccccaccatgagtcctgtgtccaggccggacatggctgggggaccaactactctggcaggatctggacccctggcaggggagtccagctgagagtggaagaggtggcggggaccagctgggcagatgagaggctgagcctcatccctaaccccctttcccagagcccctggtggtcctgaaccggcccctctatccctccgyaggcctcttgcctggggccactctcccaccctctcgatctgtatatcctccagtccaagattaaagrggcggactgtggcctg

SEQ ID NO: 7191 - DNA, 1166 bp, Homo sapiens
acagctgctgcccacaccgcgctcagcgccttcactgccatccccgctgtccttgccgcccccgccatgggcctagagctgtttcttgacctggtgtcccagcccagccgcgccgtctacatcttcgccaagaagaatggcatccccttagagctgcgcaccgtggatttggtcaaagggcagcacaagagcaaggagttcttgcagatcaacagcctggggaaactgccgacgctcaaggatggtgatttcatcttgacygaaagctyggccatcctgatttacctgagctgtaagtaccagacgccggaccactggtatccatctgacctgcaggctcgtgcccgtgttcatgagtacctgggctggcatgccgactgcatccgtggcacctttggtatacccctgtgggtccagrtgttggggccmctcattggggtccaggtgcccraggagaaggtggaacgcaacaggactgccatrgaccaggccctgcaatggctggaggacaagttcctgggggacaggcccttcctcgctggccagcaggtgacactggctgatctcatggccctggaggagctgatgcagccggtggctctcggctatgaactgtttgagggacggccacgactggcagcatggcgtggaygagtggaggctttcctgggtgctgagctatgccaggaggcccacagcatcatcttgagcatcctggaacaggcggccaagaaaaccctcccaacaccctcaccagaggcctatcaggctatgctgcttcgaatcrccaggatcccctgaagggtctgggatgggggccaggagattagcaacaaggattcattctgttacttacttgcccctttttatctttccctcttgccccagtcccttctctccagcttcatgtgaagctctgcacagacaagacactcagtgtccttggcagtgctkctactcctcaggtgcagcatacataaccagtaagagactaaatctgcaatatataaagagctcctacaaatcagtaacatgaagaacactcaaaaattggcaaatgtcatcagtgttttaaacagaataaagattccaaacactttgaatagagaaccaagagttattggttttactacattgttgtgttatacatatggagtaaaagtatg

SEQ ID NO: 7192 - DNA, 1863 bp, Homo sapiens
atgggttttacaaggtgcctagctacagagaattatcagcaagagttaacagagaagatgaagttctctgcccaggaatgcccagagaaagtccctgaagacaaatctgccctgtgctctggcccactacagcagactatggacaggaaacagctcagaactagtggagaagggctgagcaactcctggagacagaatgacatcccttttgagctgtggatggtggaggagcacctgaagcctgagttcctgaaggtgaaccccctggggaaggtgcctgccctcagagatggcgacttcctactagcaaagaggctggagaaaagatctctgacaccccctgcccacagcatggtcatcgttttatacctgagtcgaaagtaccagatacggggacactggtacccacctgagctgcaagcccgcacctgcgtggatgagtacttggcgtggaagcatgtcaccatccagctgcctgccaccaatgtctacctgtgcaagcctgcagatgctgcacagctggagcggctgttggggaggctgatgccagccctgcagcacctggatkggggggtgctggtggccaggcccttcctggcaatggagcagatctccctggaagacttggtgctgacggaggtgatgcaggcccgtgtggcggctgcccttggtactgagctcttgctggaggcccacaagctcatactccagcctctgaaccacagtgaggcttggcgggacccccagctggcccagaagcaggcccaggtctgtggctggccaactgcggctgtggggcctggcatgtgtctcaacatggcactggagctctacatggacctgctgtcagcaccctgccgtgccgtctacatcttctcgaagaagcatgacatccagttcaactttcagtttgtggatctgctgaaaggtcaccaccacagcaaaggatacattgacatcaaccccctcaggaagctgcccagcctcaaagatgggaaatttatcttaagtgaaagcccccaactcctactcaccccgcagggctccttcccagcccttactgactgtcagacagacagctctggtgaaggtctttctcggggccgtttgggctcctctttgctctggaagccccagcagttgggcccaggccacaccggggtggttgaygtagtggcactcaggaaggcaagggcagtgcccctgaccggccccttctgcagcgcggccatcctttactacctgtgccgcaagtacagcgcaccatcgcactggtgcccgccagacccgcacgcacgtgcccgtgtggatgagttcgtggcttggcaacacacggcctttcagctgcccatgaagaagatagtctggctcaagttgctgatcccaaagataacagggraggaagtttcagctgagaagatggagcatgcagtggaagaggtgaagaacagcctgcagctcttygaggagwattttctgcasgataagatgttcatcaccgggaaccaaatctcactggctgacytggtggccgtggtrgagatgatgcagcccatggcagccaactataatgtcttcctcaacagctccaagctagctgagtggcgtatgcgggtggagctgaatattggctstggcctctttagggaggcccatgatcgactaatgcagttggccgactgggacttttcaacaytggatccaatggtcacgaggaaaatctgtgagtttcgggagaagtacttgtgaccctaatcgcagcccatcctgcagggcctggctggctcaatgatctgagccaccttccttaaaggaaatgctaaaaaaacaactgttctttgcctaataaagaactggaacaac

SEQ ID NO: 7193 - DNA, 1505 bp, Homo sapiens
atgggttttacaaggtgcctagctacagagaattatcagcaagagttaacagagaagatgaagttctctgcccaggaatgcccagagaaagtccctgaagacaaatctgccctgtgctctggcccactacagcagactatggacaggaaacagctcagaactagtggagaagggctgagcaactcctggagacagaatgacatcccttttgagctgtggatggtggaggagcacctgaagcctgagttcctgaaggtgaaccccctggggaaggtgcctgccctcagagatggcgacttcctactagcaaagaggctggagaaaagatctctgacaccccctgcccacagcatggtcatcgttttatacctgagtcgaaagtaccagatacggggacactggtacccacctgagctgcaagcccgcacctgcgtggatgagtacttggcgtggaagcatgtcaccatccagctgcctgccaccaatgtctacctgtgcaagcctgcagatgctgcacagctggagcggctgttggggaggctgatgccagccctgcagcacctggatkggggggtgctggtggccaggcccttcctggcaatggagcagatctccctggaagacttggtgctgacggaggtgatgcaggcccgtgtggcggctgcccttggtactgagctcttgctggaggcccacaagctcatactccagcctctgaaccacagtgaggcttggcgggacccccagctggcccagaagcaggcccaggtctgtggctggccaactgcggctgtggggcctggcatgtgtctcaacatggcactggagctctacatggacctgctgtcagcaccctgccgtgccgtctacatcttctcgaagaagcatgacatccagttcaactttcagtttgtggatctgctgaaaggtcaccaccacagcaaaggatacattgacatcaaccccctcaggaagctgcccagcctcaaagatgggaaatttatcttaagtgaaagttgctgatcccaaagataacagggraggaagtttcagctgagaagatggagcatgcagtggaagaggtgaagaacagcctgcagctcttygaggagwattttctgcasgataagatgttcatcaccgggaaccaaatctcactggctgacytggtggccgtggtrgagatgatgcagcccatggcagccaactataatgtcttcctcaacagctccaagctagctgagtggcgtatgcgggtggagctgaatattggctstggcctctttagggaggcccatgatcgactaatgcagttggccgactgggacttttcaacaytggatccaatggtcacgaggaaaatctgtgagtttcgggagaagtacttgtgaccctaatcgcagcccatcctgcagggcctggctggctcaatgatctgagccaccttccttaaaggaaatgctaaaaaaacaactgttctttgcctaataaagaactggaacaac

SEQ ID NO: 7194 - DNA, 449 bp, Homo sapiens
gatcccggtgccagggaccctgcccagttccaggcgtcgccctracccagaaacgactgggcgccgccgtcctggaaaggccccagcgcacggacatctgaggagctgtttccgttcctctgcccgccatgccgttcctggagctggacacgaatttgcccgccaaccgagtgcccgcggggctggagaaacgactctgcgccgccgctgcctccatcctgggcaaacctgcggaccgcgtgaacgtgacggtacggccgggcctggccatggcgctgagcgggtccaccgagccctgcgcgcagctgtccatctcctccatcggcgtagtgggcaccgccgaggacaaccgcagccacagcgcccacttctttgagtttctcaccaaggagctagccctgggccaggaccgccaggttccaggtgaagttcacgggagactcacagag

SEQ ID NO: 7195 - DNA, 979 bp, Homo sapiens
gatcccggtgccagggaccctgcccagttccaggcgtcgccctracccagaaacgactgggcgccgccgtcctggaaaggccccagcgcacggacatctgaggagctgtttccgttcctctgcccgccatgccgttcctggagctggacacgaatttgcccgccaaccgagtgcccgcggggctggagaaacgactctgcgccgccgctgcctccatcctgggcaaacctgcggaccgcgtgaacgtgacggtacggccgggcctggccatggcgctgagcgggtccaccgagccctgcgcgcagctgtccatctcctccatcggcgtagtgggcaccgccgaggacaaccgcagccacagcgcccacttctttgagtttctcaccaaggagctagccctgggccaggaccggatacttatccgctttttccccttggagtcctggcagattggcaagatagggacggtcatgacttttttatgattgggcacggagggatccagggcatctgtgaactggctgcttcttccagagagatctcttggcagagtgagggcctggagataaccagctttggattatcccgcatgcaacattcctgtgatcacataatcctcttyttcatcctcatatgaaataaatgaagagagcttcctcattcaaacatgacttcttaccttctattatctctcctgggcatctggggccaccatgggcagcagggctggtggataagaccgtagggaacctggagggggatgatttagactgctcagatctggggctgggagactcagcctggaggctctgctctccacacccatctgcaggcctgtgggaaggtgtgagcagctggtccagctggggccttcctgcagactgctgacctgaggctcctgtcctcagccccaaaatgggaccagacctctgtactcctcctgaagtctactccctccatgactggctgggcagcctgc

SEQ ID NO: 7196 - DNA, 9519 bp, Homo sapiens
tcttgtttgtgtgctaggctgggggggagagagggcgagagagagcgggcgagagtgggcaagcaggacgccgggctgagtgctaactgcgggagccagagagtgcggaggggagtcgggtcggagagaggcggcaggggccgagacagtggcagggggcccggggcgcacgggctgaggcgacccccagccccctcccgtccgcacacacccccaccgcggtccagcagccgggccggcgtcgacgcctaggggggaccattacataaccccgcgccccgcggcgtcttctcccgccgccgcgggcggccccgaacggagccccggggggcgggcgctcccagcacctggccgccggcggtgggggccgtagcagcggccgtatttatttattttccgcgggaaaggaaggcgaaggaggggagcgcggcgcgaggaggggccgcctgcgccgccgccggagcggggcctcctcggtgggctccgcgtcggcgcgggcgtgcgggcggcgctgctcggcccggccccctcggccctctggtccggccagctccgctcccggcgtccttgccgcgcctccgccggccgccgcgcgatgtgaggcggcggcgccagcctggctctcggctcgggcgagttctctgcggccattaggggccggtgcggcggcggcggcgcggagcgcggcggcaggaggagggttcggagggtgggggcgcaggcccgggagggggcaccgggaggaggtgagtgtctcttgtcgcctcctcctctccccccttttcgcccccgcctccttgtggcgatgagaaggaggaggacagcgccgaggaggaagaggttgatggcggcggcggagctccgagagacctcggctgggcaggggccggccgtggcgggccggggactgcgcctctagagccgcgagttctcgggaattcgccgcagcggacgcgctcggcgaatttgtgctcttgtgccctcctccgggcttgggcccaggcccggcccctcgcacttgcccttaccttttctatcgagtccgcatccctctccagccactgcgacccggcgaagagaaaaaggaacttcccccaccccctcgggtgccgtcggagccccccagcccacccctgggtgcggcgcggggaccccgggccgaagaagagatttcctgaggattctggttttcctcgcttgtatctccgaaagaattaaaaatggccgagaatgtggtggaaccggggccgccttcagccaagcggcctaaactctcatctccggccctctcggcgtccgccagcgatggcacagattttggctctctatttgacttggagcacgacttaccagatgaattaatcaactctacagaattgggactaaccaatggtggtgatattaatcagcttcagacaagtcttggcatggtacaagatgcagcttctaaacataaacagctgtcagaattgctgcgatctggtagttcccctaacctcaatatgggagttggtggcccaggtcaagtcatggccagccaggcccaacagagcagtcctggattaggtttgataaatagcatggtcaaaagcccaatgacacaggcaggcttgacttctcccaacatggggatgggcactagtggaccaaatcagggtcctacgcagtcaacaggtatgatgaacagtccagtaaatcagcctgccatgggaatgaacacagggatgaatgcgggcatgaatcctggaatgttggctgcaggcaatggacaagggataatgcctaatcaagtcatgaacggttcaattggagcaggccgagggcgacagaatatgcagtacccaaacccaggcatgggaagtgctggcaacttactgactgagcctcttcagcagggctctccccagatgggaggacaaacaggattgagaggcccccagcctcttaagatgggaatgatgaacaaccccaatccttatggttcaccatatactcagaatcctggacagcagattggagccagtggccttggtctccagattcagacaaaaactgtactatcaaataacttatctccatttgctatggacaaaaaggcagttcctggtggaggaatgcccaacatgggtcaacagccagccccgcaggtccagcagccaggyctggtgactccagttgcccaagggatgggttctggagcacatacagctgatccagagaagcgcaagctcatccagcagcagcttgttctccttttgcatgctcacaagtgccagcgccgggaacaggccaatggggaagtgaggcagtgcaaccttccccactgtcgcacaatgaagaatgtcctaaaccacatgacacactgccagtcaggcaagtcttgccaagtggcacactgtgcatcttctcgacaaatcatttcacactggaagaattgtacaagacatgattgtcctgtgtgtctccccctcaaaaatgctggtgataagagaaatcaacagccaattttgactggagcacccgttggacttggaaatcctagctctctaggggtgggtcaacagtctgcccccaacctaagcactgttagtcagattgatcccagctccatagaaagagcctatgcagctcttggactaccctatcaagtaaatcagatgccgacacaaccccaggtgcaagcaaagaaccagcagaatcagcagcctgggcagtctccccaaggcatgcggcccatgagcaacatgagtgctagtcctatgggagtaaatggaggtgtaggagttcaaacgccgagtcttctttctgactcaatgttgcattcagccataaattctcaaaacccaatgatgagtgaaaatgccagtgtgccctccctgggtcctatgccaacagcagctcaaccatccactactggaattcggaaacagtggcacgaagatattactcaggatcttcgaaatcatcttgttcacaaactcgtccaagccatatttcctacgccggatcctgctgctttaaaagacagacggatggaaaacctagttgcatatgctcggaaagttgaaggggacatgtatgaatctgcaaacaatcgagcggaatactaccaccttctagctgagaaaatctataagatccagaaagaactagaagaaaaacgaaggaccagactacagaagcagaacatgctaccaaatgctgcaggcatggttccagtttccatgaatccagggcctaacatgggacagccgcaaccaggaatgacttctaatggccctctacctgacccaagtatgatccgtggcagtgtgccaaaccagatgatgcctcgaataactccacaatctggtttgaatcaatttggccagatgagcatggcccagccccctattgtaccccggcaaacccctcctcttcagcaccatggacagttggctcaacctggagctctcaacccgcctatgggctatgggcctcgtatgcaacagccttccaaccagggccagttccttcctcagactcagttcccatcacagggaatgaatgtaacaaatatccctttggctccgtccagcggtcaagctccagtgtctcaagcacaaatgtctagttcttcctgcccggtgaactctcctataatgcctccagggtctcaggggagccacattcactgtccccagcttcctcaaccagctcttcatcagaattcaccctcrcctgtacctagtcgtacccccacccctcaccatactcccccaagcataggggctcagcagccaccagcaacaacaattccagcccctgttcctacacctcctgccatgccacctgggccacagtcccaggctctacatccccctccaaggcagacacctacaccaccaacaacacaacttccccaacaagtgcagccttcacttcctgctgcaccttctgctgaccagccccagcagcagcctcgctcacagcagagcacagcagcgtctgttcctaccccaacagcaccgctgcttcctccgcagcctgcaactccactttcccagccagctgtaagcattgaaggacaggtatcaaatcctccatctactagtagcacagaagtgaattctcaggccattgctgagaagcagccttcccaggaagtgaagatggaggccaaaatggaagtggatcaaccagaaccagcagatactcagccggaggatrtttcagagtctaaagtggaagactgtaaaatggaatctaccgaaacagaagagagaagcactgagttaaaaactgaaataaaagaggaggaagaccagccaagtacttcagctacccagtcatctccggctccaggacagtcaaagaaaaagattttcaaaccagaagaactacgacaggcactgatgccaacwttggaggcactttaccgtcaggatccagaatcccttccctttcgtcaacctgtggaccctcagcttttaggaatccctgattactttgatattgtgaagagccccatggatctttctaccattaagaggaagttagacactggacagtatcaggagccctggcartatgtygatgatatttggcttatgttcaataatgcctggttatataaccggaaaacatcacgggtatacaaatactgctccaagctctctgaggtctttgaacaagaaattgacccagtgatgcaaagccttggatactgttgtggcagaaagttggagttctctccacagacactgtgttgctacggcaaacagttgtgcacaatacctcgtgatgccacttattacagttaccagaacaggtatcatttctgtgagaagtgtttcaatgagatccaaggggagagcgtttctttgggggatgacccttcccagcctcaaactacaataaataaagaacaattttccaagagaaaaaatgacacactggatcctgaactgtttgttgaatgtacagagtgcggaagaaagatgcatcagatctgtgtccttcaccatgagatcatctggcctgctggattcgtctgtgatggctgtttaaagaaaagtgcacgaactaggaaagaaaataagttttctgctaaaaggttgccatctaccagacttggcacctttctagagaatcgtgtgaatgactttctgaggcgacagaatcaccctgagtcaggagaggtcactgttagagtagttcatgcttctgacaaaaccgtggaagtaaaaccaggcatgaaagcaaggtttgtggacagtggagagatggcagaatcctttccataccgaaccaaagccctctttgcctttgaagaaattgatggtgttgacctgtgcttctttggcatgcatgttcaagagtatggctctgactgccctccacccaaccagaggagagtatacatatcttacctcgatagtgttcatttcttccgtcctaaatgcttgaggactgcagtctatcatgaaatcctaattggatatttagaatatgtcaagaaattaggttacacaacagggcatatttgggcatgtccaccaagtgagggagatgattatatcttccattgccatcctcctgaccagaagatacccaagcccaagcgactgcaggaatggtacaaaaaaatgcttgacaaggctgtatcagagcgtattgtccatgactacaaggatatttttaaacaagctactgaagatagattaacaagtgcaaaggaattgccttatttcgagggtgatttctggcccaatgttctggaagaaagcattaaggaactggaacaggaggaagaagagagaaaacgagaggaaaacaccagcaatgaaagcacagatgtgaccaagggagacagcaaaaatgctaaaaagaagaataataagaaaaccagcaaaaataagagcagcctgagtaggggcaacaagaagaaacccgggatgcccaatgtatctaacgacctctcacagaaactatatgccaccatggagaagcataaagaggtcttctttgtgatccgcctcattgctggccctgctgccaactccctgcctcccattgttgatcctgatcctctcatcccctgcgatctgatggatggtcgggatgcgtttctcacgctggcaagggacaagcacctggagttctcttcactccgaagagcccagtggtccaccatgtgcatgctggtggagctgcacacgcagagccaggaccgctttgtctacacctgcaatgaatgcaagcaccatgtggagacacgctggcactgtactgtctgtgaggattatgacttgtgtatcacctgctataacactaaaaaccatgaccacaaaatggagaaactaggccttggcttagatgatgagagcaacaaccagcaggctgcagccacccagagcccaggcgattctcgccgcctgagtatccagcgctgcatccagtctctggtccatgcttgccagtgtcggaatgccaattgctcactgccatcctgccagaagatgaagcgggttgtgcagcataccaagggttgcaaacggaaaaccaatggcgggtgccccatctgcaagcagctcattgccctctgctgctaccatgccaagcactgccaggagaacaaatgcccggtgccgttctgcctaaacatcaagcagaagctccggcagcaacagctgcagcaccgactacagcaggcccaaatgcttcgcaggaggatggccagcatgcagcggactggtgtggttgggcagcaacagggcctcccttcccccactcctgccactccaacgacaccaactggccaacagccaaccaccccgcagacgccccagcccacttctcagcctcagcctacccctcccaatagcatgccaccctacttgcccaggactcaagctgctggccctgtgtcccagggtaaggcagcaggccaggtgacccctccaacccctcctcagactgctcagccaccccttccagggcccccacctgcagcagtggaaatggcaatgcagattcagagagcagcggagacgcagcgccagatggcccacgtgcaaatttttcaaaggccaatccaacaccagatgcccccgatgactcccatggcccccatgggtatgaacccacctcccatgaccagaggtcccagtgggcatttggagccagggatgggaccgacagggatgcagcaacagccaccctggagccaaggaggattgcctcagccccagcaactacagtctgggatgccaaggccagccatgatgtcagtggcccagcatggtcaacctttgaacatggctccacaaccaggattgggccaggtaggtatcagcccactcaaaccaggcactgtgtctcaacaagccttacaaaaccttttgcggactctcaggtctcccagctctcccctgcagcagcaacaggtrcttagtatccttcacgccaacccccagctgttggctgcattcatcaagcagcgggctgccaagtatgccaactctaatccacaacccatccctgggcagcctggcatgccccaggggcagccagggctacagccacctaccatgccaggtcagcagggggtycactccaatccagccatgcagaacatgaatccaatgcaggcgggcgttcagagggctggcctgccccagcagcaaccacagcagcaactccagccacccatgggagggatgagcccccaggctcagcagatgaacatgaaccacaacaccatgccttcacaattccgagacatcttgagacgacagcaaatgatgcaacagcagcagcaacagggagcagggccaggaataggccctggaatggccaaccataaccagttccagcaaccccaaggagttggctacccaccacagcmgcagcagcggatgcagcatcacatgcaacagatgcaacaaggaaatatgggacagataggccagcttccccaggccttgggagcagaggcaggtgccagtctacaggcctatcagcagcgactccttcagcaacagatggggtcccctgttcagcccaaccccatgagcccccagcagcatatgctcccaaatcaggcccagtccccacacctacaaggccagcagatccctaattctctctccaatcaagtgcgctctccccagcctgtcccttctccacggccacagtcccagcccccccactccagtccttccccaaggatgcagcctcagccttctccacaccacgtttccccacagacaagttccccacatcctggactggtagctgcccaggccaaccccatggaacaagggcattttgccagcccggaccagaattcaatgctttctcagcttgctagcaatccaggcatggcaaacctccatggtgcaagcgccacggacctgggactcagcaccgataactcagacttgaattcaaacctctcacagagtacactagacatacactagagacaccttdtattttgggagcaaaaaaattattttctcttaacaagactttttgtactgaaaacaatttttttgaatctttcgtagcctaaaagacaattttccttggaacacataagaactgtgcagtagccgtttgtggtttaaagcaaacatgcaagatgaacctgagggatgatagaatacaaagaatatatttttgttatggctggttaccaccagcctttcttcccctttgtgtgtgtggttcaagtgtgcactgggaggaggctgaggcctgtgaagccaaacaatatgctcctgccttgcacctccaataggttttattattttttwtaaattaatgaacatatgtaatattaatagttattatttactggtgcagatggttgacatttttccctattttcctcactttatggaagagttaaaacatttctaaaccagaggacaaaaggggttaatgttactttaaaattacattctatatatatataaatatatataaatatatattaaaataccagttttttttctctgggtgcaaagatgttcattcttttaaaaaatgtttaaaaaaaaaaaaaaactgcctttcttcycctcaagtcaacttttgtgctccagaaaattttctattctgtaagtctgagcgtaaaacttcaagtattaaaataatttgtacatgtagagagaaaaatgactttttcaaaaatatacaggggcagctgccaaattgatgtattatatattgtggtttctgtttcttgaaagaatttttttcgttatttttacatctaacaaagtaaaaaaattaaaaagagggtaagaaacgattccggtgggatgattttaacatgcaaaatgtccctgggggtttcttctttgcttgctttcttcctccttaccctaccccccactcacacacacacacacacacacacacacacactttctataaaacttgaaaatagcaaaaaccctcaactgttgtaaatcatgcaattaaagktgattacttataaatatgaactttggatcactgtatagactg

SEQ ID NO: 7197 - DNA, 796 bp, Homo sapiens
gacaccacrgtgaaggtgaaggctggagtcaatggatttggtcgtattgaacacctggtaaccaagcctgcttttaactctggtaaagtggatattgtcaccatcaatgaccccttyrttgacctcaacaacatggtctacatgttccagtatgattccacccatggcaaattctgtggcaccgtcaaggctgagaacaggaagcttgtcgccagtggaaatcccatcaccgtcttccagggcgagatccctccaaaatcaaatggggtgrtgctggtgctcagtacattgcggagtccacttgtatcttcaccaccatggagaaggctggggctgacttgcagggaggagccaaaagggtcatcatctctgccccctctgctgatgcccccatgttcgtgatggatgtgaaccacgagaagtatgacaacagcctcaagatcgtcagcaatgcctcctgcatcaccaactgcttagcgcccctggccaacgtcatccrcaactttgggcatcctgggctacacgagcaccaggtggtctcctctgacttcaacagcgacacccacacctactcttccaccttcaatgctggggctggcactgccctcgatggccactttgtcaagctcgtttcctggtatgacaatgmatttggctacagcaacagggtggtgaacctcagggcccacatggccgccaaggagtaagacmccctgaccaccagccccagcgagagcaccagaggaagagagagaccctcactgctggggagtccctgccacactcagtcccccac

SEQ ID NO: 7198 - DNA, 1666 bp, Homo sapiens
cggctggggcggctggagagccgggagtcgctgggtgcgtggggctgcctcgccgcgtctctccagggctctgccagcagacagccttggcacacaggcacaagggctggagcccagagatgagagtgcccaagggagatgtgagcctggcgggctgcccgctaacctgtcgctgaagccccagaagcgggccctcaggccaggcctaccctgcctccggcccagcatgcgcctgtcggtgcggagggtgctgctggcagccggctgcgccctggtcctggtgctggcggttcagctgggacagcaggtgctagagtgccgggcggtgctggcgggcctgcggagcccccggggggccatgcggcctgagcaggaggagctggtgatggtgggcaccaaccacgtggaataccgctatggcaaggccatgccgctcatcttcgtgggtggcgtgcctcgcagtggcaccacgttgatgcgcgccatgctggacgcbcacccygaggtgcgctgyggcgaggagacccgcatcatcccgcgcgtgctggccatgcgccaggcctggtccaagtctggccgtgagaagctgcggctggatgaggcgggggtgacggatgaggtgctggacgccgccatgcaggccttcatcctggaggtgattgccaagcacggagagccggcccgcgtgctctgcaacaaggacccatttacgctcaagtcctcggtctacctgtcgcgcctgttccccaactccaagttcctgctgatggtgcgggacggccgggcctccgtgcactccatgatcacgcgcaaagtcaccattgcgggctttgacctcagcagctaccgtgactgcctcaccaagtggaacaaggccatcgaggtgatgtacgcccagtgcatggaggtaggcaaggagaagtgcytgcctgtgtactacgagcagctggtgctgcaccccaggcgctcactcaagctcatcctcgacttcctcggcatcgcctggagcgacgctgtcctccaccatgaagacctcattggcaagcccggtggtgtytccctgtccaagatcgagcggtccacggaccaggtcatcaagcctgttaacctggaagcgctctccaagtggactggccacatccctggggatgtggtgcgggacatggcccagatcgcccccatgctggctcagctcggctatgacccttatgcaaacccccccaactatggcaaccctgaccccttcgtcatcaacaacacacagcgggtgagtgtgcacctgtacttgtrgaagtgtactcttggggatatggggcttctgcagatgtggaaactccagccacctgaggaaatgttcagtctctcaattcytggtcatctgatttgttcctgtctgatggacacagtgaactacatgattgcttgtatttccattttgcttgggctgcagggaagctcaaagccaactggtagcctgtctctcatactctaacatctaacagcaggccagcttgtacactaatttcatcttatttctctaattttatttacatttttacccctatttccctggctatttgtttatctgtttgtaaggcacctcaagtctttgttgagagggggtataaataaataaactattggtccctttcttgtcttataaggt

SEQ ID NO: 7199 - DNA, 2184 bp, Homo sapiens
cgccgcggccccgcccccgcgcgggcacctcccccttccccggctggggcggctggagagccgggagtcgctgggtgcgtggggctgcctcgccgcgtctcgccacgggctctgccagcagacagccttggcacacaggcacaagggctggagcccagagatgagagtgcccaagggagatgtgagcctggcgggctgcccgctaacctgtcgctgaagccccagaagcgggccctcaggccaggcctaccctgcctccggcccagcatgcgcctgtcggtgcggagggtgctgctggcagccggctgcgccctggtcctggtgctggcggttcagctgggacagcaggtgctagagtgccgggcggtgctggcgggcctgcggagcccccggggggccatgcggcctgagcaggaggagctggtgatggtgggcaccaaccacgtggaataccgctatggcaaggccatgccgctcatcttcgtgggtggcgtgcctcgcagtggcaccacgttgatgcgcgccatgctggacgcbcacccygaggtgcgctgyggcgaggagacccgcatcatcccgcgcgtgctggccatgcgccaggcctggtccaagtctggccgtgagaagctgcggctggatgaggcgggggtgacggatgaggtgctggacgccgccatgcaggccttcatcctggaggtgattgccaagcacggagagccggcccgcgtgctctgcaacaaggacccatttacgctcaagtcctcggtctacctgtcgcgcctgttccccaactccaagttcctgctgatggtgcgggacggccgggcctccgtgcactccatgatcacgcgcaaagtcaccattgcgggctttgacctcagcagctaccgtgactgcctcaccaagtggaacaaggccatcgaggtgatgtacgcccagtgcatggaggtaggcaaggagaagtgcytgcctgtgtactacgagcagctggtgctgcaccccaggcgctcactcaagctcatcctcgacttcctcggcatcgcctggagcgacgctgtcctccaccatgaagacctcattggcaagcccggtggtgtytccctgtccaagatcgagcggtccacggaccaggtcatcaagcctgttaacctggaagcgctctccaagtggactggccacatccctggggatgtggtgcgggacatggcccagatcgcccccatgctggctcagctcggctatgacccttatgcaaacccccccaactatggcaaccctgaccccttcgtcatcaacaacacacagcgggtcttgaaaggggactataaaacaccagccaatctgaaaggatattttcaggtgaaccagaacagcacctcctcccacttaggaagctcgtgatttccagatctccrcaaatgacttcattgccaagaagagaagaaaatgcatttaagtggaaatcggacctctaatccaagcatattgcttgctattaatcgccaaaacaggactgctgatgaggaatgtatttgcatatgtttgcaaaagctgaatcattgaaaacgtaccttgaaactctctatctctggacactccagggtagagaatgaagggtatggaagtagtccggcttttgaaacttaggtattttatatttttcccctcaagaacttttttttaagagacagatttgccatcctccttaatttgcaggactgccttggtggctttgtttgctgggacaaggcccacaacctgtgcctctcctattgacccttactttgaattcaaagaatctatttaagagtttaatatatgaggctttctttgattcctcctcagttctacctagtttcacagaggaaaaaaatactctttgaataaagtgaacagaggctcatttgtttgtgcctyactttactgaatgaatagggttttttttttctttccatactggattttgtcaggtagatttgtgatgagcaaaaagctggagaatataggtgcatgtaaggcacagctgaattcctgtgtcagggtccccagggccacccccaggatcgatgattggctagaagaactcagaattcagaagagctattatccttatggttatggtttattacagcaaaaggataaacattaaaatcagcaaaagaggccgggtggagtggctcacgc

SEQ ID NO: 7200 - DNA, 4896 bp, Homo sapiens
cggctggggcggctggagagccgggagtcgctgggtgcgtggggctgcctcgccgcgtctctccagggctctgccagcagacagccttggcacacaggcacaagggctggagcccagagatgagagtgcccaagggagatgtgagcctggcgggctgcccgctaacctgtcgctgaagccccagaagcgggccctcaggccaggcctaccctgcctccggcccagcatgcgcctgtcggtgcggagggtgctgctggcagccggctgcgccctggtcctggtgctggcggttcagctgggacagcaggtgctagagtgccgggcggtgctggcgggcctgcggagcccccggggggccatgcggcctgagcaggaggagctggtgatggtgggcaccaaccacgtggaataccgctatggcaaggccatgccgctcatcttcgtgggtggcgtgcctcgcagtggcaccacgttgatgcgcgccatgctggacgcbcacccygaggtgcgctgyggcgaggagacccgcatcatcccgcgcgtgctggccatgcgccaggcctggtccaagtctggccgtgagaagctgcggctggatgaggcgggggtgacggatgaggtgctggacgccgccatgcaggccttcatcctggaggtgattgccaagcacggagagccggcccgcgtgctctgcaacaaggacccatttacgctcaagtcctcggtctacctgtcgcgcctgttccccaactccaagttcctgctgatggtgcgggacggccgggcctccgtgcactccatgatcacgcgcaaagtcaccattgcgggctttgacctcagcagctaccgtgactgcctcaccaagtggaacaaggccatcgaggtgatgtacgcccagtgcatggaggtaggcaaggagaagtgcytgcctgtgtactacgagcagctggtgctgcaccccaggcgctcactcaagctcatcctcgacttcctcggcatcgcctggagcgacgctgtcctccaccatgaagacctcattggcaagcccggtggtgtytccctgtccaagatcgagcggtccacggaccaggtcatcaagcctgttaacctggaagcgctctccaagtggactggccacatccctggggatgtggtgcgggacatggcccagatcgcccccatgctggctcagctcggctatgacccttatgcaaacccccccaactatggcaaccctgaccccttcgtcatcaacaacacacagcgggtcttgaaaggggactataaaacaccagccaatctgaaaggatattttcaggtgaaccagaacagcacctcctcccacttaggaagctcgtgatttccagatctccrcaaatgacttcattgccaagaagagaagaaaatgcatttaagtggaaatcggacctctaatccaagcatattgcttgctattaatcgccaaaacaggactgctgatgaggaatgtatttgcatatgtttgcaaaagctgaatcattgaaaacgtaccttgaaactctctatctctggacactccagggtagagaatgaagggtatggaagtagtccggcttttgaaacttaggtattttatatttttcccctcaagaacttttttttaagagacagatttgccatcctccttaatttgcaggactgccttggtggctttgtttgctgggacaaggcccacaacctgtgcctctcctattgacccttactttgaattcaaagaatctatttaagagtttaatatatgaggctttctttgattcctcctcagttctacctagtttcacagaggaaaaaaatactctttgaataaagtgaacagaggctcatttgtttgtgcctyactttactgaatgaatagggttttttttttctttccatactggattttgtcaggtagatttgtgatgagcaaaaagctggagaatataggtgcatgtaaggcacagctgaattcctgtgtcagggtccccagggccacccccaggatcgatgattggctagaagaactcagaattcagaagagctattatccttatggttatggtttattacagcaaaaggataaacattaaaatcagccaaggcaggcagatcgcctgaggtcaggagttcgagaccagcctggccaacatggtgaaaccccgtctctactaaaaatacaaaaattacctgggcgtggtggtgtgcacctgtaatcccagctactcaggaggcttgaacctgggaggcggaggttgcagtgagcggagatcgtgccattatactccagcctgggtgacagagcaagactccatctcaaaataaaatcaacaaaagaaaaaggtgcatagggcagagtccgggagagaccggcctcaagcttccagttgtcatctcctggtagagtcttacagacacacttaattttcccagcaatgatatgtgacaacacgtactaaatattaccagccagaaagctcaccctagccttggggtctaggtttttattgcatgtcagtcacatagggcaatcacatgaccgactttagttacttaatcaccagctgctccagaggtcaaaatgatacagcatggcccaaggtccccaccataaatcacattattagcacaaactatctggcctggtatggcccaaggcctgaggtatacaaagacacccctacttgggaggatattccaaggacttagaggttatctcccaggagcccattaaggccagttttttctttgagatgtgctgggtttggacacttcaagcctgctgagttaacccttatagcacagtccccaaatgctgagggaccaactgggcctacaataagtttgtatctttaagggttaaggtgttttacccatacctccttgccttatatctcatgataatatgaggcttttggaaggcagtgacttattgtggcttggggcatgggtttttggagtcaggctgacctactggctgtatggcttgagactttgtctcttcatctgtaaaatggggaagttaaaacttcatggtgtgtatgtgtgtatgtgtgtgtttagacagaatctcgctctgtcactcaggctagagtacagtggcgtgatcatagctcactgcagcctcggtctcctagggtcaggtgatcctcccatcttagcctcctgagtagctgggcatgtgccaccacacctggctactttttaaatttttttttttctgtagagacgaggtctttctatgctgttcaggctgaacttcrtgggtttattggggatggctaatggatgacattggcggtggtccttgataccagataagccctcagtgtgaagcagctcttatttttccttgtcttgagattgctctggaatggaaattaggcttttttgaaggtgtgaccctttttgttcatttcttcagcagttactttttattttttaaatgtttgacacacagtctctgataaatgatcattcaccartcaccgattactctccttgctctgttaagtgtgacactgtccctttgagaatctggcgacagctatgtatcccatcaccacacaccccaaaaaaaaaatttatgtctggttccaggagttaccttttatgagaagtccatctgtgaagaccctggatgttcagagaacttcctgggaaaacactgaaagaaaataaagaggccgggcccggtggctcatgcttgtaatcccagcactttgggaggctgaggtgggcagataagctgaggtcaggagttccagaccagcctggccaacgtggcgaaaccccatctactaaaaatacaaaaattagctgggcgtcgtggcgcatgcctgtagttgcagctacttgggaggctgaggcaggagaattgcttgaacccaggaggcagaggttgcagtgaaccaagatcrtgctagtacactccagcctgggcaacagagtgagactccatctcaaaaataaaataaataaaacaaaataaaataaatacaatttctgtttctagcccctaagtggtagcactgggtcttgttccctgaaaaaaactaggctcagaatccactctcatttcatctcccctgatttgatctgaaaagattttgtttagagtactacatgaatatattataaaacatgggacaatcagaattgatagtaagaaggcaagtggctctatttgtacttcctctcaatagctcctaaaggtaatgctaccattttctgtttgtacatagtcttccagactttaaatttttgaacatataaatattatcatcttaaagacgtatggaaaaaaccattttgaataggttattccaaaatgtaatttaacagattgctctggaggattgtttgtttgtttgttttggagacagagtcccgcttggttgctcaggctgcagtgcagtggcacaaacacagctcactgcaacctctaactcctgcaaacacagctcactgcaacctctaactcctgcaaacacagctcactgcaacctctaactcctgcaaacacagctcactgcaacctctaactcctgcaaacacagctcactgcaacctctaactcctgggctcaagcagtcctttcacctcagcctcctgagtagctggaccatgacacctacctaactttttattttttgtaaagaggggaatcactrtgttgcccaggctggtctcaaactcctgggctcaagcaatccttcctcagcctctcaaagagttgggtttacaggcgtgagccaccgcacctggctcctggagcatttctgatgtgaacatgtgctgatctaacaccactccttttaccagctgcctgttctagagcaaaccatcttttttgagcattccactttggctaggccctta

SEQ ID NO: 7201 - DNA, 1986 bp, Homo sapiens
ggatccagagatttagattttttataagctttcctgccaccgaaacgggtgtttgggacctcacgaggccctgttcattcttcgtcgctgcgctccccactctgtactggatgcatttactgacgttgttgtctccgtccccagagtatgaacccccaaggtgactcatgcagctgtgggtgcccggcatacagcatggtgactggaatggatgagcacccaataaacatttgttgcaggaatgcaggaggaygggcaggccagcaagcaggctgcctggtttttcccacatgggcttttctgggaaagaagagcttctatttttggaaagggctgctatgattgagaaaagttcatggcagcaaaaaaaggacagacgtcgggagggaaacactcctagttctcccagacaacacattttttaaaaagactccttcatctctttaataataacggtaacgacaatgacaatgatgattacttatgagtgcggctagtgccagccactgtgttktcactgggcgagtaatgatctcattggatcttcacggtgggcgtgcggggctccagggacagcctgcgttcctgggctggctgggtgcagctctcttttcaggagagaaagctctcttggaggagctggaaaggtgcccgactccagccatgctggcgctactgtgttcctgcctgctcctggcagccggtgcctcggacgcctggacgggcgaggactcggcggagcccaactctgactcggcggagtggatccgagacatgtacgccaaggtcacggagatctggcaggaggtcatgcagcggcgggacgacgacggcrcgctccacgccgcctgccaggtgcagccgtcggccacgytggacgccgcgcagccccgggtgaccggcgtcgtcctcttccggcagcttgcgccccgcgccaagctcgacgccttcttcgccctggagggcttcccgaccgagccgaacagctccagccgcgccatccacgtgcaccagttcggggacctgagccagggctgcgagtccaccgggccccactacaacccgctggccgtgccgcacccgcagcacccgggcgacttcggcaacttcgcggtccgcgacggcagcctctggaggtaccgcgccggcctggccgcctcgctcgcgggcccgcactccatcgtgggccgggccgtggtcgtccacgctggcgaggacgacctgggccgcggcggcaaccaggccagcgtggagaacgggaacgcgggccggcggctggcctgctgcgtggtgggcgtgtgcgggcccgggctctgggagcgccaggcgcgggagcactcagagcgcaagaagsggcggcgcgagagcgagtgcaaggccgcctgagcgcggcccccacccggcggcggccagggacccccgaggcccccctctgcctttgagcttctcctctgctccaacagacaccytccactctgaggtctcaccttcgcctytgctgaagtctccccgcagccctctccacccagaggtctccctataccgagacccaccatccttccatcctgaggaccgccccaaccctcggagccccccactcagtaggtctgaaggcctccatttgtaccgaaacaccccgctcacgctgacagcctcctaggctccctgaggtacctttccacccagaccctccttccccaccccataagccctgagactcccgcmtttgacctgacgatcttcccccttcccgccttcaggttcctcctaggcgctcagaggccgctctggggggttgcctcgagtccccccacccctccccacccaccaccgctcccgcggsaagccagcccgtgcaacggaagccaggccaactgccccgcgtcttcagctgtttcgcatccaccgccaccccactgagagctgctcctttgggggaatgtttggcaacctttgtgttacagattaaaaattcagcaattcagt

SEQ ID NO: 7202 - DNA, 2973 bp, Homo sapiens
agcgaggtgcagggggcggggctcggcctggccgcagccattttggtgcgagagaaacaataggacggaaacgccgaggaacccggctgaggcggcagcttcctaggtgacagacaggtacactgtatgctagccctgtatctgtctgagcagtggaatgtgccaggaaagaaggagcaaccactgactgatgaacctttgccagtctcccttccaagagggatgccagagccttctagcatyctggccagaacaagccaaggagccaagacgagagggacacacggacaaacaacagacagaagacgtactggccgctggactccgctgcctcccccatctccccgccatctgcgcccggaggatgagcccagccttcagggccatggatgtggagccccgcgccaaaggcgtccttctggagccctttgtccaccaggtcggggggcactcatgcgtgctccgcttcaatgagacaaccctgtgcaagcccctggtcccaagggaacatcagttctacgagaccctccctgctgagatgcgcaaattcactccccagtacaaaggacaaagccaaaggccccttgttagctggccatccctgccccattttttcccctggtcctttcccctgtggccacagggaagtgtggcctgaataccccaccccggctcctctgcacccagagctgggggccacctcakaagtgtcatctctctctgagcacgcattcccctgcagcagtcgaggamtgagcagattgagtgatgctggggcagagaggcctgggaggaaaggtgttcagccagtcgtttgtaaggcgctcgtcggcacctgctgaaacgcccccacctgacagccccatcctcaaagactgtcttaattactcatggcaggttctagagacttaaggggaaaagctgctttcaaggccaccacatgtctgtgctccccaaccagctctatctgccttgtgttcattttgttattttgtgacgtgagactgcaaagaccaataaaaacatattttataagaacaaaaggcctgggtgcctacccgtgtgggggcactgtgggaagcctttgctagggtgtcttgtgctgtgtggtttgttttgtttgcccctttattttgctttgcttacccagtcttcccttactcttggatgcttcttaaccctcaggcaaacctgtgttccccctgtattcaggctctgctttaaagcaagccatgaggctgttggagtttctgtttagggcattaaaaattcccgcaaactataaagagcaatgttttcagtcttttaggattagaagaattacataaaaattaataaacattttcaatgatggaaaaatgtgtcttgtaattctttggctcttgcctcgttgagtacatcagagaggaagactctcagccatgtttgctccctaattgcttgtcttgtatggtgtcatcttttctagctgttttgatatttgttaagtttgcagatgagtttggggcctctggcaacatagagactaaggaactgggtaagaaaaaaacaaatgttacaatcatgttacttacaacgcttcttcctgctaaattaaaagttctttctgctcctcacccccttccaggtgtggtatctgtgcgctttgaagaagatgaagacaggaacttgtgtctaatagcatatccattgaaaggggaccatggaattgtggacattgtagataattcagactgtgaaccaaaaagtaagctcctaaggtggacaacaaacaaaaaacatcatgtcttagaaacagaaaagacccctaaggactgggtgcgtcagcaccgtaaagaggagaaaatgaagagccataagttagaagaagaatttgagtggctaaagaaatctgaagtcttgtactacactgtagagaagaaggggaatataagttcccagcttaaacactataacccttggagcatgaaatgtcaccagcaacagttacagagaatgaaggagaatgcaaagcatcggaaccagtacaaatttatcttactggaaaacctgacttcccgctaygaggtgccttgtgtccttgacctcaagatgggcacacgacaacatggtgatgatgcttcagaggagaaggcagccaaccagatccgaaaatgtcagcagagcacatctgcagtcattggtgtgcgtgtgtgtggcatgcaggtgtaccaagcaggcagtgggcagctcatgttcatgaacaagtaccatggacggaagctatcggtgcagggcttcaaggaggcacttttccagttcttccacaatgggcggtacctgcgccgtgaactcctgggccctgtgctcaagaagctgactgagctcaaggcagtgttggagcgacaggagtcctaccgcttctactcaagctccctgctggtcatttatgatggcaaggagcggcccgaagtggtcctggactcagatgctgaggatttggaggacctgtcagaggaatcagctgatgagtctgctggtgcctatgcctacaaacccatcggcgccagctctgtagatgtgcgcatgatcgactttgcacacaccacctgcaggctgtatggcgaggacaccgtggtgcatgagggccaggatgctggctatatcttcgggctccagagcctgatagacattgtcacagagataagtgaggagagtggggagtragcttgctagctgctccagtacttgagagcgactctgtgtcccaggcacagctgtgctgcgtcagggaggaagccagtatggccaggtggtggctcctgcagcctggagctgatgtgcagtggcctctgtgagccccagcctgagccagtcccagctgtgcttggagtctttatttattttaactatttcttcaacattccacatttgatgatgatacctctttcttccctgagtgtatatgttctaatacaaatctttttgtttwtt

SEQ ID NO: 7203 - DNA, 1753 bp, Homo sapiens
tggccgcagccattttggtgcgagagaaacaataggacggaaacgccgaggaacccggctgaggcggcagagcatyctggccagaacaagccaaggagccaagacgagagggacacacggacaaacaacagacagaagacgtactggccgctggactccgctgcctcccccatctccccgccatctgcgcccggaggatgagcccagccttcagggccatggatgtggagccccgcgccaaaggcgtccttctggagccctttgtccaccaggtcggggggcactcatgcgtgctccgcttcaatgagacaaccctgtgcaagcccctggtcccaagggaacatcagttctacgagaccctccctgctgagatgcgcaaattcactccccagtacaaaggggacatcagcagccaccagcatggtggggtctttgttggggagtgggggagtcttttgtaaatcaagacaaagccaaaggccccttgttagctggccatccctgccccattttttcccctggtcctttcccctgtggccacagggaagtgtggcctgaataccccaccccggctcctctgcacccagagctgggggccacctcakaagtgtcatctctctctgagcacgcattcccctgcagcagtcgaggamtgagcagattgagtgatgctggggcagagaggcctgggaggaaaggtgttcagccagtcgtttgtaaggcgctcgtcggcacctgctgaaacgcccccacctgacagccccatcctcaaagactgtcttaattactcatggcaggttctagagacttaaggggaaaagctgctttcaaggccaccacatgtctgtgctccccaaccagctctatctgccttgtgttcattttgttattttgtgacgtgagactgcaaagaccaataaaaacatattttataagaacaaaaggcctgggtgcctacccgtgtgggggcactgtgggaagcctttgctagggtgtcttgtgctgtgtggtttgttttgtttgcccctttattttgctttgcttacccagtcttcccttactcttggatgcttcttaaccctcaggcaaacctgtgttccccctgtattcaggctctgctttaaagcaagccatgaggctgttggagtttctgtttagggcattaaaaattcccgcaaactataaagagcaatgttttcagtcttttaggattagaagaattacataaaaattaataaacattttcaatgatggaaaaatgtgtcttgtaattctttggctcttgcctcgttgagtacatcagagaggaagactctcagccatgtttgctccctaattgcttgtcttgtatggtgtcatcttttctagctgttttgatatttgttaagtttgcagatgagtttggggcctctggcaacatagagactaaggaactgggtaagaaaaaaacaaatgttacaatcatgttacttacaacgcttcttcctgctaaattaaaagttctttctgctcctcacccccttccaggtgtggtatctgtgcgctttgaagaagatgaagacaggaacttgtgtctaatagcatatccattgaaaggggaccatggaattgtggacattgtagataattcagactgtgaaccaaaaagtaagctcctaaggtggacaacaaacaaaaaacatcatgtcttagaaacagaaaagacccctaaggactgggtgcgtcagcaccgtaaagaggagaaaatgaagag

SEQ ID NO: 7204 - DNA, 1986 bp, Homo sapiens
agcgaggtgcagggggcggggctcggcctggccgcagccattttggtgcgagagaaacaataggacggaaacgccgaggaacccggctgaggcggcagcttcctaggtgacagacaggtacactgtatgctagccctgtatctgtctgagcagtggaatgtgccaggaaagaaggagcaaccactgactgatgaacctttgccagtctcccttccaagagggatgccagagccttctgtaagctcctgagatgtcactggtatctaggcaacagggatgagcctgaacctccctgaggccagcttactgagagcatyctggccagaacaagccaaggagccaagacgagagggacacacggacaaacaacagacagaagacgtactggccgctggactccgctgcctcccccatctccccgccatctgcgcccggaggatgagcccagccttcagggccatggatgtggagccccgcgccaaaggcgtccttctggagccctttgtccaccaggtcggggggcactcatgcgtgctccgcttcaatgagacaaccctgtgcaagcccctggtcccaagggaacatcagttctacgagaccctccctgctgagatgcgcaaattcactccccagtacaaaggtgtggtatctgtgcgctttgaagaagatgaagacaggaacttgtgtctaatagcatatccattgaaaggggaccatggaattgtggacattgtagataattcagactgtgaaccaaaaagtaagctcctaaggtggacaacaaacaaaaaacatcatgtcttagaaacagaaaagacccctaaggactgggtgcgtcagcaccgtaaagaggagaaaatgaagagccataagttagaagaagaatttgagtggctaaagaaatctgaagtcttgtactacactgtagagaagaaggggaatataagttcccagcttaaacactataacccttggagcatgaaatgtcaccagcaacagttacagagaatgaaggagaatgcaaagcatcggaaccagtacaaatttatcttactggaaaacctgacttcccgctaygaggtgccttgtgtccttgacctcaagatgggcacacgacaacatggtgatgatgcttcagaggagaaggcagccaaccagatccgaaaatgtcagcagagcacatctgcagtcattggtgtgcgtgtgtgtggcatgcaggtgtaccaagcaggcagtgggcagctcatgttcatgaacaagtaccatggacggaagctatcggtgcagggcttcaaggaggcacttttccagttcttccacaatgggcggtacctgcgccgtgaactcctgggccctgtgctcaagaagctgactgagctcaaggcagtgttggagcgacaggagtcctaccgcttctactcaagctccctgctggtcatttatgatggcaaggagcggcccgaagtggtcctggactcagatgctgaggatttggaggacctgtcagaggaatcagctgatgagtctgctggtgcctatgcctacaaacccatcggcgccagctctgtagatgtgcgcatgatcgactttgcacacaccacctgcaggctgtatggcgaggacaccgtggtgcatgagggccaggatgctggctatatcttcgggctccagagcctgatagacattgtcacagagataagtgaggagagtggggagtragcttgctagctgctccagtacttgagagcgactctgtgtcccaggcacagctgtgctgcgtcagggaggaagccagtatggccaggtggtggctcctgcagcctggagctgatgtgcagtggcctctgtgagccccagcctgagccagtcccagctgtgcttggagtctttatttattttaactatttcttcaacattccacatttgatgatgatacctctttcttccctgagtgtatatgttctaatacaaatctttttgtttwtt

SEQ ID NO: 7205 - DNA, 1989 bp, Homo sapiens
agcgaggtgcagggggcggggctcggcctggccgcagccattttggtgcgagagaaacaataggacggaaacgccgaggaacccggctgaggcggcagcttcctaggtgacagacaggtacactgtatgctagccctgtatctgtctgagcagtggaatgtgccaggaaagaaggagcaaccactgactgatgaacctttgccagtctcccttccaagagggatgccagagccttctgtaagctcctgagatgtcactggtatctaggcaacagggatgagcctgaacctccctgaggccagcttactgagcagagcatyctggccagaacaagccaaggagccaagacgagagggacacacggacaaacaacagacagaagacgtactggccgctggactccgctgcctcccccatctccccgccatctgcgcccggaggatgagcccagccttcagggccatggatgtggagccccgcgccaaaggcgtccttctggagccctttgtccaccaggtcggggggcactcatgcgtgctccgcttcaatgagacaaccctgtgcaagcccctggtcccaagggaacatcagttctacgagaccctccctgctgagatgcgcaaattcactccccagtacaaaggtgtggtatctgtgcgctttgaagaagatgaagacaggaacttgtgtctaatagcatatccattgaaaggggaccatggaattgtggacattgtagataattcagactgtgaaccaaaaagtaagctcctaaggtggacaacaaacaaaaaacatcatgtcttagaaacagaaaagacccctaaggactgggtgcgtcagcaccgtaaagaggagaaaatgaagagccataagttagaagaagaatttgagtggctaaagaaatctgaagtcttgtactacactgtagagaagaaggggaatataagttcccagcttaaacactataacccttggagcatgaaatgtcaccagcaacagttacagagaatgaaggagaatgcaaagcatcggaaccagtacaaatttatcttactggaaaacctgacttcccgctaygaggtgccttgtgtccttgacctcaagatgggcacacgacaacatggtgatgatgcttcagaggagaaggcagccaaccagatccgaaaatgtcagcagagcacatctgcagtcattggtgtgcgtgtgtgtggcatgcaggtgtaccaagcaggcagtgggcagctcatgttcatgaacaagtaccatggacggaagctatcggtgcagggcttcaaggaggcacttttccagttcttccacaatgggcggtacctgcgccgtgaactcctgggccctgtgctcaagaagctgactgagctcaaggcagtgttggagcgacaggagtcctaccgcttctactcaagctccctgctggtcatttatgatggcaaggagcggcccgaagtggtcctggactcagatgctgaggatttggaggacctgtcagaggaatcagctgatgagtctgctggtgcctatgcctacaaacccatcggcgccagctctgtagatgtgcgcatgatcgactttgcacacaccacctgcaggctgtatggcgaggacaccgtggtgcatgagggccaggatgctggctatatcttcgggctccagagcctgatagacattgtcacagagataagtgaggagagtggggagtragcttgctagctgctccagtacttgagagcgactctgtgtcccaggcacagctgtgctgcgtcagggaggaagccagtatggccaggtggtggctcctgcagcctggagctgatgtgcagtggcctctgtgagccccagcctgagccagtcccagctgtgcttggagtctttatttattttaactatttcttcaacattccacatttgatgatgatacctctttcttccctgagtgtatatgttctaatacaaatctttttgtttwtt

SEQ ID NO: 7206 - DNA, 1678 bp, Homo sapiens
cagagcatyctggccagaacaagccaaggagccaagacgagagggacacacggacaaacaacagacagaagacgtactggccgctggactccgctgcctcccccatctccccgccatctgcgcccggaggatgagcccagccttcagggccatggatgtggagccccgcgccaaaggcgtccttctggagccctttgtccaccaggtcggggggcactcatgcgtgctccgcttcaatgagacaaccctgtgcaagcccctggtcccaagggaacatcagttctacgagaccctccctgctgagatgcgcaaattcactccccagtacaaaggtgtggtatctgtgcgctttgaagaagatgaagacaggaacttgtgtctaatagcatatccattgaaaggggaccatggaattgtggacattgtagataattcagactgtgaaccaaaaagtaagctcctaaggtggacaacaaacaaaaaacatcatgtcttagaaacagaaaagacccctaaggactgggtgcgtcagcaccgtaaagaggagaaaatgaagagccataagttagaagaagaatttgagtggctaaagaaatctgaagtcttgtactacactgtagagaagaaggggaatataagttcccagcttaaacactataacccttggagcatgaaatgtcaccagcaacagttacagagaatgaaggagaatgcaaagcatcggaaccagtacaaatttatcttactggaaaacctgacttcccgctaygaggtgccttgtgtccttgacctcaagatgggcacacgacaacatggtgatgatgcttcagaggagaaggcagccaaccagatccgaaaatgtcagcagagcacatctgcagtcattggtgtgcgtgtgtgtggcatgcaggtgtaccaagcaggcagtgggcagctcatgttcatgaacaagtaccatggacggaagctatcggtgcagggcttcaaggaggcacttttccagttcttccacaatgggcggtacctgcgccgtgaactcctgggccctgtgctcaagaagctgactgagctcaaggcagtgttggagcgacaggagtcctaccgcttctactcaagctccctgctggtcatttatgatggcaaggagcggcccgaagtggtcctggactcagatgctgaggatttggaggacctgtcagaggaatcagctgatgagtctgctggtgcctatgcctacaaacccatcggcgccagctctgtagatgtgcgcatgatcgactttgcacacaccacctgcaggctgtatggcgaggacaccgtggtgcatgagggccaggatgctggctatatcttcgggctccagagcctgatagacattgtcacagagataagtgaggagagtggggagtragcttgctagctgctccagtacttgagagcgactctgtgtcccaggcacagctgtgctgcgtcagggaggaagccagtatggccaggtggtggctcctgcagcctggagctgatgtgcagtggcctctgtgagccccagcctgagccagtcccagctgtgcttggagtctttatttattttaactatttcttcaacattccacatttgatgatgatacctctttcttccctgagtgtatatgttctaatacaaatctttttgtttwtt

SEQ ID NO: 7207 - DNA, 1737 bp, Homo sapiens
attttggtgcgagagaaacaataggacggaaacgccgaggaacccggctgaggcggcagcagagcatyctggccagaacaagccaaggagccaagacgagagggacacacggacaaacaacagacagaagacgtactggccgctggactccgctgcctcccccatctccccgccatctgcgcccggaggatgagcccagccttcagggccatggatgtggagccccgcgccaaaggcgtccttctggagccctttgtccaccaggtcggggggcactcatgcgtgctccgcttcaatgagacaaccctgtgcaagcccctggtcccaagggaacatcagttctacgagaccctccctgctgagatgcgcaaattcactccccagtacaaaggtgtggtatctgtgcgctttgaagaagatgaagacaggaacttgtgtctaatagcatatccattgaaaggggaccatggaattgtggacattgtagataattcagactgtgaaccaaaaagtaagctcctaaggtggacaacaaacaaaaaacatcatgtcttagaaacagaaaagacccctaaggactgggtgcgtcagcaccgtaaagaggagaaaatgaagagccataagttagaagaagaatttgagtggctaaagaaatctgaagtcttgtactacactgtagagaagaaggggaatataagttcccagcttaaacactataacccttggagcatgaaatgtcaccagcaacagttacagagaatgaaggagaatgcaaagcatcggaaccagtacaaatttatcttactggaaaacctgacttcccgctaygaggtgccttgtgtccttgacctcaagatgggcacacgacaacatggtgatgatgcttcagaggagaaggcagccaaccagatccgaaaatgtcagcagagcacatctgcagtcattggtgtgcgtgtgtgtggcatgcaggtgtaccaagcaggcagtgggcagctcatgttcatgaacaagtaccatggacggaagctatcggtgcagggcttcaaggaggcacttttccagttcttccacaatgggcggtacctgcgccgtgaactcctgggccctgtgctcaagaagctgactgagctcaaggcagtgttggagcgacaggagtcctaccgcttctactcaagctccctgctggtcatttatgatggcaaggagcggcccgaagtggtcctggactcagatgctgaggatttggaggacctgtcagaggaatcagctgatgagtctgctggtgcctatgcctacaaacccatcggcgccagctctgtagatgtgcgcatgatcgactttgcacacaccacctgcaggctgtatggcgaggacaccgtggtgcatgagggccaggatgctggctatatcttcgggctccagagcctgatagacattgtcacagagataagtgaggagagtggggagtragcttgctagctgctccagtacttgagagcgactctgtgtcccaggcacagctgtgctgcgtcagggaggaagccagtatggccaggtggtggctcctgcagcctggagctgatgtgcagtggcctctgtgagccccagcctgagccagtcccagctgtgcttggagtctttatttattttaactatttcttcaacattccacatttgatgatgatacctctttcttccctgagtgtatatgttctaatacaaatctttttgtttwtt

SEQ ID NO: 7208 - DNA, 1987 bp, Homo sapiens
tactgactttcagcaccaacttgtggtcccaggtaagtttccacgctggtactttagccctgggctcgaacctgcggacacgctgtggctgcaactccccgcccgccagacctcagtacgcagcgcggctggtgagaaacataatgcactctgacttccacgcgtggaatggggagatggactgcacggcgggcggacctgctcgggctgatggacggcaggtggactgatgtgcgcagggactggcggcagcgcggtcagagccagtcagccaaagccaggccagcacaatagactgtcccggttcccgccaggagggcagcccagcaccaactgtacggtactgcgcctgcgccgcgaccgccaacgcgcccagtctacgcttgccggcgcaacagggccgactgcagctggaagatggcggcgtccgtggtctgtcgggccgctaccgccggggcacaagtgctattgcgcgcccgccgctcgccggccctgctgcggacgccagccttgcggagtacggcaaccttcgctcaggcgctccagttcgtgccggagacgcaggttagcctgctggacaacggcctgcgtgtggcctccgagcagtcctctcagcccacttgcacggtgggagtgtggattgatgttggcagccgttttgagactgagaagaataatggggcaggctactttttggagcatctggctttcaagggaacaaagaatcggcctggcagtgccctggagaaggaggtggagagcatgggggcccatcttaatgcctacagcacccgggagcacacagcttactacatcaaggcgctgtccaaggatctgccgaaagctgtggagctcctgggtgacattgtgcagaactgtagtctggaagactcacagattgagaaggaacgtgatgtgatcctgcgggagatgcaggagaatgatgcatctatgcgagatgtggtctttaactacctgcatgccacagcattccagggcacacctctagcccaggctgtggaggggcccagtgagaatgtcaggaagctgtctcgtgcagacttgaccgagtacctcagcacacattacaaggcccctcgaatggtgctggcagcagctggaggagtggagcaccagcaactgttagacctcgcccagaagcacctcggtggcatcccatggacatatgcagaggacgctgtgcccactcttactccatgccrcttcactggcagtgagatccgccaccgtgatgatgctctaccttttgcccacgtggccattgcagtagagggtcctggctgggccagcccggacaatgtggccttgcaagtggccaatgccatcatcggccactatgactgcacttatggtggtggcgtgcacctgtccagcccactggcttcaggtgctgtggccaacaagctatgccagagtttccagaccttcagcatctgctatgcagagacgggcttgctgggtgcacactttgtctgtgaccgaatgaaaatcgatgacatgatgttcgtcctgcaagggcagtggatgcgcctgtgtaccagtgccacggagagtgaggtggcccggggcaaaaacatcctcagaaatgccctggtatctcatctagatggcactactcctgtgtgtgaggacatcggacgcagcctcctgacctatggccgccgcatccccctggctgaatgggaaagccggattgcggaggtggatgccagtgtggtacgtgagatctgctccaagtacatctatgaccagtgcccagcagtggctggatatggccccattgagcagctcccagactacaaccggatccgtagcggcatgttctggctgcgcttytaggcgggaagyctatgtaagcaagagggcagggccggggtttgtggtccccccycmaccacaaacacagcacttcggctcctctaacctgtgccacaggtgaccaccaataaaatcctctgctgagaag

SEQ ID NO: 7209 - DNA, 3525 bp, Homo sapiens
gcccgaggtggcccggctgctgggttggaagcggcgcagtccgactcatcccggccccgggatggcgtccccacgggaattgacacagaaccccctgaagaagatctggatgccatacagcaatgggcggcccgctctgcacgcttgccagcgcggtgtgtgcatgaccaactgcccaactctcattgtcatggtgggcctgcccgccaggggcaagacctacatctccaagaagctgactcgatacctgaactggattggtgtgcccactcgggagttcaatgttggccagtatcgccgggacgtggtcaagacctacaaatcttttgaattttttctccccgacaatgaagagggcctgaaaatcaggaagcagtgtgccctggcagccctccgtgacgtccggcggttccttagtgaggaggggggacatgtggcggtttttgatgccacaaacaccacccgagaacggagagcgaccatctttaattttggagaacagaatggctacaagaccttttttgtcgagtccatctgtgtggatcctgaggtcatagctgccaacatcgtgcaagtgaaactgggcagccctgactatgtcaaccgcgacagtgatgaggctacggaggacttcatgaggcgcattgagtgctatgagaactcctacgagtcgctagatgaggacctggatagggacctgtcctatatcaagatcatggatgtgggccagagctacgtggtgaaccgtgtggctgaccacatccagagccgcatcgtatattacctcatgaacatccacgtgaccccccgctccatctacctctgccggcacggggagagcgagctcaacctcaagggccggattggcggggacccaggactgtcccctcggggcagggagtttgccaagagtctagcccagttcatcagtgaccaaaatatcaaggatctgaaggtctggacaagccagatgaagaggacaatccagacggctgaggcactgggtgtgccctatgaacagtggaaggtcctcaacgagatcgatgcgggcgtctgtgaggaaatgacctacgaggaaattcaggataattatccactggagttcgccctgcgggaccaggacaagtaccggtaccggtaccctaaaggggagtcctacgaggacctggtccagagactggagcctgtcatcatggagctggagaggcaagagaatgtgctggtcatctgccaccaggctgtgatgcgctgcctgctggcctacttcctcgacaaggcagcagaacagctgccctacctcaagtgtccgctgcacacagtcctgaagctgactcctgtggcatatggttgtaaagtggagtccatattcctgaacgtggctgctgtgaacacgcaccgggacaggcctcagaacgtggacatctcaagacctccagaggaagcccttgtcacggtgcctgctcaccagtgaccatgttcatccacygtgaccactaggcaggcactgctctctgcagagggggtcattccaggccctccagtgtgtgtgatagtcaccatgccatgcagggatattcttgaagccacacatggctggcggaacccagagcccccaccccagcccacctggctctttgttgacagtcggcgacaaggttgtgcgtggctcctgacctgctgctaagagtcacttgaccagactgcatctgcatgggctgcgcggaggttgcccagccccagtttcttccggcgcagctcttaggtgttcactctcgccagctcagttggctttgtgaagtgtgaaaccctacaatgtgaaaggaaagtgcttgctgtgatgttcctactgtggcccagctgcccagcatggacctggtgactctccacagggcctctaccatcctctctgtggccacttcctgagccagaggccaggtcttcatggggccctgagcttctgctgcctctggtgagagggagagcccttcccatccttacccaccaggaactagagccccaaccacagcagatgcttcctgggcagccactggccaggccgttgtatccatgtcacccttagttgtgggcattcatgaaagcaatgcgcttgcttcagcacattgggatgcacagaaacgtgagggcaggggggcagttgtggtcgcccctccccagttgtgcatgtacccggctacttaggtatgcttaggggagctggtggccaggggtgccccttcaggcctgctctcacagtgaaaccacttcaagacagggcaggaagttaccttcctggtgcacacaccgaagtgctygagggagaggctgccgccccctctccccttccctggctgtggacactggcagccaatggggaggcggcctctcccctgttgctgcccgtgtccacacaggaatgtactctggtggcagaaacatgcatttgccataaataattcagaaacacttgtatggtcctgtaaaacttctctggtgtttgttgacttctgcctgtgggtctgaggaagggagaaggcagaacccataggcagtccctgggcaagggaggattttcccggccgcagcacagccttccattcatgtgcacgtgagtctggtgaaaatggccttgtgaagtccagtgtctgtcatgcccctgagttcttttggtcccagagaggcagcctgggcagtctgtttacagctggcaaacagactggctggcaagttgtggggctgggtcagaaagtgtctggacttgtaatcgggtgccctgctgtccacaggtggactctggggaagccaggcccctggatcccaagtcctttgtgtccggagcctttcctggcctgtgcctggagggtagcacatctttccagcctcccagggctttgcagcctgcagatgccacctgtccctgagagaagttagcgtccctggccctggccggtggtctctcatccttgtgtgctgctctgctaagagatgtccaaggcggagcyrgggcaagatccttccagactcatctgtcagagccccaagccctttagacccagagcccaaggaccatgcctttgggacattaggactgcagcctttgcttctgtgtattttggagttttggtgacttttgtcacctggacacactcatttgttagccatagtgggttcccttggtcagcaacagtgcatgtacctctggatgtcatctgaggtgagaccaccgaggccttttctctctgtgtacagaggggagttaggagttgctggactggatgcattacgaggactggggacagggtaragggacatccagggatcagggcatgagtgggggcaaccccccggcctctgccctggcatggtctccgcatgggctgaggtgtagctgattggctgccacatttcggccatgctggctggcgtgcccatgttgcagatattttcccgagttccccagaatggatggtattgaatctcagccacatgcaacactgtgtccagcattctttgcaataaatacttttt

SEQ ID NO: 7210 - DNA, 2794 bp, Homo sapiens
taggttttaaagacgctagagtgccaaagaagactttgaagtgtgaaaacatttcctgtaattgaaaccaaaatgtcatttatagatccttaccagcacattatagtggagcaccagtattcccacaagtttacggtagtggtgttacgtgccaccaaagtgacaaagggggcctttggtgacatgcttgatactccagatccctatgtggaactttttatctctacaacccctgacagcaggaagagaacaagacatttcaataatgacataaaccctgtgtggaatgagacctttgaatttattttggatcctaatcaggaaaatgttttggagattacgttaatggatgccaattatgtcatggatgaaactctagggacagcaacatttactgtatcttctatgaaggtgggagaaaagaaagaagttccttttattttcaaccaagtcactgaaatggttctagaaatgtctcttgaagtttgctcatgcccagacctacgatttagtatggctctgtgtgatcaggagaagactttcagacaacagagaaaagaacacataagggagagcatgaagaaactcttgggtccaaagaatagtgaaggattgcattctgcacgtgatgtgcctgtggtagccatattgggttcaggtgggggtttccgagccatggtgggattctctggtgtgatgaaggcattatacgaatcaggaattctggattgtgctacctacgttgctggtctttctggctccacctggtatatgtcaaccttgtattctcaccctgattttccagagaaagggccagaggagattaatgaagaactaatgaaaaatgttagccacaatccccttttacttctcacaccacagaaagttaaaagatatgttgagtctttatggaagaagaaaagctctggacaacctgtcacctttactgatatctttgggatgttaataggagaaacactaattcataatagaatgaatactactctgagcagtttgaaggaaaaagttaatactgcacaatgccctttacctcttttcacctgtcttcatgtcaaacctgacgtttcagagctgatgtttgcagattgggttgaatttagtccatacgaaattggcatggctaaatatggtacttttatggctcccgacttatttggaagcaaattttttatgggaacagtcgttaagaagtatgaagaaaaccccttgcatttcttaatgggtgtctggggcagtgccttttccatattgttcaacagagttttgggcgtttctggttcacaaagcagaggctccacaatggaggaagaattagaaaatattaccacaaagcatattgtgagtaatgatagctcggacagtgatgatgaatcacacgaacccaaaggcactgaaaatgaagatgctggaagtgactatcaaagtgataatcaagcaagttggattcatcgtatgataatggccttggtgagtgattcagctttattcaataccagagaaggacgtgctgggaaggtacacaacttcatgctgggcttgaatctcaatacatcttatccactgtctcctttgagtgactttgccacacaggactcctttgatgatgatgaactggatgcagctgtagcagatcctgatgaatttgagcgaatatatgagcctctggatgtcaaaagtaaaaagattcatgtagtggacagtgggctcacatttaacctgccgtatcccttgatactgagacctcagagaggggttgatctcataatctcctttgacttttctgcaaggccaagtgactctagtcctccrttcaaggaacttctacttgcagaaaagtgggctaaaatgaacaagctcccctttccaaagattgatccttatgtgtttgatcgggaagggctgaaggagtgctatgtctttaaacccaagaatcctgatatggagaaagattgcccaaccatcatccactttgttctggccaacatcaacttcagaaagtacarggctccaggtgttccaagggaaactgaggaagagaaagaaatcgctgactttgatatttttgatgacccagaatcaccattttcaaccttcaattttcaatatccaaatcaagcattcaaaagactacatgatcttatgcacttcaatactctgaacaacattgatgtgataaaagaagccatggttgaaagcattgaatatagaagacagaatccatctcgttgctctgtttcccttagtaatgttgaggcaagaagatttttcaacaaggagtttctaagtaaacccaaagcatagttcatgtactggaaatggcagcagtttctgatgctgaggcagtttgcaatcccatgacaactggatttaaaagtacagtacagatagtcgtactgatcatgagagactggctgatactcaaagttgcagttacttagctgcatkagaataatactattataagttaggttgacaaatgatgttgattatgtaaggatatacttagctacattttcagtcagtatgaacttcctgatacaaatgtagggatatatactgtatttttaaacatttctcaccaactttcttatgtgtgttctttttaaaaattttttttcttttaaaatatttaacagttcaatctcaataagacctcgcattatgtatgaatgttattcactgactagatttattcataccatgagacaacactatttttatttatatatgcatatatatacatacatgaaataaatacatcaatataaaaata

SEQ ID NO: 7211 - DNA, 3670 bp, Homo sapiens
gtcctccctgcagcccgctagggccgctcgcccgtcgccgcctgcggaacgcggaggggcagcacggccacgcccggccactcgaacctgctccccggcgccgcgtgaccgtgtcaggtccccgtcggcctcgccgtgccgaccccgggcgcctccacagtggctcggaggccgctgctgcccggatgcccgggttccacgaggctctcccagcccgacaagcccgccgatcccacgggcacgggcggaggagagggaaccgccgcgcccgccccgcgcgccgtcgccgaccccggtgggtcgcgcttccccgcgcacgccgcgctctggcgcggggagaggcccctcggggtccgcccgggtcagcgtcccgcgggggtggcggccgttcgctcagcctcctctcgacttccctttcctgtcagggctgctggggctgacaggctcccgggcaaccacgccggggaacccctcacgcccgccgatcgctgcggggctcagcagccgccccgtgcgctgagtcccctgtcatgagtgactccattgcgaggcgtttcgggccacgaagcaggaccgggggccgcactccgggtccccgccctgccctcgccgacctyccgcgcgtggaagggggacggcggcggcggagctccccgccacggagaaccccgaaatggtcatttcgaacgagaggagtgtggcctggggtgtctggtttaacagccccccgcgccgaaaggctgttcgccgaggaggggccgccggggagggagcccgagcgcggcggggcgagaccggtccccgcccggcgttgcccggcccgagggacggcggcgcccccaggaccctccccagcgcggccccagctcgctccgggaccgcggggccaggccgggcgggagcgcgggsacgtacacggcggccccgcccgcgcgytcctcctccctcccggcccgccctgcgccggcggcggcggccccagtctccgcgctgctgaggcgcgcccggccgctcccacrgcctcccctccgccctgcggtcccgccgcctccggggcctcctgggaccctggccctcgccgggcaggacgccgccagcgctgaaggcgcagcccggaggccgcgcggatgcagatctgtggatccagcgtagcatctgtagcagctgggacatcattccaggttttgggcccggtgtgttggcaacaactggatctgaagatggcagtcagggtgctttggggtggtctyagcctgctccgagtgctgtggtgtctccttccgcagacgggctatgtgcacccagatgagttcttccagtcccctgaggtgatggcagaggacatcctgggcgttcaggccgcgcggccctgggagttttaccccagcagctcctgccgctcggtgctcttccccctgctgatctctggttccaccttctggctgctcaggctctgggagragctggggccgtggcctggcctggtgagcggctatgcgctgctggtggggcctcgactcctcctcactgccctttcctttgctctggacggggccgtgtaccacctggccccgccgatgggggcggatcgctggaacgccctggccctgctgtctggttcctacgtcaccctggtcttctacacaaggaccttctccaacaccattgagggactcctcttcacgtggctgctggtgctggtatcctcccatgtaacgtggggccctacacgcaaggagccggcgccgggtccacggtggcgcagctggcttcttggaggcattgtggctgctggcttcttcaaccrgcccacctttctggcctttgctgtggtccccctctacctctggggcactcgtggagccacaaaccctggtttgaagtctctgacccgggaggccctggtgctgctccctggggcgaccctcacagcagcggtgtttgtggccacggacagctggtatttctccagccccgctacatccaggaaccttgtcctgacacctgtcaacttcttgcactacaacctgaatccccaaaacctggcgagacatggcacgcacgcgcggctcactcacctggcagtcaacggcttcctgctcttcggggtgctgcatgcccaggccctgcaggctgcgtggcaacggctgcaagtcggcctccaggcctctgcacaaatgggcctcctgagggcactgggtgcccggagcctgctgtccagccccaggtcctatctccttctcctctacttcatgcctctggccctgctatctgcctttagccaccaggaggctcggttcctgattcccctcctggtccccctggtcctgctttgtagtccacagacgcagcctgtgccttggaagggcactgtggtcctcttcaacgccctcggtgccctcctcttcggctgcctgcatcaggggggcctggtgcctggcctggagtacctggagcaggtggtccatgcccctgtgctcccaagcacacccacccactacacactcctcttcactcacacctacatgcccccccggcacctcctacacctcccaggcctgggggcaccagtggaggtggtggacatgggggggactgaggactgggccctgtgccaaaccctgaaaagcttcaccagacaaccagcctgccaagtggctggtgggccatggctctgccgcctctttgtggtaacccctggcaccaccaggcgtgccgtggagaagtgcagcttccccttcaagaatgaaacacttttatttccccatctgaccctggaggatccaccagccctgtcctccttgctgagtggggcttggagggaccacctcagtcttcacattgtggagctgggggaagaaacctgacaatatgacagagcacccactgcccaagactcagccatagaagatgccgccccaccttctacttgggtagctgggctgggacgctgggacaggaccccgtcctccttcatgactcccactgctgcctctcctgggcatggctgttagctgttctgccttctgggtgagctggcactcttctccctgagaccaaagatttgacctgtcggtcttgatgtcaaggtccccaaagaccaggttaagtgacgacacctgtctgttcctgccctgttgcttccagccactgtgatgtttgaaatatgtgatagtacctggttgtgaaaaaagacaatgaactgctagtgacattcctcaatgacctctcccaaacctcccatgatgccttacccttgctgtcatgacaaccctctggcttcctaagacccatctgcctatcgaaatatgtgcaagtcagtgagacgaagtatagagaacaggtggcccagatccaggggacccaacttctggccccttggtctgtcacctcctcgctgtgtgatcttgagaaagctccttccactcacccaccccacttcccagtctgttgggatcagaggaactttgaggtgtctgccggctaacattgtgtcattcctggagtccacagtacacgtcccctgcctcaacaggcacagctctcacaaagctcttcaagcatggaagtgggagttgtgttgtacttcatggcactctgatgcctgctgtctcagtgtttggttattatgcaaacaagtaatgtttgaaatatataatagcactggaga

SEQ ID NO: 7212 - DNA, 2780 bp, Homo sapiens
gccgggcgggagcgcggggacgtacacggcggccccgcccgcgcgctcctcctccctcccggcccgccctgcgccggcggcggcggccccagtctccgcgctgctgaggcgcgcccggccgctcccacggcctcccctccgccctgcggtcccgccgcctccggggcctcctgggaccctggccctcgccgggcaggacgccgccagcgctgaaggcgcagcccggaggccgcgcggatgcagatctgtggatccagcgtagcatctgtagcagctgggacatcattccaggttttgggcccggtgtgttggcaacaactggatctgaagatggcagtcagggtgctttggggtggtctcagcctgctccgagtgctgtggtgtctccttccgcagacgggctatgtgcacccagatgagttcttccagtcccctgaggtgatggcagaggacatcctgggcgttcaggccgcgcggccctgggagttttaccccagcagctcctgccgctcggtgctcttccccctgctgatctctggttccaccttctggctgctcaggctctgggaggagctggggccgtggcctggcctggtgagcggctatgcgctgctggyggggcctcgactcctcctcactgccctttcctttgctctggacggggccgtgtaccacctggccccgccgatgggggcggatcgctggaacgccctggccctgctgtctggttcctacgtcaccctggtcttctacacaaggaccttctccaacaccattgagggactcctcttcacrtggctgctggtgctggtatcctcccatgtaacgtggggccctacacgcaaggagcckgcgccgggtccacggtggcgcagctggcttcttggaggcattgtggctgctggcttsttcaaccggcccacctttctggccttygctgtggtccccctctacctctggggcactcgtggagccacaaaccctggtttgaagtctctgacccgggaggccctggtgctgctccctggggcgaccctcacagcagcggtgtttgtggccacggacagctggtatttctccagccccgctacatccaggaaccttgtcctgacacctgtcaacttcttgcactacaacctgaatccccaaaacctggcgagacatggcacgcacgcgcggctcactcacctggcagtcaacggcttcctgctcttcggggtgctgcatgcccaggccctgcaggctgcgtggcaacggctgcaagtcggcctccaggcctctgcacaaatgggcctcctgagggcactgggtgcccggagcctgctgtccagccccaggtcctatctccttctcctctacttcatgcctctggccctgctatctgcctttagccaccaggaggctcggttcctgattcccctcctggtccccctggtcctgctttgtagtccacagacgcarcctgtgccttggaagggcactgtggtcctcttcaacgccctcggtgccctcctcttcggctgcctgcatcaggggggcctggtgcctggcctggagtacctggagcaggtggtccatgcccctgtgctcccaagcacacccacccactacacactcctcttcactcacacctacatgcccccccggcacctcctacacctcccaggcctgggggcaccagtggaggtggtggacatgggggggactgaggactgggccctgtgccaaaccctgaaaagcttcaccagacaaccagcctgccaagtggctggtgggccatggctctgccgcctctttgtggtaaccrctggcaccaccaggcgtgccgtggagaagtgcagcttccccttcaagaatgaaacacttttatttccccatctgaccctggaggatccaccagccctgtcctccttgctgagtggggcttggagggaccacctcagtcttcacattgtggagctgggggaagaaacctgacaatatgacagagcacccactgcccaagactcagccatagaagatgccgccccaccttctacttgggtagctgggctgggacgctgggacaggaccccgtcctccttcatgactcccactgctgcctctcctgggcatggctgttagctgttctgccttctgggtgagctggcactcttctccctgagaccaaagatttgacctgtcggtcttgatgtcaaggtccccaaagaccaggttaagtgacgacacctgtctgttcctgccctgttgcttccagccactgtgatgtttgaaatatgtgatagtacctggttgtgaaaaaagacaatgaactgctagtgacattcctcaatgacctctcccaaacctcccatgatgccttacccttgctgtcatgacaaccctctggcttcctaagacccatctgcctatcgaaatatgtgcaagtcagtgagacgaagtatagagaacaggtggcccagatccaggggacccaacttctggccccttggtctgtcacctcctcgctgtgtgatcttgagaaagctccttccactcacccaccccacttcccagtctgttgggatcagaggaactttgaggtgtctgccggctaacattgtgtcattcctggagtccacagtacacgtcccctgcctcaacaggcacagctctcacaaagctcttcaagcatggaagtgggagttgtgttgtacttcatggcactctgatgcctgctgtctcagtgtttggttattatgcaaacaagtaatgtttgaaatatataatagcactggaga

SEQ ID NO: 7213 - DNA, 3076 bp, Homo sapiens
ggggcagcacggccacgcccggccactcgaacctgctccccggcgccgcgtgaccgtgtcaggtccccgtcggcctcgccgtgccgaccccgggcgcctccacagtggctcggaggccgctgctgcccggatgcccgggttccacgaggctctcccagcccgacaagcccgccgatcccacgggcacgggcggaggagagggaaccgccgcgcccgccccgcgcgccgtcgccgaccccggtgggtcgcgcttccccgcgcacgccgcgctctggcgcggggagaggcccctcggggccgggcgggagcgcggggacgtacacggcggccccgcccgcgcgctcctcctccctcccggcccgccctgcgccggcggcggcggccccagtctccgcgctgctgaggcgcgcccggccgctcccacggcctcccctccgccctgcggtcccgccgcctccggggcctcctgggaccctggccctcgccgggcaggacgccgccagcgctgaaggcgcagcccggaggccgcgcggatgcagatctgtggatccagcgtagcatctgtagcagctgggacatcattccaggttttgggcccggtgtgttggcaacaactggatctgaagatggcagtcagggtgctttggggtggtctcagcctgctccgagtgctgtggtgtctccttccgcagacgggctatgtgcacccagatgagttcttccagtcccctgaggtgatggcagaggacatcctgggcgttcaggccgcgcggccctgggagttttaccccagcagctcctgccgctcggtgctcttccccctgctgatctctggttccaccttctggctgctcaggctctgggaggagctggggccgtggcctggcctggtgagcggctatgcgctgctggyggggcctcgactcctcctcactgccctttcctttgctctggacggggccgtgtaccacctggccccgccgatgggggcggatcgctggaacgccctggccctgctgtctggttcctacgtcaccctggtcttctacacaaggaccttctccaacaccattgagggactcctcttcacrtggctgctggtgctggtatcctcccatgtaacgtggggccctacacgcaaggagcckgcgccgggtccacggtggcgcagctggcttcttggaggcattgtggctgctggcttsttcaaccggcccacctttctggccttygctgtggtccccctctacctctggggcactcgtggagccacaaaccctggtttgaagtctctgacccgggaggccctggtgctgctccctggggcgaccctcacagcagcggtgtttgtggccacggacagctggtatttctccagccccgctacatccaggaaccttgtcctgacacctgtcaacttcttgcactacaacctgaatccccaaaacctggcgagacatggcacgcacgcgcggctcactcacctggcagtcaacggcttcctgctcttcggggtgctgcatgcccaggccctgcaggctgcgtggcaacggctgcaagtcggcctccaggcctctgcacaaatgggcctcctgagggcactgggtgcccggagcctgctgtccagccccaggtcctatctccttctcctctacttcatgcctctggccctgctatctgcctttagccaccaggaggctcggttcctgattcccctcctggtccccctggtcctgctttgtagtccacagacgcarcctgtgccttggaagggcactgtggtcctcttcaacgccctcggtgccctcctcttcggctgcctgcatcaggggggcctggtgcctggcctggagtacctggagcaggtggtccatgcccctgtgctcccaagcacacccacccactacacactcctcttcactcacacctacatgcccccccggcacctcctacacctcccaggcctgggggcaccagtggaggtggtggacatgggggggactgaggactgggccctgtgccaaaccctgaaaagcttcaccagacaaccagcctgccaagtggctggtgggccatggctctgccgcctctttgtggtaaccrctggcaccaccaggcgtgccgtggagaagtgcagcttccccttcaagaatgaaacacttttatttccccatctgaccctggaggatccaccagccctgtcctccttgctgagtggggcttggagggaccacctcagtcttcacattgtggagctgggggaagaaacctgacaatatgacagagcacccactgcccaagactcagccatagaagatgccgccccaccttctacttgggtagctgggctgggacgctgggacaggaccccgtcctccttcatgactcccactgctgcctctcctgggcatggctgttagctgttctgccttctgggtgagctggcactcttctccctgagaccaaagatttgacctgtcggtcttgatgtcaaggtccccaaagaccaggttaagtgacgacacctgtctgttcctgccctgttgcttccagccactgtgatgtttgaaatatgtgatagtacctggttgtgaaaaaagacaatgaactgctagtgacattcctcaatgacctctcccaaacctcccatgatgccttacccttgctgtcatgacaaccctctggcttcctaagacccatctgcctatcgaaatatgtgcaagtcagtgagacgaagtatagagaacaggtggcccagatccaggggacccaacttctggccccttggtctgtcacctcctcgctgtgtgatcttgagaaagctccttccactcacccaccccacttcccagtctgttgggatcagaggaactttgaggtgtctgccggctaacattgtgtcattcctggagtccacagtacacgtcccctgcctcaacaggcacagctctcacaaagctcttcaagcatggaagtgggagttgtgttgtacttcatggcactctgatgcctgctgtctcagtgtttggttattatgcaaacaagtaatgtttgaaatatataatagcactggaga

SEQ ID NO: 7214 - DNA, 1506 bp, Homo sapiens
ccactgcgggcaaagggcaggcagttcgtgcgcggacacaagcwctggcggaccgtggccatggcgggcgctgagtggaagtcgctggaggaatgcttggagaagcacctgccgctccccgacttgcaggaagtgaagcgcgttctctatggcaaggaactcaggaagcttgatctgcccagggaagctttcgaagctgcctccagagaagactttgaactgcagggatatgcctttgaagcagcggaggagcagctgagacgaccccgcattgtgcacgtggggctggttcagaacagaatccccctccccgmaaatgcccctgtggcagaacaggtctctgcccttcatagacgcataaaggctatcgtagaggtggctgcaatgtgtggagtcaacatcatctgtttccaggaagcatggactatgccctttgccttctgtacgagagagaagcttccttggacagaatttgctgagtcagcagaggatgggcccaccaccagattctgtcagaagctggcgaagaaccatgacatggtggtggtgtctcccatcctggaacgagacagcgagcatggggatgttttgtggaatacagccgtggtgatctccaattccggagcagtcctgggaaagaccaggaaaaaccacatccccagagtgggtgatttcaacgagtcaacttactacatggagggaaacctgggccaccccgtgttccagacgcagttcggaaggatcgcggtgaacatttgctacgggcggcaccaccccctcaactggcttatgtacagcatcaacggggctgagatcatcttcaacccctcggccacgataggagcactcaggtcactcagttgcgagtccctgtggcccatcgaggccagaaacgcagccattgccaatcactgcttyacctgcgccatcaatcgagtgggcaccgagcacttcccgaacgagtttacctcgggagatggaaagaaagctcaccaggactttggctacttttatggctcgagctatgtggcagcccctgacagcagccggactcctgggctgtcccgtagccgggatggactgctagttgmtaagctcgacctaaacctctgccagcaggtgaatgatgtctggaacttcaagatgacgggcaggtaygagatgtacgcacgggagctcgccgaagctgtcaartccaactacagccccaccatcgtgaaagagtagccggcttcagtgcctgccttgggctgtttctgagggtgaacagccacagcagccctgtggacaccatgaggcttccacttcatcagaccatcagtgaaccaggccctggcatttaggagaacctctgtgaacttaggttcctgttgacccagtgactttgctttggtggagtgggggatataagtgtcccccaaagggttagctgccagttttttcatgtaaaactgagatgtcagcagggctagactagctgtgttcttaaatataccatttccatct

SEQ ID NO: 7215 - DNA, 2005 bp, Homo sapiens
ccactgcgggcaaagggcaggcagttcgtgcgcggacacaagcwctggcggaccgtggccatggcgggcgctgagtggaagtcgctggaggaatgcttggagaagcacctgccgctccccgacttgcaggaagtgaagcgcgttctctatggcaaggaactcaggaagcttgatctgcccagggaagctttcgaagctgcctccagagaagactttgaactgcagggatatgcctttgaagcagcggaggagcagctgagacgaccccgcattgtgcacgtggggctggttcagaacagaatccccctccccgmaaatgcccctgtggcagaacaggtctctgcccttcatagacgcataaaggctatcgtagaggtggctgcaatgtgtggagtcaacatcatctgtttccaggaagcatggactatgccctttgccttctgtacgagagagaagcttccttggacagaatttgctgagtcagcagaggatgggcccaccaccagattctgtcagaagctggcgaagaaccatgacatggtggtggtgtctcccatcctggaacgagacagcgagcatggggatgttttgtggaatacagccgtggtgatctccaattccggagcagtcctgggaaagaccaggaaaaaccacatccccagagtgggtgatttcaacgagtcaacttactacatggagggaaacctgggccaccccgtgttccagacgcagttcggaaggatcgcggtgaacatttgctacgggcggcaccaccccctcaactggcttatgtacagcatcaacggggctgagatcatcttcaacccctcggccacgataggagcactcagcgagtccctgtggcccatcgaggccagaaacgcagccattgccaatcactgcttyacctgcgccatcaatcgagtgggcaccgagcacttcccgaacgagtttacctcgggagatggaaagaaagctcaccaggactttggctacttttatggctcgagctatgtggcagcccctgacagcagccggactcctgggctgtcccgtagccgggatggactgctagttgmtaagctcgacctaaacctctgccagcaggtgaatgatgtctggaacttcaagatgacgggcaggtaygagatgtacgcacgggagctcgccgaagctgtcaartccaactacagccccaccatcgtgaaagagtagccggcttcagtgcctgccttggggtgaggaagacacctctgccccagtggattagcaagtgtggcaggcttaacatgtccaggttctccccaataacattgtccaggttggttttaaaattcccaggcagggggagagtggcatggggagtgacttcttaatgggtaaggggctgcttacttctggggtattggaaatgtttggggactaggtagaggtgaatgtactaaatgccactgaatttgtatacttcagaatgtttgttatgtaaattttacctcaactaaaaaaaaaaatgcccaggtactgcttgtgcaggtggatttgaggttaggcagatgatgctgtccatcccgtacaccagtgggaagagggtgagggctgatccagagaccctgagcctacagcaaggctgtggtgggtcggatggtctttggatgtgtcagcttagctaggccacagtcaccagtaattcaatcagacactaatctaggtatttctgtgaaggtattttgtagatgtgacagaagtccattcccaattgactaagtaagtgagattatctcagataatctgggtcagcctgacctgattagtcagaaggcctaaagaacagagctaagggtttccctgaggaagaaattctgcctgaggacagcagcccagtgcttggcgagagttcctgacagkctgcccttctgatagcctgcctcacagagtttagacatgactagccagctcctacaatcactgaagtcaattccttgcaataaatctcaatatatcccct

SEQ ID NO: 7216 - DNA, 2418 bp, Homo sapiens
atcacccattttctgcatcagtcacactgggagctgcagaccggagctgttcctatttgcccatcctctccctgctttctttacctctgaggttggattctccctgtgggatcctgcaatccttctgccccaaaaaactattatagcaggagggaacctgttcctgctcactctttgccttctccttctcatcctagacagcctgaccgtgccctagttttcagaggagtgattgattctggggtgcggagcaggatgaggaaactcaggctcagagagggatttccacctaatgtgcctggaaaccatgggtagctacycaataaggcctttctatgttcagaaggtcatggaccaggagtgttggtatcggagctttgtagagacagttttgacccctgtacttagagcagaggggtgtgtttgccatggagagtgtgtgtgggcagctgtgtgtaagcctgtgtgagttctgtgtatgttcctgtgtgaatatatgtgtgtgctccttcatggacacagcatgcatgtagtgggcatagcaaggcagagagaaatcaggagactaggggcacattgcccagtaggaagatagtatcttcctactgggcaggacttgaggtgtgcaaaggtgtgcatgagtactgcaaaagcagttcaaagagcagagaggtggggccagaataaatatgttgcagaaaggcagtcatcagggaggaaagtgaggattccctgccaaaatgcctgagggcttccctgcctaccacagccctctgtgttcttaaatcctcctgtctgaacagaggccagactctggtttcccccacagcctgtctgtgtctgtcctctgcaaagccatgtggctctacctggcggttttcgtgggcctgtactaccttctgcactggtaccgggagaggcaggtgctgagccacctgagagataagtatgtgttcatcacgggctgtgactctggcttcgggaaactgctggccagacagctggatgcacgaggcttgcgggtgctggctgcatgtctgacggagaaaggagccgagcagctgaggggccagasttcagacaggctggagacggtgaccctggatgttaccaagacagagagcgttgctgcagccgcccagtgggtgaaggagtgcgtgagagacaaaggactctggggcctggtgaataatgctggcatctccttgcccacggctcccaatgagttgctcaccaagcaggacttcgtgaccatactggacgtgaacttgttgggggtgattgatgtgactctgagcctgctgcccttagtgaggagggccaggggccgtgtggtcaacgtctccagtgtcatgggccgggtgtcactttttggtggaggctactgcatctccaagtatggcgtggaagccttctctgactccctcaggagggaactctcctactttggggtgaaggtggctatgattgaacctggctatttcaagactgctgtgaccagtaaggagagattcttaaagagcttcctggagatttgggaccggtccagtccagaggtcaaggaggcctatggcgagaagtttgttgcagactataagaaatcagctgaacaaatggagcagaagtgcacacaggatctgtcgttggtgaccaactgcatggagcatgygctgattgcctgccacccccgtactcgctactcagctggctgggatgccaagcttctctacctccccatgagctacatgcccaccttcctggtggatgccattatgtactgggtctctccaagcccggccaaggctctatgaagctaaggttggatgcatggttgcatggatttrgggtgtgctatgaggggtggtgtatccttgggagagatataaagtggagggagggagccgtccggtcagtagggcaccaatcccacctccttcattacctcctggccatgattctcctgggagataattctgctctctggagatgttggtaggaaagtttcaagttacgcagctgagaaacagggaccaaatagtgctcctgggtgcattgtcaccgtgggtggccactcaagggtccaagcctctagggccatccttgggctaamaactggggtgggtgtgagcaggtggaaggagcctcagcccatgccattacctcctgcttccttatcaggctgtgtgttaattctgggccagtctacaccctcccacggggtggaaatggcctggaggatgtgagggcacccctcctctgaagatccctgtacacgtggtgttgggactggaaccattatgcggccccataggcctcaggagtcatcccagaagcagtggctgggaggtggtgtcctaagtaaggatctgtgcagaggacaaataaatcagtttttgatttgtcttgaaagcatggact

SEQ ID NO: 7217 - DNA, 2809 bp, Homo sapiens
catgcgttctccgaacggtcttcttccgacagcttgctgccctagaccagagttggtggctggacctcctgcgacttccgagttgcgatgctgtacttctctttgttttgggcggctcggcctctgcagagatgtgggcagctggtcaggatggccattcgggctcagcacagcaacgcagcccagactcagactggggaagcaaacaggggctggacaggccaggagagcctgtcggacagtgatcctgagatgtgggagttgctgcagagggagaaggacaggcagtgtcgtggcctggagctcattgcctcagaggtgggacctggggagatgggcaggggttgggccaccatgggtacaggaagtaacaaagttatcttaactgatatttctccaaaaccccctttcacactcaggacctttctttgggctttatcttcctttcttatctccctcaagcaaaggcagtgcaagtccagtttatggggttgggacatttagggagcctccagggtccctacagtttcatctgatcccttccttcctcctatgaggaaggaggagcctagaagcacaagtttgagtgggtaggtggcattgaggggccactgctcatggcagatgggtttctgagaatgctgcctctggctttgccccaggcctggtgctgagtgaatggagctttctgcagggagtactcccgctttcagctctggctctggcagggagggactgtgggagtccaggggaaggggctcaataccttctgacattgccccccaccaccccagaacttctgcagccgagctgcgctggaggccctggggtcctgtctgaacaacaagtactcggagggttatcctggcaagaggtgagggctggagggcagtgtcagggatggtgctcccagtgggggaacccacctgtaccttcccagtgttcattgaggagtgaacttcccagtcctttgctgatggttgagagtcctttctctgtgccctcattacccctctcccacggcagatactatgggggagcagaggtggtggatgaaattgagctgctgtgccagcgccgggccttggaagcctttgacctggatcctgcacagtggggagtcaatgtccagccctactccgggtccccagccaacctggccgtctacacagcccttctgcaacctcacgaccggatcatggggctggacctgcccgatgggggccatctcacccacggctacatgtctgacgtcaagcggatatcagccacgtccatcttcttcgagtctatgccctataagctcaacgtgagtgctctaggtgtgtctgtccagcccaaaactggcctcattgactacaaccagctggcactgactgctcgacttttccggccacggctcatcatagctggcaccagcgcctatgctcgcctcattgactacgcccgcatgagagaggtgtgtgatgaagtcaaagcacacctgctggcagacatggcccacatcagtggcctggtggctgccaaggtgattccctcgcctttcaagcacgcggacatcgtcaccaccactactcacaagactcttcgaggggccaggtcagggctcatcttctaccggaaaggggtgaaggctgtggaccccaagactggccgggagatccctttgccgtgttcccatccctkcaggggggcccccacaatcatgccattgctgcagtagctgtggccctaaagcaggcctgcacccccatgttccgggagtactccctgcaggttctgaagaatgctcgggccatggcagatgccctgctagagcgaggctactcactggtatcaggtggtactgacaaccacctggtgctggtggacctgcggcccaagggcctggatggagctcgggctgagcgggtgctagagcttgtatccatcactgccaacaagaacacctgtcctggagaccgaagtgccatcacaccgggcggcctgcggcttggtgagaccccagccttaacttctcgacagttccgtgaggatgacttccggagagttgtggactttatagatgaaggggtcaacattggcttagaggtgaagagcaagatctagccaagctccaggatttcaaatccttcctgcttaaggactcagaaacaagtcagcgtctggccaacctcaggcaacgkgtggagcagtttgccagggccttccccatgcctggttttgatgagcattgaaggcacctgggaaatgaggcccacagactcaaagttactctccttccccctacctgggccagtgaaatagaaagcctttctattttttggtgcgggagggaagacctctcacttagggcaagagccaggtatagtctcccttcccagaatttgtaactgagaagatcttttctttttcctttttttggtaacaagacttagaaggagggcccaggcactttctgtttgaacccctgtcatgatcacagtgtcagagacgcgtcctctttcttggggaagttgaggagtgcccttcagagccagtagcaggcaggggtgggtaggcaccctccttcctgtttttatctaataaaatgctaacctgccctgagtttccattactgtgggtggggttcccctgggccaaacagtgatttgtctccctcaatgtgtacaccgctccgctcccaccaccgctaccacaaggacccccggggctgcagcctcctctttctgtctctgatcagagccgacaccagacgtgattagcaggcgcagcaaattcaatttgttaaatgaaattgtattttgcc

SEQ ID NO: 7218 - DNA, 2310 bp, Homo sapiens
ctcagcccttgccaactctgcctcttcccccgctgactggggtatcagtttatggtgccctgcaggaagaccctcttgttcctgtgggtgggaaggttctggaatctcagttgccctctctggagttggggagacataggcttttggaggacaagctttgcagagtggttcatggagtgaggtggtgggagatttctgaggtgcggtgcggtgaatggagcaaatcagaaccaccccttggacgttgatctcaagcttggctccagaactggcttttgaaggatggccattcgggctcagcacagcaacgcagcccagactcagactggggaagcaaacaggggctggacaggccaggagagcctgtcggacagtgatcctgagatgtgggagttgctgcagagggagaaggacaggcagtgtcgtggcctggagctcattgcctcagagaacttctgcagccgagctgcgctggaggccctggggtcctgtctgaacaacaagtactcggagggttatcctggcaagagatactatgggggagcagaggtggtggatgaaattgagctgctgtgccagcgccgggccttggaagcctttgacctggatcctgcacagtggggagtcaatgtccagccctactccgggtccccagccaacctggccgtctacacagcccttctgcaacctcacgaccggatcatggggctggacctgcccgatgggggccatctcacccacggctacatgtctgacgtcaagcggatatcagccacgtccatcttcttcgagtctatgccctataagctcaaccccaaaactggcctcattgactacaaccagctggcactgactgctcgacttttccggccacggctcatcatagctggcaccagcgcctatgctcgcctcattgactacgcccgcatgagagaggtgtgtgatgaagtcaaagcacacctgctggcagacatggcccacatcagtggcctggtggctgccaaggtgattccctcgcctttcaagcacgcggacatcgtcaccaccactactcacaagactcttcgaggggccaggtcagggctcatcttctaccggaaaggggtgaaggctgtggaccccaagactggccgggagatcccttacacatttgaggaccgaatcaactttgccgtgttcccatccctkcaggggggcccccacaatcatgccattgctgcagtagctgtggccctaaagcaggcctgcacccccatgttccgggagtactccctgcaggttctgaagaatgctcgggccatggcagatgccctgctagagcgaggctactcactggtatcaggtggtactgacaaccacctggtgctggtggacctgcggcccaagggcctggatggagctcgggctgagcgggtgctagagcttgtatccatcactgccaacaagaacacctgtcctggagaccgaagtgccatcacaccgggcggcctgcggcttggggccccagccttaacttctcgacagttccgtgaggatgacttccggagagttgtggactttatagatgaaggggtcaacattggcttagaggtgaagagcaagactgccaagctccaggatttcaaatccttcctgcttaaggactcagaaacaagtcagcgtctggccaacctcaggcaacgkgtggagcagtttgccagggccttccccatgcctggttttgatgagcattgaaggcacctgggaaatgaggcccacagactcaaagttactctccttccccctacctgggccagtgaaatagaaagcctttctattttttggtgcgggagggaagacctctcacttagggcaagagccaggtatagtctcccttcccagaatttgtaactgagaagatcttttctttttcctttttttggtaacaagacttagaaggagggcccaggcactttctgtttgaacccctgtcatgatcacagtgtcagagacgcgtcctctttcttggggaagttgaggagtgcccttcagagccagtagcaggcaggggtgggtaggcaccctccttcctgtttttatctaataaaatgctaacctgccctgagtttccattactgtgggtggggttcccctgggccaaacagtgatttgtctccctcaatgtgtacaccgctccgctcccaccaccgctaccacaaggacccccggggctgcagcctcctctttctgtctctgatcagagccgacaccagacgtgattagcaggcgcagcaaattcaatttgttaaatgaaattgtattttgcccacg

SEQ ID NO: 7219 - DNA, 2134 bp, Homo sapiens
ttccgacagcttgctgccctagaccagagttggtggctggacctcctgcgacttccgagttgcgatgctgtacttctctttgttttgggcggctcggctggtcaggatggccattcgggctcagcacagcaacgcagcccagactcagactggggaagcaaacaggggctggacaggccaggagagcctgtcggacagtgatcctgagatgtgggagttgctgcagagggagaaggacaggcagtgtcgtggcctggagctcattgcctcagagaacttctgcagccgagctgcgctggaggccctggggtcctgtctgaacaacaagtactcggagggttatcctggcaagagatactatgggggagcagaggtggtggatgaaattgagctgctgtgccagcgccgggccttggaagcctttgacctggatcctgcacagtggggagtcaatgtccagccctactccgggtccccagccaacctggccgtctacacagcccttctgcaacctcacgaccggatcatggggctggacctgcccgatgggggccatctcacccacggctacatgtctgacgtcaagcggatatcagccacgtccatcttcttcgagtctatgccctataagctcaaccccaaaactggcctcattgactacaaccagctggcactgactgctcgacttttccggccacggctcatcatagctggcaccagcgcctatgctcgcctcattgactacgcccgcatgagagaggtgtgtgatgaagtcaaagcacacctgctggcagacatggcccacatcagtggcctggtggctgccaaggtgattccctcgcctttcaagcacgcggacatcgtcaccaccactactcacaagactcttcgaggggccaggtcagggctcatcttctaccggaaaggggtgaaggctgtggaccccaagactggccgggagatcccttacacatttgaggaccgaatcaactttgccgtgttcccatccctkcaggggggcccccacaatcatgccattgctgcagtagctgtggccctaaagcaggcctgcacccccatgttccgggagtactccctgcaggttctgaagaatgctcgggccatggcagatgccctgctagagcgaggctactcactggtatcaggtggtactgacaaccacctggtgctggtggacctgcggcccaagggcctggatggagctcgggctgagcgggtgctagagcttgtatccatcactgccaacaagaacacctgtcctggagaccgaagtgccatcacaccgggcggcctgcggcttggggccccagccttaacttctcgacagttccgtgaggatgacttccggagagttgtggactttatagatgaaggggtcaacattggcttagaggtgaagagcaagactgccaagctccaggatttcaaatccttcctgcttaaggactcagaaacaagtcagcgtctggccaacctcaggcaacgkgtggagcagtttgccagggccttccccatgcctggttttgatgagcattgaaggcacctgggaaatgaggcccacagactcaaagttactctccttccccctacctgggccagtgaaatagaaagcctttctattttttggtgcgggagggaagacctctcacttagggcaagagccaggtatagtctcccttcccagaatttgtaactgagaagatcttttctttttcctttttttggtaacaagacttagaaggagggcccaggcactttctgtttgaacccctgtcatgatcacagtgtcagagacgcgtcctctttcttggggaagttgaggagtgcccttcagagccagtagcaggcaggggtgggtaggcaccctccttcctgtttttatctaataaaatgctaacctgccctgagtttccattactgtgggtggggttcccctgggccaaacagtgatttgtctccctcaatgtgtacaccgctccgctcccaccaccgctaccacaaggacccccggggctgcagcctcctctttctgtctctgatcagagccgacaccagacgtgattagcaggcgcagcaaattcaatttgttaaatgaaattgtattttgcccacg

SEQ ID NO: 7220 - DNA, 2178 bp, Homo sapiens
catgcgttctccgaacggtcttcttccgacagcttgctgccctagaccagagttggtggctggacctcctgcgacttccgagttgcgatgctgtacttctctttgttttgggcggctcggcctctgcagagatgtgggcagctggtcaggatggccattcgggctcagcacagcaacgcagcccagactcagactggggaagcaaacaggggctggacaggccaggagagcctgtcggacagtgatcctgagatgtgggagttgctgcagagggagaaggacaggcagtgtcgtggcctggagctcattgcctcagagaacttctgcagccgagctgcgctggaggccctggggtcctgtctgaacaacaagtactcggagggttatcctggcaagagatactatgggggagcagaggtggtggatgaaattgagctgctgtgccagcgccgggccttggaagcctttgacctggatcctgcacagtggggagtcaatgtccagccctactccgggtccccagccaacctggccgtctacacagcccttctgcaacctcacgaccggatcatggggctggacctgcccgatgggggccatctcacccacggctacatgtctgacgtcaagcggatatcagccacgtccatcttcttcgagtctatgccctataagctcaaccccaaaactggcctcattgactacaaccagctggcactgactgctcgacttttccggccacggctcatcatagctggcaccagcgcctatgctcgcctcattgactacgcccgcatgagagaggtgtgtgatgaagtcaaagcacacctgctggcagacatggcccacatcagtggcctggtggctgccaaggtgattccctcgcctttcaagcacgcggacatcgtcaccaccactactcacaagactcttcgaggggccaggtcagggctcatcttctaccggaaaggggtgaaggctgtggaccccaagactggccgggagatcccttacacatttgaggaccgaatcaactttgccgtgttcccatccctkcaggggggcccccacaatcatgccattgctgcagtagctgtggccctaaagcaggcctgcacccccatgttccgggagtactccctgcaggttctgaagaatgctcgggccatggcagatgccctgctagagcgaggctactcactggtatcaggtggtactgacaaccacctggtgctggtggacctgcggcccaagggcctggatggagctcgggctgagcgggtgctagagcttgtatccatcactgccaacaagaacacctgtcctggagaccgaagtgccatcacaccgggcggcctgcggcttggggccccagccttaacttctcgacagttccgtgaggatgacttccggagagttgtggactttatagatgaaggggtcaacattggcttagaggtgaagagcaagactgccaagctccaggatttcaaatccttcctgcttaaggactcagaaacaagtcagcgtctggccaacctcaggcaacgkgtggagcagtttgccagggccttccccatgcctggttttgatgagcattgaaggcacctgggaaatgaggcccacagactcaaagttactctccttccccctacctgggccagtgaaatagaaagcctttctattttttggtgcgggagggaagacctctcacttagggcaagagccaggtatagtctcccttcccagaatttgtaactgagaagatcttttctttttcctttttttggtaacaagacttagaaggagggcccaggcactttctgtttgaacccctgtcatgatcacagtgtcagagacgcgtcctctttcttggggaagttgaggagtgcccttcagagccagtagcaggcaggggtgggtaggcaccctccttcctgtttttatctaataaaatgctaacctgccctgagtttccattactgtgggtggggttcccctgggccaaacagtgatttgtctccctcaatgtgtacaccgctccgctcccaccaccgctaccacaaggacccccggggctgcagcctcctctttctgtctctgatcagagccgacaccagacgtgattagcaggcgcagcaaattcaatttgttaaatgaaattgtattttgcccacg

SEQ ID NO: 7221 - DNA, 939 bp, Homo sapiens
atggcggccctcacagacctctcatttatgtatcgctggttcaagaactgcaatctggttggcaacctctcagagaagtacgtcttcatcacaggctgtgactctggcttcgggaacctgctggccaaacagctggttgatcggggcatgcaggtgctggctgcttgcttcactgaggagggatcccagaaacttcagcgggatacctcctatcrgctgcagaccaccctactggatgtcaccaagagcgaaagcatcaaggcggcggcccagtgggtgagggacaaagtgggcgaacaaggcctctgggccctggtgaacaatgctggtgtgggcctgcccagtggtcccaacgaatggctgaccaaggatgactttgtgaaggtgattaatgtgaacctggtgggactgatcgaagtgacccttcacatgctgcccatggtcaagagagcccggggcagggttgtcaacatgtccagctctggtggtcgtgtggctgtcattggtggtggctactgcgtctccaagtttggcgttgaggccttctctgacagcataaggcgtgagctctactactttggggtgaaagtctgcatcattgagccagggaactatcggacagccattctcggcaaggagaacctggagtcacgcatgcgaaagctttgggagaggctgcctcaggagacccgggacagctacggagaggattatttccgcatctatactgacaagttaaaaaacataatgcaggtggcagagcccagagtcagagatgtcatcaacagcatggagcatgctattgtttcccggagccctcgcatccgctacaaccctggcctggatgccaaactcctctacatccctctggctaagttgcccacccctgtgacagatttcatcctaagccggtaccttccaaggccagcggacagtgtc

SEQ ID NO: 7222 - DNA, 1665 bp, Homo sapiens
tgaaaatcaggaagagccagcggggagtgtgtgttgccatcgcgtctccgcctgcaggtgcagacatctggaggagagagtcggagagcagaaaccacttggctcccagacaattcccctacaggctttgggcctggaattgaggagaaagtgagctaagttggggtggggtgagtccaaagaagcacgggctgggccaagctaagctgctctgggctgggctgatccctccccactcaggggcgggaccccaggaggagggagaggacagagccactgcagaggaccagactgggaaaacaacgatatggcaggagccagtcttggggcccgcttctaccggcagatcaaaagacatccggggatcatcccgatgatcggcttaatctgcctgggcatgggcagcgctgcgctttacttgctgcgactcgcccttcgcagccccgacgtctgctgggacagaaagaacaacccggagccctggaaccgcctgagccccaatgaccaatacaagttccttgcagtttccactgactataagaagctgaagaaggaccggccagacttctaagccaggctgggctgccagtgccatgcaagccacagccagccagcccatccacttcttccactcctccccgcaggccccaaggcatcactccggccaccctgtcccgctactgcttacacaggccgggttcccacgcagaggggaggctgctccacccctactctcctcccttgctcccagcagcggaagcgcctctgacccttggcttgagtcccacgtgggggaggaggaggcaggcagcaccagcaggggtccaccaagagcccagaccagcccctctgccctcctacccgggcctcgaagggtgtggcacaggctacgtgttgagcgtggcctacgtgagccaacaagaagcaggggcctctgagtgccaagcgaygtggcgggctccacgttagcccaggctctgagagccagcccaggggcggygctgctcagcttgggctggtccagggcctgcccaggctggggcacctttgcctcctgaggcgcagcgcactcctcccctgcccaagcctactgcctcccgctgccgcccagtaccccctccagccccacacctgggcctccccctgccactcccctcccttgctcccctctgtccccagggatcaaacagaagcagccgtgggcaaaatacaatttcatttaacaaattgaatttgctgcgcctgctaatcacgtctggtgtcggctctgatcagagacagaaagaggaggctgcagccccgggggtccttgtggtagcggtggtgggagcggagcggtgtacacattgagggagacaaatcactgtttggcccaggggaaccccacccacagtaatggaaactcagggcaggttagcattttattagataaaaacaggaaggagggtgcctacccacccctgcctgctactggctctgaagggcactcctcaacttccccaagaaagaggacgcgtctctgacactgtgatcatgacaggggttcaaacagaaagtgcctgggccctccttctaagtcttgttaccaaaaaaaggaaaaagaaaagatcttctcagttacaaattctgggaagggagactatacctggctcttgccctaagtga

SEQ ID NO: 7223 - DNA, 1608 bp, Homo sapiens
gtgcagacatctggaggagagagtcggagagcagaaaccacttggctcccagacaattcccctacaggctttgggcctggaattgaggagaaagtgagctaagttggggtggggtgagtccaaagaagcacgggctgggccaagctaagctgctctgggctgggctgatccctccccactcaggggcgggaccccaggaggagggagaggacagagccactgcagaggaccagactgggaaaacaacgatatggcaggagccagtcttggggcccgcttctaccggcagatcaaaagacatccggggatcatcccgatgatcggcttaatctgcctgggcatgggcagcgctgcgctttacttgctgcgactcgcccttcgcagccccgacgtctgctgggacagaaagaacaacccggagccctggaaccgcctgagccccaatgaccaatacaagttccttgcagtttccactgactataagaagctgaagaaggaccggccagacttctaagccaggctgggctgccagtgccatgcaagccacagccagccagcccatccacttcttccactcctccccgcaggccccaaggcatcactccggccaccctgtcccgctactgcttacacaggccgggttcccacgcagaggggaggctgctccacccctactctcctcccttgctcccagcagcggaagcgcctctgacccttggcttgagtcccacgtgggggaggaggaggcaggcagcaccagcaggggtccaccaagagcccagaccagcccctctgccctcctacccgggcctcgaagggtgtggcacaggctacgtgttgagcgtggcctacgtgagccaacaagaagcaggggcctctgagtgccaagcgaygtggcgggctccacgttagcccaggctctgagagccagcccaggggcggygctgctcagcttgggctggtccagggcctgcccaggctggggcacctttgcctcctgaggcgcagcgcactcctcccctgcccaagcctactgcctcccgctgccgcccagtaccccctccagccccacacctgggcctccccctgccactcccctcccttgctcccctctgtccccagggatcaaacagaagcagccgtgggcaaaatacaatttcatttaacaaattgaatttgctgcgcctgctaatcacgtctggtgtcggctctgatcagagacagaaagaggaggctgcagccccgggggtccttgtggtagcggtggtgggagcggagcggtgtacacattgagggagacaaatcactgtttggcccaggggaaccccacccacagtaatggaaactcagggcaggttagcattttattagataaaaacaggaaggagggtgcctacccacccctgcctgctactggctctgaagggcactcctcaacttccccaagaaagaggacgcgtctctgacactgtgatcatgacaggggttcaaacagaaagtgcctgggccctccttctaagtcttgttaccaaaaaaaggaaaaagaaaagatcttctcagttacaaattctgggaagggagactatacctggctcttgccctaagtga

SEQ ID NO: 7224 - DNA, 2487 bp, Homo sapiens
gaggccgcatataaacgcgctccccgggccaggctcgctgcgaaggacatttgggctgtgtgtgcgacgcgggtcggaggggcagtcgggggaaccgcgaagaagccgaggagcccggagccccgcgtgacgctcctctctcagtccaaaagcggcttttggttcggcgcagagagacccgggggtctagcttttcctcgaaaagcgccgccctgcccttggccccgagaacagacaaagagcaccgcagggccgatcacgctgggggcgctgaggccggccatggtcatggaagtgggcaccctggacgctggaggcctgcgggcgctgctgggggagcgagcggcgcaatgcctgctgctggactgccgctccttcttcgctttcaacgccggccacatcgccggctctgtcaacgtgcgcttcagcaccatcgtgcggcgccgggccaagggcgccatgggcctggagcacatcgtgcccaacgccgagctccgcggccgcctgctggccggcgcctaccacgccgtggtgttgctggacgagcgcagcgccgccctggacggcgccaagcgcgacggcaccctggccctggcggccggcgcgctctgccgcgaggcgcgcgccgcgcaagtcttcttcctcaaaggaggatacgaagcgttttcggcttcctgcccggagctgtgcagcaaacagtcgacccccatggggctcagccttcccctgagtactagcgtccctgacagcgcggaatctgggtgcagttcctgcagtaccccactctacgatcagggtggcccggtggaaatcctgccctttctgtacctgggcagtgcgyatcacgcttcccgcaaggacatgctggatgccttgggcatmactgccttgatcaacgtctcagccaattgtcccaaccattttgagggtcactaccagtacaagagcatccctgtggaggacaaccacaaggcagacatcagctcctggttcaacgaggccattgacttcatagactccatcaagaatgctggaggaagggtgtttgtccactgccaggcaggcatttcccggtcagccaccatctgccttgcttaccttatgaggactaatcgagtcaagctggacgaggcctttgagtttgtgaagcagaggcgaagcatcatctctcccaacttcagcttcatgggccagctgctgcagtttgagtcccaggtgctggctccgcactgttcggcagaggctgggagccccgccatggctgtgctcgaccgaggcacctccaccaccaccgtgttcaacttccccgtctccatccctgtccactccacgaacagtgcgctgagctaccttcagagccccattacgacctctcccagctgctgaaaggccacgggaggtgaggctcttcacatcccattgggactccatgctccttgagaggagaaatgcaataactctgggaggggctcgagagggctggtccttatttatttaacttcacccgagttcctctgggtttctaagcagttatggtgatgacttagcgtcaagacatttgctgaactcagcacattcgggaccaatatatagtgggtacatcaagtccatctgacaaaatggggcagaagagaaaggactcagtgtgtgatccggtttctttttgctcgcccctgttttttgtagaatctcttcatgcttgacatacctaccagtattattcccgacgacacatatacatatgagaatataccttatttatttttgtgtaggtgtctgccttcacaaatgtcattgtctactcctagaagaaccaaatacctcaatttttktttttgagtactgtactatcctgtaaatatatcttaagcaggtttgttttcagcmctgatggaaaataccagtgttgggtttttttttagttgccaacagttgtatgtttgctgattatttatgacctgaaataatatatttcttcttctaagaagacattttgttacataaggatgacttttttatacaatggaataaattatggcatttctattgaaatttcaaygcttttatttctttggcaaccacacccaatccctctcccactagtgaactagggaagaatttcgacaagggcctgcagaatgtgttgagatctgatcccatgccctgtggtggcccgttggtcccatgaaatggctgggttgcaagggaggaagacaagtgagtatcatgaaacaccggacgctacagctgaactcttagtattggatcagtgtgtctrcccatgcccattttagcggctctgtaacctaccatgtcacccaggatgccaaggtgtccccagagccaaagctaggaggaaatagccacttgtctggattgccttcttcatttaataccctcctcaggttaatataaaaagtcgccttcccatctctgagctgtgctggagttatgaggagacaaaagtttttccaaacacatgacata

SEQ ID NO: 7225 - DNA, 2383 bp, Homo sapiens
ggctgtgtgtgcgacgcgggtcggaggggcagtcgggggaaccgcgaagaagccgaggagcccggagccccgcgtgacgctcctctctcagtccaaaagcggcttttggttcggcgcagagagacccgggggtctagcttttcctcggccgatcacgctgggggcgctgaggccggccatggtcatggaagtgggcaccctggacgctggaggcctgcgggcgctgctgggggagcgagcggcgcaatgcctgctgctggactgccgctccttcttcgctttcaacgccggccacatcgccggctctgtcaacgtgcgcttcagcaccatcgtgcggcgccgggccaagggcgccatgggcctggagcacatcgtgcccaacgccgagctccgcggccgcctgctggccggcgcctaccacgccgtggtgttgctggacgagcgcagcgccgccctggacggcgccaagcgcgacggcaccctggccctggcggccggcgcgctctgccgcgaggcgcgcgccgcgcaagtcttcttcctcaaaggaggatacgaagcgttttcggcttcctgcccggagctgtgcagcaaacagtcgacccccatggggctcagccttcccctgagtactagcgtccctgacagcgcggaatctgggtgcagttcctgcagtaccccactctacgatcagggtggcccggtggaaatcctgccctttctgtacctgggcagtgcgyatcacgcttcccgcaaggacatgctggatgccttgggcatmactgccttgatcaacgtctcagccaattgtcccaaccattttgagggtcactaccagtacaagagcatccctgtggaggacaaccacaaggcagacatcagctcctggttcaacgaggccattgacttcatagactccatcaagaatgctggaggaagggtgtttgtccactgccaggcaggcatttcccggtcagccaccatctgccttgcttaccttatgaggactaatcgagtcaagctggacgaggcctttgagtttgtgaagcagaggcgaagcatcatctctcccaacttcagcttcatgggccagctgctgcagtttgagtcccaggtgctggctccgcactgttcggcagaggctgggagccccgccatggctgtgctcgaccgaggcacctccaccaccaccgtgttcaacttccccgtctccatccctgtccactccacgaacagtgcgctgagctaccttcagagccccattacgacctctcccagctgctgaaaggccacgggaggtgaggctcttcacatcccattgggactccatgctccttgagaggagaaatgcaataactctgggaggggctcgagagggctggtccttatttatttaacttcacccgagttcctctgggtttctaagcagttatggtgatgacttagcgtcaagacatttgctgaactcagcacattcgggaccaatatatagtgggtacatcaagtccatctgacaaaatggggcagaagagaaaggactcagtgtgtgatccggtttctttttgctcgcccctgttttttgtagaatctcttcatgcttgacatacctaccagtattattcccgacgacacatatacatatgagaatataccttatttatttttgtgtaggtgtctgccttcacaaatgtcattgtctactcctagaagaaccaaatacctcaatttttktttttgagtactgtactatcctgtaaatatatcttaagcaggtttgttttcagcmctgatggaaaataccagtgttgggtttttttttagttgccaacagttgtatgtttgctgattatttatgacctgaaataatatatttcttcttctaagaagacattttgttacataaggatgacttttttatacaatggaataaattatggcatttctattgaaatttcaaygcttttatttctttggcaaccacacccaatccctctcccactagtgaactagggaagaatttcgacaagggcctgcagaatgtgttgagatctgatcccatgccctgtggtggcccgttggtcccatgaaatggctgggttgcaagggaggaagacaagtgagtatcatgaaacaccggacgctacagctgaactcttagtattggatcagtgtgtctrcccatgcccattttagcggctctgtaacctaccatgtcacccaggatgccaaggtgtccccagagccaaagctaggaggaaatagccacttgtctggattgccttcttcatttaataccctcctcaggttaatataaaaagtcgccttcccatctctgagctgtgctggagttatgaggagacaaaagtttttccaaacacatgacata

SEQ ID NO: 7226 - DNA, 654 bp, Homo sapiens
cacacgctggtcasgckgtcagctattgacacttcctggtgggatccgagtgaggcgacggggtagrggttggcgctcaggcggcgaccatggcgtatcacggcctcactgtrcctctcattgtgatgagcgtgttctggggcttcgtcggcttcttggtgccttggttcatccctaagggtcctaaccggggagttatcattaccatgttggtgacctgttcagtttgctgctatctcttttggctgattgcaattctggcccaactcaaccctctctttggaccgcaattgaaaaatgaaaccatctggtatctgaagtatcattggccttgaggaagaagacatgctctacagtgctcagtctttgaggtcacgagaagagaatgccttctagatctgccttaaacgttaacagcacatttgaatgccttattctacaatgcagcgtgttttcctttgccttttttgcactttggtgaattacgtgcctccataacctgaactgtgccgactccacaaaackattrtgtactcttctgagatagaagatgctgttcttctgagagatacgttactctctccttggaatctgtggatttgaagatggctcctgccttctcacgtgggaatcagtgaagtgtttagaaactgc

SEQ ID NO: 7227 - DNA, 945 bp, Homo sapiens
cacacgctggtcasgckgtcagctattgacacttcctggtgggatccgagtgaggcgacggggtagrggttggcgctcaggcggcgaccatggcgtatcacggcctcactgtrcctctcattgtgatgagcgtgttctggggcttcgtcggcttcttggtgccttggttcatccctaagggtcctaaccggggagttatcattaccatgttggtgacctgttcagtttgctgctatctcttttggctgattgcaattctggcccaactcaaccctctctttggaccgcaattgaaaaatgaaaccatctggtatctgaagtatcattggccttgaggaagaagacatgctctacagtgctcagtctttgaggtcacgagaagagaatgccttctagatgcaaaatcacctccaaaccagaccacttttcttgacttgcctgttttggccattagctgccttaaacgttaacagcacatttgaatgccttattctacaatgcagcgtgttttcctttgccttttttgcactttggtgaattacgtgcctccataacctgaactgtgccgactccacaaaackattrtgtactcttctgagatagaagatgctgttcttctgagagatacgttactctctccttggaatctgtggatttgaagatggctcctgccttctcacgtgggaatcagtgaagtgtttagaaactgctgcaagacaaacaagackccagwggggtggtcagtaggagagcacgttcagagggaagagccatctcaacagaatcrcaccaaactatactttcrggatgaatttyttcttyctgccatcttttggaataaatattttcctcchttctatsbaaatctgggctcggtgtttgtaaagttcatttttataagcttttctatcgctacataatgcctttttaaaaaatgattttgta

SEQ ID NO: 7228 - DNA, 2697 bp, Homo sapiens
  misc_feature (1)...(2697): n = A,T,C or G
atgggggcgtgggccctggcaagtgcactcctcagccaatcagcgtcctgcccggctggtggattyggttacaagcccaagatcaccccatactccagcctctttcctcctcctcccgcagctccattcattggtcccgccgcaccgggcctgctgggctccgcttccgttccactgctcagctgccgcctggtggggccaccaagggcaggcatcccaggggctttgtctgactggactgggccagtgcagaatgggggttcaggcagggctgtttgggatgctgggcttcctgggggtggccctggggggctcccctgccctccgctggtacaggacctcctgccacttgaccaaggcsgtccctggcaacccactggggtacctgagcttcctggccaaggatgctcagggactggccctgatccatgcccgctgggatgcgcataggaggctgcagncatgtagctgggaggatgagccggagctcaccgcagcctacggtgctctctgtgctcatgagactgcctggggctccttcatccacacccccggacccgagctgcagagagcactggccactcttcagagtcagtggsaggcatgccgagcgcttgaggagagtccagcaggggccaggaagaagcgagcagcagggcagagtggagtccctggtggagggcaccagcgagagaagagaggatggaccatgcctggcacastgtggtgtggagttggagattctgctgggaactcctcggagctgggggtcttccagggacctgatctctgttgccgggaacatgaccgctgcccacagaacatctcacccttgcagtacaactatggcatccgaaactaccgattccacaccatctcccactgtgactgtgacaccaggtttcagcaatgcctacagaatcagcacgactccatctcggacatcgtgggcgtggccttcttcaacgtgctggagatcccctgctttgtgctggaggagcaggaggcgtgtgtggygtggtactggtggggcgggtgtaggatgtayggcacagtgcccctcgctcgcctgcagcccaggaccttctacaatgcctcctggagctcccgggccacctccccaactcccagctcccggagcccagcccctcccaagcctcgacagaagcagyaccttcggaaggggccaccacatcagaaagggtccaagcgccccagsaaagccaacaccacagccctccaggaccctatggtctctcccaggcttgatgtggcccccacaggcctccagggcccacagggtggcctaaaacctcagggtgcccgctgggtctgccgcagcttccgccgccacctggaccagtgtgagcaccagattgggccccrggaaatcgagttccagctgctcaacagcgcccaagagcccctcttccactgcaactgcacgcgccgtctggcacgcttcctgaggctccacagcccacccgaggttaccaacatgctttgggagctgctgggcacaacctgcttcaagctggcccctccactggactgtgtggaaggcaaaaactgttccagagaccctagggccatcagggtgtcagcccggcacttgcggaggcttcagcagaggcgacaccagctccaggataaaggcacagatgagaggcagccatggccttcagagcccctgagaggccccatgtcattctacaaccagtgcctgcagctaacccaggcagccaggagacccgacaggcagcagaagtcctggagccagtgacctcagtttcagctttcctgggcaccagcctggaccttgcccatggctatgccaagccttgrgaatctcagcctcccctccgtaggttagactgaagcatrgcagaggctgttgtggacaatcaagaggatgaatggggggatctcaaggcccaaatgctggaccacatctcctgctgttctgggtaaccttgagctatgtatgacacaactcttctatgcctggatgtggtgttcaggaagctcattctgatgccctgggctttggccttgccagggaacttcacatacagatgagaatggggaaagggtaacttattgcagcagccccaggcagtaccaggaggaggtacatgtatgtccgtgttgcaaaaataatacatgcctcaaaaacctgcctaggggagccctagtgcctgggtgctgtggcctgaggtagcaggtgggaagttagggatgtcacagaaatgtctgtgtctgaatccaggattggggtgggtgttggagagggctttcagctcccctcctcccaggggggcctctttttttaacggctgccrtgcccttcctggcccakccctaaacctaaattcaaatctcctccatgcctttgcgcaaaggacctccctcttgcactctaagccttagtttcctcctctaaaaaaagggggtctctaaacaggagctacctcatagggttgttgaggattaagtgaaccaatacatatacagtgcttagcacttaataagtaytcccccctgcgacacctagctgaactatggtttggtgtctgatcttgagaggttgatgtaaccttttaaaggcctcagttcgctcacctgtgaaatgggtctaagaatagcactgatctcacagggttgtgatgcagattaaaggagatggcatgtgtaatg

SEQ ID NO: 7229 - DNA, 2237 bp, Homo sapiens
ccggagccaagggagtccaggctgccgggggctgcagacatggagggccagagcagcaggggcagcaggaggccagggacccgggctggcctgggttccctgcccatgccccagggtgttgcccaaactggggcaccctccaaggtggactcaagttttcagctcccagcaaagaagaacgcagccctaggaccctcggaaccaaggatcactgtggtcacatggaacgtgggcactgccatgcccccagacgatgtcacatccctcctccacctgggcggtggtgacgacagcgacggcgcagacatgatcgccatagggttgcaggaagtgaactccatgctcaacaagcgactcaaggacgccctcttcacggaccagtggagtgagctgttcatggatgcgmtagggcccttcaacttcgtgctggtgagttcggtgaggatgcagggtgtcatcctgctgctgttcgccaagtactaccacctgcccttcctgcgagacgtgcagaccgactgcacgcgcactggcctgggcggctactggggtaacaagggtggcgtgagcgtgcgcctggcggccttcgggcacatgctctgcttcctgaactgccacttgcctgcgcatatggacaaggcggagcagcgcaaagacaacttccagaccatcctcagcctccagcagttccaagggccgggcgcacagggcatcctggatcatgacctcgtgttctggttcggggacctgaacttccgcattgagagctatgacctgcactttgtcaagtttgccatcgacagtgaccagctccatcagctctgggagaaggaccagctcaacatggccaagaacacctggcccattctgaagggctttcaggaggggcccctcaacttcgctcccaccttcaagtttgatgtgggtaccaacaaatacgataccagtgccaagaaacggaagccagcttggacagaccgtatcctatggaaggtcaaggctccaggtgggggtcccagcccctcaggacggaagagccaccgactccaggtgacgcagcacagctaccgcagccacatggaatacacagtcagcgaccacaagcctgtggctgcccagttcctcctgcagtttgccttcagggacgacatgccactggtgcggctggaggtggcagatgagtgggtgcrgcccgagcaggcggtggtgaggtaccgcatggaaacagtgttcgcccgcagctcctgggactggatcggcttataccgggtgggtttccgccattgcaaggactatgtggcttatgtctgggccaaacatgaagatgtggatgggaatacmtaccaggtaacattcagtgaggaatcactgcccaagggccatggagacttcatcctgggctactatagtcacaaccacagcatcctcatyggcatcactgaacccttccagatctcgctgccttcctcggagttggccagcagcagcacagacagctcaggcaccagctcagagggagaggatgacagcacactggagctccttgcacccaagtcccgcagccccagtcctggcaagtccaagcgacaccgcagccgcagcccgggactggccaggttccctgggcttgccctacggccctcatcccgtgaacgccgtggtgccagccgtagcccctcaccccagagccgccgcctgtcccgagtggctcctgacaggagcagtaatggcagcagccggggcagtagtgaagaggggccctctgggttgcctggcccctgggccttcccaccagctgtgcctcgaagcctgggcctgttgcccgccttgcgcctagagactgtagaccctggtggtggtggctcctggggacctgatcgggaggccctggcgcccaacagcctgtctcctagtccccagggccatcgggggctggaggaagggggcctggggccctgagggtggggtaggcagatgggccaaggtgaccaccattctgcctcaatcttttgcaagcccacctgcctctctcctgctgctcctccagctgtatctgcacctgcctctctgtcctggccaggggtggacaactggggtcccccaaaactcagtcctggcacctcaactgtgacaatcagcaaagccccacccaggcccccatctgggatgatgggagagctctggcagatgtcccaatcctggaggtcatccattaggaattaaattctccagcctcactc

SEQ ID NO: 7230 - DNA, 3455 bp, Homo sapiens
ccggagccaagggagtccaggctgccgggggctgcagacatggagggccagagcagcaggggcagcaggaggccagggacccgggctggcctgggttccctgcccatgccccagggtgttgcccaaactggggcaccctccaaggtggactcaagttttcagctcccagcaaagaagaacgcagccctaggaccctcggaaccaaggttggctctggcacctgtagggccacgggcagctatgtcagcttcctcggaaggaccgaggctggctctggcatctccccgaccaatcctggctccactgtgtacccctgaagggcagaaaacagctactgcccaccgcagctccagcctggccccaacatctgtgggccagctggtgatgtctgcctcagctggaccaaagcctcccccagcgaccacaggctcagttctggctccgacgtccctggggctggtgatgcctgcctcagcagggccaagatctcccccagtcaccctggggcccaatctggccccaacctccagagaccagaagcaggagccacctgcctccgtgggacccaagccaacactggcagcctctggcctgagcctggccctggcttctgaggagcagcccccagaactcccctccaccccttccccggtgcccagtccagttctgtctccaactcaggaacaggccctggctccagcatccacggcatcaggcrcagcctctgtgggacagacatcagctagaaagagggatgccccagcccctagacctctccctgcttctgaggggcatctccagcctccagctcagacatctggtcctacaggctccccaccctgcatccaaacctccccagaccctcggctctccccctccttccgagcccggcctgaggccctccacagcagccctgaggatcctgttttgccacggccaccccagaccttgcccttggatgtgggccagggtccttcagagcctggcactcactcccctggacttctgtcccccaccttccggcctggggccccctcaggccagactgtgcccccacctctgcccaagccaccccgatcacccagccgttccccaagccactccccgaatcgctctccctgtgttcccccagcccctgacatggccctcccaaggcttggcacmcagagtacagggcctggcaggtgcctgagccccaaccttcaggcccaagaagccccagccccagtcaccacctcctcttctacatccaccctgtcatcctccccttggtcagctcagcctacctggaagagcgaccccggcttccggatcactgtggtcacatggaacgtgggcactgccatgcccccagacgatgtcacatccctcctccacctgggcggtggtgacgacagcgacggcgcagacatgatcgccatagggttgcaggaagtgaactccatgctcaacaagcgactcaaggacgccctcttcacggaccagtggagtgagctgttcatggatgcgmtagggcccttcaacttcgtgctggtaacgcacccctcaccccctggacagccagagaccctgctgaattcctgkytccagctgtaccctggctcactgtggggcccgctgggcctctgtggctgggtgagttcggtgaggatgcagggtgtcatcctgctgctgttcgccaagtactaccacctgcccttcctgcgagacgtgcagaccgactgcacgcgcactggcctgggcggctactggggtaacaagggtggcgtgagcgtgcgcctggcggccttcgggcacatgctctgcttcctgaactgccacttgcctgcgcatatggacaaggcggagcagcgcaaagacaacttccagaccatcctcagcctccagcagttccaagggccgggcgcacagggcatcctggatcatgagtatgggctgggcctcgtgttctggttcggggacctgaacttccgcattgagagctatgacctgcactttgtcaagtttgccatcgacagtgaccagctccatcagctctgggagaaggaccagctcaacatggccaagaacacctggcccattctgaagggctttcaggaggggcccctcaacttcgctcccaccttcaagtttgatgtgggtaccaacaaatacgataccagtgccaagaaacggaagccagcttggacagaccgtatcctatggaaggtcaaggctccaggtgggggtcccagcccctcaggacggaagagccaccgactccaggtgacgcagcacagctaccgcagccacatggaatacacagtcagcgaccacaagcctgtggctgcccagttcctcctgcagtttgccttcagggacgacatgccactggtgcggctggaggtggcagatgagtgggtgcrgcccgagcaggcggtggtgaggtaccgcatggaaacagtgttcgcccgcagctcctgggactggatcggcttataccgggtgggtttccgccattgcaaggactatgtggcttatgtctgggccaaacatgaagatgtggatgggaatacmtaccaggtaacattcagtgaggaatcactgcccaagggccatggagacttcatcctgggctactatagtcacaaccacagcatcctcatyggcatcactgaacccttccagatctcgctgccttcctcggagttggccagcagcagcacagacagctcaggcaccagctcagagggagaggatgacagcacactggagctccttgcacccaagtcccgcagccccagtcctggcaagtccaagcgacaccgcagccgcagcccgggactggccaggttccctgggcttgccctacggccctcatcccgtgaacgccgtggtgccagccgtagcccctcaccccagagccgccgcctgtcccgagtggctcctgacaggagcagtaatggcagcagccggggcagtagtgaagaggggccctctgggttgcctggcccctgggccttcccaccagctgtgcctcgaagcctgggcctgttgcccgccttgcgcctagagactgtagaccctggtggtggtggctcctggggacctgatcgggaggccctggcgcccaacagcctgtctcctagtccccagggccatcgggggctggaggaagggggcctggggccctgagggtggggtaggcagatgggccaaggtgaccaccattctgcctcaatcttttgcaagcccacctgcctctctcctgctgctcctccagctgtatctgcacctgcctctctgtcctggccaggggtggacaactggggtcccccaaaactcagtcctggcacctcaactgtgacaatcagcaaagccccacccaggcccccatctgggatgatgggagagctctggcagatgtcccaatcctggaggtcatccattaggaattaaattctccagcctcactc

SEQ ID NO: 7231 - DNA, 5684 bp, Homo sapiens
cgcgcgcgcggctcggagaggcggcggcagcggcggaagcggcgagggcggcgggcgtccggctctgaggtggtggaggcggcggaggcggcggcggaggcggcggcggctcgggactgggctcggctggaagcagcgagggtcagagcgccgcagcaagcgccgatctcccggctcgaccatccgcctgccgcccggacgcctgggccgcggagtttgtgtcccggctcggaccccggcgcccagcccggagccgtaaccttgaggcggcggcggcggggccgggccgggccgggctggggggcggtggcgctggatccgcggctgcccgatcgttggcgggagatgtcgaaccccgggacacgcaggaacggctccagcatcaagatccgtctgacagtgttatgtgccaagaaccttgcaaagaaagacttcttcaggctccctgacccttttgcaaagattgtcgtggatgggtctgggcagtgccactcaaccgacactgtgaaaaacacattggacccaaagtggaaccagcactatgatctatatgttgggaaaacggattcgataaccattagcgtgtggaaccataagaaaattcacaagaaacagggagctggcttcctgggctgtgtgcggctgctctccaatgccatcagcagattaaaagataccggataccagcgtttggatctatgcaaactaaacccctcagatactgatgcagttcgtggccagatagtggtcagtttacagacacgagacagaataggaaccggcggctcggtggtggactgcagaggactgttagaaaatgaaggaacggtgtatgaagactcsgggcctgggaggccgctcagctgcttcatggaggaaccagccccttacacagatagcaccggtgctgctgctggaggagggaattgcaggttcgtggagtccccaagtcaagatcaaagacttcaggcacagcggcttcgaaaccctgatgtgcgaggttcactacagacgccccagaaccgaccacacggccaccagtccccggaactgcccgaaggctacgaacaaagaacaacagtccagggccaagtttactttttgcatacacagactggagttagcacgtggcacgaccccaggataccaagagaccttaacagtgtgaactgtgatgaacttggaccactgccgccaggctgggaagtcagaagtacagtttctgggaggatatattttgtagatcataataaccgaacaacccagtttacagacccaaggttacaccacatcatgaatcaccagtgccaactcaaggagcccagccagccgctgccactgcccagtgagggctctctggaggacgaggagcttcctgcccagagatacgaaagagatctagtccagaagctgaaagtcctcagacacgaactgtcgcttcagcagccccaagctggtcattgccgcatcgaagtgtccagagaagaaatctttgaggagtcttaccgccagataatgaagatgcgaccgaaagacttgaaaaaacggctgatggtgaaattccgtggggaagaaggtttggattayggtggtgtggccagggagtggctttacttgctgtgccatgaaatgctgaatccttattacgggctcttccagtattctacggacaatatttacatgttgcaaataaatccggattcttcaatcaaccccgaccacttgtcttatttccactttgtggggcggatcatggggctggctgtgttccatggacactacatcaacgggggcttcacagtgcccttctacaagcagctgctggggaagcccatccagctctcagatctggaatctgtggacccagagctgcataagagcttggtgtggatcctagagaacgacatcacgcctgtactggaccacaccttctgcgtggaacacaacgccttcgggcggatcctgcagcatgaactgaaacccaatggcagaaatgtgccagtcacagaggagaataagaaagaatacgtccggttgtatgtaaactggaggtttatgagaggaatcgaagcccagttcttagctctgcagaaggggttcaatgagctcatccctcaacatctgctgaagccttttgaccagaaggaactggagctgatcataggcggcctggataaaatagacttgaacgactggaagtcgaacacgcggctgaagcactgtgtggccgacagcaacatcgtgcggtggttctggcaagcggtggagacgttcgatgaagaaaggagggccaggctcctgcagtttgtgactgggtccacgcgagtcccgctccaaggcttcaaggctttgcaaggttctacaggcgcggcagggccccggctgttcaccatccacctgatagaygcgaacacagacaaccttccgaaggcccatacctgctttaaccggatcgacattccaccatatgagtcctatgagaagctctacgagaagctgctgacagccgtggaggagacctgcgggtttgctgtggagtgaaaagcaaccaaaggcaacagagtctagctcatggccaccagaccaaaagcatccagcttctgtgcacctcctgcaaagctggcagaggccctggaattccagatcacctgaggggaaagggttgtctctctcctttctgttgggggagggggatgggggacttttgttggtggctcccacccatatatccctcctttaccatagtactcccacccacttccatcacccatccaataaaatgcagccaggtttagcctttggctttggtcacacaggatattctgctgtgttgcaacccatgtggtgataaggctcacagccctgagctctttacgggagcatcaactcacagttaggggactgggcgtggctgattgagggtttggaactggtggctatgccagctattccatctcaaaacagccttgaggccccttttcaatttgagcagctgctagatatcttatcagagctcagattccagatttcacatcccagcagccggttctgggtagcagatcaatttccaactggaaaataactatataatgtatgcttattggaattctgccacagcaggaagcttgagtcaaaatgtgtttcccctttgaaaggagaaggaattggagcagcttttcctggaggcccaggatatttcttttctgggtatcttggctgaaaattttgttttacatagagaaaaacgatcttttaagggtcccttttgctgcattatctgtccartttgacttttttttcagtgaaaacaccatgtcatggagtgtaggaaagagcagaccaaaatcagccctagagccaaccagtcagtcccaaagctgtgacctctgtgccactgttgtccatagaagagcatcgactgtgtcacttaaaatattagtaaaccatgatgcagcaactgctaagagctaaactaacaaaattgtgtcatcatagctgctggcttggtgtgaactcgcttaaaagcaatggtgaaaggataacctcgatgatgtaaatccacccaaagatactgttctacaaaaagtagggtgtggacgcaaacctgtgacagcagagggggacgacttcacactcactgcctcatgtggcccctttcccagtggcagctggtgacactaacgattgctactcggttcacttgcccagatgtcttcatatgatgagcaaggccagaagcaaggctagattcgaagtttctgacaccatttccagtttgcacaaaagtcagtattttatcttaaagtggcttgatttccaatagctgaacttgggcagaaaacagcaggccaatgttcctatgtggtttctttgttgttgtttttgtttggggtgggggcaagtacagggtaattcatgagcaagacatttcactgctgtcgaagtctctgggatcccgctgtgggtctgagatggcctgggaaggaccttgtggacaatggttttatctgttctttttgtcactgttaatttctgggctgctgaggttctagaatagaagggctgccaaatgaggtttgctgcaggaggaaagtttaatcccccattccaaaagtccaggccaaatggtgggcttagcctctttgaaaagttctgccttgcccccacaggtgggcacatcctgtgtctcattcaccatgatgcttcctgagrgtgttctagaagcccgttccccagtggctgtatccagcctttccttgcatcatcttcctcttgaaggkgaggaagtgaaaactacagacctcccccggacagcccactctctatcacgagcctaacccgcgggaggcggaagagacatccattcgagaactgaagcggcctccgggatgaggtcagaggccccacctgattttcctggtggtggtatccaaaatcttcagtaactaggaaggaaaccagggtctcatggtttaaaagactttgaagcaggaatgttgcatttgacgcctttaaaactacctttttgctgttgggaggagtcgggggcgagccttagcagctgcaccgccatccccatgctggttggtgctgccctgcctctcgtgccgggtgttgcttcagcccagagccagagggctgggtcccgggtcctccacaggtgaccccggtggacacacgcgttcccatcctggcctccgtctctgcttttccacttctacctgcgtgtgggtttgccgccttgtcatcrgttgtgtgagtgtcgcagacctttccagagctccggttcactctttccaaacaggcctccctgtcggtggcactgcactcctagaaccttcagtttctacgatggtttgtttggtccttttgaaccaccccaaagaactcaacatggcaaagcaaatggtaaaagcttcccgactgttctactttgggtccgcgcgaagcccactcacgtgtgatytgtgttgcccctctcggtggtcccaggcgatccagccatgccccctgcccctctgcccagatgcttcaggggcccggcttttcaggcttgccctcaccagcggccgtcagccgacactcagggatgtagctaacaccactccgccagtgctttcagtaggaagagctgaggctgcctgggaggcccggggcgaccggaaaagggctctctcaagttctgaaaagagaatctgccaccagatcgaatttcgacccctgagcttgttcggacgtatggtccaaattcagattaaggtggtcacccaacccgagatgtcaggaaaggccttctgcagagaaaatgtccccccacccgccatctgcagccaggtgtgtgccacacggcagccttcccgaaacatagtatggattttaaaaatgtgtttatttttgtttctcaaccactttataacgtattttttaatttattttgtaatgtcttgttttgaagtattgctgctatccttgttatccttcccactgtttktatcactgatttattttgtgaaagttgtacactaatgttctatgtcaaaatcaaaagtatttaatgaaatactagttctatttaatgtggttatggaaccagctggaaacacaaaacaaacagtgattgtacagcaggctgggcccaggaggtcaggttcattttgttacatatgcaataaactcacgacttt

SEQ ID NO: 7232 - DNA, 5762 bp, Homo sapiens
cgcgcgcgcggctcggagaggcggcggcagcggcggaagcggcgagggcggcgggcgtccggctctgaggtggtggaggcggcggaggcggcggcggaggcggcggcggctcgggactgggctcggctggaagcagcgagggtcagagcgccgcagcaagcgccgatctcccggctcgaccatccgcctgccgcccggacgcctgggccgcggagtttgtgtcccggctcggaccccggcgcccagcccggagccgtaaccttgaggcggcggcggcggggccgggccgggccgggctggggggcggtggcgctggatccgcggctgcccgatcgttggcgggagatgtcgaaccccgggacacgcaggaacggctccagcatcaagatccgtctgacagtgttatgtgccaagaaccttgcaaagaaagacttcttcaggctccctgacccttttgcaaagattgtcgtggatgggtctgggcagtgccactcaaccgacactgtgaaaaacacattggacccaaagtggaaccagcactatgatctatatgttgggaaaacggattcgataaccattagcgtgtggaaccataagaaaattcacaagaaacagggagctggcttcctgggctgtgtgcggctgctctccaatgccatcagcagattaaaagataccggataccagcgtttggatctatgcaaactaaacccctcagatactgatgcagttcgtggccagatagtggtcagtttacagacacgagacagaataggaaccggcggctcggtggtggactgcagaggactgttagaaaatgaaggaacggtgtatgaagactcsgggcctgggaggccgctcagctgcttcatggaggaaccagccccttacacagatagcaccggtgctgctgctggaggagggaattgcaggttcgtggagtccccaagtcaagatcaaagacttcaggcacagcggcttcgaaaccctgatgtgcgaggttcactacagacgccccagaaccgaccacacggccaccagtccccggaactgcccgaaggctacgaacaaagaacaacagtccagggccaagtttactttttgcatacacagactggagttagcacgtggcacgaccccaggataccaagtccctcggggaccattcctgggggagatgcagcttttctatacgaattccttctacaaggccatacatctgagcccagagaccttaacagtgtgaactgtgatgaacttggaccactgccgccaggctgggaagtcagaagtacagtttctgggaggatatattttgtagatcataataaccgaacaacccagtttacagacccaaggttacaccacatcatgaatcaccagtgccaactcaaggagcccagccagccgctgccactgcccagtgagggctctctggaggacgaggagcttcctgcccagagatacgaaagagatctagtccagaagctgaaagtcctcagacacgaactgtcgcttcagcagccccaagctggtcattgccgcatcgaagtgtccagagaagaaatctttgaggagtcttaccgccagataatgaagatgcgaccgaaagacttgaaaaaacggctgatggtgaaattccgtggggaagaaggtttggattayggtggtgtggccagggagtggctttacttgctgtgccatgaaatgctgaatccttattacgggctcttccagtattctacggacaatatttacatgttgcaaataaatccggattcttcaatcaaccccgaccacttgtcttatttccactttgtggggcggatcatggggctggctgtgttccatggacactacatcaacgggggcttcacagtgcccttctacaagcagctgctggggaagcccatccagctctcagatctggaatctgtggacccagagctgcataagagcttggtgtggatcctagagaacgacatcacgcctgtactggaccacaccttctgcgtggaacacaacgccttcgggcggatcctgcagcatgaactgaaacccaatggcagaaatgtgccagtcacagaggagaataagaaagaatacgtccggttgtatgtaaactggaggtttatgagaggaatcgaagcccagttcttagctctgcagaaggggttcaatgagctcatccctcaacatctgctgaagccttttgaccagaaggaactggagctgatcataggcggcctggataaaatagacttgaacgactggaagtcgaacacgcggctgaagcactgtgtggccgacagcaacatcgtgcggtggttctggcaagcggtggagacgttcgatgaagaaaggagggccaggctcctgcagtttgtgactgggtccacgcgagtcccgctccaaggcttcaaggctttgcaaggttctacaggcgcggcagggccccggctgttcaccatccacctgatagaygcgaacacagacaaccttccgaaggcccatacctgctttaaccggatcgacattccaccatatgagtcctatgagaagctctacgagaagctgctgacagccgtggaggagacctgcgggtttgctgtggagtgaaaagcaaccaaaggcaacagagtctagctcatggccaccagaccaaaagcatccagcttctgtgcacctcctgcaaagctggcagaggccctggaattccagatcacctgaggggaaagggttgtctctctcctttctgttgggggagggggatgggggacttttgttggtggctcccacccatatatccctcctttaccatagtactcccacccacttccatcacccatccaataaaatgcagccaggtttagcctttggctttggtcacacaggatattctgctgtgttgcaacccatgtggtgataaggctcacagccctgagctctttacgggagcatcaactcacagttaggggactgggcgtggctgattgagggtttggaactggtggctatgccagctattccatctcaaaacagccttgaggccccttttcaatttgagcagctgctagatatcttatcagagctcagattccagatttcacatcccagcagccggttctgggtagcagatcaatttccaactggaaaataactatataatgtatgcttattggaattctgccacagcaggaagcttgagtcaaaatgtgtttcccctttgaaaggagaaggaattggagcagcttttcctggaggcccaggatatttcttttctgggtatcttggctgaaaattttgttttacatagagaaaaacgatcttttaagggtcccttttgctgcattatctgtccartttgacttttttttcagtgaaaacaccatgtcatggagtgtaggaaagagcagaccaaaatcagccctagagccaaccagtcagtcccaaagctgtgacctctgtgccactgttgtccatagaagagcatcgactgtgtcacttaaaatattagtaaaccatgatgcagcaactgctaagagctaaactaacaaaattgtgtcatcatagctgctggcttggtgtgaactcgcttaaaagcaatggtgaaaggataacctcgatgatgtaaatccacccaaagatactgttctacaaaaagtagggtgtggacgcaaacctgtgacagcagagggggacgacttcacactcactgcctcatgtggcccctttcccagtggcagctggtgacactaacgattgctactcggttcacttgcccagatgtcttcatatgatgagcaaggccagaagcaaggctagattcgaagtttctgacaccatttccagtttgcacaaaagtcagtattttatcttaaagtggcttgatttccaatagctgaacttgggcagaaaacagcaggccaatgttcctatgtggtttctttgttgttgtttttgtttggggtgggggcaagtacagggtaattcatgagcaagacatttcactgctgtcgaagtctctgggatcccgctgtgggtctgagatggcctgggaaggaccttgtggacaatggttttatctgttctttttgtcactgttaatttctgggctgctgaggttctagaatagaagggctgccaaatgaggtttgctgcaggaggaaagtttaatcccccattccaaaagtccaggccaaatggtgggcttagcctctttgaaaagttctgccttgcccccacaggtgggcacatcctgtgtctcattcaccatgatgcttcctgagrgtgttctagaagcccgttccccagtggctgtatccagcctttccttgcatcatcttcctcttgaaggkgaggaagtgaaaactacagacctcccccggacagcccactctctatcacgagcctaacccgcgggaggcggaagagacatccattcgagaactgaagcggcctccgggatgaggtcagaggccccacctgattttcctggtggtggtatccaaaatcttcagtaactaggaaggaaaccagggtctcatggtttaaaagactttgaagcaggaatgttgcatttgacgcctttaaaactacctttttgctgttgggaggagtcgggggcgagccttagcagctgcaccgccatccccatgctggttggtgctgccctgcctctcgtgccgggtgttgcttcagcccagagccagagggctgggtcccgggtcctccacaggtgaccccggtggacacacgcgttcccatcctggcctccgtctctgcttttccacttctacctgcgtgtgggtttgccgccttgtcatcrgttgtgtgagtgtcgcagacctttccagagctccggttcactctttccaaacaggcctccctgtcggtggcactgcactcctagaaccttcagtttctacgatggtttgtttggtccttttgaaccaccccaaagaactcaacatggcaaagcaaatggtaaaagcttcccgactgttctactttgggtccgcgcgaagcccactcacgtgtgatytgtgttgcccctctcggtggtcccaggcgatccagccatgccccctgcccctctgcccagatgcttcaggggcccggcttttcaggcttgccctcaccagcggccgtcagccgacactcagggatgtagctaacaccactccgccagtgctttcagtaggaagagctgaggctgcctgggaggcccggggcgaccggaaaagggctctctcaagttctgaaaagagaatctgccaccagatcgaatttcgacccctgagcttgttcggacgtatggtccaaattcagattaaggtggtcacccaacccgagatgtcaggaaaggccttctgcagagaaaatgtccccccacccgccatctgcagccaggtgtgtgccacacggcagccttcccgaaacatagtatggattttaaaaatgtgtttatttttgtttctcaaccactttataacgtattttttaatttattttgtaatgtcttgttttgaagtattgctgctatccttgttatccttcccactgtttktatcactgatttattttgtgaaagttgtacactaatgttctatgtcaaaatcaaaagtatttaatgaaatactagttctatttaatgtggttatggaaccagctggaaacacaaaacaaacagtgattgtacagcaggctgggcccaggaggtcaggttcattttgttacatatgcaataaactcacgacttt

SEQ ID NO: 7233 - DNA, 5839 bp, Homo sapiens
cggctcgggactgggctcggctggaagcagcgagggtcagagcgccgcagcaagcgccgatctcccggctcgaccatccgcctgccgcccggacgcctgggccgcggagtttgtgtcccggctcggaccccggcgcccagcccggagccgtaaccttgaggcggcggcggcggggccgggccgggccgggctggggggcggtggcgctggatccgcggctgcccgatcgttggcgggagatgtcgaaccccgggacacgcaggaacggctccagcatcaagatccgtctgacagaattcaaggtctaaattgacatatttgggaagagcagggtgttggggaaacagaactgctgagaagctgccattgatggtgaaagactttaatctaaatttagattctcttcagaggtttcgtggaatacttccttaaattaagccacagactgcaaaagctgctgctgagtggggcttccagtgttatgtgccaagaaccttgcaaagaaagacttcttcaggctccctgacccttttgcaaagattgtcgtggatgggtctgggcagtgccactcaaccgacactgtgaaaaacacattggacccaaagtggaaccagcactatgatctatatgttgggaaaacggattcgataaccattagcgtgtggaaccataagaaaattcacaagaaacagggagctggcttcctgggctgtgtgcggctgctctccaatgccatcagcagattaaaagataccggataccagcgtttggatctatgcaaactaaacccctcagatactgatgcagttcgtggccagatagtggtcagtttacagacacgagacagaataggaaccggcggctcggtggtggactgcagaggactgttagaaaatgaaggaacggtgtatgaagactcsgggcctgggaggccgctcagctgcttcatggaggaaccagccccttacacagatagcaccggtgctgctgctggaggagggaattgcaggttcgtggagtccccaagtcaagatcaaagacttcaggcacagcggcttcgaaaccctgatgtgcgaggttcactacagacgccccagaaccgaccacacggccaccagtccccggaactgcccgaaggctacgaacaaagaacaacagtccagggccaagtttactttttgcatacacagactggagttagcacgtggcacgaccccaggataccaagtccctcggggaccattcctgggggagatgcagcttttctatacgaattccttctacaaggccatacatctgagcccagagaccttaacagtgtgaactgtgatgaacttggaccactgccgccaggctgggaagtcagaagtacagtttctgggaggatatattttgtagatcataataaccgaacaacccagtttacagacccaaggttacaccacatcatgaatcaccagtgccaactcaaggagcccagccagccgctgccactgcccagtgagggctctctggaggacgaggagcttcctgcccagagatacgaaagagatctagtccagaagctgaaagtcctcagacacgaactgtcgcttcagcagccccaagctggtcattgccgcatcgaagtgtccagagaagaaatctttgaggagtcttaccgccagataatgaagatgcgaccgaaagacttgaaaaaacggctgatggtgaaattccgtggggaagaaggtttggattayggtggtgtggccagggagtggctttacttgctgtgccatgaaatgctgaatccttattacgggctcttccagtattctacggacaatatttacatgttgcaaataaatccggattcttcaatcaaccccgaccacttgtcttatttccactttgtggggcggatcatggggctggctgtgttccatggacactacatcaacgggggcttcacagtgcccttctacaagcagctgctggggaagcccatccagctctcagatctggaatctgtggacccagagctgcataagagcttggtgtggatcctagagaacgacatcacgcctgtactggaccacaccttctgcgtggaacacaacgccttcgggcggatcctgcagcatgaactgaaacccaatggcagaaatgtgccagtcacagaggagaataagaaagaatacgtccggttgtatgtaaactggaggtttatgagaggaatcgaagcccagttcttagctctgcagaaggggttcaatgagctcatccctcaacatctgctgaagccttttgaccagaaggaactggagctgatcataggcggcctggataaaatagacttgaacgactggaagtcgaacacgcggctgaagcactgtgtggccgacagcaacatcgtgcggtggttctggcaagcggtggagacgttcgatgaagaaaggagggccaggctcctgcagtttgtgactgggtccacgcgagtcccgctccaaggcttcaaggctttgcaaggttctacaggcgcggcagggccccggctgttcaccatccacctgatagaygcgaacacagacaaccttccgaaggcccatacctgctttaaccggatcgacattccaccatatgagtcctatgagaagctctacgagaagctgctgacagccgtggaggagacctgcgggtttgctgtggagtgaaaagcaaccaaaggcaacagagtctagctcatggccaccagaccaaaagcatccagcttctgtgcacctcctgcaaagctggcagaggccctggaattccagatcacctgaggggaaagggttgtctctctcctttctgttgggggagggggatgggggacttttgttggtggctcccacccatatatccctcctttaccatagtactcccacccacttccatcacccatccaataaaatgcagccaggtttagcctttggctttggtcacacaggatattctgctgtgttgcaacccatgtggtgataaggctcacagccctgagctctttacgggagcatcaactcacagttaggggactgggcgtggctgattgagggtttggaactggtggctatgccagctattccatctcaaaacagccttgaggccccttttcaatttgagcagctgctagatatcttatcagagctcagattccagatttcacatcccagcagccggttctgggtagcagatcaatttccaactggaaaataactatataatgtatgcttattggaattctgccacagcaggaagcttgagtcaaaatgtgtttcccctttgaaaggagaaggaattggagcagcttttcctggaggcccaggatatttcttttctgggtatcttggctgaaaattttgttttacatagagaaaaacgatcttttaagggtcccttttgctgcattatctgtccartttgacttttttttcagtgaaaacaccatgtcatggagtgtaggaaagagcagaccaaaatcagccctagagccaaccagtcagtcccaaagctgtgacctctgtgccactgttgtccatagaagagcatcgactgtgtcacttaaaatattagtaaaccatgatgcagcaactgctaagagctaaactaacaaaattgtgtcatcatagctgctggcttggtgtgaactcgcttaaaagcaatggtgaaaggataacctcgatgatgtaaatccacccaaagatactgttctacaaaaagtagggtgtggacgcaaacctgtgacagcagagggggacgacttcacactcactgcctcatgtggcccctttcccagtggcagctggtgacactaacgattgctactcggttcacttgcccagatgtcttcatatgatgagcaaggccagaagcaaggctagattcgaagtttctgacaccatttccagtttgcacaaaagtcagtattttatcttaaagtggcttgatttccaatagctgaacttgggcagaaaacagcaggccaatgttcctatgtggtttctttgttgttgtttttgtttggggtgggggcaagtacagggtaattcatgagcaagacatttcactgctgtcgaagtctctgggatcccgctgtgggtctgagatggcctgggaaggaccttgtggacaatggttttatctgttctttttgtcactgttaatttctgggctgctgaggttctagaatagaagggctgccaaatgaggtttgctgcaggaggaaagtttaatcccccattccaaaagtccaggccaaatggtgggcttagcctctttgaaaagttctgccttgcccccacaggtgggcacatcctgtgtctcattcaccatgatgcttcctgagrgtgttctagaagcccgttccccagtggctgtatccagcctttccttgcatcatcttcctcttgaaggkgaggaagtgaaaactacagacctcccccggacagcccactctctatcacgagcctaacccgcgggaggcggaagagacatccattcgagaactgaagcggcctccgggatgaggtcagaggccccacctgattttcctggtggtggtatccaaaatcttcagtaactaggaaggaaaccagggtctcatggtttaaaagactttgaagcaggaatgttgcatttgacgcctttaaaactacctttttgctgttgggaggagtcgggggcgagccttagcagctgcaccgccatccccatgctggttggtgctgccctgcctctcgtgccgggtgttgcttcagcccagagccagagggctgggtcccgggtcctccacaggtgaccccggtggacacacgcgttcccatcctggcctccgtctctgcttttccacttctacctgcgtgtgggtttgccgccttgtcatcrgttgtgtgagtgtcgcagacctttccagagctccggttcactctttccaaacaggcctccctgtcggtggcactgcactcctagaaccttcagtttctacgatggtttgtttggtccttttgaaccaccccaaagaactcaacatggcaaagcaaatggtaaaagcttcccgactgttctactttgggtccgcgcgaagcccactcacgtgtgatytgtgttgcccctctcggtggtcccaggcgatccagccatgccccctgcccctctgcccagatgcttcaggggcccggcttttcaggcttgccctcaccagcggccgtcagccgacactcagggatgtagctaacaccactccgccagtgctttcagtaggaagagctgaggctgcctgggaggcccggggcgaccggaaaagggctctctcaagttctgaaaagagaatctgccaccagatcgaatttcgacccctgagcttgttcggacgtatggtccaaattcagattaaggtggtcacccaacccgagatgtcaggaaaggccttctgcagagaaaatgtccccccacccgccatctgcagccaggtgtgtgccacacggcagccttcccgaaacatagtatggattttaaaaatgtgtttatttttgtttctcaaccactttataacgtattttttaatttattttgtaatgtcttgttttgaagtattgctgctatccttgttatccttcccactgtttktatcactgatttattttgtgaaagttgtacactaatgttctatgtcaaaatcaaaagtatttaatgaaatactagttctatttaatgtggttatggaaccagctggaaacacaaaacaaacagtgattgtacagcaggctgggcccaggaggtcaggttcattttgttacatatgcaataaactcacgacttt

SEQ ID NO: 7234 - DNA, 5234 bp, Homo sapiens
cgcgcgcgcggctcggagaggcggcggcagcggcggaagcggcgagggcggcgggcgtccggctctgaggtggtggaggcggcggaggcggcggcggaggcggcggcggctcgggactgggctcggctggaagcagcgagggtcagagcgccgcagcaagcgccgatctcccggctcgaccatccgcctgccgcccggacgcctgggccgcggagtttgtgtcccggctcggaccccggcgcccagcccggagccgtaaccttgaggcggcggcggcggggccgggccgggccgggctggggggcggtggcgctggatccgcggctgcccgatcgttggcgggagatgtcgaaccccgggacacgcaggaacggctccagcatcaagatccgtctgacagtgttatgtgccaagaaccttgcaaagaaagacttcttcaggctccctgacccttttgcaaagattgtcgtggatgggtctgggcagtgccactcaaccgacactgtgaaaaacacattggacccaaagtggaaccagcactatgatctatatgttgggaaaacggattcgataaccattagcgtgtggaaccataagaaaattcacaagaaacagggagctggcttcctgggctgtgtgcggctgctctccaatgccatcagcagattaaaagataccggataccagcgtttggatctatgcaaactaaacccctcagatactgatgcagttcgtggccagatagtggtcagtttacagacacgagacagaataggaaccggcggctcggtggtggactgcagaggactgttagaaaatgaaggaacggtgtatgaagactcsgggcctgggaggccgctcagctgcttcatggaggaaccagccccttacacagatagcaccggtgctgctgctggaggagggaattgcaggttcgtggagtccccaagtcaagatcaaagacttcaggcacagcggcttcgaaaccctgatgtgcgaggttcactacagacgccccagaaccgaccacacggccaccagtccccggaactgcccgaaggctacgaacaaagaacaacagtccagggccaagtttactttttgcatacacagactggagttagcacgtggcacgaccccaggataccaagggagtggctttacttgctgtgccatgaaatgctgaatccttattacgggctcttccagtattctacggacaatatttacatgttgcaaataaatccggattcttcaatcaaccccgaccacttgtcttatttccactttgtggggcggatcatggggctggctgtgttccatggacactacatcaacgggggcttcacagtgcccttctacaagcagctgctggggaagcccatccagctctcagatctggaatctgtggacccagagctgcataagagcttggtgtggatcctagagaacgacatcacgcctgtactggaccacaccttctgcgtggaacacaacgccttcgggcggatcctgcagcatgaactgaaacccaatggcagaaatgtgccagtcacagaggagaataagaaagaatacgtccggttgtatgtaaactggaggtttatgagaggaatcgaagcccagttcttagctctgcagaaggggttcaatgagctcatccctcaacatctgctgaagccttttgaccagaaggaactggagctgatcataggcggcctggataaaatagacttgaacgactggaagtcgaacacgcggctgaagcactgtgtggccgacagcaacatcgtgcggtggttctggcaagcggtggagacgttcgatgaagaaaggagggccaggctcctgcagtttgtgactgggtccacgcgagtcccgctccaaggcttcaaggctttgcaaggttctacaggcgcggcagggccccggctgttcaccatccacctgatagaygcgaacacagacaaccttccgaaggcccatacctgctttaaccggatcgacattccaccatatgagtcctatgagaagctctacgagaagctgctgacagccgtggaggagacctgcgggtttgctgtggagtgaaaagcaaccaaaggcaacagagtctagctcatggccaccagaccaaaagcatccagcttctgtgcacctcctgcaaagctggcagaggccctggaattccagatcacctgaggggaaagggttgtctctctcctttctgttgggggagggggatgggggacttttgttggtggctcccacccatatatccctcctttaccatagtactcccacccacttccatcacccatccaataaaatgcagccaggtttagcctttggctttggtcacacaggatattctgctgtgttgcaacccatgtggtgataaggctcacagccctgagctctttacgggagcatcaactcacagttaggggactgggcgtggctgattgagggtttggaactggtggctatgccagctattccatctcaaaacagccttgaggccccttttcaatttgagcagctgctagatatcttatcagagctcagattccagatttcacatcccagcagccggttctgggtagcagatcaatttccaactggaaaataactatataatgtatgcttattggaattctgccacagcaggaagcttgagtcaaaatgtgtttcccctttgaaaggagaaggaattggagcagcttttcctggaggcccaggatatttcttttctgggtatcttggctgaaaattttgttttacatagagaaaaacgatcttttaagggtcccttttgctgcattatctgtccartttgacttttttttcagtgaaaacaccatgtcatggagtgtaggaaagagcagaccaaaatcagccctagagccaaccagtcagtcccaaagctgtgacctctgtgccactgttgtccatagaagagcatcgactgtgtcacttaaaatattagtaaaccatgatgcagcaactgctaagagctaaactaacaaaattgtgtcatcatagctgctggcttggtgtgaactcgcttaaaagcaatggtgaaaggataacctcgatgatgtaaatccacccaaagatactgttctacaaaaagtagggtgtggacgcaaacctgtgacagcagagggggacgacttcacactcactgcctcatgtggcccctttcccagtggcagctggtgacactaacgattgctactcggttcacttgcccagatgtcttcatatgatgagcaaggccagaagcaaggctagattcgaagtttctgacaccatttccagtttgcacaaaagtcagtattttatcttaaagtggcttgatttccaatagctgaacttgggcagaaaacagcaggccaatgttcctatgtggtttctttgttgttgtttttgtttggggtgggggcaagtacagggtaattcatgagcaagacatttcactgctgtcgaagtctctgggatcccgctgtgggtctgagatggcctgggaaggaccttgtggacaatggttttatctgttctttttgtcactgttaatttctgggctgctgaggttctagaatagaagggctgccaaatgaggtttgctgcaggaggaaagtttaatcccccattccaaaagtccaggccaaatggtgggcttagcctctttgaaaagttctgccttgcccccacaggtgggcacatcctgtgtctcattcaccatgatgcttcctgagrgtgttctagaagcccgttccccagtggctgtatccagcctttccttgcatcatcttcctcttgaaggkgaggaagtgaaaactacagacctcccccggacagcccactctctatcacgagcctaacccgcgggaggcggaagagacatccattcgagaactgaagcggcctccgggatgaggtcagaggccccacctgattttcctggtggtggtatccaaaatcttcagtaactaggaaggaaaccagggtctcatggtttaaaagactttgaagcaggaatgttgcatttgacgcctttaaaactacctttttgctgttgggaggagtcgggggcgagccttagcagctgcaccgccatccccatgctggttggtgctgccctgcctctcgtgccgggtgttgcttcagcccagagccagagggctgggtcccgggtcctccacaggtgaccccggtggacacacgcgttcccatcctggcctccgtctctgcttttccacttctacctgcgtgtgggtttgccgccttgtcatcrgttgtgtgagtgtcgcagacctttccagagctccggttcactctttccaaacaggcctccctgtcggtggcactgcactcctagaaccttcagtttctacgatggtttgtttggtccttttgaaccaccccaaagaactcaacatggcaaagcaaatggtaaaagcttcccgactgttctactttgggtccgcgcgaagcccactcacgtgtgatytgtgttgcccctctcggtggtcccaggcgatccagccatgccccctgcccctctgcccagatgcttcaggggcccggcttttcaggcttgccctcaccagcggccgtcagccgacactcagggatgtagctaacaccactccgccagtgctttcagtaggaagagctgaggctgcctgggaggcccggggcgaccggaaaagggctctctcaagttctgaaaagagaatctgccaccagatcgaatttcgacccctgagcttgttcggacgtatggtccaaattcagattaaggtggtcacccaacccgagatgtcaggaaaggccttctgcagagaaaatgtccccccacccgccatctgcagccaggtgtgtgccacacggcagccttcccgaaacatagtatggattttaaaaatgtgtttatttttgtttctcaaccactttataacgtattttttaatttattttgtaatgtcttgttttgaagtattgctgctatccttgttatccttcccactgtttktatcactgatttattttgtgaaagttgtacactaatgttctatgtcaaaatcaaaagtatttaatgaaatactagttctatttaatgtggttatggaaccagctggaaacacaaaacaaacagtgattgtacagcaggctgggcccaggaggtcaggttcattttgttacatatgcaataaactcacgacttt

SEQ ID NO: 7235 - DNA, 5715 bp, Homo sapiens
tgacatccccgcttcagcctcccaaggagctgaaactaacagatgtgtgtcaccatgcccagctaacttaaaacagtatttttggtaaagatggaatcttgctatgttgcctgggctggtctcaaactcttggcttcaagcgatattcctgcctcggtctcccagactgctgcgattatagacatgaaccactgtacctgacccaagatttatttttaattaagaagcaatgtatacatgcattctctttgtggaaagacaaaaatgctaggctaaaggcctcctcgtccacctcttccaagcctgggatcctccctgcgccatccttctccactcccggacccctgccccagtgttatgtgccaagaaccttgcaaagaaagacttcttcaggctccctgacccttttgcaaagattgtcgtggatgggtctgggcagtgccactcaaccgacactgtgaaaaacacattggacccaaagtggaaccagcactatgatctatatgttgggaaaacggattcgataaccattagcgtgtggaaccataagaaaattcacaagaaacagggagctggcttcctgggctgtgtgcggctgctctccaatgccatcagcagattaaaagataccggataccagcgtttggatctatgcaaactaaacccctcagatactgatgcagttcgtggccagatagtggtcagtttacagacacgagacagaataggaaccggcggctcggtggtggactgcagaggactgttagaaaatgaaggaacggtgtatgaagactcsgggcctgggaggccgctcagctgcttcatggaggaaccagccccttacacagatagcaccggtgctgctgctggaggagggaattgcaggttcgtggagtccccaagtcaagatcaaagacttcaggcacagcggcttcgaaaccctgatgtgcgaggttcactacagacgccccagaaccgaccacacggccaccagtccccggaactgcccgaaggctacgaacaaagaacaacagtccagggccaagtttactttttgcatacacagactggagttagcacgtggcacgaccccaggataccaagtccctcggggaccattcctgggggagatgcagcttttctatacgaattccttctacaaggccatacatctgagcccagagaccttaacagtgtgaactgtgatgaacttggaccactgccgccaggctgggaagtcagaagtacagtttctgggaggatatattttgtagatcataataaccgaacaacccagtttacagacccaaggttacaccacatcatgaatcaccagtgccaactcaaggagcccagccagccgctgccactgcccagtgagggctctctggaggacgaggagcttcctgcccagagatacgaaagagatctagtccagaagctgaaagtcctcagacacgaactgtcgcttcagcagccccaagctggtcattgccgcatcgaagtgtccagagaagaaatctttgaggagtcttaccgccagataatgaagatgcgaccgaaagacttgaaaaaacggctgatggtgaaattccgtggggaagaaggtttggattayggtggtgtggccagggagtggctttacttgctgtgccatgaaatgctgaatccttattacgggctcttccagtattctacggacaatatttacatgttgcaaataaatccggattcttcaatcaaccccgaccacttgtcttatttccactttgtggggcggatcatggggctggctgtgttccatggacactacatcaacgggggcttcacagtgcccttctacaagcagctgctggggaagcccatccagctctcagatctggaatctgtggacccagagctgcataagagcttggtgtggatcctagagaacgacatcacgcctgtactggaccacaccttctgcgtggaacacaacgccttcgggcggatcctgcagcatgaactgaaacccaatggcagaaatgtgccagtcacagaggagaataagaaagaatacgtccggttgtatgtaaactggaggtttatgagaggaatcgaagcccagttcttagctctgcagaaggggttcaatgagctcatccctcaacatctgctgaagccttttgaccagaaggaactggagctgatcataggcggcctggataaaatagacttgaacgactggaagtcgaacacgcggctgaagcactgtgtggccgacagcaacatcgtgcggtggttctggcaagcggtggagacgttcgatgaagaaaggagggccaggctcctgcagtttgtgactgggtccacgcgagtcccgctccaaggcttcaaggctttgcaaggttctacaggcgcggcagggccccggctgttcaccatccacctgatagaygcgaacacagacaaccttccgaaggcccatacctgctttaaccggatcgacattccaccatatgagtcctatgagaagctctacgagaagctgctgacagccgtggaggagacctgcgggtttgctgtggagtgaaaagcaaccaaaggcaacagagtctagctcatggccaccagaccaaaagcatccagcttctgtgcacctcctgcaaagctggcagaggccctggaattccagatcacctgaggggaaagggttgtctctctcctttctgttgggggagggggatgggggacttttgttggtggctcccacccatatatccctcctttaccatagtactcccacccacttccatcacccatccaataaaatgcagccaggtttagcctttggctttggtcacacaggatattctgctgtgttgcaacccatgtggtgataaggctcacagccctgagctctttacgggagcatcaactcacagttaggggactgggcgtggctgattgagggtttggaactggtggctatgccagctattccatctcaaaacagccttgaggccccttttcaatttgagcagctgctagatatcttatcagagctcagattccagatttcacatcccagcagccggttctgggtagcagatcaatttccaactggaaaataactatataatgtatgcttattggaattctgccacagcaggaagcttgagtcaaaatgtgtttcccctttgaaaggagaaggaattggagcagcttttcctggaggcccaggatatttcttttctgggtatcttggctgaaaattttgttttacatagagaaaaacgatcttttaagggtcccttttgctgcattatctgtccartttgacttttttttcagtgaaaacaccatgtcatggagtgtaggaaagagcagaccaaaatcagccctagagccaaccagtcagtcccaaagctgtgacctctgtgccactgttgtccatagaagagcatcgactgtgtcacttaaaatattagtaaaccatgatgcagcaactgctaagagctaaactaacaaaattgtgtcatcatagctgctggcttggtgtgaactcgcttaaaagcaatggtgaaaggataacctcgatgatgtaaatccacccaaagatactgttctacaaaaagtagggtgtggacgcaaacctgtgacagcagagggggacgacttcacactcactgcctcatgtggcccctttcccagtggcagctggtgacactaacgattgctactcggttcacttgcccagatgtcttcatatgatgagcaaggccagaagcaaggctagattcgaagtttctgacaccatttccagtttgcacaaaagtcagtattttatcttaaagtggcttgatttccaatagctgaacttgggcagaaaacagcaggccaatgttcctatgtggtttctttgttgttgtttttgtttggggtgggggcaagtacagggtaattcatgagcaagacatttcactgctgtcgaagtctctgggatcccgctgtgggtctgagatggcctgggaaggaccttgtggacaatggttttatctgttctttttgtcactgttaatttctgggctgctgaggttctagaatagaagggctgccaaatgaggtttgctgcaggaggaaagtttaatcccccattccaaaagtccaggccaaatggtgggcttagcctctttgaaaagttctgccttgcccccacaggtgggcacatcctgtgtctcattcaccatgatgcttcctgagrgtgttctagaagcccgttccccagtggctgtatccagcctttccttgcatcatcttcctcttgaaggkgaggaagtgaaaactacagacctcccccggacagcccactctctatcacgagcctaacccgcgggaggcggaagagacatccattcgagaactgaagcggcctccgggatgaggtcagaggccccacctgattttcctggtggtggtatccaaaatcttcagtaactaggaaggaaaccagggtctcatggtttaaaagactttgaagcaggaatgttgcatttgacgcctttaaaactacctttttgctgttgggaggagtcgggggcgagccttagcagctgcaccgccatccccatgctggttggtgctgccctgcctctcgtgccgggtgttgcttcagcccagagccagagggctgggtcccgggtcctccacaggtgaccccggtggacacacgcgttcccatcctggcctccgtctctgcttttccacttctacctgcgtgtgggtttgccgccttgtcatcrgttgtgtgagtgtcgcagacctttccagagctccggttcactctttccaaacaggcctccctgtcggtggcactgcactcctagaaccttcagtttctacgatggtttgtttggtccttttgaaccaccccaaagaactcaacatggcaaagcaaatggtaaaagcttcccgactgttctactttgggtccgcgcgaagcccactcacgtgtgatytgtgttgcccctctcggtggtcccaggcgatccagccatgccccctgcccctctgcccagatgcttcaggggcccggcttttcaggcttgccctcaccagcggccgtcagccgacactcagggatgtagctaacaccactccgccagtgctttcagtaggaagagctgaggctgcctgggaggcccggggcgaccggaaaagggctctctcaagttctgaaaagagaatctgccaccagatcgaatttcgacccctgagcttgttcggacgtatggtccaaattcagattaaggtggtcacccaacccgagatgtcaggaaaggccttctgcagagaaaatgtccccccacccgccatctgcagccaggtgtgtgccacacggcagccttcccgaaacatagtatggattttaaaaatgtgtttatttttgtttctcaaccactttataacgtattttttaatttattttgtaatgtcttgttttgaagtattgctgctatccttgttatccttcccactgtttktatcactgatttattttgtgaaagttgtacactaatgttctatgtcaaaatcaaaagtatttaatgaaatactagttctatttaatgtggttatggaaccagctggaaacacaaaacaaacagtgattgtacagcaggctgggcccaggaggtcaggttcattttgttacatatgcaataaactcacgacttt

SEQ ID NO: 7236 - DNA, 2376 bp, Homo sapiens
ccggcgagaagtgtgaggccgcggtagggccgcatcccgctccggagagaagtctgagtccgccaggctctgcaggcccgcggaagctcgcgtcatggcagagcaggtggccctgagccggacccasktgtgcrggatcctgcgggaagagcttttccagggcgatgccttccatcagtcggatacacacatattcatcatcatgggtgcatcgggtgacctggccaagaagaagatctaccccaccatctggtggctgttcyggratggccttctgcccgaaaacaccttcatcrtgggcyrtgcccgttcccgccycacagtggctgacatccgcaaacagagtgagcccttcttcaaggccaccccagaggagaagctcaagctggaggacttctttgcccgcaactsctatgwggctggccagtacratgatgcagcctcctaccagcgcctcaacagccacatgratgcccbccacctggkgtcacaggccamcygcctcttctacctggccttgcccccgaccgtctacgaggccgtcaccaagaacattcacragtcctgcatgagccagatarrctggraccrcatcatcgtggagaagcccttcgggagggrcctgcagwgctctgwcyggctgtccaaccacatctyctccctgttccgtgaggaccagatctacyscatcgaccactacctgggcaaggagatggtgcagaacctcrtgstgctgagattkgccaacaggatcttcggccccatctggaaccgggacaacatcgcctrcgttatcctcaccttcarggagccctttggcactgagggtcgcgggggctatttcgatgaatttgggatcatcsgggacgtgatgcagaaccacctactgcagatgctgtgtctggtggccatgragaagcccgcctccaccaactcasatgamgtcyrtgatgagaaggtcaagrtgttgaaatgcatctcagaggtgcaggccaacaatktgktcctgrgccastacgtggrgaaccccgatggagagggcraggccaccaaagrgyaccyggacgaccmcacggtgccccgcgggtccaccaccrmcrcttttgcagccgtcgtcctctatgtggagaatgagaggtggsatkkggtgyccttcatcctgcgctgcggcaaggccctgaacgagcgcaaggccgaggtgaggctgcarttccatgatgtggccggcgacrycytccaccagcagyksragyrcracgrgctggtgatcsrcstgcagcycaacrrggccgtgtacaccaagatgatraccamgaagccgkvcatgttcttcaaccccraggagtcggagctggacctgacctacggcaacagatamaagaacrkgaagctccctgacgcctaygagcgcctcatcctggacgtcttctgcgggrgccasatgcacttcgwgyrcagcgacgagctccbtgagrcctggcgtattttcaccccactgctgcaccagattgagctggagaagcccaagcccatcccctatatttatggcagccgarkccycacggaggcagacgagctgatgaagagagtgggttkccagtatgagggcacctacaagtgggtgaacccccacaagctctgagccctgggcacccacctccacccccgccacggccaccctccttcccgccgcccgaccccgagtcgggaggactccgggaccattgacctcagctgcacattcctggccccgggctctggccaccctggcccgcccctcgctgctgctactacccgagcccagctacattcctcagctgccaagcactcgagaccatcctggcccctccagaccctgcctgagcccaggagctgagtcacctcctccactcactccagcccaacagaaggaaggaggagggcgcccattcgtctgtcccagagcttattggccactgggtctcactcctgagtggggccagggtgggagggagggacragggggaggaaargggcgagcacccacgtgagagaatctgcctgtggccttgcccgccagcctcagtgccacttgacattccttgtcaccagcaacatctcgagccccctrgatgtcccctgtcccaccaactctgcactccatggccaccccgtgccacccgtaggcagcctytytgctataagaaaagcagacgcagcagctgggacccctcccaacctcaatgccctgccattaaatccgcaaacagcccctcctgtccccttgtcatttgcttccctgaggacccacttccttgtcccactccccaagtcacccgggtgcttcctctgtggccactgaggagcctcctcacttctggttctgaccccatgtcc

SEQ ID NO: 7237 - DNA, 2666 bp, Homo sapiens
agggacagcccagaggaggcgtggccacgctgccggcggaagtggagccctccgcgagcgcgcgaggccgccggggcaggcggggaaaccggacagtaggggcggggcckggccggcgatkgggatkcgggagcactacgcggagctgcacccgtgcccgccggaattggggatgcagagcagcggcagcgggtatggcaggcagccggcgggccggcctccagcgcaggtgcccgagaggcaggggctggcctgggatgcgcgcgcacctgccctcgccccgccccgcccgcacgaggggtggtggccgaggccccgccccgcacgcctcgcctgaggcgggtccgctcagcccaggcgcccgcccccgcccccgccgattaaatgggccggcggggctcagcccccggaaacggtcgtacacttcggggctgcgagcgcggagggcgacgacgacgaagcgcagacagcgtcatggcagagcaggtggccctgagccggacccasktgtgcrggatcctgcgggaagagcttttccagggcgatgccttccatcagtcggatacacacatattcatcatcatgggtgcatcgggtgacctggccaagaagaagatctaccccaccatctggtggctgttcyggratggccttctgcccgaaaacaccttcatcrtgggcyrtgcccgttcccgccycacagtggctgacatccgcaaacagagtgagcccttcttcaaggccaccccagaggagaagctcaagctggaggacttctttgcccgcaactsctatgwggctggccagtacratgatgcagcctcctaccagcgcctcaacagccacatgratgcccbccacctggkgtcarrctggraccrcatcatcgtggagaagcccttcgggagggrcctgcagwgctctgwcyggctgtccaaccacatctyctccctgttccgtgaggaccagatctacyscatcgaccactacctgggcaaggagatggtgcagaacctcrtgstgctgagattkgccaacaggatcttcggccccatctggaaccgggacaacatcgcctrcgttatcctcaccttcarggagccctttggcactgagggtcgcgggggctatttcgatgaatttgggatcatcsgggacgtgatgcagaaccacctactgcagatgctgtgtctggtggccatgragaagcccgcctccaccaactcasatgamgtcyrtgatgagaaggtcaagrtgttgaaatgcatctcagaggtgcaggccaacaatktgktcctgrgccastacgtggrgaaccccgatggagagggcraggccaccaaagrgyaccyggacgaccmcacggtgccccgcgggtccaccaccrmcrcttttgcagccgtcgtcctctatgtggagaatgagaggtggsatkkggtgyccttcatcctgcgctgcggcaaggccctgaacgagcgcaaggccgaggtgaggctgcarttccatgatgtggccggcgacrycytccaccagcagyksragyrcracgrgctggtgatcsrcstgcagcycaacrrggccgtgtacaccaagatgatraccamgaagccgkvcatgttcttcaaccccraggagtcggagctggacctgacctacggcaacagatamaagaacrkgaagctccctgacgcctaygagcgcctcatcctggacgtcttctgcgggrgccasatgcacttcgwgyrcagcgacgagctccbtgagrcctggcgtattttcaccccactgctgcaccagattgagctggagaagcccaagcccatcccctatatttatggcagccgarkccycacggaggcagacgagctgatgaagagagtgggttkccagtatgagggcacctacaagtgggtgaacccccacaagctctgagccctgggcacccacctccacccccgccacggccaccctccttcccgccgcccgaccccgagtcgggaggactccgggaccattgacctcagctgcacattcctggccccgggctctggccaccctggcccgcccctcgctgctgctactacccgagcccagctacattcctcagctgccaagcactcgagaccatcctggcccctccagaccctgcctgagcccaggagctgagtcacctcctccactcactccagcccaacagaaggaaggaggagggcgcccattcgtctgtcccagagcttattggccactgggtctcactcctgagtggggccagggtgggagggagggacragggggaggaaargggcgagcacccacgtgagagaatctgcctgtggccttgcccgccagcctcagtgccacttgacattccttgtcaccagcaacatctcgagccccctrgatgtcccctgtcccaccaactctgcactccatggccaccccgtgccacccgtaggcagcctytytgctataagaaaagcagacgcagcagctgggacccctcccaacctcaatgccctgccattaaatccgcaaacagcccctcctgtccccttgtcatttgcttccctgaggacccacttccttgtcccactccccaagtcacccgggtgcttcctctgtggccactgaggagcctcctcacttctggttctgaccccatgtcc

SEQ ID NO: 7238 - DNA, 2872 bp, Homo sapiens
agggacagcccagaggaggcgtggccacgctgccggcggaagtggagccctccgcgagcgcgcgaggccgccggggcaggcggggaaaccggacagtaggggcggggcckggccggcgatkgggatkcgggagcactacgcggagctgcacccgtgcccgccggaattggggatgcagagcagcggcagcgggtatggcaggcagccggcgggccggcctccagcgcaggtgcccgagaggcaggggctggcctgggatgcgcgcgcacctgccctcgccccgccccgcccgcacgaggggtggtggccgaggccccgccccgcacgcctcgcctgaggcgggtccgctcagcccaggcgcccgcccccgcccccgccgattaaatgggccggcggggctcagcccccggaaacggtcgtacacttcggggctgcgagcgcggagggcgacgacgacgaagcgcagacagcgtcatggcagagcaggtggccctgagccggacccasktgtgcrggatcctgcgggaagagcttttccagggcgatgccttccatcagtcggatacacacatattcatcatcatgggtgcatcgggtgacctggccaagaagaagatctaccccaccatctggtggctgttcyggratggccttctgcccgaaaacaccttcatcrtgggcyrtgcccgttcccgccycacagtggctgacatccgcaaacagagtgagcccttcttcaaggccaccccagaggagaagctcaagctggaggacttctttgcccgcaactsctatgwggctggccagtacratgatgcagcctcctaccagcgcctcaacagccacatgratgcccbccacctggkgtcacaggccamcygcctcttctacctggccttgcccccgaccgtctacgaggccgtcaccaagaacattcacragtcctgcatgagccagatggggtaacgcagctccgggctcccagcagarrctggraccrcatcatcgtggagaagcccttcgggagggrcctgcagwgctctgwcyggctgtccaaccacatctyctccctgttccgtgaggaccagatctacyscatcgaccactacctgggcaaggagatggtgcagaacctcrtgstgctgaggtggggccaagcctgggccgggggaccagggtgggggtggtactcaggagcctcacctggcccactgcctccccgaggacgaattcctccagaactcagacaagggtgacccctcacatgtggcccctgcaccacagaggcccaaggtcagttcctccacyttgcccctccctgcagattkgccaacaggatcttcggccccatctggaaccgggacaacatcgcctrcgttatcctcaccttcarggagccctttggcactgagggtcgcgggggctatttcgatgaatttgggatcatcsgggacgtgatgcagaaccacctactgcagatgctgtgtctggtggccatgragaagcccgcctccaccaactcasatgamgtcyrtgatgagaagkggtgyccttcatcctgcgctgcggcaaggccctgaacgagcgcaaggccgaggtgaggctgcarttccatgatgtggccggcgacrycytccaccagcagyksragyrcracgrgctggtgatcsrcstgcagcycaacrrggccgtgtacaccaagatgatraccamgaagccgkvcatgttcttcaaccccraggagtcggagctggacctgacctacggcaacagatamaagaacrkgaagctccctgacgcctaygagcgcctcatcctggacgtcttctgcgggrgccasatgcacttcgwgyrcagcgacgagctccbtgagrcctggcgtattttcaccccactgctgcaccagattgagctggagaagcccaagcccatcccctatatttatggcaggtgaggaaagggtgggggctggggacagagcccagcgggcaggggcggggtgagggtggagctacctcatgcctctcctccacccgtcactctccagccgarkccycacggaggcagacgagctgatgaagagagtgggttkccagtatgagggcacctacaagtgggtgaacccccacaagctctgagccctgggcacccacctccacccccgccacggccaccctccttcccgccgcccgaccccgagtcgggaggactccgggaccattgacctcagctgcacattcctggccccgggctctggccaccctggcccgcccctcgctgctgctactacccgagcccagctacattcctcagctgccaagcactcgagaccatcctggcccctccagaccctgcctgagcccaggagctgagtcacctcctccactcactccagcccaacagaaggaaggaggagggcgcccattcgtctgtcccagagcttattggccactgggtctcactcctgagtggggccagggtgggagggagggacragggggaggaaargggcgagcacccacgtgagagaatctgcctgtggccttgcccgccagcctcagtgccacttgacattccttgtcaccagcaacatctcgagccccctrgatgtcccctgtcccaccaactctgcactccatggccaccccgtgccacccgtaggcagcctytytgctataagaaaagcagacgcagcagctgggacccctcccaacctcaatgccctgccattaaatccgcaaacagcccctcctgtccccttgtcatttgcttccctgaggacccacttccttgtcccactccccaagtcacccgggtgcttcctctgtggccactgaggagcctcctcacttctggttctgaccccatgtcc

SEQ ID NO: 7239 - DNA, 2399 bp, Homo sapiens
cccccgrgaactcgggaagccggcgagaagtgtgaggccgcggtagggccgcatcccgctccggagagaagtctgagtccgccaggctctgcaggcccgcggaagctcgacagcgtcatggcagagcaggtggccctgagccggacccasktgtgcrggatcctgcgggaagagcttttccagggcgatgccttccatcagtcggatacacacatattcatcatcatgggtgcatcgggtgacctggccaagaagaagatctaccccaccatctggtggctgttcyggratggccttctgcccgaaaacaccttcatcrtgggcyrtgcccgttcccgccycacagtggctgacatccgcaaacagagtgagcccttcttcaaggccaccccagaggagaagctcaagctggaggacttctttgcccgcaactsctatgwggctggccagtacratgatgcagcctcctaccagcgcctcaacagccacatgratgcccbccacctggkgtcacaggccamcygcctcttctacctggccttgcccccgaccgtctacgaggccgtcaccaagaacattcacragtcctgcatgagccagatarrctggraccrcatcatcgtggagaagcccttcgggagggrcctgcagwgctctgwcyggctgtccaaccacatctyctccctgttccgtgaggaccagatctacyscatcgaccactacctgggcaaggagatggtgcagaacctcrtgstgctgagattkgccaacaggatcttcggccccatctggaaccgggacaacatcgcctrcgttatcctcaccttcarggagccctttggcactgagggtcgcgggggctatttcgatgaatttgggatcatcsgggacgtgatgcagaaccacctactgcagatgctgtgtctggtggccatgragaagcccgcctccaccaactcasatgamgtcyrtgatgagaaggtcaagrtgttgaaatgcatctcagaggtgcaggccaacaatktgktcctgrgccastacgtggrgaaccccgatggagagggcraggccaccaaagrgyaccyggacgaccmcacggtgccccgcgggtccaccaccrmcrcttttgcagccgtcgtcctctatgtggagaatgagaggtggsatkkggtgyccttcatcctgcgctgcggcaaggccctgaacgagcgcaaggccgaggtgaggctgcarttccatgatgtggccggcgacrycytccaccagcagyksragyrcracgrgctggtgatcsrcstgcagcycaacrrggccgtgtacaccaagatgatraccamgaagccgkvcatgttcttcaaccccraggagtcggagctggacctgacctacggcaacagatamaagaacrkgaagctccctgacgcctaygagcgcctcatcctggacgtcttctgcgggrgccasatgcacttcgwgyrcagcgacgagctccbtgagrcctggcgtattttcaccccactgctgcaccagattgagctggagaagcccaagcccatcccctatatttatggcagccgarkccycacggaggcagacgagctgatgaagagagtgggttkccagtatgagggcacctacaagtgggtgaacccccacaagctctgagccctgggcacccacctccacccccgccacggccaccctccttcccgccgcccgaccccgagtcgggaggactccgggaccattgacctcagctgcacattcctggccccgggctctggccaccctggcccgcccctcgctgctgctactacccgagcccagctacattcctcagctgccaagcactcgagaccatcctggcccctccagaccctgcctgagcccaggagctgagtcacctcctccactcactccagcccaacagaaggaaggaggagggcgcccattcgtctgtcccagagcttattggccactgggtctcactcctgagtggggccagggtgggagggagggacragggggaggaaargggcgagcacccacgtgagagaatctgcctgtggccttgcccgccagcctcagtgccacttgacattccttgtcaccagcaacatctcgagccccctrgatgtcccctgtcccaccaactctgcactccatggccaccccgtgccacccgtaggcagcctytytgctataagaaaagcagacgcagcagctgggacccctcccaacctcaatgccctgccattaaatccgcaaacagcccctcctgtccccttgtcatttgcttccctgaggacccacttccttgtcccactccccaagtcacccgggtgcttcctctgtggccactgaggagcctcctcacttctggttctgaccccatgtcc

SEQ ID NO: 7240 - DNA, 2756 bp, Homo sapiens
agggacagcccagaggaggcgtggccacgctgccggcggaagtggagccctccgcgagcgcgcgaggccgccggggcaggcggggaaaccggacagtaggggcggggcckggccggcgatkgggatkcgggagcactacgcggagctgcacccgtgcccgccggaattggggatgcagagcagcggcagcgggtatggcaggcagccggcgggccggcctccagcgcaggtgcccgagaggcaggggctggcctgggatgcgcgcgcacctgccctcgccccgccccgcccgcacgaggggtggtggccgaggccccgccccgcacgcctcgcctgaggcgggtccgctcagcccaggcgcccgcccccgcccccgccgattaaatgggccggcggggctcagcccccggaaacggtcgtacacttcggggctgcgagcgcggagggcgacgacgacgaagcgcagacagcgtcatggcagagcaggtggccctgagccggacccasktgtgcrggatcctgcgggaagagcttttccagggcgatgccttccatcagtcggatacacacatattcatcatcatgggtgcatcgggtgacctggccaagaagaagatctaccccaccatctggtggctgttcyggratggccttctgcccgaaaacaccttcatcrtgggcyrtgcccgttcccgccycacagtggctgacatccgcaaacagagtgagcccttcttcaaggccaccccagaggagaagctcaagctggaggacttctttgcccgcaactsctatgwggctggccagtacratgatgcagcctcctaccagcgcctcaacagccacatgratgcccbccacctggkgtcacaggccamcygcctcttctacctggccttgcccccgaccgtctacgaggccgtcaccaagaacattcacragtcctgcatgagccagatarrctggraccrcatcatcgtggagaagcccttcgggagggrcctgcagwgctctgwcyggctgtccaaccacatctyctccctgttccgtgaggaccagatctacyscatcgaccactacctgggcaaggagatggtgcagaacctcrtgstgctgagattkgccaacaggatcttcggccccatctggaaccgggacaacatcgcctrcgttatcctcaccttcarggagccctttggcactgagggtcgcgggggctatttcgatgaatttgggatcatcsgggacgtgatgcagaaccacctactgcagatgctgtgtctggtggccatgragaagcccgcctccaccaactcasatgamgtcyrtgatgagaaggtcaagrtgttgaaatgcatctcagaggtgcaggccaacaatktgktcctgrgccastacgtggrgaaccccgatggagagggcraggccaccaaagrgyaccyggacgaccmcacggtgccccgcgggtccaccaccrmcrcttttgcagccgtcgtcctctatgtggagaatgagaggtggsatkkggtgyccttcatcctgcgctgcggcaaggccctgaacgagcgcaaggccgaggtgaggctgcarttccatgatgtggccggcgacrycytccaccagcagyksragyrcracgrgctggtgatcsrcstgcagcycaacrrggccgtgtacaccaagatgatraccamgaagccgkvcatgttcttcaaccccraggagtcggagctggacctgacctacggcaacagatamaagaacrkgaagctccctgacgcctaygagcgcctcatcctggacgtcttctgcgggrgccasatgcacttcgwgyrcagcgacgagctccbtgagrcctggcgtattttcaccccactgctgcaccagattgagctggagaagcccaagcccatcccctatatttatggcagccgarkccycacggaggcagacgagctgatgaagagagtgggttkccagtatgagggcacctacaagtgggtgaacccccacaagctctgagccctgggcacccacctccacccccgccacggccaccctccttcccgccgcccgaccccgagtcgggaggactccgggaccattgacctcagctgcacattcctggccccgggctctggccaccctggcccgcccctcgctgctgctactacccgagcccagctacattcctcagctgccaagcactcgagaccatcctggcccctccagaccctgcctgagcccaggagctgagtcacctcctccactcactccagcccaacagaaggaaggaggagggcgcccattcgtctgtcccagagcttattggccactgggtctcactcctgagtggggccagggtgggagggagggacragggggaggaaargggcgagcacccacgtgagagaatctgcctgtggccttgcccgccagcctcagtgccacttgacattccttgtcaccagcaacatctcgagccccctrgatgtcccctgtcccaccaactctgcactccatggccaccccgtgccacccgtaggcagcctytytgctataagaaaagcagacgcagcagctgggacccctcccaacctcaatgccctgccattaaatccgcaaacagcccctcctgtccccttgtcatttgcttccctgaggacccacttccttgtcccactccccaagtcacccgggtgcttcctctgtggccactgaggagcctcctcacttctggttctgaccccatgtcc

SEQ ID NO: 7241 - DNA, 2666 bp, Homo sapiens
agggacagcccagaggaggcgtggccacgctgccggcggaagtggagccctccgcgagcgcgcgaggccgccggggcaggcggggaaaccggacagtaggggcggggcckggccggcgatkgggatkcgggagcactacgcggagctgcacccgtgcccgccggaattggggatgcagagcagcggcagcgggtatggcaggcagccggcgggccggcctccagcgcaggtgcccgagaggcaggggctggcctgggatgcgcgcgcacctgccctcgccccgccccgcccgcacgaggggtggtggccgaggccccgccccgcacgcctcgcctgaggcgggtccgctcagcccaggcgcccgcccccgcccccgccgattaaatgggccggcggggctcagcccccggaaacggtcgtacacttcggggctgcgagcgcggagggcgacgacgacgaagcgcagacagcgtcatggcagagcaggtggccctgagccggacccasktgtgcrggatcctgcgggaagagcttttccagggcgatgccttccatcagtcggatacacacatattcatcatcatgggtgcatcgggtgacctggccaagaagaagatctaccccaccatctggtggctgttcyggratggccttctgcccgaaaacaccttcatcrtgggcyrtgcccgttcccgccycacagtggctgacatccgcaaacagagtgagcccttcttcaaggccaccccagaggagaagctcaagctggaggacttctttgcccgcaactsctatgwggctggccagtacratgatgcagcctcctaccagcgcctcaacagccacatgratgcccbccacctggkgtcacaggccamcygcctcttctacctggccttgcccccgaccgtctacgaggccgtcaccaagaacattcacragtcctgcatgagccagatarrctggraccrcatcatcgtggagaagcccttcgggagggrcctgcagwgctctgwcyggctgtccaaccacatctyctccctgttccgtgaggaccagatctacyscatcgaccactacctgggcaaggagatggtgcagaacctcrtgstgctgagattkgccaacaggatcttcggccccatctggaaccgggacaacatcgcctrcgttatcctcaccttcarggagccctttggcactgagggtcgcgggggctatttcgatgaatttgggatcatcsgggacgtgatgcagaaccacctactgcagatgctgtgtctggtggccatgragaagcccgcctccaccaactcasatgamgtcyrtgatgagaagkggtgyccttcatcctgcgctgcggcaaggccctgaacgagcgcaaggccgaggtgaggctgcarttccatgatgtggccggcgacrycytccaccagcagyksragyrcracgrgctggtgatcsrcstgcagcycaacrrggccgtgtacaccaagatgatraccamgaagccgkvcatgttcttcaaccccraggagtcggagctggacctgacctacggcaacagatamaagaacrkgaagctccctgacgcctaygagcgcctcatcctggacgtcttctgcgggrgccasatgcacttcgwgyrcagcgacgagctccbtgagrcctggcgtattttcaccccactgctgcaccagattgagctggagaagcccaagcccatcccctatatttatggcaggtgaggaaagggtgggggctggggacagagcccagcgggcaggggcggggtgagggtggagctacctcatgcctctcctccacccgtcactctccagccgarkccycacggaggcagacgagctgatgaagagagtgggttkccagtatgagggcacctacaagtgggtgaacccccacaagctctgagccctgggcacccacctccacccccgccacggccaccctccttcccgccgcccgaccccgagtcgggaggactccgggaccattgacctcagctgcacattcctggccccgggctctggccaccctggcccgcccctcgctgctgctactacccgagcccagctacattcctcagctgccaagcactcgagaccatcctggcccctccagaccctgcctgagcccaggagctgagtcacctcctccactcactccagcccaacagaaggaaggaggagggcgcccattcgtctgtcccagagcttattggccactgggtctcactcctgagtggggccagggtgggagggagggacragggggaggaaargggcgagcacccacgtgagagaatctgcctgtggccttgcccgccagcctcagtgccacttgacattccttgtcaccagcaacatctcgagccccctrgatgtcccctgtcccaccaactctgcactccatggccaccccgtgccacccgtaggcagcctytytgctataagaaaagcagacgcagcagctgggacccctcccaacctcaatgccctgccattaaatccgcaaacagcccctcctgtccccttgtcatttgcttccctgaggacccacttccttgtcccactccccaagtcacccgggtgcttcctctgtggccactgaggagcctcctcacttctggttctgaccccatgtcc

SEQ ID NO: 7242 - DNA, 2479 bp, Homo sapiens
ccgggctgggagaaatgacsgcttctatgaggagaccatgtgccgaggtygtgtgctaggaagccagttgctgtgagaaatgaccagtgtcatgtctgtctttcagccaccctacatcatgtagcagttcttctgagatcatgtctgtgctgttcttctacatcatgaggtacaagcagtcagatccagagaatccggacaacgaccgatttgtcctcgcaaagagactgtcgtttgtggatgtggcaacaggatggctcggacaaggactgggagttgcatgtggaatggcatatactggcaagtacttcgacagggccagctaccgggtgttctgcctcatgagtgatggcgagtcctcagaaggctctgtctgggaggcaatggcctttgcttcctactacagtctggacaatcttgtggcaatctttgatgtgaaccgcctgggacacagtggtgcattgcccgccgagcactgcataaacatctatcagaggcgctgcgaagcctttgggtggaacacttatgtggtggacggccgggacgtggaggcactgtgccaggtattctggcaggcttctcaggtgaagcacaagcccactgctgtggtggccaagaccttcaagggccggggcaccccaagtattgaggatgcagaaagttggcatgcaaagccaatgccgagagaaagagcagatgccattatcaaattaattgagagccagatacagaccagcaggaatcttgacccacagccccccattgaggactcacctgaagtcaacatcacagatgtaaggatgacctctccacctgattacagagttggtgacaagatagctactcggaaagcatgcggtctggctctggctaagctgggctacgcgaacaacagagtcgttgtgctggatggtgacaccaggtactctactttctctgagatattcaacaaggagtaccctgagcgcttcatcgagtgctttatggctgaacaaaacatggtgagcgtggctctgggctgtgcctcccgtggacggaccattgcttttgctagcacctttgctgcctttctgactcgagcatttgatcacatccggataggaggcctcgctgagagcaacatcaacattattggttcccactgtggggtatctgttggtgacgatggtgcttcccagatggccctggaggatatagccatgttccgaaccattcccaagtgcacgatcttctacccaactgatgccgtctccacggagcatgctgttgctctggcagccaatgccaaggggatgtgcttcattcggaccacccgaccagaaactatggttatttacaccccacaagaacgctttgagatcggacaggccaagtggcgtatccatgctccaggacagctggagcagtgtaatttcctatcaaaaagtcctccgccactgtgtcagtgacaaggtcacagttattggagctggaattactgtgtatgaagccttagcagctgctgatgagctttcgaaacaagatatttttatccgtgtcatcgacctgtttaccattaaacctctggatgtcgccaccatcgtctccagtgcaaaagccacagagggccggatcattacagtggaggatcactacccgcaaggtggcatcggggaagctgtctgcgcagccgtctccatggatcctgacattcaggttcattcgctggcagtgtcgggagtgccccagagtgggaagtccgaggaattgctggatatgtatggaattagtgccagacatatcatagtggccgtgaaatgcatgttgctgaactaaaatagctgttagctttggtcttttggcctctttaccctgtgtttatgtttgttccaaaaccatcatttaaatctctactgtcacattttgtttcttaaaagcaaagccagctaacaccttcmttcatccctagttcggaaattcaagctaactacttaccctttaaactgtcactgcatatgcaagtaccgctctaatttttggatcattaaagggagttacacaacttttaagtgaaaaaaataggtaacaaaacaaccacctgatagtaagttttctgataagactatagataagtggtagaggtaatcaattcttccraagtgtttccttcgtgaataactggtagaggtaatagttttttcaatgtatttccttcrtgagtaaagaaaatgtggattgaagtatagattccagtagcctagtttccacagcacgataacaccatgacgcctactgctgttcccaccttgggattctgtgtgctgccatcccacctgcagctgccctggaattcccttcgctgtttgccttcatctccctccacgtttgagaggctgtcaggcagcagcgaaagcttgttaggatgtcctgtgctgcttgtgatgagagcctccacactgtactgttcaagtcaatgttaataaagcatttcaaaaccagc

SEQ ID NO: 7243 - DNA, 2696 bp, Homo sapiens
agatcccttgacttgcttgcggagggagcggcyggcggagggagcggcaggtggagggagtggcacgaggcatgcggagggagctgcaccgacatcacataaackcactgggcagctcrcaggcgccrttcgctcttcagacgccggagacgtaggagtgggtcttcagactccaaaggggttggactaatggcggatgctgaggcgagggytgagttcccggaggaggccagacctgacaggggcaccttgcaggtgttgcaagatatggccagccgcttgcgaatccattccatcagggccacatgctccacgagctccggccaccctacatcatgtagcagttcttctgagatcatgtctgtgctgttcttctacatcatgaggtacaagcagtcagatccagagaatccggacaacgaccgatttgtcctcgcaaagagactgtcgtttgtggatgtggcaacaggatggctcggacaaggactgggagttgcatgtggaatggcatatactggcaagtacttcgacagggccagctaccgggtgttctgcctcatgagtgatggcgagtcctcagaaggctctgtctgggaggcaatggcctttgcttcctactacagtctggacaatcttgtggcaatctttgatgtgaaccgcctgggacacagtggtgcattgcccgccgagcactgcataaacatctatcagaggcgctgcgaagcctttgggtggaacacttatgtggtggacggccgggacgtggaggcactgtgccaggtattctggcaggcttctcaggtgaagcacaagcccactgctgtggtggccaagaccttcaagggccggggcaccccaagtattgaggatgcagaaagttggcatgcaaagccaatgccgagagaaagagcagatgccattatcaaattaattgagagccagatacagaccagcaggaatcttgacccacagccccccattgaggactcacctgaagtcaacatcacagatgtaaggatgacctctccacctgattacagagttggtgacaagatagctactcggaaagcatgcggtctggctctggctaagctgggctacgcgaacaacagagtcgttgtgctggatggtgacaccaggtactctactttctctgagatattcaacaaggagtaccctgagcgcttcatcgagtgctttatggctgaacaaaacatggtgagcgtggctctgggctgtgcctcccgtggacggaccattgcttttgctagcacctttgctgcctttctgactcgagcatttgatcacatccggataggaggcctcgctgagagcaacatcaacattattggttcccactgtggggtatctgttggtgacgatggtgcttcccagatggccctggaggatatagccatgttccgaaccattcccaagtgcacgatcttctacccaactgatgccgtctccacggagcatgctgttgctctggcagccaatgccaaggggatgtgcttcattcggaccacccgaccagaaactatggttatttacaccccacaagaacgctttgagatcggacaggccaagtggcgtatccatgctccaggacagctggagcagtgtaatttcctatcaaaaagtcctccgccactgtgtcagtgacaaggtcacagttattggagctggaattactgtgtatgaagccttagcagctgctgatgagctttcgaaacaagatatttttatccgtgtcatcgacctgtttaccattaaacctctggatgtcgccaccatcgtctccagtgcaaaagccacagagggccggatcattacagtggaggatcactacccgcaaggtggcatcggggaagctgtctgcgcagccgtctccatggatcctgacattcaggttcattcgctggcagtgtcgggagtgccccagagtgggaagtccgaggaattgctggatatgtatggaattagtgccagacatatcatagtggccgtgaaatgcatgttgctgaactaaaatagctgttagctttggtcttttggcctctttaccctgtgtttatgtttgttccaaaaccatcatttaaatctctactgtcacattttgtttcttaaaagcaaagccagctaacaccttcmttcatccctagttcggaaattcaagctaactacttaccctttaaactgtcactgcatatgcaagtaccgctctaatttttggatcattaaagggagttacacaacttttaagtgaaaaaaataggtaacaaaacaaccacctgatagtaagttttctgataagactatagataagtggtagaggtaatcaattcttccraagtgtttccttcgtgaataactggtagaggtaatagttttttcaatgtatttccttcrtgagtaaagaaaatgtggattgaagtatagattccagtagcctagtttccacagcacgataacaccatgacgcctactgctgttcccaccttgggattctgtgtgctgccatcccacctgcagctgccctggaattcccttcgctgtttgccttcatctccctccacgtttgagaggctgtcaggcagcagcgaaagcttgttaggatgtcctgtgctgcttgtgatgagagcctccacactgtactgttcaagtcaatgttaataaagcatttcaaaaccagc

SEQ ID NO: 7244 - DNA, 2556 bp, Homo sapiens
attcagaaagggcctcagttactctaccatgacaaatttctyagtctgtcaccgttcacttcctaaaagaaattcattgtasaaggtagaatgggatcttcatggcatttctgattcacaatgctcctgaaagttcctcggcatgtggaaaggccacagatgaatttaagcatgtgaaagaatactcatgtcagaggcacaaaggaaacttgccccgagtccacggtgctctgcgccaccctacatcatgtagcagttcttctgagatcatgtctgtgctgttcttctacatcatgaggtacaagcagtcagatccagagaatccggacaacgaccgatttgtcctcgcaaagagactgtcgtttgtggatgtggcaacaggatggctcggacaaggactgggagttgcatgtggaatggcatatactggcaagtacttcgacagggccagctaccgggtgttctgcctcatgagtgatggcgagtcctcagaaggctctgtctgggaggcaatggcctttgcttcctactacagtctggacaatcttgtggcaatctttgatgtgaaccgcctgggacacagtggtgcattgcccgccgagcactgcataaacatctatcagaggcgctgcgaagcctttgggtggaacacttatgtggtggacggccgggacgtggaggcactgtgccaggtattctggcaggcttctcaggtgaagcacaagcccactgctgtggtggccaagaccttcaagggccggggcaccccaagtattgaggatgcagaaagttggcatgcaaagccaatgccgagagaaagagcagatgccattatcaaattaattgagagccagatacagaccagcaggaatcttgacccacagccccccattgaggactcacctgaagtcaacatcacagatgtaaggatgacctctccacctgattacagagttggtgacaagatagctactcggaaagcatgcggtctggctctggctaagctgggctacgcgaacaacagagtcgttgtgctggatggtgacaccaggtactctactttctctgagatattcaacaaggagtaccctgagcgcttcatcgagtgctttatggctgaacaaaacatggtgagcgtggctctgggctgtgcctcccgtggacggaccattgcttttgctagcacctttgctgcctttctgactcgagcatttgatcacatccggataggaggcctcgctgagagcaacatcaacattattggttcccactgtggggtatctgttggtgacgatggtgcttcccagatggccctggaggatatagccatgttccgaaccattcccaagtgcacgatcttctacccaactgatgccgtctccacggagcatgctgttgctctggcagccaatgccaaggggatgtgcttcattcggaccacccgaccagaaactatggttatttacaccccacaagaacgctttgagatcggacaggccaaggtcctccgccactgtgtcagtgacaaggtcacagttattggagctggaattactgtgtatgaagccttagcagctgctgatgagctttcgaaacaagatatttttatccgtgtcatcgacctgtttaccattaaacctctggatgtcgccaccatcgtctccagtgcaaaagccacagagggccggatcattacagtggaggatcactacccgcaaggtggcatcggggaagctgtctgcgcagccgtctccatggatcctgacattcaggttcattcgctggcagtgtcgggagtgccccagagtgggaagtccgaggaattgctggatatgtatggaattagtgccagacatatcatagtggccgtgaaatgcatgttgctgaactaaaatagctgttagctttggtcttttggcctctttaccctgtgtttatgtttgttccaaaaccatcatttaaatctctactgtcacattttgtttcttaaaagcaaagccagctaacaccttcmttcatccctagttcggaaattcaagctaactacttaccctttaaactgtcactgcatatgcaagtaccgctctaatttttggatcattaaagggagttacacaacttttaagtgaaaaaaataggtaacaaaacaaccacctgatagtaagttttctgataagactatagataagtggtagaggtaatcaattcttccraagtgtttccttcgtgaataactggtagaggtaatagttttttcaatgtatttccttcrtgagtaaagaaaatgtggattgaagtatagattccagtagcctagtttccacagcacgataacaccatgacgcctactgctgttcccaccttgggattctgtgtgctgccatcccacctgcagctgccctggaattcccttcgctgtttgccttcatctccctccacgtttgagaggctgtcaggcagcagcgaaagcttgttaggatgtcctgtgctgcttgtgatgagagcctccacactgtactgttcaagtcaatgttaataaagcatttcaaaaccagc

SEQ ID NO: 7245 - DNA, 2644 bp, Homo sapiens
agatcccttgacttgcttgcggagggagcggcyggcggagggagcggcaggtggagggagtggcacgaggcatgcggagggagctgcaccgacatcacataaackcactgggcagctcrcaggcgccrttcgctcttcagacgccggagacgtaggagtgggtcttcagactccaaaggggttggactaatggcggatgctgaggcgagggytgagttcccggaggaggccagacctgacaggggcaccttgcaggtgttgcaagatatggccagccgcttgcgaatccattccatcagggccacatgctccacgagctccggccaccctacatcatgtagcagttcttctgagatcatgtctgtgctgttcttctacatcatgaggtacaagcagtcagatccagagaatccggacaacgaccgatttgtcctcgcaaagagactgtcgtttgtggatgtggcaacaggatggctcggacaaggactgggagttgcatgtggaatggcatatactggcaagtacttcgacagggccagctaccgggtgttctgcctcatgagtgatggcgagtcctcagaaggctctgtctgggaggcaatggcctttgcttcctactacagtctggacaatcttgtggcaatctttgatgtgaaccgcctgggacacagtggtgcattgcccgccgagcactgcataaacatctatcagaggcgctgcgaagcctttgggtggaacacttatgtggtggacggccgggacgtggaggcactgtgccaggtattctggcaggcttctcaggtgaagcacaagcccactgctgtggtggccaagaccttcaagggccggggcaccccaagtattgaggatgcagaaagttggcatgcaaagccaatgccgagagaaagagcagatgccattatcaaattaattgagagccagatacagaccagcaggaatcttgacccacagccccccattgaggactcacctgaagtcaacatcacagatgtaaggatgacctctccacctgattacagagttggtgacaagatagctactcggaaagcatgcggtctggctctggctaagctgggctacgcgaacaacagagtcgttgtgctggatggtgacaccaggtactctactttctctgagatattcaacaaggagtaccctgagcgcttcatcgagtgctttatggctgaacaaaacatggtgagcgtggctctgggctgtgcctcccgtggacggaccattgcttttgctagcacctttgctgcctttctgactcgagcatttgatcacatccggataggaggcctcgctgagagcaacatcaacattattggttcccactgtggggtatctgttggtgacgatggtgcttcccagatggccctggaggatatagccatgttccgaaccattcccaagtgcacgatcttctacccaactgatgccgtctccacggagcatgctgttgctctggcagccaatgccaaggggatgtgcttcattcggaccacccgaccagaaactatggttatttacaccccacaagaacgctttgagatcggacaggccaaggtcctccgccactgtgtcagtgacaaggtcacagttattggagctggaattactgtgtatgaagccttagcagctgctgatgagctttcgaaacaagatatttttatccgtgtcatcgacctgtttaccattaaacctctggatgtcgccaccatcgtctccagtgcaaaagccacagagggccggatcattacagtggaggatcactacccgcaaggtggcatcggggaagctgtctgcgcagccgtctccatggatcctgacattcaggttcattcgctggcagtgtcgggagtgccccagagtgggaagtccgaggaattgctggatatgtatggaattagtgccagacatatcatagtggccgtgaaatgcatgttgctgaactaaaatagctgttagctttggtcttttggcctctttaccctgtgtttatgtttgttccaaaaccatcatttaaatctctactgtcacattttgtttcttaaaagcaaagccagctaacaccttcmttcatccctagttcggaaattcaagctaactacttaccctttaaactgtcactgcatatgcaagtaccgctctaatttttggatcattaaagggagttacacaacttttaagtgaaaaaaataggtaacaaaacaaccacctgatagtaagttttctgataagactatagataagtggtagaggtaatcaattcttccraagtgtttccttcgtgaataactggtagaggtaatagttttttcaatgtatttccttcrtgagtaaagaaaatgtggattgaagtatagattccagtagcctagtttccacagcacgataacaccatgacgcctactgctgttcccaccttgggattctgtgtgctgccatcccacctgcagctgccctggaattcccttcgctgtttgccttcatctccctccacgtttgagaggctgtcaggcagcagcgaaagcttgttaggatgtcctgtgctgcttgtgatgagagcctccacactgtactgttcaagtcaatgttaataaagcatttcaaaaccagc

SEQ ID NO: 7246 - DNA, 2712 bp, Homo sapiens
agatcccttgacttgcttgcggagggagcggcyggcggagggagcggcaggtggagggagtggcacgaggcatgcggagggagctgcaccgacatcacataaackcactgggcagctcrcaggcgccrttcgctcttcagacgccggagacgtaggagtgggtcttcagactccaaaggggttggactaatggcggatgctgaggcgagggytgagttcccggaggaggccagacctgacaggggcaccttgcaggtgttgcaagatatggccagccgcttgcgaatccattccatcagggccacatgctccacgagctccggccaccctacatcatgtagcagttcttctgagatcatgtctgtgctgttcttctacatcatgaggtacaagcagtcagatccagagaatccggacaacgaccgatttgtcctcgcaaagagactgtcgtttgtggatgtggcaacaggatggctcggacaaggactgggagttgcatgtggaatggcatatactggcaagtacttcgacagggccagctaccgggtgttctgcctcatgagtgatggcgagtcctcagaaggctctgtctgggaggcaatggcctttgcttcctactacagtctggacaatcttgtggcaatctttgatgtgaaccgcctgggacacagtggtgcattgcccgccgagcactgcataaacatctatcagaggcgctgcgaagcctttgggtggaacacttatgtggtggacggccgggacgtggaggcactgtgccaggtattctggcaggcttctcaggtgaagcacaagcccactgctgtggtggccaagaccttcaagggccggggcaccccaagtattgaggatgcagaaagttggcatgcaaagccaatgccgagagaaagagcagatgccattatcaaattaattgagagccagatacagaccagcaggaatcttgacccacagccccccattgaggactcacctgaagtcaacatcacagatgtaaggatgacctctccacctgattacagagttggtgacaagatagctactcggaaagcatgcggtctggctctggctaagctgggctacgcgaacaacagagtcgttgtgctggatggtgacaccaggtactctactttctctgagatattcaacaaggagtaccctgagcgcttcatcgagtgctttatggctgaacaaaacatggtgagcgtggctctgggctgtgcctcccgtggacggaccattgcttttgctagcacctttgctgcctttctgactcgagcatttgatcacatccggataggaggcctcgctgagagcaacatcaacattattggttcccactgtggggtatctgttggtgacgatggtgcttcccagatggccctggaggatatagccatgttccgaaccattcccaagtgcacgatcttctacccaactgatgccgtctccacggagcatgctgttgctctggcagccaatgccaaggggatgtgcttcattcggaccacccgaccagaaactatggttatttacaccccacaagaacgctttgagatcggacaggccaagactcctgatgggtatgtggcgtatccatgctccaggacagctggagcagtgtaatttcctatcaaaaagtcctccgccactgtgtcagtgacaaggtcacagttattggagctggaattactgtgtatgaagccttagcagctgctgatgagctttcgaaacaagatatttttatccgtgtcatcgacctgtttaccattaaacctctggatgtcgccaccatcgtctccagtgcaaaagccacagagggccggatcattacagtggaggatcactacccgcaaggtggcatcggggaagctgtctgcgcagccgtctccatggatcctgacattcaggttcattcgctggcagtgtcgggagtgccccagagtgggaagtccgaggaattgctggatatgtatggaattagtgccagacatatcatagtggccgtgaaatgcatgttgctgaactaaaatagctgttagctttggtcttttggcctctttaccctgtgtttatgtttgttccaaaaccatcatttaaatctctactgtcacattttgtttcttaaaagcaaagccagctaacaccttcmttcatccctagttcggaaattcaagctaactacttaccctttaaactgtcactgcatatgcaagtaccgctctaatttttggatcattaaagggagttacacaacttttaagtgaaaaaaataggtaacaaaacaaccacctgatagtaagttttctgataagactatagataagtggtagaggtaatcaattcttccraagtgtttccttcgtgaataactggtagaggtaatagttttttcaatgtatttccttcrtgagtaaagaaaatgtggattgaagtatagattccagtagcctagtttccacagcacgataacaccatgacgcctactgctgttcccaccttgggattctgtgtgctgccatcccacctgcagctgccctggaattcccttcgctgtttgccttcatctccctccacgtttgagaggctgtcaggcagcagcgaaagcttgttaggatgtcctgtgctgcttgtgatgagagcctccacactgtactgttcaagtcaatgttaataaagcatttcaaaaccagc

SEQ ID NO: 7247 - DNA, 1031 bp, Homo sapiens
ctcaggcaggacraggagctgcctaacaagaggtggaaggggttacgtacgttgcgaaagactccaaccctcctggatgcctggtttgcttttatgtgaaccracagagctttacaacatcctgaatcaggccacaaaactctccagattaacagaccccaactatctctgtttattggatgtccgttccaaatgggagtatgacgaaagccatgtgatcactgcccttcgagtgaagaagaaaaataatgaatatcttctcccggagtctgtggacctggagtgtgtgaagtactgcrtggtgtatgataacaacagcagcaccctggagatactcttaaaagatgatgatgatgattcagactctgatggtgatggcaaagatcttgtgcctcaagcagccattgagtatggcaggatcctgacccgcctcacccaccaccccgtctacatcctgaaagggggctatgagcgcttctcaggcacgtaccactttctccggacccagaagatcatctggatgcctcaggaactggatgcatttcagccataccccattgaaatygtgccagggaaggtcttcgttggcaatttcagtcaagcctgtgaccccaagattcagaaggacttgaaaatcaaagcccatgtcaatgtctccatggatacagggcccttttttgcaggcgatrctgacaagcttctgcacatccggatagaagattccccggaagcccagattcttcccttcttacgccacatgtgtcacttcattgaggtcctgggcctatgtcaagaagtgcaaaaacaacatgtgtccaaatcggggattggtgagccagctgctggaatgggagaagactatccttggagattccatcacaaacatcatggatccgctctactgatyttctccgaggcccaccgaagggtactgaagagcctcacctgggggcattttgtgggtggagggccagagtgtgtatacccaggcttgtctggaaggagaaggcctttgctgcctgaaagtctca

SEQ ID NO: 7248 - DNA, 1148 bp, Homo sapiens
ctcaggcaggacraggagctgcctaacaagaggtggaaggggttacgtacgttgcgaaagactccaaccctcctggatgcctggtttgcttttatgtgaaccracagagctttacaacatcctgaatcaggccacaaaactctccagattaacagaccccaactatctctgtttattggatgtccgttccaaatgggagtatgacgaaagccatgtgatcactgcccttcgagtgaagaagaaaaataatgaatatcttctcccggagtctgtggacctggagtgtgtgaagtactgcrtggtgtatgataacaacagcagcaccctggagatactcttaaaagatgatgatgatgattcagactctgatggtgatggcaaagatcttgtgcctcaagcagccattgagtatggcaggatcctgacccgcctcacccaccaccccgtctacatcctgaaagggggctatgagcgcttctcaggcacgtaccactttctccggacccagaagatcatctggatgcctcaggaactggatgcatttcagccataccccattgaaatygtgccagggaaggtcttcgttggcaatttcagtcaagcctgtgaccccaagattcagaaggacttgaaaatcaaagcccatgtcaatgtctccatggatacagggcccttttttgcaggcgatrctgacaagcttctgcacatccggatagaagattccccggaagcccagattcttcccttcttacgccacatgtgtcacttcattgaaattcaccatcaccttggctctgtcattctgatcttttccacccarggtatcagccgcagttgtgccgccatcatagcctacctcatgcatagtaacgagcagaccttgcagaggtcctgggcctatgtcaagaagtgcaaaaacaacatgtgtccaaatcggggattggtgagccagctgctggaatgggagaagactatccttggagattccatcacaaacatcatggatccgctctactgatyttctccgaggcccaccgaagggtactgaagagcctcacctgggggcattttgtgggtggagggccagagtgtgtatacccaggcttgtctggaaggagaaggcctttgctgcctgaaagtctcatgtt

SEQ ID NO: 7249 - DNA, 1267 bp, Homo sapiens
cggccacttccgggagtcggaaaggaaagctgtgggaccatcctggcaaccccggtgtttggctgggttctagcstagccgtctgtgtggccggtgggggacctgcgrtcggagtgggagggccagtctgcacccaagaggtggaagaggacgggctttaggctggaagcgccttagaggagccatttttccaggatgcctggtttgcttttatgtgaaccracagagctttacaacatcctgaatcaggccacaaaactctccagattaacagaccccaactatctctgtttattggatgtccgttccaaatgggagtatgacgaaagccatgtgatcactgcccttcgagtgaagaagaaaaataatgaatatcttctcccggagtctgtggacctggagtgtgtgaagtactgcrtggtgtatgataacaacagcagcaccctggagatactcttaaaagatgatgatgatgattcagactctgatggtgatggcaaagatcttgtgcctcaagcagccattgagtatggcaggatcctgacccgcctcacccaccaccccgtctacatcctgaaagggggctatgagcgcttctcaggcacgtaccactttctccggacccagaagatcatctggatgcctcaggaactggatgcatttcagccataccccattgaaatygtgccagggaaggtcttcgttggcaatttcagtcaagcctgtgaccccaagattcagaaggacttgaaaatcaaagcccatgtcaatgtctccatggatacagggcccttttttgcaggcgatrctgacaagcttctgcacatccggatagaagattccccggaagcccagattcttcccttcttacgccacatgtgtcacttcattgaaattcaccatcaccttggctctgtcattctgatcttttccacccarggtatcagccgcagttgtgccgccatcatagcctacctcatgcatagtaacgagcagaccttgcagaggtcctgggcctatgtcaagaagtgcaaaaacaacatgtgtccaaatcggggattggtgagccagctgctggaatgggagaagactatccttggagattccatcacaaacatcatggatccgctctactgatyttctccgaggcccaccgaagggtactgaagagcctcacctgggggcattttgtgggtggagggccagagtgtgtatacccaggcttgtctggaaggagaaggcctttgctgcctgaaagtctcatgtt

SEQ ID NO: 7250 - DNA, 1415 bp, Homo sapiens
gccacttccgggagtcggaaaggaaagctgtgggaccatcctggcaaccccggtgtttggctgggttctagcstagccgtctgtgtggccggtgggggacctgcgrtcggagtgggagggccagtctgcacccaagaggtggaagaggacgggctttaggctggaagcgccttagaggagccatttttccaggtggggccccaggcagaggctccgacagggagcctggccatagtcgcgcagccggggaggtggakcgcgtcccagacccragcccycgacctcagccaaacccattccttctgyccttggaggccagaggggactctgagcwycggaaaggatgcctggtttgcttttatgtgaaccracagagctttacaacatcctgaatcaggccacaaaactctccagattaacagaccccaactatctctgtttattggatgtccgttccaaatgggagtatgacgaaagccatgtgatcactgcccttcgagtgaagaagaaaaataatgaatatcttctcccggagtctgtggacctggagtgtgtgaagtactgcrtggtgtatgataacaacagcagcaccctggagatactcttaaaagatgatgatgatgattcagactctgatggtgatggcaaagatcttgtgcctcaagcagccattgagtatggcaggatcctgacccgcctcacccaccaccccgtctacatcctgaaagggggctatgagcgcttctcaggcacgtaccactttctccggacccagaagatcatctggatgcctcaggaactggatgcatttcagccataccccattgaaatygtgccagggaaggtcttcgttggcaatttcagtcaagcctgtgaccccaagattcagaaggacttgaaaatcaaagcccatgtcaatgtctccatggatacagggcccttttttgcaggcgatrctgacaagcttctgcacatccggatagaagattccccggaagcccagattcttcccttcttacgccacatgtgtcacttcattgaaattcaccatcaccttggctctgtcattctgatcttttccacccarggtatcagccgcagttgtgccgccatcatagcctacctcatgcatagtaacgagcagaccttgcagaggtcctgggcctatgtcaagaagtgcaaaaacaacatgtgtccaaatcggggattggtgagccagctgctggaatgggagaagactatccttggagattccatcacaaacatcatggatccgctctactgatyttctccgaggcccaccgaagggtactgaagagcctcacctgggggcattttgtgggtggagggccagagtgtgtatacccaggcttgtctggaaggagaaggcctttgctgcctgaaagtctcatgtt

SEQ ID NO: 7251 - DNA, 991 bp, Homo sapiens
ctcaggcaggacraggagctgcctaacaagaggtggaaggggttacgtacgttgcgaaagactccaaccctcctggatgcctggtttgcttttatgtgaaccracagagctttacaacatcctgaatcaggccacaaaactctccagattaacagaccccaactatctctgtttattggatgtccgttccaaatgggagtatgacgaaagccatgtgatcactgcccttcgagtgaagaaggggctgaactactttacattcccaccaacagtatatcttgtgcctcaagcagccattgagtatggcaggatcctgacccgcctcacccaccaccccgtctacatcctgaaagggggctatgagcgcttctcaggcacgtaccactttctccggacccagaagatcatctggatgcctcaggaactggatgcatttcagccataccccattgaaatygtgccagggaaggtcttcgttggcaatttcagtcaagcctgtgaccccaagattcagaaggacttgaaaatcaaagcccatgtcaatgtctccatggatacagggcccttttttgcaggcgatrctgacaagcttctgcacatccggatagaagattccccggaagcccagattcttcccttcttacgccacatgtgtcacttcattgrgtatcagccgcagttgtgccgccatcatagcctacctcatgcatagtaacgagcagaccttgcagaggtcctgggcctatgtcaagaagtgcaaaaacaacatgtgtccaaatcggggattggtgagccagctgctggaatgggagaagactatccttggagattccatcacaaacatcatggatccgctctactgatyttctccgaggcccaccgaagggtactgaagagcctcacctgggggcattttgtgggtggagggccagagtgtgtatacccaggcttgtctggaaggagaaggcctttgctgcctgaaagtctcatg

SEQ ID NO: 7252 - DNA, 2528 bp, Homo sapiens
atggccacgcccccacccccgcggccggcgaaggcggtggtagcgcctcagtggtgtgggcctgmgccctgcccaggtgcccgcagagagcagccgggctgccagcgtttcatgatcaacatgggrgactcccacgtggacaccagctccaccgtgtccgaggcggtggccgaagaagtatctcttttcagcatgacggacatgattctgttttcgctcatcgtgggtctcctaacctactggttcctcttcagaaagaaaaaagaagaagtccccgagttcaccaaaattcagacattgacctcctctgtcagagagagcagctttgtggaaaagatgaagaaaacggggaggaacatcatcgtgttctacggctcccagacggggactgcagaggagtttgccaaccgcctgtccaaggacgcccaccgctacgggatgcgaggcatgtcagcggaccctgaggagtatgacctggccgacctgagcagcctgccrgagatcgacaacgccctggtggttttctgcatggccacctacggtgagggagaccccaccgacaatgcccaggacttctacgactggctgcaggagacagacgtggatctctctggggtcaagttcgcggtgtttggtcttgggaacaagacctacgagcacttcaatgccatgggcaagtacgtggacaagcggctggagcagctcggcgcccagcgcatctttgagctggggttgggcgacgacgatgggaacttggaggaggacttcatcacctggcgagagcagttctggccggccgtgtgtgaacactttggggtggaagccactggcgaggagtccagcattcgccagtacgagcttgtggtccacaccgacatagatgcggccaaggtgtacatgggggagatgggccggctgaagagctacgagaaccagaagcccccctttgatgccaagaatccgttcctggctgcagtcaccaccaaccggaagctgaaccagggaaccgagcgccacctcatgcacctggaattggacatctcggactccaaaatcaggtatgaatctggggaccacgtggctgtgtacccagccaacgactctgctctcgtcaaccagctgggcaaaatcctgggtgccgacctggacgtcgtcatgtccctgaacaacctggatgaggagtccaacaagaagcacccattcccgtgccctacgtcctaccgcacggccctcacctactacctggacatcaccaacccgccgcgtaccaacgtgctgtacgagctggcgcagtacgcctcggagccctcggagcaggagctgctgcgcaagatggcctcctcctccggcgagggcaaggagctgtacctgagctgggtggtggaggcccggaggcacatcctggccatcctgcaggactgcccgtccctgcggccccccatcgaccacctgtgtgagctgctgccgcgcctgcaggcccgctactactccatcgcctcatcctccaaggtccaccccaactctgtgcacatctgtgcggtggttgtggagtacgagaccaaggcyggccgcatcaacaagggcgtggccaccaactggctgcgggccaaggagcctgycggggagaacggcggccgtgcgctggtgcccatgttcgtgcgcaagtcccagttccgcctgcccttcaaggccaccacgcctgtcatcatggtgggccccggcaccggggtggcacccttcataggcttcatccaggagcgggcctggctgcgacagcagggcaaggaggtgggggagacgctgctgtactacggctgccgccgctcrgatgaggactacctgtaccgggaggagctggcgcagttccacagggacggtgcgctcacccagctcaacgtggccttctcccgggagcagtcccacaaggtctacgtccagcacctgctaaagcaagaccgagagcacctgtggaagttgatcgaaggcggtgcccacatctacgtctgtggggatgcacggaacatggccagggatgtgcagaacaccttctacgacatcgtggctgagctcggggccatggagcacgcgcaggcggtggactacatcaagaaactgatgaccaagggccgctactccctggacgtgtggagctaggggcctgcctgccccacccaccccacagactccggcctgtaatcagctctcctggctccctcccgtagtctcctgggtgtgtttggcttggccttggcatgggcgcaggcccagtgacaaagactcctctgggcctggggtgcatcctcctcagcccccaggccaggtgaggtccaccggcccctggcagcacagcccagggcctgcatgggggcaccgggctccatgcctctggaggcytctggccctcggtggctgcacagaagggctctttctctctgctgagctgggcccagcccctccacrtgatttccagtgagtgtaaataattttaaataacctctggcccttggaataaagttctgttttctrta

SEQ ID NO: 7253 - DNA, 2816 bp, Homo sapiens
tggctctctgcgtcggggtgggccctcgggcctgggcactgcgcrtctggcccgacgctcgggcggaaggcatggctcccaccccggccctcctccgcgtcgcccttcccctagagctgatctcccgcggcggcctgagggtcgacttttccacagcttgggccgagagagcccggcaggccctcggctgagggttagggctcggtatctcagggctcggggtccagtccccgcgccgccgccccccacgggctaagccactttaactctccgagcctcagtttccccatctgtacgatgaatgggcctcgggaggcagcgaattctgggggtacctaacgtgagaggcgctcgatgcatgctcatgggacccgaatctaaccctgcagcatcagtttcatgatcaacatgggrgactcccacgtggacaccagctccaccgtgtccgaggcggtggccgaagaagtatctcttttcagcatgacggacatgattctgttttcgctcatcgtgggtctcctaacctactggttcctcttcagaaagaaaaaagaagaagtccccgagttcaccaaaattcagacattgacctcctctgtcagagagagcagctttgtggaaaagatgaagaaaacggggaggaacatcatcgtgttctacggctcccagacggggactgcagaggagtttgccaaccgcctgtccaaggacgcccaccgctacgggatgcgaggcatgtcagcggaccctgaggagtatgacctggccgacctgagcagcctgccrgagatcgacaacgccctggtggttttctgcatggccacctacggtgagggagaccccaccgacaatgcccaggacttctacgactggctgcaggagacagacgtggatctctctggggtcaagttcgcggtgtttggtcttgggaacaagacctacgagcacttcaatgccatgggcaagtacgtggacaagcggctggagcagctcggcgcccagcgcatctttgagctggggttgggcgacgacgatgggaacttggaggaggacttcatcacctggcgagagcagttctggccggccgtgtgtgaacactttggggtggaagccactggcgaggagtccagcattcgccagtacgagcttgtggtccacaccgacatagatgcggccaaggtgtacatgggggagatgggccggctgaagagctacgagaaccagaagcccccctttgatgccaagaatccgttcctggctgcagtcaccaccaaccggaagctgaaccagggaaccgagcgccacctcatgcacctggaattggacatctcggactccaaaatcaggtatgaatctggggaccacgtggctgtgtacccagccaacgactctgctctcgtcaaccagctgggcaaaatcctgggtgccgacctggacgtcgtcatgtccctgaacaacctggatgaggagtccaacaagaagcacccattcccgtgccctacgtcctaccgcacggccctcacctactacctggacatcaccaacccgccgcgtaccaacgtgctgtacgagctggcgcagtacgcctcggagccctcggagcaggagctgctgcgcaagatggcctcctcctccggcgagggcaaggagctgtacctgagctgggtggtggaggcccggaggcacatcctggccatcctgcaggactgcccgtccctgcggccccccatcgaccacctgtgtgagctgctgccgcgcctgcaggcccgctactactccatcgcctcatcctccaaggtccaccccaactctgtgcacatctgtgcggtggttgtggagtacgagaccaaggcyggccgcatcaacaagggcgtggccaccaactggctgcgggccaaggagcctgycggggagaacggcggccgtgcgctggtgcccatgttcgtgcgcaagtcccagttccgcctgcccttcaaggccaccacgcctgtcatcatggtgggccccggcaccggggtggcacccttcataggcttcatccaggagcgggcctggctgcgacagcagggcaaggaggtgggggagacgctgctgtactacggctgccgccgctcrgatgaggactacctgtaccgggaggagctggcgcagttccacagggacggtgcgctcacccagctcaacgtggccttctcccgggagcagtcccacaaggtctacgtccagcacctgctaaagcaagaccgagagcacctgtggaagttgatcgaaggcggtgcccacatctacgtctgtggggatgcacggaacatggccagggatgtgcagaacaccttctacgacatcgtggctgagctcggggccatggagcacgcgcaggcggtggactacatcaagaaactgatgaccaagggccgctactccctggacgtgtggagctaggggcctgcctgccccacccaccccacagactccggcctgtaatcagctctcctggctccctcccgtagtctcctgggtgtgtttggcttggccttggcatgggcgcaggcccagtgacaaagactcctctgggcctggggtgcatcctcctcagcccccaggccaggtgaggtccaccggcccctggcagcacagcccagggcctgcatgggggcaccgggctccatgcctctggaggcytctggccctcggtggctgcacagaagggctctttctctctgctgagctgggcccagcccctccacrtgatttccagtgagtgtaaataattttaaataacctctggcccttggaataaagttctgttttctrta

SEQ ID NO: 7254 - DNA, 486 bp, Homo sapiens
atggccacgcccccacccccgcggccggcgaaggcggtggtagcgcctcagtggtgtgggcctgmgccctgcccaggtgcccgcagagagcagccgggctgccagcgagctgatctcccgcggcggcctgagggtcgacttttccacagcttgggccgagagagcccggcaggccctcggctgaggaaacatgacaaggtgtgtctcagacgactagaagtaaaacctcacaccttggaatcgccagataaacattccttggcctttgttgtacgcgtcgaaaggattgatggttggactgtcatgctaccaaaaatagtggactttctgaaggagattggcacacctccatcttcttgggggaagccccagtgggtgcagcagagctgtggctctcccaactcaagcacatctccacagctagctgccggcaagtacgcagctctcttggtggtgtctgagaaatggagcattaagccctcagtc

SEQ ID NO: 7255 - DNA, 2209 bp, Homo sapiens
atggccacgcccccacccccgcggccggcgaaggcggtggtagcgcctcagtggtgtgggcctgmgccctgcccaggtgcccgcagagagcagccgggctgccagcgtttcatgatcaacatgggrgactcccacgtggacaccagctccaccgtgtccgaggcggtggccgaagaagtatctcttttcagcatgacggacatgattctgttttcgctcatcgtgggtctcctaacctactggttcctcttcagaaagaaaaaagaagaagtccccgagttcaccaaaattcagacattgacctcctctgtcagagagagcagctttgtggaaaagatgaagaaaacggggaggaacatcatcgtgttctacggctcccagacggggactgcagaggagtttgccaaccgcctgtccaaggacgcccaccgctacgggatgcgaggcatgtcagcggaccctgaggagtatgacctggccgacctgagcagcctgccrgagatcgacaacgccctggtggttttctgcatggccacctacggtgagggagaccccaccgacaatgcccaggacttctacgactggctgcaggagacagacgtggatctctctggggtcaagttcgcggtgtttggtcttgggaacaagacctacgagcacttcaatgccatgggcaagtacgtggacaagcggctggagcagctcggcgcccagcgcatctttgagctggggttgggcgacgacgatgggaacttggaggaggacttcatcacctggcgagagcagttctggccggccgtgtgtgaacactttggggtggaagccactggcgaggagtccagcattcgccagtacgagcttgtggtccacaccgacatagatgcggccaaggtgtacatgggggagatgggccggctgaagagctacgagaaccagaagcccccctttgatgccaagaatccgttcctggctgcagtcaccaccaaccggaagctgaaccagggaaccgagcgccacctcatgcacctggaattggacatctcggactccaaaatcaggtatgaatctggggaccacgtggctgtgtacccagccaacgactctgctctcgtcaaccagctgggcaaaatcctgggtgccgacctggacgtcgtcatgtccctgaacaacctggatgaggagtccaacaagaagcacccattcccgtgccctacgtcctaccgcacggccctcacctactacctggacatcaccaacccgccgcgtaccaacgtgctgtacgagctggcgcagtacgcctcggagccctcggagcaggagctgctgcgcaagatggcctcctcctccggcgagggcaaggagctgtacctgagctgggtggtggaggcccggaggcacatcctggccatcctgcaggactgcccgtccctgcggccccccatcgaccacctgtgtgagctgctgccgcgcctgcaggcccgctactactccatcgcctcatcctccaaggtccaccccaactctgtgcacatctgtgcggtggttgtggagtacgagaccaaggcyggccgcatcaacaagggcgtggccaccaactggctgcgggccaaggagcctgycggggagaacggcggccgtgcgctggtgcccatgttcgtgcgcaagtcccagttccgcctgcccttcaaggccaccacgcctgtcatcatggtgggccccggcaccggggtggcacccttcataggcttcatccaggagcgggcctggctgcgacagcagggcaaggaggtgggggagacgctgctgtactacggctgccgccgctcrgatgaggactacctgtaccgggaggagctggcgcagttccacagggacggtgcgctcacccagctcaacgtggccttctcccgggagcagtcccacaaggtctacgtccagcacctgctaaagcaagaccgagagcacctgtggaagttgatcgaaggcggtgcccacatctacgtctgtggggatgcacggaacatggccagggatgtgcagaacaccttctacgacatcgtggctgagctcggggccatggagcacgcgcaggcggtggactacatcaagaaactgatgaccaagggccgcccctccacrtgatttccagtgagtgtaaataattttaaataacctctggcccttggaataaagttctgttttctrtatt

SEQ ID NO: 7256 - DNA, 4627 bp, Homo sapiens
gggaacgtgcttggacgaggggcgcgggacagtctgggagttgtagttccaggtcgctgtggggcgcgsgcctggcggaagtagctggagaaggcgggcggaagttccacgccaagatactggattcggtgctgaggcggcggctgcggcacgggaaaggctcagtgactgaagctccaaaggccagcaggytggtggggacgtgaccgaagcgaggctctggttccctttcggtgggcgccakttgagcctcatctctggcttccccaggatgcgccggcagccggggagcggctccgggcgcgaggtctgaggatgatctttcytgtcgcccgctacgcgctccggtggctgcgacggcccgaagaccgtgccttttcccgcgccgccatggagatggccctccgaggcgtgcggaaagtcctctgtgtggccgaaaaaaacgacgcrgccaaggggatcgccgacctgctgtcaaacggtcgcatgaggcggagagaaggactttcaaaattcaacaagatctatgaatttgattatcatctgtatggccagaatgttaccatggtaatgacttcagtttctggacatttactggctcatgatttccagatgcagtttcgaaaatggcagagctgcaaccctcttgtcctctttgaagcagaaattgaaaagtactgcccagagaattttgtagacatcaagaaaactttggaacgagagactcgccagtgccaggctctggtkatctggactgactgtgatagagaaggcgaaaacatcgggtttgagattatccacgtgtgtaaggctgtaaagcccaatctgcaggtgttgcgagcccgattctctgagatcacaccccatgccgtcaggacagcttgtgaaaacctgaccgagcctgatcagagggtgagcgatgctgtggatgtgaggcaggagctggacctgaggattggagctgcctttactaggttccagaccctgcggcttcagaggatttttcctgaggtgctggcagagcagctcatcagttacggcagctgccagttccccacactgggctttgtggtggagcggttcaaagccattcaggcttttgtaccagaaatcttccacagaattaaagtaactcatgaccacaaagatggtatsgtagaattcaactggaaaaggcatcgactctttaaccacacggcttgcctagttctctatcagttgtgtgtggaggatcccatggcaactgtggtagaggtcagatctaagcccaagagcaagtggcggcctcaagccttggacactgtggagcttgagaagctggcttctcgaaagttgagaataaatgctaaagaaaccatgaggattgctgagaagctctacactcaagggtacatcagctatccccgaacagaaacaaacatttttcccagagacttaaacctgacggtgttggtggaacagcagacccccgatccacgctggggggcctttgcccagagcattctagagcggggtggtcccaccccacgcaatgggaacaagtctgaccaagctcaccctcccattcaccccaccaaatacaccaacaacttacagggagatgaacagcgactgtacgagtttattgttcgccatttcctggcttgctgctcccaggatgctcaggggcaggagaccacagtggagatcracatcgctcaggaacgctttgtggcccatggcctcatgattctggcccgaaactatctggatgtgtatccatatgatcactggagtgacaagatcctccctgtctatgagcaaggatcccactttcagcccagcaccgtggagatggtggayggggagaccagcccacccaagctgctcaccgaggccgacctcattgccctcatggagaagcatggcattggtacggatgccactcatgcggagcacatcgagaccatcaaagcccggatgtacgtgggcctcaccccagacaagcggttcctccctgggcacctgggcatgggacttgtggaaggttatgattccatgggctatgaaatgtctaagcctgacckccgggctgaactggaagctgatctgaagctgatctgtgatggcaaaaaggacaaatttgtggttctaaggcagcaagtgcagaaatacaagcaggttttcattgaagcggtggctaaagcaaagaaattggacgaggccttggcccagtactttgggaatgggacagagttggcccagcaagaagatatctacccagccatgccagagcccatcaggaagtgcccacagtgcaacaaggacatggtccttaagaccaagaagaatggcgggttctacctcagctgcatgggtttcccagagtgtcgctcagctgtgtggcttcctgactcggtgctggaggccagcagggacagcagtgtgtgtccagtttgtcagccacaccctgtgtacaggttaaagttaaagtttaagcgcggtagccttcccccgaccatgcctctggagtttgtttgctgcatcggcggatgcgacracaccctgagggagatcctggacctgagattttcagggggcccccccagggctagccagccctctggccgcctgcaggctaaccagtccctgracaggatggacaacagccagcacccccagcctgctgacagcagacagactgggtcctcaaaggctctggcccagaccctcccaccacccacggctgctggtgaaagcaattctgtgacctgcaactgtggccaggaggctgtgctgctcactgtccgtaaggagggccccaaccggggccggcagttctttaagtgcaacggaggtagctgcaacttcttcctgtgggcagacagccccaatccgggagcaggagggcctcctgccttggcatatagacccctgggcgcctccctgggatgcccaccaggcccagggatccayctaggtgggtttggcaaccctggtgatggcagtggtagtggcacatcctgcctttgcagccagccctccgtcacacggactgtgcagaaggatggacccaacaaggggcgccagttccacacatgtgccaagccgagagagcagcagtgtggctttttccagtgggtcgatgagaacaccgctccagggacttctggagccccgtcctggacaggagacagaggaagaaccctggagtcggaagccagaagcaaaaggccccgggccagttcctcagacatggggtccacagcaaagaaaccccggaaatgcagcctttgccaccagcctggacacacccgtcccttttgtcctcagaacagatgagctcagggtagggtagagaacgccactttctcagacctgtcccctttgtgtttagaaatgagttaaccaggaccaagtggccatttagtgtcctggaaacttagaggacagtgttggcctttggagtcgggccttcttgtgttaaggggcacaaggtccagatcactctgsagcaggccagctctgctggacagtgaccctcttcccaggcctcaggagtgaccatagccactgctgaaaagtcacgcagctgctccctcggaccccccaaggatggttgctgttagcagaggattggtgcagtcccagctgaagcccactgtgtgccaaaggaagaagctcccagggctgcttccttcacctgcagaaagccccaagtgagscaccagcactcatggggyagtccctgtccaggctgcccagggcttctcatagacgtcctgagaaggacggtgtaatgcaaggaaatggctgtggtaacactgatccttcagaagaagcttcattccctcttaatctagttaagccaggacatccmgaattcattgctttaataaagaacccaggccgggtgcagtggctcatgcctgtaatcccagcactttgggaggctgtggggggcggattgcctgagctcaggagttcgagaccagccagggcaacatggtgaaaccctgtctctactaaaatacaaaaaattagccaggtgtggcggtgtgcgcctgtagacccggctactcaggaggctgaggcaggagaattgcttgaacccgggaggcggaggttgcagttagctgagattgcgccactggacgacagagcgagactcagtctcaaaaaaaatttaaaaatttaaaaaaataaaaagaatccaaccccggcagggcgtggaggctcacacctgtaatccagcacttagggaggccaaggctggaggattgcttgagatcaggagttcaagaccagcctgggcaacatagttagaccttgtctctatttttaaaaatataacaagcacagttgtacacgtctttagttcagctgctcaggaggctgaagtgggaggatcctttgaacccaagagtttgaggctgcagcaagccatgatcacaccactgcactccagcctgggtgacagagtaagaccctgtctcaaactttttttaaaatgaaagaatccaacctttttttactctgacctgcgagagtgcagagggtctggggaacatttgcagaagcaacaggtaccagccagtgctggaaggagctcaccctgggaggtctcgtcagcctctgtccttcatgg

SEQ ID NO: 7257 - DNA, 4131 bp, Homo sapiens
gggaacgtgcttggacgaggggcgcgggacagtctgggagttgtagttccaggtcgctgtggggcgcgsgcctggcggaagtagctggagaaggcgggcggaagttccacgccaagatactggattcggtgctgaggcggcggctgcggcacgggaaaggctcagtgactgaagctccaaaggccagcaggytggtggggacgtgaccgaagcgaggctctggttccctttcggtgggcgccakttgagcctcatctctggcttccccaggatgcgccggcagccggggagcggctccgggcgcgaggtctgaggatgatctttcytgtcgcccgctacgcgctccggtggctgcgacggcccgaagaccgtgccttttcccgcgccgccatggagatggccctccgaggcgtgcggaaagtcctctgtgtggccgaaaaaaacgacgcrgccaaggggatcgccgacctgctgtcaaacggtcgcatgaggcggagagaaggactttcaaaattcaacaagatctatgaatttgattatcatctgtatggccagaatgttaccatggtaatgacttcagtttctggacatttactggctcatgatttccagatgcagtttcgaaaatggcagagctgcaaccctcttgtcctctttgaagcagaaattgaaaagtactgcccagagaattttgtagacatcaagaaaactttggaacgagagactcgccagtgccaggctctggtkatctggactgactgtgatagagaaggcgaaaacatcgggtttgagattatccacgtgtgtaaggctgtaaagcccaatctgcaggtgttgcgagcccgattctctgagatcacaccccatgccgtcaggacagcttgtgaaaacctgaccgagcctgatcagagggtgagcgatgctgtggatgtgaggcaggagctggacctgaggattggagctgcctttactaggttccagaccctgcggcttcagaggatttttcctgaggtgctggcagagcagctcatcagttacggcagctgccagttccccacactgggctttgtggtggagcggttcaaagccattcaggcttttgtaccagaaatcttccacagaattaaagtaactcatgaccacaaagatggtatsgtagaattcaactggaaaaggcatcgactctttaaccacacggcttgcctagttctctatcagttgtgtgtggaggatcccatggcaactgtggtagaggtcagatctaagcccaagagcaagtggcggcctcaagccttggacactgtggagcttgagaagctggcttctcgaaagttgagaataaatgctaaagaaaccatgaggattgctgagaagctctacactcaagggtacatcagctatccccgaacagaaacaaacatttttcccagagacttaaacctgacggtgttggtggaacagcagacccccgatccacgctggggggcctttgcccagagcattctagagcggggtggtcccaccccacgcaatgggaacaagtctgaccaagctcaccctcccattcaccccaccaaatacaccaacaacttacagggagatgaacagcgactgtacgagtttattgttcgccatttcctggcttgctgctcccaggatgctcaggggcaggagaccacagtggagatcracatcgctcaggaacgctttgtggcccatggcctcatgattctggcccgaaactatctggatgtgtatccatatgatcactggagtgacaagatcctccctgtctatgagcaaggatcccactttcagcccagcaccgtggagatggtggayggggagaccagcccacccaagctgctcaccgaggccgacctcattgccctcatggagaagcatggcattggtacggatgccactcatgcggagcacatcgagaccatcaaagcccggatgtacgtgggcctcaccccagacaagcggttcctccctgggcacctgggcatgggacttgtggaaggttatgattccatgggctatgaaatgtctaagcctgacckccgggctgaactggaagctgatctgaagctgatctgtgatggcaaaaaggacaaatttgtggttctaaggcagcaagtgcagaaatacaagcaggttttcattgaagcggtggctaaagcaaagaaattggacgaggccttggcccagtactttgggaatgggacagagttggcccagcaagaagatatctacccagccatgccagagcccatcaggaagtgcccacagtgcaacaaggacatggtccttaagaccaagaagaatggcgggttctacctcagctgcatgggtttcccagagtgtcgctcagctgtgtggcttcctgactcggtgctggaggccagcagggacagcagtgtgtgtccagtttgtcagccacaccctgtgtacaggttaaagttaaagtttaagcgcggtagccttcccccgaccatgcctctggagtttgtttgctgcatcggcggatgcgacracaccctgagggagatcctggacctgagattttcagggggcccccccagggctagccagccctctggccgcctgcaggctaaccagtccctgracaggatggacaacagccagcacccccagcctgctgacagcagacagactgggtcctcaaaggctctggcccagaccctcccaccacccacggctgctggtgaaagcaattctgtgacctgcaactgtggccaggaggctgtgctgctcactgtccgtaaggagggccccaaccggggccggcagttctttaagtgcaacggaggtagctgcaacttcttcctgtgggcagacagccccaatccgggagcaggagggcctcctgccttggcatatagacccctgggcgcctccctgggatgcccaccaggcccagggatccayctaggtgggtttggcaaccctggtgatggcagtggtagtggcacatcctgcctttgcagccagccctccgtcacacggactgtgcagaaggatggacccaacaaggggcgccagttccacacatgtgccaagccgagagagcagcagtgtggctttttccagtgggtcgatgagaacaccgctccagggacttctggagccccgtcctggacaggagacagaggaagaaccctggagtcggaagccagaagcaaaaggccccgggccagttcctcagacatggggtccacagcaaagaaaccccggaaatgcagcctttgccaccagcctggacacacccgtcccttttgtcctcagaacagatgagctcagggtagggtagagaacgccactttctcagacctgtcccctttgtgtttagaaatgagttaaccaggaccaagtggccatttagtgtcctggaaacttagaggacagtgttggcctttggagtcgggccttcttgtgttaaggggcacaaggtccagatcactctgsagcaggccagctctgctggacagtgaccctcttcccaggcctcaggagtgaccatagccactgctgaaaagtcacgcagctgctccctcggaccccccaaggatggttgctgttagcagaggattggtgcagtcccagctgaagcccactgtgtgccaaaggaagaagctcccagggctgcttccttcacctgcagaaagccccaagtgagscaccagcactcatggggyagtccctgtccaggctgcccagggcttctcatagacgtcctgagaaggacggtgtaatgcaaggaaatggctgtggtaacactgatccttcagaagaagcttcattccctcttaatctagttaagccaggacatccmgaattcattgctttaataaagaacccaggccgggtgcagtggctcatgcctgtaatcccagcactttgggaggctgtggggggcggattgcctgagctcaggagttcgagaccagccagggcaacatggtgaaaccctgtctctataaaaatacaaaaattagccgagcgtggtagcgcgcacttgtagtcccagctaccgggaggcagaggttgcagtgagccgagatcgcaccactgcactccagcctgggcgacagagtgatactcact

SEQ ID NO: 7258 - DNA, 1047 bp, Homo sapiens
gggaacgtgcttggacgaggggcgcgggacagtctgggagttgtagttccaggtcgctgtggggcgcgsgcctggcggaagtagctggagaaggcgggcggaagttccacgccaagatactggattcggtgctgaggcggcggctgcggcacgggaaaggctcagtgactgaagctccaaaggccagcaggytggtggggacgtgaccgaagcgaggctctggttccctttcggtgggcgccakttgagcctcatctctggcttccccaggatgcgccggcagccggggagcggctccgggcgcgaggtctgaggatgatctttcytgtcgcccgctacgcgctccggtggctgcgacggcccgaagaccgtgccttttcccgcgccgccatggagatggccctccgaggcgtgcggaaagtcctctgtgtggccgaaaaaaacgacgcrgccaaggggatcgccgacctgctgtcaaacggtcgcatgaggcggagagaaggactttcaaaattcaacaagatctatgaatttgattatcatctgtatggccagaatgttaccatggtaatgacttcagtttctggacatttactggctcatgatttccagatgcagtttcgaaaatggcagagctgcaaccctcttgtcctctttgaagcagaaattgaaaagtactgcccagagaattttgtagacatcaaggtagggtcttttggaagacatatggcactgagtcaaaccacagagtcaaacagrgtgatttctttgtttttaatgcattggcatttggagataaggttttccaccaaagtcactaccatgatttaaaaagctggttcccacccattgtataaatgtggctaagtggccaagggactgaagtaaacttttttttatgaatggtagttgtttaaatcctaggaataaaggctggacatggtggtttatgcctgtaatcccagcaatttgtggggccaaggcaggatcacatgaactccaggaatttgagaccagcctgggcaacatagtgagaccctatctctc

SEQ ID NO: 7259 - DNA, 4350 bp, Homo sapiens
gggaacgtgcttggacgaggggcgcgggacagtctgggagttgtagttccaggtcgctgtggggcgcgsgcctggcggaagtagctggagaaggcgggcggaagttccacgccaagatactggattcggtgctgaggcggcggctgcggcacgggaaaggctcagtgactgaagctccaaaggccagcaggytggtggggacgtgaccgaagcgaggctctggttccctttcggtgggcgccakttgagcctcatctctggcttccccaggatgcgccggcagccggggagcggctccgggcgcgaggtctgaggatgatctttcytgtcgcccgctacgcgctccggtggctgcgacggcccgaagaccgtgccttttcccgcgccgccatggagatggccctccgaggcgtgcggaaagtcctctgtgtggccgaaaaaaacgacgcrgccaaggggatcgccgacctgctgtcaaacggtcgcatgaggcggagagaaggactttcaaaattcaacaagatctatgaatttgattatcatctgtatggccagaatgttaccatggtaatgacttcagtttctggacatttactggctcatgatttccagatgcagtttcgaaaatggcagagctgcaaccctcttgtcctctttgaagcagaaattgaaaagtactgcccagagaattttgtagacatcaagaaaactttggaacgagagactcgccagtgccaggctctggtkatctggactgactgtgatagagaaggcgaaaacatcgggtttgagattatccacgtgtgtaaggctgtaaagcccaatctgcaggtgttgcgagcccgattctctgagatcacaccccatgccgtcaggacagcttgtgaaaacctgaccgagcctgatcagagggtgagcgatgctgtggatgtgaggcaggagctggacctgaggattggagctgcctttactaggttccagaccctgcggcttcagaggatttttcctgaggtgctggcagagcagctcatcagttacggcagctgccagttccccacactgggctttgtggtggagcggttcaaagccattcaggcttttgtaccagaaatcttccacagaattaaagtaactcatgaccacaaagatggtatsgtagaattcaactggaaaaggcatcgactctttaaccacacggcttgcctagttctctatcagttgtgtgtggaggatcccatggcaactgtggtagaggtcagatctaagcccaagagcaagtggcggcctcaagccttggacactgtggagcttgagaagctggcttctcgaaagttgagaataaatgctaaagaaaccatgaggattgctgagaagctctacactcaagggtacatcagctatccccgaacagaaacaaacatttttcccagagacttaaacctgacggtgttggtggaacagcagacccccgatccacgctggggggcctttgcccagagcattctagagcggggtggtcccaccccacgcaatgggaacaagtctgaccaagctcaccctcccattcaccccaccaaatacaccaacaacttacagggagatgaacagcgactgtacgagtttattgttcgccatttcctggcttgctgctcccaggatgctcaggggcaggagaccacagtggagatcracatcgctcaggaacgctttgtggcccatggcctcatgattctggcccgaaactatctggatgtgtatccatatgatcactggagtgacaagatcctccctgtctatgagcaaggatcccactttcagcccagcaccgtggagatggtggayggggagaccagcccacccaagctgctcaccgaggccgacctcattgccctcatggagaagcatggcattggtacggatgccactcatgcggagcacatcgagaccatcaaagcccggatgtacgtgggcctcaccccagacaagcggttcctccctgggcacctgggcatgggacttgtggaaggttatgattccatgggctatgaaatgtctaagcctgacckccgggctgaactggaagctgatctgaagctgatctgtgatggcaaaaaggacaaatttgtggttctaaggcagcaagtgcagaaatacaagcaggttttcattgaagcggtggctaaagcaaagaaattggacgaggccttggcccagtactttgggaatgggacagagttggcccagcaagaagatatctacccagccatgccagagcccatcaggaagtgcccacagtgcaacaaggacatggtccttaagaccaagaagaatggcgggttctacctcagctgcatgggtttcccagagtgtcgctcagctgtgtggcttcctgactcggtgctggaggccagcagggacagcagtgtgtgtccagtttgtcagccacaccctgtgtacaggttaaagttaaagtttaagcgcggtagccttcccccgaccatgcctctggagtttgtttgctgcatcggcggatgcgacracaccctgagggagatcctggacctgagattttcagggggcccccccagggctagccagccctctggccgcctgcaggctaaccagtccctgracaggatggacaacagccagcacccccagcctgctgacagcagacagactgggtcctcaaaggctctggcccagaccctcccaccacccacggctgctggtgaaagcaattctgtgacctgcaactgtggccaggaggctgtgctgctcactgtccgtaaggagggccccaaccggggccggcagttctttaagtgcaacggaggtagctgcaacttcttcctgtgggcagacagccccaatccgggagcaggagggcctcctgccttggcatatagacccctgggcgcctccctgggatgcccaccaggcccagggatccayctaggtgggtttggcaaccctggtgatggcagtggtagtggcacatcctgcctttgcagccagccctccgtcacacggactgtgcagaaggatggacccaacaaggggcgccagttccacacatgtgccaagccgagagagcagcagtgtggctttttccagtgggtcgatgagaacaccgctccagggacttctggagccccgtcctggacaggagacagaggaagaaccctggagtcggaagccagaagcaaaaggccccgggccagttcctcagacatggggtccacagcaaagaaaccccggaaatgcagcctttgccaccagcctggacacacccgtcccttttgtcctcagaacagatgagctcaggtggtggccatgttcccccgtttgccttcacaaaaaccttgtgaataatacaagccatatggactctgatttacagtttagaagatgagcagaggcaactgtgtgtctcaaaagcaaactgcaggattgggctgcaccatggactgggccaggcatctgagatcagacagacccaggctcagctcccacttcctggcctcttctgccaccctgggtgtgcagcctcatccttggagccccagttgcctcatccgtaatggggtgtccttgttcatattgaggctctctagtgaaggcttacggtcaggcacgactgcaaattaaagcttcacaaatcaaacctgttggaatttctaagtctctctcgatggcccactcaggttagcagcatgcagctcattctaccccgtcaacgttgactggaagggtttttagtccctgtgttgagccacatctgcagcttgtgcaatgcaaaaccaaggaaaagaaaatggaccccccccgccccccccttgatggatctagctgagactaggcactggccaggctgtcacctacagtggtttcaacctcctgctgccagcaagacagcatctcctgtcctttttgtgcaggaaccatagctctgttgggttaagtgttttcctctaccaagcagctaacctggccttgaaacctaatctctgatgccatgtccccccaagccccatcagagttttgtaaaaagcccctccctgctctccacaccaatgmtgagagcccatggggtaactggaggcttccctgccatcttggcaaagaagcctggctgacgtcctgcacatgcttccccaggtgattgcttgcacttaacagcagaggaaacgagaccaccccacacaacttgtagcagttgaggagtctctgcctgatcccaccccggatacttagagcatccagaattaaaaataagccttgtcaccaacatccggctcccccactccccagagccaggctcaatgtgcccaacagcgctggggcccg

SEQ ID NO: 7260 - DNA, 1333 bp, Homo sapiens
cgtacccccacggcccggccagtggaaggcgcgggcagcagcggctccgagtggccgcggcggtgggctgtgccggagtctcctccctttggtccgctgcaggcccgcagcccgagtgtcgccgccatggcttcgccgcagctctgccgcgcgctggtgtcggcgcaatgggtggcggaggcgctgcgggccccgcgcgctgggcagcctctgcagctgctggacgcctcctggtacctgccgaagctggggcgcgacgcgcgacgcgagttcgaggagcgccacatcccgggcgccgctttcttcgacatcgaccagtgcagcgaccgcacctcgccctacgaccacatgctgcccggggccgagcatttcgcggagtacgcaggccgcctgggcgtgggcgcggccacccacgtcgtgatctacgacgccagcgaccagggcctctactccgccccgcgcgtctggtggatgttccgcgccttcggccaccacgccgtgtcactgcttgatggcggcctccgccactggctgcgccagaacctcccgctcagctccggcaagagccaacctgctcccgccgagttccgcgctcagctcgaccccgccttcatcaagacctacgaggacatcaaggagaacctggaatcccggcgcttccaggtggtggactcccgagccactggcaggttccgcggcaccgagcccgagccccgagacggcattgaacctggccacatcccaggtaccgtgaacatccccttcacagacttcctgagccaggaggggctggagaagagccctgaggagatccgccatctgttccaggagaagaaagtggacctgtctaagccactggtggccacgtgtggctctggcgtcacagcctgccacgtggcactaggggcctacctctgcggcaagccagacgtgcccatctacgatggctcctgggtggagtggtacatgcgcgcccggcccgaggatgtcatctcagagggccgggggaagacccactgaagctgggcaggacacaggcgagctcaggtgatgccrgccaccagcaatgcctggcctggtagctccgcttctgctttcacmaagagagtgtttcttcactcaactcaggtggcatttggggtgacatctcaaaggccaggaattccgttgacttgttggctgccagtaggggcgggaggaaaggcggaggcgagccctggaggagggaggccacaacwccgagctgcccacctggtgctgagctggggccccgcctcctttctgttttatttttgaggaaataaaataaccaagtgctaaatcttgtagctct

SEQ ID NO: 7261 - DNA, 1509 bp, Homo sapiens
cgtacccccacggcccggccagtggaaggcgcgggcagcagcggctccgagtggccgcggcggtgggctgtgccggagtctcctccctttggtccgctgcaggtcgccaatataaatgcttgatgagtgaatgaatgacttccgtctgggacttggttgcaaataaagccgagctgcatcttagggaggggtggagactttgcccctgtttgtgccttgaagccagcagggccttgccctaggatacctccacccaccctcctgcccagcaagtggaggcccgcagcccgagtgtcgccgccatggcttcgccgcagctctgccgcgcgctggtgtcggcgcaatgggtggcggaggcgctgcgggccccgcgcgctgggcagcctctgcagctgctggacgcctcctggtacctgccgaagctggggcgcgacgcgcgacgcgagttcgaggagcgccacatcccgggcgccgctttcttcgacatcgaccagtgcagcgaccgcacctcgccctacgaccacatgctgcccggggccgagcatttcgcggagtacgcaggccgcctgggcgtgggcgcggccacccacgtcgtgatctacgacgccagcgaccagggcctctactccgccccgcgcgtctggtggatgttccgcgccttcggccaccacgccgtgtcactgcttgatggcggcctccgccactggctgcgccagaacctcccgctcagctccggcaagagccaacctgctcccgccgagttccgcgctcagctcgaccccgccttcatcaagacctacgaggacatcaaggagaacctggaatcccggcgcttccaggtggtggactcccgagccactggcaggttccgcggcaccgagcccgagccccgagacggcattgaacctggccacatcccaggtaccgtgaacatccccttcacagacttcctgagccaggaggggctggagaagagccctgaggagatccgccatctgttccaggagaagaaagtggacctgtctaagccactggtggccacgtgtggctctggcgtcacagcctgccacgtggcactaggggcctacctctgcggcaagccagacgtgcccatctacgatggctcctgggtggagtggtacatgcgcgcccggcccgaggatgtcatctcagagggccgggggaagacccactgaagctgggcaggacacaggcgagctcaggtgatgccrgccaccagcaatgcctggcctggtagctccgcttctgctttcacmaagagagtgtttcttcactcaactcaggtggcatttggggtgacatctcaaaggccaggaattccgttgacttgttggctgccagtaggggcgggaggaaaggcggaggcgagccctggaggagggaggccacaacwccgagctgcccacctggtgctgagctggggccccgcctcctttctgttttatttttgaggaaataaaataaccaagtgctaaatcttgtagctct

SEQ ID NO: 7262 - DNA, 1327 bp, Homo sapiens
tggtggcgggaggaggggacagctgcgggcgcggggagggggcgccgcgccgcgggggccatggcggagccaggaagccgggagtccgagacccgggcccgcagcccgagtgtcgccgccatggcttcgccgcagctctgccgcgcgctggtgtcggcgcaatgggtggcggaggcgctgcgggccccgcgcgctgggcagcctctgcagctgctggacgcctcctggtacctgccgaagctggggcgcgacgcgcgacgcgagttcgaggagcgccacatcccgggcgccgctttcttcgacatcgaccagtgcagcgaccgcacctcgccctacgaccacatgctgcccggggccgagcatttcgcggagtacgcaggccgcctgggcgtgggcgcggccacccacgtcgtgatctacgacgccagcgaccagggcctctactccgccccgcgcgtctggtggatgttccgcgccttcggccaccacgccgtgtcactgcttgatggcggcctccgccactggctgcgccagaacctcccgctcagctccggcaagagccaacctgctcccgccgagttccgcgctcagctcgaccccgccttcatcaagacctacgaggacatcaaggagaacctggaatcccggcgcttccaggtggtggactcccgagccactggcaggttccgcggcaccgagcccgagccccgagacggcattgaacctggccacatcccaggtaccgtgaacatccccttcacagacttcctgagccaggaggggctggagaagagccctgaggagatccgccatctgttccaggagaagaaagtggacctgtctaagccactggtggccacgtgtggctctggcgtcacagcctgccacgtggcactaggggcctacctctgcggcaagccagacgtgcccatctacgatggctcctgggtggagtggtacatgcgcgcccggcccgaggatgtcatctcagagggccgggggaagacccactgaagctgggcaggacacaggcgagctcaggtgatgccrgccaccagcaatgcctggcctggtagctccgcttctgctttcacmaagagagtgtttcttcactcaactcaggtggcatttggggtgacatctcaaaggccaggaattccgttgacttgttggctgccagtaggggcgggaggaaaggcggaggcgagccctggaggagggaggccacaacwccgagctgcccacctggtgctgagctggggccccgcctcctttctgttttatttttgaggaaataaaataaccaagtgctaaatcttgtagctct

SEQ ID NO: 7263 - DNA, 1215 bp, Homo sapiens
ggcgggcggcgcagggtccccctctggcggtggcgcgatggtgcgcgccgcctggggagctgcggccgggggtttgaaccggccaacttctccagccggccggggcgagcgccagcgcggcgtccggggcgagtgacacgcagagctgaagccatggttcatcaggtgctctaccgggcgctggtctccaccaagtggctggcggagtccatcaggactggcaagctggggcccggcctgcgggtgctggacgcgtcctggtactcaccaggcacccgagaggcccgcaaggagtacctcgagcgccacgtacccggcgcctctttctttgacatagaagagtgccgggacacggcgtcgccctacgagatgatgctgcccagcgaggctggcttcgccgagtatgtgggccgcctgggcatcagcaaccacacgcacgtggtggtgtatgatggtgamcacctgggcagcttctatgctccccgggtctggtggatgttccgtgtgtttggccaccgcaccgtatcagtgctcaatggtggcttccggaactggctgaaggagggccaccmggtgacatccgagccctcacgcccagaaccggcmgtcttcaaagccacactggaccgctccctgctcaagacctacgagcaggtgctggagaaccttgaatctaagaggttccagctggtggattcaaggtctcaagggcggttcctgggcaccgagccggagccggatgcagtaggactggactcgggccatatcygtggtgccgtcaacatgcctttcatggacttcctgactgaggatggcttcgagaagrgcccagragrgctccgtgctctgttccagaccaagaaggtggatctctcgcagcctctcattgccacgtgccgcaagggagtcaccgcctgccaygtggccttggctgcctacctctgcggcaagcctgatgtggccgtgtacgatggctcctggtccgagtggtttcgccgggcccccccagagagccgtgtgtcccagggaaagtctgagaaggcctgagccrtgacctcttctgcttactgtaactgcggccggtttagtgaccccatgacttacagccggttcttacctcttaggtgaaggagatgacatgtttttagaattgctgtgcaaggctcaccctctctctgtcaacactggaataaactttgccttttctgagtagtg

SEQ ID NO: 7264 - DNA, 1083 bp, Homo sapiens
gtgacacgcagagctgaagccatggttcatcaggtgctctaccgggcgctggtctccaccaagtggctggcggagtccatcaggactggcaagctggggcccggcctgcgggtgctggacgcgtcctggtactcaccaggcacccgagaggcccgcaaggagtacctcgagcgccacgtacccggcgcctctttctttgacatagaagagtgccgggacacggcgtcgccctacgagatgatgctgcccagcgaggctggcttcgccgagtatgtgggccgcctgggcatcagcaaccacacgcacgtggtggtgtatgatggtgamcacctgggcagcttctatgctccccgggtctggtggatgttccgtgtgtttggccaccgcaccgtatcagtgctcaatggtggcttccggaactggctgaaggagggccaccmggtgacatccgagccctcacgcccagaaccggcmgtcttcaaagccacactggaccgctccctgctcaagacctacgagcaggtgctggagaaccttgaatctaagaggttccagctggtggattcaaggtctcaagggcggttcctgggcaccgagccggagccggatgcagtaggactggactcgggccatatcygtggtgccgtcaacatgcctttcatggacttcctgactgaggatggcttcgagaagrgcccagragrgctccgtgctctgttccagaccaagaaggtggatctctcgcagcctctcattgccacgtgccgcaagggagtcaccgcctgccaygtggccttggctgcctacctctgcggcaagcctgatgtggccgtgtacgatggctcctggtccgagtggtttcgccgggcccccccagagagccgtgtgtcccagggaaagtctgagaaggcctgagccrtgacctcttctgcttactgtaactgcggccggtttagtgaccccatgacttacagccggttcttacctcttaggtgaaggagatgacatgtttttagaattgctgtgcaaggctcaccctctctctgtcaacactggaataaactttgccttttctgagtagtg

SEQ ID NO: 7265 - DNA, 1796 bp, Homo sapiens
tcgccggcgagtgcaccctggaacgcacaacttagcrgcacgcaccacagctcgagcaccgcccttccggttggagccattgcaagccccccccacgccccgcccccctcgctaggcgctcgccacgcccatgcctccgtcgctgcgcggcccaccccggatgtcagccccccgcgccgaccagaatccgtgaacatggcgaacgaggttatcaagtgcaaggctgcagttgcttgggaggctggaaagcctctctccatagaggagatagaggtggcacccccaaaggctcatgaagttcgaatcaagatcattgccactgcggtttgccacaccgatgcctataccctgagtggagctgatcctgagggttgttttccagtgatcttgggacatgaaggtgctggaattgtggaaagtgttggtgagggagttactaagctgaaggcgggtgacactgtcatcccactttacatcccacagtgtggagaatgcaaattttgtctaaatcctaaaactaacctttgccagaagataagagtcactcaagggaaaggattaatgccagatggtaccagcagatttacttgcaaaggaaagacaattttgcattacatgggaaccagcacattttctgaatacacagttgtggctgatatctctgttgctaaaatagatcctttagcacctttgkataaagtctgccttctaggttgtggcatttcaaccggttatggtgctgctgtgaacactgccaagttggagcctggctctgtttgtgccgtctttggtctgggaggagtcggattggcagttatcatgggctgtaaagtggctggtgcttcccggatcattggtgtggacatcaataaagataaatttgcaagggccaaagagtttggagccactgaatgtattaaccctcaggatttwagtaaacccatccaggaagtgctcattgagatgaccgatggaggagtggactattcctttgaatgtattggtaatgtgaaggtcatgagagcagcacttgaggcatgtcacaagggctggggcgtcagcgtcgtggttggagtagctgcttcaggtgaagaaattgccactcgtccattccagctggtaacaggtcgcacatggaaaggcactgcctttggaggatggaagagtgtagaaagtgtcccaaagytggtstctgaatatatgtccaaaaagataaaagttgatgaatttgtgactcacaatctgtcttttgatgaaatcaacaaagcctttgaactgatgcattctggaaagaggaacaactaccaagtgaacaagatgagcaaagtcctctattatacaagatttccttcggtggaacattatggtgacaaagcagcgtaatgrgctcttaagcagattgatttttatcaaactggacatatcagaattccttatgtataagagaaatatgcacatgctcctttcaagaaaagagtgataacccaccatggaattacctccagtttaaacatgtactcttgactgccaaaaatatcgagatatgttaagcaagataaagcagcagaacacgctttaaaatatgttgatctctttctgtaatctacatgttaatattaaatgttcttatccttggcattgtttcctcagaatcatccagggctcaaattcagatttaagtttaaaaaattctatctggaattgtctggtgatctctgacccaactactgaaacaaagcaaatctgcttcatagccagtcacattctgtatagaataaaacagttggtagttgtca

SEQ ID NO: 7266 - DNA, 2759 bp, Homo sapiens
tcgccggcgagtgcaccctggaacgcacaacttagcrgcacgcaccacagctcgagcaccgcccttccggttggagccattgcaagccccccccacgccccgcccccctcgctaggcgctcgccacgcccatgcctccgtcgctgcgcggcccaccccggatgtcagccccccgcgccgaccagaatccgtgaacatggcgaacgaggttatcaagtgcaaggctgcagttgcttgggaggctggaaagcctctctccatagaggagatagaggtggcacccccaaaggctcatgaagttcgaatcaagatcattgccactgcggtttgccacaccgatgcctataccctgagtggagctgatcctgagggttgttttccagtgatcttgggacatgaaggtgctggaattgtggaaagtgttggtgagggagttactaagctgaaggcgggtgacactgtcatcccactttacatcccacagtgtggagaatgcaaattttgtctaaatcctaaaactaacctttgccagaagataagagtcactcaagggaaaggattaatgccagatggtaccagcagatttacttgcaaaggaaagacaattttgcattacatgggaaccagcacattttctgaatacacagttgtggctgatatctctgttgctaaaatagatcctttagcacctttgkataaagtctgccttctaggttgtggcatttcaaccggttatggtgctgctgtgaacactgccaagttggagcctggctctgtttgtgccgtctttggtctgggaggagtcggattggcagttatcatgggctgtaaagtggctggtgcttcccggatcattggtgtggacatcaataaagataaatttgcaagggccaaagagtttggagccactgaatgtattaaccctcaggatttwagtaaacccatccaggaagtgctcattgagatgaccgatggaggagtggactattcctttgaatgtattggtaatgtgaaggtcatgagagcagcacttgaggcatgtcacaagggctggggcgtcagcgtcgtggttggagtagctgcttcaggtgaagaaattgccactcgtccattccagctggtaacaggtcgcacatggaaaggcactgcctttggaggatggaagagtgtagaaagtgtcccaaagytggtstctgaatatatgtccaaaaagataaaagttgatgaatttgtgactcacaatctgtcttttgatgaaatcaacaaagcctttgaactgatgcattctggaaagagcattcgaactgttgtaaagatttaattcaaaagagaaaaataatgtccatcctgtcgtgatgtgataggagcagcttaacaggcagggagaagcgcctccaacctcacagcctcgtagagcttcacagctactccagaaaatagggttatgtgtgtcattcatgaatctctataatcaaggacaaggataattcagtcatgaacctgttttctggaygctcctccacataaataattgctagyttattaaggaatattttaacataataaaagtaatttctacatttgtgtggaaattgtcttgttttatgctgtcatcattgtcacggtttgtctgcccattatcttcattctgcaagggaaagggaaaggaagcagggcagtggtgggtgtctgaaacctcagaaacataacgttgaacttttaagggtctcagtccccrttgattaaagaacagatcctagccatcagtgacaaagttaatcaggacccaagtctgcttctgtgatattatcttkaagggaggtactgtgccttgttcatacctgtaccccaaattcctaggatggcatctgcccttcagggggcactaaaatgtattattgaaacagcattctgggcttaaataggtgtatgtatgtgttggttgtgactgtactatttctagtatagtgaactacatactgaatatccaagttctcagcacctacttttgtcaaatcttaacattttgccacttygagatcacattgccattcctcccctccagaggtaacaattatccacaatttgatgtttakcattcctgtgttgttgtactttcactgtgtataacctaaaccatctactctttagtactgttttatatatttttaagcctcatacttgctcattctacagcttttttcaytcattattgtataattatatctgaagctctcgttcattaattttagtcctgtgtagcagaattcaattacgggaactaccrtaatttatctgttctccagttgaaggcatgaagttgttgccagtttctgtattataacactgtagtggaacattcttctgcattgggctcactgcgtgttacctaagacgtatcacagaataaacacatttagccttatagacattgccaaattgctcttcaaagtaaatgtgagtttttgtgaattacatgagtatggaatggtgttttattatgactttagtttgcattttcctcaattctcgttaaatccttcattctaatggacattttattgtgaagaacctgttcatatcctgtgctcaactttgtattgaattatttttctctgaataatttttaggagttcttttattctagacatcaatcatttgtcagttttatatgttgcaaatatcttctagtctatcttgtgacttttctttttactttatggtattttgttgaataaagttttaatgtagtcacataaa

SEQ ID NO: 7267 - DNA, 2313 bp, Homo sapiens
tcgccggcgagtgcaccctggaacgcacaacttagcrgcacgcaccacagctcgagcaccgcccttccggttggagccattgcaagccccccccacgccccgcccccctcgctaggcgctcgccacgcccatgcctccgtcgctgcgcggcccaccccggatgtcagccccccgcgccgaccagaatccgtgaacatggcgaacgaggttatcaagtgcaaggctgcagttgcttgggaggctggaaagcctctctccatagaggagatagaggtggcacccccaaaggctcatgaagttcgaatcaagatcattgccactgcggtttgccacaccgatgcctataccctgagtggagctgatcctgagggttgttttccagtgatcttgggacatgaaggtgctggaattgtggaaagtgttggtgagggagttactaagctgaaggcgggtgacactgtcatcccactttacatcccacagtgtggagaatgcaaattttgtctaaatcctaaaactaacctttgccagaagataagagtcactcaagggaaaggattaatgccagatggtaccagcagatttacttgcaaaggaaagacaattttgcattacatgggaaccagcacattttctgaatacacagttgtggctgatatctctgttgctaaaatagatcctttagcacctttgkataaagtctgccttctaggttgtggcatttcaaccggttatggtgctgctgtgaacactgccaagttggagcctggctctgtttgtgccgtctttggtctgggaggagtcggattggcagttatcatgggctgtaaagtggctggtgcttcccggatcattggtgtggacatcaataaagataaatttgcaagggccaaagagtttggagccactgaatgtattaaccctcaggatttwagtaaacccatccaggaagtgctcattgagatgaccgatggaggagtggactattcctttgaatgtattggtaatgtgaaggtcatgagagcagcacttgaggcatgtcacaagggctggggcgtcagcgtcgtggttggagtagctgcttcaggtgaagaaattgccactcgtccattccagctggtaacaggtcgcacatggaaaggcactgcctttggaggatggaagagtgtagaaagtgtcccaaagytggtstctgaatatatgtccaaaaagataaaagttgatgaatttgtgactcacaatctgtcttttgatgaaatcaacaaagcctttgaactgatgcattctggaaagagcattcgaactgttgtaaagatttaattcaaaagagaaaaataatgtccatcctgtcgtgatgtgataggagcagcttaacaggcagggagaagcgcctccaacctcacagcctcgtagagcttcacagctactccagaaaatagggttatgtgtgtcattcatgaatctctataatcaaggacaaggataattcagtcatgaacctgttttctggaygctcctccacataaataattgctagyttattaaggaatattttaacataataaaagtaatttctacatttgtgtggaaattgtcttgttttatgctgtcatcattgtcacggtttgtctgcccattatcttcattctgcaagggaaagggaaaggaagcagggcagtggtgggtgtctgaaacctcagaaacataacgttgaacttttaagggtctcagtccccrttgattaaagaacagatcctagccatcagtgacaaagttaatcaggacccaagtctgcttctgtgatattatcttkaagggaggtactgtgccttgttcatacctgtaccccaaattcctaggatggcatctgcccttcagggggcactaaaatgtattattgaaacagcattctgggcttaaataggtgtatgtatgtgttggttgtgactgtactatttctagtatagtgaactacatactgaatatccaagttctcagcacctacttttgtcaaatcttaacattttgccacttygagatcacattgccattcctcccctccagagtttgcattttcctcaattctcgttaaatccttcattctaatggacattttattgtgaagaacctgttcatatcctgtgctcaactttgtattgaattatttttctctgaataatttttaggagttcttttattctagacatcaatcatttgtcagttttatatgttgcaaatatcttctagtctatcttgtgacttttctttttactttatggtattttgttgaataaagttttaatgtagtcacat

SEQ ID NO: 7268 - DNA, 1156 bp, Homo sapiens
tcgccggcgagtgcaccctggaacgcacaacttagcrgcacgcaccacagctcgagcaccgcccttccggttggagccattgcaagccccccccacgccccgcccccctcgctaggcgctcgccacgcccatgcctccgtcgctgcgcggcccaccccggatgtcagccccccgcgccgaccagaatccgtgaacatggcgaacgaggttatcaagtgcaaggctgcagttgcttgggaggctggaaagcctctctccatagaggagatagaggtggcacccccaaaggctcatgaagttcgaatcaagatcattgccactgcggtttgccacaccgatgcctataccctgagtggagctgatcctgagggttgttttccagtgatcttgggacatgaaggtgctggaattgtggaaagtgttggtgagggagttactaagctgaaggcgggtgacactgtcatcccactttacatcccacagtgtggagaatgcaaattttgtctaaatcctaaaactaacctttgccagaagataagagtcactcaagggaaaggattaatgccagatggtaccagcagatttacttgcaaaggaaagacaattttgcattacatgggaaccagcacattttctgaatacacagttgtggctgatatctctgttgctaaaatagatcctttagcacctttgkataaagtctgccttctaggttgtggcatttcaaccggttatggtgctgctgtgaacactgccaagttggagcctggctctgtttgtgccgtctttggtctgggaggagtcggattggcagttatcatgggctgtaaagtggctggtgcttcccggatcattggtgtggacatcaataaagataaatttgcaagggccaaagagtttggagccactgaatgtattaaccctcaggatttwagtaaacccatccaggaagtgctcattgagatgaccgatggaggagtggactattcctttgaatgtattggtaatgtgaaggtcatgagagcagcacttgaggcatgtcacaagggctggggcgtcagcgtcgtggttggagtagctgcttcaggtgaagaaattgccactcgtccattccagctggtaacaggtcgcacatggaaaggcactgcctttggag

SEQ ID NO: 7269 - DNA, 2110 bp, Homo sapiens
atgcactcaagcagagaagaaatccacaaagactcacagtctgctggtgggcagagaagacagaaacgacatgagcacagcaggaaaagtaatcaaatgcaaagcagctgtgctatgggaggtaaagaarcccttttccattgaggatgtggaggttgcacctcctaaggcttatgaagttcgcattaagatggtggctgtaggaatctgtcrcacagatgaccacgtggttagtggcaamctggtgaccccccttcctgtgattttaggccatgaggcagccggcatcgtggagagtgttggagaaggggtgactacagtcaaaccaggtgataaagtcatcccgctctttactcctcagtgtggaaaatgcagagtttgtaaaaacccggagagcaactactgcttgaaaaatgatctaggcaatcctcgggggaccctgcaggatggcaccaggaggttcacctgcagggggaagcccattcaccacttccttggcaccagcaccttctcccagtacacggtggtggatgagaatgcagtggccaaaattgatgcagcctcgcmcctggagaaagtctgcctcattggctgtggattctcgactggttatgggtctgcagttaacgttgccaaggtcaccccaggctctacctgtgctgtgtttggcctgggaggggtyggcctatctgctgttatgggctgtaaagcagctggagcagccagaatcattgckgtggacatcaacaaggacaaatttgcaaaggccaaagagttgggtgccactgaatgcatcaaccctcaagactacaagaaacccatycaggaagtgctaaaggaaatgactgatggaggtgtggatttttcgtttgaagtcatcggtcggcttgacaccatgatggcttccctgttatgttgtcatgaggcatgtggcacaagcgtcatcgtaggggtacctcctgcttcccagaacctctcaataaaccctatgctgctactgactggacgcacctggaagggggctgtttatggtggctttaagagtaaagaaggtatcccaaaacttgtggctgattttatggctaagaagttttcactggatgcgttaataacccatgttttaccttttgaaaaaataaatgaaggatttgacctgcttcactctgggaaaagtatcygtaccgtcctgacgttttgaggcaatagagatgccttcccctgtagcagtcttcagcctcctctaccctacragatctggagcaacagctaggaaatatcattaattcagctcttcagagatgttatcaataaattacacatgggggctttccaaagaaatggaaattgatgggaaattatttttcaggaaaatttaaaattcaagtgagaagtaaataaagtgttgaacatcagctggggaattgaagccaacaaaccttccttcttaaccattctactgtgtcacctttgccattgagtcatcgaatcccagtggaggggacccttttacttgccctgaacatacacatgctgggccattgtgattgaagtcttctaactctgtctcagttttcactgtcgacattttcctttttctaataaaaatgtaccaaatccctggggtaaaagctagggtaaggtaaaggatagactcacatttacaagtagtgaaggtccragagttctaaatacaggaaatttyttaggaactcaaataaaatgccccacattttactacagtaaatggcagtgtttttatgacttttatactatttctttatggtcgatatacaattgattttttaaaataatagcagatttcttgcttcatatgacaaagcctcaattactaattgtaaaaactgaactattcccagaatcatgttcaaaaaatctgtaatttttgctgatgaaagtgcttcattgactaaacagtattagtttgtggctataaatgattatttagatgatgactgaaaatgtgtataaagtaattaaaagtaatatggtggctttaagtgtagagatgggatggcaaatgctgtgaatgcagaattagatatatatatacacatacatatatacacatatacaaatgtatatttttgca

SEQ ID NO: 7270 - DNA, 3040 bp, Homo sapiens
atgcactcaagcagagaagaaatccacaaagactcacagtctgctggtgggcagagaagacagaaacgacatgagcacagcaggaaaagtaatcaaatgcaaagcagctgtgctatgggaggtaaagaarcccttttccattgaggatgtggaggttgcacctcctaaggcttatgaagttcgcattaagatggtggctgtaggaatctgtcrcacagatgaccacgtggttagtggcaamctggtgaccccccttcctgtgattttaggccatgaggcagccggcatcgtggagagtgttggagaaggggtgactacagtcaaaccaggtgataaagtcatcccgctctttactcctcagtgtggaaaatgcagagtttgtaaaaacccggagagcaactactgcttgaaaaatgatctaggcaatcctcgggggaccctgcaggatggcaccaggaggttcacctgcagggggaagcccattcaccacttccttggcaccagcaccttctcccagtacacggtggtggatgagaatgcagtggccaaaattgatgcagcctcgcmcctggagaaagtctgcctcattggctgtggattctcgactggttatgggtctgcagttaacgttgccaaggtcaccccaggctctacctgtgctgtgtttggcctgggaggggtyggcctatctgctgttatgggctgtaaagcagctggagcagccagaatcattgckgtggacatcaacaaggacaaatttgcaaaggccaaagagttgggtgccactgaatgcatcaaccctcaagactacaagaaacccatycaggaagtgctaaaggaaatgactgatggaggtgtggatttttcgtttgaagtcatcggtcggcttgacaccatgatggcttccctgttatgttgtcatgaggcatgtggcacaagcgtcatcgtaggggtacctcctgcttcccagaacctctcaataaaccctatgctgctactgactggacgcacctggaagggggctgtttatggtggctttaagagtaaagaaggtatcccaaaacttgtggctgattttatggctaagaagttttcactggatgcgttaataacccatgttttaccttttgaaaaaataaatgaaggatttgacctgcttcactctgggaaaagtatcygtaccgtcctgacgttttgaggcaatagagatgccttcccctgtagcagtcttcagcctcctctaccctacragatctggagcaacagctaggaaatatcattaattcagctcttcagagatgttatcaataaattacacatgggggctttccaaagaaatggaaattgatgggaaattatttttcaggaaaatttaaaattcaagtgagaagtaaataaagtgttgaacatcagctggggaattgaagccaacaaaccttccttcttaaccattctactgtgtcacctttgccattgaggaaaaatattcctgtgacttcttgcatttttggtatcttcataatctttagtcatcgaatcccagtggaggggacccttttacttgccctgaacatacacatgctgggccattgtgattgaagtcttctaactctgtctcagttttcactgtcgacattttcctttttctaataaaaatgtaccaaatccctggggtaaaagctagggtaaggtaaaggatagactcacatttacaagtagtgaaggtccragagttctaaatacaggaaatttyttaggaactcaaataaaatgccccacattttactacagtaaatggcagtgtttttatgacttttatactatttctttatggtcgatatacaattgattttttaaaataatagcagatttcttgcttcatatgacaaagcctcaattactaattgtaaaaactgaactattcccagaatcatgttcaaaaaatctgtaatttttgctgatgaaagtgcttcattgactaaacagtattagtttgtggctataaatgattatttagatgatgactgaaaatgtgtataaagtaattaaaagtaatatggtggctttaagtgtagagatgggatggcaaatgctgtgaatgcagaatgtaaaattggtaactaagaaatggcacaaacaccttaagcaatatattttcctagtagatatatatatacacatacatatatacacatatacaaatgtatatttttgcaaaattgttttcaatctagaacttttctattaactaccatgtcttaaaatcaagtctataatcctagcattagtttaatattttgaatatgtaaagacctgtgttaatgctttgttaatgcttttcccactctcatttgttaatgctttcccactctcaggggaaggatttgcattttgagctttatctctaaatgtgacatgcaaagattattcctggtaaaggaggtagctgtctccaaaaatgctattgttgcaatatctacattctatttcatattatgaaagaccttagacataaagtaaaatagtttatcatttactgtgtgatcttcagtaagtctctcaggctctctgagcttgttcatcctttgttttgaaaaaattactcaaccaatccattacagcttaaccaagattaaatgggatgatgttaatgaaagagcttcgccaattaagaagggccatgtaaatgtgggtaacctgattgttttgtcaaaaatgctaaagcggggtggggggtggcgcagtggcttatccctgtaatcccagcactttgggaggtcaagacgggtggatgacctgaggtcaggagtttgagaccagcctggtcaacatggtgaaaccccatctctactaaaaatacaaaaattwgccaggcatggtggcaggtggctgtaatcccagctactcaggaggctgaggcaagagaatcgctggagcctgggaggcggaggttgcagtgagcagaaatcttgccactgcacagcagcctaggcgacaagagcaaaactctgtcaaaagaaaagaaaagaaaatgctgaag

SEQ ID NO: 7271 - DNA, 2161 bp, Homo sapiens
atgcactcaagcagagaagaaatccacaaagactcacagtctgctggtgggcagagaagacagaaacgacatgagcacagcaggaaaagtaatcaaatgcaaagcagctgtgctatgggaggtaaagaarcccttttccattgaggatgtggaggttgcacctcctaaggcttatgaagttcgcattaagatggtggctgtaggaatctgtcrcacagatgaccacgtggttagtggcaamctggtgaccccccttcctgtgattttaggccatgaggcagccggcatcgtggagagtgttggagaaggggtgactacagtcaaaccaggtgataaagtcatcccgctctttactcctcagtgtggaaaatgcagagtttgtaaaaacccggagagcaactactgcttgaaaaatgatctaggcaatcctcgggggaccctgcaggatggcaccaggaggttcacctgcagggggaagcccattcaccacttccttggcaccagcaccttctcccagtacacggtggtggatgagaatgcagtggccaaaattgatgcagcctcgcmcctggagaaagtctgcctcattggctgtggattctcgactggttatgggtctgcagttaacgttgccaaggtcaccccaggctctacctgtgctgtgtttggcctgggaggggtyggcctatctgctgttatgggctgtaaagcagctggagcagccagaatcattgckgtggacatcaacaaggacaaatttgcaaaggccaaagagttgggtgccactgaatgcatcaaccctcaagactacaagaaacccatycaggaagtgctaaaggaaatgactgatggaggtgtggatttttcgtttgaagtcatcggtcggcttgacaccatgatggcttccctgttatgttgtcatgaggcatgtggcacaagcgtcatcgtaggggtacctcctgcttcccagaacctctcaataaaccctatgctgctactgactggacgcacctggaagggggctgtttatggtggctttaagagtaaagaaggtatcccaaaacttgtggctgattttatggctaagaagttttcactggatgcgttaataacccatgttttaccttttgaaaaaataaatgaaggatttgacctgcttcactctgggaaaagtatcygtaccgtcctgacgttttgaggcaatagagatgccttcccctgtagcagtcttcagcctcctctaccctacragatctggagcaacagctaggaaatatcattaattcagctcttcagagatgttatcaataaattacacatgggggctttccaaagaaatggaaattgatgggaaattatttttcaggaaaatttaaaattcaagtgagaagtaaataaagtgttgaacatcagctggggaattgaagccaacaaaccttccttcttaaccattctactgtgtcacctttgccattgaggaaaaatattcctgtgacttcttgcatttttggtatcttcataatctttagtcatcgaatcccagtggaggggacccttttacttgccctgaacatacacatgctgggccattgtgattgaagtcttctaactctgtctcagttttcactgtcgacattttcctttttctaataaaaatgtaccaaatccctggggtaaaagctagggtaaggtaaaggatagactcacatttacaagtagtgaaggtccragagttctaaatacaggaaatttyttaggaactcaaataaaatgccccacattttactacagtaaatggcagtgtttttatgacttttatactatttctttatggtcgatatacaattgattttttaaaataatagcagatttcttgcttcatatgacaaagcctcaattactaattgtaaaaactgaactattcccagaatcatgttcaaaaaatctgtaatttttgctgatgaaagtgcttcattgactaaacagtattagtttgtggctataaatgattatttagatgatgactgaaaatgtgtataaagtaattaaaagtaatatggtggctttaagtgtagagatgggatggcaaatgctgtgaatgcagaattagatatatatatacacatacatatatacacatatacaaatgtatatttttgca

SEQ ID NO: 7272 - DNA, 2106 bp, Homo sapiens
atgtgaaggcacaagctgctgttayatacaacagagtgaactgagcatcagtcagaaaaagtctatgtttgcagaaatacagatccaagacaaagacaggatgggcactgctggaaaagttattaaatgcaaagcagctgtgctttgggagcagaagcaacccttctccattgaggaaatagaagttgccccaccaaagactaaagaagttcgcattaagattttggccacaggaatctgtcgcacagatgaccatgtgataaaaggaacaatggtgtccaagtttccagtgattgtgggacatgaggcaactgggattgtagagagcattggagaagsagtgactacagtgaaaccaggtgacaaagtcatccctctctttctgccacaatgtagagaatgcaatgcttgtcgcaacccagatggcaacctttgcattaggagcgatattactggtcrtggagtactggctgatggcaccaccagatttacatgcaagggcaaaccagtmcaccacttcatgaacaccagtacatttaccgagtacacagtggtggatgaatcttctgttgctaagattgatgatgcagctcctcctgagaaagtctgtttaattggctgtgggttttccactggatatggcgctgctgttaaaactggcaaggtcaaacctggttccacttgcgtcgtctttggcctgggaggagttggcctgtcagtcatcatgggctgtaagtcagctggtgcatctagratcattgggattgacctcaacraagacaaatttgagaaggccatggctgtaggtgccactgagtgtatcagtcccaaggactctaccaaacccatcagtgaggtgctgtcagaaatgacaggcaacaacgtgggatacacctttgaagttattgggcatcttgaaaccatgattgatgccctggcatcctgccacatgaactatgggaccagcgtggttgtaggagttcctccatcagccaagatgctcacctatgacccgatgttgctcttcactggacgcacatggaagggatgtgtctttggaggtttgaaaagcagagatgatgtcccaaaactagtgactgagttcctggcaaagaaatttgacctggaccagttgataactcatrttttaccatttaaaaaaatcagtgaaggatttgagctgctcaattcaggacaaagcattcgaacggtcctgacgttttgagatccaaagtggcargaggtctgtgttgtcatggtgaactggagtttctcttgtgagagttccctcatctgaaatcatgtatctgtctcacaaatacaagcataagtagaagatttgttgaagacatagaacccttataaagaattattaacctttataaacatttaaagtcttgtgagcacctgggaattagtataataacaatgttaatatttttgatttacattttgtaaggctayaattgtatcttttaagaaaacatacacttggatttctatgttgaaatggagatttttaagagttttaaccagctgctgcagatatatawctcaaaacagatatagcgtataaagatatagtaaatgcatctccyagagtaatattcacttaacacattgaaactattattttttagatttgaatataaatgtattttttaaacacttgttatgagttaasttggattacattttgaaatcagttcattccatgatgcatattactggattagattaagaaagacagaaaagattaagggacgggcacatttttcaacgattaagaatcatcattacataacttggtgaaactgaaaaagtatatcatatgggtacacaaggctatttgccagcatatattaatattttagaaaatattccttttgtaatactgaatataaacatagagctagartcatattatcatacttatcataatgttcaatttgatacagtagaattgcaagtccytaagtccctattcactgtgcttagtagtgactccatttaataaaaagtgtttttagtttttaacaactacactgatgtatctatatatatctataacatgttaaaaattcttaagaaaattaaaaattatat

SEQ ID NO: 7273 - DNA, 3260 bp, Homo sapiens
ctggtttgtgaagtgcggaaaaccagagtcatgtcgggattcgacgatcctggcattttctacagcgacagcttcgggggcgacgcccaggccgacgaggggcaggcccgcaaatcgcagctgcagaggcgcttcaaggagttcctgcggcagtaccgagtgggcaccgaccgcacgggcttcaccttcaaatacagggatgaactcaagcggcattacaacctgggggagtactggattgaggtggagatggaggatctggccagctttgatgaggacctggccgactacttgtacaagcagccagccgagcacctgcagctgctggaggaagctgccaaggaggtagctgatgaggtgacccggccccggccttctggggaggaggtgctccaggacatccaggtcatgctcaaktcggacgccagcccttccascattcgtagcctgaagtcggacatgatgtcacacctgstgaagatccctggcatcatcatcgcggcctctgcggtccgtgccaaggccacccgcatctctatccagtgccgcagctgccgcaacaccctcascaacattgccatgcgccctggcctygagggctatgccctgcccaggaagtgcaacacagatcaggctgggcgccccaaatgcccattggacccgtacttcatcatgcccgacaaatgcaaatgcgtggacttccagaccctgaagctgcaggagctgcctgatgcagtcccccacggggagatgcccagacacatgcagctctactgcgacaggtacctgtgtgacaaggtcrtccctgggaacagggttaccatcatgggcatctactccatcaagaagtttggcctgacyaccagyaggggccgtgacagggtgggcgtgggcatccgaagctcctacatccgtgtcctgggcatccaggtggacacagatggctctggccgcagctttgctggggccgtgagcccccaggaggaggaggagttccgtcgcctggctgccctcccaaatgtctatgaggtyatctccaagagcatcgccccctccatctttgggggcacagacatgaagaaggccattgcctgcctgctctttgggggctcccgaaagaggctccctgatggacttactcgccgaggagacatcaacctgctgatgctaggggaccctgggacagccaagtcccagcttctgaagtttgtggagaagtgttctcccattggggtatacacgtctgggaaaggcagcagcgcagctggactgacagcctcggtgatgagggacccttcgtcccggaatttcatcatggagggcggagccatggtcctggccgatggtggggtcgtctgtattgacgagtttgacaagatgcgagaagatgaccgtgtggcaatccacgaagccatggagcagcagaccatctctatcgccaaggctgggatcaccaccaccctgaactcccgctgctccgtcctggctgctgccaactcagtgttcggccgctgggatgagacgaagggggaggacaacattgacttcatgcccaccatcttgtcgcgcttcgacatgatcttcatcgtcaaggatgagcacaatgaggagagggatgtgatgctggccaagcatgtcatcactctgcacgtgagcgcactgacacagacacaggctgtggagggcgagattgacctggccaagctgaagaagtttattgcctactgccgagtgaartgtggcccccggctgtcagcagaggctgcagagaaactgaagaaccgctacatcatcatgcggagcggggcccgtcagcacgagagggacagtgaccgccgctccagcatccccatcactgtgcggcagctggaggccattgtgcgcatcgcggaagccctcagcaagatgaagctgcagcccttcgccacagaggcagatgtggaggaggccctgcggctcttccaagtgtccacgttggatgctgccttgtccggtaccctgtcaggggtggagggcttcaccagccaggaggaccaggagatgctgagccgcatcgagaagcagctcaagcgccgctttgccattggctcccaggtgtctgagcacagcatcatcaaggacttcaccaagcagaaatacccggagcacgccatccacaaggtgctgcagctcatgctgcggcgcggcgagatccagcatcgcatgcagcgcaaggttctctaccgcctcaagtgagtcgcrccgcctcactggactcatggactcgcccacgcctcgcccctcctgccgctgcctgccattgacaatgttgctgkgacctctgcctccccactgcagccctcgaacttcccaggcaccctcctttctgccccagaggaaggagctgtagtgtcctgctgcctctgggcgcccgcctctagcgcggttctgggaagtgtgcttttggcatccgttaataataaagccmcggtgtgttcaggwatctgtgggtttgtgcactcggtgacctgtcacctccatcgtgccctcatggcagggtaagtgtgagggaacagggtctggaggcagactggccagggtttctgacttggatctgccactcagacttstgggtaagtcacgtgacttgagtgctccggtttcttcatctgtttagcggggctcataaagccactcccttgatgctgggaatccagtgagaccagggagtggggaagcgcttctcaaagtgtgtgattttgatccgcctcacctgttccccagtaacttattggggggctgcgagccgtggtgcggcggtcagactgcctggattcatggaccctctccatgccttagtttccttatctgtaagcaggctgatactagaacctgcttcacagggttgtgcttagggtcagtgagcagctgttagtgaggggaatgtagtggccaccaggcaggaactaggactccagccagttctttcctggtgggccacgtgtaactgtgtggccttgggcgagacatttcacttttctgtgcctgagtttatcagtaaactggagatggggggattcctcaccctgagttgtgaggattgaatgacagaaggcactagtgacagtgatgctggaggaaggagtgttgccaagtgcctcggtcactttgcctaatttcagaargtcactctgagttggtatgttttgtgtttttaaaaaagctaggattcataaaattaaatagaaatcagtgaaataaaatatttgatatttaaaata

SEQ ID NO: 7274 - DNA, 1674 bp, Homo sapiens
tatcctgtctcctcaatcaggcctgcaccaccctggcacactcggtgcccttttctgacttactcttcggggcctggctcaggctgttcttccttgggctagaggctgtctctgtccaagaactcccattgtcccagctccccrgctgcctcacttctccatgcccacaggggtggagggcttcaccagccaggaggaccaggagatgctgagccgcatcgagaagcagctcaagcgccgctttgccattggctcccaggtgtctgagcacagcatcatcaaggacttcaccaagcaggtgagcctgccttggagtgggggtgtgagccggcacggggtgcaggtcttctgctggttcccacccactcagcactggcatcttactcagcagacaggccctgaacgggggtaggatggacaactgtccctttctcagaccttttctagccatcattccttccctagggacatcttcatcaggagcagggatgggggtattttttctgtcccacgaaggggaggggagagcagaggtggttggattctgaaatacccggagcacgccatccacaaggtgctgcagctcatgctgcggcgcggcgagatccagcatcgcatgcagcgcaaggttctctaccgcctcaagtgagtcgcrccgcctcactggactcatggactcgcccacgcctcgcccctcctgccgctgcctgccattgacaatgttgctgkgacctctgcctccccactgcagccctcgaacttcccaggcaccctcctttctgccccagaggaaggagctgtagtgtcctgctgcctctgggcgcccgcctctagcgcggttctgggaagtgtgcttttggcatccgttaataataaagccmcggtgtgttcaggwatctgtgggtttgtgcactcggtgacctgtcacctccatcgtgccctcatggcagggtaagtgtgagggaacagggtctggaggcagactggccagggtttctgacttggatctgccactcagacttstgggtaagtcacgtgacttgagtgctccggtttcttcatctgtttagcggggctcataaagccactcccttgatgctgggaatccagtgagaccagggagtggggaagcgcttctcaaagtgtgtgattttgatccgcctcacctgttccccagtaacttattggggggctgcgagccgtggtgcggcggtcagactgcctggattcatggaccctctccatgccttagtttccttatctgtaagcaggctgatactagaacctgcttcacagggttgtgcttagggtcagtgagcagctgttagtgaggggaatgtagtggccaccaggcaggaactaggactccagccagttctttcctggtgggccacgtgtaactgtgtggccttgggcgagacatttcacttttctgtgcctgagtttatcagtaaactggagatggggggattcctcaccctgagttgtgaggattgaatgacagaaggcactagtgacagtgatgctggaggaaggagtgttgccaagtgcctcggtcactttgcctaatttcagaargtcactctgagttggtatgttttgtgtttttaaaaaagctaggattcataaaattaaatagaaatcagtgaaataaaatatttgatatttaaaata

SEQ ID NO: 7275 - DNA, 3313 bp, Homo sapiens
tttttcccgcgaaactcggcggctgagcgtggaggttcttgtctcccctggtttgtgaagtgcggaaaaccagaggcgcagtcatgtcgggattcgacgatcctggcattttctacagcgacagcttcgggggcgacgcccaggccgacgaggggcaggcccgcaaatcgcagctgcagaggcgcttcaaggagttcctgcggcagtaccgagtgggcaccgaccgcacgggcttcaccttcaaatacagggatgaactcaagcggcattacaacctgggggagtactggattgaggtggagatggaggatctggccagctttgatgaggacctggccgactacttgtacaagcagccagccgagcacctgcagctgctggaggaagctgccaaggaggtagctgatgaggtgacccggccccggccttctggggaggaggtgctccaggacatccaggtcatgctcaaktcggacgccagcccttccascattcgtagcctgaagtcggacatgatgtcacacctgstgaagatccctggcatcatcatcgcggcctctgcggtccgtgccaaggccacccgcatctctatccagtgccgcagctgccgcaacaccctcascaacattgccatgcgccctggcctygagggctatgccctgcccaggaagtgcaacacagatcaggctgggcgccccaaatgcccattggacccgtacttcatcatgcccgacaaatgcaaatgcgtggacttccagaccctgaagctgcaggagctgcctgatgcagtcccccacggggagatgcccagacacatgcagctctactgcgacaggtacctgtgtgacaaggtcrtccctgggaacagggttaccatcatgggcatctactccatcaagaagtttggcctgacyaccagyaggggccgtgacagggtgggcgtgggcatccgaagctcctacatccgtgtcctgggcatccaggtggacacagatggctctggccgcagctttgctggggccgtgagcccccaggaggaggaggagttccgtcgcctggctgccctcccaaatgtctatgaggtyatctccaagagcatcgccccctccatctttgggggcacagacatgaagaaggccattgcctgcctgctctttgggggctcccgaaagaggctccctgatggacttactcgccgaggagacatcaacctgctgatgctaggggaccctgggacagccaagtcccagcttctgaagtttgtggagaagtgttctcccattggggtatacacgtctgggaaaggcagcagcgcagctggactgacagcctcggtgatgagggacccttcgtcccggaatttcatcatggagggcggagccatggtcctggccgatggtggggtcgtctgtattgacgagtttgacaagatgcgagaagatgaccgtgtggcaatccacgaagccatggagcagcagaccatctctatcgccaaggctgggatcaccaccaccctgaactcccgctgctccgtcctggctgctgccaactcagtgttcggccgctgggatgagacgaagggggaggacaacattgacttcatgcccaccatcttgtcgcgcttcgacatgatcttcatcgtcaaggatgagcacaatgaggagagggatgtgatgctggccaagcatgtcatcactctgcacgtgagcgcactgacacagacacaggctgtggagggcgagattgacctggccaagctgaagaagtttattgcctactgccgagtgaartgtggcccccggctgtcagcagaggctgcagagaaactgaagaaccgctacatcatcatgcggagcggggcccgtcagcacgagagggacagtgaccgccgctccagcatccccatcactgtgcggcagctggaggccattgtgcgcatcgcggaagccctcagcaagatgaagctgcagcccttcgccacagaggcagatgtggaggaggccctgcggctcttccaagtgtccacgttggatgctgccttgtccggtaccctgtcaggggtggagggcttcaccagccaggaggaccaggagatgctgagccgcatcgagaagcagctcaagcgccgctttgccattggctcccaggtgtctgagcacagcatcatcaaggacttcaccaagcagaaatacccggagcacgccatccacaaggtgctgcagctcatgctgcggcgcggcgagatccagcatcgcatgcagcgcaaggttctctaccgcctcaagtgagtcgcrccgcctcactggactcatggactcgcccacgcctcgcccctcctgccgctgcctgccattgacaatgttgctgkgacctctgcctccccactgcagccctcgaacttcccaggcaccctcctttctgccccagaggaaggagctgtagtgtcctgctgcctctgggcgcccgcctctagcgcggttctgggaagtgtgcttttggcatccgttaataataaagccmcggtgtgttcaggwatctgtgggtttgtgcactcggtgacctgtcacctccatcgtgccctcatggcagggtaagtgtgagggaacagggtctggaggcagactggccagggtttctgacttggatctgccactcagacttstgggtaagtcacgtgacttgagtgctccggtttcttcatctgtttagcggggctcataaagccactcccttgatgctgggaatccagtgagaccagggagtggggaagcgcttctcaaagtgtgtgattttgatccgcctcacctgttccccagtaacttattggggggctgcgagccgtggtgcggcggtcagactgcctggattcatggaccctctccatgccttagtttccttatctgtaagcaggctgatactagaacctgcttcacagggttgtgcttagggtcagtgagcagctgttagtgaggggaatgtagtggccaccaggcaggaactaggactccagccagttctttcctggtgggccacgtgtaactgtgtggccttgggcgagacatttcacttttctgtgcctgagtttatcagtaaactggagatggggggattcctcaccctgagttgtgaggattgaatgacagaaggcactagtgacagtgatgctggaggaaggagtgttgccaagtgcctcggtcactttgcctaatttcagaargtcactctgagttggtatgttttgtgtttttaaaaaagctaggattcataaaattaaatagaaatcagtgaaataaaatatttgatatttaaaata

SEQ ID NO: 7276 - DNA, 1273 bp, Homo sapiens
atggcggccgctgcacaatcccgggttgtctgggccctgccaatgtcacattctgccattactgcaatagccacatccgtgtgtcacagcccactccattgccagcttcatcatgccctcatacctcatgggaaaggtgaatgttcctcaagtcagtgggattgtggccactgggtttggagcaacaggattcctgggccgatgtgttgtcaaccaccttggacgcgtggggtcacaggtgatcataccctatcggtgtgatacatgtgacatcatgcaccttcgtcccatgggagacctgggctagcttctgtttctggaatgggacgcgagagataaagattctatctgacgagtagtggaacacagcaatgtggtcataaatcttgttggacgagactgggaaaccaaaaactttgattttgaggatgtttttgtgaagattccccaagcaattgctcaggtgtccaaggaagctgaagttggaaaattcattcatgttgcacatctgaatgtgaatattaaaagctcttctagatatttgagaaagaaggctgttggagagaaagcagtgagagacacatttccagaagccattatcgtaaagctgttggacatctttggaagagaggatagattccttaattattttgcaaatatgtgttggtttggtgctataccccttgtttccttgggctggaaggcagttaaacaaccagtatacgtcgtagatgtatccaaaggaattgttaatgcagttaaggatcctgatgccaatgggaaaacctttgctttcgttgggccaaatcgatatctcctctttgacctggtgaagtacatctttgctgtggctcacagcaaaggggtacttcctcccgtaccccttgccaccttttgcctatcagtgggtagcaagagactttgaaataagcccatttgagtcctggacaacaagggataaagtggagcgtattcacatcacagacatgaccttgtctcacctgccyrgcttagaagaccttggtattcaggcaacaccactggaactcaaggccattgaggtgctgcggcttcatcacacttactgctggctgtctgctgaaattgaggatgtgaagctggccaagaccgtcaacatttagtgcctcccgagcaactcttggttttggtgtcttttgggtcagcccgtgtggtttgagcacccagccaggtggtctctttagagaatcctgtacacagtgaataagatcccaccattaaaacatttgaggtt

SEQ ID NO: 7277 - DNA, 1893 bp, Homo sapiens
gagattacaggcatgcgccaccacgcctggctaattttgtatttttagtagagacgaggtttctccatgttggtcaggctggtctcgaactcccgacctccggtgatccgcccgcctcgacgtcccaaactgctgggattacaggcgtgaaccaccgcgcccggctcaggagatttcctacagctcaaaatttgtaaggcaaagagatggccacaaaccttgtgagagtggatggggagcgacctcggctctcttagtcccgcctggcccactagacactgcactgcatggtagaggccccgcccgacccagccccttaatcggcctgttgcaatcactatcaacccgccaattctggccccgcccctgtcttccgggttcaccctctcacttcctgcgggtcccaggctcaggcccctcctccgccttgtttggagcaatccaatcgaacctggagggctccgctccgccctatgccgcgctcccctcctccacgagcaatgagaatcagctcaggccccgcccccgcttccgcmcgcctagaccacgccccttcttcatttggccaatcaggcagtccactggcccccgccccctaatgccccgccccgtcagcacttatccctgagctgcttctgccgttgcatcttcgggactccgccccgcgcgcggacctgcagccatggcagtcaccgcccaggcagcccgcaggaaggagcgcgtcctctgcctgtttgacgtggacgggaccctcacgccggctcgccagaaaattgaccctgaggtggccgccttcctgcagaagctacgaagtagagtgcagatcggtgtggtgggcggctctgactactgtaagatcgctgagcagctgggtgacggggatgaagtcattgagaagtttgattatgtgtttgccgagaacgggacggtgcagtataagcacggacgactgctctccaagcagaccatccagaaccacctgggggaggagctgctgcaggacttgatcaacttctgcctcagctacatggccctgctcaggctgcccaagaagcgtggaaccttcatcgagttccggaatggcatgctgaacatctcgcccatcggccggagctgcaccctggaggagaggatcgagttctccgaactggacaagaaagagaagatccgggagaagttmgtggaagccctgaaaacagagtttgctggcaaagggctgaggttctctcgaggaggcatgatcagctttgacgtcttccccgagggctgggacaagcgctactgcctggatagcctggaccaggacagcttcgacaccatccacttctttgggaacgagactagccctggtgggaacgactttgagatctttgccgacccccggactgttggccacagcgtggtgtctcctcaggacacggtgcagcgatgccgggagattttcttcccagagacagctcatgaggcgtgaccggggcccacatctgtgtgtcgtgacttctgaagagtttggcctaggcctaaagagaggtcctggtgttggatagatgccagggcccctcctctggcccaggacgcctgctgcaagcccacccagatggggccagagtctgtgtggacaaccgtccccagccagtctgctcctagtggcactggcttcgtcctcccagggcccagagtgttccccatgctccacctggtggcccaggccacagctgctgcttgtatttcggtacagaagaggtttctttctgcaccaggaggaggcgtgctcaagtatcggtacgagatctagcctgccctgcctgcctgccctgggcgatgaggtacggtggggaaggtgcctattttagagaactttgtcacagtattaaagttcccagaacaaagtag

SEQ ID NO: 7278 - DNA, 1772 bp, Homo sapiens
gagattacaggcatgcgccaccacgcctggctaattttgtatttttagtagagacgaggtttctccatgttggtcaggctggtctcgaactcccgacctccggtgatccgcccgcctcgacgtcccaaactgctgggattacaggcgtgaaccaccgcgcccggctcaggagatttcctacagctcaaaatttgtaaggcaaagagatggccacaaaccttgtgagagtggatggggagcgacctcggctctcttagtcccgcctggcccactagacactgcactgcatggtagaggccccgcccgacccagccccttaatcggcctgttgcaatcactatcaacccgccaattctggccccgcccctgtcttccgggttcaccctctcacttcctgcgggtcccaggctcaggcccctcctccgccttgtttggagcaatccaatcgaacctggagggctccgctccgccctatgccgcgctcccctcctccacgagcaatgagaatcagctcaggccccgcccccgcttccgcmcgcctagaccacgccccttcttcatttggccaatcaggcagtccactggcccccgccccctaatgccccgccccgtcagcacttatccctgagctgcttctgccgttgcatcttcgggactccgccccgcgcgcggacctgcagccatggcagtcaccgcccaggcagcccgcaggaaggagcgcgtcctctgcctgtttgacgtggacgggaccctcacgccggctcgccagaaaattgaccctgaggtggccgccttcctgcagaagctacgaagtagagtgcagatcggtgtggtgggcggctctgactactgtaagatcgctgagcagctgggtgacggggatgaagtcattgagaagtttgattatgtgtttgccgagaacgggacggtgcagtataagcacggacgactgctctccaagcagaccatccagaaccacctgggggaggagctgctgcaggacttgatcaacttctgcctcagctacatggccctgctcaggctgcccaagaagcgtggaaccttcatcgagttccggaatggcatgctgaacatctcgcccatcggccggagctgcaccctggaggagaggatcgagttctccgaactggacaagaaagagaagatccgggagaagttmgtggaagccctgaaaacagagtttgctggcaaagggctgaggttctctcgaggaggcatgatcagctttgacgtcttccccgagggctgggacaagcgctactgcctggatagcctggaccaggacagcttcgacaccatccacttctttgggaacgagactagccctggtgggaacgactttgagatctttgccgacccccggactgttggccacagcgtggtgtctcctcaggacacggtgcagcgatgccgggagattttcttcccagagacagctcatgaggcgtgaccggggcccacatctgtgtgtcgtgacttctgaagagtttggcctaggcctaaagagaggtcctggtgttggatagatgccagggcccctcctctggcccaggacgcctgctgcaagcccacccagatggggccagagtctgtgtggacaaccgtccccagccagtctgctcctagtggcactggcttcgtcctcccagggcccagagtgttccccatggaggtttctttctgcaccaggaggaggcgtgctcaagtatcggtacgagatctagcctgccctgcctgcctgccctgggcga

SEQ ID NO: 7279 - DNA, 3061 bp, Homo sapiens
aatgcgacctcatctttgtcagtgcacaaaatggcgccctacagcctactggtgactcggctgcagaaagctctgggtgtgcggcagtaccatgtggcctcagtcctgtgccaacgggccaaggtggcgatgagccaytttgagcccaacgagtacatccattatgacctgctagagaagaacattaacattgttcgcaaacgactgaaccggccgctgacmctctcggagaagattgtgtatggacacctggatgaccccgccagccaggaaattgagcgaggcaagtcgtacctgcggctgcggccggaccgtgtggccatgcaggatgcgacggcccagatggccatgctccagttcatcagcagcgggctgtccaaggtggctgtgccatccaccatccactgtgaccatctgattgaagcccaggttgggggcgagaaagacctgcgccgggccaaggacatcaaccaggaagtttataatttcctggcaactgcaggtgccaartatggcgtgggcttctggaagcctggatctggaatcattcaccagattattctggaaaactatgcgtaccctggtgttcttctgattggcactgactcccacacccccaatggtggcggccttgggggcatctgcattggagttgggggtgcmgatgctgtggatgtcatggctgggatcccctgggagytgaagtgccccaaggtgattggcgtgaagctgacgggctctctctccggttggtcctcacccaaagatgtgatcctgaaggtggcaggcatcctcacggtgaaaggtggcacaggtgcaatcgtggaataccacgggcctggtgtagactccatctcctgcactggcatggcgacaatctgcaacatgggtgcagaaattggggccaccacttccgtgttcccttacaaccacaggatgaagaagtacctgagcaagaccggccgggaagacattgccaatctagctgatgaattcaaggatcacttggtgcctgaccctggctgccattatgaccaactaattgaaattaacctcagtgagctgaagccacacatcaatgggcccttcacccctgacctggctcaccctgtggcagaagtgggcaaggtggcagagaaggaaggatggcctctggacatccgagtgggtctaattggtagctgcaccaattcaagctatgaagatatggggcgctcagcagctgtggccaagcaggcactggcccatggcctcaagtgcaagtcccagttcaccatcactccaggttccgagcagatccgcgccaccattgagcgggacggctatgcacagatcttgagggatctgggtggcattgtcctggccaatgcttgtggcccctgcattggccagtgggacaggaaggacatcaagaagkgggagaagaacacaatcgtcacctcctacaacaggaacttcacgggccgcaacgacgcaaaccccgagacccatgcctttgtcacgtccccagagattgtcacagccctggccattgcgggaaccctcaagttcaacccagagaccgactacctgacgggcacggatggcaagaagttcaggctggaggctccggatgcagatgagcttcccaaaggggagtttgacccagggcaggacacctaccagcacccacccaaggacagcagcgggcagcatgtggacgtgagccccaccagccagcgcctgcagctcctggagccttttgacaagtgggatggcaaggacctggaggacctgcagatcctcatcaaggtcaaagggaagtgtaccactgaccacatctcagctgctggcccctggctcaagttccgtgggcacttggataacatctccaacaacctgctcattggtgccatcaacattgaaaacggcaaggccaactccgtgcgcaatgccgtcactcaggagtttggccccgtccctgacactgcccgctactacaagaaacatggcwtcaggtgggtggtgatcggagacgagaactacggcgagggctcgagccgggagcatgcagctctggagcctcgccaccttgggggccgggccatcatcaccaagagctttgccaggatccacgagaccaacctgaagaaacagggcctgytgcctctgaccttcgctgacccggctgactacaacaagattcaccctgtggacaagctgaccattcagggcctgaaggacttcacccctggcaagcccctgaagtgcatcatcaagcaccccaacgggacccaggagaccatcctcctgaaccacaccttcaacgagacgcagattgagtggttccgckctggcagtgccctcaacagaatgaaggaactgcaacagtgagggcagtgcctccccgccccgccgctggcgtcaagttcagctccacgtgtgccatcagtggatcygatccgtccagccatggcttcctattccaagatggtgtgaccagacatgcttcctgctccccgcttagcccacggagtgactgtggttgtggtgggggggttcttaaaataactttttagcccccgtcttcctattttgagtttggttcagatcttaagcagctccatgcaactgtatttatttttgatgacaagactcccatctaaagtttttytcctgcctgatcatttcattggtggctgaaggattytagagaaccttttgttcttgcaaggaaaacaagaatccaaaaccagtgactgttctgtgagtgattggtgtctgtgccgtttgttgtcaagtccagggtccaggaagggtcttttcagtcaaggtcagtggaggcccaacagccacagccacagatggatccatcactgcagtgaaggaggagcagggcctagatggtggaggagcggggcaagctggtgggcactcctggccttgcctcactgtccagctcgagacactatctccttagcatcggcctcagctgctgttgtcttcacagccggccataccaccttcccgcaggctggtaggrtccactgtccagccccagggctagttgctggtccaccag

SEQ ID NO: 7280 - DNA, 1844 bp, Homo sapiens
gcttcggacttatcaggttaccggattcgagtcagaagcggcggcaggtctgaacgcttcgagcccaacacatacagctgatacacgcagaccagatctggtcaggtcctcggaagctgagtccagagcgatgctgctgaagacagtgctcttgctgggacatgtggcccaggtgctgatgctggacaatgggctcctgcagacaccacccatgggctggctggcctgggaacgcttccgctgcaacattaactgtgatgaggacccaaagaactgcataagtgaacagctcttcatggagatggctgaccggatggcacaggatggatggcgggacatgggctacacatacctmaacattgatgactgctggatcggyggtcgcgatgccagtggccgcctgatgccrgatcccaagcgcttccctcatggcattcctttcctggctgactacgttcactccctgggcctgaagttgggtrtctacgcggacatgggcaacttcacctgcatgggttacccaggcaccacactggacaaggtggtccaggatgctcagaccttcgccgagtggaaggtagacatgctcaagctggatggctgcttctccacccccgaggagcgggcccaggggtaccccaagatggctgctgccctgaatgccacaggccgccccatcgccttctcctgcagctggccagcctatkaaggcggcctccccccaagggtgaactacagtctgctggcggacatctgcaacctctggcgtaactatgatgacatccaggactcctggtggagcgtgctctccatcctgaattggttcgtggagcaccaggacatactgcagccagtggccggccctgggcactggaatgaccctgacatgctgctcattgggaactttggtctcagcttagagcaatcccgggcccagatggccctgtggacggtgctggcagcccccctcttgatgtccacagacctgcgtaccatctccgcccagaacatggacattctgcagaatccactcatgatcaaaatcaaccaggatcccttaggcatccagggacgcaggattcacaaggaaaaatctctcatcraagtgtacatgcggcctctgtccaacaaggctagcgccttagtcttcttcagctgcaggaccgatatgccttatcgctaccactcctcccttggccagctgaacttcaccgggtctgtgatatatraggcccaggacgtctactcaggtgacatcatcagtggcctccgagatgaaaccaacttcacagtgatcatcaacccttcaggggtagtgatgtggtacctgtatcccatcaagaacctggagatgtcccagcagtgaggagctgggacmtgtgacaggctgtggtggcaccactgagcctagaccatggagccttggcatgcccagggcaagtggggaggttctctgctccccaggcctgctcggtgactgaccccatcatacccaaagtgcaatctcayggccaggttctatgcccygtccaagcgtaaaccctcttggaaacttcttttggggcaattttcctgtggccttcctggcctctacttccatgtgcgcagccccagactctagcctctgaccttgctgttgactctgaaatcaggatttggaagttttcgaattaggagtagagagatctgacctcttgccaggaatgcccatggatcatgtgattggcttttctacccatagagggccttgcagcctgataccacctgggagtgagggtcacaaaggagaccttggctccctcaggtcaccaataaacctgttctttaatcaagtagttgtaata

SEQ ID NO: 7281 - DNA, 3709 bp, Homo sapiens
gcttcggacttatcaggttaccggattcgagtcagaagcggcggcaggtctgaacgcttcgagcccaacacatacagctgatacacgcagaccagatctggtcaggtcctcggaagctgagtccagagcgatgctgctgaagacagtgctcttgctgggacatgtggcccaggtgctgatgctggacaatgggctcctgcagacaccacccatgggctggctggcctgggaacgcttccgctgcaacattaactgtgatgaggacccaaagaactgcataagtgaacagctcttcatggagatggctgaccggatggcacaggatggatggcgggacatgggctacacatacctmaacattgatgactgctggatcggyggtcgcgatgccagtggccgcctgatgccrgatcccaagcgcttccctcatggcattcctttcctggctgactacgttcactccctgggcctgaagttgggtrtctacgcggacatgggcaacttcacctgcatgggttacccaggcaccacactggacaaggtggtccaggatgctcagaccttcgccgagtggaaggtagacatgctcaagctggatggctgcttctccacccccgaggagcgggcccaggggtaccccaagatggctgctgccctgaatgccacaggccgccccatcgccttctcctgcagctggccagcctatkaaggcggcctccccccaagggtgaactacagtctgctggcggacatctgcaacctctggcgtaactatgatgacatccaggactcctggtggagcgtgctctccatcctgaattggttcgtggagcaccaggacatactgcagccagtggccggccctgggcactggaatgaccctgacatgctgctcattgggaactttggtctcagcttagagcaatcccgggcccagatggccctgtggacggtgctggcagcccccctcttgatgtccacagacctgcgtaccatctccgcccagaacatggacattctgcagaatccactcatgatcaaaatcaaccaggatcccttaggcatccagggacgcaggattcacaaggaaaaatctctcatcraagtgtacatgcggcctctgtccaacaaggctagcgccttagtcttcttcagctgcaggaccgatatgccttatcgctaccactcctcccttggccagctgaacttcaccgggtctgtgatatatraggcccaggacgtctactcaggtgacatcatcagtggcctccgagatgaaaccaacttcacagtgatcatcaacccttcaggggtagtgatgtggtacctgtatcccatcaagaacctggagatgtcccagcagtgaggagctgggacmtgtgacaggctgtggtggcaccactgagcctagaccatggagccttggcatgcccagggcaagtggggaggttctctgctccccaggcctgctcggtgactgaccccatcatacccaaagtgcaatctcayggccaggttctatgcccygtccaagcgtaaaccctcttggaaacttcttttggggcaattttcctgtggccttcctggcctctacttccatgtgcgcagccccacagacgttgctgagcaactcgccagcctcctgagctccatgcccatcaggactctagcctctgaccttgctgttgactctgaaatcaggatttggaagttttcgaattaggagtagagagatctgacctcttgccaggaatgcccatggatcatgtgattggcttttctacccatagagggccttgcagcctgataccacctgggagtgagggtcacaaaggagaccttggctccctcaggtcaccaataaacctgttctttaatcaagtagttgtaatatggacctggggtacctttagttagggactctggtggcactacacggggtgctggattcaaatctcacctctatggatgatgtctggcatcgtctggcccctccttttccaaagtgaccagaagattgtacttcctagagatgccagacttgcctcacacccaggagctgcccctgctgtgcctggtatgctggcagtggtgatggtgacaacacaatgaggccaagtagcaatgctcccaggtcctgcagcttgtgctctgcccagcagtgcccctggcccagcacctcagcctgctcttctctctggtggctccaccccaacccctacttcttttcctttatttctctcccaacctggctgcaaaggaggttcatattccccagatgtgtccacaaacctgtccaggagttgtgtcttaaaattgatttcctgtccctcttcctaaggacaggggtaacagtcaaagtgaaggaatgatgggttcttgcctgtcttgctttggtccgtatttcccaagccctcctcttttagccaaggctacagggcacttgtcttccctggtggctctcccctttggagagagctagtggcagagcaacctagctaggtcctccttgggctttgaatgcaggagcacccagtgccccaggccttgcactgtgctgcccaaggagtattttctgggtggatctcccatactcctcagggttctgaggtccttgtatttagggtatggtgtaaaaacttacatatgcacattttgttacatcatttaagatgattgaagctttactggttaagtayagggtcaccagagaaagttcctttccccagttgatgtcttgaggctgttgagaaacttaggacagaagcctacctcatcccaggcctgcccctccgtgcatagctctgcctttgggtcttgttcatagtgctgttcaggcaaaatggaatagtctcaggwgggaacaccttctcttgctagctccaggaaggctttgtgggaaatgagttgagaccatggacttgggagttgggggccagagttgagcctggacttgaccaattaattcccttacctttcagcccaagatagctacatgtctttacttgctgtataagttttccttttgtcctgggggtgcctgattgatcctatctcttcayccttcattcyttcaacaaacatgccatctatctcccaggacatttattcccttctattcaaggccagttaggaatgcaattattttttttttcagttaaatacagacttgtttggacgcaaggtaccctttctctttttaaaaactttttatcatgaaaactttcaaatacaaaaataaaatggtagagtgaacctccatgtacccagcatccagctccagtaaccatcaatgtgtaccattatttcatctctcttcctgcacatgctcttctgatgtgtgagctagagtatctgaaaggaaatttcagaaaaccctaaaaaccactatgtctctaacagataagggctttaaaaatacatatatgagccgggcgcggtgactcatgcctgtaatcccagcactttgggaggctgaggtaggcggatcacaaggtcaggagattgagaccatcctggctaacacggtgaaaccccatctctattaaaaatacaaaaaattagccgggcatggtggtgggcgcctgtagtcccagccactcgggaggctgaggcaggagaacagcgtgatcctgggaggcggaggttgcagtgagccgagatggcaccaccatactccagcctgggtgacagagccagactccatctc

SEQ ID NO: 7282 - DNA, 4416 bp, Homo sapiens
tgcacaaagccctcaaccgtcctctgcacggccgcttactgagcgcccacggtgagcctggcacgatccttgccctcttggtccccacagaggtggaaggacaggcctcgcggggtccgggccacgaaggacagccccgagtccgttctgccaatgccwgcctcgctagcacgcagggcgggagcccartggggaagggcttagggaggctgggaggccggacccatatgggcrgggcacagcgttgctaggggggattctgataggttgcgcgaagggttgccttcgtgaggccccgccctcactggaacgcttcggacttatcaggttaccggattcgagtcagaagcggcggcaggtctgaacgcttcggtagsataagtgcggtgggagggggctctgcggttttggggagcccagggcgggaacccggacccggctggaagtccggagcctggccgcagccccgcccctccgctctttcttggtgaccttaagccagtggctgcctttttctgagcccgggcggggccgaaggcggcccgtaggccctcgggactcccagcactgcagagggtgtgaggtctgacatccaagacacgttgtttcgtatttctgaaggaagaactsaagctccgggaagtgatggctggggatggggcgggcaacttggggaccgagtgtacgatccacgcctaaggttgagggcggccgagctagccaggcagccgtgaccccagtgcttttcagacgtttcttagcttccagagcccaacacatacagctgatacacgcagaccagatctggtcaggtcctcggaagctgagtccagagcgatgctgctgaagacagtgctcttgctgggacatgtggcccaggtgctgatgctggacaatgggctcctgcagacaccacccatgggctggctggcctgggaacgcttccgctgcaacattaactgtgatgaggacccaaagaactgcataagtgaacagctcttcatggagatggctgaccggatggcacaggatggatggcgggacatgggctacacatacctmaacattgatgactgctggatcggyggtcgcgatgccagtggccgcctgatgccrgatcccaagcgcttccctcatggcattcctttcctggctgactacgttcactccctgggcctgaagttgggtrtctacgcggacatgggcaacttcacctgcatgggttacccaggcaccacactggacaaggtggtccaggatgctcagaccttcgccgagtggaaggtagacatgctcaagctggatggctgcttctccacccccgaggagcgggcccaggggtaccccaagatggctgctgccctgaatgccacaggccgccccatcgccttctcctgcagctggccagcctatkaaggcggcctccccccaagggtgaactacagtctgctggcggacatctgcaacctctggcgtaactatgatgacatccaggactcctggtggagcgtgctctccatcctgaattggttcgtggagcaccaggacatactgcagccagtggccggccctgggcactggaatgaccctgacatgctgctcattgggaactttggtctcagcttagagcaatcccgggcccagatggccctgtggacggtgctggcagcccccctcttgatgtccacagacctgcgtaccatctccgcccagaacatggacattctgcagaatccactcatgatcaaaatcaaccaggatcccttaggcatccagggacgcaggattcacaaggaaaaatctctcatcraagtgtacatgcggcctctgtccaacaaggctagcgccttagtcttcttcagctgcaggaccgatatgccttatcgctaccactcctcccttggccagctgaacttcaccgggtctgtgatatatraggcccaggacgtctactcaggtgacatcatcagtggcctccgagatgaaaccaacttcacagtgatcatcaacccttcaggggtagtgatgtggtacctgtatcccatcaagaacctggagatgtcccagcagtgaggagctgggacmtgtgacaggctgtggtggcaccactgagcctagaccatggagccttggcatgcccagggcaagtggggaggttctctgctccccaggcctgctcggtgactgaccccatcatacccaaagtgcaatctcayggccaggttctatgcccygtccaagcgtaaaccctcttggaaacttcttttggggcaattttcctgtggccttcctggcctctacttccatgtgcgcagccccacagacgttgctgagcaactcgccagcctcctgagctccatgcccatcaggactctagcctctgaccttgctgttgactctgaaatcaggatttggaagttttcgaattaggagtagagagatctgacctcttgccaggaatgcccatggatcatgtgattggcttttctacccatagagggccttgcagcctgataccacctgggagtgagggtcacaaaggagaccttggctccctcaggtcaccaataaacctgttctttaatcaagtagttgtaatatggacctggggtacctttagttagggactctggtggcactacacggggtgctggattcaaatctcacctctatggatgatgtctggcatcgtctggcccctccttttccaaagtgaccagaagattgtacttcctagagatgccagacttgcctcacacccaggagctgcccctgctgtgcctggtatgctggcagtggtgatggtgacaacacaatgaggccaagtagcaatgctcccaggtcctgcagcttgtgctctgcccagcagtgcccctggcccagcacctcagcctgctcttctctctggtggctccaccccaacccctacttcttttcctttatttctctcccaacctggctgcaaaggaggttcatattccccagatgtgtccacaaacctgtccaggagttgtgtcttaaaattgatttcctgtccctcttcctaaggacaggggtaacagtcaaagtgaaggaatgatgggttcttgcctgtcttgctttggtccgtatttcccaagccctcctcttttagccaaggctacagggcacttgtcttccctggtggctctcccctttggagagagctagtggcagagcaacctagctaggtcctccttgggctttgaatgcaggagcacccagtgccccaggccttgcactgtgctgcccaaggagtattttctgggtggatctcccatactcctcagggttctgaggtccttgtatttagggtatggtgtaaaaacttacatatgcacattttgttacatcatttaagatgattgaagctttactggttaagtayagggtcaccagagaaagttcctttccccagttgatgtcttgaggctgttgagaaacttaggacagaagcctacctcatcccaggcctgcccctccgtgcatagctctgcctttgggtcttgttcatagtgctgttcaggcaaaatggaatagtctcaggwgggaacaccttctcttgctagctccaggaaggctttgtgggaaatgagttgagaccatggacttgggagttgggggccagagttgagcctggacttgaccaattaattcccttacctttcagcccaagatagctacatgtctttacttgctgtataagttttccttttgtcctgggggtgcctgattgatcctatctcttcayccttcattcyttcaacaaacatgccatctatctcccaggacatttattcccttctattcaaggccagttaggaatgcaattattttttttttcagttaaatacagacttgtttggacgcaaggtaccctttctctttttaaaaactttttatcatgaaaactttcaaatacaaaaataaaatggtagagtgaacctccatgtacccagcatccagctccagtaaccatcaatgtgtaccattatttcatctctcttcctgcacatgctcttctgatgtgtgagctagagtatctgaaaggaaatttcagaaaaccctaaaaaccactatgtctctaacagataagggctttaaaaatacatatatgagccgggcgcggtgactcatgcctgtaatcccagcactttgggaggctgaggtaggcggatcacaaggtcaggagattgagaccatcctggctaacacggtgaaaccccatctctattaaaaatacaaaaaattagccgggcatggtggtgggcgcctgtagtcccagccactcgggaggctgaggcaggagaacagcgtgatcctgggaggcggaggttgcagtgagccgagatggcaccaccatactccagcctgggtgacagagccagactccatctc

SEQ ID NO: 7283 - DNA, 1089 bp, Homo sapiens
gcttgcaaaggggtggggttgtggagtggatgctttggcaagatggcggggagcggcgtccgccaagytacttctaccgccagcaccttcgtgaagcccattttcagtcgggacatgaacgaggccaagcggagggtgcgcgagctctaccgcgcctggtatcgggaggtgccgaacactgtgcaccaattccagctggacatcactgtgaaaatgggacgggataaagtccgagaaatgtttatgaagaatgcccatgtcacagaccccagggtggttgatcttctggtcattaagggaaagatcgaactggaagaaacaattaaagtatggaagcagcggacacatgttatgcggttcttccatgaaacagaagcgccaaggccaaaggatttcctatccaagttctatgttggccacgatccatgaagtcattcagtggaaagatgcacgttgatactattttagagcacaaataaactcactatacaatggtcactttgtgatagaattccattgatgraccaattttctgcagcctctttttgcctgagcaagtgggaccttggtatacacatcacctgttctttcccttttcttgaaatgtggtgtttgctgtaaattggattgaattatttttctcagagccttgcatgtcagtaaacaggaaggaaggaggccatctgttcaaaaattgtgacattgggcatgaggctggacgacttgttaatgtagttgtttctatagcccctatgattagacacttyagtgtcagggcacagattatctaaaattagccagctcttcctgtcagggatcagggcagcactaacaggcgcaaaagtagagctgtcaagatgggctagttttccttgggttctgaagaaaatggatgtgcaaaggcttggctccgctacttgtaacaagctccagcccttaaaatgaaattaacttcctactcaggcaccctgcttaggtgcacagctgttcaatatacacagagaacagaaatattcctactgtctttggaaaccctggtgtacctctcagtggcagaataaacatcaacacaggttcaagaactgatct

SEQ ID NO: 7284 - DNA, 1656 bp, Homo sapiens
gcygagagtgtcctgcctggtcctctgtgcctggtggggtgggggtgccaggtgtgtccagaggagcccagttggtagtgaggcagccatggggctagaagcactggtgcccctggccatgatagtggccatcttcctgctcctggtggacctgatgcaccggcaccaacgctgggmtgcacgctacccgccaggtcccctgccactgcccgggctgggcaaccttgctgcatgtggacttccagaacacaccatactgcttcgaccagttgcggcgccgcttcggggacgtgttcagcctgcagctggcctggacgccggtggtcgtgctcaatgggctggcggccgtgcgcgaggcgmtggtgacccgcggcgaggacacggccgaccgcccgcctgcgcccatctaccaggtcctgggcttcgggccgcgttcccaaggggtgwtcctgkcgcgctatgggcccgcgtggcgcgagcagaggcgcttctccgtgtccaccttgcgcaacttgggcctgggcaagaagtcgctggagcagtgggtgaccgaggaggccgcctgcctttgtgccgccttcgccgaccaakccggacgcccctttcgccccaacggyctcttggacaaagccgtgagcaacgtgatcgcctccctcacctgcgggcgccgcttcgagtacgacgaccctcgcttcctcaggctgctggacctagctcaggagggayygaaggaggagtcgggcttyctgcgcgaggtgctgaatgctgtccccgtcctccygcacatcccagcgctggctggcaaggtcctacgcttccaaaaggctttcctgacccagctggatgagctgctaactgagcacaggatgacctgggacccagcccagccaccccgagacctgactgaggccttcctggcaragaaggagaaggccaaggggarccctgagagcagcttcaatgatgagaacstgygcatagtggtggstracctgttcyytgccgggatggtgaccacctygaccacgctggcctggggcctcctgctcatgatcctacaycyggatgtgcagctccgtgtccaacaggagatcgacgacgtgatagggcaggtgcggcgaccagagatgggtgaccaggctcrcatgccctrcaccactgccgtgattcaygaggtgcagcrctttggggacatcrtccccctgrgtgtgacccatatgacatcccrtgayatcgaagtacagggcttccgcatccctaagggaacgacactcatcaccaacctgtcatcggtgctgaaggatgaggccgtctggragaagcccttccgcttccaccccgaacacttcctggatgcccagggccactttgtgaagccggaggccttcctgcctttctcagcaggccgccgtgcatgcctcggggagcccctggcccgcatrgagctcttcctcttcttcacctccctgctgcagcacttcagcttctcsgtgsccrcyggacagccccggcccagccactctsgtgtcktyagctttctggtgascccatccccctaygagctttgtgctgtgccccgctagaatggggtacctagtccccagcctgytccctagccagaggctctaatgtacaataaagcaatgtggtagttcc

SEQ ID NO: 7285 - DNA, 1655 bp, Homo sapiens
gctgagagtgtcctgcctggtcctctgtgcctggtggggtgggggtgccaggtgtgtccagaggagcccatttggtagtgaggcaggtatggggctagaagcactggtgcccctggccrtgatagtggccatcttcctgctcctggtggacctgatgcaccggcrccaacgctgggctgcacgctacycaccaggccccctgccactgcccrggctgggcaacctgctgcatgtggacttccagaacacaccatactgcttcgaccagttgcggcgccgcttcggggacgtgttcagcctgcagctggcctggacgccggtggtcgtgctcaatgggctggcggccgtgcgcgaggcgmtggtgacccacggcgaggacacsgccgaccgcccgcctgtgcccatcayccagatcctgggtttygggccgcgttcccaaggggtgttyctggcgcgctatgggcccgcgtggcgcgagcagaggcgcttctccrtstccaccttgcgcaacttgggcctgggcaagaagtcgctggagcagtgggtgaccraggaggccgcctgcctttgtgccgccttcgccaaccactccgracgcccctttcgccccaacggtctcttggacaaagccgtgagcaacgtgatcgcctccctcacctgcgggcgccgcttcgagtacgacgaccctcgcttcctcaggctgctggacctagctcaggagggactgaaggaggagtcgggctttctgcgcgaggtgctgaatgctgtccccgtcctcctgcayatcccagcgctggctggcaaggtcctacgcttccaaaaggctttcctgacccagctggatgagctgctaactgagcacaggatgacctgggacccagcccagccmccccgagacctgactgaggccttcctggcagagatggagaaggccaaggggaaccctgagagcagcttcaatgatgagaacctgygcatagtggtggstracctgttctctgccgggatggtgaccacctygaccacgctggcctggggcctcctgctcatgatcctacatccggatgtgcagcgccgtgtccaacaggagatcgacgacgtgatagggcaggtgcggcgaccagagatgggtgaccaggctcacatgccctacaccactgccgtgattcatgaggtgcagcrctttggggacatcgtccccctgggtgtgacccatatgacatcccgtgacatcgaagtacagggcttccgcatccctaagggaacgacactcatcaccaacctgtcatcggtgctgaaggatgaggccgtctgggagaagcccttccgcttccaccccgaacacttcctggatgcccagggccactttgtgaagccggaggccttcctgcctttctcagcaggccgccgtgcatgcctcggggagcccctggcccgcatggagctcttcctcttcttcacctccctgctgcagcacttcagcttctcggtgcccrctggacagccccggcccagccaccatsgtgtcktygctttcctggtgascccatccccctatgagctttgtgctgtgccccgctagaatggggtacctagtccccagcctgctccctagccagaggctctaatgtacaataaagcaatgtggtagttcc

SEQ ID NO: 7286 - DNA, 1482 bp, Homo sapiens
atggggctggatgcactggtgcccctggcagtgacagtggccatcttcctgctcctggtggacctgatgcagcagcaccaacgctggactgcacgctacccrccaggccccctgccactgcccgggctgggcaacttgctgcatgtggacttccagaacatatacaccttcaaccagctgcggcaccgctttggggacgtgttcagcctgcagctggcctggaygccggtggtcgtgctcaatgggctggcggccgtgcgtgaggctctggtgacctgcggcgargacaccgccgaccgcccgcctgcgcccatctaccaggtcctgggcatcgggccgcgytcccaaggggtgtttctggcacactacggacacgcgtggcgcgagcagaggcgcttctccgtgtccaccttgcgcaacttgggcctgggcaagaagtccctggagcggtgggtgaccgaggaggccgcctgcctctgtgccgccttcgccgaccaagccagacgcccctttcaccccaacggcctcctgaacaaagcggcgagcaacgtgatcgcctccctcacctgcgggygccgcttcgagtacgacgaccctcgcttcmtcagkctactggacctagctcagaagggattgaaggaggarctgggctttcbatgctgaatgttgtccccctcctcctgcgcatcccagggctggctggcaaggtcctacgctcccaaaaggctttcctgacccagctggatgagctgctgaccgagcacagaatgatctgggacccagcctagccaccccgagacctgactgaggccttcctggcagagaaggagaaggccaaggggaaccctgagagcagcttcaatgatgagaacctgcgcatggtggtggctgacctgttctttgccgggatggtgaccacctcgatcacgctggcctggggcctcctgctcatgatcctacgcccggatgtgcagcgccgtgtccaacagatcgacaacgtgatagggcaggtgtggtgaccagagatgggtgaccaggctcrcatgccctrcaccactgccgtgattcaygaggtgcagcgctttggggacatcgtccccctgggtgtgacccatatgacatcccgtgacatcgaagtacagggcttccgcatccctaaggggatgatgctcttcaccaacctgtcatcggtgctgaaggatgaggccgtctggragaagcccttccgcttccaccccgaacacttcctggatgcccagggccactttgtgaagcyggaggccttcctgcctttctcagcaggccgccgtgcatgcctcggggagcccctggcccgcatrgagctcttcctcttcttcacctccctgctgcagcacttcagcttctcggtgcccaccggacagccccggcccagccactctcgtgtcgtcggctttctggtgacgccatccccctatgagctttrwgctgtgccccgctaga

SEQ ID NO: 7287 - DNA, 1445 bp, Homo sapiens
ggattcggaatctcgcccgcagtcgcgcaagcgcgagcggctgtgcgcggtgcgyggtgcgtggtgcgtgatacgagcggcggcacgtggcgcgggtgcggggcgtggagtggcgtggcgtggagtggcgtggcgtggcggggtctcgcggcgcgggcgcgcacccggagctgtggacggagagtgcctccctctggcctcagtttcctcatgttgtagtagcggagcatggcccggaccgggcccccgagaccgccccgtgcaacctcaccgccagcctgggggcctcagcgactgggacgggaccaaggggctcggggattctccctgcccccggccctggtgcgtgactgaccctcctgttcccagagcccccagcgcaggccgggatgttcgtcctggtggaaatggtggacaccgtccggatccccccttggcagtttgagaggaagctcaacgactccattgccgaggagctgaacaagaagttggccaacaaggtcgtgtacaacgtgggactctgcatttgtctgtttgatatcaccaaactggaggatgcctatgtattccctggggatggcgcatcacacaccaaagtccattttcgctgcgtggtgtttcatccattcctagatgagattctcattgggaagatcaaaggctgcagcccagaaggagtgcacgtctctctaggcttcttcgatgacattctcatccccccagagtcactgcagcagccagccaagttcgacgaagcggagcaggtgtgggtgtgggagtacgagacggaggaaggagcacacgacctctacatggacaccggcgaggagatccgcttccgggtggtggacgagagctttgttgacacgtcccccacagggccyagctcagcagatgccaccacttccagtgaggagctgccaaagaaggaggctccgtacacgcttgtgggatccatcagtgagccaggcctgggccttctctcctggtggaccagcaactagccctggggctggacagtggaycctaccagcctgcgggaaggtggtatggccggctgtgaagacaacagcagctgaggccgatgctaaggagatagtgtctcgagctggacagtgaggcaaggccaggagtgcccaccagcttgccccgctcctccaccatctaggccctgctcctccttcactgcagtgatggatccatctgtggctgtggctgttgggcctccactgaccttgactgaaaagacccttcctggaccctggacttgacaacaaacggcacagacaccaatcactcacagaacagtcactggttttggattcttgttttccttgcaagaacaaaaggttctctaraatccttcagccaccaatgaaatgatcaggcaggaraaaaactttagatgggagtcttgtcatcaaaaataaatacagttgcatgga

SEQ ID NO: 7288 - DNA, 1460 bp, Homo sapiens
ggattcggaatctcgcccgcagtcgcgcaagcgcgagcggctgtgcgcggtgcgyggtgcgtggtgcgtgatacgagcggcggcacgtggcgcgggtgcggggcgtggagtggcgtggcgtggagtggcgtggcgtggcggggtctcgcggcgcgggcgcgcacccggagctgtggacggagagtgcctccctctggcctcagtttcctcatgttgtagtagcggagcatggcccggaccgggcccccgagaccgccccgtgcaacctcaccgccagcctgggggcctcagcgactgggacgggaccaaggggctcggggattctccctgcccccggccctggtgcgtgactgaccctcctgttcccagagcccccagcgcaggccgggatgttcgtcctggtggaaatggtggacaccgtccggatccccccttggcagtttgagaggaagctcaacgactccattgccgaggagctgaacaagaagttggccaacaaggtcgtgtacaacgtgggactctgcatttgtctgtttgatatcaccaaactggaggatgcctatgtattccctggggatggcgcatcacacaccaaagtccattttcgctgcgtggtgtttcatccattcctagatgagattctcattgggaagatcaaaggctgcagcccagaaggagtgcacgtctctctaggcttcttcgatgacattctcatccccccagagtcactgcagcagccagccaagttcgacgaagcggagcaggtgtgggtgtgggagtacgagacggaggaaggagcacacgacctctacatggacaccggcgaggagatccgcttccgggtggtggacgagagctttgttgacacgtcccccacagggccyagctcagcagatgccaccacttccagtgaggagctgccaaagaaggaggctccgtacacgcttgtgggatccatcagtgagccaggcctgggccttctctcctggtggaccagcaactagccctggggctggacagtggaycctaccagcctgcgggaaggtggtatggccggctgtgaagacaacagcagctgaggccgatgctaaggagatagtgtctcgagctggacaaggcaggcaagtcttcagacacgtgttctgtggtcctggtgcttccaccctaaggccacatgggctcaggccaggccttcatcccctcaaaggcctctggctgctcagtctcccttatggggcagaggccgcccaaagttgggacaggtcaatgttcgctcacccttcaggcctcagctgcaagatcagccacagacctcatgctggacacaggagcccaggacatgcctgggtcctggctgatgactgattagtctcttctgtcacaggggtgcctggagaccccttaataagcagcataaataaatatctgacacagattggaggcctctggccacaccaaaa

SEQ ID NO: 7289 - DNA, 1147 bp, Homo sapiens
cgcgcaagcgcgagcggctgtgcgcggtgcgyggtgcgtggtgcgtgatacgagcgagcccccagcgcaggccgggatgttcgtcctggtggaaatggtggacaccgtccggatccccccttggcagtttgagaggaagctcaacgactccattgccgaggagctgaacaagaagttggccaacaaggtcgtgtacaacgtgggactctgcatttgtctgtttgatatcaccaaactggaggatgcctatgtattccctggggatggcgcatcacacaccaaagtccattttcgctgcgtggtgtttcatccattcctagatgagattctcattgggaagatcaaaggctgcagcccagaaggagtgcacgtctctctaggcttcttcgatgacattctcatccccccagagtcactgcagcagccagccaagttcgacgaagcggagcaggtgtgggtgtgggagtacgagacggaggaaggagcacacgacctctacatggacaccggcgaggagatccgcttccgggtggtggacgagagctttgttgacacgtcccccacagggccyagctcagcagatgccaccacttccagtgaggagctgccaaagaaggaggctccgtacacgcttgtgggatccatcagtgagccaggcctgggccttctctcctggtggaccagcaactagccctggggctggacagtggaycctaccagcctgcgggaaggtggtatggccggctgtgaagacaacagcagctgaggccgatgctaaggagatagtgtctcgagctggacaaggcaggcaagtcttcagacacgtgttctgtggtcctggtgcttccaccctaaggccacatgggctcaggccaggccttcatcccctcaaaggcctctggctgctcagtctcccttatggggcagaggccgcccaaagttgggacaggtcaatgttcgctcacccttcaggcctcagctgcaagatcagccacagacctcatgctggacacaggagcccaggacatgcctgggtcctggctgatgactgattagtctcttctgtcacaggggtgcctggagaccccttaataagcagcataaataaatatctgacacagattggaggcctctggccacaccaaaa

SEQ ID NO: 7290 - DNA, 2399 bp, Homo sapiens
ctcacgcgcgctcacggccgcccgcagctgccactggtcccctgcgcccctccgcccgtccccgccgcagcccagtggggctcccagagaccaggacggacgcagccatgtcagagctggtgcctgagcccaggcctaagccagcggtgcccatgaagcccatgagcatcaactccaacctgctgggctacatcggcatcgacaccatcatcgagcagatgcgcaagaagaccatgaagaccggtttcgacttcaacatcatggtcgttggccagagtggactgggcaaatcaacgctggtcaacacgctcttcaaatcccaagtgagccgcaaggcctccagctggaaccgggaggagaagatccccaagacagtggagatcaaagctatcgggcatgtgatagaggaaggcggtgtcaaaatgaagctgaccgtcatcgacaccccaggctttggagaccaaatcaacaatgaaaactgctgggagcccattgagaagtacatcaatgagcagtacgagaagttcctgaaggaggaggtcaacatcgccaggaagaaacgcatccctgacactcgtgtccactgctgcctttacttcatctctcccacaggacactccttgcgacctctggatcttgagttcatgaaacacctcagcaaggttgtgaacatcatccctgtcattgctaaggctgacaccatgaccctggaggagaagtctgaattcaagcaaagggttcgcaaggagcttgaagtaaatggcattgaattctacccccagaaggaatttgatgaggatttggaggataagacrgagaatgacaaaatcaggcaggagagcatgccttttgctgtggtgggaagtgacaaggagtaccaagtgaatggcaagagggtcctcggccgaaaaactccatgggggatcatcgaagtggaaaacctcaaccactgtgagtttgccctgcttcgagactttgtcatcaggacccacctccaggacctcaaggaagtgacacacaacatccactatgagacttacagggccaagcggctcaatgacaatggaggcctccctccgggagaaggcctcctgggcactgtccttccacctgtgccagccaccccctgccccactgctgaatgaaggccatttcaagcgctgcttctcactccattcctctcagctgttattgctgcagggccaagccctttttagtgctgtgctcgtccagctcaccaccacagcccctctcagccctcagtaggtgggaggggccagctgcctctttaggccagttgcatcctccatttatccaaaccactcctctcctcccagtggagtggggttctgccagtacagccctactgcatcatctgcgtcagccggtcctagcccatctgcagggtgaaagaactcatcaagagctccttctgcccttgtaagcccatcccagctacttgtaaccatctctaagggcaatggcattgctccctacccattcatctgcatgagctactcttggcttccttaaagggtcaagaaagcaatttttctgcttactagattcattgagatcagctgtgtgagccccaaagtgggacaagggtgtctccttcattacttaaagatattcatgagggtgggtcactacagatgttggggagcaagggctaggatcactttttaaaaaatcaccacttgtggctgtcccagagtgcggttgtacatcctccccacctcataacgcagccactgaggaagagtggttttcctaagaagacattgctggagttgactttcttctgtccaaacaaacaaacaaaaactaaacacacacacaaacccccagaaacccacaatatgtacacgctaaggaaaaactagcacccttctgtccactcagcaataagagggatctcttcccacctaccctacctactcctacccccaacccccttccccattaatgtgagtaatgaattagcctgaccacaggtggtcactgtaggctaatggaaaatacccaagggagggcaaagccccccatcagatgcatgaatgtttgcgaatgttgactgccactgccccacacactgtgtctttatagaattcccctttgcccaccctcttcctgtctccacctggacacaacttgctcaaaggctggtgacttgtgggccattcatctacaaccaagtcctgatggagcaagaggcccacgcctaggggatgcaagaacaacccgtttcttaaatgttaccagtcccagccaatcttacggtgacattacagttaaatttcccaattgaaaacaagcaaacagacactcaaactggtcctgtaattgttgctagactttatgtgttgtacaactaaacattgctgtttgaacagtaa

SEQ ID NO: 7291 - DNA, 4586 bp, Homo sapiens
ctcacgcgcgctcacggccgcccgcagctgccactggtcccctgcgcccctccgcccgtccccgccgcagcccagtggggctcccagagaccaggacggacgcagccatgtcagagctggtgcctgagcccaggcctaagccagcggtgcccatgaagcccatgagcatcaactccaacctgctgggctacatcggcatcgacaccatcatcgagcagatgcgcaagaagaccatgaagaccggtttcgacttcaacatcatggtcgttggccagagtggactgggcaaatcaacgctggtcaacacgctcttcaaatcccaagtgagccgcaaggcctccagctggaaccgggaggagaagatccccaagacagtggagatcaaagctatcgggcatgtgatagaggaaggcggtgtcaaaatgaagctgaccgtcatcgacaccccaggctttggagaccaaatcaacaatgaaaactgctgggagcccattgagaagtacatcaatgagcagtacgagaagttcctgaaggaggaggtcaacatcgccaggaagaaacgcatccctgacactcgtgtccactgctgcctttacttcatctctcccacaggacactccttgcgacctctggatcttgagttcatgaaacacctcagcaaggttgtgaacatcatccctgtcattgctaaggctgacaccatgaccctggaggagaagtctgaattcaagcaaagggttcgcaaggagcttgaagtaaatggcattgaattctacccccagaaggaatttgatgaggatttggaggataagacrgagaatgacaaaatcaggcaggagagcatgccttttgctgtggtgggaagtgacaaggagtaccaagtgaatggcaagagggtcctcggccgaaaaactccatgggggatcatcgaagtggaaaacctcaaccactgtgagtttgccctgcttcgagactttgtcatcaggacccacctccaggacctcaaggaagtgacacacaacatccactatgagacttacagggccaagcggctcaatgacaatggaggcctccctccggtgagcgtggacacagaggaaagccacgacagtaacccatgacgaccacttctctgtgtcatcacacmtacccacttcacacacacacatcccaaataccaccaccaaccaccttcttcctctcaactctgtcccacaggcctgtctggtatttgtggagcatcttgtctgtgtgtgtgtgtgtgtgtgtgtgtgtgtgtgtgtgtgtgacagagagagagcgagagagcctgtgtgtgtgcatgcaggggtgaggtattttcactgccctccctggagagtcccttgtaagtttggctcctccatgcctgtccattatctgtctcctttccttgtgtcccaaaacaaagctgtttgcctcactcaggagatctgggggaggtttcatttaaaagtgctgggagcaggtgagccacaggcaactcttctctcggaacctgcacacaaactggggctayagagattctccaaggacagatggcagtggagctagacctgagtagggggcagggagttcaggacaaccctcctgtaagttgggggtggtctgggggtaaggctggggcttcctgggaaaaggaaggccatgagaaggcagagaagtaggccagagctgggttcttgcagaaagcatcagtgcctacaaatggagctccacccttcagtctgtgtcgtgttcagtgtcacaaagctaccacctgtcaccagagcctactgctgctctccactcaactggcctctgctgccaggccactgcctgtctctgcttccgactttgtcttctttctccctttccctccttccctcatacattgctttctctccctctcctgcgtgtctctgacatctctcacttccttttagatgaatctactttaggttcattcctatatttagcatttatgcccagtctacttccagaaatgactttagactgcctttcacataaaatcacaaaactacaggacagtacaaacagattgccagagaaatctgggtcaaagaaaggaataggaaagaaagtttctgtagtcaagcacctgaacaggccctgagctcacaggcagccaatgtaaagagggaaacacagtgagttatgcagttcccagtgtccagttaaaggaagcacacatgctagtcatgtgagacaaccttttattgggacatcaggttctagaactaattctaaagaagtatcagaaacaatatacataatttgtctttcttagtaatttggcttcaaagacaaatttttgaccacacctccgttttctccgtcagacttctctcccttctaagcaggcttctctgttgctccatttgcttcatacatacttgacctctcttttctattccccatcacttttgtgctgaagctaatcatatttatgtctgtctttctctacttttccctaattccctctcctcctgactcctgtagacattcccaatgatacccaccgtcatacatttaggcttttcttgcctttccctgaagccctgtatttattaatgcatatatttcccctgcttgttgtacaagtaagttactcttttcctttaatctgtaagattcatgaaattcggggccagggaaacagtttagccttagggaagggaaaacactaagtgaaactgtttacaataacctcatacaaccttctgtcccatctcctggttcagcctaggtgtttcactggtcctctatgaatcccagcacttataatcccagtcttttatcactcaggtgctaggaaaaaaaacatagactcaagacccaagattcaatggaccaggagaaaggggggcggtgatcaggtcaccagtgaccccaacctatgstctcggtctttcctggaggctgccaacccagccctcatcctcccttgctcacaaagttacagggtaggcacctgtcaggacagaacagcagcagcgctacagcccagaggttatacatttcaacagaacagggatccttggctactgtagaagcagtcctgtatggagaccttggaccagcaggggaagatctatgggcatgggaggtgggcgttggaaaggctgagtaggaatggtgcctggcacccctraaccatgatctgagcctccctggagaaggtattttatatgtctgctgccagctgctggtctccacaccctcaaccgttctcaacccccctgcagggagaaggcctcctgggcactgtccttccacctgtgccagccaccccctgccccactgctgaatgaaggccatttcaagcgctgcttctcactccattcctctcagctgttattgctgcagggccaagccctttttagtgctgtgctcgtccagctcaccaccacagcccctctcagccctcagtaggtgggaggggccagctgcctctttaggccagttgcatcctccatttatccaaaccactcctctcctcccagtggagtggggttctgccagtacagccctactgcatcatctgcgtcagccggtcctagcccatctgcagggtgaaagaactcatcaagagctccttctgcccttgtaagcccatcccagctacttgtaaccatctctaagggcaatggcattgctccctacccattcatctgcatgagctactcttggcttccttaaagggtcaagaaagcaatttttctgcttactagattcattgagatcagctgtgtgagccccaaagtgggacaagggtgtctccttcattacttaaagatattcatgagggtgggtcactacagatgttggggagcaagggctaggatcactttttaaaaaatcaccacttgtggctgtcccagagtgcggttgtacatcctccccacctcataacgcagccactgaggaagagtggttttcctaagaagacattgctggagttgactttcttctgtccaaacaaacaaacaaaaactaaacacacacacaaacccccagaaacccacaatatgtacacgctaaggaaaaactagcacccttctgtccactcagcaataagagggatctcttcccacctaccctacctactcctacccccaacccccttccccattaatgtgagtaatgaattagcctgaccacaggtggtcactgtaggctaatggaaaatacccaagggagggcaaagccccccatcagatgcatgaatgtttgcgaatgttgactgccactgccccacacactgtgtctttatagaattcccctttgcccaccctcttcctgtctccacctggacacaacttgctcaaaggctggtgacttgtgggccattcatctacaaccaagtcctgatggagcaagaggcccacgcctaggggatgcaagaacaacccgtttcttaaatgttaccagtcccagccaatcttacggtgacattacagttaaatttcccaattgaaaacaagcaaacagacactcaaactggtcctgtaattgttgctagactttatgtgttgtacaactaaacattgctgtttgaacagtaa

SEQ ID NO: 7292 - DNA, 2605 bp, Homo sapiens
ggcagcggcggcggctggcggcggcggcaacggtgcgcgcggacaggggcggcgcggcgccgagcgagccgaggcgaggtcccggggagggcgcggcggcgcggggcgcaggggcggcgcggcggggccgcgggccgggcgggtgggaggagagcgcgaaggggcgaggcccgtttgcaggggccgctcggcccggggaagcccgcgccccgctcagccttgcagccccgcgcccggagcatctccctggaggaacggagacaaaggaggattcatgtccaaagggctcccagagaccaggacggacgcagccatgtcagagctggtgcctgagcccaggcctaagccagcggtgcccatgaagcccatgagcatcaactccaacctgctgggctacatcggcatcgacaccatcatcgagcagatgcgcaagaagaccatgaagaccggtttcgacttcaacatcatggtcgttggccagagtggactgggcaaatcaacgctggtcaacacgctcttcaaatcccaagtgagccgcaaggcctccagctggaaccgggaggagaagatccccaagacagtggagatcaaagctatcgggcatgtgatagaggaaggcggtgtcaaaatgaagctgaccgtcatcgacaccccaggctttggagaccaaatcaacaatgaaaactgctgggagcccattgagaagtacatcaatgagcagtacgagaagttcctgaaggaggaggtcaacatcgccaggaagaaacgcatccctgacactcgtgtccactgctgcctttacttcatctctcccacaggacactccttgcgacctctggatcttgagttcatgaaacacctcagcaaggttgtgaacatcatccctgtcattgctaaggctgacaccatgaccctggaggagaagtctgaattcaagcaaagggttcgcaaggagcttgaagtaaatggcattgaattctacccccagaaggaatttgatgaggatttggaggataagacrgagaatgacaaaatcaggcaggagagcatgccttttgctgtggtgggaagtgacaaggagtaccaagtgaatggcaagagggtcctcggccgaaaaactccatgggggatcatcgaagtggaaaacctcaaccactgtgagtttgccctgcttcgagactttgtcatcaggacccacctccaggacctcaaggaagtgacacacaacatccactatgagacttacagggccaagcggctcaatgacaatggaggcctccctccgggagaaggcctcctgggcactgtccttccacctgtgccagccaccccctgccccactgctgaatgaaggccatttcaagcgctgcttctcactccattcctctcagctgttattgctgcagggccaagccctttttagtgctgtgctcgtccagctcaccaccacagcccctctcagccctcagtaggtgggaggggccagctgcctctttaggccagttgcatcctccatttatccaaaccactcctctcctcccagtggagtggggttctgccagtacagccctactgcatcatctgcgtcagccggtcctagcccatctgcagggtgaaagaactcatcaagagctccttctgcccttgtaagcccatcccagctacttgtaaccatctctaagggcaatggcattgctccctacccattcatctgcatgagctactcttggcttccttaaagggtcaagaaagcaatttttctgcttactagattcattgagatcagctgtgtgagccccaaagtgggacaagggtgtctccttcattacttaaagatattcatgagggtgggtcactacagatgttggggagcaagggctaggatcactttttaaaaaatcaccacttgtggctgtcccagagtgcggttgtacatcctccccacctcataacgcagccactgaggaagagtggttttcctaagaagacattgctggagttgactttcttctgtccaaacaaacaaacaaaaactaaacacacacacaaacccccagaaacccacaatatgtacacgctaaggaaaaactagcacccttctgtccactcagcaataagagggatctcttcccacctaccctacctactcctacccccaacccccttccccattaatgtgagtaatgaattagcctgaccacaggtggtcactgtaggctaatggaaaatacccaagggagggcaaagccccccatcagatgcatgaatgtttgcgaatgttgactgccactgccccacacactgtgtctttatagaattcccctttgcccaccctcttcctgtctccacctggacacaacttgctcaaaggctggtgacttgtgggccattcatctacaaccaagtcctgatggagcaagaggcccacgcctaggggatgcaagaacaacccgtttcttaaatgttaccagtcccagccaatcttacggtgacattacagttaaatttcccaattgaaaacaagcaaacagacactcaaactggtcctgtaattgttgctagactttatgtgttgtacaactaaacattgctgtttgaacagtaa

SEQ ID NO: 7293 - DNA, 4508 bp, Homo sapiens
ggctcccagagaccaggacggacgcagccatgtcagagctggtgcctgagcccaggcctaagccagcggtgcccatgaagcccatgagcatcaactccaacctgctgggctacatcggcatcgacaccatcatcgagcagatgcgcaagaagaccatgaagaccggtttcgacttcaacatcatggtcgttggccagagtggactgggcaaatcaacgctggtcaacacgctcttcaaatcccaagtgagccgcaaggcctccagctggaaccgggaggagaagatccccaagacagtggagatcaaagctatcgggcatgtgatagaggaaggcggtgtcaaaatgaagctgaccgtcatcgacaccccaggctttggagaccaaatcaacaatgaaaactgctgggagcccattgagaagtacatcaatgagcagtacgagaagttcctgaaggaggaggtcaacatcgccaggaagaaacgcatccctgacactcgtgtccactgctgcctttacttcatctctcccacaggacactccttgcgacctctggatcttgagttcatgaaacacctcagcaaggttgtgaacatcatccctgtcattgctaaggctgacaccatgaccctggaggagaagtctgaattcaagcaaagggttcgcaaggagcttgaagtaaatggcattgaattctacccccagaaggaatttgatgaggatttggaggataagacrgagaatgacaaaatcaggcaggagagcatgccttttgctgtggtgggaagtgacaaggagtaccaagtgaatggcaagagggtcctcggccgaaaaactccatgggggatcatcgaagtggaaaacctcaaccactgtgagtttgccctgcttcgagactttgtcatcaggacccacctccaggacctcaaggaagtgacacacaacatccactatgagacttacagggccaagcggctcaatgacaatggaggcctccctccggtgagcgtggacacagaggaaagccacgacagtaacccatgacgaccacttctctgtgtcatcacacmtacccacttcacacacacacatcccaaataccaccaccaaccaccttcttcctctcaactctgtcccacaggcctgtctggtatttgtggagcatcttgtctgtgtgtgtgtgtgtgtgtgtgtgtgtgtgtgtgtgtgtgacagagagagagcgagagagcctgtgtgtgtgcatgcaggggtgaggtattttcactgccctccctggagagtcccttgtaagtttggctcctccatgcctgtccattatctgtctcctttccttgtgtcccaaaacaaagctgtttgcctcactcaggagatctgggggaggtttcatttaaaagtgctgggagcaggtgagccacaggcaactcttctctcggaacctgcacacaaactggggctayagagattctccaaggacagatggcagtggagctagacctgagtagggggcagggagttcaggacaaccctcctgtaagttgggggtggtctgggggtaaggctggggcttcctgggaaaaggaaggccatgagaaggcagagaagtaggccagagctgggttcttgcagaaagcatcagtgcctacaaatggagctccacccttcagtctgtgtcgtgttcagtgtcacaaagctaccacctgtcaccagagcctactgctgctctccactcaactggcctctgctgccaggccactgcctgtctctgcttccgactttgtcttctttctccctttccctccttccctcatacattgctttctctccctctcctgcgtgtctctgacatctctcacttccttttagatgaatctactttaggttcattcctatatttagcatttatgcccagtctacttccagaaatgactttagactgcctttcacataaaatcacaaaactacaggacagtacaaacagattgccagagaaatctgggtcaaagaaaggaataggaaagaaagtttctgtagtcaagcacctgaacaggccctgagctcacaggcagccaatgtaaagagggaaacacagtgagttatgcagttcccagtgtccagttaaaggaagcacacatgctagtcatgtgagacaaccttttattgggacatcaggttctagaactaattctaaagaagtatcagaaacaatatacataatttgtctttcttagtaatttggcttcaaagacaaatttttgaccacacctccgttttctccgtcagacttctctcccttctaagcaggcttctctgttgctccatttgcttcatacatacttgacctctcttttctattccccatcacttttgtgctgaagctaatcatatttatgtctgtctttctctacttttccctaattccctctcctcctgactcctgtagacattcccaatgatacccaccgtcatacatttaggcttttcttgcctttccctgaagccctgtatttattaatgcatatatttcccctgcttgttgtacaagtaagttactcttttcctttaatctgtaagattcatgaaattcggggccagggaaacagtttagccttagggaagggaaaacactaagtgaaactgtttacaataacctcatacaaccttctgtcccatctcctggttcagcctaggtgtttcactggtcctctatgaatcccagcacttataatcccagtcttttatcactcaggtgctaggaaaaaaaacatagactcaagacccaagattcaatggaccaggagaaaggggggcggtgatcaggtcaccagtgaccccaacctatgstctcggtctttcctggaggctgccaacccagccctcatcctcccttgctcacaaagttacagggtaggcacctgtcaggacagaacagcagcagcgctacagcccagaggttatacatttcaacagaacagggatccttggctactgtagaagcagtcctgtatggagaccttggaccagcaggggaagatctatgggcatgggaggtgggcgttggaaaggctgagtaggaatggtgcctggcacccctraaccatgatctgagcctccctggagaaggtattttatatgtctgctgccagctgctggtctccacaccctcaaccgttctcaacccccctgcagggagaaggcctcctgggcactgtccttccacctgtgccagccaccccctgccccactgctgaatgaaggccatttcaagcgctgcttctcactccattcctctcagctgttattgctgcagggccaagccctttttagtgctgtgctcgtccagctcaccaccacagcccctctcagccctcagtaggtgggaggggccagctgcctctttaggccagttgcatcctccatttatccaaaccactcctctcctcccagtggagtggggttctgccagtacagccctactgcatcatctgcgtcagccggtcctagcccatctgcagggtgaaagaactcatcaagagctccttctgcccttgtaagcccatcccagctacttgtaaccatctctaagggcaatggcattgctccctacccattcatctgcatgagctactcttggcttccttaaagggtcaagaaagcaatttttctgcttactagattcattgagatcagctgtgtgagccccaaagtgggacaagggtgtctccttcattacttaaagatattcatgagggtgggtcactacagatgttggggagcaagggctaggatcactttttaaaaaatcaccacttgtggctgtcccagagtgcggttgtacatcctccccacctcataacgcagccactgaggaagagtggttttcctaagaagacattgctggagttgactttcttctgtccaaacaaacaaacaaaaactaaacacacacacaaacccccagaaacccacaatatgtacacgctaaggaaaaactagcacccttctgtccactcagcaataagagggatctcttcccacctaccctacctactcctacccccaacccccttccccattaatgtgagtaatgaattagcctgaccacaggtggtcactgtaggctaatggaaaatacccaagggagggcaaagccccccatcagatgcatgaatgtttgcgaatgttgactgccactgccccacacactgtgtctttatagaattcccctttgcccaccctcttcctgtctccacctggacacaacttgctcaaaggctggtgacttgtgggccattcatctacaaccaagtcctgatggagcaagaggcccacgcctaggggatgcaagaacaacccgtttcttaaatgttaccagtcccagccaatcttacggtgacattacagttaaatttcccaattgaaaacaagcaaacagacactcaaactggtcctgtaattgttgctagactttatgtgttgtacaactaaacattgctgtttgaacagtaa

SEQ ID NO: 7294 - DNA, 4574 bp, Homo sapiens
ctcacgcgcgctcacggccgcccgcagctgccactggtcccctgcgcccctccgcccgtccccgccgcagcccagtggggctcccagagaccaggacggacgcagccatgtcagagctggtgcctgagcccaggcctaagccagcggtgcccatgaagcccatgagcatcaactccaacctgctgggctacatcggcatcgacaccatcatcgagcagatgcgcaagaagaccatgaagaccggtttcgacttcaacatcatggtcgttggccagagtggactgggcaaatcaacgctggtcaacacgctcttcaaatcccaagtgagccgcaaggcctccagctggaaccgggaggagaagatccccaagacagtggagatcaaagctatcgggcatgtgatagaggaaggcggtgtcaaaatgaagctgaccgtcatcgacaccccaggctttggagaccaaatcaacaatgaaaactgctgggagcccattgagaagtacatcaatgagcagtacgagaagttcctgaaggaggaggtcaacatcgccaggaagaaacgcatccctgacactcgtgtccactgctgcctttacttcatctctcccacaggacactccttgcgacctctggatcttgagttcatgaaacacctcagcaaggttgtgaacatcatccctgtcattgctaaggctgacaccatgaccctggaggagaagtctgaattcaagcaaaggcttgaagtaaatggcattgaattctacccccagaaggaatttgatgaggatttggaggataagacrgagaatgacaaaatcaggcaggagagcatgccttttgctgtggtgggaagtgacaaggagtaccaagtgaatggcaagagggtcctcggccgaaaaactccatgggggatcatcgaagtggaaaacctcaaccactgtgagtttgccctgcttcgagactttgtcatcaggacccacctccaggacctcaaggaagtgacacacaacatccactatgagacttacagggccaagcggctcaatgacaatggaggcctccctccggtgagcgtggacacagaggaaagccacgacagtaacccatgacgaccacttctctgtgtcatcacacmtacccacttcacacacacacatcccaaataccaccaccaaccaccttcttcctctcaactctgtcccacaggcctgtctggtatttgtggagcatcttgtctgtgtgtgtgtgtgtgtgtgtgtgtgtgtgtgtgtgtgtgacagagagagagcgagagagcctgtgtgtgtgcatgcaggggtgaggtattttcactgccctccctggagagtcccttgtaagtttggctcctccatgcctgtccattatctgtctcctttccttgtgtcccaaaacaaagctgtttgcctcactcaggagatctgggggaggtttcatttaaaagtgctgggagcaggtgagccacaggcaactcttctctcggaacctgcacacaaactggggctayagagattctccaaggacagatggcagtggagctagacctgagtagggggcagggagttcaggacaaccctcctgtaagttgggggtggtctgggggtaaggctggggcttcctgggaaaaggaaggccatgagaaggcagagaagtaggccagagctgggttcttgcagaaagcatcagtgcctacaaatggagctccacccttcagtctgtgtcgtgttcagtgtcacaaagctaccacctgtcaccagagcctactgctgctctccactcaactggcctctgctgccaggccactgcctgtctctgcttccgactttgtcttctttctccctttccctccttccctcatacattgctttctctccctctcctgcgtgtctctgacatctctcacttccttttagatgaatctactttaggttcattcctatatttagcatttatgcccagtctacttccagaaatgactttagactgcctttcacataaaatcacaaaactacaggacagtacaaacagattgccagagaaatctgggtcaaagaaaggaataggaaagaaagtttctgtagtcaagcacctgaacaggccctgagctcacaggcagccaatgtaaagagggaaacacagtgagttatgcagttcccagtgtccagttaaaggaagcacacatgctagtcatgtgagacaaccttttattgggacatcaggttctagaactaattctaaagaagtatcagaaacaatatacataatttgtctttcttagtaatttggcttcaaagacaaatttttgaccacacctccgttttctccgtcagacttctctcccttctaagcaggcttctctgttgctccatttgcttcatacatacttgacctctcttttctattccccatcacttttgtgctgaagctaatcatatttatgtctgtctttctctacttttccctaattccctctcctcctgactcctgtagacattcccaatgatacccaccgtcatacatttaggcttttcttgcctttccctgaagccctgtatttattaatgcatatatttcccctgcttgttgtacaagtaagttactcttttcctttaatctgtaagattcatgaaattcggggccagggaaacagtttagccttagggaagggaaaacactaagtgaaactgtttacaataacctcatacaaccttctgtcccatctcctggttcagcctaggtgtttcactggtcctctatgaatcccagcacttataatcccagtcttttatcactcaggtgctaggaaaaaaaacatagactcaagacccaagattcaatggaccaggagaaaggggggcggtgatcaggtcaccagtgaccccaacctatgstctcggtctttcctggaggctgccaacccagccctcatcctcccttgctcacaaagttacagggtaggcacctgtcaggacagaacagcagcagcgctacagcccagaggttatacatttcaacagaacagggatccttggctactgtagaagcagtcctgtatggagaccttggaccagcaggggaagatctatgggcatgggaggtgggcgttggaaaggctgagtaggaatggtgcctggcacccctraaccatgatctgagcctccctggagaaggtattttatatgtctgctgccagctgctggtctccacaccctcaaccgttctcaacccccctgcagggagaaggcctcctgggcactgtccttccacctgtgccagccaccccctgccccactgctgaatgaaggccatttcaagcgctgcttctcactccattcctctcagctgttattgctgcagggccaagccctttttagtgctgtgctcgtccagctcaccaccacagcccctctcagccctcagtaggtgggaggggccagctgcctctttaggccagttgcatcctccatttatccaaaccactcctctcctcccagtggagtggggttctgccagtacagccctactgcatcatctgcgtcagccggtcctagcccatctgcagggtgaaagaactcatcaagagctccttctgcccttgtaagcccatcccagctacttgtaaccatctctaagggcaatggcattgctccctacccattcatctgcatgagctactcttggcttccttaaagggtcaagaaagcaatttttctgcttactagattcattgagatcagctgtgtgagccccaaagtgggacaagggtgtctccttcattacttaaagatattcatgagggtgggtcactacagatgttggggagcaagggctaggatcactttttaaaaaatcaccacttgtggctgtcccagagtgcggttgtacatcctccccacctcataacgcagccactgaggaagagtggttttcctaagaagacattgctggagttgactttcttctgtccaaacaaacaaacaaaaactaaacacacacacaaacccccagaaacccacaatatgtacacgctaaggaaaaactagcacccttctgtccactcagcaataagagggatctcttcccacctaccctacctactcctacccccaacccccttccccattaatgtgagtaatgaattagcctgaccacaggtggtcactgtaggctaatggaaaatacccaagggagggcaaagccccccatcagatgcatgaatgtttgcgaatgttgactgccactgccccacacactgtgtctttatagaattcccctttgcccaccctcttcctgtctccacctggacacaacttgctcaaaggctggtgacttgtgggccattcatctacaaccaagtcctgatggagcaagaggcccacgcctaggggatgcaagaacaacccgtttcttaaatgttaccagtcccagccaatcttacggtgacattacagttaaatttcccaattgaaaacaagcaaacagacactcaaactggtcctgtaattgttgctagactttatgtgttgtacaactaaacattgctgtttgaacagtaa

SEQ ID NO: 7295 - DNA, 1734 bp, Homo sapiens
cctgggcggagcgggaggcggaggcgccgcgtaggcccgggaggccgggccggccgggctgcgagcgcctgccccatgcgccgccgcctctccgcacgatgttcccctcgcggaggaaagcggcgcagctgccctgggaggacggcaggtccgggttgctctccggcggcctccctcggaagtgttccgtcttccacctgttcgtggcctgcctctcgctgggcttcttctccctactctggctgcagctcagctgctctggggacgtggcccgggcagtcaggggacaagggcaggagacctcgggccctccccgygcctgccccccagagccgccccctgagcactgggaagaagacgcatcctggggcccccaccgcctggcagtgctggtgcccttccgcgaacgcttcgaggagctcctggtcttcgtgccccacatgcgccgcttcctgagcaggaagaagatccggcaccacatctacgtgctcaaccaggtggaccacttcaggttcaaccgggcagcgctcatcaacgtgggcttcctggagagcagcaacagcacggactacattgccatgcacgacgttgacctgctccctctcaacgaggagctggactatggctttcctgaggctgggcccttccacgtggmctccccggagctccaccctctctaccactacaagacctatgtcggcggcatcctgctgctctccaagcagcactaccggctgtgcaatgggatgtccaaccgcttctggggctggggccgcgaggacgacgagttctaccggcgcattaagggagctgggctccagcttttccgcccctcgggaatcacaactgggtacaagacatttcgccacctgcaygacccagcctggcggaagagggaccagaagcgcatcgcagctcaaaaacaggagcagttcaaggtggacagggagggaggcctgaacactgtgaagtaccatgtggcttcccgcactgccctgtctgtgggcggggccccctgcactgtcctcaacatcatgttggactgtgacaagaccgccacaccctggtgcacattcagctgagctggatggacagtgaggaagcctgtacctacaggccatattgctcaggctcaggacaaggcctcaggtcgtgggcccagctctgacaggatgtggagtggccaggaccaagacagcaagctacgcaattgcagccacccggccgccaaggcaggcttgggctgggccaggacacgtggggtgcctgggacgctgcttgccatgcacagtgatcagagagaggctggggtgtgtcctgtccgggaccccccctgccttcctgctcaccctactctgacctccttcacgtgcccaggcctgtgggtagtggggagggctgaacaggacaacctctcatcacccccacttttgttccttcctgctgggctgcctcgtgcagagacacagtgtaggggccatgcagctggcgtaggtggcagttgggcctggtgagggttaggacttcagaaaccagagcacaagccccacagagggggaacagccagcaccgctctagctggttgttgccatgccggaatgtgggcctagtgttgccagatcttctgatttttcgaaagaaactagaatgctggattcttaagtgatatcttctgattttttaaatgatagcmcctaaatgaaactttcaaaaagtatggcaggccagacaaaa

SEQ ID NO: 7296 - DNA, 3759 bp, Homo sapiens
cctcatattgccagacaagagctcagacctgaggagagtgactagcttctctgtgtcccaggtggccaccttccactgtggaagctcatggactccattgggtcttcagggttgcggcagggggaagaaaccctgagttgctctgaggagggcttgcccgggccctcagacagctcagagctggtgcaggagtgcctgcagcagttcaaggtgacaagggcacagctacagcagatccaagccagcctcttgggttccatggagcaggcgctgaggggacaggccagccctgcccctgcggtccrgatgctgcctacatacgtggggtccaccccacatggcactgagcaaggagacttcgtggtgctggagctgggggccacaggggcctcactgcgtgttttgtgggtgactctaactggcattgaggggcatagggtggagcccagaagccaggagtttgtgatcccccaagaggtgatgctgggtgctggccagcagctctttgactttgctgcccactgcctgtctgagttcctggatgcgcagcctgtgaacaaacagggtctgcagcttggcttcagcttctctttcccttgtcaccagacgggcttggacaggagcaccctcatttcctggaccaaaggttttaggtgcagtggtgtggaaggccaggatgtggtccagctgctgagagatgccattcggaggcagggggcctacaacatcgacgtggttgctgtggtgaacgacacagtgggcaccatgatgggctgtgagccgggggtcaggccgtgtgaggttgggctagttgtagacacgggcaccaacgcgtgttacatggaggaggcacggcatgtggcagtgctggacgaagaccggggccgcgtctgcgtcagcgtcgagtggggctccttcagcgatgatrgggcgctgggaccagtgctgaccaccttckaccataccctggaccatgagtccctgaatcctggtgctcagaggtttgagaagatgatcggaggcctgtacctgggtgagctggtgcggctggtgctggctcacttggcccggtgtggggtcctctttggtggctgcacctcccctgccctgctgagccaaggcagcatcctcctggaacacgtggctgagatggaggagtgagtcggggagatggtggtttagtgggggattcttggcttggaggaaggggatgatactctgttmccaaggtagccatggggctttagtgggatggggagcttctgggctgagccccaaaccacttccctttcccctccagcccctctactggggcagccygtgtccatgctatcctgcaggacttgggcctgagccctggggcttcggatgttgagcttgtgcagcacgtctgtgcggccgtgtgcacgcgggctgcccagctctgtgctgccgccctggccgctgttctctcctgcctccagcacagccgggagcaacaaacactccaggttgctgtggccaccggaggccgagtgtgtgagcggcaccccaggttctgcagcgtcctgcagggkacagtgatgctcctggccccggaatgcgatgtctccttaatcccctctgtggatggtggtggccggggagtggcgatggtgactgcygtggctgcccgtctggmtgcccaccggcrcctgctggaggagaccctggccccattccggttgaaccatgatcaactggctgcggttcaggcacagatgcggaaggccatggccaaggggctccgaggggaggcctcctcccttcgcatgctgcccactttcgtccgggccacccctgayggcagcgagcgaggggatttcctggccctggacctcgggggcacgaacttccgtgtcctcctggtacgtgtgaccacaggcgtgcagatcaccagcgagatctactccattcccgagactgtggcccagggttctgggcagcagctctttgaccacatcgtggactgcatcgtggacttccagcagaagcagggcctgagcgggcagagcctcccactgggttttaccttctccttcccatgtaggcagcttggcctagaccagggcatcctcctgaactggaccaagggtttcaaggcatcagactgcgagggccaagatgtcgtgagtctgttgcgggaagccatcactcgcagacaggcagtggagctgaatgtggttgccattgtcaatgacacggtggggaccatgatgtcctgtggctatgaggacccccgttgcgagataggcctcattgtcggaaccggcaccaatgcctgctacatggaggagctccggaatgtggcrggcgtgcctggggactcaggccgcatgtgcatyaacatggagtggggcgcctttggggacgatggctctctggccatgctcagcacycgctttgatgcaagtgtggaccaggcgtccatcaaccccggcaagcagagcagatccagcgccttcagaccagggacatcttcaagaccaagttcctctctgagatcgaaagtgacagcctggccctgcggcaggtccgagccatcctagaggatctggggctacccctgacctcagatgacgccctgatggtgctagaggtgtgccaggctgtgtcccagagggctgcccagctctgtggggcgggtgtagctgccgtggtggagaagatccgggagaaccggggcctggaagagctggcagtgtctgtgggggtggatggaacgctctacaagctgcacccgcgcttctccagcctggtggcggccacagtgcgggagctggcccctcgctgtgtggtcacgttcctgcagtcagaggatgggtccggcaaaggtgcggccctggtcacygctgttgcctgccgccttgcgcagttgactcgtgtctgaggaaacctccaggctgaggaggtctccgccgcagccttgctggagccgggtcggggtctgcctgtttcccagccaggcccagccacccaggactcctgggacatcccatgtgtgacccctctgcggccatttggccttgctccctggctttccctgagagaagtagcactcaggttagcaatatatatatataatttatttacattcacgcccgataaaacccctatgtgccccggcggccgggcaaggctgtgtacataaggccaagagtaagtgcgtgaatgcacttaagacaaagtcaggacacgagcttcacatgacaggccccgcgtggggcaccagccagccctggggacgggcacgccacgccacacacacactcaccactgtacagcctgggactcccattgcatattcacaggccccgccgggcagggcacctcaaggctgggggaggggcaggggcagggaggagccgtggggtgtccctgggtgggtggagagggcagcatgtgagaggcaaatgtgcaccaacactgggcgtgagacgtgagcagcctcaggtgtacrgcatgagatgtgtgtggttggggggtgtctgcgtgacccgggaggggggtgtgtgtgagatgagcacacgaggcatgcgtggcacgtgctcgtgtggtggtcgtgtgcctgaatccaggggctaccccctgtccggctgtggccctcggtcctgcaggcttggagcagggcccctcagacgtgcccctacccagcaggcacagaaatgtttgcataaggtccagctcaggcaggagctctggggccctggcccaggcccagtgtgtgcgtgcatggccgtg

SEQ ID NO: 7297 - DNA, 3705 bp, Homo sapiens
gacaagagctcagacctgaggagagtgactagcttctctgtgtcccagtcccataggtggccaccttccactgtggaagctcatggactccattgggtcttcagggttgcggcagggggaagaaaccctgagttgctctgaggagggcttgcccgggccctcagacagctcagagctggtgcaggagtgcctgcagcagttcaaggtgacaagggcacagctacagcagatccaagccagcctcttgggttccatggagcaggcgctgaggggacaggccagccctgcccctgcggtccrgatgctgcctacatacgtggggtccaccccacatggcactgagcaaggagacttcgtggtgctggagctgggggccacaggggcctcactgcgtgttttgtgggtgactctaactggcattgaggggcatagggtggagcccagaagccaggagtttgtgatcccccaagaggtgatgctgggtgctggccagcagctctttgactttgctgcccactgcctgtctgagttcctggatgcgcagcctgtgaacaaacagggtctgcagcttggcttcagcttctctttcccttgtcaccagacgggcttggacaggagcaccctcatttcctggaccaaaggttttaggtgcagtggtgtggaaggccaggatgtggtccagctgctgagagatgccattcggaggcagggggcctacaacatcgacgtggttgctgtggtgaacgacacagtgggcaccatgatgggctgtgagccgggggtcaggccgtgtgaggttgggctagttgtagacacgggcaccaacgcgtgttacatggaggaggcacggcatgtggcagtgctggacgaagaccggggccgcgtctgcgtcagcgtcgagtggggctccttcagcgatgatrgggcgctgggaccagtgctgaccaccttckaccataccctggaccatgagtccctgaatcctggtgctcagaggtttgagaagatgatcggaggcctgtacctgggtgagctggtgcggctggtgctggctcacttggcccggtgtggggtcctctttggtggctgcacctcccctgccctgctgagccaaggcagcatcctcctggaacacgtggctgagatggaggacccctctactggggcagccygtgtccatgctatcctgcaggacttgggcctgagccctggggcttcggatgttgagcttgtgcagcacgtctgtgcggccgtgtgcacgcgggctgcccagctctgtgctgccgccctggccgctgttctctcctgcctccagcacagccgggagcaacaaacactccaggttgctgtggccaccggaggccgagtgtgtgagcggcaccccaggttctgcagcgtcctgcagggkacagtgatgctcctggccccggaatgcgatgtctccttaatcccctctgtggatggtggtggccggggagtggcgatggtgactgcygtggctgcccgtctggmtgcccaccggcrcctgctggaggagaccctggccccattccggttgaaccatgatcaactggctgcggttcaggcacagatgcggaaggccatggccaaggggctccgaggggaggcctcctcccttcgcatgctgcccactttcgtccgggccacccctgayggcagcgagcgaggggatttcctggccctggacctcgggggcacgaacttccgtgtcctcctggtacgtgtgaccacaggcgtgcagatcaccagcgagatctactccattcccgagactgtggcccagggttctgggcagcagctctttgaccacatcgtggactgcatcgtggacttccagcagaagcagggcctgagcgggcagagcctcccactgggttttaccttctccttcccatgtaggcagcttggcctagaccagggcatcctcctgaactggaccaagggtttcaaggcatcagactgcgagggccaagatgtcgtgagtctgttgcgggaagccatcactcgcagacaggcagtggagctgaatgtggttgccattgtcaatgacacggtggggaccatgatgtcctgtggctatgaggacccccgttgcgagataggcctcattgtcggaaccggcaccaatgcctgctacatggaggagctccggaatgtggcrggcgtgcctggggactcaggccgcatgtgcatyaacatggagtggggcgcctttggggacgatggctctctggccatgctcagcacycgctttgatgcaagtgtggaccaggcgtccatcaaccccggcaagcagaggtttgaaaagatgatcagcggcatgtacctgggggagatcgtccgccacatccttttacatttaaccagccttggcgttctcttccggggccagcagatccagcgccttcagaccagggacatcttcaagaccaagttcctctctgagatcgaaagtgacagcctggccctgcggcaggtccgagccatcctagaggatctggggctacccctgacctcagatgacgccctgatggtgctagaggtgtgccaggctgtgtcccagagggctgcccagctctgtggggcgggtgtagctgccgtggtggagaagatccgggagaaccggggcctggaagagctggcagtgtctgtgggggtggatggaacgctctacaagctgcacccgcgcttctccagcctggtggcggccacagtgcgggagctggcccctcgctgtgtggtcacgttcctgcagtcagaggatgggtccggcaaaggtgcggccctggtcacygctgttgcctgccgccttgcgcagttgactcgtgtctgaggaaacctccaggctgaggaggtctccgccgcagccttgctggagccgggtcggggtctgcctgtttcccagccaggcccagccacccaggactcctgggacatcccatgtgtgacccctctgcggccatttggccttgctccctggctttccctgagagaagtagcactcaggttagcaatatatatatataatttatttacattcacgcccgataaaacccctatgtgccccggcggccgggcaaggctgtgtacataaggccaagagtaagtgcgtgaatgcacttaagacaaagtcaggacacgagcttcacatgacaggccccgcgtggggcaccagccagccctggggacgggcacgccacgccacacacacactcaccactgtacagcctgggactcccattgcatattcacaggccccgccgggcagggcacctcaaggctgggggaggggcaggggcagggaggagccgtggggtgtccctgggtgggtggagagggcagcatgtgagaggcaaatgtgcaccaacactgggcgtgagacgtgagcagcctcaggtgtacrgcatgagatgtgtgtggttggggggtgtctgcgtgacccgggaggggggtgtgtgtgagatgagcacacgaggcatgcgtggcacgtgctcgtgtggtggtcgtgtgcctgaatccaggggctaccccctgtccggctgtggccctcggtcctgcaggcttggagcagggcccctcagacgtgcccctacccagcaggcacagaaatgtttgcataaggtccagctcaggcaggagctctggggccctggcccaggcccagtgtgtgcgtgcatggccgtg

SEQ ID NO: 7298 - DNA, 3710 bp, Homo sapiens
cctcatattgccagacaagagctcagacctgaggagagtgactagcttctctgtgtcccaggtggccaccttccactgtggaagctcatggactccattgggtcttcagggttgcggcagggggaagaaaccctgagttgctctgaggagggcttgcccgggccctcagacagctcagagctggtgcaggagtgcctgcagcagttcaaggtgacaagggcacagctacagcagatccaagccagcctcttgggttccatggagcaggcgctgaggggacaggccagccctgcccctgcggtccrgatgctgcctacatacgtggggtccaccccacatggcactgagcaaggagacttcgtggtgctggagctgggggccacaggggcctcactgcgtgttttgtgggtgactctaactggcattgaggggcatagggtggagcccagaagccaggagtttgtgatcccccaagaggtgatgctgggtgctggccagcagctctttgactttgctgcccactgcctgtctgagttcctggatgcgcagcctgtgaacaaacagggtctgcagcttggcttcagcttctctttcccttgtcaccagacgggcttggacaggagcaccctcatttcctggaccaaaggttttaggtgcagtggtgtggaaggccaggatgtggtccagctgctgagagatgccattcggaggcagggggcctacaacatcgacgtggttgctgtggtgaacgacacagtgggcaccatgatgggctgtgagccgggggtcaggccgtgtgaggttgggctagttgtagacacgggcaccaacgcgtgttacatggaggaggcacggcatgtggcagtgctggacgaagaccggggccgcgtctgcgtcagcgtcgagtggggctccttcagcgatgatrgggcgctgggaccagtgctgaccaccttckaccataccctggaccatgagtccctgaatcctggtgctcagaggtttgagaagatgatcggaggcctgtacctgggtgagctggtgcggctggtgctggctcacttggcccggtgtggggtcctctttggtggctgcacctcccctgccctgctgagccaaggcagcatcctcctggaacacgtggctgagatggaggacccctctactggggcagccygtgtccatgctatcctgcaggacttgggcctgagccctggggcttcggatgttgagcttgtgcagcacgtctgtgcggccgtgtgcacgcgggctgcccagctctgtgctgccgccctggccgctgttctctcctgcctccagcacagccgggagcaacaaacactccaggttgctgtggccaccggaggccgagtgtgtgagcggcaccccaggttctgcagcgtcctgcagggkacagtgatgctcctggccccggaatgcgatgtctccttaatcccctctgtggatggtggtggccggggagtggcgatggtgactgcygtggctgcccgtctggmtgcccaccggcrcctgctggaggagaccctggccccattccggttgaaccatgatcaactggctgcggttcaggcacagatgcggaaggccatggccaaggggctccgaggggaggcctcctcccttcgcatgctgcccactttcgtccgggccacccctgayggcagcgagcgaggggatttcctggccctggacctcgggggcacgaacttccgtgtcctcctggtacgtgtgaccacaggcgtgcagatcaccagcgagatctactccattcccgagactgtggcccagggttctgggcagcagctctttgaccacatcgtggactgcatcgtggacttccagcagaagcagggcctgagcgggcagagcctcccactgggttttaccttctccttcccatgtaggcagcttggcctagaccagggcatcctcctgaactggaccaagggtttcaaggcatcagactgcgagggccaagatgtcgtgagtctgttgcgggaagccatcactcgcagacaggcagtggagctgaatgtggttgccattgtcaatgacacggtggggaccatgatgtcctgtggctatgaggacccccgttgcgagataggcctcattgtcggaaccggcaccaatgcctgctacatggaggagctccggaatgtggcrggcgtgcctggggactcaggccgcatgtgcatyaacatggagtggggcgcctttggggacgatggctctctggccatgctcagcacycgctttgatgcaagtgtggaccaggcgtccatcaaccccggcaagcagaggtttgaaaagatgatcagcggcatgtacctgggggagatcgtccgccacatccttttacatttaaccagccttggcgttctcttccggggccagcagatccagcgccttcagaccagggacatcttcaagaccaagttcctctctgagatcgaaagtgacagcctggccctgcggcaggtccgagccatcctagaggatctggggctacccctgacctcagatgacgccctgatggtgctagaggtgtgccaggctgtgtcccagagggctgcccagctctgtggggcgggtgtagctgccgtggtggagaagatccgggagaaccggggcctggaagagctggcagtgtctgtgggggtggatggaacgctctacaagctgcacccgcgcttctccagcctggtggcggccacagtgcgggagctggcccctcgctgtgtggtcacgttcctgcagtcagaggatgggtccggcaaaggtgcggccctggtcacygctgttgcctgccgccttgcgcagttgactcgtgtctgaggaaacctccaggctgaggaggtctccgccgcagccttgctggagccgggtcggggtctgcctgtttcccagccaggcccagccacccaggactcctgggacatcccatgtgtgacccctctgcggccatttggccttgctccctggctttccctgagagaagtagcactcaggttagcaatatatatatataatttatttacattcacgcccgataaaacccctatgtgccccggcggccgggcaaggctgtgtacataaggccaagagtaagtgcgtgaatgcacttaagacaaagtcaggacacgagcttcacatgacaggccccgcgtggggcaccagccagccctggggacgggcacgccacgccacacacacactcaccactgtacagcctgggactcccattgcatattcacaggccccgccgggcagggcacctcaaggctgggggaggggcaggggcagggaggagccgtggggtgtccctgggtgggtggagagggcagcatgtgagaggcaaatgtgcaccaacactgggcgtgagacgtgagcagcctcaggtgtacrgcatgagatgtgtgtggttggggggtgtctgcgtgacccgggaggggggtgtgtgtgagatgagcacacgaggcatgcgtggcacgtgctcgtgtggtggtcgtgtgcctgaatccaggggctaccccctgtccggctgtggccctcggtcctgcaggcttggagcagggcccctcagacgtgcccctacccagcaggcacagaaatgtttgcataaggtccagctcaggcaggagctctggggccctggcccaggcccagtgtgtgcgtgcatggccgtg

SEQ ID NO: 7299 - DNA, 1019 bp, Homo sapiens
atggcggccgccgaggtcgtgaactgcatcatggaggtgtcctgtggccaggcggaaagcagcgagaagccgaacgtcgagggcatgacgtccaaagattactactttgactcctacgcccacttcggcaactccatgtttcacaaccgccacctctttaaagacaaggtggtgctggatgtgggctcggacacaagcatcctctgcatgttcgccgccaaggccgggcccgcaaggtcatcggcatcgwgtgttccagtagctctgattatgcggtgaagattgtcaaagccaacaagttagaccacttggtgaccatcaccaaggggaaggtggaggagatagagctcccggtggaaaaggtgaacatcatcatcagcaagtggatgggctaactgcctcttctacgagtccatgctcaacactgtgctctatgcccggacaagtggctggcgcccaatagcctcatcttcccagaacgggccacactgtatgtgacggccaccgaggaccggcagtacaaagactacaagatccactggtgggagaacgtttatggcttcgatatatcttgcatcaaagatgtggccatcaaggaaaccctagtggatgtggtggacctcaaacagctggttaccaacgcctgcctcataaaggaggtagacatctacaccgtcaaggtggaagacctgaccttcacctccccgttctgcctgcaagtgaagcagaatgactacgtgcacacccaggtggcctacttcaacatcgagtttacgcactgccacaagaggaccggagggaccggcttctccaccatacccgagtccctgtacacgcactggaagcagacggtgttctacatggaggactacctgaccttgaagacgggcgaggagatcttcggcaccatcggcatgcggcccaacgccaagaactgggaccgggacttcaccatcaacctagatttcaggggccatctgtgcgacctgtcctgctccacagactacaggatgtgctga

SEQ ID NO: 7300 - DNA, 3095 bp, Homo sapiens
ggagagtgagttggtgaagggagggcgtgcactagggatacagcgatgagctcccatggatttacagtggtgagaagaagagatacagaaactcaaaagttccccattgtggagttaccaggacttagacacacactggagactaggtagaaaacttaatgctggagctgtagcctttaagcctggctgtcactacaatgcaggtctttcagtgcctttactcagctgacacacatttgcagtgataacgtcattgaaccaaagggattcaaataggtttttcgttggaatatacgttgcacatttatggcgattctgagtgtgagggcagacttctgccaggctcagcacagcattttcgctgacaagtgagcttggaggttctatgtgccataattaacattgccttgaagactcctggacaccgagactggcctcagaaatagttggctttttttttttttaattgcaagcatatttcttttaatgactccagtaaaattaagcatcaagtaaacaagtggaaagtgacctacacttttaacttgtctcactagtgcctaaatgtagtaaaggctgcttaagttttgtatgtagttgkattttttggagtccgaaggtatccatctgcagaaattgaggcccaaattgaatttggattcaagtggattctaaatactttgcttatcttgaagagagaagcttcataaggaataaacaagttgaatagagaaaacactgattgataataggcattttagtggtctttttaatgttttctgctgtgaaacatttcaagatttattgatttttttttttcactttccccatcacactcacacgcacgctcacactttttatttgccataatgaaccgtccagcccctgtggagatctcctatgagaacatgcgttttctgataactcacaaccctaccaatgctactctcaacaagttcacagaggaacttaagaagtatggagtgacgactttggttcgagtttgtgatgctacatatgataaagctccagttgaaaaagaaggaatccacgttctagattggccatttgatgatggagctccaccccctaatcagatagtagatgattggttaaacctgttaaaaaccaaatttcgtgaagagccaggttgctgtgttgcagtgcattgtgttgcaggattgggaagggcacctgtgctggttgcacttgctttgattgaatgtggaatgaagtacgaagatgcagttcagtttataagacaaaaaagaaggggagcgttcaattccaaacagctgctttatttggagaaataccgacctaagatgcgattacgcttcagagataccaatgggcattgctgtgttcagtagaaggaaatgtaaacgaaggctgacttgattgtgccatttagagggaactcttggtacctggaaatgtgaatctggaatattacctgtgtcatcaaagtagtgatggattcagtactcctcaaccactctcctaatgattggaacaaaagcaaacaaaaaagaaatctctctataaaatgaataaaatgtttaagaaaagagaaagagaaaaggaattaattcagtgaaggatgattttgctcctagttttggagtttgaatttctgccaggattgaattattttgaaatctcctgtctttttaaactttttcaaaataggtctctaaggaaaaccagcagaacattagcctgtgcaaaaccatctgtttggggagcacactcttccattatgcttggcacatagatctccctgtggtgggattttttttttccctttttttgtgggggagggttggtggtatatttttcccctcttttttccttcctctcctacatctcccttttcccccgatccaagttgtagatggaatagaagcccttgttgctgtagatgtgcgtgcagtctggcagccttaagcccacctgggcacttttagataaaaaaaaaaaaaaaacaaaaaacaacaccaaaaaaacagcagtgatatatatattccaggtggtttttagtctttactgatgaaagggtgttcatgttagtttcttcaaaaccctatctaatactaggcaaagtagccaagagccttttgttttgtttttattttgataaattagtggagaaatggcattttaagaggagtctcttctcaacttacctgagagtcgaattcttctcttccctaaccaatgaagctaagtggttatcccagaaacttgtcttctaaaagggaggactccaggccatcaataaagatgtccaggcagtgagcgtactttttacaccctgtagaattgtgggctgtagcgttactctgattttctgtctagtatcagagaatgctggtagcttaaaatttttattttaggacttgtactctgaattttcaggaaccgtcaaaggagcagcagcaaattcacatattttcgacttgagaaatgcttgtggtatgtgttttccaaactgccccctatatgtaaagttcagtttaaccactgattgccttgttattactaggttttttgagattaaaaaaaaaaaatccctggtttaaaaccaacaatgatgcctagtgagccataacagggtagaagagagacatcgtgcaacccaatgagtagtgaagggactgtgttgcttgtgaagcggtgtagtagcatttttgcagattcttggctgggtttagtgtactgatctagaaaagctgtttttctgctcctttgtggaaggcagttatgatcaggctgcatggacaaagcaggtagaggggcmccatcaggggctcttgcactattttcacctctaaatattacrtactcagtagtgccctgcttctagggctctgaatacgggcttaaagtcatcttgtcctgctggaatttgctgtgcagagccataagcctcccattttgttagcgtcagctaggccaataggaacagaccgggaccttgtctcacactgatgatacctcacatgttgaccggctatgtgaactgcctatatcaaaacagcatacctgctaagctaagatagatggtgttgattccactgggttttgatcaa

SEQ ID NO: 7301 - DNA, 3472 bp, Homo sapiens
tgcgcgcgcagcggtggtggtggcggcgcgatcggccgggctgtaaccgtcgtctgtccgggagcggctggagcggcagcggcggccgggcacggcgcgaggtgacgccacagggcagcggcggcagcggccaccgctaccgccgccgcagccgctgcagaggtgactgaggagagaggcgcctcctcgctcccgccaccgccggacttcaatgcccagtccccagctcgccagcgtttttcgttggaatatacgttgcacatttatggcgattctgagtgtgagggcagacttctgccaggctcagcacagcattttcgctgacaagtgagcttggaggttctatgtgccataattaacattgccttgaagactcctggacaccgagactggcctcagaaatagttggctttttttttttttaattgcaagcatatttcttttaatgactccagtaaaattaagcatcaagtaaacaagtggaaagtgacctacacttttaacttgtctcactagtgcctaaatgtagtaaaggctgcttaagttttgtatgtagttgkattttttggagtccgaaggtatccatctgcagaaattgaggcccaaattgaatttggattcaagtggattctaaatactttgcttatcttgaagagagaagcttcataaggaataaacaagttgaatagagaaaacactgattgataataggcattttagtggtctttttaatgttttctgctgtgaaacatttcaagatttattgatttttttttttcactttccccatcacactcacacgcacgctcacactttttatttgccataatgaaccgtccagcccctgtggagatctcctatgagaacatgcgttttctgataactcacaaccctaccaatgctactctcaacaagttcacagaggaacttaagaagtatggagtgacgactttggttcgagtttgtgatgctacatatgataaagctccagttgaaaaagaaggaatccacgttctaaaaaagaaggggagcgttcaattccaaacagctgctttatttggagaaataccgacctaagatgcgattacgcttcagagataccaatgggcattgctgtgttcagtagaaggaaatgtaaacgaaggctgacttgattgtgccatttagagggaactcttggtacctggaaatgtgaatctggaatattacctgtgtcatcaaagtagtgatggattcagtactcctcaaccactctcctaatgattggaacaaaagcaaacaaaaaagaaatctctctataaaatgaataaaatgtttaagaaaagagaaagagaaaaggaattaattcagtgaaggatgattttgctcctagttttggagtttgaatttctgccaggattgaattattttgaaatctcctgtctttttaaactttttcaaaataggtctctaaggaaaaccagcagaacattagcctgtgcaaaaccatctgtttggggagcacactcttccattatgcttggcacatagatctccctgtggtgggattttttttttccctttttttgtgggggagggttggtggtatatttttcccctcttttttccttcctctcctacatctcccttttcccccgatccaagttgtagatggaatagaagcccttgttgctgtagatgtgcgtgcagtctggcagccttaagcccacctgggcacttttagataaaaaaaaaaaaaaaacaaaaaacaacaccaaaaaaacagcagtgatatatatattccaggtggtttttagtctttactgatgaaagggtgttcatgttagtttcttcaaaaccctatctaatactaggcaaagtagccaagagccttttgttttgtttttattttgataaattagtggagaaatggcattttaagaggagtctcttctcaacttacctgagagtcgaattcttctcttccctaaccaatgaagctaagtggttatcccagaaacttgtcttctaaaagggaggactccaggccatcaataaagatgtccaggcagtgagcgtactttttacaccctgtagaattgtgggctgtagcgttactctgattttctgtctagtatcagagaatgctggtagcttaaaatttttattttaggacttgtactctgaattttcaggaaccgtcaaaggagcagcagcaaattcacatattttcgacttgagaaatgcttgtggtatgtgttttccaaactgccccctatatgtaaagttcagtttaaccactgattgccttgttattactaggttttttgagattaaaaaaaaaaaatccctggtttaaaaccaacaatgatgcctagtgagtatgtgtccacaggccataacagggtagaagagagacatcgtgcaacccaatgagtagtgaagggactgtgttgcttgtgaagcggtgtagtagcatttttgcagattcttggctgggtttagtgtactgatctagaaaagctgtttttctgctcctttgtggaaggcagttatgatcaggctgcatggacaaagcaggtagaggggcmccatcaggggctcttgcactattttcacctctaaatattacrtactcagtagtgccctgcttctagggctctgaatacgggcttaaagtcatcttgtcctgctggaatttgctgtgcagagccataagcctcccattttgttagcgtcagctaggccaataggaacagaccgggaccttgtctcacactgatgatacctcacatgttgaccggctatgtgaactgcctatttcctatgctggagttttgatttttaactaaacgcaaatctgtagattctctcctctcccatcccagaaaacaaaacaaaataatgcttttcgaaattgtttctaggactttaaaacataatggtatatccaaaattctttatttcagaatgcaacaatagattccattaatatagactcaagatcaaaacagcatacctgctaagctaagatagatggtgttgattccactgggttttgatcaatacaataacaaacctttttcctttgacatactctgaattttgttgtttggggggagggkkgtgtgtgtgtgtgtgtgtgtgtgtgtgtrtatgtgtgtgtgtgtgtgtgcacgcgcagtgtccatcagtatcagtgcctgcctgagttaggaaaattacattcctggttctgtattgaggagaaggatgtataaagcaacatgaaacattagccctccttttattttaaagactaatgttaattgttcttaaaactggattttttttccttaaagcaatttttttcttttcgatttaatgaagtattrctagctgaagccagtttgacatagagagatgtcagattgatttgaaaggtgtgcagcctgatttaaaaccaaaccctgaacccttttaaagaacaataaaacatattttacaygctctt

SEQ ID NO: 7302 - DNA, 3678 bp, Homo sapiens
tgcgcgcgcagcggtggtggtggcggcgcgatcggccgggctgtaaccgtcgtctgtccgggagcggctggagcggcagcggcggccgggcacggcgcgaggtgacgccacagggcagcggcggcagcggccaccgctaccgccgccgcagccgctgcagaggtgactgaggagagaggcgcctcctcgctcccgccaccgccggacttcaatgcccagtccccagctcgccagcgtttttcgttggaatatacgttgcacatttatggcgattctgagtgtgagggcagacttctgccaggctcagcacagcattttcgctgacaagtgagcttggaggttctatgtgccataattaacattgccttgaagactcctggacaccgagactggcctcagaaatagttggctttttttttttttaattgcaagcatatttcttttaatgactccagtaaaattaagcatcaagtaaacaagtggaaagtgacctacacttttaacttgtctcactagtgcctaaatgtagtaaaggctgcttaagttttgtatgtagttgkattttttggagtccgaaggtatccatctgcagaaattgaggcccaaattgaatttggattcaagtggattctaaatactttgcttatcttgaagagagaagcttcataaggaataaacaagttgaatagagaaaacactgattgataataggcattttagtggtctttttaatgttttctgctgtgaaacatttcaagatttattgatttttttttttcactttccccatcacactcacacgcacgctcacactttttatttgccataatgaaccgtccagcccctgtggagatctcctatgagaacatgcgttttctgataactcacaaccctaccaatgctactctcaacaagttcacagaggaacttaagaagtatggagtgacgactttggttcgagtttgtgatgctacatatgataaagctccagttgaaaaagaaggaatccacgttctagattggccatttgatgatggagctccaccccctaatcagatagtagatgattggttaaacctgttaaaaaccaaatttcgtgaagagccaggttgctgtgttgcagtgcattgtgttgcaggattgggaagggcacctgtgctggttgcacttgctttgattgaatgtggaatgaagtacgaagatgcagttcagtttataagacaaaaaagaaggggagcgttcaattccaaacagctgctttatttggagaaataccgacctaagatgcgattacgcttcagagataccaatgggcattgctgtgttcagtagaaggaaatgtaaacgaaggctgacttgattgtgccatttagagggaactcttggtacctggaaatgtgaatctggaatattacctgtgtcatcaaagtagtgatggattcagtactcctcaaccactctcctaatgattggaacaaaagcaaacaaaaaagaaatctctctataaaatgaataaaatgtttaagaaaagagaaagagaaaaggaattaattcagtgaaggatgattttgctcctagttttggagtttgaatttctgccaggattgaattattttgaaatctcctgtctttttaaactttttcaaaataggtctctaaggaaaaccagcagaacattagcctgtgcaaaaccatctgtttggggagcacactcttccattatgcttggcacatagatctccctgtggtgggattttttttttccctttttttgtgggggagggttggtggtatatttttcccctcttttttccttcctctcctacatctcccttttcccccgatccaagttgtagatggaatagaagcccttgttgctgtagatgtgcgtgcagtctggcagccttaagcccacctgggcacttttagataaaaaaaaaaaaaaaacaaaaaacaacaccaaaaaaacagcagtgatatatatattccaggtggtttttagtctttactgatgaaagggtgttcatgttagtttcttcaaaaccctatctaatactaggcaaagtagccaagagccttttgttttgtttttattttgataaattagtggagaaatggcattttaagaggagtctcttctcaacttacctgagagtcgaattcttctcttccctaaccaatgaagctaagtggttatcccagaaacttgtcttctaaaagggaggactccaggccatcaataaagatgtccaggcagtgagcgtactttttacaccctgtagaattgtgggctgtagcgttactctgattttctgtctagtatcagagaatgctggtagcttaaaatttttattttaggacttgtactctgaattttcaggaaccgtcaaaggagcagcagcaaattcacatattttcgacttgagaaatgcttgtggtatgtgttttccaaactgccccctatatgtaaagttcagtttaaccactgattgccttgttattactaggttttttgagattaaaaaaaaaaaatccctggtttaaaaccaacaatgatgcctagtgagtatgtgtccacaggccataacagggtagaagagagacatcgtgcaacccaatgagtagtgaagggactgtgttgcttgtgaagcggtgtagtagcatttttgcagattcttggctgggtttagtgtactgatctagaaaagctgtttttctgctcctttgtggaaggcagttatgatcaggctgcatggacaaagcaggtagaggggcmccatcaggggctcttgcactattttcacctctaaatattacrtactcagtagtgccctgcttctagggctctgaatacgggcttaaagtcatcttgtcctgctggaatttgctgtgcagagccataagcctcccattttgttagcgtcagctaggccaataggaacagaccgggaccttgtctcacactgatgatacctcacatgttgaccggctatgtgaactgcctatttcctatgctggagttttgatttttaactaaacgcaaatctgtagattctctcctctcccatcccagaaaacaaaacaaaataatgcttttcgaaattgtttctaggactttaaaacataatggtatatccaaaattctttatttcagaatgcaacaatagattccattaatatagactcaagatcaaaacagcatacctgctaagctaagatagatggtgttgattccactgggttttgatcaatacaataacaaacctttttcctttgacatactctgaattttgttgtttggggggagggkkgtgtgtgtgtgtgtgtgtgtgtgtgtgtrtatgtgtgtgtgtgtgtgtgcacgcgcagtgtccatcagtatcagtgcctgcctgagttaggaaaattacattcctggttctgtattgaggagaaggatgtataaagcaacatgaaacattagccctccttttattttaaagactaatgttaattgttcttaaaactggattttttttccttaaagcaatttttttcttttcgatttaatgaagtattrctagctgaagccagtttgacatagagagatgtcagattgatttgaaaggtgtgcagcctgatttaaaaccaaaccctgaacccttttaaagaacaataaaacatattttacaygctctt

SEQ ID NO: 7303 - DNA, 3113 bp, Homo sapiens
gagagtaaaaccatgttacagccttctgtgggaagccatttggatgtcggggtttttcgttggaatatacgttgcacatttatggcgattctgagtgtgagggcagacttctgccaggctcagcacagcattttcgctgacaagtgagcttggaggttctatgtgccataattaacattgccttgaagactcctggacaccgagactggcctcagaaatagttggctttttttttttttaattgcaagcatatttcttttaatgactccagtaaaattaagcatcaagtaaacaagtggaaagtgacctacacttttaacttgtctcactagtgcctaaatgtagtaaaggctgcttaagttttgtatgtagttgkattttttggagtccgaaggtatccatctgcagaaattgaggcccaaattgaatttggattcaagtggattctaaatactttgcttatcttgaagagagaagcttcataaggaataaacaagttgaatagagaaaacactgattgataataggcattttagtggtctttttaatgttttctgctgtgaaacatttcaagatttattgatttttttttttcactttccccatcacactcacacgcacgctcacactttttatttgccataatgaaccgtccagcccctgtggagatctcctatgagaacatgcgttttctgataactcacaaccctaccaatgctactctcaacaagttcacagaggaacttaagaagtatggagtgacgactttggttcgagtttgtgatgctacatatgataaagctccagttgaaaaagaaggaatccacgttctagattggccatttgatgatggagctccaccccctaatcagatagtagatgattggttaaacctgttaaaaaccaaatttcgtgaagagccaggttgctgtgttgcagtgcattgtgttgcaggattgggaagggcacctgtgctggttgcacttgctttgattgaatgtggaatgaagtacgaagatgcagttcagtttataagacaaaaaagaaggggagcgttcaattccaaacagctgctttatttggagaaataccgacctaagatgcgattacgcttcagagataccaatgggcattgctgtgttcagtagaaggaaatgtaaacgaaggctgacttgattgtgccatttagagggaactcttggtacctggaaatgtgaatctggaatattacctgtgtcatcaaagtagtgatggattcagtactcctcaaccactctcctaatgattggaacaaaagcaaacaaaaaagaaatctctctataaaatgaataaaatgtttaatgtctttttaaactttttcaaaataggtctctaaggaaaaccagcagaacattagcctgtgcaaaaccatctgtttggggagcacactcttccattatgcttggcacatagatctccctgtggtgggattttttttttccctttttttgtgggggagggttggtggtatatttttcccctcttttttccttcctctcctacatctcccttttcccccgatccaagttgtagatggaatagaagcccttgttgctgtagatgtgcgtgcagtctggcagccttaagcccacctgggcacttttagataaaaaaaaaaaaaaaacaaaaaacaacaccaaaaaaacagcagtgatatatatattccaggtggtttttagtctttactgatgaaagggtgttcatgttagtttcttcaaaaccctatctaatactaggcaaagtagccaagagccttttgttttgtttttattttgataaattagtggagaaatggcattttaagaggagtctcttctcaacttacctgagagtcgaattcttctcttccctaaccaatgaagctaagtggttatcccagaaacttgtcttctaaaagggaggactccaggccatcaataaagatgtccaggcagtgagcgtactttttacaccctgtagaattgtgggctgtagcgttactctgattttctgtctagtatcagagaatgctggtagcttaaaatttttattttaggacttgtactctgaattttcaggaaccgtcaaaggagcagcagcaaattcacatattttcgacttgagaaatgcttgtggtatgtgttttccaaactgccccctatatgtaaagttcagtttaaccactgattgccttgttattactaggttttttgagattaaaaaaaaaaaatccctggtttaaaaccaacaatgatgcctagtgagtatgtgtccacaggccataacagggtagaagagagacatcgtgcaacccaatgagtagtgaagggactgtgttgcttgtgaagcggtgtagtagcatttagtgccctgcttctagggctctgaatacgggcttaaagtcatcttgtcctgctggaatttgctgtgcagagccataagcctcccattttgttagcgtcagctaggccaataggaacagaccgggaccttgtctcacactgatgatacctcacatgttgaccggctatgtgaactgcctatttcctatgctggagttttgatttttaactaaacgcaaatctgtagattctctcctctcccatcccagaaaacaaaacaaaataatgcttttcgaaattgtttctaggactttaaaacataatggtatatccaaaattctttatttcagaatgcaacaatagattccattaatatagactcaagatcaaaacagcatacctgctaagctaagatagatggtgttgattccactgggttttgatcaatacaataacaaacctttttcctttgacatactctgaattttgttgtttggggggagggkkgtgtgtgtgtgtgtgtgtgtgtgtgtgtrtatgtgtgtgtgtgtgtgtgcacgcgcagtgtccatcagtatcagtgcctgcctgagttaggaaaattacattcctggttctgtattgaggagaaggatgtataaagcaacatgaaacattagccctccttttattttaaagactaatgttaattgttcttaaaactggattttttttccttaaagcaatttttttcttttcgatttaatgaagtat

SEQ ID NO: 7304 - DNA, 3577 bp, Homo sapiens
gctggagcggcagcggcggccgggcacggcgcgaggtgacgccgccgcagccgctgcagaggtgactgaggagagaggcgcctcctcgctcccgccaccgccggacttcaatgcccagtccccagctcgccagcgtttttcgttggaatatacgttgcacatttatggcgattctgagtgtgagggcagacttctgccaggctcagcacagcattttcgctgacaagtgagcttggaggttctatgtgccataattaacattgccttgaagactcctggacaccgagactggcctcagaaatagttggctttttttttttttaattgcaagcatatttcttttaatgactccagtaaaattaagcatcaagtaaacaagtggaaagtgacctacacttttaacttgtctcactagtgcctaaatgtagtaaaggctgcttaagttttgtatgtagttgkattttttggagtccgaaggtatccatctgcagaaattgaggcccaaattgaatttggattcaagtggattctaaatactttgcttatcttgaagagagaagcttcataaggaataaacaagttgaatagagaaaacactgattgataataggcattttagtggtctttttaatgttttctgctgtgaaacatttcaagatttattgatttttttttttcactttccccatcacactcacacgcacgctcacactttttatttgccataatgaaccgtccagcccctgtggagatctcctatgagaacatgcgttttctgataactcacaaccctaccaatgctactctcaacaagttcacagaggaacttaagaagtatggagtgacgactttggttcgagtttgtgatgctacatatgataaagctccagttgaaaaagaaggaatccacgttctagattggccatttgatgatggagctccaccccctaatcagatagtagatgattggttaaacctgttaaaaaccaaatttcgtgaagagccaggttgctgtgttgcagtgcattgtgttgcaggattgggaagggcacctgtgctggttgcacttgctttgattgaatgtggaatgaagtacgaagatgcagttcagtttataagacaaaaaagaaggggagcgttcaattccaaacagctgctttatttggagaaataccgacctaagatgcgattacgcttcagagataccaatgggcattgctgtgttcagtagaaggaaatgtaaacgaaggctgacttgattgtgccatttagagggaactcttggtacctggaaatgtgaatctggaatattacctgtgtcatcaaagtagtgatggattcagtactcctcaaccactctcctaatgattggaacaaaagcaaacaaaaaagaaatctctctataaaatgaataaaatgtttaagaaaagagaaagagaaaaggaattaattcagtgaaggatgattttgctcctagttttggagtttgaatttctgccaggattgaattattttgaaatctcctgtctttttaaactttttcaaaataggtctctaaggaaaaccagcagaacattagcctgtgcaaaaccatctgtttggggagcacactcttccattatgcttggcacatagatctccctgtggtgggattttttttttccctttttttgtgggggagggttggtggtatatttttcccctcttttttccttcctctcctacatctcccttttcccccgatccaagttgtagatggaatagaagcccttgttgctgtagatgtgcgtgcagtctggcagccttaagcccacctgggcacttttagataaaaaaaaaaaaaaaacaaaaaacaacaccaaaaaaacagcagtgatatatatattccaggtggtttttagtctttactgatgaaagggtgttcatgttagtttcttcaaaaccctatctaatactaggcaaagtagccaagagccttttgttttgtttttattttgataaattagtggagaaatggcattttaagaggagtctcttctcaacttacctgagagtcgaattcttctcttccctaaccaatgaagctaagtggttatcccagaaacttgtcttctaaaagggaggactccaggccatcaataaagatgtccaggcagtgagcgtactttttacaccctgtagaattgtgggctgtagcgttactctgattttctgtctagtatcagagaatgctggtagcttaaaatttttattttaggacttgtactctgaattttcaggaaccgtcaaaggagcagcagcaaattcacatattttcgacttgagaaatgcttgtggtatgtgttttccaaactgccccctatatgtaaagttcagtttaaccactgattgccttgttattactaggttttttgagattaaaaaaaaaaaatccctggtttaaaaccaacaatgatgcctagtgagtatgtgtccacaggccataacagggtagaagagagacatcgtgcaacccaatgagtagtgaagggactgtgttgcttgtgaagcggtgtagtagcatttttgcagattcttggctgggtttagtgtactgatctagaaaagctgtttttctgctcctttgtggaaggcagttatgatcaggctgcatggacaaagcaggtagaggggcmccatcaggggctcttgcactattttcacctctaaatattacrtactcagtagtgccctgcttctagggctctgaatacgggcttaaagtcatcttgtcctgctggaatttgctgtgcagagccataagcctcccattttgttagcgtcagctaggccaataggaacagaccgggaccttgtctcacactgatgatacctcacatgttgaccggctatgtgaactgcctatttcctatgctggagttttgatttttaactaaacgcaaatctgtagattctctcctctcccatcccagaaaacaaaacaaaataatgcttttcgaaattgtttctaggactttaaaacataatggtatatccaaaattctttatttcagaatgcaacaatagattccattaatatagactcaagatcaaaacagcatacctgctaagctaagatagatggtgttgattccactgggttttgatcaatacaataacaaacctttttcctttgacatactctgaattttgttgtttggggggagggkkgtgtgtgtgtgtgtgtgtgtgtgtgtgtrtatgtgtgtgtgtgtgtgtgcacgcgcagtgtccatcagtatcagtgcctgcctgagttaggaaaattacattcctggttctgtattgaggagaaggatgtataaagcaacatgaaacattagccctccttttattttaaagactaatgttaattgttcttaaaactggattttttttccttaaagcaatttttttcttttcgatttaatgaagtattrctagctgaagccagtttgacatagagagatgtcagattgatttgaaaggtgtgcagcctgatttaaaaccaaaccctgaacccttttaaagaacaataaaacatattttacaygctctt

SEQ ID NO: 7305 - DNA, 2664 bp, Homo sapiens
gagagtaaaaccatgttacagccttctgtgggaagccatttggatgtcggggtttttcgttggaatatacgttgcacatttatggcgattctgagtgtgagggcagacttctgccaggctcagcacagcattttcgctgacaagtgagcttggaggttctatgtgccataattaacattgccttgaagactcctggacaccgagactggcctcagaaatagttggctttttttttttttaattgcaagcatatttcttttaatgactccagtaaaattaagcatcaagtaaacaagtggaaagtgacctacacttttaacttgtctcactagtgcctaaatgtagtaaaggctgcttaagttttgtatgtagttgkattttttggagtccgaaggtatccatctgcagaaattgaggcccaaattgaatttggattcaagtggattctaaatactttgcttatcttgaagagagaagcttcataaggaataaacaagttgaatagagaaaacactgattgataataggcattttagtggtctttttaatgttttctgctgtgaaacatttcaagatttattgatttttttttttcactttccccatcacactcacacgcacgctcacactttttatttgccataatgaaccgtccagcccctgtggagatctcctatgagaacatgcgttttctgataactcacaaccctaccaatgctactctcaacaagttcacagaggaacttaagaagtatggagtgacgactttggttcgagtttgtgatgctacatatgataaagctccagttgaaaaagaaggaatccacgttctaaaaaagaaggggagcgttcaattccaaacagctgctttatttggagaaataccgacctaagatgcgattacgcttcagagataccaatgggcattgctgtgttcagtagaaggaaatgtaaacgaaggctgacttgattgtgccatttagagggaactcttggtacctggaaatgtgaatctggaatattacctgtgtcatcaaagtagtgatggattcagtactcctcaaccactctcctaatgattggaacaaaagcaaacaaaaaagaaatctctctataaaatgaataaaatgtttaagaaaagagaaagagaaaaggaattaattcagtgaaggatgattttgctcctagttttggagtttgaatttctgccaggattgaattattttgaaatctcctgtctttttaaactttttcaaaataggtctctaaggaaaaccagcagaacattagcctgtgcaaaaccatctgtttggggagcacactcttccattatgcttggcacatagatctccctgtggtgggattttttttttccctttttttgtgggggagggttggtggtatatttttcccctcttttttccttcctctcctacatctcccttttcccccgatccaagttgtagatggaatagaagcccttgttgctgtagatgtgcgtgcagtctggcagccttaagcccacctgggcacttttagataaaaaaaaaaaaaaaacaaaaaacaacaccaaaaaaacagcagtgatatatatattccaggtggtttttagtctttactgatgaaagggtgttcatgttagtttcttcaaaaccctatctaatactaggcaaagtagccaagagccttttgttttgtttttattttgataaattagtggagaaatggcattttaagaggagtctcttctcaacttacctgagagtcgaattcttctcttccctaaccaatgaagctaagtggttatcccagaaacttgtcttctaaaagggaggactccaggccatcaataaagatgtccaggcagtgagcgtactttttacaccctgtagaattgtgggctgtagcgttactctgattttctgtctagtatcagagaatgctggtagcttaaaatttttattttaggacttgtactctgaattttcaggaaccgtcaaaggagcagcagcaaattcacatattttcgacttgagaaatgcttgtggtatgtgttttccaaactgccccctatatgtaaagttcagtttaaccactgattgccttgttattactaggttttttgagattaaaaaaaaaaaatccctggtttaaaaccaacaatgatgcctagtgagccataacagggtagaagagagacatcgtgcaacccaatgagtagtgaagggactgtgttgcttgtgaagcggtgtagtagcatttttgcagattcttggctgggtttagtgtactgatctagaaaagctgtttttctgctcctttgtggaaggcagttatgatcaggctgcatggacaaagcaggtagaggggcmccatcaggggctcttgcactattttcacctctaaatattacrtactcagtagtgccctgcttctagggctctgaatacgggcttaaagtcatcttgtcctgctggaatttgctgtgcagagccataagcctcccattttgttagcgtcagctaggccaataggaacagaccgggaccttgtctcacactgatgatacctcacatgttgaccggctatgtgaactgcctatatcaaaacagcatacctgctaagctaagatagatggtgttgattccactgggttttgatcaa

SEQ ID NO: 7306 - DNA, 1231 bp, Homo sapiens
gctggagcggcagcggcggccgggcacggcgcgaggtgacgccgccgcagccgctgcagaggtgactgaggagagaggcgcctcctcgctcccgccaccgccggacttcaatgcccagtccccagctcgccagcgtttttcgttggaatatacgttgcacatttatggcgattctgagtgtgagggcagacttctgccaggctcagcacagcattttcgctgacaagtgagcttggaggttctatgtgccataattaacattgccttgaagactcctggacaccgagactggcctcagaaatagttggctttttttttttttaattgcaagcatatttcttttaatgactccagtaaaattaagcatcaagtaaacaagtggaaagtgacctacacttttaacttgtctcactagtgcctaaatgtagtaaaggctgcttaagttttgtatgtagttgkattttttggagtccgaaggtatccatctgcagaaattgaggcccaaattgaatttggattcaagtggattctaaatactttgcttatcttgaagagagaagcttcataaggaataaacaagttgaatagagaaaacactgattgataataggcattttagtggtctttttaatgttttctgctgtgaaacatttcaagatttattgatttttttttttcactttccccatcacactcacacgcacgctcacactttttatttgccataatgaaccgtccagcccctgtggagatctcctatgagaacatgcgttttctgataactcacaaccctaccaatgctactctcaacaagttcacagaggaacttaagaagtatggagtgacgactttggttcgagtttgtgatgctacatatgataaagctccagttgaaaaagaaggaatccacgttctagattggccatttgatgatggagctccaccccctaatcagatagtagatgattggttaaacctgttaaaaaccaaatttcgtgaagagccaggttgctgtgttgcagtgcattgtgttgcaggattgggaagggcacctgtgctggttgcacttgctttgattgaatgtggaatgaagtacgaagatgcagttcagtttataagacaaaaaagaaggggagcgttcaattccaaacagctgctttatttggaatgcgattacgcttcagagataccaatgggcattgctgtgttcagtagaaggaaatgtaaacga

SEQ ID NO: 7307 - DNA, 2117 bp, Homo sapiens
ctcccccctgggtcggacgctgagcggagccgcgggcgggagggcggacggaccgactgacggtagggacgggaggcgagcaagatggcgcagacgcagggcacccggaggaaagtctgttactactacgacggggatgttggaaattactattatggacaaggccacccaatgaagcctcaccgaatccgcatgactcataatttgctgctcaactatggtctctaccgaaaaatggaaatctatcgccctcacaaagccaatgctgaggagatgaccaagtaccacagcgatgactacattaaattcttgcgctccatccgtccagataacatgtcggagtacagcaagcagatgcagagattcaacgttggtgaggactgtccagtattcgatggcctgtttgagttctgtcagttgtctactggtggttctgtggcaagtgctgtgaaacttaataagcagcagacggacatcgctgtgaattgggctgggggcctgcaccatgcaaagaagtccgaggcatctggcttctgttacgtcaatgatatcgtcttggccatcctggaactgctaaagtatcaccagagggtgctgtacattgacattgatattcaccatggtgacggcgtggaagaggccttctacaccacggaccgggtcatgactgtgtcctttcataagtatggagagtacttcccaggaactggggacctacgggatatcggggctggcaaaggcaagtattatgctgttaactacccgctccgagacgggattgatgacgagtcctatgaggccattttcaagccggtcatgtccaaagtaatggagatgttccagcctagtgcggtggtcttacagtgtggctcagactccctatctggggatcggttaggttgcttcaatctaactatcaaaggacacgccaagtgtgtggaatttgtcaagagctttaacctgcctatgctgatgctgggaggcggtggttacaccattcgtaacgttgcccggtgctggacatatgagacagctgtggccctggatacggagatccctaatgagcttccatacaatgactactttgaatactttggaccagatttcaagctccacatcagtccttccaatatgactaaccagaacacgaatgagtacctggagaagatcaaacagcgactgtttgagaaccttagaatgctgccgcacgcacctggggtycaaatgcaggcgattcctgaggacgccatccctgaggagagtggcgatgaggacgaagacgaccctgacaagcgcatctcgatctgctcctctgacaaacgaattgcctgtgaggaagagttctccgattctgaagaggagggagaggggggccgcaagaactcttccaacttcaaaaaagccaagagagtcaaaacagaggatgaaaaagagaaagacccagaggagaagaaagaagtcaccgaagaggagaaaaccaaggaggagaagccagaagccaaaggggtcaaggaggaggtcaagttggcctgaatggacctctccagctctggcttcctgctgagtccctcacgtttcttccccaacccctcagattttatattttctatttctctgtgtatttatataaaaatttattaaatataaatatccccagggacagaaaccaaggccccgagctcagggcagctgtgctgggtgagctcttccaggagccaccttgccacccattcttcccgttcttaactttgaaccataaagggtgccaggtctgggtgaaagggatacttttatgcaaccataagacaaactcctgaaatgccaagtgcctgcttagtagctttggaaaggtgcccttattgaacattctagaaggggtggctgggtcttcaaggatctcctgtttttttcaggctcctaaagtaacatcagccatttttagattggttctgttttcgtaccttcccactggcctcaagtgagccaagaaacactgcctgccctctgtctgtcttctcctaattctgcaggtggaggttgctagtctagtttcctttttgagatactattttcatttttgtgagcctctttgtaataaaatggtacatttctatatc

SEQ ID NO: 7308 - DNA, 1823 bp, Homo sapiens
ctcccccctgggtcggacgctgagcggagccgcgggcgggagggcggacggaccgactgacggtagggacgggaggcgagcaagatggcgcagacgcagggcacccggaggaaagtctgttactactacgacggggatgttggaaattactattatggacaaggccacccaatgaagcctcaccgaatccgcatgactcataatttgctgctcaactatggtctctaccgaaaaatggaaatctatcgccctcacaaagccaatgctgaggagatgaccaagtaccacagcgatgactacattaaattcttgcgctccatccgtccagataacatgtcggagtacagcaagcagatgcagagattcaacgttggtgaggactgtccagtattcgatggcctgtttgagttctgtcagttgtctactggtggttctgtggcaagtgctgtgaaacttaataagcagcagacggacatcgctgtgaattgggctgggggcctgcaccatgcaaagaagtccgaggcatctggcttctgttacgtcaatgatatcgtcttggccatcctggaactgctaaagtatcaccagagggtgctgtacattgacattgatattcaccatggtgacggcgtggaagaggccttctacaccacggaccgggtcatgactgtgtcctttcataagtatggagagtacttcccaggaactggggacctacgggatatcggggctggcaaaggcaagtattatgctgttaactacccgctccgagacgggattgatgacgagtcctatgaggccattttcaagccggtcatgtccaaagtaatggagatgttccagcctagtgcggtggtcttacagtgtggctcagactccctatctggggatcggttaggttgcttcaatctaactatcaaaggacacgccaagtgtgtggaatttgtcaagagctttaacctgcctatgctgatgctgggaggcggtggttacaccattcgtaacgttgcccggtgctggacatatgagacagctgtggccctggatacggagatccctaatgagcttccatacaatgactactttgaatactttggaccagatttcaagctccacatcagtccttccaatatgactaaccagaacacgaatgagtacctggagaagatcaaacagcgactgtttgagaaccttagaatgctgccgcacgcacctggggtycaaatgcaggcgattcctgaggacgccatccctgaggagagtggcgatgaggacgaagacgaccctgacaagcgcatctcgatctgctcctctgacaaacgaattgcctgtgaggaagagttctccgattctgaagaggagggagaggggggccgcaagaactcttccaacttcaaaaaagccaagagagtcaaaacagaggatgaaaaagagaaagacccagaggagaagaaagaagtcaccgaagaggagaaaaccaaggaggagaagccagaagccaaaggggtcaaggaggaggtcaagttggcctgaatggacctctccagctctggcttcctgctgagtccctcacgtttcttccccaacccctcagattttatattttctatttctctgtgtatttatctcagggcagctgtgctgggtgagctcttccaggagccaccttgccacccattcttcccgttcttaactttgaaccataaagggtgccaggtctgggtgaaagggatacttttatgcaaccataagacaaactcctgaaatgccaagtgcctgcttagtagctttggaaaggtgcccttattgaacattctagaagg

SEQ ID NO: 7309 - DNA, 1493 bp, Homo sapiens
gtcaccgtccaccacctgctcctgtcgccagggcccgcgtcctctccggacctgtggctgctgctgttgcgtagcgtcgactccttcgaraagcaggttgcgagtgactcgggcaccatcaccctgtgctgtaaagacctgcgagtgctgmagctggaaatagagggcgcggaagcgacgctgggcatcgcccgctccatcgaggtagcccctgacttccttctccggacgctgtcctccctggaatcagtcatcacctccttccctttattctaccgtcccaagggcctgagattgggcgactcctggcacttcctcccgcccgaactctactgcaagagagtagctcgcgaaaccaacgcgtggcggctgagcgaggtgaacgaggacttcagcttgtgccccagatacccccgtgcggtgatcgtgccatacttggtggacgatgatgccctggcgcgcagcgcccgcttccgtcagggaggtcgcttccyggtgctcagctaccacccaactgagtccggtccgcaggttctgctacgctccagccagcccctaactggtccccagaagcggcgctgckacagggaccaggagctgctgcgaactgcgctggcgggggctcgtccttgggcgcggggcttcatcatggacacgctctcggcccaggccgcgaaacaagcccgcgtgactggcggaggcacagagaccarggccgcttaacctggctggttgcactggtccctggagagagggcgtcccctgcaggagagcttcatgcgcctggtggaggcctgtggggactcggagcaaagcatggacaactggctgagtcggctggacggctgccgctgactgtaacatgtaaagcaggcactgagcaccacctgcctggcagtccaggrcatggagagaactgggtccattctattcctggcctggtacatggggctgaaggmacagacagcaccctgcttgtgacttcactggcccaactcatcctggaccccttgagcaagaccatggctggattccaggaactggtggagtggaagtggatccaggaaagtaaccaccccttccagctgcgctgtgcccattcagccttctcccatgcccaccccaagcatgaggcacccacctttctcctcttcctggactgcgtgtggcagctgggctgccggttcccactgtcattggagtttggggaagggctactgttggcgctgtttgggcacgcctatgcctcctcttttggcaccttcctctgcaacagcgaaaaggagagatgccgtgtgaagggaggactcagatgcactccctgtggtctgggctcaaccagccaaaagagcaacaaagactccagaacccactctacctcctcaatcccttggccatctgtggagccccagagcctgcggctgtggcaaggcctgtttctgcgctggacctgctcacctgagcctgcagaagctgcatgggggaagagtgtg

SEQ ID NO: 7310 - DNA, 5373 bp, Homo sapiens
gcgcgctctgtgtggccgctgccgccatgttgttgtggttgtgagaaggcggcggcggcggcggagtagcagccggacgagacgtcccagcggctcaggcgctgcccagcgccggccctggcagggagcctggtggggtggcggagggggagactgtgccgtggagggcctcgccatgtcctgctgcccgacttccttgtgaaacctcctagtagaaaaagttcttgggacaaacttcatttggatgaagagactcggcacagccttgagtgcatccaggccaatcagatctttcccaggaagcagctgatccgggaggatgagaatcttcaggttcctttccttgaacttcatggagagagcacagagtttgtgggccgtgccgaggatgccatcattgccctttccaattacagacttcacatcaagttcaaygagtctcttgttaatgttccattacagcttatagaaagtgttgaatgccgagatatatttcagcttcatttgacttgcaaagactgcaaagttatcaggtgtcagttttcaacctttgagcagtgtcaagagtggctgaagagactgaacaacgcaatccgaccacctgctaaaatagaagatctcttctcatttgcataccatgcttggtgcatggaggtctatgccagtgaaaaagagcaacatggagacctgtgcagaccaggggagcatgtaacttcaaggtttaaaaacgaggtggagaggatgggttttgatatgaacaacgcctggaggatttccaacatcaatgagaagtacaaattatgtggtagctatcctcaagagctcatagtgcctgcctggatcactgacaaagaactggaaagtgtatcaagtttcaggtcctggaagcgcatccctgccgtcatctacaggcaccagagcaatggagctgtcattgcccgctgtggacagccagaggttagctggtggggctggcgaaatgcagatgatgagcatctggtacagtcagtagccaaagcttgtgcctctgactcccgatcgagtggcagcaagctgtcaactaggaacacttctcgagactttcccaatgggggagacctttctgacgtggagttcgattcttctctgtcaaatgcttcaggagcagagagtttagccatccaaccgcagaagcttttgatcttggatgcacgctcctatgcagctgctgtggcaaaccgagcyaaaggaggaggctgcgaatgcccagagtattacccaaactgtgaagttgtgtttatggggatggcaaacattcattctattcggaggagttttcagtctctgcggttgctgtgcactcagatgccagatccgggaaattggctatcagctcttgaaagcacaaaatggctccatcacttgtctgtgcttctgaaatcagcgcttctggtagtgcatgctgtggatcaggatcagcggccggtgctagtacactgctcagatggctgggaccgcaccccccagattgtggcattggctaagctcttgctggacccttattaccgaaccatagagggtttccaggtcctcgtggaaatggagtggctggattttggccataaatttgctgaccggtgtggtcatggggagaactcggatgatctgaatgaacgttgcccagtgtttctgcagtggcttgactgtgttcatcagcttcagaggcaatttccttgctcttttgagttcaatgaagcattccttgtgaaactggtgcagcatacctattcctgcctgtttggaacattcctgtgcaacaacgccaaggagagaggggaaaagcatactcaggaacggacatgttccgtgtggtcacttcttcgggcaggcaacaaggctttcaaaaacctactgtattcctctcagtcagaagccgtgctgtaccctgtgtgccatgtgcgtaacctgatgctgtggagtgcagtgtacctgccctgcccatccccaaccacccctgtggacgacagctgtgcaccatacccagccccaggcaccagccctgatgatccccccctgagccggctaccaaagactagatcatacgacaatctgaccacagcctgtgacaacacagtgcctctggccagccggcgctgcagcgaccccagcctgaacgagaagtggcaggagcaccggcgctcactagagctgagcagcctggctggccctggagaggatcccctttctgccgacagcctagggaagcccaccagagtgccggggggtgccgagctttctgttgcagccggagtagctgaggggcagatggagaacatcttgcaggaggccaccaaagaggagagtggagtagaggaacctgcccacagggcaggcattgagatacaggagggtaaagaggaccctctcttagaaaaggagagcaggaggaagacacctgaggcctcagccattggacttcaccaagacccagaactgggtgatgctgctctgaggagccatctggatatgagctggcctctgttctcacagggcatttctgaacagcagagtgggctcagtgttctcctcagttctytccaggtcccccccaggggagaggattccctggaggtccctgtggagcagtttcgaatagaagagattgcagagggtagggaggaagcagttcttccaatcccagtagatgcaaaagttggctatggtacctcacagtcatgttctctgctaccttcccaagtcccttttgagaccagaggaccaaacgtggacagttctacagacatgttagtggaagataaggtgaagtcagtaagtgggccccaaggtcatcatagatcttgccttgtaaatagtggcaaggacaggcttcctcagaccatggaacccagcccttcagagacaagcctggtcgagaggccccaagtggggtctgtggtgcataggacttcccttggcagcactctcagcctgacacgttccccttgtgccttgcctttagccgaatgtaaagaggggcttgtgtgcaatggtgccccagagactgaaaacagggcctcagagcagcccccaggtcttagyaccctccagatgtaccccacacccaatgggcattgcgccartggggaggctggtaggagcaaggactcactgagccgtcagctgtctgctatgagctgcagctctgcccacttacactcaaggaacttgcaccacaagtggctgcatagccactcaggaaggccatctgcaaccagcagccccgaccagccttcccgcagccacctggacgatgatggcatgtcagtgtacacagacacgatccaacagcgcctgcgtcagattgagtcaggccaccagcaggaagtagaaactttgaagaaacaagtccaggagctgaagagtcgcctggagagccagtacctgaccagctccctacactttaatggagactttggggatgaggtgacttcaatccccgactcggaaagcaatctggatcagaactgtttgtctcgctgcagcacagagattttctctgaagccagctgggagcaggtggataaacaggacacagagatgacccgttggcttcctgaccacctggccgcccactgctatgcgtgcgacagtgccttctggcttgccagcaggaagcaccactgcaggaattgtgggaacgtattctgctccagttgttgtaaccagaaggttccagttcccagccagcagctctttgaacccagtcgagtatgcaagtcttgctatagcagcctacatcccacaagctccagcattgaccttgaactggataagcccattgctgccacttccaactgaagctcagtgacctgggtgggcagtggccaagctgctgttcctatgacaggcccactcaacctgggcagaccgagaggcccgtgcactttggaatgggagcgtggaaccacctgtacagagtgacagatttgggatgcaccactggattgtagattgatttttctttcctgtccccctactccctccctaccttttccatcctcctcctctgccttcaaaaaaggaaactttcccttggttgtcttaattttttttttttttgatggaagaccaagggttgccaggcccactgtaactgccgagctgcctgctgtcasgtgacactgagggatggcttgtttcttccgggtgggaggatggtggtcagagccaggagtatggagatctgagaccgtgagcagggaagaaagccagtgctaacatgcaaccattcctcacgccaccggccacttggtgacttcgtagggttccttagagaagtgacatggccttgaggagattcagggcacctttcctcagtgagctttgatatggtccaaaaacagccttaaatcaagaatatttgtggaggtaggtgtggggaaggttggagaagagttaggtttgtgctttgtaatcttggcatccatgttttgtgcctgccctccctcttggggaggccatgcttgactctgctgaaagctgctaactggtgacagggtggatcatggtgaggactaggggtaaggtcagggaatgcttaagctctggccctgccctgtattcctcttccccttggtagcagttccctgaccaagggcaaggtgtgtctcaggaaggtggttctgtgcatgcctgggtgtggttaaggcgtggcccagaaggcttccctggtgctctcagtccaggcaaagcccagagcatctgagcacgtctctgacttccagtggcaacacagtttgaaygtggtgaaacagggtgtagttcttttccacattctgtgtcatctagtcgtgcaggtagggaaaaagttggtctaattgaagattgtgcatttcctagtgacaggtgccaagaggttatgatacgggtttcttgggtctgatgtacagtgtgaataaatgcttgcagctcttagctcttttttgatcgatgaagcacttttttattaatattttcctttgttaaaggaggaaccgtaactctccatagctgtacatataacccttttctcctaaagaggagtcartcagtgctcctatatttttcattttttgtcaaagcaagaagtaaatactttagaattgttaaatatataaataaagcaaataaagttgagtgttccacatggtagcatttgctaacacttcctaattctttgccctgtggtttatcccctcttcgtcccttttccctctcacacagaagtgtttgagggcctgctgggaaactgacctttggcaaaggaaagctacagatagccttccgactctagaccttggcaaggagcctcaccatgatgttcaagcactgaacgcatttcctcagtgattttgc

SEQ ID NO: 7311 - DNA, 2288 bp, Homo sapiens
gcgcgctctgtgtggccgctgccgccatgttgttgtggttgtgagaaggcggcggcggcggcggagtagcagccggacgagacgtcccagcggctcaggcgctgcccagcgccggccctggcagggagcctggtggggtggcggagggggagactgtgccgtggagggcctcgccatgtcctgctgcccgacttccttgtgaaacctcctagtagaaaaagttcttgggacaaacttcatttggatgaagagactcggcacagccttgagtgcatccaggccaatcagatctttcccaggaagcagctgatccgggaggatgagaatcttcaggttcctttccttgaacttcatggagagagcacagagtttgtgggccgtgccgaggatgccatcattgccctttccaattacagacttcacatcaagttcaaygagtctcttgttaatgttccattacagcttatagaaagtgttgaatgccgagatatatttcagcttcatttgacttgcaaagactgcaaagttatcaggtgtcagttttcaacctttgagcagtgtcaagagtggctgaagagactgaacaacgcaatccgaccacctgctaaaatagaagatctcttctcatttgcataccatgcttggtgcatggaggtctatgccagtgaaaaagagcaacatggagacctgtgcagaccaggggagcatgtaacttcaaggtttaaaaacgaggtggagaggatgggttttgatatgaacaacgcctggaggatttccaacatcaatgagaagtacaaattatgtggtagctatcctcaagagctcatagtgcctgcctggatcactgacaaagaactggaaagtgtatcaagtttcaggtcctggaagcgcatccctgccgtcatctacaggcaccagagcaatggagctgtcattgcccgctgtggacagccagaggttagctggtggggctggcgaaatgcagatgatgagcatctggtacagtcagtagccaaagcttgtgcctctgactcccgatcgagtggcagcaagctgtcaactaggaacacttctcgagactttcccaatgggggagacctttctgacgtggagttcgattcttctctgtcaaatgcttcaggagcagagagtttagccatccaaccgcagaagcttttgatcttggatgcacgctcctatgcagctgctgtggcaaaccgagcyaaaggaggaggctgcgaatgcccagagtattacccaaactgtgaagttgtgtttatggggatggcaaacattcattctattcggaggagttttcagtctctgcggttgctgtgcactcagatgccagatccgggaaattggctatcagctcttgaaagcacaaaatggctccatcacttgtctgtgcttctgaaatcagcgcttctggtagtgcatgctgtggatcaggatcagcggccggtgctagtacactgctcagatggctgggaccgcaccccccagattgtggcattggctaagctcttgctggacccttattaccgaaccatagagggtttccaggtcctcgtggaaatggagtggctggattttggccataaatttgctgaccggtgtggtcatggggagaactcggatgatctgaatgaacgttgcccagtgtttctgcagtggcttgactgtgttcatcagcttcagaggcaatttccttgctcttttgagttcaatgaagcattccttgtgaaactggtgcagcatacctattcctgcctgtttggaacattcctgtgcaacaacgccaaggagagaggggaaaagcatactcaggaacggacatgttccgtgtggtcacttcttcgggcaggcaacaaggctttcaaaaacctactgtattcctctcagtcagaagccgtatgtatccttcagcctttccactgtggtcagcagaaggaatttggggttggttacatatgagagcctttytgagtagtgactgtttytgtgaagacatctctactgtctctggatggactggttccatttttcccccatgattctgtcctgaggaaggcctgcttctgatggtgctctgatctgtttctgatgactrcttgctgagggtggtttggtttaacacagatctctactttgccaccctagacatgaatcttttttggcactgcctccagagcttatttctagcatattctgtcttacgggagaggcacttaagttgcttcctgatgcactgatagctcagaatgagctgccaccaggcccccagc

SEQ ID NO: 7312 - DNA, 5289 bp, Homo sapiens
gcgcgctctgtgtggccgctgccgccatgttgttgtggttgtgagaaggcggcggcggcggcggagtagcagccggacgagacgtcccagcggctcaggcgctgcccagcgccggccctggcagggagcctggtggggtggcggagggggagactgtgccgtggagggcctcgccatgtcctgctgcccgacttccttgtgaaacctcctagtagaaaaagttcttgggacaaacttcatttggatgaagagactcggcacagccttgagtgcatccaggccaatcagatctttcccaggaagcagctgatccgggaggatgagaatcttcaggttcctttccttgaacttcatggagagagcacagagtttgtgggccgtgccgaggatgccatcattgccctttccaattacagacttcacatcaagttcaaygagtctcttgttaatgttccattacagcttatagaaagtgttgaatgccgagatatatttcagcttcatttgacttgcaaagactgcaaagttatcaggtgtcagttttcaacctttgagcagtgtcaagagtggctgaagagactgaacaacgcaatccgaccacctgctaaaatagaagatctcttctcatttgcataccatgcttggtgcatggaggtctatgccagtgaaaaagagcaacatggagacctgtgcagaccaggggagcatgtaacttcaaggtttaaaaacgaggtggagaggatgggttttgatatgaacaacgcctggaggatttccaacatcaatgagaagtacaaattatgtggtagctatcctcaagagctcatagtgcctgcctggatcactgacaaagaactggaaagtgtatcaagtttcaggtcctggaagcgcatccctgccgtcatctacaggcaccagagcaatggagctgtcattgcccgctgtggacagccagaggttagctggtggggctggcgaaatgcagatgatgagcatctggtacagtcagtagccaaagcttgtgcctctgactcccgatcgagtggcagcaagctgtcaactaggaacacttctcgagactttcccaatgggggagacctttctgacgtggagttcgattcttctctgtcaaatgcttcaggagcagagagtttagccatccaaccgcagaagcttttgatcttggatgcacgctcctatgcagctgctgtggcaaaccgagcyaaaggaggaggctgcgaatgcccagagtattacccaaactgtgaagttgtgtttatggggatggcaaacattcattctattcggaggagttttcagtctctgcggttgctgtgcactcagatgccagatccgggaaattggctatcagctcttgaaagcacaaaatggctccatcacttgtctgtgcttctgaaatcagcgcttctggtagtgcatgctgtggatcaggatcagcggccggtgctagtacactgctcagatggctgggaccgcaccccccagattgtggcattggctaagctcttgctggacccttattaccgaaccatagagggtttccaggtcctcgtggaaatggagtggctggattttggccataaatttgctgaccggtgtggtcatggggagaactcggatgatctgaatgaacgttgcccagtgtttctgcagtggcttgactgtgttcatcagcttcagaggcaatttccttgctcttttgagttcaatgaagcattccttgtgaaactggtgcagcatacctattcctgcctgtttggaacattcctgtgcaacaacgccaaggagagaggggaaaagcatactcaggaacggacatgttccgtgtggtcacttcttcgggcaggcaacaaggctttcaaaaacctactgtattcctctcagtcagaagccgtgctgtaccctgtgtgccatgtgcgtaacctgatgctgtggagtgcagtgtacctgccctgcccatccccaaccacccctgtggacgacagctgtgcaccatacccagccccaggcaccagccctgatgatccccccctgagccggctaccaaagactagatcatacgacaatctgaccacagcctgtgacaacacagtgcctctggccagccggcgctgcagcgaccccagcctgaacgagaagtggcaggagcaccggcgctcactagagctgagcagcctggctggccctggagaggatcccctttctgccgacagcctagggaagcccaccagagtgccggggggtgccgagctttctgttgcagccggagtagctgaggggcagatggagaacatcttgcaggaggccaccaaagaggagagtggagtagaggaacctgcccacagggcaggcattgagatacaggagggtaaagaggaccctctcttagaaaaggagagcaggaggaagacacctgaggcctcagccattggacttcaccaagacccagaactgggtgatgctgctctgaggagccatctggatatgagctggcctctgttctcacagggcatttctgaacagcagagtgggctcagtgttctcctcagttctytccaggtcccccccaggggagaggattccctggaggtccctgtggagcagtttcgaatagaagagattgcagagggtagggaggaagcagttcttccaatcccagtagatgcaaaagttggctatggtacctcacagtcatgttctctgctaccttcccaagtcccttttgagaccagaggaccaaacgtggacagttctacagacatgttagtggaagataaggtgaagtcagtaagtgggccccaaggtcatcatagatcttgccttgtaaatagtggcaaggacaggcttcctcagaccatggaacccagcccttcagagacaagcctggtcgagaggccccaagtggggtctgtggtgcataggacttcccttggcagcactctcagcctgacacgttccccttgtgccttgcctttagccgaatgtaaagaggggcttgtgtgcaatggtgccccagagactgaaaacagggcctcagagcagcccccaggtcttagyaccctccagatgtaccccacacccaatgggcattgcgccartggggaggctggtaggagcaaggactcactgagccgtcagctgtctgctatgagctgcagctctgcccacttacactcaaggaacttgcaccacaagtggctgcatagccactcaggaaggccatctgcaaccagcagccccgaccagccttcccgcagccacctggacgatgatggcatgtcagtgtacacagacacgatccaacagcgcctgcgtcagattgagtcaggccaccagcaggaagtagaaactttgaagaaacaagtccaggagctgaagagtcgcctggagagccagtacctgaccagctccctacactttaatggagactttggggatgaggtgatgacccgttggcttcctgaccacctggccgcccactgctatgcgtgcgacagtgccttctggcttgccagcaggaagcaccactgcagggacactgaccgtgttgatcaaacgtggaattgtgggaacgtattctgctccagttgttgtaaccagaaggttccagttcccagccagcagctctttgaacccagtcgagtatgcaagtcttgctatagcagcctacatcccacaagctccagcattgaccttgaactggataagcccattgctgccacttccaactgaagctcagtgacctgggtgggcagtggccaagctgctgttcctatgacaggcccactcaacctgggcagaccgagaggcccgtgcactttggaatgggagcgtggaaccacctgtacagagtgacagatttgggatgcaccactggattgtagattgatttttctttcctgtccccctactccctccctaccttttccatcctcctcctctgccttcaaaaaaggaaactttcccttggttgtcttaattttttttttttttgatggaagaccaagggttgccaggcccactgtaactgccgagctgcctgctgtcasgtgacactgagggatggcttgtttcttccgggtgggaggatggtggtcagagccaggagtatggagatctgagaccgtgagcagggaagaaagccagtgctaacatgcaaccattcctcacgccaccggccacttggtgacttcgtagggttccttagagaagtgacatggccttgaggagattcagggcacctttcctcagtgagctttgatatggtccaaaaacagccttaaatcaagaatatttgtggaggtaggtgtggggaaggttggagaagagttaggtttgtgctttgtaatcttggcatccatgttttgtgcctgccctccctcttggggaggccatgcttgactctgctgaaagctgctaactggtgacagggtggatcatggtgaggactaggggtaaggtcagggaatgcttaagctctggccctgccctgtattcctcttccccttggtagcagttccctgaccaagggcaaggtgtgtctcaggaaggtggttctgtgcatgcctgggtgtggttaaggcgtggcccagaaggcttccctggtgctctcagtccaggcaaagcccagagcatctgagcacgtctctgacttccagtggcaacacagtttgaaygtggtgaaacagggtgtagttcttttccacattctgtgtcatctagtcgtgcaggtagggaaaaagttggtctaattgaagattgtgcatttcctagtgacaggtgccaagaggttatgatacgggtttcttgggtctgatgtacagtgtgaataaatgcttgcagctcttagctcttttttgatcgatgaagcacttttttattaatattttcctttgttaaaggaggaaccgtaactctccatagctgtacatataacccttttctcctaaagaggagtcartcagtgctcctatatttttcattttttgtcaaagcaagaagtaaatactttagaattgttaaatatataaataaagcaaataaagttgagtgttccacatggtagcatttgctaacacttcctaattctttgccctgtggtttatcccctcttcgtcccttttccctctcacacagaagtgtttgagggcctgctgggaaactgacctttggcaaaggaaagctacagatagccttccgactctagaccttggcaaggagcctcaccatgatgttcaagcactgaacgcatttcctcagtgattttgc

SEQ ID NO: 7313 - DNA, 5349 bp, Homo sapiens
gcgcgctctgtgtggccgctgccgccatgttgttgtggttgtgagaaggcggcggcggcggcggagtagcagccggacgagacgtcccagcggctcaggcgctgcccagcgccggccctggcagggagcctggtggggtggcggagggggagactgtgccgtggagggcctcgccatgtcctgctgcccgacttccttgtgaaacctcctagtagaaaaagttcttgggacaaacttcatttgacttcaccataagggaaagaagagagccttgttggacactgaagaagggacggggatttctcctcctaatctgggcctcttgtcatggatgaagagactcggcacagccttgagtgcatccaggccaatcagatctttcccaggaagcagctgatccgggaggatgagaatcttcaggttcctttccttgaacttcatggagagagcacagagtttgtgggccgtgccgaggatgccatcattgccctttccaattacagacttcacatcaagttcaaygagtctcttgttaatgttccattacagcttatagaaagtgttgaatgccgagatatatttcagcttcatttgacttgcaaagactgcaaagttatcaggtgtcagttttcaacctttgagcagtgtcaagagtggctgaagagactgaacaacgcaatccgaccacctgctaaaatagaagatctcttctcatttgcataccatgcttggtgcatggaggtctatgccagtgaaaaagagcaacatggagacctgtgcagaccaggggagcatgtaacttcaaggtttaaaaacgaggtggagaggatgggttttgatatgaacaacgcctggaggatttccaacatcaatgagaagtacaaattatgtggtagctatcctcaagagctcatagtgcctgcctggatcactgacaaagaactggaaagtgtatcaagtttcaggtcctggaagcgcatccctgccgtcatctacaggcaccagagcaatggagctgtcattgcccgctgtggacagccagaggttagctggtggggctggcgaaatgcagatgatgagcatctggtacagtcagtagccaaagcttgtgcctctgactcccgatcgagtggcagcaagctgtcaactaggaacacttctcgagactttcccaatgggggagacctttctgacgtggagttcgattcttctctgtcaaatgcttcaggagcagagagtttagccatccaaccgcagaagcttttgatcttggatgcacgctcctatgcagctgctgtggcaaaccgagcyaaaggaggaggctgcgaatgcccagagtattacccaaactgtgaagttgtgtttatggggatggcaaacattcattctattcggaggagttttcagtctctgcggttgctgtgcactcagatgccagatccgggaaattggctatcagctcttgaaagcacaaaatggctccatcacttgtctgtgcttctgaaatcagcgcttctggtagtgcatgctgtggatcaggatcagcggccggtgctagtacactgctcagatggctgggaccgcaccccccagattgtggcattggctaagctcttgctggacccttattaccgaaccatagagggtttccaggtcctcgtggaaatggagtggctggattttggccataaatttgctgaccggtgtggtcatggggagaactcggatgatctgaatgaacgttgcccagtgtttctgcagtggcttgactgtgttcatcagcttcagaggcaatttccttgctcttttgagttcaatgaagcattccttgtgaaactggtgcagcatacctattcctgcctgtttggaacattcctgtgcaacaacgccaaggagagaggggaaaagcatactcaggaacggacatgttccgtgtggtcacttcttcgggcaggcaacaaggctttcaaaaacctactgtattcctctcagtcagaagccgtgctgtaccctgtgtgccatgtgcgtaacctgatgctgtggagtgcagtgtacctgccctgcccatccccaaccacccctgtggacgacagctgtgcaccatacccagccccaggcaccagccctgatgatccccccctgagccggctaccaaagactagatcatacgacaatctgaccacagcctgtgacaacacagtgcctctggccagccggcgctgcagcgaccccagcctgaacgagaagtggcaggagcaccggcgctcactagagctgagcagcctggctggccctggagaggatcccctttctgccgacagcctagggaagcccaccagagtgccggggggtgccgagctttctgttgcagccggagtagctgaggggcagatggagaacatcttgcaggaggccaccaaagaggagagtggagtagaggaacctgcccacagggcaggcattgagatacaggagggtaaagaggaccctctcttagaaaaggagagcaggaggaagacacctgaggcctcagccattggacttcaccaagacccagaactgggtgatgctgctctgaggagccatctggatatgagctggcctctgttctcacagggcatttctgaacagcagagtgggctcagtgttctcctcagttctytccaggtcccccccaggggagaggattccctggaggtccctgtggagcagtttcgaatagaagagattgcagagggtagggaggaagcagttcttccaatcccagtagatgcaaaagttggctatggtacctcacagtcatgttctctgctaccttcccaagtcccttttgagaccagaggaccaaacgtggacagttctacagacatgttagtggaagataaggtgaagtcagtaagtgggccccaaggtcatcatagatcttgccttgtaaatagtggcaaggacaggcttcctcagaccatggaacccagcccttcagagacaagcctggtcgagaggccccaagtggggtctgtggtgcataggacttcccttggcagcactctcagcctgacacgttccccttgtgccttgcctttagccgaatgtaaagaggggcttgtgtgcaatggtgccccagagactgaaaacagggcctcagagcagcccccaggtcttagyaccctccagatgtaccccacacccaatgggcattgcgccartggggaggctggtaggagcaaggactcactgagccgtcagctgtctgctatgagctgcagctctgcccacttacactcaaggaacttgcaccacaagtggctgcatagccactcaggaaggccatctgcaaccagcagccccgaccagccttcccgcagccacctggacgatgatggcatgtcagtgtacacagacacgatccaacagcgcctgcgtcagattgagtcaggccaccagcaggaagtagaaactttgaagaaacaagtccaggagctgaagagtcgcctggagagccagtacctgaccagctccctacactttaatggagactttggggatgaggtgatgacccgttggcttcctgaccacctggccgcccactgctatgcgtgcgacagtgccttctggcttgccagcaggaagcaccactgcaggaattgtgggaacgtattctgctccagttgttgtaaccagaaggttccagttcccagccagcagctctttgaacccagtcgagtatgcaagtcttgctatagcagcctacatcccacaagctccagcattgaccttgaactggataagcccattgctgccacttccaactgaagctcagtgacctgggtgggcagtggccaagctgctgttcctatgacaggcccactcaacctgggcagaccgagaggcccgtgcactttggaatgggagcgtggaaccacctgtacagagtgacagatttgggatgcaccactggattgtagattgatttttctttcctgtccccctactccctccctaccttttccatcctcctcctctgccttcaaaaaaggaaactttcccttggttgtcttaattttttttttttttgatggaagaccaagggttgccaggcccactgtaactgccgagctgcctgctgtcasgtgacactgagggatggcttgtttcttccgggtgggaggatggtggtcagagccaggagtatggagatctgagaccgtgagcagggaagaaagccagtgctaacatgcaaccattcctcacgccaccggccacttggtgacttcgtagggttccttagagaagtgacatggccttgaggagattcagggcacctttcctcagtgagctttgatatggtccaaaaacagccttaaatcaagaatatttgtggaggtaggtgtggggaaggttggagaagagttaggtttgtgctttgtaatcttggcatccatgttttgtgcctgccctccctcttggggaggccatgcttgactctgctgaaagctgctaactggtgacagggtggatcatggtgaggactaggggtaaggtcagggaatgcttaagctctggccctgccctgtattcctcttccccttggtagcagttccctgaccaagggcaaggtgtgtctcaggaaggtggttctgtgcatgcctgggtgtggttaaggcgtggcccagaaggcttccctggtgctctcagtccaggcaaagcccagagcatctgagcacgtctctgacttccagtggcaacacagtttgaaygtggtgaaacagggtgtagttcttttccacattctgtgtcatctagtcgtgcaggtagggaaaaagttggtctaattgaagattgtgcatttcctagtgacaggtgccaagaggttatgatacgggtttcttgggtctgatgtacagtgtgaataaatgcttgcagctcttagctcttttttgatcgatgaagcacttttttattaatattttcctttgttaaaggaggaaccgtaactctccatagctgtacatataacccttttctcctaaagaggagtcartcagtgctcctatatttttcattttttgtcaaagcaagaagtaaatactttagaattgttaaatatataaataaagcaaataaagttgagtgttccacatggtagcatttgctaacacttcctaattctttgccctgtggtttatcccctcttcgtcccttttccctctcacacagaagtgtttgagggcctgctgggaaactgacctttggcaaaggaaagctacagatagccttccgactctagaccttggcaaggagcctcaccatgatgttcaagcactgaacgcatttcctcagtgattttgc

SEQ ID NO: 7314 - DNA, 6186 bp, Homo sapiens
gcgcgctctgtgtggccgctgccgccatgttgttgtggttgtgagaaggcggcggcggcggcggagtagcagccggacgagacgtcccagcggctcaggcgctgcccagcgccggccctggcagggagcctggtggggtggcggagggggagactgtgccgtggagggcctcgccatgtcctgctgcccgacttccttgtgaaacctcctagtagaaaaagttcttgggacaaacttcatttgacttcaccataagggaaagaagagagccttgttggacactgaagaagggacggggatttctcctcctaatctgggcctcttgtcatggatgaagagactcggcacagccttgagtgcatccaggccaatcagatctttcccaggaagcagctgatccgggaggatgagaatcttcaggttcctttccttgaacttcatggagagagcacagagtttgtgggccgtgccgaggatgccatcattgccctttccaattacagacttcacatcaagttcaaygagtctcttgttaatgttccattacagcttatagaaagtgttgaatgccgagatatatttcagcttcatttgacttgcaaagactgcaaagttatcaggtgtcagttttcaacctttgagcagtgtcaagagtggctgaagagactgaacaacgcaatccgaccacctgctaaaatagaagatctcttctcatttgcataccatgcttggtgcatggaggtctatgccagtgaaaaagagcaacatggagacctgtgcagaccaggggagcatgtaacttcaaggtttaaaaacgaggtggagaggatgggttttgatatgaacaacgcctggaggatttccaacatcaatgagaagtacaaattatgtggtagctatcctcaagagctcatagtgcctgcctggatcactgacaaagaactggaaagtgtatcaagtttcaggtcctggaagcgcatccctgccgtcatctacaggcaccagagcaatggagctgtcattgcccgctgtggacagccagaggttagctggtggggctggcgaaatgcagatgatgagcatctggtacagtcagtagccaaagcttgtgcctctgactcccgatcgagtggcagcaagctgtcaactaggaacacttctcgagactttcccaatgggggagacctttctgacgtggagttcgattcttctctgtcaaatgcttcaggagcagagagtttagccatccaaccgcagaagcttttgatcttggatgcacgctcctatgcagctgctgtggcaaaccgagcyaaaggaggaggctgcgaatgcccagagtattacccaaactgtgaagttgtgtttatggggatggcaaacattcattctattcggaggagttttcagtctctgcggttgctgtgcactcagatgccagatccgggaaattggctatcagctcttgaaagcacaaaatggctccatcacttgtctgtgcttctgaaatcagcgcttctggtagtgcatgctgtggatcaggatcagcggccggtgctagtacactgctcagatggctgggaccgcaccccccagattgtggcattggctaagctcttgctggacccttattaccgaaccatagagggtttccaggtcctcgtggaaatggagtggctggattttggccataaatttgctgaccggtgtggtcatggggagaactcggatgatctgaatgaacgttgcccagtgtttctgcagtggcttgactgtgttcatcagcttcagaggcaatttccttgctcttttgagttcaatgaagcattccttgtgaaactggtgcagcatacctattcctgcctgtttggaacattcctgtgcaacaacgccaaggagagaggggaaaagcatactcaggaacggacatgttccgtgtggtcacttcttcgggcaggcaacaaggctttcaaaaacctactgtattcctctcagtcagaagccgtgctgtaccctgtgtgccatgtgcgtaacctgatgctgtggagtgcagtgtacctgccctgcccatccccaaccacccctgtggacgacagctgtgcaccatacccagccccaggcaccagccctgatgatccccccctgagccggctaccaaagactagatcatacgacaatctgaccacagcctgtgacaacacagtgcctctggccagccggcgctgcagcgaccccagcctgaacgagaagtggcaggagcaccggcgctcactagagctgagcagcctggctggccctggagaggatcccctttctgccgacagcctagggaagcccaccagagtgccggggggtgccgagctttctgttgcagccggagtagctgaggggcagatggagaacatcttgcaggaggccaccaaagaggagagtggagtagaggaacctgcccacagggcaggcattgagatacaggagggtaaagaggaccctctcttagaaaaggagagcaggaggaagacacctgaggcctcagccattggacttcaccaagacccagaactgggtgatgctgctctgaggagccatctggatatgagctggcctctgttctcacagggcatttctgaacagcagagtgggctcagtgttctcctcagttctytccaggtcccccccaggggagaggattccctggaggtccctgtggagcagtttcgaatagaagagattgcagagggtagggaggaagcagttcttccaatcccagtagatgcaaaagttggctatggtacctcacagtcatgttctctgctaccttcccaagtcccttttgagaccagaggaccaaacgtggacagttctacagacatgttagtggaagataaggtgaagtcagtaagtgggccccaaggtcatcatagatcttgccttgtaaatagtggcaaggacaggcttcctcagaccatggaacccagcccttcagagacaagcctggtcgagaggccccaagtggggtctgtggtgcataggacttcccttggcagcactctcagcctgacacgttccccttgtgccttgcctttagccgaatgtaaagaggggcttgtgtgcaatggtgccccagagactgaaaacagggcctcagagcagcccccaggtcttagyaccctccagatgtaccccacacccaatgggcattgcgccartggggaggctggtaggagcaaggactcactgagccgtcagctgtctgctatgagctgcagctctgcccacttacactcaaggaacttgcaccacaagtggctgcatagccactcaggaaggccatctgcaaccagcagccccgaccagccttcccgcagccacctggacgatgatggcatgtcagtgtacacagacacgatccaacagcgcctgcgtcagattgagtcaggccaccagcaggaagtagaaactttgaagaaacaagtccaggagctgaagagtcgcctggagagccagtacctgaccagctccctacactttaatggagactttggggatgaggtgacttcaatccccgactcggaaagcaatctggatcagaactgtttgtctcgctgcagcacagagattttctctgaagccagctgggagcaggtggataaacaggacacagagatgacccgttggcttcctgaccacctggccgcccactgctatgcgtgcgacagtgccttctggcttgccagcaggaagcaccactgcaggaattgtgggaacgtattctgctccagttgttgtaaccagaaggttccagttcccagccagcagctctttgaacccagtcgagtatgcaagtcttgctatagcagcctacatcccacaagctccagcattgaccttgaactggataagcccattgctgccacttccaactgaagctcagtgacctgggtgggcagtggccaagctgctgttcctatgacaggcccactcaacctgggcagaccgagaggcccgtgcactttggaatgggagcgtggaaccacctgtacagagtgacagatttgggatgcaccactggattgtagattgatttttctttcctgtccccctactccctccctaccttttccatcctcctcctctgccttcaaaaaaggaaactttcccttggttgtcttaattttttttttttttgatggaagaccaagggttgccaggcccactgtaactgccgagctgcctgctgtcasgtgacactgagggatggcttgtttcttccgggtgggaggatggtggtcagagccaggagtatggagatctgagaccgtgagcagggaagaaagccagtgctaacatgcaaccattcctcacgccaccgccacatcagagctggttgggaaccctttgctgctggggaggctggaagcatattccccaagagcactgccctgggcatcatctccctcctgcgaggagctgagccagtcccctcacagatggataaatgaggctgatgtttggagggagaggcacacggtaaatggcatccccttaggcgcctctttgggaaaggaaagtggatgctcctttgaggcaggcgaggggctgggagtgggtagccgtcatgttgtcccccgtgggatcccatttttaacttgacccagattgtcttgggctccttttactttcagggggctgctttcctgggccaggctgtgtagcacttcccaccctcaggcatgagtacagactggtcaaaatgtttatgcagtcaaggccaaagcctgccctgagcccagacacacctgggtccccattctggggcctggtcccctaaacaatctcttcctyagccagcacagggaaatccagactcagggttccagaaatcccccgttcccaaaccaaaccaatcatggatcttccctttaaggggtagaatcagcctttagagttacaagcccctggaaaagggagcaggtcccatacaatcagcctttctcctctyctcttcttgggacaggaataactgctgagcagtccccctttgccactcctggctgtctgagtgggcacttgtctggctgctggccagcagtgaagggccacttggtgacttcgtagggttccttagagaagtgacatggccttgaggagattcagggcacctttcctcagtgagctttgatatggtccaaaaacagccttaaatcaagaatatttgtggaggtaggtgtggggaaggttggagaagagttaggtttgtgctttgtaatcttggcatccatgttttgtgcctgccctccctcttggggaggccatgcttgactctgctgaaagctgctaactggtgacagggtggatcatggtgaggactaggggtaaggtcagggaatgcttaagctctggccctgccctgtattcctcttccccttggtagcagttccctgaccaagggcaaggtgtgtctcaggaaggtggttctgtgcatgcctgggtgtggttaaggcgtggcccagaaggcttccctggtgctctcagtccaggcaaagcccagagcatctgagcacgtctctgacttccagtggcaacacagtttgaaygtggtgaaacagggtgtagttcttttccacattctgtgtcatctagtcgtgcaggtagggaaaaagttggtctaattgaagattgtgcatttcctagtgacaggtgccaagaggttatgatacgggtttcttgggtctgatgtacagtgtgaataaatgcttgcagctcttagctcttttttgatcgatgaagcacttttttattaatattttcctttgttaaaggaggaaccgtaactctccatagctgtacatataacccttttctcctaaagaggagtcartcagtgctcctatatttttcattttttgtcaaagcaagaagtaaatactttagaattgttaaatatataaataaagcaaataaagttgagtgttccacatggtagcatttgctaacacttcctaattctttgccctgtggtttatcccctcttcgtcccttttccctctcacacagaagtgtttgagggcctgctgggaaactgacctttggcaaaggaaagctacagatagccttccgactctagaccttggcaaggagcctcaccatgatgttcaagcactgaacgcatttcctcagtgattttgc

SEQ ID NO: 7315 - DNA, 1303 bp, Homo sapiens
gtgtggcgtgagccaccatgcctggccttaccaattatttaactttccttgaaggccctacgctctctagtcagtacgcctttgcacatgctgttcctctgcctagaacaccgtcttgtcctcacttctatccccttcatcctgcaggtccttcaggtctcagcttagatctgaagcaagcttcttggggaagggttctttggacgccccctctctccatgggttagttaccatggatgtgtgcttccatatacttttcacattctaaccattaacacacagctttgtagtcgcctgttcccttgactttccacctcactaggcagtatcatcattaacttttgcaktcctttaactgaacaaacgtgtgttacttgttaactatgtgtcatagttacacacatacatacacgataaagacccagaccctgcccttgagatgagtaactgcgtctcttctctggggtctcggcgtctaacagcgtcaggtccaaagcgcttgttgaacgaatgaaccaaggaacgagtgaatgaacgaatgaatgcccgcgaaggacgtggtgccgcgcggtcttctgggaatcgtagtcccctggttcgggcctgtctttacggcgcaggcgtattcacatggaggccgtgttgctgttaatgcgcatgtcccggaatgcggctgggaggactgcgcatgctcgaagggtgggggttgaggccgacggggcgccgtacggcggaggcggggtttcagtggcttctggtgctctagggtgakctctgcccggctgcagggatggcggggaggggtaagctcaycgcagtgatcggagacgaggacacggtgactggtttcctgctgggcgkcataggggagcttaacaagaaccgccatcccaatttcctggtggtggagaaggatacaaccatcaatgagatcgaagacactttccggcaatttctaaaccgggatgacattggcatcatcctcatcaaccagtacatcgcagagatggtgcggcatgccctggacgcccaccagcagtccatccccgctgtcctggagatcccctccaaggagcacccatatgacgccgccaaggactccatcctgcgcagggccaggggcatgttcactsccgaagacctgcgctaggggactcctcatagccctcagcccttccctcktttccaggcctctccccaggcttgccatcagccttctttactttttgagcctttytaggttgctggggctctgctggttaaggaacaggaagcctgaccatctcyctccactacctcttyc

SEQ ID NO: 7316 - DNA, 1672 bp, Homo sapiens
gtgtggcgtgagccaccatgcctggccttaccaattatttaactttccttgaaggccctacgctctctagtcagtacgcctttgcacatgctgttcctctgcctagaacaccgtcttgtcctcacttctatccccttcatcctgcaggtccttcaggtctcagcttagatctgaagcaagcttcttggggaagggttctttggacgccccctctctccatgggttagttaccatggatgtgtgcttccatatacttttcacattctaaccattaacacacagctttgtagtcgcctgttcccttgactttccacctcactaggcagtatcatcattaacttttgcaktcctttaactgaacaaacgtgtgttacttgttaactatgtgtcatagttacacacatacatacacgataaagacccagaccctgcccttgagatgagtaactgcgtctcttctctggggtctcggcgtctaacagcgtcaggtccaaagcgcttgttgaacgaatgaaccaaggaacgagtgaatgaacgaatgaatgcccgcgaaggacgtggtgccgcgcggtcttctgggaatcgtagtcccctggttcgggcctgtctttacggcgcaggcgtattcacatggaggccgtgttgctgttaatgcgcatgtcccggaatgcggctgggaggactgcgcatgctcgaagggtgggggttgaggccgacggggcgccgtacggcggaggcggggtttcagtggcttctggtgctctagggtgakctctgcccggctgcagggatggcggggaggggtaagctcaycgcagtgatcggagacgaggacacggtgactggtttcctgctgggcgkcataggggagcttaacaagaaccgccatcccaatttcctggtggtggagaaggatacaaccatcaatgagatcgaagacactttccggcaatttctaaaccgggatgacattggcatcatcctcatcaaccagtacatcgcagagatggtgcggcatgccctggacgcccaccagcagtccatccccgctgtcctggagatcccctccaaggagcacccatatgacgccgccaaggactccatcctgcgcagggccaggggcatgttcactsccgaagacctgcgctaggggactcctcatagccctcagcccttccctcktttccaggcctctccccaggcttgccatcagccttctttactttttgagcctctgatttccaattccctgctccttcccactccattaagaggctaggtgaggcgcttytaggttgctggggctctgctggttaaggaacaggaagcctgaccatctcyctccactacctcttycctgtgctgttacacagtgtcattgttgatgttaaattaaagtcatattcttgcttctctccagatgggttgggtgctggaaaggacatgtgtggggtgaggccatggggcagattcggttggcaaggatggaaaaggtgctgccaaagacaggcatagaagaggtggcccaggaggattgtgccgggaggcagaactcaaggactggtccttggatcagagaagaccagctctggtctggggaggaatgggaggaggcttgagcccagctcctgcttcccccaccttgctcggcattgggctgggaagggggcca

SEQ ID NO: 7317 - DNA, 787 bp, Homo sapiens
ctttcccctgctaccagacacgcggtcacgtggggccatcgcgggctgccggcgcgggaagccgcgcgagaggcggccgaggggtgcgtgagccggcgccactgcttgcagtgcgcggcttgggagcccgcccctcctgcacggaggagtcggcctgccgccgcggcggcatctggaaccacaatggacactgccagccatagccttgttcttctccagcagctgaacatgcagcgagaatttggttttctgtgtgattgcacagttgcaattggagatgtttacttcaaagcccacagagcagtgcttgctgctttttctaactatttcaagatgatatttattcaccaaacaaggaaaagaaaaatgagctgtaccatctgtggtcataaattccctcgaaagagccaattgttggaacacatgtatacacacaaagacagcaaatcacccaccttgaggtcataaaggagctggaagctgctgggtgcttgtgctgctctctggacggcctgagccagggctaaggcacmcttgcccccttctgcccagtgagtgcacttcacggcatcaaaagccccatgttctctggaaaggcggctgatgaggtccagctcagactctgtatccgtcctataaaggaagcatttcatatcaaagcatggaaaatggctggagagacagaattgtcttctttttgccattaaacctcatgtgaattacccactgataaacgaacactaaccaagaaatttggcctgggtttgaatctcagctccgaaactta

SEQ ID NO: 7318 - DNA, 3344 bp, Homo sapiens
agtgtgatccccyggccagtccctaagcacgtgggttgggttgtcctgcttggctgcggagggagtggaacctcgatattggtggtgtccatcgtgggcagcggactaataaaggccatggcgccagcagaaatcctgaacgggaaggagatctccgcgcaaataagggcgagactgaaaaatcaagtcactcagttgaaggagcaagtacctggtttcacaccacgcctggcaatattacaggttggcaacagagatgattccaatctttatataaatgtgaagctgaaggctgctgaagagattgggatcaaagccactcacattaagttaccaagaacaaccacagaatctgaggtgatgaagtacattacatctttgaatgaagactctactgtacatgggttcttagtgcagctacctttagattcagagaattccattaacactgaagaagtgatcaatgctattgcacccgagaaggatgtggatggattgactagcatcaatgctgggaracttgctagaggtgacctcaatgactgtttcattccttgtacgcctaagggatgcttggaactcatcaaagagacaggggtgcygattgccggaaggcatgctgtggtggttgggcgcagtaaaatagttggggccccgatgcatgacttgcttctgtggaacaatgccacagtgaccacctgccactccaagactgcccatctggatgaggaggtaaataaaggtgacatcctggtggttgcaactggtcagcctgaaatggttaaaggggagtggatcaaacctggggcaatagtcatcgactgtggaatcaattatgtcccagatgataaaaaaccaaatgggagaaaagttgtgggtgatgtggcatacgacgaggccaaagagagggcgagcttcatcactcctgttcctggcggcgtagggcccatgacagttgcaatgctcatgcagagcacagtagagagtgccaagcrtttcctggagaaatttaagccaggaaagtggatgattcagtataacaaccttaacctcaagacacctgttccaagtgacattgatatatcacgatcttgtaaaccgaagcccattggtaagctggctcgagaaattggtctgctgtctgaagaggtagaattatatggtgaaacaaaggccaaagttctgctgtcagcactagaacgcctgaagcaccggcctgatgggaaatacgtggtggtgactggaataactccaacacccctgggagaagggaaaagcacaactacaatcgggctagtgcaagcccttggtgcccatctctaccagaatgtctttgcgtgtgtgcgacagccttctcagggccccacctttggaataaaaggtggcgctgcaggaggcggctactcccaggtcattcctatggaagagtttaatctccacctcacaggtgacatccatgccatcactgcagctaataacctcgttgctgcggccattgatgctcggatatttcatgaactgacccagacagacaaggctctctttaatcgtttggtgccatcagtaaatggagtgagaaggttctctgacatccaaatccgaaggttaaagagactaggcattgaaaagactgaccctaccacactgacagatgaagagataaacagatttgcaagattggacattgatccagaaaccataacttggcaaagagtgttggataccaatgatagattcctgaggaagatcacgattggacaggctccaacggagaagggtcacacacggacggcccagtttgatatctctgtggccagtgaaattatggctgtcctggctctcaccacttctctagaagacatgagagagagactgggcaaaatggtggtggcatccagtaagaaaggagagcccgtcagtgccgaagatctgggggtgagtggtgcactgacagtgcttatgaaggacgcaatcaagcccaatctcatgcagacactggagggcactccagtgtttgtccatgctggcccgtttgccaacatcgcacatggcaattcctccatcattgcagaccrgatcgcactcaagcttgttggcccagaagggtttgtagtgacggaagcaggatttggagcagacattggaatggaaaagttttttaacatcaaatgccggtattccggcctctgcccccacgtggtggtgcttgttgccactgtcagggctctcaagatgcacgggggcggccccacggtcactgctggactgcctcttcccaaggcttacatacaggagaacctggagctggttgaaaaaggcttcagtaacttgaagaaacaaattgaaaatgccagaatgtttggaattccagtagtagtggccgtgaatgcattcaagacggatacagagtctgagctggacctcatcagccgcctttccagagaacatggggcttttgatgccgtgaagtgcactcactgggcagaagggggcaagkgtgccttagccctggctcaggccgtccagagagcagcacaagcacccagcagcttccagctcctttatgacctcaagctcccagttgaggataaaatcaggatcattgcacagaagatctatggagcagatgacattgaattacttcccgaagctcaacacaaagctgaagtctacacgaagcagggctttgggaatctccccatctgcatggctaaaacacacttgtctttgtctcacaacccagagcaaaaaggtgtccctacaggcttcattctgcccattcgcgacatccgcgccagcgttggggctggttttctgtaccccttagtaggaacgatgagcacaatgcctggactccccacccggccctgtttttatgatattgatttggaccytgaaacagaacaggtgaatggattattctaaacagacttccctgaggggagaggggatagtaatgagagttggcaataaccaatgaattgaaatatttatatttcaacacatttttggaagaagcgcagcatggcttgtcacaggttgacagtgtaggggagaaaactgctgtccaataaactacagaggaaactacaggagagatcaccatccatcttcaagaagctactttraaagtctggccagtgtctattcaggcccactgggagttaggaagtataagtaagccaagagaagtcagcccctgyccagaagatctgaaactaatagtaggagtttccccagamgtcattttcagccttaattctcatcatgtataaattaacataaatcatgcatgtctgtttactttagtgacgttccacagaataaaaggaaacaagtttgcc

SEQ ID NO: 7319 - DNA, 3217 bp, Homo sapiens
agtgtgatccccyggccagtccctaagcacgtgggttgggttgtcctgcttggctgcggagggagtggaacctcgatattggtggtgtccatcgtgggcagcggactaataaaggccatggcgccagcagaaatcctgaacgggaaggagatctccgcgcaaataagggcgagactgaaaaatcaagtcactcagttgaaggagcaagtacctggtttcacaccacgcctggcaatattacaggttggcaacagagatgattccaatctttatataaatgtgaagctgaaggctgctgaagagattgggatcaaagccactcacattaagttaccaagaacaaccacagaatctgaggtgatgaagtacattacatctttgaatgaagactctactgtacatgggttcttagtgcagctacctttagattcagagaattccattaacactgaagaagtgatcaatgctattgcacccgagaaggatgtggatggattgactagcatcaatgctgggaracttgctagaggtgacctcaatgactgtttcattccttgtacgcctaagggatgcttggaactcatcaaagagacaggggtgcygattgccggaaggcatgctgtggtggttgggcgcagtaaaatagttggggccccgatgcatgacttgcttctgtggaacaatgccacagtgaccacctgccactccaagactgcccatctggatgaggaggtaaataaaggtgacatcctggtggttgcaactggtcagcctgaaatggttaaaggggagtggatcaaacctggggcaatagtcatcgactgtggaatcaattatgtcccagatgataaaaaaccaaatgggagaaaagttgtgggtgatgtggcatacgacgaggccaaagagagggcgagcttcatcactcctgttcctggcggcgtagggcccatgacagttgcaatgctcatgcagagcacagtagagagtgccaagcrtttcctggagaaatttaagccaggaaagtggatgattcagtataacaaccttaacctcaagacacctgttccaagtgacattgatatatcacgatcttgtaaaccgaagcccattggtaagctggctcgagaaattggtctgctgtctgaagaggtagaattatatggtgaaacaaaggccaaagttctgctgtcagcactagaacgcctgaagcaccggcctgatgggaaatacgtggtggtgactggaataactccaacacccctgggagaagggaaaagcacaactacaatcgggctagtgcaagcccttggtgcccatctctaccagaatgtctttgcgtgtgtgcgacagccttctcagggccccacctttggaataaaaggtggcgctgcaggaggcggctactcccaggtcattcctatggaagagtttaatctccacctcacaggtgacatccatgccatcactgcagctaataacctcgttgctgcggccattgatgctcggatatttcatgaactgacccagacagacaaggctctctttaatcgtttggtgccatcagtaaatggagtgagaaggttctctgacatccaaatccgaaggttaaagagactaggcattgaaaagactgaccctaccacactgacagatgaagagataaacagatttgcaagattggacattgatccagaaaccataacttggcaaagagtgttggataccaatgatagattcctgaggaagatcacgattggacaggctccaacggagaagggtcacacacggacggcccagtttgatatctctgtggccagtgaaattatggctgtcctggctctcaccacttctctagaagacatgagagagagactgggcaaaatggtggtggcatccagtaagaaaggagagcccgtcagtgccgaagatctgggggtgagtggtgcactgacagtgcttatgaaggacgcaatcaagcccaatctcatgcagacactggagggcactccagtgtttgtccatgctggcccgtttgccaacatcgcacatggcaattcctccatcattgcagaccrgatcgcactcaagcttgttggcccagaagggtttgtagtgacggaagcaggatttggagcagacattggaatggaaaagttttttaacatcaaatgccggtattccggcctctgcccccacgtggtggtgcttgttgccactgtcagggctctcaagatgcacgggggcggccccacggtcactgctggactgcctcttcccaaggcttacatacaggagaacctggagctggttgaaaaaggcttcagtaacttgaagaaacaaattgaaaatgccagaatgtttggaattccagtagtagtggccgtgaatgcattcaagacggatacagagtctgagctggacctcatcagccgcctttccagagaacatggggcttttgatgccgtgaagtgcactcactgggcagaagggggcaagkgtgccttagccctggctcaggccgtccagagagcagcacaagcacccagcagcttccagctcctttatgacctcaagctcccagttgaggataaaatcaggatcattgcacagaagatctatggagcagatgacattgaattacttcccgaagctcaacacaaagctgaagtctacacgaagcagggctttgggaatctccccatctgcatggctaaaacacacttgtctttgtctcacaacccagagcaaaaaggtgtccctacaggcttcattctgcccattcgcgacatccgcgccagcgttggggctggttttctgtaccccttagtaggaacgatgagcacaatgcctggactccccacccggccctgtttttatgatattgatttggaccytgaaacagaacaggtgaatggattattctaaacagatcaccatccatcttcaagaagctactttraaagtctggccagtgtctattcaggcccactgggagttaggaagtataagtaagccaagagaagtcagcccctgyccagaagatctgaaactaatagtaggagtttccccagamgtcattttcagccttaattctcatcatgtataaattaacataaatcatgcatgtctgtttactttagtgacgttccacagaataaaaggaaacaagtttgccatcttggtgttgcaatatgaattacagccttaacagactgtg

SEQ ID NO: 7320 - DNA, 3207 bp, Homo sapiens
tctatttcacttatccttgttccttstactgcatttcagttctcgctactgcagtgtaacctccaagagacaggagaaaatcataatacccccctccctccatcactgagtgatactgagacggcgtccttgcacgtttgagcagctgctgccttctcctgggaggctgtcaagtaccccaaggtgcacaataattcttttagtaattgcctgactgaggcaaatcagtagagctgtcagaaatgctttcaaacttaacattcattgggttcttgggcaccgaggcgtcctacgccatctcgctgaaatgaaattcggatgtagacacccttgcgcttcaggactctacgctcttgcagcagctcctctgcccaatggggggcggcagcatctcagtaactcactcgaaagacgggtaggcgggaggagacattcgcgttcaaaatctttttgcctctatccgctcgccgtagcgctttagcccgctcgagtttcaatgcgcgttgttgcttaacgaagcagagtcctacacactgtctgctgctctcctgatcatggcttctccgagttctttcacctactattgccctccatcttcctcccccgtctggtcagagccgctgtacagtctgaggcccgagcacgcgcgagagcggttgcaggacgactcggtggaaacagtcacgtccatagaacaggcaaaagtagaagaaaagatccaagaggtcttcagttcttacaagttcaaccaccttgtaccaaggcttgttttgcagagggagaagcacttccattatctgaaaagaggccttcgacaactgacagatgcctatgagtgtctggatgccagccgcccatggctctgctattggatcctgcacagcttggaactgctagatgaacccatcccccagatagtggctacagatgtgtgtcagttcctggagctgtgtcagagcccagaaggtggctttggaggaggacccggtcagtatccacaccttgcacccacatatgcagcagtcaatgcattgtgcatcattggcaccgaggaggcctatgacatcattaacagagagaagcttcttcagtatttgtactccctgaagcaacctgacggctcctttctcatgcatgtcggaggtgaggtggatgtgagaagcgcatactgtgctgcctccgtagcctcgctgaccaacatcatcactccagacctctttgagggcactgctgaatggatagcaaggtgtcagaactgggaaggtggcattggcggggtaccagggatggaagcccatggtggctataccttctgtggcctggccgcgctggtaatcctcaagagggaacgttccttgaacttgaagagcttattacaatgggtgacaagccggcagatgcgatttgaaggaggatttcagggccgctgcaacaagctggtggatggctgctactccttctggcaggcggggctcctgcccctgctccaccgcgcactgcacgcccaaggtgaccctgcccttagcatgagccactggatgttycatcagcaggccctgcaggagtacatcctgatgtgctgccagtgccctgcgggggggcttctggataaacctggcaagtcgcgtgatttctaccacacctgctactgcctgagcggcctgtccatagcccagcacttcggcagcggagccatgttgcatgatgtggtcctgggtgtgcccgaaaacgctctgcagcccactcacccagtgtacaacattggaccagacaaggtgatccaggccactacatactttctacagaagccagtcccaggttttgaggagcttaaggatgagacatcggcagagcctgcaaccgactagaggacctgggtcccggcagctctttgctcacccatctccccagtcagacaaggtttatacgtttcaatacatactgcattctgtgctacacaagccttagcctcagtggagctgtggttctcttggtactttcttgtcaaacaaaaccaatggctctgggtttggagaacacagtggctggttttaaaaattctttccacacctgtcaaaccaaaaatctatcagcccacgtggtgtggttggtgaacagtgcatgccaggaggaagcagtccctcctcaccagctctccagccaggacgatcacacagagatgaatggcatctgagtattacggcatccagagccactgctgactcccacttgcacgccaccattcagtcaccagactgggtgccctccgatgggtggaataagtctgcttcatgccaaggctgggctttgggtcccaccaagatgagttctctgtaagactgtggtggagttgcaccaggaggtgcctctgcctctcgacttgcaccctggtcatttgtaagggaaaagagctggaggtggggagagaaagatctccttcagttgggagtccttccacttcaacactggagaactgagccttgcatctctccagggtccaaggccacgcttggtgcacaggcaagacttgcttcagccccaggtgtggtgacttagacctaggaaaccaattatgagtggaaagtgaccctctagttcaactgtgccagaggaaacagccctccagtgcccacctgcctcactcctccctatcatgtaccgtgaaaaccccctctgatggcctcaaggcagtgcctgcaggccgaggcccttctgggggtttctwtcttycttccaccagactccaagcccactctcctccaagactgtgttgtcttttctcaccaagagtattaacactactaagtctttcaccttaacttatgactcaggatttattcacgtcctgcccactctaggctcacaggaataaaatcaagtgctagacacactggctgctactaaggcactagcctctgtagctggtggtggcagcgtggggtgccgcccagcgtgctgggtcctggcagtgcctctgctgtgctgcacattgagccctttctcagtcagtggagtatcaagttgggccatctgtctactgacctggccttcatgtaagcagctgtgggctgcgggcagacaggagctcagagatgcagcatgaggcgcttagaaaaacctggccatttgctgcctctaattcccttttgctttgccatattgggctatgtattacctccttgaaataataaaagaataacattttct

SEQ ID NO: 7321 - DNA, 2927 bp, Homo sapiens
cgaggcgtcctacgccatctcgctgaaatgaaattcggatgtagacacccttgcgcttcaggactctacgctcttgcagcagctcctctgcccaatggggggcggcagcatctcagtaactcactcgaaagacgggtaggcgggaggagacattcgcgttcaaaatctttttgcctctatccgctcgccgtagcgctttagcccgctcgagtttcaatgcgcgttgttgcttaacgaagcagagtcctacacactgtctgctgctctcctgatcatggcttctccgagttctttcacctactattgccctccatcttcctcccccgtctggtcagagccgctgtacagtctgaggcccgagcacgcgcgagagcggttgcaggacgactcggtggaaacagtcacgtccatagaacaggcaaaagtagaagaaaagatccaagaggtcttcagttcttacaagttcaaccaccttgtaccaaggcttgttttgcagagggagaagcacttccattatctgaaaagaggccttcgacaactgacagatgcctatgagtgtctggatgccagccgcccatggctctgctattggatcctgcacagcttggaactgctagatgaacccatcccccagatagtggctacagatgtgtgtcagttcctggagctgtgtcagagcccagaaggtggctttggaggaggacccggtcagtatccacaccttgcacccacatatgcagcagtcaatgcattgtgcatcattggcaccgaggaggcctatgacatcattaacagagagaagcttcttcagtatttgtactccctgaagcaacctgacggctcctttctcatgcatgtcggaggtgaggtggatgtgagaagcgcatactgtgctgcctccgtagcctcgctgaccaacatcatcactccagacctctttgagggcactgctgaatggatagcaaggtgtcagaactgggaaggtggcattggcggggtaccagggatggaagcccatggtggctataccttctgtggcctggccgcgctggtaatcctcaagagggaacgttccttgaacttgaagagcttattacaatgggtgacaagccggcagatgcgatttgaaggaggatttcagggccgctgcaacaagctggtggatggctgctactccttctggcaggcggggctcctgcccctgctccaccgcgcactgcacgcccaaggtgaccctgcccttagcatgagccactggatgttycatcagcaggccctgcaggagtacatcctgatgtgctgccagtgccctgcgggggggcttctggataaacctggcaagtcgcgtgatttctaccacacctgctactgcctgagcggcctgtccatagcccagcacttcggcagcggagccatgttgcatgatgtggtcctgggtgtgcccgaaaacgctctgcagcccactcacccagtgtacaacattggaccagacaaggtgatccaggccactacatactttctacagaagccagtcccaggttttgaggagcttaaggatgagacatcggcagagcctgcaaccgactagaggacctgggtcccggcagctctttgctcacccatctccccagtcagacaaggtttatacgtttcaatacatactgcattctgtgctacacaagccttagcctcagtggagctgtggttctcttggtactttcttgtcaaacaaaaccaatggctctgggtttggagaacacagtggctggttttaaaaattctttccacacctgtcaaaccaaaaatctatcagcccacgtggtgtggttggtgaacagtgcatgccaggaggaagcagtccctcctcaccagctctccagccaggacgatcacacagagatgaatggcatctgagtattacggcatccagagccactgctgactcccacttgcacgccaccattcagtcaccagactgggtgccctccgatgggtggaataagtctgcttcatgccaaggctgggctttgggtcccaccaagatgagttctctgtaagactgtggtggagttgcaccaggaggtgcctctgcctctcgacttgcaccctggtcatttgtaagggaaaagagctggaggtggggagagaaagatctccttcagttgggagtccttccacttcaacactggagaactgagccttgcatctctccagggtccaaggccacgcttggtgcacaggcaagacttgcttcagccccaggtgtggtgacttagacctaggaaaccaattatgagtggaaagtgaccctctagttcaactgtgccagaggaaacagccctccagtgcccacctgcctcactcctccctatcatgtaccgtgaaaaccccctctgatggcctcaaggcagtgcctgcaggccgaggcccttctgggggtttctwtcttycttccaccagactccaagcccactctcctccaagactgtgttgtcttttctcaccaagagtattaacactactaagtctttcaccttaacttatgactcaggatttattcacgtcctgcccactctaggctcacaggaataaaatcaagtgctagacacactggctgctactaaggcactagcctctgtagctggtggtggcagcgtggggtgccgcccagcgtgctgggtcctggcagtgcctctgctgtgctgcacattgagccctttctcagtcagtggagtatcaagttgggccatctgtctactgacctggccttcatgtaagcagctgtgggctgcgggcagacaggagctcagagatgcagcatgaggcgcttagaaaaacctggccatttgctgcctctaattcccttttgctttgccatattgggctatgtattacctccttgaaataataaaagaataacattttct

SEQ ID NO: 7322 - DNA, 5411 bp, Homo sapiens
aaagcagtttacataaagctttcagtaatggttggtttttaaacaggcttgctatgtgctggtagcttctttgtgcatcttgcctagacaattaaaaatatttgctccatgtccccttgcatttctaaaccaaattaattggctaccattagaataacttagactcttcatcccacccccactcatccaagtgaggggagagggaaggtacccgagtctgtttcttgttactcaacatcagtgcttgttttgggcccctttgtttgctgccttgtaaaaaatcaaaagagggagawaacccaccaaaatggcagaattctgaccaatgtcctacaagatcctggaaagtgaaggcttctacctcatagacaggggtgcaattttcagctgagtcaccagggccttttttcacttcctgtcaagcgatggtctcttaaatgttcccttcaggtaagttctttgattcccataattttataatagtcatccttaggctaccacttccctttccactgggatattttttatttttccttttttttgtttgaactacacactgttaaactaaaagtattgaatttattttgttttgttttttaacagaagctttgatatcagctgcagatcactcaatacatggccgagacaaatctacattggccggaagcagctctagatgagcctcttggctagacttagtccctccttattagtgattggcgattcaggccatgtcatagggcctttcagacaaaaggttcttatcccagtcagctggccaaaacattaactttggatttcttaccctgctacagcatcttctagaaaggcagcaagataatattgtggcagtgcacagataacatcagggtagacttgactggagaaaaccaaattctgcgcttgctcctgtgtgcccccatccagctgtgcatgcacacacaggacacctttctagtatgaagaacttgcatcatgtctgccctctattgagcacccccttctagaaatacttccaagtattagcatgtgaactgttgactccaccctggtgctttctgctaggaaagcacacttaacgcatccagtgtagtaattgaacttgttctactgccatggtcatatgcagtgggattgcataaggagcattatcctagctctgaagataccatggagtagaattccccaccccctgtcttacatccaccctggccctgtaaattcttttttcctttgttgcgtcaacgaccctagccggagactcaagctgccccctgtgataagtgccttctcgtctttctggtgtgattcaggactttaggggtcagtaaagaccgaggagcctttattgtaataagaaacagacataatgccccttcttcacaagccctgtaacaacagctaattttttttttttratctcccctttctcccttgaaattaatccagtctgggcaatagatgcagtctgaccctttggatgtaacttacatttttttttattaattatttttttctacaatcaccccaattatccttgggggaggcgttggaggacctgaaatttttacccgaacccaggttctccggcgcttggcaaccaaatggggctacagagaagcatctaagccagttcacagagcgagcgtgtgtggggacttctcactgccacggacccttgatgcatgctccccgcgctccagtggtcccgtgtcagaaggcggagttttcgaaaggaggccgccaaawataaaaggcaaagagacgggatcggctgcagcggtttcccaaaggaggagggagtgtgcatcggtctggtaacaaacagagaatgttttttaattatttmtatcacaraaatctgtgttttatctaggatattttckgaatattctttgtaaaatgcagatttttttccacaaaacagtaggattctttgttatattcttaaaattgtttgtttaagtaggtaaaaatatacattcagctgaaagcattacactaacatttacattttaagccttaggaggttattcagcccaattcccagcagtagagagaatactaaacttgtgtctcaaggtttcatggttttcccacgttctttggctattaatttaatttcccaggtcacgtagacaatcattgataattgaaacaagtcctgagttgaaataaccttgagttgagcaaaaatatcctcattttggcagaagctgggcttggtagtacagtaaaattttagtgtaatgtgctcttgtaattgaaaggggatagataatctggatgtttctgcaaaggaaaataggtgtgtacttaacagctttggctctactcagtttcttaaaaagataagagcaaaaaaagttaaatgttaatcaaaacatttaagtttcctttaaattgtagtaataaaatatatgaagctcctttttttactttgctctgtgactggtttaaaggtaagtttgttatgttgttggtagattttgccaggcttctcccaacagagtagaagtgatttggcctcataacttcacagtggtttaccactttgttctatgttctggttttgtaaaggatagtactggaatttgcgtctgaagaccaatattggtgtaactcctgtcagtatattggtaaaatgtagcagaggcaggagtttggatgtttggatgggattcccttaggattctacagccaataaagatcctatttcctatgcatgtcccaggaatcagtaatcctcttttactctgttgggatgagtctttttttktttctgttcagagtggttactaacttcaccttctttcctcttgctgtcatctgcattcgtgcttcccacctgttgttggcatgtcctttaccttctytttccctgccacatcaacctacacactgactcatcattgacgtggaagatgtggaagatgtcaagtttgtgatcaactatgactatccaaacagctcagaggattatgtgcaccgtattggccgaacagcccgtagcaccaacaagggtaccgcctataccttcttcaccccagggaacctaaaacaggccagagagcttatcaaagtgctggaagaggccaatcaggctatcaatccaaaactgatgcagcttgtggaccacagaggaggcggcggaggcgggggtaagggtggtcgttctcgttaccggaccacttcttcagccaacaatcccaatctgatgtatcaggatgagtgtgaccgaaggcttcgaggagtcaaggatggtggccggagagactctgcaagctatcgggatcgtagtgaaaccgatagagctggttatgctaatggcagtggctatggaagtccaaattctgcctttggagcacaagcaggccaatacacctatggtcaaggcacctatggggcagctgcttatggcaccagtagctatacagctcaagaatatggtgctggcacttatggagctagtagcaccacctcaactgggagaagttcacagagctctagccagcagtttagtgggataggccggtctgggcagcagccacagccactgatgtcacaacagtttgcacagcctccrggagctaccaatatgataggttacatggggcagactgcctaccaataccctcctcctcctccccctcctcctccttcacgtaaatgaaaccactcaagtggtagtgactccagcagacttaattacattttaaggaacactgtctttcctttttttttcctcttcgccttttctttttttttccttttttcttttttttttttttaatttttccccccaaccatcgtgatttgtcttttcatgcagattagttagaattcactgccaggtttcttctgcccaccaaaatgatccagtctggaataacattttgtaaaaaaaaaawatatatatatatatatatagctgactggaagagattaatttcttcccccaacttcttgcatgttgaagatatttgagctatttttcatctaaaagagtaaggtattaggcccttttgtgggagccccatgttttgtttttctgagttggtggggagggagggagggggagggctgaattgttttgcagaggaagatggcatctgtgctttaaatttctcattactgggttagaaaacaaagagggaktgccctgcacattttcttttgtgcttttaaatgtttcttaagttggaacaggtttcctcgggcctgttttgactgattgctggagtgcatttgatagttaaaaattactaattggttttatttcccttcacactctgcctccccacttctccccccgttactgaaaaataaccattttagtgtcaggctagaaattgaattgctgagttttgtgtatcctttaaattaaaaaccacaagtgtttattgtagtggttaaactgtagcatctcagcatctgggtggaagctgcctatatttyttcccagtttaactggggaccatctgtgaaattaattttccatccagacagctgctgtgagcaaatgaacataaatgctcgctggaaatttactaaccagtttttatattgacctgcagtgtaaaaagcacatttaattataaacaatatattcaaaatgggcaaattttattttcaaatgcagtgtagagctagattaaaagcaactctttgccacctactctgcccttttggcaaagttaccttgaacaaagaatcttaagggtttattaagaactctttattttcttcataccctgttctctgcagtgctttctaacagcttctgggtgcagattttcttcggcatccttttgcactcagcttattacaggtaggtagtgcttaagaaaagtcatggaggactaaagcctaagtccttttcacttttcctccatctgaaggtaggtgagttcatcctcttcatrgtaatgctgttttaccaagactttatagcagatggacccagaaagaattttctgctattgtgttcactacaacaggatagggacatcagacagccccagaaaccccttccagatctgatatgggactattaatttttatgctgttaattggtattcattcacaatgcagttgaagggggaaggctccactgcattctttggctaaggcctgaatgcttgctcatctgtaagatctatactcgaggttttgttttccttttaaaattctttagggagagagggatggtttctgaggggttctgaaagtatgattcaatgtgcaacatacaggtaggtcttcagcataagctgaaatatatgcatgtaaaaactttgacatctttttttttaattttccactttcttcttaactttacttctctttttgtcccccccccatcttacagaagttgaggccaagggagaatggtaggcacagaagaaaca

SEQ ID NO: 7323 - DNA, 4429 bp, Homo sapiens
aagttggagccgactcagcggcggccgccattttgtgcagtcgctgggaaggaaggagacgcctaaaccgcggcactgcccggtttgagcgtagccaaacctgcccaccggctttgtagccccgattctctgtgttttgctcccgtctccgacgagagaggcggcgacggtggcgtctgcgacgggagacagcgcgtcggagcgagagagcgctgcgcctgccgccgccccaacagcggaggcgccgccgccatcggtcgtcaccagaccggagccgcaggccctcccgagcccggccatccgtgccccgctcccagatctctatccttttgggaccatgcgcggaggaggctttggggaccgggaccgggatcgtgaccgtggaggatttggagcaagaggtggtggtggccttcccccgaagaaatttggtaatcctggggagcgtttgcgtaaaaaaaagtgggatttgagtgagctccccaagtttgagaaaaatttttatgtggaacatccggaagtagcaaggctgacaccatatgaggttgatgagctacgccgaaagaaggagattacagtgagggggggagatgtttgtcctaaacccgtgtttgccttccatcatgctaacttcccacaatatgtaatggatgtgttgatggatcagcactttacagaaccaactccaattcagtgccagggatttccgttggctcttagtggccgggatatggtgggcattgctcagactggctctgggaagacgttggcgtatctcctgcctgcaattgttcatattaaccaccagccatacttggaaaggggagatggcccaatctgtctagttctggctcctaccagagagcttgcccagcaagtacagcaggtggccgatgactatggcaaatgttctagattgaagagtacttgtatttatggaggtgctcctaaaggtccccagattcgagacttggaaagaggtgttgagatctgcatagccactcctggacgtctgatagatttcctggagtcaggaaagacaaatcttcgccgatgtacttaccttgtattggacgaagctgacagaatgcttgatatggggtttgaaccccagatccgtaaaattgttgaccaaatcaggcctgataggcagacactgatgtggagtgcaacctggccaaaagaagtaagacagcttgcagaggatttccttcgtgattacacccagatcaacgtaggcaatctggagttgagtgccaaccacaacatcctccagatagtggatgtctgcatggaaagtgaaaaagaccacaagttgatccaactaatggaagaaataatggctgaaaaggaaaacaaaacaataatatttgtggagacaaagagacgctgtgatgatctgactcgaaggatgcgcagagatggttggccagctatgtgtatccatggagacaagagtcaaccagaaagagattgggtacttaatgagttccgttctggaaaggcacccatccttattgctacagatgtagcctcccgtgggctagatgtggaagatgtcaagtttgtgatcaactatgactatccaaacagctcagaggattatgtgcaccgtattggccgaacagcccgtagcaccaacaagggtaccgcctataccttcttcaccccagggaacctaaaacaggccagagagcttatcaaagtgctggaagaggccaatcaggctatcaatccaaaactgatgcagcttgtggaccacagaggaggcggcggaggcgggggtggtcgttctcgttaccggaccacttcttcagccaacaatcccaatctgatgtatcaggatgagtgtgaccgaaggcttcgaggagtcaaggatggtggccggagagactctgcaagctatcgggatcgtagtgaaaccgatagagctggttatgctaatggcagtggctatggaagtccaaattctgcctttggagcacaagcaggccaatacacctatggtcaaggcacctatggggcagctgcttatggcaccagtagctatacagctcaagaatatggtgctggcacttatggagctagtagcaccacctcaactgggagaagttcacagagctctagccagcagtttagtgggataggccggtctgggcagcagccacagccactgatgtcacaacagtttgcacagcctccrggagctaccaatatgataggttacatggggcagactgcctaccaataccctcctcctcctccccctcctcctccttcacgtaaatgaaaccactcaagtggtagtgactccagcagacttaattacattttaaggaacactgtctttcctttttttttcctcttcgccttttctttttttttccttttttcttttttttttttttaatttttccccccaaccatcgtgatttgtcttttcatgcagattagttagaattcactgccaggtttcttctgcccaccaaaatgatccagtctggaataacattttgtaaaaaaaaaawatatatatatatatatatagctgactggaagagattaatttcttcccccaacttcttgcatgttgaagatatttgagctatttttcatctaaaagagtaaggtattaggcccttttgtgggagccccatgttttgtttttctgagttggtggggagggagggagggggagggctgaattgttttgcagaggaagatggcatctgtgctttaaatttctcattactgggttagaaaacaaagagggaktgccctgcacattttcttttgtgcttttaaatgtttcttaagttggaacaggtttcctcgggcctgttttgactgattgctggagtgcatttgatagttaaaaattactaattggttttatttcccttcacactctgcctccccacttctccccccgttactgaaaaataaccattttagtgtcaggctagaaattgaattgctgagttttgtgtatcctttaaattaaaaaccacaagtgtttattgtagtggttaaactgtagcatctcagcatctgggtggaagctgcctatatttyttcccagtttaactggggaccatctgtgaaattaattttccatccagacagctgctgtgagcaaatgaacataaatgctcgctggaaatttactaaccagtttttatattgacctgcagtgtaaaaagcacatttaattataaacaatatattcaaaatgggcaaattttattttcaaatgcagtgtagagctagattaaaagcaactctttgccacctactctgcccttttggcaaagttaccttgaacaaagaatcttaagggtttattaagaactctttattttcttcataccctgttctctgcagtgctttctaacagcttctgggtgcagattttcttcggcatccttttgcactcagcttattacaggtaggtagtgcttaagaaaagtaggtgagttcatcctcttcatrgtaatgctgttttaccaagactttatagcagatggacccagaaagaattttctgctattgtgttcactacaacaggatagggacatcagacagccccagaaaccccttccagatctgatatgggactattaatttttatgctgttaattggtattcattcacaatgcagttgaagggggaaggctccactgcattctttggctaaggcctgaatgcttgctcatctgtaagatctatactcgaggttttgttttccttttaaaattctttagggagagagggatggtttctgaggggttctgaaagtatgattcaatgtgcaacatacaggtaggtcttcagcataagctgaaatatatgcatgtaaaaactttgacatctttttttttaattttccactttcttcttaactttacttctctttttgtcccccccccatcttacagaagttgaggccaagggagaatggtaggcacagaagaaacatggcaaactgctctgtgctttcaaaccaaagtgttccccccaaccccaaatttgtctaagcactggccagtctgttgtgggcattgttttctacaaccaaattctgggtttttttcttctttctttaaacatagaggtaccaccacaagggatgccctactctctcgcagctcttgaaagcatctgtttgagggaaaggtctctgggcaagcaagtggttatttggattgcttgcttccctttttccacctgggacattgyactgaaatctagcagagtttaactcttctgcctccatgtctgtcacttataattcaggttctgctgttggcttcagaacatgagcagaagaatcgttttatgctagttattgcattcatggttgaaactcaacttagggaaagggttccaatgtattaagcaatgggctgcttctccccaatcctcccta

SEQ ID NO: 7324 - DNA, 4028 bp, Homo sapiens
aagttggagccgactcagcggcggccgccattttgtgcagtcgctgggaaggaaggagacgcctaaaccgcggcactgcccggtttgagcgtagccaaacctgcccaccggctttgtagccccgattctctgtgttttgctcccgtctccgacgagagaggcggcgacggtggcgtctgcgacgggagacagcgcgtcggagcgagagagcgctgcgcctgccgccgccccaacagcggaggcgccgccgccatcggtcgtcaccagaccggagccgcaggccctcccgagcccggccatccgtgccccgctcccagatctctatccttttgggaccatgcgcggaggaggctttggggaccgggaccgggatcgtgaccgtggaggatttggagcaagaggtggtggtggccttcccccgaagaaatttggtaatcctggggagcgtttgcgtaaaaaaaagtgggatttgagtgagctccccaagtttgagaaaaatttttatgtggaacatccggaagtagcaaggctgacaccatatgaggttgatgagctacgccgaaagaaggagattacagtgagggggggagatgtttgtcctaaacccgtgtttgccttccatcatgctaacttcccacaatatgtaatggatgtgttgatggatcagcactttacagaaccaactccaattcagtgccagggatttccgttggctcttagtggccgggatatggtgggcattgctcagactggctctgggaagacgttggcgtatctcctgcctgcaattgttcatattaaccaccagccatacttggaaaggggagatggcccaatctgtctagttctggctcctaccagagagcttgcccagcaagtacagcaggtggccgatgactatggcaaatgttctagattgaagagtacttgtatttatggaggtgctcctaaaggtccccagattcgagacttggaaagaggtgttgagatctgcatagccactcctggacgtctgatagatttcctggagtcaggaaagacaaatcttcgccgatgtacttaccttgtattggacgaagctgacagaatgcttgatatggggtttgaaccccagatccgtaaaattgttgaccaaatcaggcctgataggcagacactgatgtggagtgcaacctggccaaaagaagtaagacagcttgcagaggatttccttcgtgattacacccagatcaacgtaggcaatctggagttgagtgccaaccacaacatcctccagatagtggatgtctgcatggaaagtgaaaaagaccacaagttgatccaactaatggaagaaataatggctgaaaaggaaaacaaaacaataatatttgtggagacaaagagacgctgtgatgatctgactcgaaggatgcgcagagatggttggccagctatgtgtatccatggagacaagagtcaaccagaaagagattgggtacttaatgagttccgttctggaaaggcacccatccttattgctacagatgtagcctcccgtgggctagatgtggaagatgtcaagtttgtgatcaactatgactatccaaacagctcagaggattatgtgcaccgtattggccgaacagcccgtagcaccaacaagggtaccgcctataccttcttcaccccagggaacctaaaacaggccagagagcttatcaaagtgctggaagaggccaatcaggctatcaatccaaaactgatgcagcttgtggaccacagaggaggcggcggaggcgggggtggtcgttctcgttaccggaccacttcttcagccaacaatcccaatctgatgtatcaggatgagtgtgaccgaaggcttcgaggagtcaaggatggtggccggagagactctgcaagctatcgggatcgtagtgaaaccgatagagctggttatgctaatggcagtggctatggaagtccaaattctgcctttggagcacaagcaggccaatacacctatggtcaaggcacctatggggcagctgcttatggcaccagtagctatacagctcaagaatatggtgctggcacttatggagctagtagcaccacctcaactgggagaagttcacagagctctagccagcagtttagtgggataggccggtctgggcagcagccacagccactgatgtcacaacagtttgcacagcctccrggagctaccaatatgataggttacatggggcagactgcctaccaataccctcctcctcctccccctcctcctccttcacgtaaatgaaaccactcaagtggtagtgactccagcagacttaattacattttaaggaacactgtctttcctttttttttcctcttcgccttttctttttttttccttttttcttttttttttttttaatttttccccccaaccatcgtgatttgtcttttcatgcagattagttagaattcactgccaggtttcttctgcccaccaaaatgatccagtctggaataacattttgtaaaaaaaaaawatatatatatatatatatagctgactggaagagattaatttcttcccccaacttcttgcatgttgaagatatttgagctatttttcatctaaaagagtaaggtattaggcccttttgtgggagccccatgttttgtttttctgagttggtggggagggagggagggggagggctgaattgttttgcagaggaagatggcatctgtgctttaaatttctcattactgggttagaaaacaaagagggaktgccctgcacattttcttttgtgcttttaaatgtttcttaagttggaacaggtttcctcgggcctgttttgactgattgctggagtgcatttgatagttaaaaattactaattggttttatttcccttcacactctgcctccccacttctccccccgttactgaaaaataaccattttagtgtcaggctagaaattgaattgctgagttttgtgtatcctttaaattaaaaaccacaagtgtttattgtagtggttaaactgtagcatctcagcatctgggtggaagctgcctatatttyttcccagtttaactggggaccatctgtgaaattaattttccatccagacagctgctgtgagcaaatgaacataaatgctcgctggaaatttactaaccagtttttatattgacctgcagtgtaaaaagcacatttaattataaacaatatattcaaaatgggcaaattttattttcaaatgcagtgtagagctagattaaaagcaactctttgccacctactctgcccttttggcaaagttaccttgaacaaagaatcttaagggtttattaagaactctttattttcttcataccctgttctctgcagtgctttctaacagcttctgggtgcagattttcttcggcatccttttgcactcagcttattacaggtaggtagtgcttaagaaaagtcatggaggactaaagcctaagtccttttcacttttcctccatctgaaggtaggtgagttcatcctcttcatrgtaatgctgttttaccaagactttatagcagatggacccagaaagaattttctgctattgtgttcactacaacaggatagggacatcagacagccccagaaaccccttccagatctgatatgggactattaatttttatgctgttaattggtattcattcacaatgcagttgaagggggaaggctccactgcattctttggctaaggcctgaatgcttgctcatctgtaagatctatactcgaggttttgttttccttttaaaattctttagggagagagggatggtttctgaggggttctgaaagtatgattcaatgtgcaacatacaggtaggtcttcagcataagctgaaatatatgcatgtaaaaactttgacatctttttttttaattttccactttcttcttaactttacttctctttttgtcccccccccatcttacagaagttgaggccaagggagaatggtaggcacagaagaaaca

SEQ ID NO: 7325 - DNA, 2393 bp, Homo sapiens
tgattctcctgcctcagcctccagagtagctgggattacaggcgcacgtcaccacacctggctaatttttgtatttttagtagagacggggtttctccatgttggtcaggctggtctcgaactcctgacctcgtgatccgcccgcctcggcctcccaaagtgctgggattacaggcgtgagccaccgtgcccggccgggaggtcactttaaggagggctgtccaactgcaaggagccgcaagcaggaagtgaaaccacagcacttcaaaaaaagagggagactgggacaagcgtatctaagaggctgaacatgaatccacagatcagaaatccgatggagcggatgtatcgagacacattctacgacaactttgaaaacgaacccatcctctatggtcggagctacacttggctgtgctatgaagtgaaaataaagaggggccgctcaaatctcctttgggacacaggggtctttcgaggcccggtactacccaaacgtcagtcgaatcacaggcaggaggtgtatttccggtttgagaaccacgcagaaatgtgcttcttatcttggttctgtggcaaccgactgcctgctaacaggcgcttccagatcacctggtttgtatcatggaacccctgcctgccctgtgtggtgaaggtgaccaaattcttggctgagcaccccaatgtcaccctgaccatctctgccgcccgcctctactactaccgggatagagattggcggtgggtgctcctcaggctgcataaggcaggggcccgtgtgaagatcatggactatgaagactttgcatactgctgggaaaactttgtgtgcaatgaaggtcagccattcatgccttggtacaaattcgatgacaattatgcatccctgcaccgcacgctaaaggagattctcagaaacccgatggaggcaatgtacccacacatattctacttccactttaaaaacctactgaaagcctgtggtcggaacgaaagctggctgtgcttcaccatggaagttacaaagcaccactcagctgtcttccggaagargggcgtcttccgaaaccaggtggatcctgagacccattgtcatgcagaaaggtgcttcctctcttggttctgtgacgacatactgtctcctaacacaaactacgaggtcacctggtacacatcttggagcccttgcccagagtgtgcaggggaggtggccgagttcctggccaggcacagcaacgtgaatctcaccatcttcaccgcccgcctctrctacttctgggatacagattaccaggaggggctctgcagcctgagtcaggaaggggcctccgtgaagatcatgggctacaaagattttgtatcttgttggaaaaactttgtgtacagtgatgatgagccattcaagccttggaagggactacaaaccaactttcgacttctgaaaagaaggctacgggagattctccagtgaggggtctccctgggcctcatggtctgtctcttctagcctcctgctcatgctgcacgggcctcccctccatcctgsaccagctgtgcttttgcctggtcatcctgagcccctcctggcctcagggccattccatagtgcccccctgcctcaccacctcctccccgctctcccaggctcttcttgtagaggctctccatccacctccccagtcctgttcccccagcctgggtgcccctaacttgactcttcccatctccccagcataaccaaatcttttttttttttttttttttttgagacggagtttcactctgtcgcccagactagagtgcaatggctggatctcagctcactgcaaactctgcttactgggttcaagtgattctcctgtctcagcttctgagtagctgggattacagatgcctgccaccacgcccagctaattttttttttttttttttttttttttgtatttttagtagtgactgggtttcaccatgttggccaggctggtcttgaactcctgacctcaggtgatctgcccatctctgtctcccaaagtgctgggattacgggcgtgagccacccggctcggcygcacaaccaaatcttattaaactcaatctagtctggccctggtgactcacgcctttcggaggcagaggtgggagaatcgcttgagcccagaagtttgagaccagcctgggccacacgacaaagccccatttctacaaaaaaaaatacaaaaaaaaagccagatgtggtggcatgcacctgtagtttaagctacttgggaggatgaagtgggaggactgcttgagccggggaggtggaggctggagtaaactgagatcgcgccacagaactccagtttgagcaacagatcragaccctgcctgaaaataaatcaataaatacactc

SEQ ID NO: 7326 - DNA, 1676 bp, Homo sapiens
agcaacctgctctggttcccttccacgctgtggaagctttgttcttttggtcttcatgataaatcttgctgctgctcactcgttgggtccgtgccacctttaagagctgtaacactcaccgcgaaggtctgcaacttcactcctggggccagcaagaccacgaatgcaccgagaggaatgaacaactctggacacaccatctttaagaaccgtaatactcaccgcaagggtctgcaacttcattcttgaagtcagtgaggccaagaacccatcaattccgtacacattttggtgactttgaagagactgtcacctatcaccaagtggtgagaytattgccaagcagtgagactattgccaagtggtgagaccatcaccaagcggtgagactatcacctatcgccaagtggcctgattcagcaggaagcatctcagacaccaaccactatgctgtcagcagttgcccggggctaccagggctggttkcatccctgtgctaggctttctgtgaggatgagcagcaccgggatagacaggaagggcgtcctggctaaccgggtagccgtggtcayggggtccaccagtgggatcggctttgccatcgcccgacgtctggcccgggacggggcccacgtggtcatcagcagccggaagcagcagaacgtggaccgggccatggccaagctgcagggggagrggctgagtgtggcgggcattgtgtgycacgtggggaaggctgaggaccgggagcagctggtggccaaggccctggagcactgtgggggcgtcgacttcctggtgtgcagcgcaggggtcaamcctctggtagggagcactctggggaccagtgagcagatctgggacaagatcctaagtgtgaacgtgaagtccccagccctgctgctgagccagttgctgccctacatggagaacaggaggggtgctgtcatcctggtctcttccattgcagcttataatccagtagtggcgctgggtgtctacaatgtcagcaagacagcgctgctgggtctcactagaacactggcattggagctggcccccaaggacatccgggtaaactgcgtggttccaggaattatcaaaactgacttcagcaaagtgtttcatgggaatgagtctctctggaagaacttcaaggaacatcatcagctgcagaggattggggagtcagaggactgtgcaggaatcgtgtccttcctgtgctctccagatgccagctacgtcaacggggagaacattgcggtggcaggctactccactmggctctgagaggagtgggggcggctgcgyagctgtrgtcccaggcccaggagcctgagggggtgtctaggtgatcatttggatctggaggcagagtctgccattctgccagactagcaatttgggggcttactcatgctaggcttgaggaagaagaaaaacgcttcggcattctccttaggacttatctgcttgtagatttggctgatccaattaacatgtggggttcttggtgtgggtctggggagctgaaggattttatggagctggtgctttggaggaatcttaagggaaaggagtrgaagctcaggcctttgaaggatttcagctcctcctctctgtaatttgtgctttaagcattttttttcctaaaataaactcaaatttatcctcaa

SEQ ID NO: 7327 - DNA, 1376 bp, Homo sapiens
cagtgcctgaaatccagcctgctgcttactcacatcctcrtactcagctgcagactgcctgacagaagggctgccaaactgcactccagacagacaggtgcacagccaggcctgattcagcaggaagcatctcagacaccaaccactatgctgtcagcagttgcccggggctaccagggctggttkcatccctgtgctaggctttctgtgaggatgagcagcaccgggatagacaggaagggcgtcctggctaaccgggtagccgtggtcayggggtccaccagtgggatcggctttgccatcgcccgacgtctggcccgggacggggcccacgtggtcatcagcagccggaagcagcagaacgtggaccgggccatggccaagctgcagggggagrggctgagtgtggcgggcattgtgtgycacgtggggaaggctgaggaccgggagcagctggtggccaaggccctggagcactgtgggggcgtcgacttcctggtgtgcagcgcaggggtcaamcctctggtagggagcactctggggaccagtgagcagatctgggacaagatcctaagtgtgaacgtgaagtccccagccctgctgctgagccagttgctgccctacatggagaacaggaggggtgctgtcatcctggtctcttccattgcagcttataatccagtagtggcgctgggtgtctacaatgtcagcaagacagcgctgctgggtctcactagaacactggcattggagctggcccccaaggacatccgggtaaactgcgtggttccaggaattatcaaaactgacttcagcaaagtgtttcatgggaatgagtctctctggaagaacttcaaggaacatcatcagctgcagaggattggggagtcagaggactgtgcaggaatcgtgtccttcctgtgctctccagatgccagctacgtcaacggggagaacattgcggtggcaggctactccactmggctctgagaggagtgggggcggctgcgyagctgtrgtcccaggcccaggagcctgagggggtgtctaggtgatcatttggatctggaggcagagtctgccattctgccagactagcaatttgggggcttactcatgctaggcttgaggaagaagaaaaacgcttcggcattctccttaggacttatctgcttgtagatttggctgatccaattaacatgtggggttcttggtgtgggtctggggagctgaaggattttatggagctggtgctttggaggaatcttaagggaaaggagtrgaagctcaggcctttgaaggatttcagctcctcctctctgtaatttgtgctttaagcattttttttcctaaaataaactcaaatttatcctcaa

SEQ ID NO: 7328 - DNA, 2161 bp, Homo sapiens
cgaggtcatgttcccaggacgggcgcgtcttcagggtggaagcctggcgcacgtccggaggtgccgaggacccaaccagcccaaactctgggggaaatgactcccctctgccctcgccccgcgctctgctaccatttccttacgtctctgcttcgctcagcgatgcaaaacgcgcgaggcgcacggcagagggccgaagccgcggtactctccgggccaggcccgcccctcggccgcgccgcgcagcacgggattccccggccgctgtccagcgctggccgcctgagccaaggctgccgcggagccagtacagtcggggccgctggctggaagggcgagcttcctaaggcggggggaagcccggcgccggggccggagacacccgccatttcacccagtaagcgggcccggcctgcggaggtgggcggcatgcagctccgctttgcccggctctccgagcacgccacggcccccacccggggctccgcgcgcgccgcgggctacgacctgtacagtgcctatgattacacaataccacctatggagaargctgttgtgaaaacggacattcagatagcgctcccttctgggtgttatggaagagtggctccacggtcaggcttggctgcaaaacactttattgatgtaggagctggtgtcatagatgaagattatagaggaaatgttggtgttgtactgtttaattttggcaaagaaaagtttgaagtcaaaaaaggtgatcgaattgcacagctcatttgcgaacggattttttatccagaaatagaagaagttcaagccttggatgacaccgaaaggggttcaggaggttttggttccmctggaaagaattaaaatttatgccaagaacagaaaacaagaagtcatacctttttcttaaaaaaaaaaaaaaagtttttgcttcaagtgttttggtgttttgcacttctgtaaacttactagctttaccttctaaaagtactgcattttttacttttttttatgatcaaggaaaagatcattaaaaaaaaacacaaagaagtttttctttgtgtttggatcaaaaagaaactttgtttttccgcaattgaaggttgtatgtaaatctgctttgtggtgacctgatgtaaacagtgtcttcttaaaatcaaatgtaaatcaattacagattaaaaaaaaaagcctgtatttaactcatatgatctcccttcagcaacttattttgctttaattgctttaaatcttaagcaatattttttattcagtaaacaaattctttcacaaggtacaaaatcttgcataagctgaactaaaataaaaatgaaaaggagagattaaaggtattccttgttcttcccttctcttcactagtctaaaaacttctttttaatcttaagattctttgtgatgagggtgagaaaaagaatcctcagtttatttttccactattaatctttcttttgataaatcctctattgactgggtagaggtatgtttgtgaaagacatgtaacttggggatttgttactttaggtttgttcccttgaatttcatctcatcaggcaaattgtactagttgtagttacgagttttccctcagtgaagtagcaataggctgtaatcaagaaaatatgccatttatagagataagataaatgaaataatacttcagccaccaggtttttctgtctcacatacataagcagcatttcattgcagatatgggactgattctgtggcttaccttgattaacatcttttggaagttttgctagtgtgctttcctttctttactatgtttctcagattcctttgtatcagggttttgggtgtcacttaggttttgtccatcagattctgtgagacaccaggcatcgttttgaggatgtgggttatacacatggagtgcttctggaactatcagcccacttgaccacccagtttgtggaagcacaggcaagagtgttcttttctggtgattctccaggccatttaataccctgcaatgtaattgtccctctgtggctcacatttcattagtgagccatgaaatcaactcagtgggacatagccagcatttttgcataccaggttgggctataaaatatttctgttgtcaataaattttaaatgttttcctgctaaactaaccagaatgaat

SEQ ID NO: 7329 - DNA, 2883 bp, Homo sapiens
gctgcgggcggtgccgccccaggtaaatcagtccaggagcagggcccgggcctggcgtacactctcggaaaaatgggggccagagcaaacaagaagagcgaaagcaagagggctaggcagccagaggcggcagmaagactcaagacgccaacggcgcsgtcttcctggggccccagggcctgcgccatccctgggctgccggggcaccgcctctccacgcccctcgtccggcggcggctgcgactgcttccgaggtcatgttcccaggacgggcgcgtcttcagggtggaagcctggcgcacgtccggaggtgccgaggacccaaccagcccaaactctgggggaaatgactcccctctgccctcgccccgcgctctgctaccatttccttacgtctctgcttcgctcagcgatgcaaaacgcgcgaggcgcacggcagagggccgaagccgcggtactctccgggccaggcccgcccctcggccgcgccgcgcagcacgggattccccggccgctgtccagcgctggccgcctgagccaaggctgccgcggagccagtacagtcggggccgctggctggaagggcgagcttcctaaggcggggggaagcccggcgccggggccgggtaggaaaggcgggggaggggctccggccgtctggaaggaatccacgcggcttgaggctgtgggggaagtagggtggcgagcggtccttctgcgcgcggggggcggggggggtggggtggtccattagggtcccctggcgagggggcggctttctagtgtgtgagggcgacgccctagaagctccccttcaaagttggccccacgcgctgaatgtggaaagttgactgggacccagtagtttcccatcccaaacctgctttccgagaagggcttcaaacccaaaatgtgaatcccgcctcccctctcagccagaactgtggactcgtcccggggaggggcggtgggtggggcggggctggcgggaaatttcggttttggcgcgctccctgcggcgacgctcatcgtgcgctctcctsttcccccsgtggtctcctcgctcgccttctggctctgccatgccctgctctgaagagacacccgccatttcacccagtaagcgggcccggcctgcggaggtgggcggcatgcagctccgctttgcccggctctccgagcacgccacggcccccacccggggctccgcgcgcgccgcgggctacgacctgtacagtgcctatgattacacaataccacctatggagaargctgttgtgaaaacggacattcagatagcgctcccttctgggtgttatggaagagtggctccacggtcaggcttggctgcaaaacactttattgatgtaggagctggtgtcatagatgaagattatagaggaaatgttggtgttgtactgtttaattttggcaaagaaaagtttgaagtcaaaaaaggtgatcgaattgcacagctcatttgcgaacggattttttatccagaaatagaagaagttcaagccttggatgacaccgaaaggggttcaggaggttttggttccmctggaaagaattaaaatttatgccaagaacagaaaacaagaagtcatacctttttcttaaaaaaaaaaaaaaagtttttgcttcaagtgttttggtgttttgcacttctgtaaacttactagctttaccttctaaaagtactgcattttttacttttttttatgatcaaggaaaagatcattaaaaaaaaacacaaagaagtttttctttgtgtttggatcaaaaagaaactttgtttttccgcaattgaaggttgtatgtaaatctgctttgtggtgacctgatgtaaacagtgtcttcttaaaatcaaatgtaaatcaattacagattaaaaaaaaaagcctgtatttaactcatatgatctcccttcagcaacttattttgctttaattgctttaaatcttaagcaatattttttattcagtaaacaaattctttcacaaggtacaaaatcttgcataagctgaactaaaataaaaatgaaaaggagagattaaaggtattccttgttcttcccttctcttcactagtctaaaaacttctttttaatcttaagattctttgtgatgagggtgagaaaaagaatcctcagtttatttttccactattaatctttcttttgataaatcctctattgactgggtagaggtatgtttgtgaaagacatgtaacttggggatttgttactttaggtttgttcccttgaatttcatctcatcaggcaaattgtactagttgtagttacgagttttccctcagtgaagtagcaataggctgtaatcaagaaaatatgccatttatagagataagataaatgaaataatacttcagccaccaggtttttctgtctcacatacataagcagcatttcattgcagatatgggactgattctgtggcttaccttgattaacatcttttggaagttttgctagtgtgctttcctttctttactatgtttctcagattcctttgtatcagggttttgggtgtcacttaggttttgtccatcagattctgtgagacaccaggcatcgttttgaggatgtgggttatacacatggagtgcttctggaactatcagcccacttgaccacccagtttgtggaagcacaggcaagagtgttcttttctggtgattctccaggccatttaataccctgcaatgtaattgtccctctgtggctcacatttcattagtgagccatgaaatcaactcagtgggacatagccagcatttttgcataccaggttgggctataaaatatttctgttgtcaataaattttaaatgttttcctgctaaactaaccagaatgaat

SEQ ID NO: 7330 - DNA, 2217 bp, Homo sapiens
cgaggtcatgttcccaggacgggcgcgtcttcagggtggaagcctggcgcacgtccggaggtgccgaggacccaaccagcccaaactctgggggaaatgactcccctctgccctcgccccgcgctctgctaccatttccttacgtctctgcttcgctcagcgatgcaaaacgcgcgaggcgcacggcagagggccgaagccgcggtactctccgggccaggcccgcccctcggccgcgccgcgcagcacgggattccccggccgctgtccagcgctggccgcctgagccaaggctgccgcggagccagtacagtcggggccgctggctggaagggcgagcttcctaaggcggggggaagcccggcgccggggccggagacacccgccatttcacccagtaagcgggcccggcctgcggaggtgggcggcatgcagctccgctttgcccggctctccgagcacgccacggcccccacccggggctccgcgcgcgccgcgggctacgacctgtacagtgcctatgattacacaataccacctatggagaargctgttgtgaaaacggacattcagatagcgctcccttctgggtgttatggaagagtggctccacggtcaggcttggctgcaaaacactttattgatgtaggagctggtgtcatagatgaagattatagaggaaatgttggtgttgtactgtttaattttggcaaagaaaagtttgaagacaggatatggcgaatgtgtcagtaacgtcagtaataaactattctttctttgaagtcaaaaaaggtgatcgaattgcacagctcatttgcgaacggattttttatccagaaatagaagaagttcaagccttggatgacaccgaaaggggttcaggaggttttggttccmctggaaagaattaaaatttatgccaagaacagaaaacaagaagtcatacctttttcttaaaaaaaaaaaaaaagtttttgcttcaagtgttttggtgttttgcacttctgtaaacttactagctttaccttctaaaagtactgcattttttacttttttttatgatcaaggaaaagatcattaaaaaaaaacacaaagaagtttttctttgtgtttggatcaaaaagaaactttgtttttccgcaattgaaggttgtatgtaaatctgctttgtggtgacctgatgtaaacagtgtcttcttaaaatcaaatgtaaatcaattacagattaaaaaaaaaagcctgtatttaactcatatgatctcccttcagcaacttattttgctttaattgctttaaatcttaagcaatattttttattcagtaaacaaattctttcacaaggtacaaaatcttgcataagctgaactaaaataaaaatgaaaaggagagattaaaggtattccttgttcttcccttctcttcactagtctaaaaacttctttttaatcttaagattctttgtgatgagggtgagaaaaagaatcctcagtttatttttccactattaatctttcttttgataaatcctctattgactgggtagaggtatgtttgtgaaagacatgtaacttggggatttgttactttaggtttgttcccttgaatttcatctcatcaggcaaattgtactagttgtagttacgagttttccctcagtgaagtagcaataggctgtaatcaagaaaatatgccatttatagagataagataaatgaaataatacttcagccaccaggtttttctgtctcacatacataagcagcatttcattgcagatatgggactgattctgtggcttaccttgattaacatcttttggaagttttgctagtgtgctttcctttctttactatgtttctcagattcctttgtatcagggttttgggtgtcacttaggttttgtccatcagattctgtgagacaccaggcatcgttttgaggatgtgggttatacacatggagtgcttctggaactatcagcccacttgaccacccagtttgtggaagcacaggcaagagtgttcttttctggtgattctccaggccatttaataccctgcaatgtaattgtccctctgtggctcacatttcattagtgagccatgaaatcaactcagtgggacatagccagcatttttgcataccaggttgggctataaaatatttctgttgtcaataaattttaaatgttttcctgctaaactaaccagaatgaat

SEQ ID NO: 7331 - DNA, 3451 bp, Homo sapiens
gcatacttgtgcggttccaagtgtggagaaagcggctctgggtctagattgagggatactccccctttccaccatgggcaagaagggcaaagttggcaagagccgacgagacaagttttatcacttggcgaaggagacgggttaccgttcccgatctgctttcaagctgatccagctcaatcgccgctttcagttcctgcagaaagcccgagccttgctggacctgtgtgctgcgccaggrggatggctgcaggtagctgccaagtttatgcctgtatccagccttattgtgggagtggacctggttccaatcaagcctctccccaatgtggtgactctccagsaggacatcacaacagaacgttgtaggcaggccctgaggaaggagctgaagacctggaaggttgatgttgtgctcaatgatggggcccccaacgttggggctagctgggtccatgatgcttactcacaagcccatttgacactgatggctctacgtttggcttgtgactttttggcccgtggtggcagcttcatcacaaaggttttccgttctcgtgactatcagcctctgctatggatctttcagcagctgttccgccgtgtccaggccaccaagccccaagcctctcgccatgaatctgcagagatctttgtagtctgccaaggattcctggcccctgacaaggttgacagtaaattctttgaccccaaatttgcctttaaggaggttgaagttcaggctaagaccgttactgaattggttactaagaagaagccaaaggctgaaggctatgctgagggtgacctcactctctatcaccgtacctcagtcactgayttcctccgagctgccaaccctgttgacttcctctccaaggccagcgaaatcatggtagatgatgaagagttggcacagcatccagctaccactgaggacatacgggtgtgctgtcaggacatcagagtgttgggrcgcaaggagctcaggtcgctactaaactggagaacaaaacttcggcgatatgtggccaagaagctgaaagaacaagcaaaggcactggacatcagcctcagctctggagaggaagatgaaggtgatgaggaggactcaacagctggaaccacaaagcagccctctaaggaggaggaggaagaggaggaggaggaacaactgaaccagaccttggcagaaatgaaggcccaggaggtggcggaattgaagaggaagaaaaagaagctgttgcgtgagcagagaaagcagcgggagcgtgtggagctgaagatggatctgcctggggtttccattgcagacgagggggagactggcatgttctccttgwgcaccatccggggtcaccagttattagaggaagtaacacaaggggatatgagtgcagcagacacatttctgtccgatctgccaagggatgatatctrtgtgtcagatgttgaggacgacggtgatgacacatctctggatagtgacctggatccagaggagctggcaggagtcaggggacatcagggtctaagggaccaaaagcgtatgcgacttactgaagtgcaagatgataaagaggaggaggaggaggagaatccactgctggtaccactggaggaaaaggcagtactgcaggaagaacaagccaacctgtggttctcaaagggcagctttgctgggatcgaggacgatgccgatgaggccctggagatcagtcaggcccagctgttatttgagaaccggcggaagggacggcagcagcagcagaagcagcagctgccacagacacccccttcctgtttgaagactgagataatgtctcccctgtaccaagatgaagcccctaagggaacagaggcttyttcggggacagaagctgccactggccttgaaggggaagaaaaggatggcatctcagacagtgatagcagtactagcagtgargaagaaragagctgggaacccctccgtggtaagaagcgaagccgtgggcctaagtcagatgatgacgggtttgagatagtgcctattgaggacccagcgaaacatcggatactggaccccgaaggccttgctctaggtgctgttattgcctcttccaaaaaggccaagagagacctcatagataactccttcaaccggtacacatttaatgaggatgagggggagcttccggagtggtttgtgcaagaggaaaagcagcaccggatacgacagttgcctgttggtaagaaggaggtggagcattaccggaaacgctggcgggaaatcaatgcacgtcccatcaagaaggtggctgaggctaaggctagaaagaaaaggaggatgctgaagaggctggagcagaccaggaagaaggcagaagccgtggtgaacacagtggacatctcagaacgagagaaagtggcacagctgcgaagtctctacaagaaggctgggcttggcaaggagaaacgccatgtcacctacgttgtagccaaaaaaggtgtgggccgcaaagtgcgccggccagctggagtcagaggtcatttcaaggtggtggactcaaggatgaagaaggaccaaagagcacagcaacgtaaggaacaaaagaaaaaacacaaacggaagtaagcagagctgccaggctcccaggagagcatggggactaggaggaagggtgtggcatggctcagtctggcccccttgattaccggcctagcccctgctcacatcacagctgtctgaagaacagtgaggtggagtgcctagaactcccgtggtggtcctgagcagagaggaggatgtcctcctgcctgcctgaaggtctcccatgaaaacactgctgaactgtgttgacactcatgaccctttttttaaaccgttaaagggaagttcggtgttggagcgatactcaatgtagtcagtctacacctggacgtgtgggccacttaagccctccccacccccatcctattcctraataaaaccaggataatggaatatgtaccaattcatagacagaaatgacaaacgatccacaggtcccggtagtaaaacatttactagagagcaagcagaaaggaatgcacatcttaaagaaaccttcacaaagtcacaaaagtcaaagtttgtatatttcttttcctttttataaacgataaacaaaaatcatcaaaatcatttcagcaaaagacttttctatcattggggcaagttaaaaaaaatacaatgaratagaagacactttaaaagctgttgttgggtytcttgtttaattttaaatttagcaataccatctcaaacctggagcaatcctggaacagttaccaggatcaccttttcccttcaatccttgtggcttctgggaatcttcagagcctgggtctgaaagggatgcaaacctggctggggacctgagcatcaactcccatttagaatcagacatctcccttccctgcaaatgtc

SEQ ID NO: 7332 - DNA, 3822 bp, Homo sapiens
gcatacttgtgcggttccaagtgtggagaaagcggctctgggtctagattgagggatactccccctttccaccatgggcaagaagggcaaagttggcaagagccgacgagacaagttttatcacttggcgaaggagacgggttaccgttcccgatctgctttcaagctgatccagctcaatcgccgctttcagttcctgcagaaagcccgagccttgctggacctgtgtgctgcgccaggrggatggctgcaggtagctgccaagtttatgcctgtatccagccttattgtgggagtggacctggttccaatcaagcctctccccaatgtggtgactctccagsaggacatcacaacagaacgttgtaggcaggccctgaggaaggagctgaagacctggaaggttgatgttgtgctcaatgatggggcccccaacgttggggctagctgggtccatgatgcttactcacaagcccatttgacactgatggctctacgtttggcttgtgactttttggcccgtggtggcagcttcatcacaaaggttttccgttctcgtgactatcagcctctgctatggatctttcagcagctgttccgccgtgtccaggccaccaagccccaagcctctcgccatgaatctgcagagatctttgtagtctgccaaggattcctggcccctgacaaggttgacagtaaattctttgaccccaaatttgcctttaaggaggttgaagttcaggctaagaccgttactgaattggttactaagaagaagccaaaggctgaaggctatgctgagggtgacctcactctctatcaccgtacctcagtcactgayttcctccgagctgccaaccctgttgacttcctctccaaggccagcgaaatcatggtagatgatgaagagttggcacagcatccagctaccactgaggacatacgggtgtgctgtcaggacatcagagtgttgggrcgcaaggagctcaggtcgctactaaactggagaacaaaacttcggcgatatgtggccaagaagctgaaagaacaagcaaaggcactggacatcagcctcagctctggagaggaagatgaaggtgatgaggaggactcaacagctggaaccacaaagcagccctctaaggaggaggaggaagaggaggaggaggaacaactgaaccagaccttggcagaaatgaaggcccaggaggtggcggaattgaagaggaagaaaaagaagctgttgcgtgagcagagaaagcagcgggagcgtgtggagctgaagatggatctgcctggggtttccattgcagacgagggggagactggcatgttctccttgwgcaccatccggggtcaccagttattagaggaagtaacacaaggggatatgagtgcagcagacacatttctgtccgatctgccaagggatgatatctrtgtgtcagatgttgaggacgacggtgatgacacatctctggatagtgacctggatccagaggagctggcaggagtcaggggacatcagggtctaagggaccaaaagcgtatgcgacttactgaagtgcaagatgataaagaggaggaggaggaggagaatccactgctggtaccactggaggaaaaggcagtactgcaggaagaacaagccaacctgtggttctcaaagggcagctttgctgggatcgaggacgatgccgatgaggccctggagatcagtcaggcccagctgttatttgagaaccggcggaagggacggcagcagcagcagaagcagcagctgccacagacacccccttcctgtttgaagactgagataatgtctcccctgtaccaagatgaagcccctaagggaacagaggcttyttcggggacagaagctgccactggccttgaaggggaagaaaaggatggcatctcagacagtgatagcagtactagcagtgargaagaaragagctgggaacccctccgtggtaagaagcgaagccgtgggcctaagtcagatgatgacgggtttgagatagtgcctattgaggacccagcgaaacatcggatactggaccccgaaggccttgctctaggtgctgttattgcctcttccaaaaaggccaagagagacctcatagataactccttcaaccggtacacatttaatgaggatgagggggagcttccggagtggtttgtgcaagaggaaaagcagcaccggatacgacagttgcctgttggtaagaaggaggtggagcattaccggaaacgctggcgggaaatcaatgcacgtcccatcaagaaggtggctgaggctaaggctagaaagaaaaggaggatgctgaagaggctggagcagaccaggaagaaggcagaagccgtggtgaacacagtggacatctcagaacgagagaaagtggcacagctgcgaagtctctacaagaaggctgggcttggcaaggagaaacgccatgtcacctacgttgtagccaaaaaaggtgtgggccgcaaagtgcgccggccagctggagtcagaggtcatttcaaggtggtggactcaaggatgaagaaggaccaaagagcacagcaacgtaaggaacaaaagaaaaaacacaaacggaagtaagcagagctgccaggctcccaggagagcatggggactaggaggaagggtgtggcatggctcagtctggcccccttgattaccggcctagcccctgctcacatcacagctgtctgaagaacagtgaggtggagtgcctagaactcccgtggtggtcctgagcagagaggaggatgtcctcctgcctgcctgaaggtctcccatgaaaacactgctgaactgtgttgacactcatgaccctttttttaaaccgttaaagggaagttcggtgttggagcgatactcaatgtagtcagtctacacctggacgtgtgggccacttaagccctccccacccccatcctattcctraataaaaccaggataatggaagagttgtcttttctgacagttttaataagcacttccctatctgtccctacactgtgtgcggcactattcttaatatgtaccaattcatagacagaaatgacaaacgatccacaggtcccggtagtaaaacatttactagagagcaagcagaaaggaatgcacatcttaaagaaaccttcacaaagtcacaaaagtcaaagtttgtatatttcttttcctttttataaacgataaacaaaaatcatcaaaatcatttcagcaaaagacttttctatcattggggcaagttaaaaaaaatacaatgaratagaagacactttaaaagctgttgttgggtytcttgtttaattttaaatttagcaataccatctcaaacctggagcaatcctggaacagttaccaggatcaccttttcccttcaatccttgtggcttctgggaatcttcagagcctgggtctgaaaggtgtttcctacatgtctcagggctggatgcaaacctggctggggacctgagcatcaactcccatttagaatcagacatctcccttccctgcaaatgtctacaactaccaaattgctccccaacagttagctcaatggattgaatttgcagaagccaactcctaaaatggggactgcctggccatacaactaagaaaaagaastcaatttatagatgcttataaggtgacaccttagtaaaaaatataagctacatacaatataaacctagagtgagttttgtgccctagaagaccctttatcccaagataacctcaacttacccrcatgacaactcacctagagccaaaagaagcttcccagctctcactgc

SEQ ID NO: 7333 - DNA, 3524 bp, Homo sapiens
gcatacttgtgcggttccaagtgtggagaaagcggctctgggtctagattgagggatactccccctttccaccatgggcaagaagggcaaagttggcaagagccgacgagacaagttttatcacttggcgaaggagacgggttaccgttcccgatctgctttcaagctgatccagctcaatcgccgctttcagttcctgcagaaagcccgagccttgctggacctgtgtgctgcgccaggrggatggctgcaggtagctgccaagtttatgcctgtatccagccttattgtgggagtggacctggttccaatcaagcctctccccaatgtggtgactctccagsaggacatcacaacagaacgttgtaggcaggccctgaggaaggagctgaagacctggaaggttgatgttgtgctcaatgatggggcccccaacgttggggctagctgggtccatgatgcttactcacaagcccatttgacactgatggctctacgtttggcttgtgactttttggcccgtggtggcagcttcatcacaaaggttttccgttctcgtgactatcagcctctgctatggatctttcagcagctgttccgccgtgtccaggccaccaagccccaagcctctcgccatgaatctgcagagatctttgtagtctgccaaggattcctggcccctgacaaggttgacagtaaattctttgaccccaaatttgcctttaaggaggttgaagttcaggctaagaccgttactgaattggttactaagaagaagccaaaggctgaaggctatgctgagggtgacctcactctctatcaccgtacctcagtcactgayttcctccgagctgccaaccctgttgacttcctctccaaggccagcgaaatcatggtagatgatgaagagttggcacagcatccagctaccactgaggacatacgggtgtgctgtcaggacatcagagtgttgggrcgcaaggagctcaggtcgctactaaactggagaacaaaacttcggcgatatgtggccaagaagctgaaagaacaagcaaaggcactggacatcagcctcagctctggagaggaagatgaaggtgatgaggaggactcaacagctggaaccacaaagcagccctctaaggaggaggaggaagaggaggaggaggaacaactgaaccagaccttggcagaaatgaaggcccaggaggtggcggaattgaagaggaagaaaaagaagctgttgcgtgagcagagaaagcagcgggagcgtgtggagctgaagatggatctgcctggggtttccattgcagacgagggggagactggcatgttctccttgwgcaccatccggggtcaccagttattagaggaagtaacacaaggggatatgagtgcagcagacacatttctgtccgatctgccaagggatgatatctrtgtgtcagatgttgaggacgacggtgatgacacatctctggatagtgacctggatccagaggagctggcaggagtcaggggacatcagggtctaagggaccaaaagcgtatgcgacttactgaagtgcaagatgataaagaggaggaggaggaggagaatccactgctggtaccactggaggaaaaggcagtactgcaggaagaacaagccaacctgtggttctcaaagggcagctttgctgggatcgaggacgatgccgatgaggccctggagatcagtcaggcccagctgttatttgagaaccggcggaagggacggcagcagcagcagaagcagcagctgccacagacacccccttcctgtttgaagactgagataatgtctcccctgtaccaagatgaagcccctaagggaacagaggcttyttcggggacagaagctgccactggccttgaaggggaagaaaaggatggcatctcagacagtgatagcagtactagcagtgargaagaaragagctgggaacccctccgtggtaagaagcgaagccgtgggcctaagtcagatgatgacgggtttgagatagtgcctattgaggacccagcgaaacatcggatactggaccccgaaggccttgctctaggtgctgttattgcctcttccaaaaaggccaagagagacctcatagataactccttcaaccggtacacatttaatgaggatgagggggagcttccggagtggtttgtgcaagaggaaaagcagcaccggatacgacagttgcctgttggtaagaaggaggtggagcattaccggaaacgctggcgggaaatcaatgcacgtcccatcaagaaggtggctgaggctaaggctagaaagaaaaggaggatgctgaagaggctggagcagaccaggaagaaggcagaagccgtggtgaacacagtggacatctcagaacgagagaaagtggcacagctgcgaagtctctacaagaaggctgggcttggcaaggagaaacgccatgtcacctacgttgtagccaaaaaaggtgtgggccgcaaagtgcgccggccagctggagtcagaggtcatttcaaggtggtggactcaaggatgaagaaggaccaaagagcacagcaacgtaaggaacaaaagaaaaaacacaaacggaagtaagcagagctgccaggctcccaggagagcatggggactaggaggaagggtgtggcatggctcagtctggcccccttgattaccggcctagcccctgctcacatcacagctgtctgaagaacagtgaggtggagtgcctagaactcccgtggtggtcctgagcagagaggaggatgtcctcctgcctgcctgaaggtctcccatgaaaacactgctgaactgtgttgacactcatgaccctttttttaaaccgttaaagggaagttcggtgttggagcgatactcaatgtagtcagtctacacctggacgtgtgggccacttaagccctccccacccccatcctattcctraataaaaccaggataatggaagagttgtcttttctgacagttttaataagcacttccctatctgtccctacactgtgtgcggcactattcttaatatgtaccaattcatagacagaaatgacaaacgatccacaggtcccggtagtaaaacatttactagagagcaagcagaaaggaatgcacatcttaaagaaaccttcacaaagtcacaaaagtcaaagtttgtatatttcttttcctttttataaacgataaacaaaaatcatcaaaatcatttcagcaaaagacttttctatcattggggcaagttaaaaaaaatacaatgaratagaagacactttaaaagctgttgttgggtytcttgtttaattttaaatttagcaataccatctcaaacctggagcaatcctggaacagttaccaggatcaccttttcccttcaatccttgtggcttctgggaatcttcagagcctgggtctgaaagggatgcaaacctggctggggacctgagcatcaactcccatttagaatcagacatctcccttccctgcaaatgtc

SEQ ID NO: 7334 - DNA, 4351 bp, Homo sapiens
cagcaacgggccgtgaggcggtggcggtggtggcggtggcggcggcggtggtggtggtggcggcggcggcggcgaagggggcggagaggaaggagcgcggcgggaccgggccgggacagcgcgtactttgggctccgggattcgctccgcgcccgcggttgtagcagctgccgctgcagccatagcagcaggacttcctcaagcgcagggactatgtcttaaggcgctttgcagagccaagctcatttctggcacataagaggtcagtcattggcaccatgaactggaataaaggtggtcctggcactaagcgaggatttggctttggaggttttgccatcagtgctgggaaaaaggaggaacccaaactcccacagcagtcccacagtgcctttggggcaaccagctcttcttctggatttggaaagtcagctccaccacagcttccttctttctacaaaattggatctaagcgggccaactttgatgaagaaaatgcctattttgaagatgaggaagaagattctagcaacgttgatttaccttacattcctgctgaaaactcaccaactcgccagcaattccattccaagccagtagattctgacagcgatgatgatcccttggaggcattcatggctgaagtggaggcaactagagacatgaagaggcttgaagaaaaggacaaggaaagaaaaaacgtaaagggtattcgagatgacattgaagaggaagatgaccaagaagcttattttcgatacatggcagaaaacccaactgctggtgtggttcaggaggaagaggaagacaatctagaatatgatagtgacggaaatccaattgcacctaccaaaaaaatcattgatcctcttccccccattgatcattcagagattgactatccaccatttgaaaaaaacttttacaatgagcatgaagagataaccaacctcactccacagcagttaatagatctccggcataagctcaatcttcgggtctctggtgctgcacctcctagaccaggaagtagctttgctcattttgggtttgacgaacaacttatgcaccagattcggaaatctgaatacacacagcccactccaatacagtgccagggtgtgcctgtggcattaagtggtagagacatgattggtattgccaaaacaggtagtgggaaaactgcagccttcatttggcccatgttgattcatataatggaccagaaggagttggaaccaggtgatggaccaattgcagtgattgtgtgtcctaccagggagctttgccagcagatccatgcagaatgtaagcggtttggaaaagcatataatcttcgatcagtggccgtatatggaggagggagtatgtgggagcaggccaaggcccttcaggagggggcagagattgttgtgtgtaccccaggtcgactgatagatcatgtgaaaaaraaagctaccaatcttcaaagagtctcttaccttgtgtttgatgaagcagatcgaatgtttgacatgggatttgagtaccaagttcgatccatagcaagtcatgttcgtcctgacaggcagactctcttatttagtgcaacttttcggaagaagattgaaaagttggccagagacatcctgatcgaccctattcgagtggtgcagggagatattggagaggcaaatgaagatgtgacacagattgtggagattctccattctggacctagtaaatggaactggcttacccggcgtctggtagaatttacctcttcagggagtgtcctcctctttgttactaaaaaagccaatgctgaagagctagcgaataaccttaaacaggagggtcataatcttgggctgctccatggggatatggatcagagtgagagaaacaaggtcatttcagactttaagaaaaaggacatcccagtcctggtggccacagatgttgcagcccgtggtctggacattccttcaattaagactgtcattaactatgatgtggcacgagacattgatacccacacgcataggattggccgcacaggaagagcgggtgagaaaggtgtggcctataccctactcactcccaaggacagcaattttgctggtgacctggtccggaacttggaaggagccaatcaacacgtttctaaggaactcctagatctggcaatgcagaatgcctggtttcggaaatctcgattcaaaggagggaaaggaaaaaagctgaacattggtggaggaggcctaggctacagggagcggcctggcctgggctctgagaacatggatcgaggaaataacaatgtratgagcaattatgaggcctacaagccttccacaggagctatgggagatcgactaacggcaatgaaagcagctttccagtcacagtacaagagtcactttgttgcagccagtttaagtaatcagaaggctggaagttctgctgctggggcaagtgggtggactagtgcagggagcttgaattctgttccaactaactcagcacaacagggccataacagtcctgacagccccgtcaccagtgccgccaagggcatcccaggctttggcaatactggcaacatcagtggtgcccctgtgacctacccgtctgccggagcccaaggagtcaacaacacagcttcagggaataacagccgagaagggactgggggcagcaacgggaaaagagagagatatactgagaaccggggcagcagccgtcacagtcacggagagactggcaatcggcatagcgatagtccacgtcacggagatggtggtcgccatggagatggataccgccatccagaaagcagcagccgtcatactgatggccatcggcacggggagaacagacatggaggaagcgcaggccggcatggggagaaccggggtgcaaatgatggtcggaatggggaaagcaggaaagaagcttttaatcgtgagagcaagatggagcccaagatggaacccaaagtggacagcagcaagatggacaaggtggacagcaagacagataagacagctgacggctttgctgtcccagagccgcctaaacgcaagaaaagtcgatgggacagttagaggggatgtgctaaagcgtgaaatcagttgtccttaatttttagaaagattttggtaactaggtgtctcagggctgggttggggtccaaagtgtaaggaccccctgcccttagtggagagctggagcttggagacattaccccttcatcagaaggaattttcggatgttttcttgggaagctgttttggtccttggaagcagtgagagctgggaagcttcttttggctctaggtgagttgtcatgygggtaagttgaggttatcttgggataaagggtcttctagggcacaaaactcactctaggtttatattgtatgtagcttatattttttactaaggtgtcaccttataagcatctataaattgasttctttttcttagttgtatggccaggcagtccccattttaggagttggcttctgcaaattcaatccattgagctaactgttggggagcaatttggtagttgtagacatttgcagggaagggagatgtctgattctaaatgggagttgatgctcaggtccccagccaggtttgcatccagccctgagacatgtaggaaacacctttcagacccaggctctgaagattcccagaagccacaaggattgaagggaaaaggtgatcctggtaactgttccaggattgctccaggtttgagatggtattgctaaatttaaaattaaacaagaracccaacaacagcttttaaagtgtcttctatytcattgtattttttttaacttgccccaatgatagaaaagtcttttgctgaaatgattttgatgatttttgtttatcgtttataaaaaggaaaagaaatatacaaactttgacttttgtgactttgtgaaggtttctttaagatgtgcattcctttctgcttgctctctagtaaatgttttactaccgggacctgtggatcgtttgtcatttctgtctatgaattggtacatattaagaatagtgccgcacacagtgtagggacagatagggaagtgcttattaaaactgtcagaaaagacaactcttccattatcctggttttattyaggaataggatgggggtggggagggcttaagtggcccacacgtccaggtgtagactgactacattgagtatcgctccaacaccgaacttccctttaacggtttaaaaaaagggtcatgagtgtcaacacagttcagcagtgttttcatgggagaccttcaggcaggcaggaggacatcctcctctctgctcaggaccaccacggga

SEQ ID NO: 7335 - DNA, 4361 bp, Homo sapiens
cagcaacgggccgtgaggcggtggcggtggtggcggtggcggcggcggtggtggtggtggcggcggcggcggcgaagggggcggagaggaaggagcgcggcgggaccgggccgggacagcgcgtactttgggctccgggattcgctccgcgcccgcggttgtagcagctgccgctgcagccatagcagcaggacttcctcaagcgcagggactatgtcttaaggcgctttgcagagccaagctcatttctggcacataagaggtcagtcattggcaccatgaactggaataaaggtggtcctggcactaagcgaggatttggctttggaggttttgccatcagtgctgggaaaaaggaggaacccaaactcccacagcagtcccacagtgcctttggggcaaccagctcttcttctggatttggaaagtcagctccaccacagcttccttctttctacaaaattggatctaagcgggccaactttgatgaagaaaatgcctattttgaagatgaggaagaagattctagcaacgttgatttaccttacattcctgctgaaaactcaccaactcgccagcaattccattccaagccagtagattctgacagcgatgatgatcccttggaggcattcatggctgaagtggaggcaagatcaggcagctagagacatgaagaggcttgaagaaaaggacaaggaaagaaaaaacgtaaagggtattcgagatgacattgaagaggaagatgaccaagaagcttattttcgatacatggcagaaaacccaactgctggtgtggttcaggaggaagaggaagacaatctagaatatgatagtgacggaaatccaattgcacctaccaaaaaaatcattgatcctcttccccccattgatcattcagagattgactatccaccatttgaaaaaaacttttacaatgagcatgaagagataaccaacctcactccacagcagttaatagatctccggcataagctcaatcttcgggtctctggtgctgcacctcctagaccaggaagtagctttgctcattttgggtttgacgaacaacttatgcaccagattcggaaatctgaatacacacagcccactccaatacagtgccagggtgtgcctgtggcattaagtggtagagacatgattggtattgccaaaacaggtagtgggaaaactgcagccttcatttggcccatgttgattcatataatggaccagaaggagttggaaccaggtgatggaccaattgcagtgattgtgtgtcctaccagggagctttgccagcagatccatgcagaatgtaagcggtttggaaaagcatataatcttcgatcagtggccgtatatggaggagggagtatgtgggagcaggccaaggcccttcaggagggggcagagattgttgtgtgtaccccaggtcgactgatagatcatgtgaaaaaraaagctaccaatcttcaaagagtctcttaccttgtgtttgatgaagcagatcgaatgtttgacatgggatttgagtaccaagttcgatccatagcaagtcatgttcgtcctgacaggcagactctcttatttagtgcaacttttcggaagaagattgaaaagttggccagagacatcctgatcgaccctattcgagtggtgcagggagatattggagaggcaaatgaagatgtgacacagattgtggagattctccattctggacctagtaaatggaactggcttacccggcgtctggtagaatttacctcttcagggagtgtcctcctctttgttactaaaaaagccaatgctgaagagctagcgaataaccttaaacaggagggtcataatcttgggctgctccatggggatatggatcagagtgagagaaacaaggtcatttcagactttaagaaaaaggacatcccagtcctggtggccacagatgttgcagcccgtggtctggacattccttcaattaagactgtcattaactatgatgtggcacgagacattgatacccacacgcataggattggccgcacaggaagagcgggtgagaaaggtgtggcctataccctactcactcccaaggacagcaattttgctggtgacctggtccggaacttggaaggagccaatcaacacgtttctaaggaactcctagatctggcaatgcagaatgcctggtttcggaaatctcgattcaaaggagggaaaggaaaaaagctgaacattggtggaggaggcctaggctacagggagcggcctggcctgggctctgagaacatggatcgaggaaataacaatgtratgagcaattatgaggcctacaagccttccacaggagctatgggagatcgactaacggcaatgaaagcagctttccagtcacagtacaagagtcactttgttgcagccagtttaagtaatcagaaggctggaagttctgctgctggggcaagtgggtggactagtgcagggagcttgaattctgttccaactaactcagcacaacagggccataacagtcctgacagccccgtcaccagtgccgccaagggcatcccaggctttggcaatactggcaacatcagtggtgcccctgtgacctacccgtctgccggagcccaaggagtcaacaacacagcttcagggaataacagccgagaagggactgggggcagcaacgggaaaagagagagatatactgagaaccggggcagcagccgtcacagtcacggagagactggcaatcggcatagcgatagtccacgtcacggagatggtggtcgccatggagatggataccgccatccagaaagcagcagccgtcatactgatggccatcggcacggggagaacagacatggaggaagcgcaggccggcatggggagaaccggggtgcaaatgatggtcggaatggggaaagcaggaaagaagcttttaatcgtgagagcaagatggagcccaagatggaacccaaagtggacagcagcaagatggacaaggtggacagcaagacagataagacagctgacggctttgctgtcccagagccgcctaaacgcaagaaaagtcgatgggacagttagaggggatgtgctaaagcgtgaaatcagttgtccttaatttttagaaagattttggtaactaggtgtctcagggctgggttggggtccaaagtgtaaggaccccctgcccttagtggagagctggagcttggagacattaccccttcatcagaaggaattttcggatgttttcttgggaagctgttttggtccttggaagcagtgagagctgggaagcttcttttggctctaggtgagttgtcatgygggtaagttgaggttatcttgggataaagggtcttctagggcacaaaactcactctaggtttatattgtatgtagcttatattttttactaaggtgtcaccttataagcatctataaattgasttctttttcttagttgtatggccaggcagtccccattttaggagttggcttctgcaaattcaatccattgagctaactgttggggagcaatttggtagttgtagacatttgcagggaagggagatgtctgattctaaatgggagttgatgctcaggtccccagccaggtttgcatccagccctgagacatgtaggaaacacctttcagacccaggctctgaagattcccagaagccacaaggattgaagggaaaaggtgatcctggtaactgttccaggattgctccaggtttgagatggtattgctaaatttaaaattaaacaagaracccaacaacagcttttaaagtgtcttctatytcattgtattttttttaacttgccccaatgatagaaaagtcttttgctgaaatgattttgatgatttttgtttatcgtttataaaaaggaaaagaaatatacaaactttgacttttgtgactttgtgaaggtttctttaagatgtgcattcctttctgcttgctctctagtaaatgttttactaccgggacctgtggatcgtttgtcatttctgtctatgaattggtacatattaagaatagtgccgcacacagtgtagggacagatagggaagtgcttattaaaactgtcagaaaagacaactcttccattatcctggttttattyaggaataggatgggggtggggagggcttaagtggcccacacgtccaggtgtagactgactacattgagtatcgctccaacaccgaacttccctttaacggtttaaaaaaagggtcatgagtgtcaacacagttcagcagtgttttcatgggagaccttcaggcaggcaggaggacatcctcctctctgctcaggaccaccacggga

SEQ ID NO: 7336 - DNA, 4357 bp, Homo sapiens
cagcaacgggccgtgaggcggtggcggtggtggcggtggcggcggcggtggtggtggtggcggcggcggcggcgaagggggcggagaggaaggagcgcggcgggaccgggccgggacagcgcgtactttgggctccgggattcgctccgcgcccgcggttgtagcagctgccgctgcagccatagcagcaggacttcctcaagcgcagggactatgtcttaaggcgctttgcagagccaagctcatttctggcacataagaggtcagtcattggcaccatgaactggaataaaggtggtcctggcactaagcgaggatttggctttggaggttttgccatcagtgctgggaaaaaggaggaacccaaactcccacagcagtcccacagtgcctttggggcaaccagctcttcttctggatttggaaagtcagctccaccacagcttccttctttctacaaaattggatctaagcgggccaactttgatgaagaaaatgcctattttgaagatgaggaagaagattctagcaacgttgatttaccttacattcctgctgaaaactcaccaactcgccagcaattccattccaagccagtagattctgacagcgatgatgatcccttggaggcattcatggctgaagtggaggatcaggcagctagagacatgaagaggcttgaagaaaaggacaaggaaagaaaaaacgtaaagggtattcgagatgacattgaagaggaagatgaccaagaagcttattttcgatacatggcagaaaacccaactgctggtgtggttcaggaggaagaggaagacaatctagaatatgatagtgacggaaatccaattgcacctaccaaaaaaatcattgatcctcttccccccattgatcattcagagattgactatccaccatttgaaaaaaacttttacaatgagcatgaagagataaccaacctcactccacagcagttaatagatctccggcataagctcaatcttcgggtctctggtgctgcacctcctagaccaggaagtagctttgctcattttgggtttgacgaacaacttatgcaccagattcggaaatctgaatacacacagcccactccaatacagtgccagggtgtgcctgtggcattaagtggtagagacatgattggtattgccaaaacaggtagtgggaaaactgcagccttcatttggcccatgttgattcatataatggaccagaaggagttggaaccaggtgatggaccaattgcagtgattgtgtgtcctaccagggagctttgccagcagatccatgcagaatgtaagcggtttggaaaagcatataatcttcgatcagtggccgtatatggaggagggagtatgtgggagcaggccaaggcccttcaggagggggcagagattgttgtgtgtaccccaggtcgactgatagatcatgtgaaaaaraaagctaccaatcttcaaagagtctcttaccttgtgtttgatgaagcagatcgaatgtttgacatgggatttgagtaccaagttcgatccatagcaagtcatgttcgtcctgacaggcagactctcttatttagtgcaacttttcggaagaagattgaaaagttggccagagacatcctgatcgaccctattcgagtggtgcagggagatattggagaggcaaatgaagatgtgacacagattgtggagattctccattctggacctagtaaatggaactggcttacccggcgtctggtagaatttacctcttcagggagtgtcctcctctttgttactaaaaaagccaatgctgaagagctagcgaataaccttaaacaggagggtcataatcttgggctgctccatggggatatggatcagagtgagagaaacaaggtcatttcagactttaagaaaaaggacatcccagtcctggtggccacagatgttgcagcccgtggtctggacattccttcaattaagactgtcattaactatgatgtggcacgagacattgatacccacacgcataggattggccgcacaggaagagcgggtgagaaaggtgtggcctataccctactcactcccaaggacagcaattttgctggtgacctggtccggaacttggaaggagccaatcaacacgtttctaaggaactcctagatctggcaatgcagaatgcctggtttcggaaatctcgattcaaaggagggaaaggaaaaaagctgaacattggtggaggaggcctaggctacagggagcggcctggcctgggctctgagaacatggatcgaggaaataacaatgtratgagcaattatgaggcctacaagccttccacaggagctatgggagatcgactaacggcaatgaaagcagctttccagtcacagtacaagagtcactttgttgcagccagtttaagtaatcagaaggctggaagttctgctgctggggcaagtgggtggactagtgcagggagcttgaattctgttccaactaactcagcacaacagggccataacagtcctgacagccccgtcaccagtgccgccaagggcatcccaggctttggcaatactggcaacatcagtggtgcccctgtgacctacccgtctgccggagcccaaggagtcaacaacacagcttcagggaataacagccgagaagggactgggggcagcaacgggaaaagagagagatatactgagaaccggggcagcagccgtcacagtcacggagagactggcaatcggcatagcgatagtccacgtcacggagatggtggtcgccatggagatggataccgccatccagaaagcagcagccgtcatactgatggccatcggcacggggagaacagacatggaggaagcgcaggccggcatggggagaaccggggtgcaaatgatggtcggaatggggaaagcaggaaagaagcttttaatcgtgagagcaagatggagcccaagatggaacccaaagtggacagcagcaagatggacaaggtggacagcaagacagataagacagctgacggctttgctgtcccagagccgcctaaacgcaagaaaagtcgatgggacagttagaggggatgtgctaaagcgtgaaatcagttgtccttaatttttagaaagattttggtaactaggtgtctcagggctgggttggggtccaaagtgtaaggaccccctgcccttagtggagagctggagcttggagacattaccccttcatcagaaggaattttcggatgttttcttgggaagctgttttggtccttggaagcagtgagagctgggaagcttcttttggctctaggtgagttgtcatgygggtaagttgaggttatcttgggataaagggtcttctagggcacaaaactcactctaggtttatattgtatgtagcttatattttttactaaggtgtcaccttataagcatctataaattgasttctttttcttagttgtatggccaggcagtccccattttaggagttggcttctgcaaattcaatccattgagctaactgttggggagcaatttggtagttgtagacatttgcagggaagggagatgtctgattctaaatgggagttgatgctcaggtccccagccaggtttgcatccagccctgagacatgtaggaaacacctttcagacccaggctctgaagattcccagaagccacaaggattgaagggaaaaggtgatcctggtaactgttccaggattgctccaggtttgagatggtattgctaaatttaaaattaaacaagaracccaacaacagcttttaaagtgtcttctatytcattgtattttttttaacttgccccaatgatagaaaagtcttttgctgaaatgattttgatgatttttgtttatcgtttataaaaaggaaaagaaatatacaaactttgacttttgtgactttgtgaaggtttctttaagatgtgcattcctttctgcttgctctctagtaaatgttttactaccgggacctgtggatcgtttgtcatttctgtctatgaattggtacatattaagaatagtgccgcacacagtgtagggacagatagggaagtgcttattaaaactgtcagaaaagacaactcttccattatcctggttttattyaggaataggatgggggtggggagggcttaagtggcccacacgtccaggtgtagactgactacattgagtatcgctccaacaccgaacttccctttaacggtttaaaaaaagggtcatgagtgtcaacacagttcagcagtgttttcatgggagaccttcaggcaggcaggaggacatcctcctctctgctcaggaccaccacggga

SEQ ID NO: 7337 - DNA, 3858 bp, Homo sapiens
ctattttgaagatgaggaagaagattctagcaacgttgatttaccttacattcctgctgaaaactcaccaactcgccagcaattccattccaagccagtagattctgacagcgatgatgatcccttggaggcattcatggctgaagtggaggatcaggcagctagagacatgaagaggcttgaagaaaaggacaaggaaagaaaaaacgtaaagggtattcgagatgacattgaagaggaagatgaccaagaagcttattttcgatacatggcagaaaacccaactgctggtgtggttcaggaggaagaggaagacaatctagaatatgatagtgacggaaatccaattgcacctaccaaaaaaatcattgatcctcttccccccattgatcattcagagattgactatccaccatttgaaaaaaacttttacaatgagcatgaagagataaccaacctcactccacagcagttaatagatctccggcataagctcaatcttcgggtctctggtgctgcacctcctagaccaggaagtagctttgctcattttgggtttgacgaacaacttatgcaccagattcggaaatctgaatacacacagcccactccaatacagtgccagggtgtgcctgtggcattaagtggtagagacatgattggtattgccaaaacaggtagtgggaaaactgcagccttcatttggcccatgttgattcatataatggaccagaaggagttggaaccaggtgatggaccaattgcagtgattgtgtgtcctaccagggagctttgccagcagatccatgcagaatgtaagcggtttggaaaagcatataatcttcgatcagtggccgtatatggaggagggagtatgtgggagcaggccaaggcccttcaggagggggcagagattgttgtgtgtaccccaggtcgactgatagatcatgtgaaaaaraaagctaccaatcttcaaagagtctcttaccttgtgtttgatgaagcagatcgaatgtttgacatgggatttgagtaccaagttcgatccatagcaagtcatgttcgtcctgacaggcagactctcttatttagtgcaacttttcggaagaagattgaaaagttggccagagacatcctgatcgaccctattcgagtggtgcagggagatattggagaggcaaatgaagatgtgacacagattgtggagattctccattctggacctagtaaatggaactggcttacccggcgtctggtagaatttacctcttcagggagtgtcctcctctttgttactaaaaaagccaatgctgaagagctagcgaataaccttaaacaggagggtcataatcttgggctgctccatggggatatggatcagagtgagagaaacaaggtcatttcagactttaagaaaaaggacatcccagtcctggtggccacagatgttgcagcccgtggtctggacattccttcaattaagactgtcattaactatgatgtggcacgagacattgatacccacacgcataggattggccgcacaggaagagcgggtgagaaaggtgtggcctataccctactcactcccaaggacagcaattttgctggtgacctggtccggaacttggaaggagccaatcaacacgtttctaaggaactcctagatctggcaatgcagaatgcctggtttcggaaatctcgattcaaaggagggaaaggaaaaaagctgaacattggtggaggaggcctaggctacagggagcggcctggcctgggctctgagaacatggatcgaggaaataacaatgtratgagcaattatgaggcctacaagccttccacaggagctatgggagatcgactaacggcaatgaaagcagctttccagtcacagtacaagagtcactttgttgcagccagtttaagtaatcagaaggctggaagttctgctgctggggcaagtgggtggactagtgcagggagcttgaattctgttccaactaactcagcacaacagggccataacagtcctgacagccccgtcaccagtgccgccaagggcatcccaggctttggcaatactggcaacatcagtggtgcccctgtgacctacccgtctgccggagcccaaggagtcaacaacacagcttcagggaataacagccgagaagggactgggggcagcaacgggaaaagagagagatatactgagaaccggggcagcagccgtcacagtcacggagagactggcaatcggcatagcgatagtccacgtcacggagatggtggtcgccatggagatggataccgccatccagaaagcagcagccgtcatactgatggccatcggcacggggagaacagacatggaggaagcgcaggccggcatggggagaaccggggtgcaaatgatggtcggaatggggaaagcaggaaagaagcttttaatcgtgagagcaagatggagcccaagatggaacccaaagtggacagcagcaagatggacaaggtggacagcaagacagataagacagctgacggctttgctgtcccagagccgcctaaacgcaagaaaagtcgatgggacagttagaggggatgtgctaaagcgtgaaatcagttgtccttaatttttagaaagattttggtaactaggtgtctcagggctgggttggggtccaaagtgtaaggaccccctgcccttagtggagagctggagcttggagacattaccccttcatcagaaggaattttcggatgttttcttgggaagctgttttggtccttggaagcagtgagagctgggaagcttcttttggctctaggtgagttgtcatgygggtaagttgaggttatcttgggataaagggtcttctagggcacaaaactcactctaggtttatattgtatgtagcttatattttttactaaggtgtcaccttataagcatctataaattgasttctttttcttagttgtatggccaggcagtccccattttaggagttggcttctgcaaattcaatccattgagctaactgttggggagcaatttggtagttgtagacatttgcagggaagggagatgtctgattctaaatgggagttgatgctcaggtccccagccaggtttgcatccagccctgagacatgtaggaaacacctttcagacccaggctctgaagattcccagaagccacaaggattgaagggaaaaggtgatcctggtaactgttccaggattgctccaggtttgagatggtattgctaaatttaaaattaaacaagaracccaacaacagcttttaaagtgtcttctatytcattgtattttttttaacttgccccaatgatagaaaagtcttttgctgaaatgattttgatgatttttgtttatcgtttataaaaaggaaaagaaatatacaaactttgacttttgtgactttgtgaaggtttctttaagatgtgcattcctttctgcttgctctctagtaaatgttttactaccgggacctgtggatcgtttgtcatttctgtctatgaattggtacatattaagaatagtgccgcacacagtgtagggacagatagggaagtgcttattaaaactgtcagaaaagacaactcttccattatcctggttttattyaggaataggatgggggtggggagggcttaagtggcccacacgtccaggtgtagactgactacattgagtatcgctccaacaccgaacttccctttaacggtttaaaaaaagggtcatgagtgtcaacacagttcagcagtgttttcatgggagaccttcaggcaggcaggaggacatcctcctctctgctcaggaccaccacggga

SEQ ID NO: 7338 - DNA, 2953 bp, Homo sapiens
tgccatggcgacgccgtcgcgccacggcccgcagaaccggccaagcgacccgggcgcggcgcggggaggctgaagggacgctcggcgtttgcctcagcatggagggcggggccgcggcagccacccccacagcactgccttactacgtggccttctcccagctgctgggcctgaccttggtggccatgaccggcgcgtggctcgggctgtaccgaggcggcattgcctgggagagcgacctgcagttcaacgcgcaccccctctgcatggtcataggcctgatcttcctgcagggaaatgccctrctggtttaccgtgtcttcaggaacgaagctaaacgcaccaccaaggtcctgcacgggctgctgcacatctttgcgctcgtcatcgccctggttggcttggtggcggtgttcgactaccacaggaagaagggctacgctgacctgtacagcctacacagctggtgcgggatccttgtctttgtcctgtactttgtgcagtggctggtgggcttcagcttcttcctgttccccggagcttcattctccctgcggagccgctaccgcccacagcacatcttctttggtgctaccatcttcctcctttccgtgggcaccgccctgctgggcctgaaggaggcactgctgttcaacctcgggggcaagtatagcgcatttgagcccgagggtgtcctggccaacgtgctgggcctgctgctggcctgcttcggtggggcggtgctctacatcttgacccgggccgactggaagcggccttcccaggcggaagagcaggccctctccatggacttcaagacgctgacggagggagatagccccggctcccagtgatgcgcccggcyggccctgggggttcgcggggtgtcttcttgcctgcccctgctgaggcgtcttcaggactgcaggctccggagagtggctctggcagcaggcgggcrcgtgggtgcagctgcatctgtttgagtgctgctttctggggtcaggtctccgcctcctctgcttctcctttctccgctgctatagaccagttcattgtgtgtggctcccgtgtctctgttgcccccttcagtgcagaaggctttgggtaggacttcgggtgttcggtcctggtcgcagagcacagatctttaaagaagcgagagaggaggccccaccctcctggcagcagatgcctggggcaaggccaggggaaactgggggggcctcagggacaggcctggaaaggccacgatggctgctgaattcaaacaaggagtccctccagcctgaataacacgtggcacaaatgggcccggcctttggcagaggagcaagtgatatgatgtgtaaagtatgttggtggtgaaagcaaggttccccaggagaggggagggactggcccctgggaagctctgagatgaggctgtggcccagctgtagtcctgaccttcctcttctttaaccctttagccctaggatggctttggtgggagaggggatagaagcccatgacttcagacagactttctcttggcagatgcaggcgggcctcctcccaggctgctccagacatgggggttggggatggggggcaccttgcagccccttcctgctggggctccctccttgtagcaccccccttgcggctcagctctggtttcctctcccaggctcacccaggctctgctcaggctgggaggcagagggcacaaaccttataattttttaaatgaaaaaccgctgctgctggctgtggctagagccccctggggctgctggagctgctgcctctgttctggaggacgagccttctccttatctgctgcccatctttccaggaagtcaggatggagtcagaacaactacagtcatcccccgtggtgtctgcacatcactccagccccataaagagtgtcatgttagctgagtcaccatttggcttcggcctggaaatagtgtgattagaacactgatcgtgtgcgaggccaggagatcaagaccatcctgactaacaaacacagtgaaaccccgtctctactaaaaatacaaaaaaattagccaggcgtggtggtgggcgcctgtagtcccagctacttgggaggctgaggcaggagaatggtgtgaacccgggagatggcgcttgcagtgagctgagattgcactccagccygggcgacaggctcaaaaaagaaaaaaaaaagaacaccgatcatgtgcttcttggatctggtgactgttctctccctgttttcctttctttttgggtgtttgaggagcatggcttagcttgagacacacacagacactgtgtacttcagtgaagggcttaatatacartttccaaacctgacgactcttcttcttgtaatggctgcccttttcctacctgaggccgtcttagagaaaggggccagtctcctctaatgctcagatttcccatagttggcttttgctgtgtctcctgcctcaggcagtgtcatttctgggagcaggtggttgtagtccaggcccctccccagcagggtctgcccaggctccttcgagcccctttccccgcctcctctcagcctgtccggatgacagtgttcgcctcctgtttagactgtacactcttcaggggtaggggtgccgtcagttcttcaatcagctggcacacacttgtatagtgaaatgtttacatgtgggaaaactccgccttagacaaactaccaaagtacaatcgtgtctctctctagccggaatgctacagagagaaatggaaccttagatttgcaacaaaagtctgtaaactggtctgtttgccaaagtgaacactggatgactaaggagctgmagaagrcsmccagaagcggatttgtggtgggttattttattttgcctgtggccaaycttctgtgaaatacaatgtgctgtyggtgcaacagatgattcaataaatgtctacagcagac

SEQ ID NO: 7339 - DNA, 3267 bp, Homo sapiens
ggagccgcgccgcatctcaggcgcagtctctaggggctgtgcgcatccgtgggggggacatgcgcatctcaggggggctgctcgcatctgggggtgctgtgtgcatctcgggggggctgtgcccatctagcggggtggctgtgcgcatctggagggggctgtgcgcaacccggggggggtgttgcgcgcatctagcaggggcggctgtgcgcatttcggggggggctgtgcatatctggggggaccgtgcttatctccgggggcggctgtgcgcatcttgaggggtgtgtacatctcggggggcctgtgcgcatcttggggggctgtgtgcatccgcgggggctgtgcgcatctcggggtgctgtgcgctgctcctctgagctctgctctttcttgcagcgtttgcctcagcatggagggcggggccgcggcagccacccccacagcactgccttactacgtggccttctcccagctgctgggcctgaccttggtggccatgaccggcgcgtggctcgggctgtaccgaggcggcattgcctgggagagcgacctgcagttcaacgcgcaccccctctgcatggtcataggcctgatcttcctgcagggaaatgccctrctggtttaccgtgtcttcaggaacgaagctaaacgcaccaccaaggtcctgcacgggctgctgcacatctttgcgctcgtcatcgccctggttggcttggtggcggtgttcgactaccacaggaagaagggctacgctgacctgtacagcctacacagctggtgcgggatccttgtctttgtcctgtactttgtgcagtggctggtgggcttcagcttcttcctgttccccggagcttcattctccctgcggagccgctaccgcccacagcacatcttctttggtgctaccatcttcctcctttccgtgggcaccgccctgctgggcctgaaggaggcactgctgttcaacctcgggggcaagtatagcgcatttgagcccgagggtgtcctggccaacgtgctgggcctgctgctggcctgcttcggtggggcggtgctctacatcttgacccgggccgactggaagcggccttcccaggcggaagagcaggccctctccatggacttcaagacgctgacggagggagatagccccggctcccagtgatgcgcccggcyggccctgggggttcgcggggtgtcttcttgcctgcccctgctgaggcgtcttcaggactgcaggctccggagagtggctctggcagcaggcgggcrcgtgggtgcagctgcatctgtttgagtgctgctttctggggtcaggtctccgcctcctctgcttctcctttctccgctgctatagaccagttcattgtgtgtggctcccgtgtctctgttgcccccttcagtgcagaaggctttgggtaggacttcgggtgttcggtcctggtcgcagagcacagatctttaaagaagcgagagaggaggccccaccctcctggcagcagatgcctggggcaaggccaggggaaactgggggggcctcagggacaggcctggaaaggccacgatggctgctgaattcaaacaaggagtccctccagcctgaataacacgtggcacaaatgggcccggcctttggcagaggagcaagtgatatgatgtgtaaagtatgttggtggtgaaagcaaggttccccaggagaggggagggactggcccctgggaagctctgagatgaggctgtggcccagctgtagtcctgaccttcctcttctttaaccctttagccctaggatggctttggtgggagaggggatagaagcccatgacttcagacagactttctcttggcagatgcaggcgggcctcctcccaggctgctccagacatgggggttggggatggggggcaccttgcagccccttcctgctggggctccctccttgtagcaccccccttgcggctcagctctggtttcctctcccaggctcacccaggctctgctcaggctgggaggcagagggcacaaaccttataattttttaaatgaaaaaccgctgctgctggctgtggctagagccccctggggctgctggagctgctgcctctgttctggaggacgagccttctccttatctgctgcccatctttccaggaagtcaggatggagtcagaacaactacagtcatcccccgtggtgtctgcacatcactccagccccataaagagtgtcatgttagctgagtcaccatttggcttcggcctggaaatagtgtgattagaacactgatcgtgtgcgaggccaggagatcaagaccatcctgactaacaaacacagtgaaaccccgtctctactaaaaatacaaaaaaattagccaggcgtggtggtgggcgcctgtagtcccagctacttgggaggctgaggcaggagaatggtgtgaacccgggagatggcgcttgcagtgagctgagattgcactccagccygggcgacaggctcaaaaaagaaaaaaaaaagaacaccgatcatgtgcttcttggatctggtgactgttctctccctgttttcctttctttttgggtgtttgaggagcatggcttagcttgagacacacacagacactgtgtacttcagtgaagggcttaatatacartttccaaacctgacgactcttcttcttgtaatggctgcccttttcctacctgaggccgtcttagagaaaggggccagtctcctctaatgctcagatttcccatagttggcttttgctgtgtctcctgcctcaggcagtgtcatttctgggagcaggtggttgtagtccaggcccctccccagcagggtctgcccaggctccttcgagcccctttccccgcctcctctcagcctgtccggatgacagtgttcgcctcctgtttagactgtacactcttcaggggtaggggtgccgtcagttcttcaatcagctggcacacacttgtatagtgaaatgtttacatgtgggaaaactccgccttagacaaactaccaaagtacaatcgtgtctctctctagccggaatgctacagagagaaatggaaccttagatttgcaacaaaagtctgtaaactggtctgtttgccaaagtgaacactggatgactaaggagctgmagaagrcsmccagaagcggatttgtggtgggttattttattttgcctgtggccaaycttctgtgaaatacaatgtgctgtyggtgcaacagatgattcaataaatgtctacagcagac

SEQ ID NO: 7340 - DNA, 2974 bp, Homo sapiens
ccgccgcccggttgccatggcgacgccgtcgcgccacggcccgcagaaccggccaagcgacccgggcgcggcgcggggaggctgaagggacgctcgggtaggcaagcgtttgcctcagcatggagggcggggccgcggcagccacccccacagcactgccttactacgtggccttctcccagctgctgggcctgaccttggtggccatgaccggcgcgtggctcgggctgtaccgaggcggcattgcctgggagagcgacctgcagttcaacgcgcaccccctctgcatggtcataggcctgatcttcctgcagggaaatgccctrctggtttaccgtgtcttcaggaacgaagctaaacgcaccaccaaggtcctgcacgggctgctgcacatctttgcgctcgtcatcgccctggttggcttggtggcggtgttcgactaccacaggaagaagggctacgctgacctgtacagcctacacagctggtgcgggatccttgtctttgtcctgtactttgtgcagtggctggtgggcttcagcttcttcctgttccccggagcttcattctccctgcggagccgctaccgcccacagcacatcttctttggtgctaccatcttcctcctttccgtgggcaccgccctgctgggcctgaaggaggcactgctgttcaacctcgggggcaagtatagcgcatttgagcccgagggtgtcctggccaacgtgctgggcctgctgctggcctgcttcggtggggcggtgctctacatcttgacccgggccgactggaagcggccttcccaggcggaagagcaggccctctccatggacttcaagacgctgacggagggagatagccccggctcccagtgatgcgcccggcyggccctgggggttcgcggggtgtcttcttgcctgcccctgctgaggcgtcttcaggactgcaggctccggagagtggctctggcagcaggcgggcrcgtgggtgcagctgcatctgtttgagtgctgctttctggggtcaggtctccgcctcctctgcttctcctttctccgctgctatagaccagttcattgtgtgtggctcccgtgtctctgttgcccccttcagtgcagaaggctttgggtaggacttcgggtgttcggtcctggtcgcagagcacagatctttaaagaagcgagagaggaggccccaccctcctggcagcagatgcctggggcaaggccaggggaaactgggggggcctcagggacaggcctggaaaggccacgatggctgctgaattcaaacaaggagtccctccagcctgaataacacgtggcacaaatgggcccggcctttggcagaggagcaagtgatatgatgtgtaaagtatgttggtggtgaaagcaaggttccccaggagaggggagggactggcccctgggaagctctgagatgaggctgtggcccagctgtagtcctgaccttcctcttctttaaccctttagccctaggatggctttggtgggagaggggatagaagcccatgacttcagacagactttctcttggcagatgcaggcgggcctcctcccaggctgctccagacatgggggttggggatggggggcaccttgcagccccttcctgctggggctccctccttgtagcaccccccttgcggctcagctctggtttcctctcccaggctcacccaggctctgctcaggctgggaggcagagggcacaaaccttataattttttaaatgaaaaaccgctgctgctggctgtggctagagccccctggggctgctggagctgctgcctctgttctggaggacgagccttctccttatctgctgcccatctttccaggaagtcaggatggagtcagaacaactacagtcatcccccgtggtgtctgcacatcactccagccccataaagagtgtcatgttagctgagtcaccatttggcttcggcctggaaatagtgtgattagaacactgatcgtgtgcgaggccaggagatcaagaccatcctgactaacaaacacagtgaaaccccgtctctactaaaaatacaaaaaaattagccaggcgtggtggtgggcgcctgtagtcccagctacttgggaggctgaggcaggagaatggtgtgaacccgggagatggcgcttgcagtgagctgagattgcactccagccygggcgacaggctcaaaaaagaaaaaaaaaagaacaccgatcatgtgcttcttggatctggtgactgttctctccctgttttcctttctttttgggtgtttgaggagcatggcttagcttgagacacacacagacactgtgtacttcagtgaagggcttaatatacartttccaaacctgacgactcttcttcttgtaatggctgcccttttcctacctgaggccgtcttagagaaaggggccagtctcctctaatgctcagatttcccatagttggcttttgctgtgtctcctgcctcaggcagtgtcatttctgggagcaggtggttgtagtccaggcccctccccagcagggtctgcccaggctccttcgagcccctttccccgcctcctctcagcctgtccggatgacagtgttcgcctcctgtttagactgtacactcttcaggggtaggggtgccgtcagttcttcaatcagctggcacacacttgtatagtgaaatgtttacatgtgggaaaactccgccttagacaaactaccaaagtacaatcgtgtctctctctagccggaatgctacagagagaaatggaaccttagatttgcaacaaaagtctgtaaactggtctgtttgccaaagtgaacactggatgactaaggagctgmagaagrcsmccagaagcggatttgtggtgggttattttattttgcctgtggccaaycttctgtgaaatacaatgtgctgtyggtgcaacagatgattcaataaatgtctacagcagac

SEQ ID NO: 7341 - DNA, 201 bp, Homo sapiens
atgactaaggagctgmagaagrcsmccagaagcggatttgtgaccatcccttctgagagaggaggcagcgtggtggagggaagagctgtcagtgtggctgattcagaggcctacctgtgcctctgtgaccctgagcaacttcagctctcaggatctgcttctgcatttgttttggagacagcagtgtcgtctgtcgaggtg

SEQ ID NO: 7342 - DNA, 1483 bp, Homo sapiens
tcccaggcaggcaggcgcgctcgggcgaggtaggagcgatgtggcctgggaacgcctggcgcgccgcactcttctgggtgccccgcggccgccgcgcacagtcagcgctggcccagctgcgtggcattctggagggggagctggaaggcatcygcggagctggcacttggaagagtgagcgggtcatcacgtcccgtcaggggccgcacatccgcgtggacggcgtctccggaggaatccttaacttctgtgccaacaactacctgggcctgagcagccacyctgaggtgatccaggcaggtctgcaggctctggaggagtttggagctggcctcarctctgtccgctttatctgtggaacccagagcatccacaagaatctagaagcaaaaatagcccgcttccaccagcgggaggatgccatcctctatcccagctgttatgacgccaacgccggcctctttgaggccctgctgaccccagaggacgcagtcctgtcggacgagctgaaccatgcctccatcatcgacggcatccggctgtgcaaggcccacaagtaccgctatcgccacctggacatggcygacctagaagccaagctgcaggaggcccagaagcatcggctgcgcctggtggccactgatggggccttttccatggatggcgacatcgcacccctgcaggagatctgctgcctcgcctctagatatggtgccctggtcttcatggatgaatgccatgccactggcttcctggggcccacaggacggggcacagatgagctgctgggtgtgatggaccaggtcaccatcatcaactccaccctggggaaggccctgggtggagcatcagggggctacacgacagggcctgggcccctggtgtccctgctgcggcagcgcgcccggccrtacctcttctccaacagtctgccacctgctgtcgttggctgcgcctccaaggccctagatctgctgatggggagtaacaccattgtccagtctatggctgccaagacccagaggttccgtagtaagatggaagctgctggcttcactatctcgggagccagtcaccccatctgccctgtgatgctgggtgatgccyggctggcctctcgcatggcggatgacatgctgaagagaggcatctttgtcatcgggttcagctaccccgtggtccccaagggcaaggcccggatccgggtacagatctcagcagtgcatagcgaggaagacattgaccgctgcgtggaggccttcgtggaagtggggcgactgcacggggcactgccctgagctctgggtaaggacgagaagagccaaggtccgcctrctgccacagggtcaaaggaggttttcgatcagcccagaccagaggctytgagccctgaaccaaagtcccagagctgggctgggacgtgacctgtgctgagggctgtgagaatgtgaaacaacagtgtgaaaattggctgtgacactct

SEQ ID NO: 7343 - DNA, 2997 bp, Homo sapiens
ggaagtagaagtgctgagtaagccgagacagagggggaagacggtggggcctccccacctgccccgcagaagatgcagttctttggccgcctggtcaataccttcagtggcgtcaccaacttgttctctaacccattccgggtgaaggaggtggctgtrgccgactacacctcgagtgaccgagttcgggaggaagggcagctgattctgttccagaacactcccaaccgcacctgggactgcgtcctggtcaaccccrggaactcacagagtggattccgactcttccagctggagttggaggctgacgccctagtgaatttccatcagtattcttcccagctgctacccttctatgagagctcccctcaggtcctgcacactgaggtcctgcagcacctgaccgacctcatccgtaaccaccccagctggtcagtggcccacctggctgtggagctagggatccgcgagtgcttccatcacagccgtatcatcagctgtgccaattgcgcggagaacgaggagggctgcacacccctgcacctggcctgccgcaagggtgatggggagatcctggtggagctggtgcagtactgccacactcagatggatgtcaccgactacaagggagagaccgtcttccattatgctgtccagggtgacaattctcaggtgctgcagctccttggaaggaacgcagtggctggcctgaaccaggtgaataaccaagggctgaccccgctgcacctggcctgccagctggggaagcaggagatggtccgcgtgctgctgctgtgcaatgctcggtgcaacatcatgggccccaacggctaccccatccactcggccatgaagttctctcagaaggggtgtgcggagatgatcatcagcatggacagcagccagatccacagcaaagacccccgttacggagccagccccctccactgggccaagaacgcagagatggcccgcatgctgctgaaacggggctgcaacgtgaacagcaccagctccgcggggaacacrgccctgcacgtggcggtgatgcgcaaccgcttcgactgtgccatagtgctgctgacccacggggccaacrcggatgcccgcggagagcacggcaacaccccgctgcacctggccatgtcgaaagacaaygtggagatgatcaaggccctcatcgtgttcggagcagaagtggacaccccgaatgactttggggagactcctacattcctagcctccaaaatcggcagacaactacaggatctcatgcacatctcacgggcccggaagccagcgttcatcctgggctccatgagggacgagaagcggacccacgaccacctgctgtgcctggatggaggaggagtgaaaggcctcatcatcatccagctcctcatcgccatcgagaaggcctcgggtgtggccaccaaggacctgtttgactgggtggcgggcaccagcactggaggcatcctggccctggccattctgcacagtaagtccatggcctacatgcgcggcatgtactttcgcatgaaggatgaggtgttccggggctccaggccctacgagtcggggcccctggaggagttcctgaagcgggagtttggggagcacaccaagatgacggacgtcaggaaacccaaggtgatgctgacagggacactgtctgaccggcagccggctgaactccacctcttccggaactacgatgctccagaaactgtccgggagcctcgtttcaaccagaacgttaacctcaggcctccagctcagccctcagaccagctggtgtggcgggcggcccgaagcagcggggcagctcctacttacttccgacccaatgggcgcttcctggacggtgggctgctggccaacaaccccacgytggatgccatgaccgagatccatgagtacaatcaggacctgatccgcaagggtcaggccaacaaggtgaagaaactctccatcgttgtctccctggggacagggaggtccccacaagtgcctgtgacctgtgtggatgtcttccgtcccagcaacccctgggagctggccaagactgtttttggggccaaggaactgggcaagatggtggtggactgttgcacggatccagacgggcgggctgtggaccgggcacgggcctggtgcgagatggtcggcatccagtacttcagattgaacccccagctggggacggacatcatgctggatgaggtcastgacacagtgctggtcaacgccctctgggagaccgaggtctacatctatgagcaccgcgaggagttccagaagctcatccagctgctgctctcaccctgagggtccccagcctctcaccggccccagctgacctcgtccattcagcccctgccaggccaagcccagccactgccctcccgggcagatctgggcccaggcacctctgagtccatagaccaggcctgggagaatgccaagctgcctgcccgaggctggtcctgaaggcctgtctcccactaaccccgccttccagcactttctgtcattccaggctgggaaagtctagagccccctttggcccctttccctgactgtcaaggacaactgactcccccatcagctcaaacattaagggtacccgggcacaaccgtacccctgcccccagccccagcctccctgagggcctgccgggctgcctctgccccagcccccagcaagggcactcccaggcttcctggtgggtgcagcccactccctctgccctctgctccgttccctgggggctgggactaaagaaatgggtgtcccccaccccatcagctgggaaagcccaggccgcaggagtgggatgcccgttggactttgcccctcacactggcccagcccctcacactgccccaccccgagaaccctcagctctcaaaggtcactcctgggagtttcttcttcccaatggaagtggcttaagagccaaaactgaaataaatcatttggattcaagttca

SEQ ID NO: 7344 - DNA, 3245 bp, Homo sapiens
acctcgcgggtgggcggggcctgggggtccgttccccaacttcctcggcgctccggactcccaagtctccgccggaccctcctttggatattcctcgtgtctccgattctgaggcatagggggaagacggtggggcctccccacctgccccgcagaagatgcagttctttggccgcctggtcaataccttcagtggcgtcaccaacttgttctctaacccattccgggtgaaggaggtggctgtrgccgactacacctcgagtgaccgagttcgggaggaagggcagctgattctgttccagaacactcccaaccgcacctgggactgcgtcctggtcaaccccrggaactcacagagtggattccgactcttccagctggagttggaggctgacgccctagtgaatttccatcagtattcttcccagctgctacccttctatgagagctcccctcaggtcctgcacactgaggtcctgcagcacctgaccgacctcatccgtaaccaccccagctggtcagtggcccacctggctgtggagctagggatccgcgagtgcttccatcacagccgtatcatcagctgtgccaattgcgcggagaacgaggagggctgcacacccctgcacctggcctgccgcaagggtgatggggagatcctggtggagctggtgcagtactgccacactcagatggatgtcaccgactacaagggagagaccgtcttccattatgctgtccagggtgacaattctcaggtgctgcagctccttggaaggaacgcagtggctggcctgaaccaggtgaataaccaagggctgaccccgctgcacctggcctgccagctggggaagcaggagatggtccgcgtgctgctgctgtgcaatgctcggtgcaacatcatgggccccaacggctaccccatccactcggccatgaagttctctcagaaggggtgtgcggagatgatcatcagcatggacagcagccagatccacagcaaagacccccgttacggagccagccccctccactgggccaagaacgcagagatggcccgcatgctgctgaaacggggctgcaacgtgaacagcaccagctccgcggggaacacrgccctgcacgtggcggtgatgcgcaaccgcttcgactgtgccatagtgctgctgacccacggggccaacrcggatgcccgcggagagcacggcaacaccccgctgcacctggccatgtcgaaagacaaygtggagatgatcaaggccctcatcgtgttcggagcagaagtggacaccccgaatgactttggggagactcctacattcctagcctccaaaatcggcagacttgtcaccaggaaggcgatcttgactctgctgagaaccgtgggggccgaatactgcttcccacccatccacggggtccccgcggagcagggctctgcagcgccacatcatcccttctccctggaaagagctcagcccccaccgatcagcctaaacaacctagaactacaggatctcatgcacatctcacgggcccggaagccagcgttcatcctgggctccatgagggacgagaagcggacccacgaccacctgctgtgcctggatggaggaggagtgaaaggcctcatcatcatccagctcctcatcgccatcgagaaggcctcgggtgtggccaccaaggacctgtttgactgggtggcgggcaccagcactggaggcatcctggccctggccattctgcacagtaagtccatggcctacatgcgcggcatgtactttcgcatgaaggatgaggtgttccggggctccaggccctacgagtcggggcccctggaggagttcctgaagcgggagtttggggagcacaccaagatgacggacgtcaggaaacccaaggtgatgctgacagggacactgtctgaccggcagccggctgaactccacctcttccggaactacgatgctccagaaactgtccgggagcctcgtttcaaccagaacgttaacctcaggcctccagctcagccctcagaccagctggtgtggcgggcggcccgaagcagcggggcagctcctacttacttccgacccaatgggcgcttcctggacggtgggctgctggccaacaaccccacgytggatgccatgaccgagatccatgagtacaatcaggacctgatccgcaagggtcaggccaacaaggtgaagaaactctccatcgttgtctccctggggacagggaggtccccacaagtgcctgtgacctgtgtggatgtcttccgtcccagcaacccctgggagctggccaagactgtttttggggccaaggaactgggcaagatggtggtggactgttgcacggatccagacgggcgggctgtggaccgggcacgggcctggtgcgagatggtcggcatccagtacttcagattgaacccccagctggggacggacatcatgctggatgaggtcastgacacagtgctggtcaacgccctctgggagaccgaggtctacatctatgagcaccgcgaggagttccagaagctcatccagctgctgctctcaccctgagggtccccagcctctcaccggccccagctgacctcgtccattcagcccctgccaggccaagcccagccactgccctcccgggcagatctgggcccaggcacctctgagtccatagaccaggcctgggagaatgccaagctgcctgcccgaggctggtcctgaaggcctgtctcccactaaccccgccttccagcactttctgtcattccaggctgggaaagtctagagccccctttggcccctttccctgactgtcaaggacaactgactcccccatcagctcaaacattaagggtacccgggcacaaccgtacccctgcccccagccccagcctccctgagggcctgccgggctgcctctgccccagcccccagcaagggcactcccaggcttcctggtgggtgcagcccactccctctgccctctgctccgttccctgggggctgggactaaagaaatgggtgtcccccaccccatcagctgggaaagcccaggccgcaggagtgggatgcccgttggactttgcccctcacactggcccagcccctcacactgccccaccccgagaaccctcagctctcaaaggtcactcctgggagtttcttcttcccaatggaagtggcttaagagccaaaactgaaataaatcatttggattcaagttca

SEQ ID NO: 7345 - DNA, 1416 bp, Homo sapiens
ggcgcaggcgcaagataagctaggagccgcgcgagtcgtagtgtcgctgtttgcgggtctccgcgcgggaccggggcgcagcggggtcgctgaggcgagggtgtcatgtcagacaacgaggacaattttgatggcgacgactttgatgatgtggaggaggatgaagggctagatgacttggagaatgccgaagaggaaggccaggagaatgtcgagatcctcccctctggggagcgaccgcaggccaaccagaagcgaatcaccacaccatacatgaccaagtacgagcgagcccgcgtgctgggcacccgagcgctccagattgygatgtgtgcccctgtgatggtggagctggagggggagacagatcctctgctcattgccatgaaggaactcaaggcccgaaagatccccatcatcattcgccgttacctgccagatgggagctatgaagactggggggtggacgagctcatcatcaccgactgagctggagtcatcttcctgcccttgccccatgcccaattttcattctcactttatatgtgtaaataataaaatattcaactttccaacccccttcccctctgcttatctgcaatgtcaccacctgttgcttccccgttaccgccatgctgcgtggagcatgcacctattccagtggccctgtgactgtcagctccttaagaagcaccaggggcccttagcccctttggatcccccacatccttccctccatctccctgttccccagagcaaaggctgctgcaggggagacacctcagctgccttccaagcagacagacaagtctttgtgcccagggagctggttgccacggaaacccccaatttcctttccagtggggactggctgcaggggcttctcccttctcaggagtatcacagagcaggtctcatcaagccacccattgtttcctaaggacctgcttcgagcctcttatcgtgggctcrgatcccctttcaggagcagtgccccagcaggaagcgtgggggtgtgctgatctcccaccctccccaggcagagccctgctgggcaagtcagcagctggagcaaggaccgagcacctgcctacccctgcccccatggctctgtccccactcctcctcaggactctgcccacacgctgtcctctgtggcccacctctttggtgtgccacacccatgccttcttcctagcctctataagatatcctttccctcctatttggggctggtgatcccctgaggccttggggacatggtgctggggtggtggtgctcctgggttccaggtgttacattaagtcagagctggagytcccccttcctctgcctgaggttctaatgggtcctcttcctttctccaccctgcttacccaacctgaggtaagaccagtcacactggctcctccctc

SEQ ID NO: 7346 - DNA, 460 bp, Homo sapiens
ggcgcaggcgcaagataagctaggagccgcgcgagtcgtagtgtcgctgtttgcgggtctccgcgcgggaccggggcgcagcggggtcgctgaggcgagggtgtcatgtcagacaacgaggacaattttgatggcgacgactttgatgatgtggaggaggatgaagggctagatgacttggagaatgccgaagaggaaggccaggagaatgtcgagatcctcccctctggggagcgaccgcaggccaaccagaagcgaatcaccacaccatacatgaccaagtacgagcgagcccgcgtgctgggcacccgagcgctccagattgygatgtgtgcccctgtgatggtggagctggagggggagacagatcctctgctcattgccatgaaggaactcaaccccaagaggctgctcctaagacttctctttgcttgtgttttgcacacaatctgttccttct

SEQ ID NO: 7347 - DNA, 675 bp, Homo sapiens
atgaggtctgtgctgattcccagactgagcacaggacaagataagaaaaggaacggayctgtggataagcatgtctcttcaaagcctctgacaggtatctctgatttayaggatgtcttcagggccatgcatccagagcttgacattgtgcagttgtacctgaagccactgctcattggagaacttgccccaggagagcccagccaggaaagacacaaaaatgctcagagctcatttttgcagcatgacgcggggcacctttccatatttaggaagtccaagtggaaccacgtggtgcataaatttgtgatgtgccatctcaagggcctrtcagcagaccggtggaattactggcactttgaacaacacgtaaagccgaacatctaccccaaagacccagatattgacacggacccastttttctccttggagattcacaacctgtcaagttttattatctctctattcagtacggcaagaagaaaatcaaatacatcaactatgaaragcagcacctgtacttctacaaagttacatctgagcccctggaacttcaggttctccagggagcgggtattgatctcttatgccccagctatatactcactgatgaggaggaactgaaaagagagaccttgatcagcaatcagtgccagttgcctaaagagaatgtg

SEQ ID NO: 7348 - DNA, 1954 bp, Homo sapiens
cccctgctccggagtgacgcgggcccgggcgcgacggtctcggcggcggcggcggcggcgacagagcgagcgcggcgcggggccaccatgggggcccagctcagcacgttgggccatatggtgctcttcccagtctggttcctgtacagtctgctcatgaagctgttccagcgctccacgccagccatcaccctcgagagcccggacatcaagtacccrctgcggctcatcgaccgrgagatcatcagccatgacacccggcgcttccgctttgccctgccgtcaccccagcacatcctgggccyccctgtcggcyagcacatctacctctcggctcgaattgatggaaacctggtcgtccggccctatacacmmatctccagcgatgatgacaagggcttcrtggacctggtcatcaaggtttacttcaaggacabccatcccaagtttcccgctggagggaagrtgyctcagtacctggagagcatgcagattggagacaccattgagttccggggccccagtgggctgcyggtctaccagggcaaagggaagttcgccatcygacctgacaaaaagtccaaccctatcatcagkacagtgaagtctgtgggcatgatcrygggagggacaggcatcaccccgatgctgcaggtgatccgcgccatcatgaaggaccctgatgaccacactgtgyrccacctgctctttgccaaccagaccragaaggacatcctgctgcgacctgagctggaggaactcaggaacaaacattctgcacgcttcaagctctggtacacgckggacagagcccctgaagcctgggactacggccagggcttcgtgaatgaggagatgatccgggaccaccttccacccccagaggaggagccgctggtgctgatgtgtggccccccacccatgatccagtacgcctgccttcccaacctggaccacgtgggccaccccacggagcgctgcttcrtcttctgagggccgggcacggtcacacggccacccgccccgcgcaccccacgccctgttcacgctcaccyrgtcacctccccacatcgcacactggggccccrggttcagcctggcctgcccgtgccctggtgaatcacctggctgagcagttcccctggagccccttcgggagcagggctgtgtcccagatgggccacggctgagccttcagagtacgtcctgcctggcacttactggtccttaccagagacgcccagccccatccctgtcctcatgacccctcgtccaccccmcacacacactataaggctgagggctgccagcagccccgtctgcccaccattcccggccgtggaccatagtcgggatgtcagcagacacacatgggcagcccaaagctgcaggtgccagggcccaccccagcctcgcctgtcacccccactcccgcctcagggccaggcccaggcctcaccacctgacgctgcatgagacattgacaccagaaagccctcttgggggcactgctccctacccmagggccctggccagccgggagcttggctctcctctggctagagtgggaagagggggctggccatggggccctcccagaacctcagcatttccttccagcccatccaaacactgaggcagccttggggaaccccgagctggggggttggcagcccactgcaccgcctcagggttttggggtcctgggctggggccaccatccctgatggcagaactcccacaaccacatgtatttattcctctgtcctaaaccgtcccctccttccctcacccccagcacagggggattytgagcagtgcctcttgtctgagggacatatcagtgacctcgacgttgcctttagactacagttgtgttagcctcttgcgtattggctttttcagagtcatttatgagcagaaaaaaaaaaagtaaaactttgctaatattaac

SEQ ID NO: 7349 - DNA, 1892 bp, Homo sapiens
tccgccgcctcgaggcagacccggatccagagggcgcctggacaagttgggccatatggtgctcttcccagtctggttcctgtacagtctgctcatgaagctgttccagcgctccacgccagccatcaccctcgagagcccggacatcaagtacccrctgcggctcatcgaccgrgagatcatcagccatgacacccggcgcttccgctttgccctgccgtcaccccagcacatcctgggccyccctgtcggcyagcacatctacctctcggctcgaattgatggaaacctggtcgtccggccctatacacmmatctccagcgatgatgacaagggcttcrtggacctggtcatcaaggtttacttcaaggacabccatcccaagtttcccgctggagggaagrtgyctcagtacctggagagcatgcagattggagacaccattgagttccggggccccagtgggctgcyggtctaccagggcaaagggaagttcgccatcygacctgacaaaaagtccaaccctatcatcagkacagtgaagtctgtgggcatgatcrygggagggacaggcatcaccccgatgctgcaggtgatccgcgccatcatgaaggaccctgatgaccacactgtgyrccacctgctctttgccaaccagaccragaaggacatcctgctgcgacctgagctggaggaactcaggaacaaacattctgcacgcttcaagctctggtacacgckggacagagcccctgaagcctgggactacggccagggcttcgtgaatgaggagatgatccgggaccaccttccacccccagaggaggagccgctggtgctgatgtgtggccccccacccatgatccagtacgcctgccttcccaacctggaccacgtgggccaccccacggagcgctgcttcrtcttctgagggccgggcacggtcacacggccacccgccccgcgcaccccacgccctgttcacgctcaccyrgtcacctccccacatcgcacactggggccccrggttcagcctggcctgcccgtgccctggtgaatcacctggctgagcagttcccctggagccccttcgggagcagggctgtgtcccagatgggccacggctgagccttcagagtacgtcctgcctggcacttactggtccttaccagagacgcccagccccatccctgtcctcatgacccctcgtccaccccmcacacacactataaggctgagggctgccagcagccccgtctgcccaccattcccggccgtggaccatagtcgggatgtcagcagacacacatgggcagcccaaagctgcaggtgccagggcccaccccagcctcgcctgtcacccccactcccgcctcagggccaggcccaggcctcaccacctgacgctgcatgagacattgacaccagaaagccctcttgggggcactgctccctacccmagggccctggccagccgggagcttggctctcctctggctagagtgggaagagggggctggccatggggccctcccagaacctcagcatttccttccagcccatccaaacactgaggcagccttggggaaccccgagctggggggttggcagcccactgcaccgcctcagggttttggggtcctgggctggggccaccatccctgatggcagaactcccacaaccacatgtatttattcctctgtcctaaaccgtcccctccttccctcacccccagcacagggggattytgagcagtgcctcttgtctgagggacatatcagtgacctcgacgttgcctttagactacagttgtgttagcctcttgcgtattggctttttcagagtcatttatgagcagaaaaaaaaaaagtaaaactttgctaatattaac

SEQ ID NO: 7350 - DNA, 2011 bp, Homo sapiens
atgggaggcctctcccaacactttgtgggatccaggccaggggttggccctggagtctgccagccacactgggaaaacattggagcttggtctgccatcctgaactgtggttcccctgcctcccagcccggctgtgagtgctcagcgaccctgacaggctgacagttgggccatatggtgctcttcccagtctggttcctgtacagtctgctcatgaagctgttccagcgctccacgccagccatcaccctcgagagcccggacatcaagtacccrctgcggctcatcgaccgrgagatcatcagccatgacacccggcgcttccgctttgccctgccgtcaccccagcacatcctgggccyccctgtcggcyagcacatctacctctcggctcgaattgatggaaacctggtcgtccggccctatacacmmatctccagcgatgatgacaagggcttcrtggacctggtcatcaaggtttacttcaaggacabccatcccaagtttcccgctggagggaagrtgyctcagtacctggagagcatgcagattggagacaccattgagttccggggccccagtgggctgcyggtctaccagggcaaagggaagttcgccatcygacctgacaaaaagtccaaccctatcatcagkacagtgaagtctgtgggcatgatcrygggagggacaggcatcaccccgatgctgcaggtgatccgcgccatcatgaaggaccctgatgaccacactgtgyrccacctgctctttgccaaccagaccragaaggacatcctgctgcgacctgagctggaggaactcaggaacaaacattctgcacgcttcaagctctggtacacgckggacagagcccctgaagcctgggactacggccagggcttcgtgaatgaggagatgatccgggaccaccttccacccccagaggaggagccgctggtgctgatgtgtggccccccacccatgatccagtacgcctgccttcccaacctggaccacgtgggccaccccacggagcgctgcttcrtcttctgagggccgggcacggtcacacggccacccgccccgcgcaccccacgccctgttcacgctcaccyrgtcacctccccacatcgcacactggggccccrggttcagcctggcctgcccgtgccctggtgaatcacctggctgagcagttcccctggagccccttcgggagcagggctgtgtcccagatgggccacggctgagccttcagagtacgtcctgcctggcacttactggtccttaccagagacgcccagccccatccctgtcctcatgacccctcgtccaccccmcacacacactataaggctgagggctgccagcagccccgtctgcccaccattcccggccgtggaccatagtcgggatgtcagcagacacacatgggcagcccaaagctgcaggtgccagggcccaccccagcctcgcctgtcacccccactcccgcctcagggccaggcccaggcctcaccacctgacgctgcatgagacattgacaccagaaagccctcttgggggcactgctccctacccmagggccctggccagccgggagcttggctctcctctggctagagtgggaagagggggctggccatggggccctcccagaacctcagcatttccttccagcccatccaaacactgaggcagccttggggaaccccgagctggggggttggcagcccactgcaccgcctcagggttttggggtcctgggctggggccaccatccctgatggcagaactcccacaaccacatgtatttattcctctgtcctaaaccgtcccctccttccctcacccccagcacagggggattytgagcagtgcctcttgtctgagggacatatcagtgacctcgacgttgcctttagactacagttgtgttagcctcttgcgtattggctttttcagagtcatttatgagcagaaaaaaaaaaagtaaaactttgctaatattaac

SEQ ID NO: 7351 - DNA, 1643 bp, Homo sapiens
tccgccgcctcgaggcagacccggatccagagggcgcctggacaagttgggccatatggtgctcttcccagtctggttcctgtacagtctgctcatgaagctgttccagcgctccacgccagccatcaccctcgagagcccggacatcaagtacccrctgcggctcatcgaccgrgagatcatcagccatgacacccggcgcttccgctttgccctgccgtcaccccagcacatcctgggccyccctgtcggcyagcacatctacctctcggctcgaattgatggaaacctggtcgtccggccctatacacmmatctccagcgatgatgacaagggcttcrtggacctggtcatcaaggtttacttcaaggacabccatcccaagtttcccgctggagggaagrtgyctcagtacctggagagcatgcagattggagacaccattgagttccggggccccagtgggctgcyggtctaccagggcaaagggaagttcgccatcygacctgacaaaaagtccaaccctatcatcagkacagtgaagtctgtgggcatgatcrygggagggacaggcctcgctcagcacgtgcgaggcccggccggctattttgcaggcatcaccccgatgctgcaggtgatccgcgccatcatgaaggaccctgatgaccacactgtgyrccacctgctctttgccaaccagaccragaaggacatcctgctgcgacctgagctggaggaactcaggaacaaacattctgcacgcttcaagctctggtacacgckggacagagcccctgaagcctgggactacggccagggcttcgtgaatgaggagatgatccgggaccaccttccacccccagaggaggagccgctggtgctgatgtgtggccccccacccatgatccagtacgcctgccttcccaacctggaccacgtgggccaccccacggagcgctgcttcrtcttctgagggccgggcacggtcacacggccacccgccccgcgcaccccacgccctgttcacgctcaccyrgtcacctccccacatcgcacactggggccccrggttcagcctggcctgcccgtgccctggtgaatcacctggctgagcagttcccctggagccccttcgggagcagggctgtgtcccagatgggccacggctgagccttcagagtacgtcctgcctggcacttactggtccttaccagagacgcccagccccatccctgtcctcatgacccctcgtccaccccmcacacacactataaggctgagggctgccagcagccccgtctgcccaccattcccggccgtggaccatagtcgggatgtcagcagacacacatgggcagcccaaagctgcaggtgccagggcccaccccagcctcgcctgtcacccccactcccgcctcagggccaggcccaggcctcaccacctgacgctgcatgagacattgacaccagaaagccctcttgggggcactgctccctacccmagggccctggccagccgggagcttggctctcctctggctagagtgggaagagggggctggccatggttttggggtcctgggctggggccaccatccctgatggcagaactcccacaaccacatgtatttattcctctgtcc

SEQ ID NO: 7352 - DNA, 1996 bp, Homo sapiens
cccctgctccggagtgacgcgggcccgggcgcgacggtctcggcggcggcggcggcggcgacagagcgagcgcggcgcggggccaccatgggggcccagctcagcacgttgggccatatggtgctcttcccagtctggttcctgtacagtctgctcatgaagctgttccagcgctccacgccagccatcaccctcgagagcccggacatcaagtacccrctgcggctcatcgaccgrgagatcatcagccatgacacccggcgcttccgctttgccctgccgtcaccccagcacatcctgggccyccctgtcggcyagcacatctacctctcggctcgaattgatggaaacctggtcgtccggccctatacacmmatctccagcgatgatgacaagggcttcrtggacctggtcatcaaggtttacttcaaggacabccatcccaagtttcccgctggagggaagrtgyctcagtacctggagagcatgcagattggagacaccattgagttccggggccccagtgggctgcyggtctaccagggcaaagggaagttcgccatcygacctgacaaaaagtccaaccctatcatcagkacagtgaagtctgtgggcatgatcrygggagggacaggcctcgctcagcacgtgcgaggcccggccggctattttgcaggcatcaccccgatgctgcaggtgatccgcgccatcatgaaggaccctgatgaccacactgtgyrccacctgctctttgccaaccagaccragaaggacatcctgctgcgacctgagctggaggaactcaggaacaaacattctgcacgcttcaagctctggtacacgckggacagagcccctgaagcctgggactacggccagggcttcgtgaatgaggagatgatccgggaccaccttccacccccagaggaggagccgctggtgctgatgtgtggccccccacccatgatccagtacgcctgccttcccaacctggaccacgtgggccaccccacggagcgctgcttcrtcttctgagggccgggcacggtcacacggccacccgccccgcgcaccccacgccctgttcacgctcaccyrgtcacctccccacatcgcacactggggccccrggttcagcctggcctgcccgtgccctggtgaatcacctggctgagcagttcccctggagccccttcgggagcagggctgtgtcccagatgggccacggctgagccttcagagtacgtcctgcctggcacttactggtccttaccagagacgcccagccccatccctgtcctcatgacccctcgtccaccccmcacacacactataaggctgagggctgccagcagccccgtctgcccaccattcccggccgtggaccatagtcgggatgtcagcagacacacatgggcagcccaaagctgcaggtgccagggcccaccccagcctcgcctgtcacccccactcccgcctcagggccaggcccaggcctcaccacctgacgctgcatgagacattgacaccagaaagccctcttgggggcactgctccctacccmagggccctggccagccgggagcttggctctcctctggctagagtgggaagagggggctggccatggggccctcccagaacctcagcatttccttccagcccatccaaacactgaggcagccttggggaaccccgagctggggggttggcagcccactgcaccgcctcagggttttggggtcctgggctggggccaccatccctgatggcagaactcccacaaccacatgtatttattcctctgtcctaaaccgtcccctccttccctcacccccagcacagggggattytgagcagtgcctcttgtctgagggacatatcagtgacctcgacgttgcctttagactacagttgtgttagcctcttgcgtattggctttttcagagtcatttatgagcagaaaaaaaaaaagtaaaactttgctaatattaac

SEQ ID NO: 7353 - DNA, 1646 bp, Homo sapiens
tccgccgcctcgaggcagacccggatccagagggcgcctggacaagttgggccatatggtgctcttcccagtctggttcctgtacagtctgctcatgaagctgttccagcgctccacgccagccatcaccctcgagagcccggacatcaagtacccrctgcggctcatcgaccgrgagatcatcagccatgacacccggcgcttccgctttgccctgccgtcaccccagcacatcctgggccyccctgtcggcyagcacatctacctctcggctcgaattgatggaaacctggtcgtccggccctatacacmmatctccagcgatgatgacaagggcttcrtggacctggtcatcaaggtttacttcaaggacabccatcccaagtttcccgctggagggaagrtgyctcagtacctggagagcatgcagattggagacaccattgagttccggggccccagtgggctgcyggtctaccagggcaaagggaagttcgccatcygacctgacaaaaagtccaaccctatcatcagkacagtgaagtctgtgggcatgatcrygggagggacaggcatcaccccgatgctgcaggtgatccgcgccatcatgaaggaccctgatgaccacactgtgyrccacctgctctttgccaaccagaccragaaggacatcctgctgcgacctgagctggaggaactcaggaacaaacattctgcacgcttcaagctctggtacacgckggacagagcccctgaagcctgggactacggccagggcttcgtgaatgaggagatgatccgggaccaccttccacccccagaggaggagccgctggtgctgatgtgtggccccccacccatgatccagtacgcctgccttcccaacctggaccacgtgggccaccccacggagcgctgcttcrtcttctgagggccgggcacggtcacacggccacccgccccgcgcaccccacgccctgttcacgctcaccyrgtcacctccccacatcgcacactggggccccrggttcagcctggcctgcccgtgccctggtgaatcacctggctgagcagttcccctggagccccttcgggagcagggctgtgtcccagatgggccacggctgagccttcagagtacgtcctgcctggcacttactggtccttaccagagacgcccagccccatccctgtcctcatgacccctcgtccaccccmcacacacactataaggctgagggctgccagcagccccgtctgcccaccattcccggccgtggaccatagtcgggatgtcacatttccttccagcccatccaaacactgaggcagccttggggaaccccgagctggggggttggcagcccactgcaccgcctcagggttttggggtcctgggctggggccaccatccctgatggcagaactcccacaaccacatgtatttattcctctgtcctaaaccgtcccctccttccctcacccccagcacagggggattytgagcagtgcctcttgtctgagggacatatcagtgacctcgacgttgcctttagactacagttgtgttagcctcttgcgtattggctttttcagagtcatttatgagcagaaaaaaaaaaagtaaaactttgctaatattaacc

SEQ ID NO: 7354 - DNA, 1850 bp, Homo sapiens
tgcgccgcgccgccgcagtcgggcctcggtcgccacggtaacgcgcgcgggcaggtgtccgaccatgagcgtccgggtcgcacgggtagcgtgggtcaggggcttgggcgccagctaccgccgcggcgcctcgagcttcccggtgcctccgccgggcgcccagggtgtagcggagctgctgcgagatgcgaccggggcggaggaggaggcgccctgggcggcgacggagcggcgaatgccgggccagtgctccgtgctgctcttcccgggccagggcagccaggtggtgggcatgggccgcggtctgctcaactacccgcgcgtccgcgaactctacgccgccgcccgccgcgtgctgggctacgacctgctggaactgagcctgcacgggccgcaggagaccctggaccgcaccgtgcactgtcagcccgcgatcttcgtggcatcgctggccgctgtcgagaaactacatcacctgcagccctcggtgattgagaactgtgttgctgctgctggattcagtgtgggagagtttgcagccctagtgtttgccggagccatggaatttgctgaaggctctacggtttctccagaagaattcctctaagtttcatttcagacgcaccaggatgttgccggttagtggcgcattccacacccgcctcatggagccagccgtggagcccctgacgcaagctttaaaggcagtcgacattaagaagcctctggtttctgtctactccaacgtccacgsgcatagatacaggcatcccgggcacatccacaagctgctggcccagcagctggtctccccagtgaagtgggagcagacgatgcatgccatatacgaaaggaaaaagggcagggggttcccccaaactttcgaagtaggccctggcaggcagctgggagccatcctgaagagctgtaacatgcaggcctggaagtcctacagcgccgtggatgtgctgcasaccctcgaacatgtggacctggaccctcaggakcccccgagatgactgcagggggctcaaatgcratgamcccctctgtcctcctgaggagaggctgtaggctstgcctgtcgccccctaccttcctaatggctcctcctctgaggagtgaaagggatttgtttgcaacgtgctttgaaggccacataaaaagccctaaaaatgagtatttctttacatgacccagtccatttctyccccttggaaaaacgtttggacgttgggaagaatgatgccacagggctggtgtgtggggaagctrgaatcctggccccgcctctgccagccctgcaccataggcaggtgtgccatctcagcgggaaggggaggactggctgctgcagcctgtcctgctctgtgagtgctgagaacatgctggtgtggcctcaatttcagccagtgccaggggagcccctccaccacccccagcctgccccccagggctcctttgtcacaaatctgaaaggttttagaacccagttggccttggcagttttgttcacctcctcacttgacagctgggagacagaggcccacatttatggacatacccaagagatatgtattgcctgctgtgtgctagagagtgagtgcgctctgttctggtagaaaggtccttgagtgaggtgcggggtgtggggagtgccaggtagggagggcgactgaggccctggtcctaggggtggaaccatggaggaacaccctggtcacccactgggactgcgggtctgcggggcgccagagggagcacagcacatacctgcctcggagctgacccctggctccatgccccgtcctcagagmagctcctgcgycaatattaagtatgagacatty

SEQ ID NO: 7355 - DNA, 2068 bp, Homo sapiens
tgcgccgcgccgccgcagtcgggcctcggtcgccacggtaacgcgcgcgggcaggtgtccgaccatgagcgtccgggtcgcacgggtagcgtgggtcaggggcttgggcgccagctaccgccgcggcgcctcgagcttcccggtgcctccgccgggcgcccagggtgtagcggagctgctgcgagatgcgaccggggcggaggaggaggcgccctgggcggcgacggagcggcgaatgccgggccagtgctccgtgctgctcttcccgggccagggcagccaggtggtgggcatgggccgcggtctgctcaactacccgcgcgtccgcgaactctacgccgccgcccgccgcgtgctgggctacgacctgctggaactgagcctgcacgggccgcaggagaccctggaccgcaccgtgcactgtcagcccgcgatcttcgtggcatcgctggccgctgtcgagaaactacatcacctgcagccctcggtgattgagaactgtgttgctgctgctggattcagtgtgggagagtttgcagccctagtgtttgccggagccatggaatttgctgaaggtttgtatgcagtgaaaatccgagctgaggccatgcaggaagcttcagaagctgtccccagtgggatgctgtctgtcctcggccagcctcagtccaagttcaacttcgcctgtttggaagcccgggaacactgcaagtctttaggcatagagaaccccgtatgtgaagtrtccaactacctctttccagattgcagggtsatttcaggacaccaagaggctctacggtttctccagaagaattcctctaagtttcatttcagacgcaccaggatgttgccggttagtggcgcattccacacccgcctcatggagccagccgtggagcccctgacgcaagctttaaaggcagtcgacattaagaagcctctggtttctgtctactccaacgtccacgsgcatagatacaggcatcccgggcacatccacaagctgctggcccagcagctggtctccccagtgaagtgggagcagacgatgcatgccatatacgaaaggaaaaagggcagggggttcccccaaactttcgaagtaggccctggcaggcagctgggagccatcctgaagagctgtaacatgcaggcctggaagtcctacagcgccgtggatgtgctgcasaccctcgaacatgtggacctggaccctcaggakcccccgagatgactgcagggggctcaaatgcratgamcccctctgtcctcctgaggagaggctgtaggctstgcctgtcgccccctaccttcctaatggctcctcctctgaggagtgaaagggatttgtttgcaacgtgctttgaaggccacataaaaagccctaaaaatgagtatttctttacatgacccagtccatttctyccccttggaaaaacgtttggacgttgggaagaatgatgccacagggctggtgtgtggggaagctrgaatcctggccccgcctctgccagccctgcaccataggcaggtgtgccatctcagcgggaaggggaggactggctgctgcagcctgtcctgctctgtgagtgctgagaacatgctggtgtggcctcaatttcagccagtgccaggggagcccctccaccacccccagcctgccccccagggctcctttgtcacaaatctgaaaggttttagaacccagttggccttggcagttttgttcacctcctcacttgacagctgggagacagaggcccacatttatggacatacccaagagatatgtattgcctgctgtgtgctagagagtgagtgcgctctgttctggtagaaaggtccttgagtgaggtgcggggtgtggggagtgccaggtagggagggcgactgaggccctggtcctaggggtggaaccatggaggaacaccctggtcacccactgggactgcgggtctgcggggcgccagagggagcacagcacatacctgcctcggagctgacccctggctccatgccccgtcctcagagmagctcctgcgycaatattaagtatgagacatty

SEQ ID NO: 7356 - DNA, 2238 bp, Homo sapiens
gggctccagggaactacagctcccagcatgccccggggcccgcaaccgtccgccgcccggtgcactgtggacgatgagtcagggttaggggcgccaggacgtgygcgtgcaggacgccagagctgggtcagagctcgagccagcggcgcccggagagattcggagatgcaggcggctcggatggccgcgagcttggggcggcagctgctgaggytcgggggcggaagctmgcrgctcacggcgctcctggggcagccccggcccggccctgcccggcggccctatgccggggrtgccgctcaggaatctaagtcctttgctgtgggaatgttcaaaggccagctcaccacagatcaggtgttcycatacccgtccgtgctcaacgaagagcagacacagtttcttaaagagctggtggagcctgtgtcccgtttcttcgaggaagtgaacgatcccgccaagaatgacgctctggagatggtggaggagaccacttrgcagggcctcaaggagctgggggcctttggtctgyaagtgcccagtgagctgggtggtgtgggcctttgcaacamccrgtacgcccgtttggtggagatcgtgggcatgcatgaccttggcrtgggcattaccctgggggcccatcagagcatcrgtttcaaaggcatcctgctctttggcacaaaggcccagaaagaaaaatacctccccaagctggcatctggggagactgtggccsctttctgtctaaccgagccctcaagcgggtcagatgcagcctccatcygaacctctgctgwgcccagcccctgtggaaaatactataccctcaatggaagcvmgctttggatcagtaatgggggcctagcagacatcttcacggtctttgccaagacaccagttacagatccagccacaggagccgtgaaggagaagatcacagcttttgtggtggagaggggcttcggggrcattacccatgrgccccctgagaagaakatgggcatcaaggcttcaaacacagcagaggtgttctttgatggagtacgggygcyatcggagaacgtgctgggtgaggttgggagtggcttcaaggttgccatgcacatcctcaacaatggaaggtttggcatggctgcrgccctggcaggtaccatgagaggcatcattgctaagkcggtagatcatgccactaatyrtacccagtttggggagaaaattcacaactttgggctgatccaggagaagctggcacggatggttatgctgcagtatgtaactgagtccatggcttamatggtgagtgctaacatggaccagggagccacggacttccagatagaggccgccatcagcaaaatctttggctcggaggcagcctrgaargtgacagatgaatgcatccaaatcatggggggtatggrcttcatgaaggaacctggagtagagcrtgtgctccgagatcttcgcatcytcyggatctttgaggrgacaaatgacattcttcggctgtttgtggctctgcagggctrtatggacaaaggaaaggagctctctgggcttggcagtgctctaaagaatccctttgggaatgctggcctcctgctaggagaggcaggcaaacagctgaggcggcgggcagggctgggcagcggcctgagtctcagcggacttgtccacccggagttgagtcggagtggcragctggcagtacgggctctggagcagtttgccactgtggtggaggccaagctgataaaacacaagaaggggattgtcaatgaacagtttctgctgcagcggctggcagacggggccatcgacctctatgccatggtggtggttctctcgagggcctcaagatccctgagtgagggccaccccacggcccagcatgagaaaatgctctgtgacacctggtgtatcgaggctgcagctyggatcyragagggcatggccgccctgcagtytgacccctggcagcaagagctctaccgcaacttcaaaagcatctccaaggccttggtggagcggggtggtgtggtcaccagcaacccacttggcttytgaatactcccggccagggcctgtcccagttatgtgccttccctcaagccaaagccgaagcccctttccttaaggccctggtttgtcccgaaggggcctagtgttcccagcactgtgcctgctctcaagagcacttactgcctcgcaaataataaaaatttctagccagtcatg

SEQ ID NO: 7357 - DNA, 2304 bp, Homo sapiens
gggctccagggaactacagctcccagcatgccccggggcccgcaaccgtccgccgcccggtgcactgtggacgatgagtcagggttaggggcgccaggacgtgygcgtgcaggacgccagagctgggtcagagctcgagccagcggcgcccggagagattcggagatgcaggcggctcggatggccgcgagcttggggcggcagctgctgaggytcgggggcggaagctmgcrgctcacggcgctcctggggcagccccggcccggccctgcccggcggccctatgccggggrtgccgctcagctggctctggacaagtcagattcccacccctctgacgctctgaccagraaaaaacyggccaaggcggaatctaagtcctttgctgtgggaatgttcaaaggccagctcaccacagatcaggtgttcycatacccgtccgtgctcaacgaagagcagacacagtttcttaaagagctggtggagcctgtgtcccgtttcttcgaggaagtgaacgatcccgccaagaatgacgctctggagatggtggaggagaccacttrgcagggcctcaaggagctgggggcctttggtctgyaagtgcccagtgagctgggtggtgtgggcctttgcaacamccrgtacgcccgtttggtggagatcgtgggcatgcatgaccttggcrtgggcattaccctgggggcccatcagagcatcrgtttcaaaggcatcctgctctttggcacaaaggcccagaaagaaaaatacctccccaagctggcatctggggagactgtggccsctttctgtctaaccgagccctcaagcgggtcagatgcagcctccatcygaacctctgctgwgcccagcccctgtggaaaatactataccctcaatggaagcvmgctttggatcagtaatgggggcctagcagacatcttcacggtctttgccaagacaccagttacagatccagccacaggagccgtgaaggagaagatcacagcttttgtggtggagaggggcttcggggrcattacccatgrgccccctgagaagaakatgggcatcaaggcttcaaacacagcagaggtgttctttgatggagtacgggygcyatcggagaacgtgctgggtgaggttgggagtggcttcaaggttgccatgcacatcctcaacaatggaaggtttggcatggctgcrgccctggcaggtaccatgagaggcatcattgctaagkcggtagatcatgccactaatyrtacccagtttggggagaaaattcacaactttgggctgatccaggagaagctggcacggatggttatgctgcagtatgtaactgagtccatggcttamatggtgagtgctaacatggaccagggagccacggacttccagatagaggccgccatcagcaaaatctttggctcggaggcagcctrgaargtgacagatgaatgcatccaaatcatggggggtatggrcttcatgaaggaacctggagtagagcrtgtgctccgagatcttcgcatcytcyggatctttgaggrgacaaatgacattcttcggctgtttgtggctctgcagggctrtatggacaaaggaaaggagctctctgggcttggcagtgctctaaagaatccctttgggaatgctggcctcctgctaggagaggcaggcaaacagctgaggcggcgggcagggctgggcagcggcctgagtctcagcggacttgtccacccggagttgagtcggagtggcragctggcagtacgggctctggagcagtttgccactgtggtggaggccaagctgataaaacacaagaaggggattgtcaatgaacagtttctgctgcagcggctggcagacggggccatcgacctctatgccatggtggtggttctctcgagggcctcaagatccctgagtgagggccaccccacggcccagcatgagaaaatgctctgtgacacctggtgtatcgaggctgcagctyggatcyragagggcatggccgccctgcagtytgacccctggcagcaagagctctaccgcaacttcaaaagcatctccaaggccttggtggagcggggtggtgtggtcaccagcaacccacttggcttytgaatactcccggccagggcctgtcccagttatgtgccttccctcaagccaaagccgaagcccctttccttaaggccctggtttgtcccgaaggggcctagtgttcccagcactgtgcctgctctcaagagcacttactgcctcgcaaataataaaaatttctagccagtcatg

SEQ ID NO: 7358 - DNA, 6732 bp, Homo sapiens
gagagcgcgsccgggacggttggagaagaaggcggctcccggaagggggagagacaaactgccgtaacctctgccgttcaggaacccggttacttatttattcgttaccctttttcttcttcctcccccaaaaaccttttccttttcccttctttttttttcctttttgggagctgaaaaatttccggtaagggaaagaagggctcctttcgctccttatttccccgcctcyttccctcccccaccttcccctcctccggctttttcctcccaacycggggaggtccttcccggtggccgccctgacgaggtctgagcacctaggcggaggcggcgcaggctttttgtagtgaggtttgcgcctgcgcagcgcgcctgcctccgccatgcacgggggtggccccccctcgggggacagcgcatgcccgctgcgcaccatcaagagagtccagttcggagtcctgagtccggatgaactgaagcgaatgtctgtgacggagggtggcatcaaatacccagagacgactgagggaggccgccccaagcttggggggctgatggacccgaggcagggggtgattgagcggactggccgctgccaaacatgtgcaggaaacatgacagagtgtcctggccactttggccacattgaactggccaagcctgtgtttcacgtgggcttcctggtgaagacaatgaaagttttgcgctgtgtctgcttcttctgctccaaactgcttgtggactctaacaacccaaagatcaaggatatcctggctaagtccaagggacagcccaagaagcggctcacacatgtctacgacctttgcaagggcaaaaacatatgcgagggtggrgaggagatggacaacaagttcggtgtggaacaacctgagggtgacgaggatctgaccaaagaaaagggccatggtggctgtgggcggtaccagcccaggatccggcgttctggcctagagytgtatgcggaatggaagcacgttaatgaggactctcaggagaagaagatcctgctgagtccagagcgagtgcatgagatcttcaaacgcatctcagatgaggagtgttttgtgctgggcatggagccccgctatgcacggccagagtggatgattgtcacagtgctgcctgtgcccccgctctccgtgcggcctgctgttgtgatgcagggctctgcccgtaaccaggatgacctgactcacaaactggctgacatcgtgaagatcaacaatcagctgcggcgcaatgagcagaacggcgcagcggcccatgtcattgcagaggatgtgaagctcctccagttccatgtggccaccatggtggacaaygagctgcctggcttgccccgtgccatgcagaagtctgggcgtcccctcaagtccctgaagcagcggttgaagggcaaggaaggccgggtgcgagggaacctgatgggcaaaagagtggacttctcggcccgtactgtcatcacccccgaccccaacctctccattgaccaggttggcgtgccccgctccattgctgccaacatgacctttgcggagattgtcacccccttcaacattgacagacttcaagaactagtgcgcagggggaacagccagtacccaggcgccaagtacatcatccgagacaatggtgatcgcattgacttgcgtttccaccccaagcccagtgaccttcacctgcagaccggctataaggtggaacggcacatgtgtgatggggacattgttatcttcaaccggcagccaactctgcacaaaatgtccatgatggggcatcgggtccgcattctcccatggtctacctttcgcttgaatcttagygtgacaactccgtacaatgcagactttgacggggatgagatgaacttgcacctgccacagtctctggagacgcgagcagagatccaggagctggccatggttcctcgcatgattgtcaccccccagagcaatcggcctgtcatgggtattgtgcaggacacactcacagcagtgcgcaaattcaccaagagagacgtcttcctggagcggggtgaagtgatgaacctcctgatgttcctgtcgacgtgggatgggaaggtcccacagccggccatcctaaagccccggcccctgtggacaggcaagcaaatcttctccctcatcatacctggtcacatcaattgtatccgtacccacagcacccatcccgatgatgaagacagtggcccttacaagcacatctctcctggggacaccaaggtggtggtggagaatggggagctgatcatgggcatcctgtgtaagaagtctctgggcacgtcagctggctccctggtccacatctcctacctagagatgggtcatgacatcactcgcctcttctactccaacattcagactgtcattaacaactggctcctcatcgagggtcatactattggcattggggactccattgctgattctaagacttaccaggacattcagaacactattaagaaggccaagcaggacgtaatagaggtcatcgagaaggcacacaacaatgagctggagcccaccccagggaacactctgcggcagacgtttgagaatcaggtgaaccgcattcttaacgatgcccgagacaagactggctcctctgctcagaaatccctgtctgaatacaayaacttcaagtctatggtcgtgtccggagctaaaggttccaagattaacatctcccaggtcattgctgtcgttggacagcagaacgtcgagggcaagcggattccatttggcttcaagcaccggactctgcctcacttcatcaaggatgactacgggcctgagagccgtggctttgtggagaactcctacctagccggcctcacacccactgagttctttttccacgccatggggggtcgtgaggggctcattgacacggctgtcaagactgctgagactggatacatccagcggcggctgatcaagtccatggagtcagtgatggtgaagtacgacgcgactgtgcggaactccatcaaccaggtggtgcagctgcgctayggcgaagacggcctggcaggcgagagcgttgagttccagaacctggctacgcttaagccttccaacaaggcttttgagaagaagttccgctttgattataccaatgagagggccctgcggcgcactctgcaggaggacctggtgaaggacgtgctgagcaacgcacacatccagaacgagttggagcgggaatttgagcggatgcgggaggatcgggaggtgctcagggtcatcttcccaactggagacagcaaggtcgtcctcccctgtaacctgctgcggatgatctggaatgctcagaaaatcttccacatcaacccacgccttccctccgacctgcaccccatcaaagtggtggagggagtcaaggaattgagcaagaagctggtgattgtgaatggggatgacccactaagtcgacaggcccaggaaaatgccacgctgctcttcaacatccacctgcggtccacgttgtgttcccgccgcatggcagaggagtttcggctcagtggggaggccttcgactggctgcttggggagattgagtccaagttcaaccaagccattgcgcatcccggggaaatggtgggggctctggctgcgcagtcccttggagaacctgccacccagatgaccttgaataccttccactatgctggtgtgtctgccaagaatgtgacgctgggtgtgccccgacttaaggagctcatcaacatttccaagaagccaaagactccttcgcttactgtcttcctgttgggccagtcygctcgagatgctgagagagccaaggatattctgtgccgtctggagcatacaacgttgaggaaggtgactgccaacacagccatctactatgaccccaacccccagagcacrgtggtggcagaggatcaggaatgggtgaatgtctactatgaaatgcctgacttygatgtggcccgaatctccccctggctgttgcgggtggagctggatcggaagcacatgactgaccggaagctcaccatggagcagattgctgaaaagatcaatgctggttttggtgacgacttgaactgcatctttaatgatgacaatgcagagaagctggtgctccgtattcgcatcatgaacagcgatgagaacaagatgcaagaggaggaagaggtggtggacaagatggatgatgatgtcttcctgcgctgcatcgagtccaacatgctgacagatatgaccctgcagggcatcgagcagatcagcaaggtgtacatgcacttgccacagacagacaacaagaagaagatcatcatcacggaggatggggaattcaaggccctgcaggagtggatcctggagacggacggcgtgagcttgatgcgggtgctgagtgagaaggacgtggaccccgtacgcaccacgtccaatgacattgtggagatcttcacggtgctgggcattgaagccgtgcggaaggccctggagcgggagctgtaccacgtcatctcctttgatggctcctatgtcaattaccgacacttggctctcttgtgtgataccatgacctgtcgtggccacttgatggccatcacccgacacggagtcaaccgccaggacacaggaccactcatgaagtgttcctttgaggaaacggtggacgtgcttatggaagcagccgcacacggtgagagtgaccccatgaagggggtctctgagaatatcatgctgggccagctggctccggccggcactggctgctttgacctcctgcttgatgcagagaagtgcaagtatggcatggagatccccaccaatatccccggcctgggggctgctggacccaccggcatgttctttggttcagcacccagtcccatgggtggaatctctcctgccatgacaccttggaaccagggtgcaacccctgcctatggcgcctggtcccccagtgttgggagtggaatgaccccaggggcagccggcttctctcccagtgctgcgtcagatgccagcggcttcagcccaggttactcccctgcctggtctcccacaccgggctccccggggtccccaggtccctcaagcccctacatcccttcaccaggtggtgccatgtctcccagctactcgccaacgtcacctgcctacgagccccgctctcctgggggctacayaccccagagtccctcttattcccccacttcaccctcctactcccctacctctccatcctattctccaaccagtcccaactatagtcccacatcacccagctattcgccaacgtcacccagctactcaccgacctctcccagctactcacccacytctcccagytactcgcccacctctcccagctactcgcccacctctcccagctactcacccacttcccctagctactckcccacttcccctagctactcgccaacgtctcccagctactcgccgacatctcccagctactcgccaacttcacccagctattctcccacttctcccagctactcacctacctctccaagctattcacccacctcccccagctactcacccacttccccaagttactcacccaccagcccgaactattctccaaccagtcccaattacaccccaacatcacccagctacagcccgacatcacccagctattcacctactagtcccaactacacacctaccagccctaactacagcccaacctctccaagctactctccaacatcacccagctattccccgacctcaccaagttactccccttccagcccacgatacacaccacagtctccaacctataccccaagctcacccagctacagccccagytcgcccagctacagcccarcctcacccaagtacaccccaaccagtccttcttayagtcccagctccccagagtataccccaacctctcccaagtactcacctaccagtcccaaatattcacccacctctcccaagtactcgcctaccagtcccacctattcacccaccaccccaaaatactccccaacatctcctacttattccccaacctctccagtctacaccccaacctctcccaagtactcacctactagccccacttactcgcccacttcccccaagtactcgcccaccagccccacctactcgcccacctcccccaaaggctcaacctactctcccacttcccctggttactcgcccaccagccccacctacagtctcacaagcccggctatcagcccggatgacagtgacgaggagaactgagggcacgtggggtgcggcagcgggctagggcccagggcagcttgcccgtgctgcygtgcagttcttgcctccctcacggggcgtcacccccagcccagctccgttgtacataaatrccttgtggcagagctcccggtgaacttytggatcccgtttctgatgcagaytcttgtcttgttctccacttgtgctgttagaactcactggcccagtggtgttctcactcctaccccacccaccccctgcctgtccccaaattgaagatccttccttgcctgtggcttgatgcggggcgggtaaagggtattttaacttaggggtagttcctgctgtgagtggttacagctgatcctcgggaagaacaaagctaaagctgccttttgtctgttattttatttttttgaagtttaaataaagtttactaattttgacc

SEQ ID NO: 7359 - DNA, 1837 bp, Homo sapiens
gccggcactggctgctttgacctcctgcttgatgcagagaagtgcaagtatggcatggagatccccaccaatatccccggcctgggggctgctggacggagtggaatgaccccaggggcagccggcttctctcccagtgctgcgtcagatgccagcggcttcagcccaggttactcccctgcctggtctcccacaccgggctccccggggtccccaggtccctcaagcccctacatcccttcaccaggtggtgccatgtctcccagctactcgccaacgtcacctgcctacgagccccgctctcctgggggctacayaccccagagtccctcttattcccccacttcaccctcctactcccctacctctccatcctattctccaaccagtcccaactatagtcccacatcacccagctattcgccaacgtcacccagctactcaccgacctctcccagctactcacccacytctcccagytactcgcccacctctcccagctactcgcccacctctcccagctactcacccacttcccctagctactckcccacttcccctagctactcgccaacgtctcccagctactcgccgacatctcccagctactcgccaacttcacccagctattctcccacttctcccagctactcacctacctctccaagctattcacccacctcccccagctactcacccacttccccaagttactcacccaccagcccgaactattctccaaccagtcccaattacaccccaacatcacccagctacagcccgacatcacccagctattcacctactagtcccaactacacacctaccagccctaactacagcccaacctctccaagctactctccaacatcacccagctattccccgacctcaccaagttactccccttccagcccacgatacacaccacagtctccaacctataccccaagctcacccagctacagccccagytcgcccagctacagcccarcctcacccaagtacaccccaaccagtccttcttayagtcccagctccccagagtataccccaacctctcccaagtactcacctaccagtcccaaatattcacccacctctcccaagtactcgcctaccagtcccacctattcacccaccaccccaaaatactccccaacatctcctacttattccccaacctctccagtctacaccccaacctctcccaagtactcacctactagccccacttactcgcccacttcccccaagtactcgcccaccagccccacctactcgcccacctcccccaaaggctcaacctactctcccacttcccctggttactcgcccaccagccccacctacagtctcacaagcccggctatcagcccggatgacagtgacgaggagaactgagggcacgtggggtgcggcagcgggctagggcccagggcagcttgcccgtgctgcygtgcagttcttgcctccctcacggggcgtcacccccagcccagctccgttgtacataaatrccttgtggcagagctcccggtgaacttytggatcccgtttctgatgcagaytcttgtcttgttctccacttgtgctgttagaactcactggcccagtggtgttctcactcctaccccacccaccccctgcctgtccccaaattgaagatccttccttgcctgtggcttgatgcggggcgggtaaagggtattttaacttaggggtagttcctgctgtgagtggttacagctgatcctcgggaagaacaaagctaaagctgccttttgtctgttattttatttttttgaagtttaaataaagtttactaattttgacc

SEQ ID NO: 7360 - DNA, 6622 bp, Homo sapiens
gagagcgcgsccgggacggttggagaagaaggcggctcccggaagggggagagacaaactgccgtaacctctgccgttcaggaacccggttacttatttattcgttaccctttttcttcttcctcccccaaaaaccttttccttttcccttctttttttttcctttttgggagctgaaaaatttccggtaagggaaagaagggctcctttcgctccttatttccccgcctcyttccctcccccaccttcccctcctccggctttttcctcccaacycggggaggtccttcccggtggccgccctgacgaggtctgagcacctaggcggaggcggcgcaggctttttgtagtgaggtttgcgcctgcgcagcgcgcctgcctccgccatgcacgggggtggccccccctcgggggacagcgcatgcccgctgcgcaccatcaagagagtccagttcggagtcctgagtccggatgaactgaagcgaatgtctgtgacggagggtggcatcaaatacccagagacgactgagggaggccgccccaagcttggggggctgatggacccgaggcagggggtgattgagcggactggccgctgccaaacatgtgcaggaaacatgacagagtgtcctggccactttggccacattgaactggccaagcctgtgtttcacgtgggcttcctggtgaagacaatgaaagttttgcgctgtgtctgcttcttctgctccaaactgcttgtggactctaacaacccaaagatcaaggatatcctggctaagtccaagggacagcccaagaagcggctcacacatgtctacgacctttgcaagggcaaaaacatatgcgagggtggrgaggagatggacaacaagttcggtgtggaacaacctgagggtgacgaggatctgaccaaagaaaagggccatggtggctgtgggcggtaccagcccaggatccggcgttctggcctagagytgtatgcggaatggaagcacgttaatgaggactctcaggagaagaagatcctgctgagtccagagcgagtgcatgagatcttcaaacgcatctcagatgaggagtgttttgtgctgggcatggagccccgctatgcacggccagagtggatgattgtcacagtgctgcctgtgcccccgctctccgtgcggcctgctgttgtgatgcagggctctgcccgtaaccaggatgacctgactcacaaactggctgacatcgtgaagatcaacaatcagctgcggcgcaatgagcagaacggcgcagcggcccatgtcattgcagaggatgtgaagctcctccagttccatgtggccaccatggtggacaaygagctgcctggcttgccccgtgccatgcagaagtctgggcgtcccctcaagtccctgaagcagcggttgaagggcaaggaaggccgggtgcgagggaacctgatgggcaaaagagtggacttctcggcccgtactgtcatcacccccgaccccaacctctccattgaccaggttggcgtgccccgctccattgctgccaacatgacctttgcggagattgtcacccccttcaacattgacagacttcaagaactagtgcgcagggggaacagccagtacccaggcgccaagtacatcatccgagacaatggtgatcgcattgacttgcgtttccaccccaagcccagtgaccttcacctgcagaccggctataaggcacgtggaacggcacatgtgtgatggggacattgttatcttcaaccggcagccaactctgcacaaaatgtccatgatggggcatcgggtccgcattctcccatggtctacctttcgcttgaatcttagygtgacaactccgtacaatgcagactttgacggggatgagatgaacttgcacctgccacagtctctggagacgcgagcagagatccaggagctggccatggttcctcgcatgattgtcaccccccagagcaatcggcctgtcatgggtattgtgcaggacacactcacagcagtgcgcaaattcaccaagagagacgtcttcctggagcggggtgaagtgatgaacctcctgatgttcctgtcgacgtgggatgggaaggtcccacagccggccatcctaaagccccggcccctgtggacaggcaagcaaatcttctccctcatcatacctggtcacatcaattgtatccgtacccacagcacccatcccgatgatgaagacagtggcccttacaagcacatctctcctggggacaccaaggtggtggtggagaatggggagctgatcatgggcatcctgtgtaagaagtctctgggcacgtcagctggctccctggtccacatctcctacctagagatgggtcatgacatcactcgcctcttctactccaacattcagactgtcattaacaactggctcctcatcgagggtcatactattggcattggggactccattgctgattctaagacttaccaggacattcagaacactattaagaaggccaagcaggacgtaatagaggtcatcgagaaggcacacaacaatgagctggagcccaccccagggaacactctgcggcagacgtttgagaatcaggtgaaccgcattcttaacgatgcccgagacaagactggctcctctgctcagaaatccctgtctgaatacaayaacttcaagtctatggtcgtgtccggagctaaaggttccaagattaacatctcccaggtcattgctgtcgttggacagcagaacgtcgagggcaagcggattccatttggcttcaagcaccggactctgcctcacttcatcaaggatgactacgggcctgagagccgtggctttgtggagaactcctacctagccggcctcacacccactgagttctttttccacgccatggggggtcgtgaggggctcattgacacggctgtcaagactgctgagactggatacatccagcggcggctgatcaagtccatggagtcagtgatggtgaagtacgacgcgactgtgcggaactccatcaaccaggtggtgcagctgcgctayggcgaagacggcctggcaggcgagagcgttgagttccagaacctggctacgcttaagccttccaacaaggcttttgagaagaagttccgctttgattataccaatgagagggccctgcggcgcactctgcaggaggacctggtgaaggacgtgctgagcaacgcacacatccagaacgagttggagcgggaatttgagcggatgcgggaggatcgggaggtgctcagggtcatcttcccaactggagacagcaaggtcgtcctcccctgtaacctgctgcggatgatctggaatgctcagaaaatcttccacatcaacccacgccttccctccgacctgcaccccatcaaagtggtggagggagtcaaggaattgagcaagaagctggtgattgtgaatggggatgacccactaagtcgacaggcccaggaaaatgccacgctgctcttcaacatccacctgcggtccacgttgtgttcccgccgcatggcagaggagtttcggctcagtggggaggccttcgactggctgcttggggagattgagtccaagttcaaccaagccattgcgcatcccggggaaatggtgggggctctggctgcgcagtcccttggagaacctgccacccagatgaccttgaataccttccactatgctggtgtgtctgccaagaatgtgacgctgggtgtgccccgacttaaggagctcatcaacatttccaagaagccaaagactccttcgcttactgtcttcctgttgggccagtcygctcgagatgctgagagagccaaggatattctgtgccgtctggagcatacaacgttgaggaaggtgactgccaacacagccatctactatgaccccaacccccagagcacrgtggtggcagaggatcaggaatgggtgaatgtctactatgaaatgcctgacttygatgtggcccgaatctccccctggctgttgcgggtggagctggatcggaagcacatgactgaccggaagctcaccatggagcagattgctgaaaagatcaatgctggttttggtgacgacttgaactgcatctttaatgatgacaatgcagagaagctggtgctccgtattcgcatcatgaacagcgatgagaacaagatgcaagaggaggaagaggtggtggacaagatggatgatgatgtcttcctgcgctgcatcgagtccaacatgctgacagatatgaccctgcagggcatcgagcagatcagcaaggtgtacatgcacttgccacagacagacaacaagaagaagatcatcatcacggaggatggggaattcaaggccctgcaggagtggatcctggagacggacggcgtgagcttgatgcgggtgctgagtgagaaggacgtggaccccgtacgcaccacgtccaatgacattgtggagatcttcacggtgctgggcattgaagccgtgcggaaggccctggagcgggagctgtaccacgtcatctcctttgatggctcctatgtcaattaccgacacttggctctcttgtgtgataccatgacctgtcgtggccacttgatggccatcacccgacacggagtcaaccgccaggacacaggaccactcatgaagtgttcctttgaggaaacggtggacgtgcttatggaagcagccgcacacggtgagagtgaccccatgaagggggtctctgagaatatcatgctgggccagctggctccggccggcactggctgctttgacctcctgcttgatgcagagaagtgcaagtatggcatggagatccccaccaatatccccggcctgggggctgctggacggagtggaatgaccccaggggcagccggcttctctcccagtgctgcgtcagatgccagcggcttcagcccaggttactcccctgcctggtctcccacaccgggctccccggggtccccaggtccctcaagcccctacatcccttcaccaggtggtgccatgtctcccagctactcgccaacgtcacctgcctacgagccccgctctcctgggggctacayaccccagagtccctcttattcccccacttcaccctcctactcccctacctctccatcctattctccaaccagtcccaactatagtcccacatcacccagctattcgccaacgtcacccagctactcaccgacctctcccagctactcacccacytctcccagytactcgcccacctctcccagctactcgcccacctctcccagctactcacccacttcccctagctactckcccacttcccctagctactcgccaacgtctcccagctactcgccgacatctcccagctactcgccaacttcacccagctattctcccacttctcccagctactcacctacctctccaagctattcacccacctcccccagctactcacccacttccccaagttactcacccaccagcccgaactattctccaaccagtcccaattacaccccaacatcacccagctacagcccgacatcacccagctattcacctactagtcccaactacacacctaccagccctaactacagcccaacctctccaagctactctccaacatcacccagctattccccgacctcaccaagttactccccttccagcccacgatacacaccacagtctccaacctataccccaagctcacccagctacagccccagytcgcccagctacagcccarcctcacccaagtacaccccaaccagtccttcttayagtcccagctccccagagtataccccaacctctcccaagtactcacctaccagtcccaaatattcacccacctctcccaagtactcgcctaccagtcccacctattcacccaccaccccaaaatactccccaacatctcctacttattccccaacctctccagtctacaccccaacctctcccaagtactcacctactagccccacttactcgcccacttcccccaagtactcgcccaccagccccacctactcgcccacctcccccaaaggctcaacctactctcccacttcccctggttactcgcccaccagccccacctacagtctcacaagcccggctatcagcccggatgacagtgacgaggagaactgagggcacgtggggtgcggcagcgggctagggcccagggcagcttgcccgtgctgcygtgcagttcttgcctccctcacggggcgtcacccccagcccagctccgttgtacataaatrccttgtggcagagctcccggtgaacttytggatcccgtttctgatgcagaytcttgtcttgttctccacttgtgctgttagaactcactggcccagtggtgttctcactcctaccccacccaccccctgcctgtccccaaattgaagatccttccttgcctgtggcttgatgcggggcgggtaaagggtattttaacttaggggtagttcctgctgtgagtggttacagctgatcctcgggaagaacaaagctaaagctgccttttgtctgttattttatttttttgaagtttaaataaagtttactaattttgacc

SEQ ID NO: 7361 - DNA, 6736 bp, Homo sapiens
gagagcgcgsccgggacggttggagaagaaggcggctcccggaagggggagagacaaactgccgtaacctctgccgttcaggaacccggttacttatttattcgttaccctttttcttcttcctcccccaaaaaccttttccttttcccttctttttttttcctttttgggagctgaaaaatttccggtaagggaaagaagggctcctttcgctccttatttccccgcctcyttccctcccccaccttcccctcctccggctttttcctcccaacycggggaggtccttcccggtggccgccctgacgaggtctgagcacctaggcggaggcggcgcaggctttttgtagtgaggtttgcgcctgcgcagcgcgcctgcctccgccatgcacgggggtggccccccctcgggggacagcgcatgcccgctgcgcaccatcaagagagtccagttcggagtcctgagtccggatgaactgaagcgaatgtctgtgacggagggtggcatcaaatacccagagacgactgagggaggccgccccaagcttggggggctgatggacccgaggcagggggtgattgagcggactggccgctgccaaacatgtgcaggaaacatgacagagtgtcctggccactttggccacattgaactggccaagcctgtgtttcacgtgggcttcctggtgaagacaatgaaagttttgcgctgtgtctgcttcttctgctccaaactgcttgtggactctaacaacccaaagatcaaggatatcctggctaagtccaagggacagcccaagaagcggctcacacatgtctacgacctttgcaagggcaaaaacatatgcgagggtggrgaggagatggacaacaagttcggtgtggaacaacctgagggtgacgaggatctgaccaaagaaaagggccatggtggctgtgggcggtaccagcccaggatccggcgttctggcctagagytgtatgcggaatggaagcacgttaatgaggactctcaggagaagaagatcctgctgagtccagagcgagtgcatgagatcttcaaacgcatctcagatgaggagtgttttgtgctgggcatggagccccgctatgcacggccagagtggatgattgtcacagtgctgcctgtgcccccgctctccgtgcggcctgctgttgtgatgcagggctctgcccgtaaccaggatgacctgactcacaaactggctgacatcgtgaagatcaacaatcagctgcggcgcaatgagcagaacggcgcagcggcccatgtcattgcagaggatgtgaagctcctccagttccatgtggccaccatggtggacaaygagctgcctggcttgccccgtgccatgcagaagtctgggcgtcccctcaagtccctgaagcagcggttgaagggcaaggaaggccgggtgcgagggaacctgatgggcaaaagagtggacttctcggcccgtactgtcatcacccccgaccccaacctctccattgaccaggttggcgtgccccgctccattgctgccaacatgacctttgcggagattgtcacccccttcaacattgacagacttcaagaactagtgcgcagggggaacagccagtacccaggcgccaagtacatcatccgagacaatggtgatcgcattgacttgcgtttccaccccaagcccagtgaccttcacctgcagaccggctataaggcacgtggaacggcacatgtgtgatggggacattgttatcttcaaccggcagccaactctgcacaaaatgtccatgatggggcatcgggtccgcattctcccatggtctacctttcgcttgaatcttagygtgacaactccgtacaatgcagactttgacggggatgagatgaacttgcacctgccacagtctctggagacgcgagcagagatccaggagctggccatggttcctcgcatgattgtcaccccccagagcaatcggcctgtcatgggtattgtgcaggacacactcacagcagtgcgcaaattcaccaagagagacgtcttcctggagcggggtgaagtgatgaacctcctgatgttcctgtcgacgtgggatgggaaggtcccacagccggccatcctaaagccccggcccctgtggacaggcaagcaaatcttctccctcatcatacctggtcacatcaattgtatccgtacccacagcacccatcccgatgatgaagacagtggcccttacaagcacatctctcctggggacaccaaggtggtggtggagaatggggagctgatcatgggcatcctgtgtaagaagtctctgggcacgtcagctggctccctggtccacatctcctacctagagatgggtcatgacatcactcgcctcttctactccaacattcagactgtcattaacaactggctcctcatcgagggtcatactattggcattggggactccattgctgattctaagacttaccaggacattcagaacactattaagaaggccaagcaggacgtaatagaggtcatcgagaaggcacacaacaatgagctggagcccaccccagggaacactctgcggcagacgtttgagaatcaggtgaaccgcattcttaacgatgcccgagacaagactggctcctctgctcagaaatccctgtctgaatacaayaacttcaagtctatggtcgtgtccggagctaaaggttccaagattaacatctcccaggtcattgctgtcgttggacagcagaacgtcgagggcaagcggattccatttggcttcaagcaccggactctgcctcacttcatcaaggatgactacgggcctgagagccgtggctttgtggagaactcctacctagccggcctcacacccactgagttctttttccacgccatggggggtcgtgaggggctcattgacacggctgtcaagactgctgagactggatacatccagcggcggctgatcaagtccatggagtcagtgatggtgaagtacgacgcgactgtgcggaactccatcaaccaggtggtgcagctgcgctayggcgaagacggcctggcaggcgagagcgttgagttccagaacctggctacgcttaagccttccaacaaggcttttgagaagaagttccgctttgattataccaatgagagggccctgcggcgcactctgcaggaggacctggtgaaggacgtgctgagcaacgcacacatccagaacgagttggagcgggaatttgagcggatgcgggaggatcgggaggtgctcagggtcatcttcccaactggagacagcaaggtcgtcctcccctgtaacctgctgcggatgatctggaatgctcagaaaatcttccacatcaacccacgccttccctccgacctgcaccccatcaaagtggtggagggagtcaaggaattgagcaagaagctggtgattgtgaatggggatgacccactaagtcgacaggcccaggaaaatgccacgctgctcttcaacatccacctgcggtccacgttgtgttcccgccgcatggcagaggagtttcggctcagtggggaggccttcgactggctgcttggggagattgagtccaagttcaaccaagccattgcgcatcccggggaaatggtgggggctctggctgcgcagtcccttggagaacctgccacccagatgaccttgaataccttccactatgctggtgtgtctgccaagaatgtgacgctgggtgtgccccgacttaaggagctcatcaacatttccaagaagccaaagactccttcgcttactgtcttcctgttgggccagtcygctcgagatgctgagagagccaaggatattctgtgccgtctggagcatacaacgttgaggaaggtgactgccaacacagccatctactatgaccccaacccccagagcacrgtggtggcagaggatcaggaatgggtgaatgtctactatgaaatgcctgacttygatgtggcccgaatctccccctggctgttgcgggtggagctggatcggaagcacatgactgaccggaagctcaccatggagcagattgctgaaaagatcaatgctggttttggtgacgacttgaactgcatctttaatgatgacaatgcagagaagctggtgctccgtattcgcatcatgaacagcgatgagaacaagatgcaagaggaggaagaggtggtggacaagatggatgatgatgtcttcctgcgctgcatcgagtccaacatgctgacagatatgaccctgcagggcatcgagcagatcagcaaggtgtacatgcacttgccacagacagacaacaagaagaagatcatcatcacggaggatggggaattcaaggccctgcaggagtggatcctggagacggacggcgtgagcttgatgcgggtgctgagtgagaaggacgtggaccccgtacgcaccacgtccaatgacattgtggagatcttcacggtgctgggcattgaagccgtgcggaaggccctggagcgggagctgtaccacgtcatctcctttgatggctcctatgtcaattaccgacacttggctctcttgtgtgataccatgacctgtcgtggccacttgatggccatcacccgacacggagtcaaccgccaggacacaggaccactcatgaagtgttcctttgaggaaacggtggacgtgcttatggaagcagccgcacacggtgagagtgaccccatgaagggggtctctgagaatatcatgctgggccagctggctccggccggcactggctgctttgacctcctgcttgatgcagagaagtgcaagtatggcatggagatccccaccaatatccccggcctgggggctgctggacccaccggcatgttctttggttcagcacccagtcccatgggtggaatctctcctgccatgacaccttggaaccagggtgcaacccctgcctatggcgcctggtcccccagtgttgggagtggaatgaccccaggggcagccggcttctctcccagtgctgcgtcagatgccagcggcttcagcccaggttactcccctgcctggtctcccacaccgggctccccggggtccccaggtccctcaagcccctacatcccttcaccaggtggtgccatgtctcccagctactcgccaacgtcacctgcctacgagccccgctctcctgggggctacayaccccagagtccctcttattcccccacttcaccctcctactcccctacctctccatcctattctccaaccagtcccaactatagtcccacatcacccagctattcgccaacgtcacccagctactcaccgacctctcccagctactcacccacytctcccagytactcgcccacctctcccagctactcgcccacctctcccagctactcacccacttcccctagctactckcccacttcccctagctactcgccaacgtctcccagctactcgccgacatctcccagctactcgccaacttcacccagctattctcccacttctcccagctactcacctacctctccaagctattcacccacctcccccagctactcacccacttccccaagttactcacccaccagcccgaactattctccaaccagtcccaattacaccccaacatcacccagctacagcccgacatcacccagctattcacctactagtcccaactacacacctaccagccctaactacagcccaacctctccaagctactctccaacatcacccagctattccccgacctcaccaagttactccccttccagcccacgatacacaccacagtctccaacctataccccaagctcacccagctacagccccagytcgcccagctacagcccarcctcacccaagtacaccccaaccagtccttcttayagtcccagctccccagagtataccccaacctctcccaagtactcacctaccagtcccaaatattcacccacctctcccaagtactcgcctaccagtcccacctattcacccaccaccccaaaatactccccaacatctcctacttattccccaacctctccagtctacaccccaacctctcccaagtactcacctactagccccacttactcgcccacttcccccaagtactcgcccaccagccccacctactcgcccacctcccccaaaggctcaacctactctcccacttcccctggttactcgcccaccagccccacctacagtctcacaagcccggctatcagcccggatgacagtgacgaggagaactgagggcacgtggggtgcggcagcgggctagggcccagggcagcttgcccgtgctgcygtgcagttcttgcctccctcacggggcgtcacccccagcccagctccgttgtacataaatrccttgtggcagagctcccggtgaacttytggatcccgtttctgatgcagaytcttgtcttgttctccacttgtgctgttagaactcactggcccagtggtgttctcactcctaccccacccaccccctgcctgtccccaaattgaagatccttccttgcctgtggcttgatgcggggcgggtaaagggtattttaacttaggggtagttcctgctgtgagtggttacagctgatcctcgggaagaacaaagctaaagctgccttttgtctgttattttatttttttgaagtttaaataaagtttactaattttgacc

SEQ ID NO: 7362 - DNA, 946 bp, Homo sapiens
tgcccggacagaggatcgcctcgctggcctactctctcctcccgtacggcgccggaatcccagctccacttaccaggccgcggctaccccgccgtcccccccgactcccgccaccccgctctctcaggctcttcaggatccaagtccgtaggccctttaaggggtctagttgccgtttgcgaggccctgggactttggtcccagacagcggggatccggatggcttccgtgcggatccgagaggccaaggagggagactgtggagatatcctgaggctgattcgggagctagccgaattcgaaaaactctcggatcaggtgaagatcagtgaagaagccctgagagcagatggctttggagacaatcctttctatcaytgtttggtagcagagattcttccagcgcccgggaagctactggggccctgcgtggtgggctatgggatatactatttcatctacagtacatggaagggacgcaccatttatctggaggatatctatgtgatgccrgaatatcggggtcaagggattggttccaaaataatcaaaaaggtggctgaggtggccttggataagggctgctcccaattcygcctggccgtcctggactggaaccagagggccatggacttgtacaaggccctaggagcccaagatctgacggaagctgagggctggcacttcttctgctttcaaggagaggcaacgagaaagttggcaggaaagtgacgccatccctaggaggatctctgtcttgagtttctccttccccatcagctgaagcactcttcagagactacgtccacagacactgatgctgaggcctccctggaggaaggagggttaggggtgcctatcctcaagtattggaagagcagaattgagggagagacctttcttccttgttgagggtgaaaaataaataagaattacatgtcctgat

SEQ ID NO: 7363 - DNA, 1797 bp, Homo sapiens
acggcacagatctcgcgagcttctcctacttctctagcgcygtggctcactgaagcgtactacgccrgatgtcttaagatatcgcgagacctttacctctggtttcttayacatcctttagaaactggaatttagcgagaatacattctttcatactgcctcctcccttgtttttctgtctcagagagatagtctgtcctaaatatcccatgtagcccaggccactgaattaaaacggagcgtattcgttctctgccccaccccgcaactcctgaaagcggcgcaactcaattacttgatccttatatgccccacgcgggactcatactacgtttcccgtgaacacgtgcagtccaaaccccgcccctgatatttatctcagtggacggtggccggaaaaggacaatggtttccatgtcagcggataaacgctctcccctcggctcccggacgcgacggaggtcgtagtagtagtgagtacgtgctgaggagcaaaggagtaaccaagagatccagtgaccgacagagcaagagccatgccgcgccggggcctggtggctgggccagacttggagtattttcagcgtcgctatttmacgccggcggaggtggcccaacataacaggcccgaagacctctgggtatcttacctgggacgcgtgtacgacctaacgtcattggcacaggaatacaaggggaacctgctgctgaaacccatcgtggaagttgcaggccaggatatcagccactggtttgatccaaagaccagagacatycgcaagcacatagatccgctgaccggctgcctgaggtactgcaccccgcggggccgctttgtgcacgttccgcctcagctgccctgttcggactgggccaacgattttgggaagccctggtggcaggggtcgtattatgaggtggggcggctgtctgccaagacccggagcatccgcatcattaacacgctcacgtcgcaggagcacacactggaggtgggggttctggagtccatatgggaaatcctacaccgctatctccactcctctccaggagctagcctgtgcccttytgaagtgtaaaggccctattccctgccttcattacagtttgctctgagaaaattagtgaattaatctttgggaatgatacaagaagatcaagtaccttggtttagggagatgtagaagaggatagtcagagttcaggcagaactgtttgatagttaagagagagtagttctacaggggtgagggatggaaggacttttttggcaatgatggaaatgagatgtctgcaggaagatgggatttacaaagaaataggaaatgtttatcattgaccatacaaagctggcttatcttacttgtagaagagtgtttggcagctgaaacccaagggaaagaaaggaagtgcgtcattataggcaattcaggctagatattatactaggtacttcatataccctcttttttttttttgcccccaacaaagagaaggggtcttgctctgtcacccagtctggagtgcagtggcaaaatcatggctcactgcagcctggagctcctgggcacaagtgatcctcccatctctgccttgagtagctgggacttcaggtgcacgccacaatgcctaattttttaattttttgtagacacagggtctcgctgtgttgcccaggctggtttcaacctcctggcctcaagtgatcctcttgcctcagcctcccaaatagcctcttcaagacaactaccccataaggtggattaccattactatgttacagataagtccttcgaa

SEQ ID NO: 7364 - DNA, 5989 bp, Homo sapiens
atctttgtttgggtctcccatactgcgtatagatgaatgggtcaggatatctggaacaaaatatggaggtgaagggtgagatcgggaaacaaagggtatggccccctagttcccaaagggagcagggagatgggaatagaattgaaggtaggttttaggctacttgggaggaggaatatttaggtaattgtggagactttctcctgtgtgatgaaggyggcagacactgtgatcctgtgggcaagaagtaaaaatgaccagctgaggatttcttttyctccaggactgtgttggggtgacaggatgcctgataaggatgacattcggctgctgccgtcagcattgggtgtgaagaagagaaaacgaggacccaagaagcagaaggagaacaagccaggaaaaccccgaaaacgcaagaagcgtgacagtgaggaggaatttggttctgagcgagatgagtaccgggagaagtcagagagtgggggcagtgaatatggaaccggaccgggtcggaaacgaagaaggaagcaccgagaaaaaaaggagaagaagacaaagcggcggaaaaagggggagggagatggggggcaaaagcaagtggaacagaagtcatcagcaactctgcttctgacctggggcctggaggatgtggagcatgtgttctctgaggaggattaccacacgctcaccaactacaaagccttcagccagttcatgaggcccctaattgctaagaagaatcctaagatcccaatgtctaagatgatgaccatccttggggccaaatggagagagttcagtgccaacaaccccttcaaggggtcagcagctgctgtggcggcggcagcggcagcagcagcagcagctgtagctgagcaggtgtcagctgctgtctcgtcggccacccccatagcaccctccggaccccccgcccttccaccaccccctgctgctgatatccagcccccacccatccgaagagccaaaaccaaagagggcaaaggtccaggccataagaggcggagtaagagcccccgagtgcctgatggacgcaagaagcttcggggaaagaaaatggcaccactcaaaataaaactagggcttctgggtggcaagaggaagaaaggaggctcgtatgtttttcagagcgacgaaggtcctgaaccagaggctgaggaatcagacctggacagtggcagtgtccacagtgcctcaggccggcctgatggccctgtccgcaccaagaaactaaagagaggccggccaggaaggaagaagaagaaggtcctgggctgtcctgcagtggccggggaggaggaggttgatggctacgagacggatcaccaggattactgtgaggtgtgccagcagggtggggaaattattctgtgtgacacctgccctcgtgcctaccacctcgtctgccttgatcctgagcttgaccgggctccagagggcaaatggagctgccctcactgtgagaaggagggggtccagtgggaggccaaggaggaagaagaagaatacgaagaggagggagaggaagaaggggagaaggaggaggaggatgatcacatggagtactgccgcgtatgcaaggacggcggggagctcctgtgctgtgacgcgtgcatctcctcctaccacattcattgtctaaaccctcccctgcctgacattcccaatggtgaatggctgtgtccccgatgcacatgccccgtgctgaagggtcgagtgcagaagatcctacattggcggtggggggagccacctgtagcagtgccagcccctcaacaggcagatggaaatccagatgtcccacccccccgtcctcttcaaggcagatcagagcgagagttctttgtcaagtgggtaggactatcctactggcactgctcctgggccaaggagcttcagctggaaatcttccatttggttatgtatcgaaactaccagcggaagaatgacatggatgascccccacccctggactatggctccggcgaggatgatgggaagagcgacaagcgtaaagtgaaagacccgcactatgctgagatggaggagaagtactatcgttttggcatcaagccagagtggatgaccgtccaccgcatcatcaaccacagtgtggataaaaaggggaattaccactatctagtaaaatggagggacttaccatatgaccagtccacgtgggaggaagatgaaatgaatatccctgaatacgaagaacataagcaaagctactggagacaccgagaactaattatgggggaagaccctgcccagccmcgcaagtataagaagaagaagaaggagctacagggtgatgggcctcccagttctcccactaatgatcctaccgtgaaatatgagactcagccacggtttatcacagccactggaggcaccctgcacatgtatcagttggaagggctgaactggctacgcttctcctgggcccagggcactgacaccattctmgctgatgagatggggctrggcaagaccatacaaaccatcgtcttcctctactcactctacaaggagggccacacaaaaggtcccttcctggtgagtgccccactctctaccatcattaactgggagcgggagttccagatgtgggcacccaaattctatgtggtgacatacacgggtgacaaggacagccgggccatcattcgtgagaatgaattctcctttgaggacaatgccatcaaagggggcaagaaagcttttaagatgaagagggaggcacaggtgaagttccatgttctcctgacatcgtatgagctgatcaccattgatcaggcagcacttggttccatccgctgggcctgtcttgtggtagatgaggcccatcgactcaagaacaaccagtccaagtttttcagggttctcaatggttacaagatagatcataagttgctgctgacaggaaccccattgcagaataatctggaggagctcttccatctcctgaacttcctcaccccagagagatttaacaacttggagggcttcctggaggartttgctgacatatccaaagaggaccagatcaagaaactgcatgatttgctggggccacacatgctgcggagactcaaggcagatgtctttaagaacatgccagccaagacagagctcatcgttcgggtggagctaagccccatgcagaagaaatactacaaatacatcctgactcgaaattttgaggccttgaattcacgaggtggtgggaaccaggtgtcgctgcttaatatcatgatggatcttaagaagtgctgcaaccatccatacctttttcccgtggctgctatggagtcccccaaactccccagtggggcttatgagggtggggcacttattaagtcgtctgggaagctcatgctgctccagaagatgctgcgaaagctgaaggagcaaggacaccgagtgctcatcttctcgcagatgaccaaaatgttagacttgcttgaggacttcttagactatgaaggctacaagtatgagcgcatcgatggtggtatcacgggtgccctgaggcaggaggccatcgatcggtttaatgctcctggggcccaacaattctgcttcctcctgtccacccgagctgggggcctgggcatcaatctggccactgctgacactgtcatcatctttgattctgactggaacccccataatgacatccaggcctttagccgggctcatcggattggccaggccaacaaagtgatgatttaccggtttgtgactcgcgcgtcagtggaagagcgaatcacacaagtggccaagagaaagatgatgctgacacacctggttgtgcggcctgggctgggctccaaggcaggctccatgtccaagcaggagcttgacgacattctcaaatttggcactgaagagctattcaaggatgaaaacgagggggagaacaaggaggaggacagcagtgtgattcattatgacaatgaggccatcgctcggctgttggaccggaaccaggatgcaactgaggacactgaygtgcagaacatgaatgagtatctcagctccttcaaggtggcacagtacgtcgtgcgggaagaagacaagattgaggaaattgagcgagagatcatcaagcaggaggagaatgtggaccctgactactgggagaagctgctgaggcatcactatgagcaacagcaggaagacctagcccggaatctaggcaagggcaagcgggttcgcaagcaagttaactacaatgatgctgctcaggaagaccaagacaaccagtcagagtactcggtgggttcagaggaggaggatgaagacttcgatgaacgtcctgaagggcgtagacagtcaaagaggcagctccggaatgagaaagataagccactgcctccactgctggcccgagtcgggggcaacattgaggtgctgggcttcaacacccgtcagcggaaggctttcctcaatgctgtgatgcgctgggggatgccaccacaggatgccttcaccacacagtggctggtgcgggacctgaggggcaagactgagaaggagtttaaggcctatgtgtctttgttcatgcgccatctgtgtgagcctggggcagacggctctgaaacctttgccgatggggtccctcgggagggactgagtcgccagcaggtgttgacccgcattggagtcatgtctctcgtcaaaaagaaggtgcaggagtttgagcacatcaatgggcgttggtcaatgccggaactgatgcctgaccccagcgccgattctaagcgctcctccagagcctcctctcctaccaaaacgtctcccaccactcctgaggcttctgctaccaacagtccctgcacctctaaacctgctactccagctccaagtgagaaaggagaaggcataaggacacctcttgagaaggaggaagctgaaaaccaggaggaaaagccagagaagaacagcagaattggggagaagatggagacagaggctgatgcccccagcccagccccatcacttggggagcggctggagccaaggaagattcctctagaggatgaggtgccaggggtgcctggagagatggagcctgaacctgggtaccgtggggacagagagaagtcagaagatgtaaaaggtgaccgggagcttcgaccagggcctcgagatgagccacggtccaatgggckacgagaggaaaagacagagaagccccggttcatgttcaatatcgccgatggtggcttcacagagcttcacacactgtggcagaatgaggaacgggcagctatttcctcggggaaactcaatgagatctggcacagaagacatgactattggcttctggctgggattgtcctccatggctatgcacggtggcaggacatccagaatgatgctcaatttgccattatcaacgagccatttaaaactgaagccaataaggggaactttctggagatgaaaaataagttcctggcccggaggttcaagctcctggagcaggcgctggtgattgaggagcagctgcggcgggcggcctacctgaacctgtcgcaggagccggcgcaccccgccatggccctccacgcccgcttcgccgaggccgagtgcctggccgagagccaccagcacctctccaaggagtcgctggcggggaacaagccggccaacgccgtcctgcacaaggttctgaaccagctggaggagttgctgagcgacatgaaggcggacgtgacccgcctgccagccacgctgtcccgaataccccccatcgcagcccgccttcagatgtccgagcgcagcatcctcagccggctggccagcaagggcacggagcctcaccccacaccggcctacccgccgggtccctacgctacacctccggggtacggggcggccttcagcgccgcacccgtaggggccctggccgccgcaggcgccaattacagccagatgcctgcagggtccttcatcacag

SEQ ID NO: 7365 - DNA, 7008 bp, Homo sapiens
atctttgtttgggtctcccatactgcgtatagatgaatgggtcaggatatctggaacaaaatatggaggtgaagggtgagatcgggaaacaaagggtatggccccctagttcccaaagggagcagggagatgggaatagaattgaaggtaggttttaggctacttgggaggaggaatatttaggtaattgtggagactttctcctgtgtgatgaaggyggcagacactgtgatcctgtgggcaagaagtaaaaatgaccagctgaggatttcttttyctccaggactgtgttggggtgacaggatgcctgataaggatgacattcggctgctgccgtcagcattgggtgtgaagaagagaaaacgaggacccaagaagcagaaggagaacaagccaggaaaaccccgaaaacgcaagaagcgtgacagtgaggaggaatttggttctgagcgagatgagtaccgggagaagtcagagagtgggggcagtgaatatggaaccggaccgggtcggaaacgaagaaggaagcaccgagaaaaaaaggagaagaagacaaagcggcggaaaaagggggagggagatggggggcaaaagcaagtggaacagaagtcatcagcaactctgcttctgacctggggcctggaggatgtggagcatgtgttctctgaggaggattaccacacgctcaccaactacaaagccttcagccagttcatgaggcccctaattgctaagaagaatcctaagatcccaatgtctaagatgatgaccatccttggggccaaatggagagagttcagtgccaacaaccccttcaaggggtcagcagctgctgtggcggcggcagcggcagcagcagcagcagctgtagctgagcaggtgtcagctgctgtctcgtcggccacccccatagcaccctccggaccccccgcccttccaccaccccctgctgctgatatccagcccccacccatccgaagagccaaaaccaaagagggcaaaggtccaggccataagaggcggagtaagagcccccgagtgcctgatggacgcaagaagcttcggggaaagaaaatggcaccactcaaaataaaactagggcttctgggtggcaagaggaagaaaggaggctcgtatgtttttcagagcgacgaaggtcctgaaccagaggctgaggaatcagacctggacagtggcagtgtccacagtgcctcaggccggcctgatggccctgtccgcaccaagaaactaaagagaggccggccaggaaggaagaagaagaaggtcctgggctgtcctgcagtggccggggaggaggaggttgatggctacgagacggatcaccaggattactgtgaggtgtgccagcagggtggggaaattattctgtgtgacacctgccctcgtgcctaccacctcgtctgccttgatcctgagcttgaccgggctccagagggcaaatggagctgccctcactgtgagaaggagggggtccagtgggaggccaaggaggaagaagaagaatacgaagaggagggagaggaagaaggggagaaggaggaggaggatgatcacatggagtactgccgcgtatgcaaggacggcggggagctcctgtgctgtgacgcgtgcatctcctcctaccacattcattgtctaaaccctcccctgcctgacattcccaatggtgaatggctgtgtccccgatgcacatgccccgtgctgaagggtcgagtgcagaagatcctacattggcggtggggggagccacctgtagcagtgccagcccctcaacaggcagatggaaatccagatgtcccacccccccgtcctcttcaaggcagatcagagcgagagttctttgtcaagtgggtaggactatcctactggcactgctcctgggccaaggagcttcagctggaaatcttccatttggttatgtatcgaaactaccagcggaagaatgacatggatgascccccacccctggactatggctccggcgaggatgatgggaagagcgacaagcgtaaagtgaaagacccgcactatgctgagatggaggagaagtactatcgttttggcatcaagccagagtggatgaccgtccaccgcatcatcaaccacagtgtggataaaaaggggaattaccactatctagtaaaatggagggacttaccatatgaccagtccacgtgggaggaagatgaaatgaatatccctgaatacgaagaacataagcaaagctactggagacaccgagaactaattatgggggaagaccctgcccagccmcgcaagtataagaagaagaagaaggagctacagggtgatgggcctcccagttctcccactaatgatcctaccgtgaaatatgagactcagccacggtttatcacagccactggaggcaccctgcacatgtatcagttggaagggctgaactggctacgcttctcctgggcccagggcactgacaccattctmgctgatgagatggggctrggcaagaccatacaaaccatcgtcttcctctactcactctacaaggagggccacacaaaaggtcccttcctggtgagtgccccactctctaccatcattaactgggagcgggagttccagatgtgggcacccaaattctatgtggtgacatacacgggtgacaaggacagccgggccatcattcgtgagaatgaattctcctttgaggacaatgccatcaaagggggcaagaaagcttttaagatgaagagggaggcacaggtgaagttccatgttctcctgacatcgtatgagctgatcaccattgatcaggcagcacttggttccatccgctgggcctgtcttgtggtagatgaggcccatcgactcaagaacaaccagtccaagtttttcagggttctcaatggttacaagatagatcataagttgctgctgacaggaaccccattgcagaataatctggaggagctcttccatctcctgaacttcctcaccccagagagatttaacaacttggagggcttcctggaggartttgctgacatatccaaagaggaccagatcaagaaactgcatgatttgctggggccacacatgctgcggagactcaaggcagatgtctttaagaacatgccagccaagacagagctcatcgttcgggtggagctaagccccatgcagaagaaatactacaaatacatcctgactcgaaattttgaggccttgaattcacgaggtggtgggaaccaggtgtcgctgcttaatatcatgatggatcttaagaagtgctgcaaccatccatacctttttcccgtggctgctatggagtcccccaaactccccagtggggcttatgagggtggggcacttattaagtcgtctgggaagctcatgctgctccagaagatgctgcgaaagctgaaggagcaaggacaccgagtgctcatcttctcgcagatgaccaaaatgttagacttgcttgaggacttcttagactatgaaggctacaagtatgagcgcatcgatggtggtatcacgggtgccctgaggcaggaggccatcgatcggtttaatgctcctggggcccaacaattctgcttcctcctgtccacccgagctgggggcctgggcatcaatctggccactgctgacactgtcatcatctttgattctgactggaacccccataatgacatccaggcctttagccgggctcatcggattggccaggccaacaaagtgatgatttaccggtttgtgactcgcgcgtcagtggaagagcgaatcacacaagtggccaagagaaagatgatgctgacacacctggttgtgcggcctgggctgggctccaaggcaggctccatgtccaagcaggagcttgacgacattctcaaatttggcactgaagagctattcaaggatgaaaacgagggggagaacaaggaggaggacagcagtgtgattcattatgacaatgaggccatcgctcggctgttggaccggaaccaggatgcaactgaggacactgaygtgcagaacatgaatgagtatctcagctccttcaaggtggcacagtacgtcgtgcgggaagaagacaagattgaggaaattgagcgagagatcatcaagcaggaggagaatgtggaccctgactactgggagaagctgctgaggcatcactatgagcaacagcaggaagacctagcccggaatctaggcaagggcaagcgggttcgcaagcaagttaactacaatgatgctgctcaggaagaccaagacaaccagtcagagtactcggtgggttcagaggaggaggatgaagacttcgatgaacgtcctgaagggcgtagacagtcaaagaggcagctccggaatgagaaagataagccactgcctccactgctggcccgagtcgggggcaacattgaggtgctgggcttcaacacccgtcagcggaaggctttcctcaatgctgtgatgcgctgggggatgccaccacaggatgccttcaccacacagtggctggtgcgggacctgaggggcaagactgagaaggagtttaaggcctatgtgtctttgttcatgcgccatctgtgtgagcctggggcagacggctctgaaacctttgccgatggggtccctcgggagggactgagtcgccagcaggtgttgacccgcattggagtcatgtctctcgtcaaaaagaaggtgcaggagtttgagcacatcaatgggcgttggtcaatgccggaactgatgcctgaccccagcgccgattctaagcgctcctccagagcctcctctcctaccaaaacgtctcccaccactcctgaggcttctgctaccaacagtccctgcacctctaaacctgctactccagctccaagtgagaaaggagaaggcataaggacacctcttgagaaggaggaagctgaaaaccaggaggaaaagccagagaagaacagcagaattggggagaagatggagacagaggctgatgcccccagcccagccccatcacttggggagcggctggagccaaggaagattcctctagaggatgaggtgccaggggtgcctggagagatggagcctgaacctgggtaccgtggggacagagagaagtcagaagatgtaaaaggtgaccgggagcttcgaccagggcctcgagatgagccacggtccaatgggckacgagaggaaaagacagagaagccccggttcatgttcaatatcgccgatggtggcttcacagagcttcacacactgtggcagaatgaggaacgggcagctatttcctcggggaaactcaatgagatctggcacagaagacatgactattggcttctggctgggattgtcctccatggctatgcacggtggcaggacatccagaatgatgctcaatttgccattatcaacgagccatttaaaactgaagccaataaggggaactttctggagatgaaaaataagttcctggcccggaggttcaagctcctggagcaggcgctggtgattgaggagcagctgcggcgggcggcctacctgaacctgtcgcaggagccggcgcaccccgccatggccctccacgcccgcttcgccgaggccgagtgcctggccgagagccaccagcacctctccaaggagtcgctggcggggaacaagccggccaacgccgtcctgcacaaggttctgaaccagctggaggagttgctgagcgacatgaaggcggacgtgacccgcctgccagccacgctgtcccgaataccccccatcgcagcccgccttcagatgtccgagcgcagcatcctcagccggctggccagcaagggcacggagcctcaccccacaccggcctacccgccgggtccctacgctacacctccggggtacggggcggccttcagcgccgcacccgtaggggccctggccgccgcaggcgccaattacagccagatgcctgcagggtccttcatcacagccgccaccaacggccctccagtgcttgtgaagaaggagaaggaaatggtgggggcattggtgtcagacgggctggatcggaaggagccccgagccggggaggtgatctgtatagacgactgactggatcccaggcctgcccttcacccaggccccgtccccgaggccgacccccagctcaagcgctggggcctgctgccagccctccaccttccccaccccttgggccatcactgggctaggaacccctttgcccctctctgcagctcctctcttcaagaagggccctttgtctttctccactcccacacacctttcccaccaagccttgaagactgtgctggtgagaagaagtctgggtgggagatggctggcagggtcttccaagtaccttcctcccacactgccaagtatacacaacttcccagtaaatggttgtggggaggaaagaggtggagcctccccagccgtttccctgcagaatcagctctgtctcatgtggaagtggagaatcagccttgcctggcctttaggaacttttgtggggaagagagctttgaagagaggagggggactttagagagggatgaaaatgagccctgggagggaggaagggacgaggaggggtggctgcatgttaccgtcccctacctctccccacgtggagggtggagcagttatgagggaggaagtcractgctgttcagcctcagaataaaggtgccgttcactggctcagttacctcctgtgtaccggcatcttgtgttgggaatgttcccccctccctagggaccaaggaccacccctacaaaaagagtaatggttgggtgatactccctcaagccaaagaggagctccccaacctgttctagggacccaggtaacctagaagggtgggagagaatacaatgggccagatgtggcagactaaatttgtataagtcaggcaggggacctagtcagggtcttgggagctaccttgtcgttgggaccagagcaaaatagtggagggcaggcta

SEQ ID NO: 7366 - DNA, 7275 bp, Homo sapiens
atctttgtttgggtctcccatactgcgtatagatgaatgggtcaggatatctggaacaaaatatggaggtgaagggtgagatcgggaaacaaagggtatggccccctagttcccaaagggagcagggagatgggaatagaattgaaggtaggttttaggctacttgggaggaggaatatttaggtaattgtggagactttctcctgtgtgatgaaggyggcagacactgtgatcctgtgggcaagaagtaaaaatgaccagctgaggatttcttttyctccaggactgtgttggggtgacaggatgcctgataaggatgacattcggctgctgccgtcagcattgggtgtgaagaagagaaaacgaggacccaagaagcagaaggagaacaagccaggaaaaccccgaaaacgcaagaagcgtgacagtgaggaggaatttggttctgagcgagatgagtaccgggagaagtcagagagtgggggcagtgaatatggaaccggaccgggtcggaaacgaagaaggaagcaccgagaaaaaaaggagaagaagacaaagcggcggaaaaagggggagggagatggggggcaaaagcaagtggaacagaagtcatcagcaactctgcttctgacctggggcctggaggatgtggagcatgtgttctctgaggaggattaccacacgctcaccaactacaaagccttcagccagttcatgaggcccctaattgctaagaagaatcctaagatcccaatgtctaagatgatgaccatccttggggccaaatggagagagttcagtgccaacaaccccttcaaggggtcagcagctgctgtggcggcggcagcggcagcagcagcagcagctgtagctgagcaggtgtcagctgctgtctcgtcggccacccccatagcaccctccggaccccccgcccttccaccaccccctgctgctgatatccagcccccacccatccgaagagccaaaaccaaagagggcaaaggtccaggccataagaggcggagtaagagcccccgagtgcctgatggacgcaagaagcttcggggaaagaaaatggcaccactcaaaataaaactagggcttctgggtggcaagaggaagaaaggaggctcgtatgtttttcagagcgacgaaggtcctgaaccagaggctgaggaatcagacctggacagtggcagtgtccacagtgcctcaggccggcctgatggccctgtccgcaccaagaaactaaagagaggccggccaggaaggaagaagaagaaggtcctgggctgtcctgcagtggccggggaggaggaggttgatggctacgagacggatcaccaggattactgtgaggtgtgccagcagggtggggaaattattctgtgtgacacctgccctcgtgcctaccacctcgtctgccttgatcctgagcttgaccgggctccagagggcaaatggagctgccctcactgtgagaaggagggggtccagtgggaggccaaggaggaagaagaagaatacgaagaggagggagaggaagaaggggagaaggaggaggaggatgatcacatggagtactgccgcgtatgcaaggacggcggggagctcctgtgctgtgacgcgtgcatctcctcctaccacattcattgtctaaaccctcccctgcctgacattcccaatggtgaatggctgtgtccccgatgcacatgccccgtgctgaagggtcgagtgcagaagatcctacattggcggtggggggagccacctgtagcagtgccagcccctcaacaggcagatggaaatccagatgtcccacccccccgtcctcttcaaggcagatcagagcgagagttctttgtcaagtgggtaggactatcctactggcactgctcctgggccaaggagcttcagctggaaatcttccatttggttatgtatcgaaactaccagcggaagaatgacatggatgascccccacccctggactatggctccggcgaggatgatgggaagagcgacaagcgtaaagtgaaagacccgcactatgctgagatggaggagaagtactatcgttttggcatcaagccagagtggatgaccgtccaccgcatcatcaaccacagtgtggataaaaaggggaattaccactatctagtaaaatggagggacttaccatatgaccagtccacgtgggaggaagatgaaatgaatatccctgaatacgaagaacataagcaaagctactggagacaccgagaactaattatgggggaagaccctgcccagccmcgcaagtataagaagaagaagaaggagctacagggtgatgggcctcccagttctcccactaatgatcctaccgtgaaatatgagactcagccacggtttatcacagccactggaggcaccctgcacatgtatcagttggaagggctgaactggctacgcttctcctgggcccagggcactgacaccattctmgctgatgagatggggctrggcaagaccatacaaaccatcgtcttcctctactcactctacaaggagggccacacaaaaggtcccttcctggtgagtgccccactctctaccatcattaactgggagcgggagttccagatgtgggcacccaaattctatgtggtgacatacacgggtgacaaggacagccgggccatcattcgtgagaatgaattctcctttgaggacaatgccatcaaagggggcaagaaagcttttaagatgaagagggaggcacaggtgaagttccatgttctcctgacatcgtatgagctgatcaccattgatcaggcagcacttggttccatccgctgggcctgtcttgtggtagatgaggcccatcgactcaagaacaaccagtccaagtttttcagggttctcaatggttacaagatagatcataagttgctgctgacaggaaccccattgcagaataatctggaggagctcttccatctcctgaacttcctcaccccagagagatttaacaacttggagggcttcctggaggartttgctgacatatccaaagaggaccagatcaagaaactgcatgatttgctggggccacacatgctgcggagactcaaggcagatgtctttaagaacatgccagccaagacagagctcatcgttcgggtggagctaagccccatgcagaagaaatactacaaatacatcctgactcgaaattttgaggccttgaattcacgaggtggtgggaaccaggtgtcgctgcttaatatcatgatggatcttaagaagtgctgcaaccatccatacctttttcccgtggctgctatggagtcccccaaactccccagtggggcttatgagggtggggcacttattaagtcgtctgggaagctcatgctgctccagaagatgctgcgaaagctgaaggagcaaggacaccgagtgctcatcttctcgcagatgaccaaaatgttagacttgcttgaggacttcttagactatgaaggctacaagtatgagcgcatcgatggtggtatcacgggtgccctgaggcaggaggccatcgatcggtttaatgctcctggggcccaacaattctgcttcctcctgtccacccgagctgggggcctgggcatcaatctggccactgctgacactgtcatcatctttgattctgactggaacccccataatgacatccaggcctttagccgggctcatcggattggccaggccaacaaagtgatgatttaccggtttgtgactcgcgcgtcagtggaagagcgaatcacacaagtggccaagagaaagatgatgctgacacacctggttgtgcggcctgggctgggctccaaggcaggctccatgtccaagcaggagcttgacgacattctcaaatttggcactgaagagctattcaaggatgaaaacgagggggagaacaaggaggaggacagcagtgtgattcattatgacaatgaggccatcgctcggctgttggaccggaaccaggatgcaactgaggacactgaygtgcagaacatgaatgagtatctcagctccttcaaggtggcacagtacgtcgtgcgggaagaagacaagattgaggaaattgagcgagagatcatcaagcaggaggagaatgtggaccctgactactgggagaagctgctgaggcatcactatgagcaacagcaggaagacctagcccggaatctaggcaagggcaagcgggttcgcaagcaagttaactacaatgatgctgctcaggaagaccaagacaaccagtcagagtactcggtgggttcagaggaggaggatgaagacttcgatgaacgtcctgaagggcgtagacagtcaaagaggcagctccggaatgagaaagataagccactgcctccactgctggcccgagtcgggggcaacattgaggtgctgggcttcaacacccgtcagcggaaggctttcctcaatgctgtgatgcgctgggggatgccaccacaggatgccttcaccacacagtggctggtgcgggacctgaggggcaagactgagaaggagtttaaggcctatgtgtctttgttcatgcgccatctgtgtgagcctggggcagacggctctgaaacctttgccgatggggtccctcgggagggactgagtcgccagcaggtgttgacccgcattggagtcatgtctctcgtcaaaaagaaggtgcaggagtttgagcacatcaatgggcgttggtcaatgccggaactgatgcctgaccccagcgccgattctaagcgctcctccagagcctcctctcctaccaaaacgtctcccaccactcctgaggcttctgctaccaacagtccctgcacctctaaacctgctactccagctccaagtgagaaaggagaaggcataaggacacctcttgagaaggaggaagctgaaaaccaggaggaaaagccagagaagaacagcagaattggggagaagatggagacagaggctgatgcccccagcccagccccatcacttggggagcggctggagccaaggaagattcctctagaggatgaggtgccaggggtgcctggagagatggagcctgaacctgggtaccgtggggacagagagaagtcagaagatgtaaaaggtgaccgggagcttcgaccagggcctcgagatgagccacggtccaatgggckacgagaggaaaagacagagaagccccggttcatgttcaatatcgccgatggtggcttcacagagcttcacacactgtggcagaatgaggaacgggcagctatttcctcggggaaactcaatgagatctggcacagaagacatgactattggcttctggctgggattgtcctccatggctatgcacggtggcaggacatccagaatgatgctcaatttgccattatcaacgagccatttaaaactgaagccaataaggggaactttctggagatgaaaaataagttcctggcccggaggttcaagctcctggagcaggcgctggtgattgaggagcagctgcggcgggcggcctacctgaacctgtcgcaggagccggcgcaccccgccatggccctccacgcccgcttcgccgaggccgagtgcctggccgagagccaccagcacctctccaaggagtcgctggcggggaacaagccggccaacgccgtcctgcacaaggttctgaaccagctggaggagttgctgagcgacatgaaggcggacgtgacccgcctgccagccacgctgtcccgaataccccccatcgcagcccgccttcagatgtccgagcgcagcatcctcagccggctggccagcaagggcacggagcctcaccccacaccggcctacccgccgggtccctacgctacacctccggggtacggggcggccttcagcgccgcacccgtaggggccctggccgccgcaggcgccaattacagccagatgcctgcagggtccttcatcacagccgccaccaacggccctccagtgcttgtgaagaaggagaaggaaatggtgggggcattggtgtcagacgggctggatcggaaggagccccgagccggggaggtgatctgtatagacgactgactggatcccaggcctgcccttcacccaggccccgtccccgaggccgacccccagctcaagcgctggggcctgctgccagccctccaccttccccaccccttgggccatcactgggctaggaacccctttgcccctctctgcagctcctctcttcaagaagggccctttgtctttctccactcccacacacctttcccaccaagccttgaagactgtgctggtgagaagaagtctgggtgggagatggctggcagggtcttccaagtaccttcctcccacactgccaagtatacacaacttcccagtaaatggttgtggggaggaaagaggtggagcctccccagccgtttccctgcagaatcagctctgtctcatgtggaagtggagaatcagccttgcctggcctttaggaacttttgtggggaagagagctttgaagagaggagggggactttagagagggatgaaaatgagccctgggagggaggaagggacgaggaggggtggctgcatgttaccgtcccctacctctccccacgtggagggtggagcagttatgagggaggaagtcractgctgttcagcctcagaataaaggtgccgttcactggctcagttacctcctgtgtaccggcatcttgtgttgggaatgttcccccctccctagggaccaaggaccacccctacaaaaagagtaatggttgggtgatactccctcaagccaaagaggagctccccaacctgttctagggacccaggtaacctagaagggtgggagagaatacaatgggccagatgtggtggaagcccagctctggggctcaggttcctggaagacttctactaccctccctcctcaaggcctggatacagactaaatttgtataagtcaggcaggggacctagtcagggtcttgggagctaccttgtcgttgggaccagagcaaaatagtggagggcaggctagggaaatgtgggcacatcccccctcccaggaggggccggggagagtggcagtttgcatggcgaaccccccacttcctctttgctgccccttcactttcttgctgcccctttcccagtctctcttcacacccactcctggtctgtcctgatcccctcttctgtatcaggtttattggttgtacatataaattatacttt

SEQ ID NO: 7367 - DNA, 7110 bp, Homo sapiens
atctttgtttgggtctcccatactgcgtatagatgaatgggtcaggatatctggaacaaaatatggaggtgaagggtgagatcgggaaacaaagggtatggccccctagttcccaaagggagcagggagatgggaatagaattgaaggtaggttttaggctacttgggaggaggaatatttaggtaattgtggagactttctcctgtgtgatgaaggyggcagacactgtgatcctgtgggcaagaagtaaaaatgaccagctgaggatttcttttyctccaggactgtgttggggtgacaggatgcctgataaggatgacattcggctgctgccgtcagcattgggtgtgaagaagagaaaacgaggacccaagaagcagaaggagaacaagccaggaaaaccccgaaaacgcaagaagcgtgacagtgaggaggaatttggttctgagcgagatgagtaccgggagaagtcagagagtgggggcagtgaatatggaaccggaccgggtcggaaacgaagaaggaagcaccgagaaaaaaaggagaagaagacaaagcggcggaaaaagggggagggagatggggggcaaaagcaagtggaacagaagtcatcagcaactctgcttctgacctggggcctggaggatgtggagcatgtgttctctgaggaggattaccacacgctcaccaactacaaagccttcagccagttcatgaggcccctaattgctaagaagaatcctaagatcccaatgtctaagatgatgaccatccttggggccaaatggagagagttcagtgccaacaaccccttcaaggggtcagcagctgctgtggcggcggcagcggcagcagcagcagcagctgtagctgagcaggtgtcagctgctgtctcgtcggccacccccatagcaccctccggaccccccgcccttccaccaccccctgctgctgatatccagcccccacccatccgaagagccaaaaccaaagagggcaaaggtccaggccataagaggcggagtaagagcccccgagtgcctgatggacgcaagaagcttcggggaaagaaaatggcaccactcaaaataaaactagggcttctgggtggcaagaggaagaaaggaggctcgtatgtttttcagagcgacgaaggtcctgaaccagaggctgaggaatcagacctggacagtggcagtgtccacagtgcctcaggccggcctgatggccctgtccgcaccaagaaactaaagagaggccggccaggaaggaagaagaagaaggtcctgggctgtcctgcagtggccggggaggaggaggttgatggctacgagacggatcaccaggattactgtgaggtgtgccagcagggtggggaaattattctgtgtgacacctgccctcgtgcctaccacctcgtctgccttgatcctgagcttgaccgggctccagagggcaaatggagctgccctcactgtgagaaggagggggtccagtgggaggccaaggaggaagaagaagaatacgaagaggagggagaggaagaaggggagaaggaggaggaggatgatcacatggagtactgccgcgtatgcaaggacggcggggagctcctgtgctgtgacgcgtgcatctcctcctaccacattcattgtctaaaccctcccctgcctgacattcccaatggtgaatggctgtgtccccgatgcacatgccccgtgctgaagggtcgagtgcagaagatcctacattggcggtggggggagccacctgtagcagtgccagcccctcaacaggcagatggaaatccagatgtcccacccccccgtcctcttcaaggcagatcagagcgagagttctttgtcaagtgggtaggactatcctactggcactgctcctgggccaaggagcttcagctggaaatcttccatttggttatgtatcgaaactaccagcggaagaatgacatggatgascccccacccctggactatggctccggcgaggatgatgggaagagcgacaagcgtaaagtgaaagacccgcactatgctgagatggaggagaagtactatcgttttggcatcaagccagagtggatgaccgtccaccgcatcatcaaccacagtgtggataaaaaggggaattaccactatctagtaaaatggagggacttaccatatgaccagtccacgtgggaggaagatgaaatgaatatccctgaatacgaagaacataagcaaagctactggagacaccgagaactaattatgggggaagaccctgcccagccmcgcaagtataagaagaagaagaaggagctacagggtgatgggcctcccagttctcccactaatgatcctaccgtgaaatatgagactcagccacggtttatcacagccactggaggcaccctgcacatgtatcagttggaagggctgaactggctacgcttctcctgggcccagggcactgacaccattctmgctgatgagatggggctrggcaagaccatacaaaccatcgtcttcctctactcactctacaaggagggccacacaaaaggtcccttcctggtgagtgccccactctctaccatcattaactgggagcgggagttccagatgtgggcacccaaattctatgtggtgacatacacgggtgacaaggacagccgggccatcattcgtgagaatgaattctcctttgaggacaatgccatcaaagggggcaagaaagcttttaagatgaagagggaggcacaggtgaagttccatgttctcctgacatcgtatgagctgatcaccattgatcaggcagcacttggttccatccgctgggcctgtcttgtggtagatgaggcccatcgactcaagaacaaccagtccaagtttttcagggttctcaatggttacaagatagatcataagttgctgctgacaggaaccccattgcagaataatctggaggagctcttccatctcctgaacttcctcaccccagagagatttaacaacttggagggcttcctggaggartttgctgacatatccaaagaggaccagatcaagaaactgcatgatttgctggggccacacatgctgcggagactcaaggcagatgtctttaagaacatgccagccaagacagagctcatcgttcgggtggagctaagccccatgcagaagaaatactacaaatacatcctgactcgaaattttgaggccttgaattcacgaggtggtgggaaccaggtgtcgctgcttaatatcatgatggatcttaagaagtgctgcaaccatccatacctttttcccgtggctgctatggagtcccccaaactccccagtggggcttatgagggtggggcacttattaagtcgtctgggaagctcatgctgctccagaagatgctgcgaaagctgaaggagcaaggacaccgagtgctcatcttctcgcagatgaccaaaatgttagacttgcttgaggacttcttagactatgaaggctacaagtatgagcgcatcgatggtggtatcacgggtgccctgaggcaggaggccatcgatcggtttaatgctcctggggcccaacaattctgcttcctcctgtccacccgagctgggggcctgggcatcaatctggccactgctgacactgtcatcatctttgattctgactggaacccccataatgacatccaggcctttagccgggctcatcggattggccaggccaacaaagtgatgatttaccggtttgtgactcgcgcgtcagtggaagagcgaatcacacaagtggccaagagaaagatgatgctgacacacctggttgtgcggcctgggctgggctccaaggcaggctccatgtccaagcaggagcttgacgacattctcaaatttggcactgaagagctattcaaggatgaaaacgagggggagaacaaggaggaggacagcagtgtgattcattatgacaatgaggccatcgctcggctgttggaccggaaccaggatgcaactgaggacactgaygtgcagaacatgaatgagtatctcagctccttcaaggtggcacagtacgtcgtgcgggaagaagacaagattgaggaaattgagcgagagatcatcaagcaggaggagaatgtggaccctgactactgggagaagctgctgaggcatcactatgagcaacagcaggaagacctagcccggaatctaggcaagggcaagcgggttcgcaagcaagttaactacaatgatgctgctcaggaagaccaagacaaccagtcagagtactcggtgggttcagaggaggaggatgaagacttcgatgaacgtcctgaagggcgtagacagtcaaagaggcagctccggaatgagaaagataagccactgcctccactgctggcccgagtcgggggcaacattgaggtgctgggcttcaacacccgtcagcggaaggctttcctcaatgctgtgatgcgctgggggatgccaccacaggatgccttcaccacacagtggctggtgcgggacctgaggggcaagactgagaaggagtttaaggcctatgtgtctttgttcatgcgccatctgtgtgagcctggggcagacggctctgaaacctttgccgatggggtccctcgggagggactgagtcgccagcaggtgttgacccgcattggagtcatgtctctcgtcaaaaagaaggtgcaggagtttgagcacatcaatgggcgttggtcaatgccggaactgatgcctgaccccagcgccgattctaagcgctcctccagagcctcctctcctaccaaaacgtctcccaccactcctgaggcttctgctaccaacagtccctgcacctctaaacctgctactccagctccaagtgagaaaggagaaggcataaggacacctcttgagaaggaggaagctgaaaaccaggaggaaaagccagagaagaacagcagaattggggagaagatggagacagaggctgatgcccccagcccagccccatcacttggggagcggctggagccaaggaagattcctctagaggatgaggtgccaggggtgcctggagagatggagcctgaacctgggtaccgtggggacagagagaagtcagccacagagtcgacgccaggagaaaggggggaggagaagccgttggatggacaggaacacagggagaggccggagggggaaacaggggatttgggcaagagagaagatgtaaaaggtgaccgggagcttcgaccagggcctcgagatgagccacggtccaatgggckacgagaggaaaagacagagaagccccggttcatgttcaatatcgccgatggtggcttcacagagcttcacacactgtggcagaatgaggaacgggcagctatttcctcggggaaactcaatgagatctggcacagaagacatgactattggcttctggctgggattgtcctccatggctatgcacggtggcaggacatccagaatgatgctcaatttgccattatcaacgagccatttaaaactgaagccaataaggggaactttctggagatgaaaaataagttcctggcccggaggttcaagctcctggagcaggcgctggtgattgaggagcagctgcggcgggcggcctacctgaacctgtcgcaggagccggcgcaccccgccatggccctccacgcccgcttcgccgaggccgagtgcctggccgagagccaccagcacctctccaaggagtcgctggcggggaacaagccggccaacgccgtcctgcacaaggttctgaaccagctggaggagttgctgagcgacatgaaggcggacgtgacccgcctgccagccacgctgtcccgaataccccccatcgcagcccgccttcagatgtccgagcgcagcatcctcagccggctggccagcaagggcacggagcctcaccccacaccggcctacccgccgggtccctacgctacacctccggggtacggggcggccttcagcgccgcacccgtaggggccctggccgccgcaggcgccaattacagccagatgcctgcagggtccttcatcacagccgccaccaacggccctccagtgcttgtgaagaaggagaaggaaatggtgggggcattggtgtcagacgggctggatcggaaggagccccgagccggggaggtgatctgtatagacgactgactggatcccaggcctgcccttcacccaggccccgtccccgaggccgacccccagctcaagcgctggggcctgctgccagccctccaccttccccaccccttgggccatcactgggctaggaacccctttgcccctctctgcagctcctctcttcaagaagggccctttgtctttctccactcccacacacctttcccaccaagccttgaagactgtgctggtgagaagaagtctgggtgggagatggctggcagggtcttccaagtaccttcctcccacactgccaagtatacacaacttcccagtaaatggttgtggggaggaaagaggtggagcctccccagccgtttccctgcagaatcagctctgtctcatgtggaagtggagaatcagccttgcctggcctttaggaacttttgtggggaagagagctttgaagagaggagggggactttagagagggatgaaaatgagccctgggagggaggaagggacgaggaggggtggctgcatgttaccgtcccctacctctccccacgtggagggtggagcagttatgagggaggaagtcractgctgttcagcctcagaataaaggtgccgttcactggctcagttacctcctgtgtaccggcatcttgtgttgggaatgttcccccctccctagggaccaaggaccacccctacaaaaagagtaatggttgggtgatactccctcaagccaaagaggagctccccaacctgttctagggacccaggtaacctagaagggtgggagagaatacaatgggccagatgtggcagactaaatttgtataagtcaggcaggggacctagtcagggtcttgggagctaccttgtcgttgggaccagagcaaaatagtggagggcaggcta

SEQ ID NO: 7368 - DNA, 1497 bp, Homo sapiens
cgtctctggtctttggatcaaaccagtggctgatatcctggcctgcaacttccacgatgggtttcagcagcaggttccctwgaaragagcagcacagccactgtcaatgccagcccttcgagaaccaggcaaacgcgcgcgtgcacacacacacactccggccccggcccaaygtgtggcccttacccttgtattcctgtgccaatgacgttaggtcgtacacgcgtcccaggtaagatacccagaggtcttcgggcctgttatgttgggccacctccgccggcgtkaaatagcgacgctgaaaatactccaagtctggcccagccaccaggccccggcgcggcatggctcttgctctgtcggtcactggatctcttggttactcctttgctcctcagcacgtactcactactactacgacctccgtcgcgtccgggagccgaggggagagcgtttatccgctgacatggaaaccattgtccttttccggccaccgtccactgagataaatatcaggggcggggtttggactgcacgtgttcacgggaaacgtagtatgagtcccgcgtggggcatataaggatcaagtaattgagttgcgccgctttcaggagttgcggggtggggcagagaacgaatacgctccgttttaattcagtggcctgggctacatgggatatttaggacagactatctctctgagacagaaaaacaagggaggaggcagtatgaaagaatgtattctcgctaaattccagtttctaaaggatgtrtaagaaaccagaggtaaaggtctcgcgatatcttaagacatcyggcgtagtacgcttcagtgagccacrgcgctagagaagtaggagaagctcgcgagatctgtgccgttgccgaggagactaggagggggaggagaggggatctcgcgaaaggaaagaggtcgggagcgctcgcgagatctcggaccacccaacctgaaaggtgcttaggaagttgaaaggcccagaggaggcctccgggcaaatggccggagctggacygaccatgctgctacgagaagagaatggctgttgcagtcggcgtcagagcagctccagtgcyggggattcggacggagagcgcgaggactcggcggctgagcgcgcccgacagcagctagaggcgctgctcaacaagactatgcgcattcgcatgacagatggacggacactggtcggctgyttyctctgcactgaccgtgactgcaatgtcatcctgggctcggcgcaggagttcctcaagccgtcggattccttctctgccggggagccccgtgtgctgggcctggccatggtacccggacaccacatcgtttccattgaggtgcagagggagagtctgaccgggcctccgtatytctgaccacgatggcgcttacctttcagacttcattaaacttatgaccgaatgggcctgtgtctgtgtgtagctgggatgccggtgcaggatagcacaccccatccc

SEQ ID NO: 7369 - DNA, 459 bp, Homo sapiens
gcccctccccgccccgcctcccggcgcgggtggccgaggcgtagcgctgcgacccccgcacccctgcgaacatggcgctgcgagtggtgcggagcgtgcgggccctgctctgcaccctgcgcgcggtcccgtcacccgccgcgccctgcccgccgaggccctggcagctgggggtgggcgccgtccgtacgctacgcactggacccgctctgctctcggtgcgtaaattcacagagaaacacgaatgggtaacaacagaaaatggcattggaacagtgggaatcagcaattttgcacaggaagcgttgggagatgttgtttattgtagtctccctgaagttgggacaaaattgaacaaacaagatgagtttggtgctttggaaagygtgaaagctgctagtgaactctattctcctttatcaggagaagtaactgaaattaatgaagctcttgcagaaa

SEQ ID NO: 7370 - DNA, 5240 bp, Homo sapiens
gacagacatggcgcttcagctgtcttcagaataatgtcacccggcctcctctcctgtcttctgcagtcttaaaagacctagtccctaactgaggtctggcttttcctcagccctggatgaagtggagaagacctatttggagactgcttcctgtcaccataaaatcctgaacatttgtcttgaacatgaacactccaaaagaagaattccaggactggcccatagtcagaatagcagctcatttaccagacctcattgtctatggacatttctccccagagcgaccctttatggattattttgacggagtcctgatgtttgttgatatttcaggttttactgcaatgactgagaagttcagcagtgccatgtacatggacagaggggctgagcagttggtggagatcctcaactaccacataagtgcaatagtggagaaagtgttgatttttggaggagacatcctgaaatttgcaggtgatgcactgctagccctgtggagggtggagcgaaagcagctgaaaaacattatcacagtggtaattaaatgtagcctggagatccatggattgtttgagacccaggagtgggaagaaggcctagacatccgagtcaagataggactggctgctggccacatcagcatgttggtctttggagatgaaacacacagccactttctggtgattggtcaggcagtggacgatgtgcgccttgcccagaacatggctcagatgaatgatgttattctgtcaccaaactgctggcagctctgtgaccggagcatgattgaaattgagagtgttccagatcagagagcagttaaggttaacttcttaaaaccaccccccaattttaattttgatgaatttttcacaaagtgtaygaccttcatgcattattatccttctggtgagcacaaaaacctcctgaggcttgcatgcacgctgaagcctgatcctgaactggagatgtccctacaaaagtatgtgatggaaagcattttgaagcagattgataacaaacagcttcagggctatttatctgagcttcgcccagtgacgattgtgtttgtgaacctgatgtttgaagaccaagacaaagcagaagagataggcccagccatccaggatgcctatatgcacatcacttctgtcctgaagatcttccaaggccaaatcaataaagtcttcatgtttgacaagggctgctctttcctctgtgtctttggcttccctggggaaaaggtacctgacgagctcactcatgctctggaatgtgctatggatatatttgacttctgctctcaagtccacaaaatccaaactgtatccatcggygttgccagtgggattgtcttctgtgggatcgttggacacactgtgagacacgagtacacagtcattggtcaaaaagtcaacttagctgccaggatgatgatgtactacccaggaattgtgacctgcgactctgtcacctacaatgggagcaacctaccagcgtacttttttaaagagcttccaaagaaagttatgaaaggtgttgcagattctggaccattgtatcagtattggggccgtactgagaaagtcatgtttggtatggcgtgcctcatctgcaacagaaaggaggattaccctttgctgggacgtaataaagagatcaactacttcatgtatactatgaagaaatttttgatatctaacagcagccaagtyttaatgtatgagggattaccaggatatggaaaaagccagatacttatgaaaattgagtacctggcccaaggtaagaatcacaggattattgccatttcattgaataagatcagcttccatcaaactttctataccatccagatgttcatggccaatgtcctaggcctagacacttgtaaacattataaagaacgacagaccaaccttcgaaataaagtcatgacactgttggatgaaaagttctactgtcttcttaatgacattttccatgttcagttccctatttctcgggagatttccaggatgagcaccttgaaaaagcaaaaacaattggaaatattgtttatgaagatcttgaagctgatagtgaaagaggaaaggattatttttatcattgatgaggcccagtttgtggattcgacctcctggagattyatggagaagcttatccggactcttcctatcttcatcattatgtccctgtgtcccttcgttaacattccctgtgcagctgccagggccgtaataaagaacaggaacaccacctacattgtcrttggtgcagtacagcctaacgacatctccaacaagatctgtcttgacctcaatgtgagctgcatctccaaagaactggactcgtacctgggggagggaagctgtgggattccattttactgtgaagaattgcttaaaaacctggaacatcatgaggtactcgttttccaacaaacggagtctgaggaaaagacaaataggacctggaataacctgttcaagtattccattaagctaacagagaagttaaacatggttactctccatagtgataaggaaagtgaagaagtctgtcacctcacaagtggygtcagactgaaaaacctgtcacctccaacgtcattaaaagaaatctctctgatccagctggatagcatgagactttcccaccaaatgctggtgagatgtgctgccatcattggcctgaccttcaccactgagttgttgtttgagattctcccctgttggaatatgaagatgatgatcaagaccctggcaaccctagtggaatctaacattttttattgtttccggaatggcaaggagcttcaaaaggccctgaaacagaatgatccctcatttgaggtgcactatcgttccttgtctctgaagcccagtgaagggatggatcacggtgaagaggaacagcttcgtgaactggagaatgaggtgatcgagtgccacaggatycgattctgtaaccctatgatgcagaaaacagcctacgagctgtggctcaaggaccagagaaaagccatgcacttgaaatgtgcccgctttttagaagaagatgcccacagatgtgaccactgccgaggcagggacttcattccctatcatcacttcacagtgaatattcggctcaacgctttagacatggatgccattaaaaagatggctatgtctcatggatttaaaactgaagaaaagcttatcttgtccaactcagagattcctgagacatctgcattttttcctgaaaatcgcagtcctgaagaaataagagaaaagatcttgaatttctttgaccacgttttaacaaaaatgaagacatctgacgaagacattatccctctggaatcttgccagtgtgaagaaatcctagagattgtcatcttgcctctggcccaccattttctggctttgggagaaaatgacaaagccttatattacttcttagaaattgcatctgcttatctcatcttttgtgataactacatggcatacatgtatttgaatgaaggacagaagttgctaaaaactctcaagaaggacaaatcttggagccagacatttgagtctgccaccttttacagcctcaaaggtgaggtctgtttcaatatgggccagatagtgcttgccaagaaaatgctgaggaaggcactgaagctcctcaaccgaatctttccttacaacttaatctccttgtttctccatatccatgtcgagaaaaacagacactttcattatgtgaatcggcaggcccaagagagcccacctccagggaagaagaggctggcacaactttaccggcaaactgtctgcctttccttgctgtggcgcatctatagctacagttatctttttcactgcaagtattatgcccayctggcagttatgatgcaaatgaayactgcactggaaactcaaaattgtttccagatcattaaggcttacctagactattcgctataccaccacctggctggctacaaaggtgtgtggttcaaatatgaagtcatggccatggagcacatcttcaacctccccctgaaaggcgagggcattgaaatcgtggcatacgtggctgagacactggtcttcaacaagctcataatgggacacctggatttggccattgagttaggctcccgagcccttcagatgtgggcactgctccagaatcccaaccgacattatcagtccctctgcagacttagcagatgtctccttctgaacagcagatacccgcaattgatccaggtgctggggcggctgtgggagctttctgtaacacaggaacacatcttcagcaaggcatttttctattttgtctgcttggacatcctgctttattctggttttgtttatagaacatttgaagaatgtttggaattcatacaccaatacgraaacaacagaatcctcaagttccacagtggactcctcctgggactttattcctctgtagctatctggtatgccagacttcaggaatgggacaacttttacaaattttccaatagagctaaaaatcttttgccaagaagaaccatgacacttacttaytatgacggaatwtctaggtacatggaggggcaagttcttcaccttcaaaaacaaatcaaagaacagtcagagaatgcccaagccagtggggaggagctactcaagaacttggagaatctggtggctcaaaataccactggccctgtcttttgcccaaggctctaccacctgatggcttacgtctgtatattaatgggagatgggcagaaatgtggcctcttcctgaacacagccttgcggctctctgaaacacaggggaatatactggagaaaygctggctgaacatgaacaaagaatcatggtactcaacctctgagttaaaagaagaccaatggcttcagacgatcttgagtctcccatcatgggaaaaaatygtagcaggcagggtaaacattcaggatcttcaaaaaaacaaattcctgatgagagctaataccgtggacaatcatttctaacatgtcaaagaaaaaagattttaataagcactatgtccttgtgattatctattattgacctttctccgtggytggcccactccaggttcctacataatctcttctgttccagacacagaaacagacatgttgatttcttctctttctggagggcctacaagggtcaggagtgtcatgrtttacttcttcctaatgttacaaaaaattgcttttaccattcat

SEQ ID NO: 7371 - DNA, 5122 bp, Homo sapiens
gacagacatggcgcttcagctgtcttcagaataatgtcacccggcctcctctcctgtcttctgcagtcttaaaagacctagtccctaactgaggtctggcttttcctcagccctggatgaagtggagaagacctatttggagactgcttcctgtcaccataaaatcctgaacatttgtcttgaacatgaacactccaaaagaagaattccaggactggcccatagtcagaatagcagctcatttaccagacctcattgtctatggacatttctccccagagcgaccctttatggattattttgacggagtcctgatgtttgttgatatttcaggcaactgcacatttattccaggttttactgcaatgactgagaagttcagcagtgccatgtacatggacagaggggctgagcagttggtggagatcctcaactaccacataagtgcaatagtggagaaagtgttgatttttggaggagacatcctgaaatttgcaggtgatgcactgctagccctgtggagggtggagcgaaagcagctgaaaaacattatcacagtggtaattaaatgtagcctggagatccatggattgtttgagacccaggagtgggaagaaggcctagacatccgagtcaagataggactggctgctggccacatcagcatgttggtctttggagatgaaacacacagccactttctggtgattggtcaggcagtggacgatgtgcgccttgcccagaacatggctcagatgaatgatgttattctgtcaccaaactgctggcagctctgtgaccggagcatgattgaaattgagagtgttccagatcagagagcagttaaggttaacttcttaaaaccaccccccaattttaattttgatgaatttttcacaaagtgtaygaccttcatgcattattatccttctggtgagcacaaaaacctcctgaggcttgcatgcacgctgaagcctgatcctgaactggagatgtccctacaaaagtatgtgatggaaagcattttgaagcagattgataacaaacagcttcagggctatttatctgagcttcgcccagtgacgattgtgtttgtgaacctgatgtttgaagaccaagacaaagcagaagagataggcccagccatccaggatgcctatatgcacatcacttctgtcctgaagatcttccaaggccaaatcaataaagtcttcatgtttgacaagggctgctctttcctctgtgtctttggcttccctggggaaaaggtacctgacgagctcactcatgctctggaatgtgctatggatatatttgacttctgctctcaagtccacaaaatccaaactgtatccatcggygttgccagtgggattgtcttctgtgggatcgttggacacactgtgagacacgagtacacagtcattggtcaaaaagtcaacttagctgccaggatgatgatgtactacccaggaattgtgacctgcgactctgtcacctacaatgggagcaacctaccagcgtacttttttaaagagcttccaaagaaagttatgaaaggtgttgcagattctggaccattgtatcagtattggggccgtactgagaaagtcatgtttggtatggcgtgcctcatctgcaacagaaaggaggattaccctttgctgggacgtaataaagagatcaactacttcatgtatactatgaagaaatttttgatatctaacagcagccaagtyttaatgtatgagggattaccaggatatggaaaaagccagatacttatgaaaattgagtacctggcccaaggtaagaatcacaggattattgccatttcattgaataagatcagcttccatcaaactttctataccatccagatgttcatggccaatgtcctaggcctagacacttgtaaacattataaagaacgacagaccaaccttcgaaataaagtcatgacactgttggatgaaaagttctactgtcttcttaatgacattttccatgttcagttccctatttctcgggagatttccaggatgagcaccttgaaaaagcaaaaacaattggaaatattgtttatgaagatcttgaagctgatagtgaaagaggaaaggattatttttatcattgatgaggcccagtttgtggattcgacctcctggagattyatggagaagcttatccggactcttcctatcttcatcattatgtccctgtgtcccttcgttaacattccctgtgcagctgccagggccgtaataaagaacaggaacaccacctacattgtcrttggtgcagtacagcctaacgacatctccaacaagatctgtcttgacctcaatgtgagctgcatctccaaagaactggactcgtacctgggggagggaagctgtgggattccattttactgtgaagaattgcttaaaaacctggaacatcatgaggtactcgttttccaacaaacggagtctgaggaaaagacaaataggacctggaataacctgttcaagtattccattaagctaacagagaagttaaacatggttactctccatagtgataaggaaagtgaagaagtctgtcacctcacaagtggygtcagactgaaaaacctgtcacctccaacgtcattaaaagaaatctctctgatccagctggatagcatgagactttcccaccaaatgctggtgagatgtgctgccatcattggcctgaccttcaccactgagttgttgtttgagattctcccctgttggaatatgaagatgatgatcaagaccctggcaaccctagtggaatctaacattttttattgtttccggaatggcaaggagcttcaaaaggccctgaaacagaatgatccctcatttgaggtgcactatcgttccttgtctctgaagcccagtgaagggatggatcacggtgaagaggaacagcttcgtgaactggagaatgaggtgatcgagtgccacaggatycgattctgtaaccctatgatgcagaaaacagcctacgagctgtggctcaaggaccagagaaaagccatgcacttgaaatgtgcccgctttttagaagaagatgcccacagatgtgaccactgccgaggcagggacttcattccctatcatcacttcacagtgaatattcggctcaacgctttagacatggatgccattaaaaagatggctatgtctcatggatttaaaactgaagaaaagcttatcttgtccaactcagagattcctgagacatctgcattttttcctgaaaatcgcagtcctgaagaaataagagaaaagatcttgaatttctttgaccacgttttaacaaaaatgaagacatctgacgaagacattatccctctggaatcttgccagtgtgaagaaatcctagagattgtcatcttgcctctggcccaccattttctggctttgggagaaaatgacaaagccttatattacttcttagaaattgcatctgcttatctcatcttttgtgataactacatggcatacatgtatttgaatgaaggacagaagttgctaaaaactctcaagaaggacaaatcttggagccagacatttgagtctgccaccttttacagcctcaaaggtgaggtctgtttcaatatgggccagatagtgcttgccaagaaaatgctgaggaaggcactgaagctcctcaaccgaatctttccttacaacttaatctccttgtttctccatatccatgtcgagaaaaacagacactttcattatgtgaatcggcaggcccaagagagcccacctccagggaagaagaggctggcacaactttaccggcaaactgtctgcctttccttgctgtggcgcatctatagctacagttatctttttcactgcaagtattatgcccayctggcagttatgatgcaaatgaayactgcactggaaactcaaaattgtttccagatcattaaggcttacctagactattcgctataccaccacctggctggctacaaaggtgtgtggttcaaatatgaagtcatggccatggagcacatcttcaacctccccctgaaaggcgagggcattgaaatcgtggcatacgtggctgagacactggtcttcaacaagctcataatgggacacctggatttggccattgagttaggctcccgagcccttcagatgtgggcactgctccagaatcccaaccgacattatcagtccctctgcagacttagcagatgtctccttctgaacagcagatacccgcaattgatccaggtgctggggcggctgtgggagctttctgtaacacaggaacacatcttcagcaaggcatttttctattttgtctgcttggacatcctgctttattctggttttgtttatagaacatttgaagaatgtttggaattcatacaccaatacgraaacaacagaatcctcaagttccacagtggactcctcctgggactttattcctctgtagctatctgggagtgtgaagcaggggtaggcaggagactacacacttccagagacccaggtatgccagacttcaggaatgggacaacttttacaaattttccaatagagctaaaaatcttttgccaagaagaaccatgacacttacttaytatgacggaatwtctaggtacatggaggggcaagttcttcaccttcaaaaacaaatcaaagaacagtcagagaatgcccaagccagtggggaggagctactcaaggaatcatggtactcaacctctgagttaaaagaagaccaatggcttcagacgatcttgagtctcccatcatgggaaaaaatygtagcaggcagggtaaacattcaggatcttcaaaaaaacaaattcctgatgagagctaataccgtggacaatcatttctaacatgtcaaagaaaaaagattttaataagcactatgtccttgtgattatctattattgacctttctccgtggytggcccactccaggttcctacataatctcttctgttccagacacagaaacagacatgttgatttcttctctttctggagggcctacaagggtcaggagtgtcatgrtttacttcttcctaatgttacaaaaaattgcttttaccattcat

SEQ ID NO: 7372 - DNA, 5261 bp, Homo sapiens
gacagacatggcgcttcagctgtcttcagaataatgtcacccggcctcctctcctgtcttctgcagtcttaaaagacctagtccctaactgaggtctggcttttcctcagccctggatgaagtggagaagacctatttggagactgcttcctgtcaccataaaatcctgaacatttgtcttgaacatgaacactccaaaagaagaattccaggactggcccatagtcagaatagcagctcatttaccagacctcattgtctatggacatttctccccagagcgaccctttatggattattttgacggagtcctgatgtttgttgatatttcaggcaactgcacatttattccaggttttactgcaatgactgagaagttcagcagtgccatgtacatggacagaggggctgagcagttggtggagatcctcaactaccacataagtgcaatagtggagaaagtgttgatttttggaggagacatcctgaaatttgcaggtgatgcactgctagccctgtggagggtggagcgaaagcagctgaaaaacattatcacagtggtaattaaatgtagcctggagatccatggattgtttgagacccaggagtgggaagaaggcctagacatccgagtcaagataggactggctgctggccacatcagcatgttggtctttggagatgaaacacacagccactttctggtgattggtcaggcagtggacgatgtgcgccttgcccagaacatggctcagatgaatgatgttattctgtcaccaaactgctggcagctctgtgaccggagcatgattgaaattgagagtgttccagatcagagagcagttaaggttaacttcttaaaaccaccccccaattttaattttgatgaatttttcacaaagtgtaygaccttcatgcattattatccttctggtgagcacaaaaacctcctgaggcttgcatgcacgctgaagcctgatcctgaactggagatgtccctacaaaagtatgtgatggaaagcattttgaagcagattgataacaaacagcttcagggctatttatctgagcttcgcccagtgacgattgtgtttgtgaacctgatgtttgaagaccaagacaaagcagaagagataggcccagccatccaggatgcctatatgcacatcacttctgtcctgaagatcttccaaggccaaatcaataaagtcttcatgtttgacaagggctgctctttcctctgtgtctttggcttccctggggaaaaggtacctgacgagctcactcatgctctggaatgtgctatggatatatttgacttctgctctcaagtccacaaaatccaaactgtatccatcggygttgccagtgggattgtcttctgtgggatcgttggacacactgtgagacacgagtacacagtcattggtcaaaaagtcaacttagctgccaggatgatgatgtactacccaggaattgtgacctgcgactctgtcacctacaatgggagcaacctaccagcgtacttttttaaagagcttccaaagaaagttatgaaaggtgttgcagattctggaccattgtatcagtattggggccgtactgagaaagtcatgtttggtatggcgtgcctcatctgcaacagaaaggaggattaccctttgctgggacgtaataaagagatcaactacttcatgtatactatgaagaaatttttgatatctaacagcagccaagtyttaatgtatgagggattaccaggatatggaaaaagccagatacttatgaaaattgagtacctggcccaaggtaagaatcacaggattattgccatttcattgaataagatcagcttccatcaaactttctataccatccagatgttcatggccaatgtcctaggcctagacacttgtaaacattataaagaacgacagaccaaccttcgaaataaagtcatgacactgttggatgaaaagttctactgtcttcttaatgacattttccatgttcagttccctatttctcgggagatttccaggatgagcaccttgaaaaagcaaaaacaattggaaatattgtttatgaagatcttgaagctgatagtgaaagaggaaaggattatttttatcattgatgaggcccagtttgtggattcgacctcctggagattyatggagaagcttatccggactcttcctatcttcatcattatgtccctgtgtcccttcgttaacattccctgtgcagctgccagggccgtaataaagaacaggaacaccacctacattgtcrttggtgcagtacagcctaacgacatctccaacaagatctgtcttgacctcaatgtgagctgcatctccaaagaactggactcgtacctgggggagggaagctgtgggattccattttactgtgaagaattgcttaaaaacctggaacatcatgaggtactcgttttccaacaaacggagtctgaggaaaagacaaataggacctggaataacctgttcaagtattccattaagctaacagagaagttaaacatggttactctccatagtgataaggaaagtgaagaagtctgtcacctcacaagtggygtcagactgaaaaacctgtcacctccaacgtcattaaaagaaatctctctgatccagctggatagcatgagactttcccaccaaatgctggtgagatgtgctgccatcattggcctgaccttcaccactgagttgttgtttgagattctcccctgttggaatatgaagatgatgatcaagaccctggcaaccctagtggaatctaacattttttattgtttccggaatggcaaggagcttcaaaaggccctgaaacagaatgatccctcatttgaggtgcactatcgttccttgtctctgaagcccagtgaagggatggatcacggtgaagaggaacagcttcgtgaactggagaatgaggtgatcgagtgccacaggatycgattctgtaaccctatgatgcagaaaacagcctacgagctgtggctcaaggaccagagaaaagccatgcacttgaaatgtgcccgctttttagaagaagatgcccacagatgtgaccactgccgaggcagggacttcattccctatcatcacttcacagtgaatattcggctcaacgctttagacatggatgccattaaaaagatggctatgtctcatggatttaaaactgaagaaaagcttatcttgtccaactcagagattcctgagacatctgcattttttcctgaaaatcgcagtcctgaagaaataagagaaaagatcttgaatttctttgaccacgttttaacaaaaatgaagacatctgacgaagacattatccctctggaatcttgccagtgtgaagaaatcctagagattgtcatcttgcctctggcccaccattttctggctttgggagaaaatgacaaagccttatattacttcttagaaattgcatctgcttatctcatcttttgtgataactacatggcatacatgtatttgaatgaaggacagaagttgctaaaaactctcaagaaggacaaatcttggagccagacatttgagtctgccaccttttacagcctcaaaggtgaggtctgtttcaatatgggccagatagtgcttgccaagaaaatgctgaggaaggcactgaagctcctcaaccgaatctttccttacaacttaatctccttgtttctccatatccatgtcgagaaaaacagacactttcattatgtgaatcggcaggcccaagagagcccacctccagggaagaagaggctggcacaactttaccggcaaactgtctgcctttccttgctgtggcgcatctatagctacagttatctttttcactgcaagtattatgcccayctggcagttatgatgcaaatgaayactgcactggaaactcaaaattgtttccagatcattaaggcttacctagactattcgctataccaccacctggctggctacaaaggtgtgtggttcaaatatgaagtcatggccatggagcacatcttcaacctccccctgaaaggcgagggcattgaaatcgtggcatacgtggctgagacactggtcttcaacaagctcataatgggacacctggatttggccattgagttaggctcccgagcccttcagatgtgggcactgctccagaatcccaaccgacattatcagtccctctgcagacttagcagatgtctccttctgaacagcagatacccgcaattgatccaggtgctggggcggctgtgggagctttctgtaacacaggaacacatcttcagcaaggcatttttctattttgtctgcttggacatcctgctttattctggttttgtttatagaacatttgaagaatgtttggaattcatacaccaatacgraaacaacagaatcctcaagttccacagtggactcctcctgggactttattcctctgtagctatctggtatgccagacttcaggaatgggacaacttttacaaattttccaatagagctaaaaatcttttgccaagaagaaccatgacacttacttaytatgacggaatwtctaggtacatggaggggcaagttcttcaccttcaaaaacaaatcaaagaacagtcagagaatgcccaagccagtggggaggagctactcaagaacttggagaatctggtggctcaaaataccactggccctgtcttttgcccaaggctctaccacctgatggcttacgtctgtatattaatgggagatgggcagaaatgtggcctcttcctgaacacagccttgcggctctctgaaacacaggggaatatactggagaaaygctggctgaacatgaacaaagaatcatggtactcaacctctgagttaaaagaagaccaatggcttcagacgatcttgagtctcccatcatgggaaaaaatygtagcaggcagggtaaacattcaggatcttcaaaaaaacaaattcctgatgagagctaataccgtggacaatcatttctaacatgtcaaagaaaaaagattttaataagcactatgtccttgtgattatctattattgacctttctccgtggytggcccactccaggttcctacataatctcttctgttccagacacagaaacagacatgttgatttcttctctttctggagggcctacaagggtcaggagtgtcatgrtttacttcttcctaatgttacaaaaaattgcttttaccattcat

SEQ ID NO: 7373 - DNA, 1968 bp, Homo sapiens
cagtccggccgggcggagctaggggcgggcccctgcgtctctgggcgctggagcgcggcgactatcacgccgcgtggcggacggacggactgacggacgcgcagccttacccgaaaggccatggcggagcacgcccctcgccgctgctgcctgggctgggacttcagcacgcagcaggtaaaggttgttgctgttgatgcagagttgaatgtcttctatgaggaaagtgtgcattttgacagagatcttccagaatttgggyatgtacttgatgtgcatgtggyggtgttcatgtgcacaaggatgggctgacggtcacttctccagtactaatgtgggtccaggcactggatatcatcttggagaagatgaaggcttcgggcttcgamttctctcaagtcctagccttgtccggggcgggccagcaacacggaagtatatactggaaggctggagcccagcaggcactgacaagcttatcaccagacctccggctacaccagcagctkcaggactgtttctccatcagcractgcccggtgtggatggamtccagcaccacagcccagtgccgccagctggaggctgctgtgggtggtgctcaggctctcmgctgcctcacggggtcccgtgcctatgagcgttttacagggaaccaaattgcaaaaatttaccagcagaaccccgaggcctactcacatacrgayagaatttctttggtcagtagctttgctgcttccctgttccttggctcttactcccctattgactacagtgatggttctggaatgaatttgttgcagatacaggataaagtctggtcccaggcttgccttggtgcctgtgcacctcatttagaggagaagcttagcccaccagtaccatcatgctcagttgtgggagccatttcttcctacwacgtccagcgctacggatttcctccaggatgcaaagtggtggccttcactggggacaacccagcgtcgctggcaggcatgagactggaggaaggtgacattgcggtcagcctgggcaccagtgacaccctgtttctctggctccaagagcccatgcctgccctggaaggccacatcttctgcaacccggttgactcccagcactacatggcactcctgtgctttaaaaatggctccctcatgagagagaagatccgcracgagtctgtatcccgttcctggagcgatttctctaaggcactgcagtccacagagatgggcaacggtggaaacctgggtttttattttgatgtaatggagatcacccctgaaattattggacgtcataggtttaacacagaaaaccacaaggttgcagcattccctggggatgtggaggttcgagcactaattgaaggacaattcatggccaagaggattcacgcagaaggcctgggctatcgagtcatgtccaagacaaagattttggccacaggaggagcatctcacaatagagaaatcttacaggtgcttgcagatgtgtttgatgccccggtgtatgttatagacactgccaactysgcctgtgtgggttctgcataccgagcttttcatggtcttgcaggtggaacagatrtgcccttttcagaggttgtgaagttagctccaaatcccagactagctgctaccccaagcccgggagcttctcaggtgagagaccatcrgaatttgtttgtarcatttgcattatgaaagcccgctagggttttttcccccaccaaaaggtcacctacattgaacgtgatgtgctcaactaaaggagaaattctgctttattgaaattatcaagaaaatggagctaaagggccatgttgtcagctgcaagtcacagatactgctgattttacagccagggtcagatggattgctgggcatatttgtattgcttcttatgcctcacggtgggcccttccatgtcactgggctataaaagctactgaaaggatccatc

SEQ ID NO: 7374 - DNA, 3694 bp, Homo sapiens
cagtccggccgggcggagctaggggcgggcccctgcgtctctgggcgctggagcgcggcgactatcacgccgcgtggcggacggacggactgacggacgcgcagccttacccgaaaggccatggcggagcacgcccctcgccgctgctgcctgggctgggacttcagcacgcagcaggtaaaggttgttgctgttgatgcagagttgaatgtcttctatgaggaaagtgtgcattttgacagagatcttccagaatttgygactcagggyggtgttcatgtgcacaaggatgggctgacggtcacttctccagtactaatgtgggtccaggcactggatatcatcttggagaagatgaaggcttcgggcttcgamttctctcaagtcctagccttgtccggggcgggccagcaacacggaagtatatactggaaggctggagcccagcaggcactgacaagcttatcaccagacctccggctacaccagcagctkcaggactgtttctccatcagcractgcccggtgtggatggamtccagcaccacagcccagtgccgccagctggaggctgctgtgggtggtgctcaggctctcmgctgcctcacggggtcccgtgcctatgagcgttttacagggaaccaaattgcaaaaatttaccagcagaaccccgaggcctactcacatacrgayagaatttctttggtcagtagctttgctgcttccctgttccttggctcttactcccctattgactacagtgatggttctggaatgaatttgttgcagatacaggataaagtctggtcccaggcttgccttggtgcctgtgcacctcatttagaggagaagcttagcccaccagtaccatcatgctcagttgtgggagccatttcttcctacwacgtccagcgctacggatttcctccaggatgcaaagtggtggccttcactggggacaacccagcgtcgctggcaggcatgagactggaggaaggtgacattgcggtcagcctgggcaccagtgacaccctgtttctctggctccaagagcccatgcctgccctggaaggccacatcttctgcaacccggttgactcccagcactacatggcactcctgtgctttaaaaatggctccctcatgagagagaagatccgcracgagtctgtatcccgttcctggagcgatttctctaaggcactgcagtccacagagatgggcaacggtggaaacctgggtttttattttgatgtaatggagatcacccctgaaattattggacgtcataggtttaacacagaaaaccacaaggttgcagcattccctggggatgtggaggttcgagcactaattgaaggacaattcatggccaagaggattcacgcagaaggcctgggctatcgagtcatgtccaagacaaagattttggccacaggaggagcatctcacaatagagaaatcttacaggtgcttgcagatgtgtttgatgccccggtgtatgttatagacactgccaactysgcctgtgtgggttctgcataccgagcttttcatggtcttgcaggtggaacagatrtgcccttttcagaggttgtgaagttagctccaaatcccagactagctgctaccccaagcccgggagcttctcaggtctacgaggcccttctcccccagtatgccaaactcgagcagagaatcttgtctcagacccgggggcctccggagtgaacaggcatccctgttgcccctgcctgcccagatttactgaccccatttgtcgacatggccccagacaggagggatccacttctctgttctgaacagctcttcctgcccctactgactccttggagtgtccaggaccatcttaaagccgccctcagcacatctgcatgaagatagataggcactcctgtccctgtgcccgtgtgccccagggcaggaaagcatctctcttttcctgtcttttatcccaggaggcaggacaacactgagactgggatatgtccaataaaaactatgacttttccccttgcagaggcagaattaaagctaatctagggactcaaatcagcagaatgggggagacaaagcccggtctcaccccctaacctcatcctatctctttctccaaccctgactgcccactcctccrcaaaccgtgacccatagccgcccccaccccataccttgatctaccatccatcctcttccccaatccaaaccccacagtctcttctctcccacaccctgccctccttgtttcagctgtctgaggtgcctcgcagggcctctcttacttgccccatgctcaccctttccatgctgtccccattctctcctttcaccatctctcctctccccctccttcatctctcctccctccccaaactcacttggcataattcacaacctcccacccaaacaatgggcctggtggacgtgcttcctgtgccctccctttagctatgcccacagatcactgagagggaccatctcccaagtggtgcagtttagaacttctctccctttttctccctcattccctctctcttcttgcagtccacttgctgaagaagttgtgtcatttctctggaagaatttccaaaattctggatttcttttttattttggagtatttcatcagctgaaaagtgattctyactttgagttttcttcctatatttgtatagtgagttcctttttccttcctctttatccctcctgttttactttatacctctctattccttgctcaaattattgcaaaagcctctatagaaagtcctctgtgatctgactcctgcagactcttccagatttttctgcccaaggcctttactgagctcaggactccagctaaatcaaaatackcatgttctcacccagagtgacaaaatcctgcagataggtttaagacctagtggmtcagagcagtagctactgggaagttaaaaggaaggggcttagaaaatgaatgggaccaaaggcatcacttctgatggagatgaagccatcttgaaagtgagtggtgtcctttggaggcatggtggatgaaaggcgcaaaggaagcaagaggttaaagataatggcccattagatacaacagcaagcccaagattccraagaagacagacaactccccctagtaccacctagacattactttttaaagacattttacattattgtccagcagaaaaaggctgtcttggaccatgaaacagtaaactgtaactaaacacttcaacatgaatttgaaaataaataattgtggatataaaagaacaccagagatcagaaattcaaaaactcagaataaaaatgaaaaagctacaagcatatatgagaagagaactgactgaacttgggaaataatttgaacaaaaagataaatcttcacagatatgaatactaaattatatcttaatgaaaatagatatggtcacaagtacattaaggcacgtagaaggtaggagtaagaaaagctaagagaagcaaaacaaacaaagcaatattaaaggaagagccaaaaagacccagaaataaaatgacagataaagaagattgtcaaagaaaagatgatacaggtaagattggaactcatgaagacaaaagataagacagtggcatagagttaatatttaaaattcaaatattaaaactcaaataaaccccaaagaacttttgg

SEQ ID NO: 7375 - DNA, 1975 bp, Homo sapiens
cagtccggccgggcggagctaggggcgggcccctgcgtctctgggcgctggagcgcggcgactatcacgccgcgtggcggacggacggactgacggacgcgcagccttacccgaaaggccatggcggagcacgcccctcgccgctgctgcctgggctgggacttcagcacgcagcaggtaaaggttgttgctgttgatgcagagttgaatgtcttctatgaggaaagtgtgcattttgacagagatcttccagaatttgggyatgtacttgatgtgcatgtgactcagggyggtgttcatgtgcacaaggatgggctgacggtcacttctccagtactaatgtgggtccaggcactggatatcatcttggagaagatgaaggcttcgggcttcgamttctctcaagtcctagccttgtccggggcgggccagcaacacggaagtatatactggaaggctggagcccagcaggcactgacaagcttatcaccagacctccggctacaccagcagctkcaggactgtttctccatcagcractgcccggtgtggatggamtccagcaccacagcccagtgccgccagctggaggctgctgtgggtggtgctcaggctctcmgctgcctcacggggtcccgtgcctatgagcgttttacagggaaccaaattgcaaaaatttaccagcagaaccccgaggcctactcacatacrgayagaatttctttggtcagtagctttgctgcttccctgttccttggctcttactcccctattgactacagtgatggttctggaatgaatttgttgcagatacaggataaagtctggtcccaggcttgccttggtgcctgtgcacctcatttagaggagaagcttagcccaccagtaccatcatgctcagttgtgggagccatttcttcctacwacgtccagcgctacggatttcctccaggatgcaaagtggtggccttcactggggacaacccagcgtcgctggcaggcatgagactggaggaaggtgacattgcggtcagcctgggcaccagtgacaccctgtttctctggctccaagagcccatgcctgccctggaaggccacatcttctgcaacccggttgactcccagcactacatggcactcctgtgctttaaaaatggctccctcatgagagagaagatccgcracgagtctgtatcccgttcctggagcgatttctctaaggcactgcagtccacagagatgggcaacggtggaaacctgggtttttattttgatgtaatggagatcacccctgaaattattggacgtcataggtttaacacagaaaaccacaaggttgcagcattccctggggatgtggaggttcgagcactaattgaaggacaattcatggccaagaggattcacgcagaaggcctgggctatcgagtcatgtccaagacaaagattttggccacaggaggagcatctcacaatagagaaatcttacaggtgcttgcagatgtgtttgatgccccggtgtatgttatagacactgccaactysgcctgtgtgggttctgcataccgagcttttcatggtcttgcaggtggaacagatrtgcccttttcagaggttgtgaagttagctccaaatcccagactagctgctaccccaagcccgggagcttctcaggtgagagaccatcrgaatttgtttgtarcatttgcattatgaaagcccgctagggttttttcccccaccaaaaggtcacctacattgaacgtgatgtgctcaactaaaggagaaattctgctttattgaaattatcaagaaaatggagctaaagggccatgttgtcagctgcaagtcacagatactgctgattttacagccagggtcagatggattgctgggcatatttgtattgcttcttatgcctcacggtgggcccttccatgtcactgggctataaaagctactgaaaggatccatc

SEQ ID NO: 7376 - DNA, 2198 bp, Homo sapiens
cctgtgggccctcctatagagggcttggtaggcggtggcggggaggggcgggttcccaggccgactctccttgtggttggctgaggctggaggtggacgggacttttggagggtcgctcgcgtctgttcgcagagctgtgggcggagttgaggccttggaggctgagatgtggttctgcgcgtgtgcggacggctgtctgttaactccgcggtcagttcccggactggtggctggtctgcagggttgacctgcgcaatgcagaggctgcaggtagtgctgggccacctgaggggtccggccgattccggctggatgccgcaggccgcgccttgcctgagcggtgccccgcaggcctcggccgcggacgtggtggtggtgcacgggcggcgcacggccatctgccgggcgggccgcggcggcttcaaggacaccacccccgacgagcttctctcggcagtcatgaccgcggttctcaaggacgtgaatctgaggccggaacagctgggggacatctgtgtcggaaatgtgctgcagcctggggccggggcaatcatggcccgaatcgcccagtttctgagtgayatcccggagactgtgcctttgtccactgtcaatagacagtgytcgtcggggctacaggcagtggccagcatagcaggtggcatcagaaatgggtcttatgacattggcatggcctgtggggtggagtccatgtccctggctgacagagggaaccctggaaatattacttcgcgcttgatggagaaggasaaggccagagattgcctgattcctatggggataacctctgagaatgtggctgagcggtttggcatttcacgggagaagcaggatacctttgccctggcttcccagcagaaggcagcaagagcccagagcaagggctgtttccaagctgagattgtgcctgtgaccaccacggtccakgatgacaagggcaccaagaggagcatcactgtgacccaggatgagggtatccgccccagcaccaccatggarggcctggccaaactgaagcctgccttcaagaaagatgkttctaccacagctggaaactctagccaggtgagtgatggggcagctgccatcctgctggcccggaggtccaaggcagaagagttgggccttcccatccttggggtcmtgaggtcttatgcagtggttggggtcccacctgacatcatgggcattggacctgcctatgccatcccagtagctttgcaaaaagcagggctgacagtgagtgacgtggacatcttcgagatcaatgaggcctttgcaagccaggctgcctactgtgtggagaagctacgactcccccctgagaaggtgaaccccctggggggtgcagtggccttagggcacccactgggctgcactggggcacgacaggtcatcacgctgctcaatgagctgaagcgccgtgggaagagggcatacggagtggtgtccatgtgcatcgggactggaatgggagccgctgccgtctttgaataccctgggaactgagtgaggtcccaggctggaggcgctacgcagacagtcctgctgctctagcagcaaggcagtaacaccacaaaagcaaaaccacatgggaaaactcagcactggtggtggtggcagtggacagatcaaggcacttcaactcatttggaaaatgagccttggccccggagccgcagggtgcaggacttctcaccgagcacaccttccaccaccatcgtggactcgtacagctcactactcctgtggggagcatgtgggggctgaggcctccctattccttgagacacarcaatattgaaattagaccaactgataaccctacaatagcctctaagtcttcaagtgaaaagaagagtcgtacgtatctcactttaaatcaaaatgattaagctaaaaaatgattaagcttagtgaggaaggcacattcaaagctgacacaggcagaaagctagctttgtgccaaacagacaaattgtgaatgcaaagaaatgtaatatctagcaaatgccctatttgtgaaaattttgaagtaaaagataataaagcaaataaaatgttatgcaaacaaggaaaagaaaataggagaaagaaataatgtgatcaggttaactgataaaacagaggagaacaaaactgctgcttgaaatccctgcacaggttacgtgcaatg

SEQ ID NO: 7377 - DNA, 1919 bp, Homo sapiens
cctgtgggccctcctatagagggcttggtaggcggtggcggggaggggcgggttcccaggccgactctccttgtggttggctgaggctggaggtggacgggacttttggagggtcgctcgcgtctgttcgcagagctgtgggcggagttgaggccttggaggctgagatgtggttctgcgcgtgtgcggacggctgtctgttaactccgcggtcagttcccggactggtggctggtctgcagggttgacctgcgcaatgcagaggctgcaggtagtgctgggccacctgaggggtccggccgattccggctggatgccgcaggccgcgccttgcctgagcggtgccccgcaggcctcggccgcggacgtggtggtggtgcacgggcggcgcacggccatctgccgggcgggccgcggcggcttcaaggacaccacccccgacgagcttctctcggcagtcatgaccgcggttctcaaggacgtgaatctgaggccggaacagctgggggacatctgtgtcggaaatgtgctgcagcctggggccggggcaatcatggcccgaatcgcccagtttctgagtgayatcccggagactgtgcctttgtccactgtcaatagacagtgytcgtcggggctacaggcagtggccagcatagcaggtggcatcagaaatgggtcttatgacattggcatggcctgtgggataacctctgagaatgtggctgagcggtttggcatttcacgggagaagcaggatacctttgccctggcttcccagcagaaggcagcaagagcccagagcaagggctgtttccaagctgagattgtgcctgtgaccaccacggtccakgatgacaagggcaccaagaggagcatcactgtgacccaggatgagggtatccgccccagcaccaccatggarggcctggccaaactgaagcctgccttcaagaaagatgkttctaccacagctgggctgacagtgagtgacgtggacatcttcgagatcaatgaggcctttgcaagccaggctgcctactgtgtggagaagctacgactcccccctgagaaggtgaaccccctggggggtgcagtggccttagggcacccactgggctgcactggggcacgacaggtcatcacgctgctcaatgagctgaagcgccgtgggaagagggcatacggagtggtgtccatgtgcatcgggactggaatgggagccgctgccgtctttgaataccctgggaactgagtgaggtcccaggctggaggcgctacgcagacagtcctgctgctctagcagcaaggcagtaacaccacaaaagcaaaaccacatgggaaaactcagcactggtggtggtggcagtggacagatcaaggcacttcaactcatttggaaaatgagccttggccccggagccgcagggtgcaggacttctcaccgagcacaccttccaccaccatcgtggactcgtacagctcactactcctgtggggagcatgtgggggctgaggcctccctattccttgagacacarcaatattgaaattagaccaactgataaccctacaatagcctctaagtcttcaagtgaaaagaagagtcgtacgtatctcactttaaatcaaaatgattaagctaaaaaatgattaagcttagtgaggaaggcacattcaaagctgacacaggcagaaagctagctttgtgccaaacagacaaattgtgaatgcaaagaaatgtaatatctagcaaatgccctatttgtgaaaattttgaagtaaaagataataaagcaaataaaatgttatgcaaacaaggaaaagaaaataggagaaagaaataatgtgatcaggttaactgataaaacagaggagaacaaaactgctgcttgaaatccctgcacaggttacgtgcaatg

SEQ ID NO: 7378 - DNA, 2037 bp, Homo sapiens
cctgtgggccctcctatagagggcttggtaggcggtggcggggaggggcgggttcccaggccgactctccttgtggttggctgaggctggaggtggacgggacttttggagggtcgctcgcgtctgttcgcagagctgtgggcggagttgaggccttggaggctgagatgtggttctgcgcgtgtgcggacggctgtctgttaactccgcggtcagttcccggactggtggctggtctgcagggttgacctgcgcaatgcagaggctgcaggtagtgctgggccacctgaggggtccggccgattccggctggatgccgcaggccgcgccttgcctgagcggtgccccgcaggcctcggccgcggacgtggtggtggtgcacgggcggcgcacggccatctgccgggcgggccgcggcggcttcaaggacaccacccccgacgagcttctctcggcagtcatgaccgcggttctcaaggacgtgaatctgaggccggaacagctgggggacatctgtgtcgatcaacatggagtttcttatgtcttccttttctacatacacacggaaatgtgctgcagcctggggccggggcaatcatggcccgaatcgcccagtttctgagtgayatcccggagactgtgcctttgtccactgtcaatagacagtgytcgtcggggctacaggcagtggccagcatagcagggtggagtccatgtccctggctgacagagggaaccctggaaatattacttcgcgcttgatggagaaggasaaggccagagattgcctgattcctatggggataacctctgagaatgtggctgagcggtttggcatttcacgggagaagcaggatacctttgccctggcttcccagcagaaggcagcaagagcccagagcaagggctgtttccaagctgagattgtgcctgtgaccaccacggtccakgatgacaagggcaccaagaggagcatcactgtgacccaggatgagggtatccgccccagcaccaccatggarggcctggccaaactgaagcctgccttcaagaaagatgkttctaccacagctggtgagactggtccggggtaggggtatgagaaagcaggccatggccatgctgggtgctgtactctgggaacctggaatagaccaggcccctctgcaaagtagaagtgggagggctgggatctcctcatccccaccccgatgccttcttaccccaacagtttgcccctaggaaactctagccaggtgagtgatggggcagctgccatcctgctggcccggaggtccaaggcagaagagttgggccttcccatccttggggtcmtgaggtcttatgcagtggttggggtcccacctgacatcatgggcattggacctgcctatgccatcccagtagctttgcaaaaagcagggctgacagtgagtgacgtggacatcttcgagatcaatgaggcctttgcaagccaggctgcctactgtgtggagaagctacgactcccccctgagaaggtgaaccccctggggggtgcagtggccttagggcacccactgggctgcactggggcacgacaggtcatcacgctgctcaatgagctgaagcgccgtgggaagagggcatacggagtggtgtccatgtgcatcgggactggaatgggagccgctgccgtctttgaataccctgggaactgagtgaggtcccaggctggaggcgctacgcagacagtcctgctgctctagcagcaaggcagtaacaccacaaaagcaaaaccacatgggaaaactcagcactggtggtggtggcagtggacagatcaaggcacttcaactcatttggaaaatgtgaacactgatgwcatggtataggagtgggtggggtgttgagccacccatcagaccctctttagctgtgcaagataaaagcagcctgggtcacccaggccacaaggccatggttaattcttaaggcaaggcaaatccatggatgagaagtgcaatgggcatagtaaaagtgcatgaatttatctta

SEQ ID NO: 7379 - DNA, 2435 bp, Homo sapiens
cctgtgggccctcctatagagggcttggtaggcggtggcggggaggggcgggttcccaggccgactctccttgtggttggctgaggctggaggtggacgggacttttggagggtcgctcgcgtctgttcgcagagctgtgggcggagttgaggccttggaggctgagatgtggttctgcgcgtgtgcggacggctgtctgttaactccgcggtcagttcccggactggtggctggtctgcagggttgacctgcgcaatgcagaggctgcaggtagtgctgggccacctgaggggtccggccgattccggctggatgccgcaggccgcgccttgcctgagcggtgccccgcaggcctcggccgcggacgtggtggtggtgcacgggcggcgcacggccatctgccgggcgggccgcggcggcttcaaggacaccacccccgacgagcttctctcggcagtcatgaccgcggttctcaaggacgtgaatctgaggccggaacagctgggggacatctgtgtcggaaatgtgctgcagcctggggccggggcaatcatggcccgaatcgcccagtttctgagtgayatcccggagactgtgcctttgtccactgtcaatagacagtgytcgtcggggctacaggcagtggccagcatagcagggtggagtccatgtccctggctgacagagggaaccctggaaatattacttcgcgcttgatggagaaggasaaggccagagattgcctgattcctatggggataacctctgagaatgtggctgagcggtttggcatttcacgggagaagcaggatacctttgccctggcttcccagcagaaggcagcaagagcccagagcaagggctgtttccaagctgagattgtgcctgtgaccaccacggtccakgatgacaagggcaccaagaggagcatcactgtgacccaggatgagggtatccgccccagcaccaccatggarggcctggccaaactgaagcctgccttcaagaaagatgkttctaccacagctggaaactctagccaggtgagtgatggggcagctgccatcctgctggcccggaggtccaaggcagaagagttgggccttcccatccttggggtcmtgaggtcttatgcagtggttggggtcccacctgacatcatgggcattggacctgcctatgccatcccagtagctttgcaaaaagcaggtaaggtggctccttcatatagtatctgggtcccacctggatcctgcagctgccctgcatgctgttgccaggggcatgagggtggtcctgtgggtgctgcagagtggaggtggggcaggctagtgtcccatacttcaagcccttcctgaccccacagctgggattggctcacccttctggaagagacacacaccaggcagcctgtaggcccatggatggggtgggccccaggggaggcagagggccagtgtgtcagctcaggtctttaccttgtctgcagggctgacagtgagtgacgtggacatcttcgagatcaatgaggcctttgcaagccaggctgcctactgtgtggagaagctacgactcccccctgagaaggtgaaccccctggggggtgcagtggccttagggcacccactgggctgcactggggcacgacaggtcatcacgctgctcaatgagctgaagcgccgtgggaagagggcatacggagtggtgtccatgtgcatcgggactggaatgggagccgctgccgtctttgaataccctgggaactgagtgaggtcccaggctggaggcgctacgcagacagtcctgctgctctagcagcaaggcagtaacaccacaaaagcaaaaccacatgggaaaactcagcactggtggtggtggcagtggacagatcaaggcacttcaactcatttggaaaatgagccttggccccggagccgcagggtgcaggacttctcaccgagcacaccttccaccaccatcgtggactcgtacagctcactactcctgtggggagcatgtgggggctgaggcctccctattccttgagacacarcaatattgaaattagaccaactgataaccctacaatagcctctaagtcttcaagtgaaaagaagagtcgtacgtatctcactttaaatcaaaatgattaagctaaaaaatgattaagcttagtgaggaaggcacattcaaagctgacacaggcagaaagctagctttgtgccaaacagacaaattgtgaatgcaaagaaatgtaatatctagcaaatgccctatttgtgaaaattttgaagtaaaagataataaagcaaataaaatgttatgcaaacaaggaaaagaaaataggagaaagaaataatgtgatcaggttaactgataaaacagaggagaacaaaactgctgcttgaaatccctgcacaggttacgtgcaatg

SEQ ID NO: 7380 - DNA, 1836 bp, Homo sapiens
cctgtgggccctcctatagagggcttggtaggcggtggcggggaggggcgggttcccaggccgactctccttgtggttggctgaggctggaggtggacgggacttttggagggtcgctcgcgtctgttcgcagagctgtgggcggagttgaggccttggaggctgagatgtggttctgcgcgtgtgcggacggctgtctgttaactccgcggtcagttcccggactggtggctggtctgcagggttgacctgcgcaatgcagaggctgcaggtagtgctgggccacctgaggggtccggccgattccggctggatgccgcaggccgcgccttgcctgagcggtgccccgcaggcctcggccgcggacgtggtggtggtgcacgggcggcgcacggccatctgccgggcgggccgcggcggcttcaaggacaccacccccgacgagcttctctcggcagtcatgaccgcggttctcaaggacgtgaatctgaggccggaacagctgggggacatctgtgtcggaaatgtgctgcagcctggggccggggcaatcatggcccgaatcgcccagtttctgagtgayatcccggagactgtgcctttgtccactgtcaatagacagtgytcgtcggggctacaggcagtggccagcatagcagggtggagtccatgtccctggctgacagagggaaccctggaaatattacttcgcgcttgatggagaaggasaaggccagagattgcctgattcctatggggataacctctgagaatgtggctgagcggtttggcatttcacgggagaagcaggatacctttgccctggcttcccagcagaaggcagcaagagcccagagcaagggctgtttccaagctgagattgtgcctgtgaccaccacggtccakgatgacaagggcaccaagaggagcatcactgtgacccaggatgagggtatccgccccagcaccaccatggarggcctggccaaactgaagcctgccttcaagaaagatgkttctaccacagctgtttgcccctaggaaactctagccaggtgagtgatggggcagctgccatcctgctggcccggaggtccaaggcagaagagttgggccttcccatccttggggtcmtgaggtcttatgcagtggttggggtcccacctgacatcatgggcattggacctgcctatgccatcccagtagctttgcaaaaagcagggctgacagtgagtgacgtggacatcttcgagatcaatgaggcctttgcaagccaggctgcctactgtgtggagaagctacgactcccccctgagaaggtgaaccccctggggggtgcagtggccttagggcacccactgggctgcactggggcacgacaggtcatcacgctgctcaatgagctgaagcgccgtgggaagagggcatacggagtggtgtccatgtgcatcgggactggaatgggagccgctgccgtctttgaataccctgggaactgagtgaggtcccaggctggaggcgctacgcagacagtcctgctgctctagcagcaaggcagtaacaccacaaaagcaaaaccacatgggaaaactcagcactggtggtggtggcagtggacagatcaaggcacttcaactcatttggaaaatgtgaacactgatgwcatggtataggagtgggtggggtgttgagccacccatcagaccctctttagctgtgcaagataaaagcagcctgggtcacccaggccacaaggccatggttaattcttaaggcaaggcaaatccatggatgagaagtgcaatgggcatagtaaaagtgcatgaatttatctta

SEQ ID NO: 7381 - DNA, 1868 bp, Homo sapiens
cctgtgggccctcctatagagggcttggtaggcggtggcggggaggggcgggttcccaggccgactctccttgtggttggctgaggctggaggtggacgggacttttggagggtcgctcgcgtctgttcgcagagctgtgggcggagttgaggccttggaggctgagatgtggttctgcgcgtgtgcggacggctgtctgttaactccgcggtcagttcccggactggtggctggtctgcagggttgacctgcgcaatgcagaggctgcaggtagtgctgggccacctgaggggtccggccgattccggctggatgccgcaggccgcgccttgcctgagcggtgccccgcaggcctcggccgcggacgtggtggtggtgcacgggcggcgcacggccatctgccgggcgggccgcggcggcttcaaggacaccacccccgacgagcttctctcggcagtcatgaccgcggttctcaaggacgtgaatctgaggccggaacagctgggggacatctgtgtcggaaatgtgctgcagcctggggccggggcaatcatggcccgaatcgcccagtttctgagtgayatcccggagactgtgcctttgtccactgtcaatagacagtgytcgtcggggctacaggcagtggccagcatagcaggtggcatcagaaatgggtcttatgacattggcatggcctgtggggtggagtccatgtccctggctgacagagggaaccctggaaatattacttcgcgcttgatggagaaggasaaggccagagattgcctgattcctatggggataacctctgagaatgtggctgagcggtttggcatttcacgggagaagcaggatacctttgccctggcttcccagcagaaggcagcaagagcccagagcaagggctgtttccaagctgagattgtgcctgtgaccaccacggtccakgatgacaagggcaccaagaggagcatcactgtgacccaggatgagggtatccgccccagcaccaccatggarggcctggccaaactgaagcctgccttcaagaaagatgkttctaccacagctggaaactctagccaggtgagtgatggggcagctgccatcctgctggcccggaggtccaaggcagaagagttgggccttcccatccttggggtcmtgaggtcttatgcagtggttggggtcccacctgacatcatgggcattggacctgcctatgccatcccagtagctttgcaaaaagcagggctgacagtgagtgacgtggacatcttcgagatcaatgaggcctttgcaagccaggctgcctactgtgtggagaagctacgactcccccctgagaaggtgaaccccctggggggtgcagtggccttagggcacccactgggctgcactggggcacgacaggtcatcacgctgctcaatgagctgaagcgccgtgggaagagggcatacggagtggtgtccatgtgcatcgggactggaatgggagccgctgccgtctttgaataccctgggaactgagtgaggtcccaggctggaggcgctacgcagacagtcctgctgctctagcagcaaggcagtaacaccacaaaagcaaaaccacatgggaaaactcagcactggtggtggtggcagtggacagatcaaggcacttcaactcatttggaaaatgtgaacactgatgwcatggtataggagtgggtggggtgttgagccacccatcagaccctctttagctgtgcaagataaaagcagcctgggtcacccaggccacaaggccatggttaattcttaaggcaaggcaaatccatggatgagaagtgcaatgggcatagtaaaagtgcatgaatttatctta

SEQ ID NO: 7382 - DNA, 2639 bp, Homo sapiens
ctgcaccgcactccgctcggaccccaggccgccggtgctgtcgctactcaagtgagtcccgcggtgcccctcccgccgcgccgcccgtcgggcatggactcgggccgggacttcctgaccctgcacggcctacaggatgatgaggatctacaggcgctgctgaagggcagccagctcctgaaggtgaagtccagctcatggaggagagagcgcttctacaagttgcaggaggactgcaagaccatctggcaggagtcccgcaaggtcatgcggaccccggagtcccagctgttctccatcgaggacattcaggaggtgcgaatggggcaccgcacggagggtctggagaagttcgcccgtgatgtgcccgaggaccgctgcttctccattgtcttcaaggaccagcrcaatacactagacctcatcgccccatcgccagctgatgcccagcactgggtgctggggctgcacaagatcatccaccactcaggctccatggaccagcgtcagaagctacagcactggattcactcctgcttgcgaaaagctgacaaaaacaaggacaacaagatgagcttcaaggagctgcagaacttcctgaaggagctcaacatccaggtggacgacagctatgcccggaagatcttcaggragtgtgaccactcccagacagactccctggaggacgaggagattgaggccttctacaagatgctgacccagcgggtggagatcgaccgcaccttcgccgaggccgcgggctcaggggagactctgtcggtggatcagttagtgacgttcctgcagcaccagcagcgggaggaggcggcagggcctgcgctggccctctccctcattgagcrctacgagcccagcgagactgccaaggcgcagcggcagatgaccaaggacggcttcctcatgtacttactgtcggctgacggcagcgccttcagcctggcacaccgccgtgtctaccaggacatgggccagccacttagccactacctggtgtcctcttcacacaacacctacctgctggaggaccagctagccgggcccagcagcactgaagcctacatccgggcactgtgcaaaggctgccgatgcctggagcttgactgctgggacgggcccaaccaggaaccaatcatctaccacggctatactttcacttccaagatcctcttctgcgatgtgctcagggccatccgggactatgccttcaaggcgtccccctaccctgtcatcctatccctggagaaccactgcacactggagcagcagcgcgtgatggcgcggcacctgcatgccatcctgggccccatgctgttgaaccgaccactggatggggtcaccaacagcctgccctcccctgagcaactgaaggggaagatcctgctgaaggggaagaarsyckgggggctcctgccccctggaggggrrrgkggccctgaggccactgtggtgtcagacgaagacgaggctgctgagatggaggatgaggcagtgaggagccgtgtgcagcacaagccmaaggaggacaagctcaggctagcacaggagctctctgacatggtcatttactgcaagagtgtccactttgggggcttctccagtcctggcacccctggacaggccttctacgagatggcgtccttctctgagaaccgtgcccttcgactgctccaagaatcaggaaacggctttgtccgccacaacgtggggcacctgagcagaatmtacccggctggatggagaacagactcctccaactacagccccgtggagatgtggaatgggggctgccagatcgtggccctgaatttccagacacctgggccagagatggacgtgtaccaggrccgcttccaggacaacggggcctgtgggtacgtgctgaagcccgccttcctgcgagaccccaacggcacctttaacccccgcgccctggctcaggggccctggtgggcacggaagcggctcaacatcagggtcatttcggggcagcagctgccaaaagtcaacaagaataagaattcaattgtggaccccaaagtgacagtggagatccatggcgtgagccgggacgtggccagccgccagactgctgtcatcaccaacaatggtttcaacccatggtgggacacggagtttgcgtttgaggtagttgtgcctgaccttgccctcatccgcttcttggtggaagattatgatgcctcctccaagaatgacttcattggccagagtaccatccccttgaacagcctcaagcaaggataccgccatgtccacctcatgtctaagaacggggaccagcatccatcagccaccctctttgtgaagatctccctccaggactaggctggaggaagccagtggggtcccccctgagtgggctgggccctctgtccacatgtggggacagggctggtgtggctgctcccagcctcttgctcagagctaggcccccaaattgccttcagccctaacatagtgtctgctgctgcctccctggggaccagragctagcccagtccctggagctgtccttcattccgttaggaataacactgcagccctctccmccctccggccagcgagtggtcaaggatttttataaaaatcacgataagatt

SEQ ID NO: 7383 - DNA, 2512 bp, Homo sapiens
gcctacaggatgatgaggatctacaggcgctgctgaagggcagccagctcctgaaggtgaagtccagctcatggaggagagagcgcttctacaagttgcaggaggactgcaagaccatctggcaggagtcccgcaaggtcatgcggaccccggagtcccagctgttctccatcgaggacattcaggaggtgcgaatggggcaccgcacggagggtctggagaagttcgcccgtgatgtgcccgaggaccgctgcttctccattgtcttcaaggaccagcrcaatacactagacctcatcgccccatcgccagctgatgcccagcactgggtgctggggctgcacaagatcatccaccactcaggctccatggaccagcgtcagaagctacagcactggattcactcctgcttgcgaaaagctgacaaaaacaaggacaacaagatgagcttcaaggagctgcagaacttcctgaaggagctcaacatccaggtggacgacagctatgcccggaagatcttcaggragtgtgaccactcccagacagactccctggaggacgaggagattgaggccttctacaagatgctgacccagcgggtggagatcgaccgcaccttcgccgaggccgcgggctcaggggagactctgtcggtggatcagttagtgacgttcctgcagcaccagcagcgggaggaggcggcagggcctgcgctggccctctccctcattgagcrctacgagcccagcgagactgccaaggcgcagcggcagatgaccaaggacggcttcctcatgtacttactgtcggctgacggcagcgccttcagcctggcacaccgccgtgtctaccaggacatgggccagccacttagccactacctggtgtcctcttcacacaacacctacctgctggaggaccagctagccgggcccagcagcactgaagcctacatccgggcactgtgcaaaggctgccgatgcctggagcttgactgctgggacgggcccaaccaggaaccaatcatctaccacggctatactttcacttccaagatcctcttctgcgatgtgctcagggccatccgggactatgccttcaaggcgtccccctaccctgtcatcctatccctggagaaccactgcacactggagcagcagcgcgtgatggcgcggcacctgcatgccatcctgggccccatgctgttgaaccgaccactggatggggtcaccaacagcctgccctcccctgagcaactgaaggggaagatcctgctgaaggggaagaarsyckgggggctcctgccccctggaggggrrrgkggccctgaggccactgtggtgtcagacgaagacgaggctgctgagatggaggatgaggcagtgaggagccgtgtgcagcacaagccmaaggaggacaagctcaggctagcacaggagctctctgacatggtcatttactgcaagagtgtccactttgggggcttctccagtcctggcacccctggacaggccttctacgagatggcgtccttctctgagaaccgtgcccttcgactgctccaagaatcaggaaacggctttgtccgccacaacgtggggcacctgagcagaatmtacccggctggatggagaacagactcctccaactacagccccgtggagatgtggaatgggggctgccagatcgtggccctgaatttccagacacctgggccagagatggacgtgtaccaggrccgcttccaggacaacggggcctgtgggtacgtgctgaagcccgccttcctgcgagaccccaacggcacctttaacccccgcgccctggctcaggggccctggtgggcacggaagcggctcaacatcagggtcatttcggggcagcagctgccaaaagtcaacaagaataagaattcaattgtggaccccaaagtgacagtggagatccatggcgtgagccgggacgtggccagccgccagactgctgtcatcaccaacaatggtttcaacccatggtgggacacggagtttgcgtttgaggtagttgtgcctgaccttgccctcatccgcttcttggtggaagattatgatgcctcctccaagaatgacttcattggccagagtaccatccccttgaacagcctcaagcaaggataccgccatgtccacctcatgtctaagaacggggaccagcatccatcagccaccctctttgtgaagatctccctccaggactaggctggaggaagccagtggggtcccccctgagtgggctgggccctctgtccacatgtggggacagggctggtgtggctgctcccagcctcttgctcagagctaggcccccaaattgccttcagccctaacatagtgtctgctgctgcctccctggggaccagragctagcccagtccctggagctgtccttcattccgttaggaataacactgcagccctctccmccctccggccagcgagtggtcaaggatttttataaaaatcacgataagatt

SEQ ID NO: 7384 - DNA, 2171 bp, Homo sapiens
gggggaggagatgagcatggagagaactgggaataggagattccaaggaacagggcaggtggatcagggctcaaagttgagaaggtacgataggctgagctggaggtggaaaggaaaagaagtggtcttcagggggctcatttgtaataacttacctggttaatcggagtctctctactgacttaaggattgtgggatgaggggaatgctatgtttggcttcatatagtctccaggactgggttcagtatgggtggtctgagcctgtggagtggggctgaccctgcctgggttcatcttgtgtmtccatcccgaggtcttcaagccataccaggcctcccarcatgacatgtgccgcttccactccgaggactacattgacttcctgcagagagtcagccccaccaatatgcaaggcttcaccaagagtcttaatgccttcaacgtaggcgatgactgcccagtgtttcccgggctctttgagttctgctcgcgttacacaggcgcatctctgcaaggagcaacccagctgaacaacaagatctgtgatattgccattaactgggctggtggtctgcaccatgccaagaagtttgaggcctctggcttctgctatgtcaacgacattgtgattggcatcctggagctgctcaagtaccaccctcgggtgctctacattgacattgacatccaccatggtgacggggttcaagaagctttctacctcactgaccgggtcatgacggtgtccttccacaaatayggaaattacttcttccctggcacaggtgacatgtatgaagtcggggcagagagtggccgctactactgtctgaacgtgcccctgcgggatggcattgatgaccagagttacaagcaccttttccagccggttatcaaccaggtagtggacttctaccaacccacgtgcattgtgctccagtgtggagctgactctctgggctgtgatcsattgggctgctttaacctcagcatccgagggcatggggaatgcgttgaatatgtcaagagcttcaatatccctctactcgtgctgggtggtggtggttatactgtccgaaatgttgcccgctgctggacatatgagacatcgctgctggtagaagaggccattagtgaggagcttccctatagtgaatacttcgagtactttgccccagacttcacacttcatccagatgtcagcacccgcatcgagaatcagaactcacgccagtatctggaccagatccgccagacaatctttgaaaacctgaagatgctgaaccatgcacctagtgtccagattcatgacgtgcctgcagacctcctgacctatgacaggactgatgaggctgatgcagaggagaggggtcctgaggagaactatagcaggccagaggcacccartgagttctatgatggagaccatgacaatgacaaggaaagcgatgtggagatttaagagtggcttgggatgctgtgtcccaaggaatttcttttcacctcttggttgggctggagggaaaaggagtggctcctagagtcctggggktcaccccagggcttttgctgactctgggaaagagtctggagaccacatttggttctcgaaccatctacctgcttttcctctctctcccaaggcctgacaatggtacctattagggatgagatacagacaaggatagctatctgggacattattggcagtgggccctggaggccagtccctagccccccttgccccttatttyttccctgcttccctcgaacccagagatttttgagggatgaacgggtagacaaggactgagattgcctctgacttcctcctcccctgggttctgacttcttcctccccttgcttccagggaagatgaagagagagagatttggaaggggctctggctccctaacacctgaatcccagatgatgggaagtatgttttcaagtgtggggaggatatgaaaatgttctgttctcacttttggctttatgtycattttaccactgtttttatccaataaactaagtcggtattttttgtacctttcgcctttctaggaatgttaattcttgctagtttcctatttatgaaaggagagggaaatgggcatgatgatgcatgtaataaaagcatagttaacattcattcagcacttatccta

SEQ ID NO: 7385 - DNA, 2192 bp, Homo sapiens
ggccggggaggggctggcggcggccgcgggcggcgggcggcggagkygcggggcctgctcccgccggcaccatggccaagaccgtggcctatttctacgaccccgacgtgggcaacttccactacggagctggacaccctatgaagccycatcgcctggcattgacccatagcctggtcctgcattacggtctctataagaagatgatcgtcttcaagccataccaggcctcccarcatgacatgtgccgcttccactccgaggactacattgacttcctgcagagagtcagccccaccaatatgcaaggcttcaccaagagtcttaatgccttcaacgtaggcgatgactgcccagtgtttcccgggctctttgagttctgctcgcgttacacaggcgcatctctgcaaggagcaacccagctgaacaacaaggtgacatagtcccgagtcctgttcttcctttcctctggatccctggactcgggatttaaccctgatcctgggctcccagcttgaggggtgggcaggaaggactgtgacttaggtgtttgtctttcagatctgtgatattgccattaactgggctggtggtctgcaccatgccaagaagtttgaggcctctggcttctgctatgtcaacgacattgtgattggcatcctggagctgctcaagtaccaccctcgggtgctctacattgacattgacatccaccatggtgacggggttcaagaagctttctacctcactgaccgggtcatgacggtgtccttccacaaatayggaaattacttcttccctggcacaggtgacatgtatgaagtcggggcagagagtggccgctactactgtctgaacgtgcccctgcgggatggcattgatgaccagagttacaagcaccttttccagccggttatcaaccaggtagtggacttctaccaacccacgtgcattgtgctccagtgtggagctgactctctgggctgtgatcsattgggctgctttaacctcagcatccgagggcatggggaatgcgttgaatatgtcaagagcttcaatatccctctactcgtgctgggtggtggtggttatactgtccgaaatgttgcccgctgctggacatatgagacatcgctgctggtagaagaggccattagtgaggagcttccctatagtgaatacttcgagtactttgccccagacttcacacttcatccagatgtcagcacccgcatcgagaatcagaactcacgccagtatctggaccagatccgccagacaatctttgaaaacctgaagatgctgaaccatgcacctagtgtccagattcatgacgtgcctgcagacctcctgacctatgacaggactgatgaggctgatgcagaggagaggggtcctgaggagaactatagcaggccagaggcacccartgagttctatgatggagaccatgacaatgacaaggaaagcgatgtggagatttaagagtggcttgggatgctgtgtcccaaggaatttcttttcacctcttggttgggctggagggaaaaggagtggctcctagagtcctggggktcaccccagggcttttgctgactctgggaaagagtctggagaccacatttggttctcgaaccatctacctgcttttcctctctctcccaaggcctgacaatggtacctattagggatgagatacagacaaggatagctatctgggacattattggcagtgggccctggaggccagtccctagccccccttgccccttatttyttccctgcttccctcgaacccagagatttttgagggatgaacgggtagacaaggactgagattgcctctgacttcctcctcccctgggttctgacttcttcctccccttgcttccagggaagatgaagagagagagatttggaaggggctctggctccctaacacctgaatcccagatgatgggaagtatgttttcaagtgtggggaggatatgaaaatgttctgttctcacttttggctttatgtycattttaccactgtttttatccaataaactaagtcggtattttttgtacctttcgcctttctaggaatgttaattcttgctagtttcctatttatgaaaggagagggaaatgggcatgatgatgcatgtaataaaagcatagttaacattcattcagcacttatccta

SEQ ID NO: 7386 - DNA, 2012 bp, Homo sapiens
ggccggggaggggctggcggcggccgcgggcggcgggcggcggagkygcggggcctgctcccgccggcaccatggccaagaccgtggcctatttctacgaccccgacgtgggcaacttccactacggagctggacaccctatgaagccycatcgcctggcattgacccatagcctggtcctgcattacggtctctataagaagatgatcgtcttcaagccataccaggcctcccarcatgacatgtgccgcttccactccgaggactacattgacttcctgcagagagtcagccccaccaatatgcaaggcttcaccaagagtcttaatgccttcaacgtaggcgatgactgcccagtgtttcccgggctctttgagttctgctcgcgttacacaggcgcatctctgcaaggagcaacccagctgaacaacaagatctgtgatattgccattaactgggctggtggtctgcaccatgccaagaagtttgaggcctctggcttctgctatgtcaacgacattgtgattggcatcctggagctgctcaagtaccaccctcgggtgctctacattgacattgacatccaccatggtgacggggttcaagaagctttctacctcactgaccgggtcatgacggtgtccttccacaaatayggaaattacttcttccctggcacaggtgacatgtatgaagtcggggcagagagtggccgctactactgtctgaacgtgcccctgcgggatggcattgatgaccagagttacaagcaccttttccagccggttatcaaccaggtagtggacttctaccaacccacgtgcattgtgctccagtgtggagctgactctctgggctgtgatcsattgggctgctttaacctcagcatccgagggcatggggaatgcgttgaatatgtcaagagcttcaatatccctctactcgtgctgggtggtggtggttatactgtccgaaatgttgcccgctgctggacatatgagacatcgctgctggtagaagaggccattagtgaggagcttccctatagtgaatacttcgagtactttgccccagacttcacacttcatccagatgtcagcacccgcatcgagaatcagaactcacgccagtatctggaccagatccgccagacaatctttgaaaacctgaagatgctgaaccatgcacctagtgtccagattcatgacgtgcctgcagacctcctgacctatgacaggactgatgaggctgatgcagaggagaggggtcctgaggagaactatagcaggccagaggcacccartgagttctatgatggagaccatgacaatgacaaggaaagcgatgtggagatttaagagtggcttgggatgctgtgtcccaaggaatttcttttcacctcttggttgggctggagtctgggaaagagtctggagaccacatttggttctcgaaccatctacctgcttttcctctctctcccaaggcctgacaatggtacctattagggatgagatacagacaaggatagctatctgggacattattggcagtgggccctggaggccagtccctagccccccttgccccttatttyttccctgcttccctcgaacccagagatttttgagggatgaacgggtagacaaggactgagattgcctctgacttcctcctcccctgggttctgacttcttcctccccttgcttccagggaagatgaagagagagagatttggaaggggctctggctccctaacacctgaatcccagatgatgggaagtatgttttcaagtgtggggaggatatgaaaatgttctgttctcacttttggctttatgtycattttaccactgtttttatccaataaactaagtcggtattttttgtacctttcgcctttctaggaatgttaattcttgctagtttcctatttatgaaaggagagggaaatgggcatgatgatgcatgtaataaaagcatagttaacattcattcagcacttatccta

SEQ ID NO: 7387 - DNA, 2065 bp, Homo sapiens
ggccggggaggggctggcggcggccgcgggcggcgggcggcggagkygcggggcctgctcccgccggcaccatggccaagaccgtggcctatttctacgaccccgacgtgggcaacttccactacggagctggacaccctatgaagccycatcgcctggcattgacccatagcctggtcctgcattacggtctctataagaagatgatcgtcttcaagccataccaggcctcccarcatgacatgtgccgcttccactccgaggactacattgacttcctgcagagagtcagccccaccaatatgcaaggcttcaccaagagtcttaatgccttcaacgtaggcgatgactgcccagtgtttcccgggctctttgagttctgctcgcgttacacaggcgcatctctgcaaggagcaacccagctgaacaacaagatctgtgatattgccattaactgggctggtggtctgcaccatgccaagaagtttgaggcctctggcttctgctatgtcaacgacattgtgattggcatcctggagctgctcaagtaccaccctcgggtgctctacattgacattgacatccaccatggtgacggggttcaagaagctttctacctcactgaccgggtcatgacggtgtccttccacaaatayggaaattacttcttccctggcacaggtgacatgtatgaagtcggggcagagagtggccgctactactgtctgaacgtgcccctgcgggatggcattgatgaccagagttacaagcaccttttccagccggttatcaaccaggtagtggacttctaccaacccacgtgcattgtgctccagtgtggagctgactctctgggctgtgatcsattgggctgctttaacctcagcatccgagggcatggggaatgcgttgaatatgtcaagagcttcaatatccctctactcgtgctgggtggtggtggttatactgtccgaaatgttgcccgctgctggacatatgagacatcgctgctggtagaagaggccattagtgaggagcttccctatagtgaatacttcgagtactttgccccagacttcacacttcatccagatgtcagcacccgcatcgagaatcagaactcacgccagtatctggaccagatccgccagacaatctttgaaaacctgaagatgctgaaccatgcacctagtgtccagattcatgacgtgcctgcagacctcctgacctatgacaggactgatgaggctgatgcagaggagaggggtcctgaggagaactatagcaggccagaggcacccartgagttctatgatggagaccatgacaatgacaaggaaagcgatgtggagatttaagagtggcttgggatgctgtgtcccaaggaatttcttttcacctcttggttgggctggagggaaaaggagtggctcctagagtcctggggktcaccccagggcttttgctgactctgggaaagagtctggagaccacatttggttctcgaaccatctacctgcttttcctctctctcccaaggcctgacaatggtacctattagggatgagatacagacaaggatagctatctgggacattattggcagtgggccctggaggccagtccctagccccccttgccccttatttyttccctgcttccctcgaacccagagatttttgagggatgaacgggtagacaaggactgagattgcctctgacttcctcctcccctgggttctgacttcttcctccccttgcttccagggaagatgaagagagagagatttggaaggggctctggctccctaacacctgaatcccagatgatgggaagtatgttttcaagtgtggggaggatatgaaaatgttctgttctcacttttggctttatgtycattttaccactgtttttatccaataaactaagtcggtattttttgtacctttcgcctttctaggaatgttaattcttgctagtttcctatttatgaaaggagagggaaatgggcatgatgatgcatgtaataaaagcatagttaacattcattcagcacttatccta

SEQ ID NO: 7388 - DNA, 2417 bp, Homo sapiens
ggcgccggcgatcgcggcctgaggctgctcycggacaagggcaacgagcgtttcgtttggacttctcgacttgagtgcccgcctccttcgccgccgcctctgcagtcctcagcgcaggagccagcatacttcctgaacatggagagtgttgttcgccgctgcccattcttatcccragtcccccaggcctttctgcagaaagcaggcaaatctctgttgttctatgcccaaaactgccccaagatgatggaagttggggccaagycakcccctcgggcattgtccactgcagcagtacactaccaacagatcaaagaaacccctccggccagtgagaaagacaaaactgctaaggccaaggtccaacagactcctgatggatcccagcagagtccagatggcacacagcttccgtctggacaccccttgcctgccacaagccagggcactgcaagcaaatgccctttcctggcagcacagatgaatcagagaggcagcagtgtcttctgcaaagccagtcttgagcttcaggaggatgtgcaggaaatgaatgccgtgaggaaagaggttgctgaaacctcagcaggccccagtgtggttagtgtgaaaaccgatggaggggatcccagtggactgctgaagaacttccaggacatyatgcaaaagcaaagaccagaaagagtgtctcatcttcttcaagataacttgccaaaatctgtttccacttttcagtatgatcgtttctttgagaaaaaaattgatgagaaaaagaatgaccacacctatcgagtttttaaaactgtgaaccggcgagcacacatcttccccatggcagatgactattcagactccctcatcaccaaaaagcaagtgtcagtctggtgcagtaatgactacctaggaatgagtcgccacccacgggtgtgtggggcagttatggacactttgaaacaacatggtgctggggcaggtggtactagaaatatttctggaactagtaaattccatgtggacttagagcgggagctggcagacctccatgggaaagatgccgcactcttgttttcctcgtgctttgtggccaatgactcaaccctcttcaccctggctaagatgatgccaggctgtgagatttactctgattctgggaaccatgcctccatgatccaagggattcgaaacagccgagtgccaaagtacatcttccgccacaatgatgtcagccacctcagagaactgctgcaaagatctgacccctcagtccccaagattgtggcatttgaaactgtccattcaatggatggggcrgtgtgcccactggaagagctgtgtgatgtggcccatgagtttggagcaatcaccttcgtggatgaggtccacgcagtggggctttatggggctcgaggyggagggattggggatcgggatggagtcatgccaaaaatggacatcatttctggaacacttggcaaagcctttggttgtgttggagggtacatcgccagcacgagttctctgattgacaccgtacggtcctatgctgctggcttcatcttcaccacctctctgccacccatgctgctggctggagccctggagtctgtgcggatcctgaagagcgctgagggacgggtgcttcgccgccagcaccagcgcaacgtcaaactcatgagacagatgctaatggatgccggcctccctgttgtccactgccccagccacatcatccctgtgcgggttgcagatgctgctaaaaacacagaagtctgtgatgaactaatgagcagacataacatctacgtgcaagcaatcaattaccctacggtgccccggggagaagagctcctacggattgcccccacccctcaccacacaccccagatgatgaactacttccttgagaatctgctagtcacatggaagcaagtggggctggaactgaagcctcattcctcagctgagtgcaacttctgcaggaggccactgcattttgaagtgatgagtgaaagagagaagtcctatttctcaggcttgagcaagttggtatctgctcaggcctgagcatgacctcaattatttcacttaaccccaggccattatcatatccagatggtcttcagagttgtctttatatgtgaattaagttatattaaattttaatctatagkaaaaacatagtcctggaaataaattcttgcttaaatggtggttctttctgctattggctactggataacattcttcattggctagacacagtggctaacacctgtaatcacaacacttgggaggccaaagcaagaggatcactttaggccaggagtttgaagctgcagtgagccatgattgctccactgcactccggcctgggtgacagagcaagactgcctctgaaataaaaaataataattgtcatc

SEQ ID NO: 7389 - DNA, 2622 bp, Homo sapiens
ctcccgctgtatattaaggcgccggcgatcgcggcctgaggctgctcycggacaagggcaacgagcgtttcgtttggacttctcgacttgagtgcccgcctccttcgccgccgcctctgcagtcctcagcgcagttatgcccagttcttcccgctgtggggacacgaccacggaggaatccttgcttcagggactcgggaccctgctggaccccttcctcgggtttaggggatgtggggaccaggagaaagtcaggatccctaagagtcttccctgcctggatggatgagtggcttcttctccacctagattctttccacaggagccagcatacttcctgaacatggagagtgttgttcgccgctgcccattcttatcccragtcccccaggcctttctgcagaaagcaggcaaatctctgttgttctatgcccaaaactgccccaagatgatggaagttggggccaagycakcccctcgggcattgtccactgcagcagtacactaccaacagatcaaagaaacccctccggccagtgagaaagacaaaactgctaaggccaaggtccaacagactcctgatggatcccagcagagtccagatggcacacagcttccgtctggacaccccttgcctgccacaagccagggcactgcaagcaaatgccctttcctggcagcacagatgaatcagagaggcagcagtgtcttctgcaaagccagtcttgagcttcaggaggatgtgcaggaaatgaatgccgtgaggaaagaggttgctgaaacctcagcaggccccagtgtggttagtgtgaaaaccgatggaggggatcccagtggactgctgaagaacttccaggacatyatgcaaaagcaaagaccagaaagagtgtctcatcttcttcaagataacttgccaaaatctgtttccacttttcagtatgatcgtttctttgagaaaaaaattgatgagaaaaagaatgaccacacctatcgagtttttaaaactgtgaaccggcgagcacacatcttccccatggcagatgactattcagactccctcatcaccaaaaagcaagtgtcagtctggtgcagtaatgactacctaggaatgagtcgccacccacgggtgtgtggggcagttatggacactttgaaacaacatggtgctggggcaggtggtactagaaatatttctggaactagtaaattccatgtggacttagagcgggagctggcagacctccatgggaaagatgccgcactcttgttttcctcgtgctttgtggccaatgactcaaccctcttcaccctggctaagatgatgccaggctgtgagatttactctgattctgggaaccatgcctccatgatccaagggattcgaaacagccgagtgccaaagtacatcttccgccacaatgatgtcagccacctcagagaactgctgcaaagatctgacccctcagtccccaagattgtggcatttgaaactgtccattcaatggatggggcrgtgtgcccactggaagagctgtgtgatgtggcccatgagtttggagcaatcaccttcgtggatgaggtccacgcagtggggctttatggggctcgaggyggagggattggggatcgggatggagtcatgccaaaaatggacatcatttctggaacacttggcaaagcctttggttgtgttggagggtacatcgccagcacgagttctctgattgacaccgtacggtcctatgctgctggcttcatcttcaccacctctctgccacccatgctgctggctggagccctggagtctgtgcggatcctgaagagcgctgagggacgggtgcttcgccgccagcaccagcgcaacgtcaaactcatgagacagatgctaatggatgccggcctccctgttgtccactgccccagccacatcatccctgtgcgggttgcagatgctgctaaaaacacagaagtctgtgatgaactaatgagcagacataacatctacgtgcaagcaatcaattaccctacggtgccccggggagaagagctcctacggattgcccccacccctcaccacacaccccagatgatgaactacttccttgagaatctgctagtcacatggaagcaagtggggctggaactgaagcctcattcctcagctgagtgcaacttctgcaggaggccactgcattttgaagtgatgagtgaaagagagaagtcctatttctcaggcttgagcaagttggtatctgctcaggcctgagcatgacctcaattatttcacttaaccccaggccattatcatatccagatggtcttcagagttgtctttatatgtgaattaagttatattaaattttaatctatagkaaaaacatagtcctggaaataaattcttgcttaaatggtggttctttctgctattggctactggataacattcttcattggctagacacagtggctaacacctgtaatcacaacacttgggaggccaaagcaagaggatcactttaggccaggagtttgaagctgcagtgagccatgattgctccactgcactccggcctgggtgacagagcaagactgcctctgaaataaaaaataataattgtcatc

SEQ ID NO: 7390 - DNA, 2462 bp, Homo sapiens
cgcatgcgcagcggtcactcccgctgtatattaaggcgccggcgatcgcggcctgaggctgctcycggacaagggcaacgagcgtttcgtttggacttctcgacttgagtgcccgcctccttcgccgccgcctctgcagtcctcagcgcagtctttccacaggagccagcatacttcctgaacatggagagtgttgttcgccgctgcccattcttatcccragtcccccaggcctttctgcagaaagcaggcaaatctctgttgttctatgcccaaaactgccccaagatgatggaagttggggccaagycakcccctcgggcattgtccactgcagcagtacactaccaacagatcaaagaaacccctccggccagtgagaaagacaaaactgctaaggccaaggtccaacagactcctgatggatcccagcagagtccagatggcacacagcttccgtctggacaccccttgcctgccacaagccagggcactgcaagcaaatgccctttcctggcagcacagatgaatcagagaggcagcagtgtcttctgcaaagccagtcttgagcttcaggaggatgtgcaggaaatgaatgccgtgaggaaagaggttgctgaaacctcagcaggccccagtgtggttagtgtgaaaaccgatggaggggatcccagtggactgctgaagaacttccaggacatyatgcaaaagcaaagaccagaaagagtgtctcatcttcttcaagataacttgccaaaatctgtttccacttttcagtatgatcgtttctttgagaaaaaaattgatgagaaaaagaatgaccacacctatcgagtttttaaaactgtgaaccggcgagcacacatcttccccatggcagatgactattcagactccctcatcaccaaaaagcaagtgtcagtctggtgcagtaatgactacctaggaatgagtcgccacccacgggtgtgtggggcagttatggacactttgaaacaacatggtgctggggcaggtggtactagaaatatttctggaactagtaaattccatgtggacttagagcgggagctggcagacctccatgggaaagatgccgcactcttgttttcctcgtgctttgtggccaatgactcaaccctcttcaccctggctaagatgatgccaggctgtgagatttactctgattctgggaaccatgcctccatgatccaagggattcgaaacagccgagtgccaaagtacatcttccgccacaatgatgtcagccacctcagagaactgctgcaaagatctgacccctcagtccccaagattgtggcatttgaaactgtccattcaatggatggggcrgtgtgcccactggaagagctgtgtgatgtggcccatgagtttggagcaatcaccttcgtggatgaggtccacgcagtggggctttatggggctcgaggyggagggattggggatcgggatggagtcatgccaaaaatggacatcatttctggaacacttggcaaagcctttggttgtgttggagggtacatcgccagcacgagttctctgattgacaccgtacggtcctatgctgctggcttcatcttcaccacctctctgccacccatgctgctggctggagccctggagtctgtgcggatcctgaagagcgctgagggacgggtgcttcgccgccagcaccagcgcaacgtcaaactcatgagacagatgctaatggatgccggcctccctgttgtccactgccccagccacatcatccctgtgcgggttgcagatgctgctaaaaacacagaagtctgtgatgaactaatgagcagacataacatctacgtgcaagcaatcaattaccctacggtgccccggggagaagagctcctacggattgcccccacccctcaccacacaccccagatgatgaactacttccttgagaatctgctagtcacatggaagcaagtggggctggaactgaagcctcattcctcagctgagtgcaacttctgcaggaggccactgcattttgaagtgatgagtgaaagagagaagtcctatttctcaggcttgagcaagttggtatctgctcaggcctgagcatgacctcaattatttcacttaaccccaggccattatcatatccagatggtcttcagagttgtctttatatgtgaattaagttatattaaattttaatctatagkaaaaacatagtcctggaaataaattcttgcttaaatggtggttctttctgctattggctactggataacattcttcattggctagacacagtggctaacacctgtaatcacaacacttgggaggccaaagcaagaggatcactttaggccaggagtttgaagctgcagtgagccatgattgctccactgcactccggcctgggtgacagagcaagactgcctctgaaataaaaaataataattgtcatc

SEQ ID NO: 7391 - DNA, 1885 bp, Homo sapiens
ccagggctttgcagctctgcatcttgagagcctcggggcggccccctttcctcccgccctatccgggggctgaaggaggaggcgcccttaggggacgggaccgtcctgagctcccggcgcatacctgggggcaggagtggcaggcgtgtcgtgtggggcggggcgagcctgtcagagcagggccagcccggagctcgcaactcgcggggcggcgctggccgcggcggccgctgcccggggacgggatccggatctaatcctccagtaatctcgctgaggcccgaaccagaggcgggcggggacatccgcgccgacgcggccgctggcgccgggacggccctcactgacggtcttcggtctccgccccgacatccggcctcggccacgtggtgggcggaccggggcggtcctgagcctgcgacctcgcaggcgacctcgctggaccctaagtccaggccacagtcagggaagggcgctgagaggcgagcgtgagcccagcgacaggagagtgagctcaccacgcgcagcgccatgaccagcaagggtcccgaggaggagcacccatcggtgacgctcttccgccagtacctgcgtatccgsactgtccagcccaagcctgactatggagctgctgtggctttctttgaggagacagcccgccagctgggcctgggctgtcagaaagtagaggtggcacctggctatgtggtgaccgtgttgacctggccaggcaccaaccctacactctcctccatcttgctcaactcccacacggatgtggtgcctgtcttcaaggaacattggagtcacgacccctttgaggccttcaaggattctgagggctacatctatgccaggggtgcccaggacatgaagtgcgtcagcatccagtacctggaagctgtgaggaggctgaaggtggagggccaccggttccccagaaccatccacatgacctttgtgcctgatgaggaggttgggggtcaccaaggcatggagctgttcgtgcagcggcctgagttccacgccctgagggcaggctttgccctggatgagggcatagccartcccactgatgccttcactgtcttttatagtgagcggagtccctggtgggtgcgggttaccagcactgggaggccaggccatgcctcacgcttcatggaggacacagcagcagagaagctgcacaaggttgtaaactccatcctggcattccgggagaaggaatggcagaggctgcagtcaaacccccacctgaaagaggggtccgtgacctccgtgaacctgactaagctagagggtggcgtggcctataacgtgatacctgccaccatgagcgccagctttgacttccgtgtggcaccggatgtggacttcaaggcttttgaggagcagctgcagagctggtgccaggcagctggcgagggggtcaccctagagtttgctcagaagtggatgcacccccaagtgacacctactgatgactcaaacccttggtgggcagcttttagccgggtctgcaaggatatgaacctcactctggagcctgagatcatgcctgctgccactgacaaccgctatatccgcgcggtgggggtcccagctctaggcttctcacccatgaaccgcacacctgtgctgctgcacgaccacgatgaacggctgcatgaggctgtgttcctccgtggggtggacatatatacacgcctgctgcctgcccttgccagtgtgcctgccctgcccagtgacagctgasccctggaactcctaaacctttgcccctggggcttccatcccaaccagtgccaaggacctcctcttcccccttccaaataataaagtctatggacagggctgtctctgaagtactaacacaaggaca

SEQ ID NO: 7392 - DNA, 2424 bp, Homo sapiens
gggcagcccggcgctagacccaacggggatccaagcagccccggggagagggaggctgcgtctgtatccgggcccaaggtcaccgcgcgaccggcagatgcgtgctgcaggccccggccacatgagcagcgctacggacgcgactgccccggccttggatatgccagatcgagtgtccacccgtccgtgggactggtcgcctgactcggcctgccccagcctctgcttcaccccactggtggccaaatagccgatgtctaatcccccacacaagctcatccccggcctctggcgattgttgggaattctctccctaattcacgcctgaggctcatggagagttgctagacctgggactgccctgggaggcgcacacaaccaggccgggtggcagccaggacctctcccatgtccctgcttttcttgggacagccatggctccaaagcygaagccctgggtacagactgagggccctgagaagaagaagggccggcaggcaggaagggaggaggaccccttccgctccaccgctgaggccctcaaggccatacccgcagagaagcgcataatccgcgtggatccaacatgtccactcagcagcaaccccgggacccaggtgtatgaggactacaactgcaccctgaaccagaccaacatcgagaacaacaacaacaagttctacatcatccagctgctccaagacagcaaccgcttcttcacctgctggaaccgctggggccgtgtgggagaggtcggccagtcaaagatcaaccacttcacaaggctagaagatgcaaagaaggactttgagaagaaatttcgggaaaagaccaagaacaactgggcagagcgggaccactttgtgtctcacccgggcaagtacacacttatcgaagtacaggcagaggatgaggcccaggaagctgtggtgaaggtggacagaggcccagtgaggactgtgactaagcgggtgcagccctgctccctggacccagccacgcagaagctcatcactaacatcttcagcaaggagatgttcaagaacaccatggccctcatggacctggatgtgaagaagatgcccctgggaaagctgagcaagcaacagattgcacggggtttcgaggccttggaggcgctggaggaggccctgaaaggccccacggatggtggccaaagcctggaggagctgtcctcacacttttacaccgtcatcccgcacaacttcggccacagccrgcccccgcccatcaattcccctgagcttctgcaggccaagaaggacatgctgctggtgctggcggacatcgagctggcccaggccctgcaggcagtctctgagcaggagaagacggtggaggaggtgccacaccccctggaccgagactaccagcttctcaagtgccagctgcagctgctagactctggagcacctgagtacaaggtgatacagacctacttagaacagactggcagcaaccacaggtgccctacacttcaacacatctggaaagtaaaccaagaaggggaggaagacagattccaggcccactccaaactgggtaatcggaagctgctgtggcatggcaccaacatggccgtggtggccgccatcctcactagtgggctccgcatcatgccacattctggtgggcgtgttggcaagggcatctactttgcctcagagaacagcaagtcagctggatatgttattggcatgaagtgtggggcccaccatgtcggctacatgttcctgggtgaggtggccctgggcagagagcaccatatcaacacggacaaccccagcttgaagagcccacctcctggcttcgacagtgtcattgcccgaggccacaccgagcctgatccgacccaggacactgagttggagctggatggccagcaagtggtggtgccccagggccagcctgtgccctgcccagagttcagcagctccacattctcccagagcgagtacctcatctaccaggagagccagtgtcgcctgcgctacctgctggaggtccacctctgagtgcccgccctgtcccccggggtcctgcaaggctggactgtgatcttcaatcatcctgcccatctctggtacccctatatcactcctttttttcaagaatacaatacgttgttgttaactatagtcaccatgctgtacaagatccctgaacttatgcctcctaactgaaattttgtattctttgacacatctgcccagtccctctcctcccagcccatggtaaccagcatttgactctttacttgtataagggcagcttttataggttccacatgtaagtgagatcatgcagtgtttgtctttctgtgcctggcttatttcacccagcataatgtgcaccgggttcacccatgttttcataaatgacaagatttcctccttttttaag

SEQ ID NO: 7393 - DNA, 2478 bp, Homo sapiens
gtatccgggcccaaggtcaccgcgcgaccggcagatgcgtgctgcaggccccggccacatgagcagcgctacggacgcgactgccccggccttggatatgccagatcgagtgtccacccgtccgtgggactggtcgcctgactcggcctgccccagcctctgcttcaccccactggtggccaaatagccgatgtctaatcccccacacaagctcatccccggcctctggcgattgttgggaattctctccctaattcacgcctgaggctcatggagagttgctagacctgggactgccctgggaggcgcacacaaccaggccgggtggcagccaggacctctcccatgtccctgcttttcttggctcggtgactcggcccggcaaccatgccagggctgaactagctgacacagggggaggagccccgaagtggaagagagagagcctcctttcactttccctacccctcaggacacacaggacagccatggctccaaagcygaagccctgggtacagactgagggccctgagaagaagaagggccggcaggcaggaagggaggaggaccccttccgctccaccgctgaggccctcaaggccatacccgcagagaagcgcataatccgcgtggatccaacatgtccactcagcagcaaccccgggacccaggtgtatgaggactacaactgcaccctgaaccagaccaacatcgagaacaacaacaacaagttctacatcatccagctgctccaagacagcaaccgcttcttcacctgctggaaccgctggggccgtgtgggagaggtcggccagtcaaagatcaaccacttcacaaggctagaagatgcaaagaaggactttgagaagaaatttcgggaaaagaccaagaacaactgggcagagcgggaccactttgtgtctcacccgggcaagtacacacttatcgaagtacaggcagaggatgaggcccaggaagctgtggtgaaggtggacagaggcccagtgaggactgtgactaagcgggtgcagccctgctccctggacccagccacgcagaagctcatcactaacatcttcagcaaggagatgttcaagaacaccatggccctcatggacctggatgtgaagaagatgcccctgggaaagctgagcaagcaacagattgcacggggtttcgaggccttggaggcgctggaggaggccctgaaaggccccacggatggtggccaaagcctggaggagctgtcctcacacttttacaccgtcatcccgcacaacttcggccacagccrgcccccgcccatcaattcccctgagcttctgcaggccaagaaggacatgctgctggtgctggcggacatcgagctggcccaggccctgcaggcagtctctgagcaggagaagacggtggaggaggtgccacaccccctggaccgagactaccagcttctcaagtgccagctgcagctgctagactctggagcacctgagtacaaggtgatacagacctacttagaacagactggcagcaaccacaggtgccctacacttcaacacatctggaaagtaaaccaagaaggggaggaagacagattccaggcccactccaaactgggtaatcggaagctgctgtggcatggcaccaacatggccgtggtggccgccatcctcactagtgggctccgcatcatgccacattctggtgggcgtgttggcaagggcatctactttgcctcagagaacagcaagtcagctggatatgttattggcatgaagtgtggggcccaccatgtcggctacatgttcctgggtgaggtggccctgggcagagagcaccatatcaacacggacaaccccagcttgaagagcccacctcctggcttcgacagtgtcattgcccgaggccacaccgagcctgatccgacccaggacactgagttggagctggatggccagcaagtggtggtgccccagggccagcctgtgccctgcccagagttcagcagctccacattctcccagagcgagtacctcatctaccaggagagccagtgtcgcctgcgctacctgctggaggtccacctctgagtgcccgccctgtcccccggggtcctgcaaggctggactgtgatcttcaatcatcctgcccatctctggtacccctatatcactcctttttttcaagaatacaatacgttgttgttaactatagtcaccatgctgtacaagatccctgaacttatgcctcctaactgaaattttgtattctttgacacatctgcccagtccctctcctcccagcccatggtaaccagcatttgactctttacttgtataagggcagcttttataggttccacatgtaagtgagatcatgcagtgtttgtctttctgtgcctggcttatttcacccagcataatgtgcaccgggttcacccatgttttcataaatgacaagatttcctccttttttaag

SEQ ID NO: 7394 - DNA, 3535 bp, Homo sapiens
ggccgcggtgcgcgcggagggccgggcgggcgggcgggacggaggccgggaggccgggaggccggggcggcgggcgcgcagctcggcgggaggcgggcgcccggagacgcggctggggcccgcgcggccggggcgccgtcccagggcagggctgcccggccccggccccgggccgcccgcgctccccatgaaaaaccagctccgcggccccccagcgcgggcgcacatgtcgacttcgggggcggcggcggctgggggcacccggccggggtccgagcccggtgcggggtcggggtccggcgcaggcaccggggcgggcgcggcgacgggggcaggggccatgccctgcaagagcgccgagtggctgcaggaggagctggaggcgcgcggcggcgcgtccttgctgctgctcgactgccggccgcacgagctcttcgagtcgtcgcacatcgagacggccatcaacctggccatcccgggcctcatgttgcgccgcctgcgcaagggcaacctgcccatccgctccatcatccccaaccacgccgacaaggagcgcttcgccacgcgctgcaaggcggccaccgtgctgctctacgacgaggccacggccgagtggcagcccgagcccggcgctcccgcctccgtgctcggcctgctcctacagaagctgcgcgacgacggctgccaggcctactacctccaaggtggtttcaacaagtttcaaacagagtactctgagcactgcgagaccaacgtggacagctcttcctcgccgagcagctcgccacccacctcagtgctgggcctggggggcctgcgcatcagctctgactgctccgacggcgagtcggaccgagagctgcccagcagtgccaccgagtcagacggcarccctgtgccatccagccaaccagccttccctgtccagatcctgccctacctctacctcggctgcgccaaggactccaccaacctggacgtgctcggcaagtatggcatcaagtatatcctcaatgtcacacccaacctacccaacgccttcgagcacggcggcgagttcacctacaagcagatccccatctctgaccactggagccagaacctctcccagttcttccctgaggccatcagcttcattgacgaagcccgctccaagaagtgtggtgtcctggtgcactgcctggcargcatcagccgctcagtgacggtcactgtggcctatctgatgcagaagatgaacctgtcactcaacgacgcctacgactttgtcaagaggaaaaagtccaacatctcgcccaacttcaacttcatggggcagctgctggactttgagcggacgctggggctaagcagcccgtgcgacaaccacgcgtcgagtgagcagctctacttttccacgcccaccaaccacaacctgttcccactcaatacgctggagtccacgtgaggcctggtgcacggggggcatggcaccaggcccctgctcggctctccacagggctaggtgggagagcccaagcccgccacctctggcctgaggaacccccagatgtcacctgtgcccagaggcccaggctgatcggtgtcggagcgcccctcaccatccttgggggcagggcccgcaggcaaggtctcccactgcagggcttgctggagaggcctcggctcttggacacgtggctttgggcgtccaccagggcctcatcctgtccaggacgctcctttctgctgacagcccagccagtttggctgttttttaaagacacatccacggacctgagtttactttttacttttggcaggtaaatccaagctccctggagcacaaagagtgtttgagctcttcttgatttttcttttttttttttttttttaacaaaaagtgttattttcaggctacatgcaacagtggattgtataacccagtatttcatccctttcctgatcctgcaagagagagaaatgttcagttttgtttttcgttcaatttcaaaaagcaagtatcgtgtttgtttttgtttttgttttttaatggaaaagacagacgccatgttgacyttgaccaaatgcgttttgcacatgtgtgaagcctctgtttcytcagcgggcccttcttgaaggggtggcttactgctcttcaggtattgggacccccagtcgtgccgcctcccacccttggcccagtctgacttagctctgcattcgcctgtgatgactgctgcaagttgtgattggtgrgctggatggtggtctttgcattttctgccgtctcatccatccctctggtggtccctgcagacctccctgaggcagaaggtggggaccctggggccctgccgctgtcccccaggaggtgggccgcagggggctgccaggcagtagcattagccctctggggtcagcccctaagaaggcctgggctctgagcccttttatatacttagccactacttctgtctgtctgtctgtctctctctcttcctctccctctctctctttctctctctccctctctctctctttctttctctctccccccctccctctctcttcctttcctctctcttgttgtaactgggagtggaggcccagtggctggggagacattaggtggtggggcccagcccgacctccaggttcttccttctccctagctgttgctttggtctggccactcccagcccccttgtccccttggaagcttgccctgccctcatcttgcccatgccttctactgccaggagacttgcacccatttcaaccctagggcgggggcaagtggggcaaggatggaccagcagaaggggggtaaggctctgttcacttccccctgcctccacagaacgaagccacggattccgttatcttcctccagttttgttccttctccagcctcagttccaccaggtgtcaggactgcatgggggcctggggcaggcagaggagtcaggccagggtccctgacggagcagcactcagcatgtgagtgaggccacagaaaaactctgccccactgcttcttacctcacgggggtggctttcagggattctttagcgcagcagattaaaatcttgccacagtcgagaaattgacaacaagcttccatgctgtacatggttctctttttctctcttttatttttaaaaagaaaacccagaaagatgtaccagatttgtgtaaatgagggtatgccagaaggtggccagttttgctttatgatcttatgaaggaagatttgtgaccctacgtatatatatacacacacatacatatatatatatatcccgaaccaacaacgggactttgtttatattgcaaataaatattattttttctttaaaatgagtcgtgtccgataagggcttggggcctgggaaggaggggaaggagtgctgtcgacaggcatcctagtgcctgctctgtgtgaggcactggcctggttctgcttggggtctgctggccacttagactaatcaaggtgccccgcagatgggagggagcagccacagtttctggatgaagctggggcaggtg

SEQ ID NO: 7395 - DNA, 1399 bp, Homo sapiens
gacctggagctgctgcataacaatatctggcatttacacaacgaggcctctgctccggacactgttctgaggcttgacccgtccttaagaacctaggacaaccctgtgcggtgggttttatccttaactccattatacaggccagagaactgagccagggtggagatgttccactgagaagaagccacatggctctccgccggctctcaagccaaaaacagttccgaaaatctgggcggggagcgggccagagagcgctggggctctgcccccagcaccccctccacgcagacgactcggtaactgggttgcaggcccgcggctgcggagtgcgcaggcgcgccgagatggccgcgctcctggccgcctagagccggagcggcccgcggagctgcggaggcagccatggtcggggcgctgtgcggctgctggttccgcctgggcggggcccgcccgctcatcccgttgggcccgactgtggtacagacctccatgagccggtcccaggtagcyctgctgggcctgagtctgctgctcatgctcctactgtatgtggggctgccaggcccccctgagcagacttcctgsctctggggagaccccaatgtcacagtcctggctggtctcacccctggcaactcgcccatcttttaccgcgaggtgctcccactcaaccaggcacacagggtggaggtggtgctgcttcatggaaaggcctttaactctcacacrtgggagcagctgggcacactgcagctactgtcacagaggggctaccgggccgtggcccttgaccttccaggttttgggaactcggcaccttcaaaggaggcaagcacagaggcagggcgggcagcgctgctggagcgggcgctgcgggacctggaggtacagaatgccgtgttggtgagcccctcgctgagtggccactatgccctgcccttcctgatgcgaggccaccaccagctacatggatttgtgcccatcgcacccacctccacccagaactacacccaggagcaattytgggctgtgaagactccaacccttatcctgtatggagagctggaccacatccyggctsgagagtcackgcggcagctccgccacctgcccaaccactctgtggtgaagctacgcaatgcaggccatgcctgttacctccacaagccgcaagacttccaccttgtcctgcttgccttccttgaccatctaccttgaactaacccactcccagctcccagcctggcatgagcttggacagtctggaccgccaccctccctgaaccagggagacagcctctgggattggaggccagaggccagggtcagacccagccaggactcctcatttcatctcacagacacaataaaaaagcatatttgtcctgcctgggaa

SEQ ID NO: 7396 - DNA, 2253 bp, Homo sapiens
cgtcccggcgccagcggccgcgtcggcgcggatgtccccgcccgcctctggttcgggcctcagcgagattactggaggattagatccggatcccgtccccgggcagcggccgccgcggccagcgccgccccgcgagttgcgagctccgggctggccctgctctgacaggctcgccccgccccacacgacacgcctgccactcctgcccccaggtcgctgaagagttcgaaaccgtgctcagcaccgcgtttggggcatgtgagaccgagaggctttgggaaactgacgccgctgtgagaacgagtttagcggagtctatggacgctgcgagcttgtggccacaagagggcgccccggagcacggcccagtccccgcccccgctggatggggcccggcctcttcccagcgttcctcctccggccccaggtcaccgccagcacgcgcctgcttcccgtctgcgcgagtccacgcagctccccagatcaagaagctgaggccccaggttacacactaaagtaaatggcagaggcagaaataacacctatgtcctcctgaccccaaggcatgttcttaaagttctggaaacctcctggaggcttccttgctgctcctctgggactgccaccctgggcagggtgttctgtggcccctcatcatcgtggttttgaaccacaggcccttcaccagcacagcagcagcaggcatggcagcaagcgtggagcagcgcgagggcaccatccaggtgcagggccaggccctcttcttccgagaggccctgcccggcagtgggcaggctcgcttctctgtactgctgctgcatggtattcgcttctcctccgagacctggcagaacctgggtacactgcacaggctggcccaggctggctaccgggctgtggccattgacctgccaggtctggggcactccaaggaagcagcagcccctgcccctattggggagctggcccctggcagcttcctggcggctgtggtggatgccttggagctgggccccccggttgtgatcagtccatcactgagtggcatgtactccctgcccttcctcacggcccctggctcccagctcccgggctttgtgccagtggcccccatctgcactgacaaaatcaatgctgccaactatgccagtgtgaagactccagctctgattgtatatggagaccaggaccccatgggtcagaccagctttgagcacctgaagcagctgcccaaccaccgggtgctgatcatgaagggggcggggcacccctgttacctggacaaaccagaggagtggcatacagggctgctggacttcctgcaggggctccagtgaagcccagcactgctgcagggggtgggctgcctgcctgctctgagctctctcttgcacgctctctcttctctcccaggctctggctcatgcacatgcaacaggtgcgtctgtctatatgtctgggttcttgtcttttgtggtctgtttgtcttttctacctctttctcttgcagtgatagactgagggggtaaaatcaagagaaaaaactctcaggaatcaaggaacataatcctgtggagggtaatccattacatgagcttctcctgttcttccactttcctgcctggctttcactccttcccctgctctgcccagcctttccctcccacccactcctccttctgcaaatgccctgaaggccarcccttaccccaacacccacttccccacctccttaggccccagatacatacatgcccacatgcacgcttacatgtttagagccatccttgtttccaaatatgacccttcgcttgagggcaactgcataggtacatctaactctggactggcatgcacattgtcatgtgcagctttgcatatacacacatgcatacatgagcctccacacaagcacttgcacacatgtggactcctaaccatgctaacctcactggctgggaaggtggggaccccatgggccagcccttgcaggaggcccttttgcaaggcttagggtgtggccagccctgaaagctacttggacacaggtttcagctggccccagcccagaagtgacccccagaaagggagggccmccgctttgccccctgcttttacccttccttytgggtgctytacacctcaggttaccaggcctgaggcatytcagccaagcttgtttcctgctytgaggcttgtggggtgggagccagagtggaggtcggtgaaataaagtgatgcaattagacccca

SEQ ID NO: 7397 - DNA, 2059 bp, Homo sapiens
cgtcccggcgccagcggccgcgtcggcgcggatgtccccgcccgcctctggttcgggcctcagcgagattactggaggattagatccggatcccgtccccgggcagcggccgccgcggccagcgccgccccgcgagttgcgagctccgggctggccctgctctgacaggctcgccccgccccacacgacacgcctgccactcctgcccccaggtcgctgaagagttcgaaaccgtgctcagcaccgcgtttggggcatgtgagaccgagaggctttgggaaactgacgccgctgtgagaacgagtttagcggagtctatggacgctgcgagcttgtggccacaagagggcgccccggagcacggcccagtccccgcccccgctggatggggcccggcctcttcccagcgttcctcctccggccccaggtcaccgccagcacgcgcctgcttcccgtctgcgcgagtccacgcagctccccaggcccttcaccagcacagcagcagcaggcatggcagcaagcgtggagcagcgcgagggcaccatccaggtgcagggccaggccctcttcttccgagaggccctgcccggcagtgggcaggctcgcttctctgtactgctgctgcatggtattcgcttctcctccgagacctggcagaacctgggtacactgcacaggctggcccaggctggctaccgggctgtggccattgacctgccaggtctggggcactccaaggaagcagcagcccctgcccctattggggagctggcccctggcagcttcctggcggctgtggtggatgccttggagctgggccccccggttgtgatcagtccatcactgagtggcatgtactccctgcccttcctcacggcccctggctcccagctcccgggctttgtgccagtggcccccatctgcactgacaaaatcaatgctgccaactatgccagtgtgaagactccagctctgattgtatatggagaccaggaccccatgggtcagaccagctttgagcacctgaagcagctgcccaaccaccgggtgctgatcatgaagggggcggggcacccctgttacctggacaaaccagaggagtggcatacagggctgctggacttcctgcaggggctccagtgaagcccagcactgctgcagggggtgggctgcctgcctgctctgagctctctcttgcacgctctctcttctctcccaggctctggctcatgcacatgcaacaggtgcgtctgtctatatgtctgggttcttgtcttttgtggtctgtttgtcttttctacctctttctcttgcagtgatagactgagggggtaaaatcaagagaaaaaactctcaggaatcaaggaacataatcctgtggagggtaatccattacatgagcttctcctgttcttccactttcctgcctggctttcactccttcccctgctctgcccagcctttccctcccacccactcctccttctgcaaatgccctgaaggccarcccttaccccaacacccacttccccacctccttaggccccagatacatacatgcccacatgcacgcttacatgtttagagccatccttgtttccaaatatgacccttcgcttgagggcaactgcataggtacatctaactctggactggcatgcacattgtcatgtgcagctttgcatatacacacatgcatacatgagcctccacacaagcacttgcacacatgtggactcctaaccatgctaacctcactggctgggaaggtggggaccccatgggccagcccttgcaggaggcccttttgcaaggcttagggtgtggccagccctgaaagctacttggacacaggtttcagctggccccagcccagaagtgacccccagaaagggagggccmccgctttgccccctgcttttacccttccttytgggtgctytacacctcaggttaccaggcctgaggcatytcagccaagcttgtttcctgctytgaggcttgtggggtgggagccagagtggaggtcggtgaaataaagtgatgcaattagacccca

SEQ ID NO: 7398 - DNA, 2041 bp, Homo sapiens
gtcgctgaagagttcgaaaccgtgctcagcaccgcgtttggggcatgtgagaccgagaggctttgggaaactgacgccgctgtgagaacgagtttagcggagtctatggacgctgcgagcttgtggccacaagagggcgccccggagcacggcccagtccccgcccccgctggatggggcccggcctcttcccagcgttcctcctccggccccaggtcaccgccagcacgcgcctgcttcccgtctgcgcgagtccacgcagctccccagatcaagaagctgaggccccaggttacacactaaagtaaatggcagaggcagaaataacacctatgtcctcctgaccccaaggcatgttcttaaagttctggaaacctcctggaggcttccttgctgctcctctgggactgccaccctgggcagggtgttctgtggcccctcatcatcgtggttttgaaccacaggcccttcaccagcacagcagcagcaggcatggcagcaagcgtggagcagcgcgagggcaccatccaggtgcagggccaggccctcttcttccgagaggccctgcccggcagtgggcaggctcgcttctctgtactgctgctgcatggtattcgcttctcctccgagacctggcagaacctgggtacactgcacaggctggcccaggctggctaccgggctgtggccattgacctgccaggtctggggcactccaaggaagcagcagcccctgcccctattggggagctggcccctggcagcttcctggcggctgtggtggatgccttggagctgggccccccggttgtgatcagtccatcactgagtggcatgtactccctgcccttcctcacggcccctggctcccagctcccgggctttgtgccagtggcccccatctgcactgacaaaatcaatgctgccaactatgccagtgtgaagactccagctctgattgtatatggagaccaggaccccatgggtcagaccagctttgagcacctgaagcagctgcccaaccaccgggtgctgatcatgaagggggcggggcacccctgttacctggacaaaccagaggagtggcatacagggctgctggacttcctgcaggggctccagtgaagcccagcactgctgcagggggtgggctgcctgcctgctctgagctctctcttgcacgctctctcttctctcccaggctctggctcatgcacatgcaacaggtgcgtctgtctatatgtctgggttcttgtcttttgtggtctgtttgtcttttctacctctttctcttgcagtgatagactgagggggtaaaatcaagagaaaaaactctcaggaatcaaggaacataatcctgtggagggtaatccattacatgagcttctcctgttcttccactttcctgcctggctttcactccttcccctgctctgcccagcctttccctcccacccactcctccttctgcaaatgccctgaaggccarcccttaccccaacacccacttccccacctccttaggccccagatacatacatgcccacatgcacgcttacatgtttagagccatccttgtttccaaatatgacccttcgcttgagggcaactgcataggtacatctaactctggactggcatgcacattgtcatgtgcagctttgcatatacacacatgcatacatgagcctccacacaagcacttgcacacatgtggactcctaaccatgctaacctcactggctgggaaggtggggaccccatgggccagcccttgcaggaggcccttttgcaaggcttagggtgtggccagccctgaaagctacttggacacaggtttcagctggccccagcccagaagtgacccccagaaagggagggccmccgctttgccccctgcttttacccttccttytgggtgctytacacctcaggttaccaggcctgaggcatytcagccaagcttgtttcctgctytgaggcttgtggggtgggagccagagtggaggtcggtgaaataaagtgatgcaattagacccca

SEQ ID NO: 7399 - DNA, 2792 bp, Homo sapiens
gggagcttccggattgagccggaagtycccccagagcggatgccgcggcgggcctgtgggagcggggtcatcttctctctgctgctgtagctgccatgggcaaaagagaccgagcggaccgcgacaagaagaaatccaggaagcggcactatgaggatgaagaggatgatgaagaggacgccccggggaacgaccctcaggaagcggttccctcggcggcggggaagcaggtggatgagtcaggcaccaaagtggatgaatatggagccaaggactacaggctgcaaatgccgctgaaggacgaccacacctccaggcccctctgggtggctcccgatggccatatcttcttggaagccttctctccagtttacaaatatgcccaagactycttggtggctattgcagagccagtgtgcygaccaacccatgtgcatgagtacaractamctgcctactccttgtatgcagctgtcagcgttgggctgcaaaccagtgacatcaccgagtacctcaggaagctcagcaagactggagtccctgatggaattatgcagtttattaaggcaactgcacatttacctgttggatgttatctgtatttgcagttgtgtactgtcagctatggaaaagtcaagctggtcttgaagcacaacagatacttcgttgaaagttgccaccctgatgtaatccagcatcttctccaggaccccgtgatccgagaatgccgcttaagaaactctgaaggggaggccactgagctcatcacagagactttcacaagcaaatctgccatttctaagactgctgaaagcagtggtgggccctccacttcccgagtgacagatccacagggtaaatctgacatccccatggacctgtttgacttctatgagcaaatggacaaggatgaagaagaagaagaagagacacagacagtgtcttttgaagtcaagcaggaaatgattgaggaactccagaaacgttgcatccacctggagtaccctctgttggcagaatatgacttccggaatgattctgtcaaccctgatatcaacattgacctaaagcccacagctgtcctcagaccctatcaggagaagagcttgcgaaagatgtttggaaacgggcgtgcacgttcgggggtcattgttcttccctgcggtgctggaaagtccctggttggtgtgactgctgcatgcactgtcagaaaacgctgtctggtgctgggcaactcagctgtttctgtggagcartggaaagcccagttcaagatgtggtccaccattgacgacagccagatctgccggttcacctccgatgccaaggacaagcccatckgctgctccgttgccattagcacctactccatgctgggccacaccaccaaaaggtcctgggaggccgagcgagtcatggagtggctcaagacccaggagtggggcctcatgatcctggatgaagtgcacaccataccagccaagatgttccgaagggtgctcaccatcgtgcaggcccactgtaagctgggtttgactgcgaccctcgtccgcgaagatgacaaaattgtggatttaaattttctgattgggcctaagctctacgaagccaactggatggarctgcagaataatggctacatcgccaaagtccagtgtgctgaggtctggtgccctatgtctcctgaattttaccgggaatatgtggcaatcaaaaccaagaaacgaatcttgctgtacaccatgaaccccaacaaatttagagcttgccagtttctgatcaagtttcatgaaaggaggaatgacaagattattgtctttgctgacaatgtgtttgccctaaaggaatatgccattcgactgaacaaaccctatatctacggacctacgtctcagggggaaaggatgcaaattctccagaatttcaagcacaaccccaaaattaacaccatcttcatatccaaggtttgtgacacttcgtttgatctgccggaagcaaatgtcctcattcagatctcatcccatggtggctccaggcgtcaggaagcccaaaggctagggcgggtgcttcgagctaaaaaagggatggttgcagaagagtacaatgcctttttctactcactggtatcccaggacacacaggaaatggcttactcaaccaagcggcagagattcttggtagatcaaggttatagcttcaaggtgatcacgaaactcgctggcatggaggaggaagacttggcgttttcgacaaaagaagagcaacagcagctcttacagaaagtcctggcagccactgacctggatgccgaggaggaggtggtggctggggaatttggctccagatccagccaggcatctcggcgctttggcaccatgagttctatgtctggggccgacgacactgtgtacatggagtaccactcatcgcggagcaaggcgcccagcaaacatgtacacccgctcttcaagcgctttaggaaatgatgcttaggcagggtacttcgttcaagacyggcgcttggcacccttgttggaaagggattttcagcataacattttccttccacctctttgaccttccctccagcgttggccaaattgtgctgaggaagatgcatcaagggcttggctgtgccttcataggtcatctagggttttatraaggaggaggagacaatattttttcaaactttttggggagtggggtcatttctgtatataaaaaatgttaatatttaaggtrtatttatgttaccgttctgaataaacagaatggaccattgaaccagt

SEQ ID NO: 7400 - DNA, 2750 bp, Homo sapiens
gggagcttccggattgagccggaagtycccccagagcggatgccgcggcgggcctgtgggagcggggtcatcttctctctgctgctgtagctgccatgggcaaaagagaccgagcggaccgcgacaagaagaaatccaggaagcggcactatgaggatgaagaggatgatgaagaggacgccccggggaacgaccctcaggaagcggttccctcggcggcggggaagcaggtggatgagtcaggcaccaaagtggatgaatatggagccaaggactacaggctgcaaatgccgctgaaggacgaccacacctccaggcccctctgggtggctcccgatggccatatcttcttggaagccttctctccagtttacaaatatgcccaagactycttggtggctattgcagagccagtgtgcygaccaacccatgtgcatgagtacaractamctgcctactccttgtatgcagctgtcagcgttgggctgcaaaccagtgacatcaccgagtacctcaggaagctcagcaagactggagtccctgatggaattatgcagtttattaagttgtgtactgtcagctatggaaaagtcaagctggtcttgaagcacaacagatacttcgttgaaagttgccaccctgatgtaatccagcatcttctccaggaccccgtgatccgagaatgccgcttaagaaactctgaaggggaggccactgagctcatcacagagactttcacaagcaaatctgccatttctaagactgctgaaagcagtggtgggccctccacttcccgagtgacagatccacagggtaaatctgacatccccatggacctgtttgacttctatgagcaaatggacaaggatgaagaagaagaagaagagacacagacagtgtcttttgaagtcaagcaggaaatgattgaggaactccagaaacgttgcatccacctggagtaccctctgttggcagaatatgacttccggaatgattctgtcaaccctgatatcaacattgacctaaagcccacagctgtcctcagaccctatcaggagaagagcttgcgaaagatgtttggaaacgggcgtgcacgttcgggggtcattgttcttccctgcggtgctggaaagtccctggttggtgtgactgctgcatgcactgtcagaaaacgctgtctggtgctgggcaactcagctgtttctgtggagcartggaaagcccagttcaagatgtggtccaccattgacgacagccagatctgccggttcacctccgatgccaaggacaagcccatckgctgctccgttgccattagcacctactccatgctgggccacaccaccaaaaggtcctgggaggccgagcgagtcatggagtggctcaagacccaggagtggggcctcatgatcctggatgaagtgcacaccataccagccaagatgttccgaagggtgctcaccatcgtgcaggcccactgtaagctgggtttgactgcgaccctcgtccgcgaagatgacaaaattgtggatttaaattttctgattgggcctaagctctacgaagccaactggatggarctgcagaataatggctacatcgccaaagtccagtgtgctgaggtctggtgccctatgtctcctgaattttaccgggaatatgtggcaatcaaaaccaagaaacgaatcttgctgtacaccatgaaccccaacaaatttagagcttgccagtttctgatcaagtttcatgaaaggaggaatgacaagattattgtctttgctgacaatgtgtttgccctaaaggaatatgccattcgactgaacaaaccctatatctacggacctacgtctcagggggaaaggatgcaaattctccagaatttcaagcacaaccccaaaattaacaccatcttcatatccaaggtaggtgacacttcgtttgatctgccggaagcaaatgtcctcattcagatctcatcccatggtggctccaggcgtcaggaagcccaaaggctagggcgggtgcttcgagctaaaaaagggatggttgcagaagagtacaatgcctttttctactcactggtatcccaggacacacaggaaatggcttactcaaccaagcggcagagattcttggtagatcaaggttatagcttcaaggtgatcacgaaactcgctggcatggaggaggaagacttggcgttttcgacaaaagaagagcaacagcagctcttacagaaagtcctggcagccactgacctggatgccgaggaggaggtggtggctggggaatttggctccagatccagccaggcatctcggcgctttggcaccatgagttctatgtctggggccgacgacactgtgtacatggagtaccactcatcgcggagcaaggcgcccagcaaacatgtacacccgctcttcaagcgctttaggaaatgatgcttaggcagggtacttcgttcaagacyggcgcttggcacccttgttggaaagggattttcagcataacattttccttccacctctttgaccttccctccagcgttggccaaattgtgctgaggaagatgcatcaagggcttggctgtgccttcataggtcatctagggttttatraaggaggaggagacaatattttttcaaactttttggggagtggggtcatttctgtatataaaaaatgttaatatttaaggtrtatttatgttaccgttctgaataaacagaatggaccattgaaccagt

SEQ ID NO: 7401 - DNA, 1350 bp, Homo sapiens
ggccgagccgagggtccccggagcctcgccgccatgccggggccgaggaccctcgccaacctggcggagttcttctgcagggacggcttcagccgcatccacgagatccagcagaagcacacacgggaatatggaaaaatcttcaagtctcactttggtcctcagtttgtagtatctattgcagaccgcgatatggtggctcaggtgctccgggcggagggcgctgcgccccagagagccaacatggagtcctggcgggagtaccgagacttgcgggggagagccaccgggctcatctcggcggagggtgaacagtggctcaagatgagaagcgtattgagacaaagaattctgaaaccgaaagatgtggccatttattctggagaagtcaaccaagttattgctgacttaattaaaagaatctacctcctcaggagccaggcagaagatggagaaaccgtgaccaatgtcaatgatcttttcttcaaatattcaatggaaggagtggccaccatcctttatgagagtcgtttgggctgcctggaaaacagcatcccacagctgactgtggaatacatcgaggccctggagctcatgtttagcatgttcaagacctccatgtatgcaggcgccatccccagatggcttcgccccttcatcccaaagccctggcgggaattctgcaggtcctgggatggactcttcaaattcagccaaattcatgttgacaacaagttgagggacatacagtaccaaatggaccgaggccggagggtgagcgggggacttctcacatacctcttccttagccaggctctgacgctgcaggagatctaygccaacgtgactgagatgctgctggccggcgtcgacacgacgtccttcaccttgtcttggackgtgtacctcctggcaaggcacccagaagtgcagcagacggtgtaccgggagattgtgaagaatttaggggaaaggcatgttccaactgcagctgatgtccccaaggtcccgctggtcagagctctccttaaggaaaccctgaggctgtttccagtgctgccagggaacggccgggtcacccaggaagacctggttattggcgggtatctgattccgaaaggcacccagctggccctttgccactatgccacatcgtaccaggatgagaacttccctcgggccaaggagttccggcctgagcgctggctgcggaaaggagacttagatagagttgacaattttggatccatcccctttggtcatggggttcgcagctgcatagggcggagaattgcagaactggagattcacctcgtcgtgatccaggtagggcgtggaggccaaacgttg

SEQ ID NO: 7402 - DNA, 1679 bp, Homo sapiens
gaggagacttggcctccgcagctgccctccggccccccacggctgccgggttccggggtgcaagtgaagcagcctccccgcggaggccgcagcgccccgaccaggcctctttaagcgcaggccccgccccgggcgccaccgccccgccccgcggatcccgctcccgcaccgccatcatgatctgcctggtgctgaccatcttcgctaacctcttccccgcggcctgcaccggcgcacacgaacgcaccttcctggccgtgaagccggacggcgtgcagcggcggctggtgggcgagattgtgcggcgcttcgagaggaagggcttcaagttggtggcgctgaagctggtgcaggcctccgaggagctgctgcgtgagcactacgccgagctgcgtgaacgcccgttctacggccgccttgtcaagtatatggcctccgggccggtggtggccatggtwtggcaggggctggacgtggtgcgcacctcgcgggcgctcatcggagccacgaacccggccgacgccccgcccggcaccatccgcggggatttctgcatcgaggttggcaagaacctgattcacggcagcgactcggtggagagtgcccgccgcgagatcgctctctggttccgcgcagacgagctcctctgctgggaggacagcgctgggcactggctgtatgagtagcccggcagatgcgcgtcacagaggctctcacactccagcctcctccagggcccaggtgggcgggcttctggccccaccccacagcgcttggagcatccctttggacgggctgctgaacatccacctgtctggacgttgcatggagggtggcgcaggcctctccaatccctggcgtacagggtttcctgcccgaggagctgctccaggagcctgcgcggctcgcctggaaacgtgccaggacactgtcctggtgcccagcccaacgtggtccaacgtttttttataataaagtcctcgttttcgtttcgrtttgggcccaggaacaggcagctacgacgttaagacatttattacatacagagcagatatgtgggtttgcttgcagggccaaagcctgaggagaatcgtcacccctcccccagccgccccactgctcagcccggagtcacttcgagatcctgggggaacagacgagggagcggacatacatcacagtggaggtggcagggtggtggggagaagccggcagcgcagcggctgcagccctcggtggccagcggggcttgtggggcagctccccaagatctgtgcttctctggttgggggtgggtgcgggggctgggctgccctcataagggcctcccagacaggagtgcagtgggcctggaaggtaggaataggccagagaggcccagctgggcagggagagcagtccagggtggcgtctgccctctgcgggcttggagtcggctgggggcggctccatcctcagccccacgggcctctgcttggtggcctctctgttgctccctgggagcaggccacagcgggcaaccctaggcacttagtagcgtgtctgggagctgggctccgtggagccccgtgcaggaggcaggccccgggagcacatcatcccccatcaacctgaggctgagcctgtgtcctaggactgatcccggagaggccaggggcctccccttcttcctgaggcct

SEQ ID NO: 7403 - DNA, 1555 bp, Homo sapiens
acaatggcctggatgctgccatgattcccatcaagtgcccctgtagtcacgtgggctgggccggtcagctgatgcmtacggcatcccggagaggaccaactgcctcggaacgctgtcccccgcagcgacggcccgttccacctcgcgatctgccgggtacccgggcggcgtggcgctcggcctccagggatccactgtgcggtgccaaaaaagaggcggaggctcgcggcacagctctcccggcgcagctctcgggccgccgccgccgctcccaggcccgtctcccggcccgtggcagtcggggctcgcggacaaaacaagttgagcgcgagcgcgttgattggttggcggacggtgcgaggtggacgctgattggctgagggcagcgcgaggcgggcgctgattggctgcgacgcgccgacgccggtgttttgcagtcctgggcagctcggcagtcmagcccggcccgggtcatggtggtgggccgagggctgctcggccgccgcagcctcgccgcgctgggagccgcctgcgcccgccgaggcctcggtccagccctgctgggagttttctgccacacagatttgcggaagaacctgaccgtggacgagggcaccatgaaggtagaggtgctgcctgccctgaccgacaactacatgtacctggtcattgatgatgagaccaaggaggctgccattgtggatccggtgcagccccagaaggtcgtggacgcggcgagaaagcacggggtgaaactgaccacagtgctcaccacccaccaccactgggaccatgctggcgggaatgagaaactggtcaagctggagtcgggactgaaggtgtacgggggtgacgaccgtatcggggccctgactcacaagatcactcacctgtccacactgcaggtggggtctctgaacgtcaagtgcctggcgaccccgtgccacacttcaggacacatttgttacttcgtgagcaagcccggaggctcggagccccctgccgtgttcacaggtgacaccttgtttgtggctggctgcgggaagttctatgaagggactgcggatgagatgtgtaaagctctgctggaggtcttrggccggctccccccggacacagtaggcagcgcctccctgcgggccgggagagtctactgtggccacgagtacaccatcaacaacctcaagtttgcacgccacgtggagcccggcaatgccgccatccgggagaagctggcctgggccaaggagaagtacagcatcggggagcccacagtgccatccaccctggcagaggagtttacctacaaccccttcatgagagtgagggagaagacggtgcagcagcacgcaggtgagacggacccggtgaccaccatgcgggccgtgcgcagggagaaggaccagttcaagatgccccgggactgaggccgccctgcaccttcagcggatttggggattaggctcttaattttacagcccttggcttgtgttatcggacrttytaatgcatatttataagagaagtttaacaagtatttattcccataacttcc

SEQ ID NO: 7404 - DNA, 1585 bp, Homo sapiens
acaatggcctggatgctgccatgattcccatcaagtgcccctgtagtcacgtgggctgggccggtcagctgatgcmtacggcatcccggagaggaccaactgcctcggaacgctgtcccccgcagcgacggcccgttccacctcgcgatctgccgggtacccgggcggcgtggcgctcggcctccagggatccactgtgcggtgccaaaaaagaggcggaggctcgcggcacagctctcccggcgcagctctcgggccgccgccgccgctcccaggcccgtctcccggcccgtggcagtcggggctcgcggacaaaacaagttgagcgcgagcgcgttgattggttggcggacggtgcgaggtggacgctgattggctgagggcagcgcgaggcgggcgctgattggctgcgacgcgccgacgccggtgttttgcagtcctgggcagctcggcagtcmagcccggcccgggtcatggtggtgggccgagggctgctcggccgccgcagcctcgccgcgctgggagccgcctgcgcccgccgaggcctcggtccagccctgctgggagttttctgccacacagatttgcggaagaacctgaccgtggacgagggcaccatgaaggtagaggtgctgcctgccctgaccgacaactacatgtacctggtcattgatgatgagaccaaggaggctgccattgtggatccggtgcagccccagaaggtcgtggacgcggcgagaaagcacggggtgaaactgaccacagtgctcaccacccaccaccactgggaccatgctggcgggaatgagaaactggtcaagctggagtcgggactgaaggtgtacgggggtgacgaccgtatcggggccctgactcacaagatcactcacctgtccacactgcaggtggggtctctgaacgtcaagtgcctggcgaccccgtgccacacttcaggacacatttgttacttcgtgagcaagcccggaggctcggagccccctgccgtgttcacaggtgacaccttgtttgtggctggctgcgggaagttctatgaagggactgcggatgagatgtgtaaagctctgctggaggtcttrggccggctccccccggacacaagagtctactgtggccacgagtacaccatcaacaacctcaagtttgcacgccacgtggagcccggcaatgccgccatccgggagaagctggcctgggccaaggagaagtacagcatcggggagcccacagtgccatccaccctggcagaggagtttacctacaaccccttcatgagagtgagggagaagacggtgcagcagcacgcaggtgagacggacccggtgaccaccatgcgggccgtgcgcagggagaaggaccagttcaagatgccccgggactgaggccgccctgcaccttcagcggatttggggattaggctcttttaggtaactggctttcctgctggtccgtgcgggaaattcagtcttgatttaaccttaattttacagcccttggcttgtgttatcggacrttytaatgcatatttataagagaagtttaacaagtatttattcccataacttcc

SEQ ID NO: 7405 - DNA, 1541 bp, Homo sapiens
ggccgagggctgctcggccgccgcagcctcgccgcgctgggagccgcctgcgcccgccgaggcctcggtgggtgcggcggggcggtgcgggccgggggacgcgggcctgtcggggcgggcagcgggcggcgccgggccgtcgtttggcgaccgctgacgcggtgtctgttgcgcaggtgcctaaggccgcgctgccgggctcgagcggaggcggcgcaggcgctgaggctggcgcggagcgggcgcggggccgcgggtgcggaaagcgctaggtccagccctgctgggagttttctgccacacagatttgcggaagaacctgaccgtggacgagggcaccatgaaggtagaggtgctgcctgccctgaccgacaactacatgtacctggtcattgatgatgagaccaaggaggctgccattgtggatccggtgcagccccagaaggtcgtggacgcggcgagaaagcacggggtgaaactgaccacagtgctcaccacccaccaccactgggaccatgctggcgggaatgagaaactggtcaagctggagtcgggactgaaggtgtacgggggtgacgaccgtatcggggccctgactcacaagatcactcacctgtccacactgcaggtggggtctctgaacgtcaagtgcctggcgaccccgtgccacacttcaggacacatttgttacttcgtgagcaagcccggaggctcggagccccctgccgtgttcacaggtgacaccttgtttgtggctggctgcgggaagttctatgaagggactgcggatgagatgtgtaaagctctgctggaggtcttrggccggctccccccggacacaagagtctactgtggccacgagtacaccatcaacaacctcaagtttgcacgccacgtggagcccggcaatgccgccatccgggagaagctggcctgggccaaggagaagtacagcatcggggagcccacagtgccatccaccctggcagaggagtttacctacaaccccttcatgagagtgagggagaagacggtgcagcagcacgcaggtgagacggacccggtgaccaccatgcgggccgtgcgcagggagaaggaccagttcaagatgccccgggactgaggccgccctgcaccttcagcggatttggggattaggctcttttagacagactcttctgagtggaggggcagagcggccctgggacctaggagcaagcctggcccgaggcttgtggattgaagaggaaggctggcactgcacttctagaccacatgcatgccctccccccggaggggtcactggtctgttcgcatactcgcagacccctctgggatgccacggaagccaggcgtgtgtgaggaggcagggcagactgcttctccggctttcttctcccactacccccrccccagcgcaaagagtttgttctattgttcagcaaatattcttaggccagaatcttaaatgtttccattctataacaaacactgtgctcatttgtcaaccaataagtaattttaacagccctctttggatg

SEQ ID NO: 7406 - DNA, 868 bp, Homo sapiens
gcgcgcagacgcagccgccctcggcgtcctctgtagcgggcgacctaggccgcgrgacccggacggaggtagaggcyagggcarcgcgtccgggagcggagtccgcgcccgccgccgccatgccggacagctgggacaaggatgtgtaccctgagcccccgcgccgcacgccggtgcagcccaatcccatygtctacatgatgaaagcgttcgacctcatcgtggaccgacccgtgaccctcgtgagagaatttatagagcggcagcacgcaaagaacaggtattactactaccaccggcagtaccgccgcgtgccagacatcactgagtgcaaggaggaggacatcatgtgcatgtatgaagccgaaatgcagtggaagagggactacaaagtcgaccaagaaattatcaacattatgcaggatcggctcaaagyctgtcagcagagggaaggacagaactaccagcagaactgtatcaaggaagtggagcagttcacccaggtggccaaggcctaccaggaccgctgtgcgtgccccacccacccccaaccccccaccatcctcctgaggcctgggggccagaaccattgcaaatcttccctcccctcccttgtgctcacttgactttgccccctttgcatgtagcagaggcctcggttcccagcttgtttccattgcttccccagatcaggacctgggggcctacagttctgccaggaagtgcctggccaaacagaggcagaggatgctgcaagagagaaaagctgcaaaagaggccgccgctgccacctcctgaggcagctgtgggtgcccytgctgtgtggctctgtatgactgttgctgaaatataaagccctgcaacctgc

SEQ ID NO: 7407 - DNA, 710 bp, Homo sapiens
gcgcgcagacgcagccgccctcggcgtcctctgtagcgggcgacctaggccgcgrgacccggacggaggtagaggcyagggcarcgcgtccgggagcggagtccgcgcccgccgccgccatgccggacagctgggacaaggatgtgtaccctgagcccccgcgccgcacgccggtgcagcccaatcccatygtctacatgatgaaagcgttcgacctcatcgtggaccgacccgtgaccctcgtgagagaatttatagagcggcagcacgcaaagaacaggtattactactaccaccggcagtaccgccgcgtgccagacatcactgagtgcaaggaggaggacatcatgtgcatgtatgaagccgaaatgcagtggaagagggactacaaagtcgaccaagaaattatcaacattatgcaggatcggctcaaagyctgtcagcagagggaaggacagaactaccagcagaactgtatcaaggaagtggagcagttcacccaggtggccaaggcctaccaggaccgctatcaggacctgggggcctacagttctgccaggaagtgcctggccaaacagaggcagaggatgctgcaagagagaaaagctgcaaaagaggccgccgctgccacctcctgaggcagctgtgggtgcccytgctgtgtggctctgtatgactgttgctgaaatataaagccctgcaacctgcct

SEQ ID NO: 7408 - DNA, 1273 bp, Homo sapiens
gctgcgggaccgccgggcgcagagcacaagccgggcacccacggactgagcggcgcgcgggccgagatgcgcgcccgcctgctgcccccgctcccgggcctggagcggcgcgaccccatggcaggtagcggcggcctgggcggcggggccgggggcggccagggcgcaggggccgggcaaggggccgctctgcgggcgtcccgcgcgccgatgctgctcgtggccctggtgctcggcgcctactgcctctgcgccctccccggccgctgcccgccggccgcccgcgcccccgcgccggcccccgcgccctccgagccgtccagctccgtccaccgcccgggagcacccggcctgcctttggccagcggtcccggccgccggcgcttcccgcaagcgctcatcgttggcgtgaagaagggcggcacgcgcgccctgctggagtttctgcggctgcaccccgacgtccgcgcgctgggctctgagccccacttcttcgacaggtgctacgagcgcggcctcgcctggtaccggagtctgatgccccgaaccctggatgggcagatcaccatggagaagacccccagctacttcgtgacgcgagaggccccccgccgcatccacgccatgtccccggacacgaagctgatcgtggtggtgcggaaccccgtgacccgggccatctccgactayrcccagacgctctccaagaccccgggcctgcccagcttccgcgccctggccttccgccacggcctgggccccgtggacacagcctggagcgccgtccgcatcggcctgtacgcccagcacctggaccactggctgcgctacttccccctgtcccacttcctgttcgtcagcggggagcgtytggtcagcgacccggcyrgagaggtcggccgcgtgcaggacttcctgggcctgaaacgggtcgtcacggacaagcacttctacttcaacgccaccaagggcttcccctgcctcaagaaggcccagggcggcagcygtccscgctgcctgggcaagtccaagggccggccacacccacgcgtgccccaggccstggtccggcgcctgcaggagttctaccggcccttcaaccgcaggttctaccagatgacgggccaggacttcggctggggctgagcggcaccctggggatgctcagcaccttgattgacacccrctcgcctggccagagcgggctgcgtgcayatgctgggcagagaggaatatttaagaaataaagcttggacccagatttttccacaaa

SEQ ID NO: 7409 - DNA, 1702 bp, Homo sapiens
atggctgagactgtggggacggctgagaccgtggggatggctgagaccgtggggactgctgaacctgtggggackmctgagaccgtgggaacagctgagaccgtggggactcagaccgtggggacggctgagaccgtggggactcctgagaccgtggggatggctgagaccgtgggggctcctgagaccgtggggactgctgagaccgtggggactcctgagaccgtggggatggctgagaccgtgggggctcctgagaccgtggggactgctgagaccgtggggacggctgagaccgtggggactcctgagaccctggggacggctgagaccatggggwcggctgagaccgtggggactcctgagaccctggggacagctgagaccatggggatgctgagaccgtggggactcctgagaccgctgctgctgggcgttggggatgtgaagttcccgcagtgtctagcggcccccgcaggtcccacccgagaggcccctgaatctcacgcccctcagaggcagcccctgggggaggtcctgggctccttctcttccccagcacaggggtccctgagtcctttgtactccagtggggtccactttgccagcttccgaaatgcatcactgatgtctctgggcagtgccagcggtcccggccgccggcgcttcccgcaagcgctcatcgttggcgtgaagaagggcggcacgcgcgccctgctggagtttctgcggctgcaccccgacgtccgcgcgctgggctctgagccccacttcttcgacaggtgctacgagcgcggcctcgcctggtaccggatggacgtgggggtgcggcagccycagctgaagcagcccgcgctggtggctgctcatccccaagcttggacccagcgcctgcagagaggaccctgcccaaggccagttggggagtcagtgggggtggcaggacccagacgcttctccaggagtctgatgccccgaaccctggatgggcagatcaccatggagaagacccccagctacttcgtgacgcgagaggccccccgccgcatccacgccatgtccccggacacgaagctgatcgtggtggtgcggaaccccgtgacccgggccatctccgactayrcccagacgctctccaagaccccgggcctgcccagcttccgcgccctggccttccgccacggcctgggccccgtggacacagcctggagcgccgtccgcatcggcctgtacgcccagcacctggaccactggctgcgctacttccccctgtcccacttcctgttcgtcagcggggagcgtytggtcagcgacccggcyrgagaggtcggccgcgtgcaggacttcctgggcctgaaacgggtcgtcacggacaagcacttctacttcaacgccaccaagggcttcccctgcctcaagaaggcccagggcggcagcygtccscgctgcctgggcaagtccaagggccggccacacccacgcgtgccccaggccstggtccggcgcctgcaggagttctaccggcccttcaaccgcaggttctaccagatgacgggccaggacttcggctggggctgagcggcaccctggggatgctcagcaccttgattgacacccrctcgcctggccagagcgggctgcgtgcayatgctgggcagagaggaatatttaagaaataaagcttggacccagatttttccac

SEQ ID NO: 7410 - DNA, 5231 bp, Homo sapiens
aaattcattgagtttgaagatgctctggaacaagagaagaaagagctgcaaatccaggtggagcactaygagttccagacgcgccagctggagctgaaggccaagaactatgccgatcagatttcccggttggaggagcgggagtcggagatgaagaaggagtacaatgccctgcaccagcggcacacagagatgatacagacctacgtggagcacattgagaggtccaagatgcagcaggtcggaggaaacagccagaccgagagcagcctgccggggcggagcaggaaggagcgccccacctccctgaacgtgttccccctggctgacggcasggtacgtgcacagatcgggggcaagctcgtgcctgcgggggaccactggcacctgagtgacctcggccagctgcagtccagctccagctaccagtgtccacaggatgaaatgtcygagtcaggccagtcctcggcggccgccacacccagcaccacaggcaccaagtccaacacgcccacatcctccgtgccctcggccgccgtcacacccctcaacgagagcctgcagcccctgggggactatggcgtgggctccaagaacagcaagcgtgcccgggagaagcgcgacagccgcaacatggaagtacaggtcacccaggagatgcgcaacgtcagtataggcatgggcagcagtgacgagtggtctgatgttcaagacattattgactccacgccagagctggacatgtgtccagagacccgcctggaccgcacaggaagcagcccaacccagggcatcgtgaacaaagctttcggcatcaacaccgactccstgtaccatgagctgtcgacggcagggtctgaggtcatcggggatgtggacgaaggggccgacctcctaggtgaaacctccgcaccttctgtttcaggaatgggcaaagaagtggggaatctgctactggaaaactcacagcttctggaaaccaaaaacgccttgaatgtggtgaagaatgacctgattgccaaggtcgaccagctgtccggggagcaggaggtgctgaggggcgagttggaggctgctaagcaggccaaagtcaagctggaaaaccgtatcaaggagctggaagaggaactgaaaagagtgaagtccgaggccatcatcgcccgccgtgaacccaaagaagaggcggaggatgtaagcagctatctctgtacagaatcggacaaaatccccatggcccagcgccgccgcttcacgcgggtggagatggcccgtgtgctcatggagcggaaccagtacaaggagcggctgatggagctgcaggaggctgtgcggtggactgagatgatcagagcgtcccgagagcacccatccgtccaggagaagaagaagtcgaccatctggcagttcttcagccgcctcttcagctcttcctccagcccccctccggccaagcgcccctatccctcggtgaacatccactacaaktcacccaccactgccggcttcagccagcgccgcaaccatgccatgtgcccgatctcsgcaggcagccggcccctggaattcttccctgacgacgactgcacgtcctccgcccgtcgagagcagaagcgcgagcagtaccgccaggtgcgtgagcacgtgcgtaacgacgacggccgtctgcaggcctgcggctggagcctgcccgccaagtacaagcagctgagtcccaacgggggccaggaggacacgcggatgaagaacgtgccggtgccggtgtactgccgccctctggtggagaaggaccccaccatgaagctgtggtgtgcygcgggcgtcaacctgagcgggtggaggcccaatgaggacgacgctgggaatggagtcaagccagcgccaggccgcgaycccctgacctgcgaccgcgaaggagacggcgagcccaagagcgcccacrcgtctcccgagaagaagaaggccaaggagctccctgaaatggacgccacctccagccgggtgtggatcctgaccagcaccctgaccaccagcaaggtggtgatcatcgacgccaaccagccgggcacggtggtggaccagttcaccgtctgcaacgcgcacgtgctgtgcatctccagcatccccgcggccagcgacagcgactaccctcccggggagatgttcctggacagcgacgtgaacccagaggacccgggcgcagatggcgtgctggccggtatcaccctggtgggctgtgccacccgctgcaacgtgccgcggagcaactgctcctcccgaggggacaccccagtgctagacaaggggcagggggaggtggccaccatcgccaacgggaaggtcaacccgtcccagtccacagaggaggccacagaggccacggaggtgccagaccctgggcccagcgagccagagacagccacattgcggcccgggcctctcacagagcacgtcttcactgacccagccccgaccccgtcctctggcccccagcctggcagcgagaacgggccagagcctgacagcagcagcacacggccagagccagagcccagcggggaccccacgggagcaggcagcagtgctgcacccaccatgtggctgggagcccagaacggctggctctatgtgcactcggctgtggccaactggaagaagtgcctgcactccatcaagctgaaggattctgtgctgagcctggtgcatgtcaaaggccgtgtgctggtggctctggcggacgggaccctggccatcttccaccgtggtgaagatggccagtgggatctgagcaactatcacctaatggacctgggccacccgcaccactccatccgctgcatggctgttgtgtacgaccgcgtgtggtgtggctacaagaacaaggtgcacgtcatccagcccaagaccatgcagatagaggcgaccatgactccacagaagtcatttgacgcccacccgcggcgggagagycaggtgcggcagctggcgtggatcggcgatggcgtatgggtgtccatccgcctggactccaccctgaggctctaccatgcacacacgcaccagcatctacaggacgtggacattgagccctacgtcagcaagatgctaggcactggcaagctgggtttctccttcgtacgcatcacggccctgcttgtcgcgggcagccggctctgggtgggcaccggcaacggagtggtcatctccatccccctgacagagactgtggtcctgcaccgaggccagctcctggggctccgagccaataagacatcccccacctctggggagggcgcccgtcccgggggcatcatccacgtgtatggcgatgacagcagtgacagggcggccagcagcttcatcccctactgctccatggcccaggcccagctatgcttccatgggcaccgcgatgccgtgaagttctttgtctcggtgccagggaacgtgctggccaccctgaatggsagtgtgctggacagcccagccgagggccctgggccagctgcccctgcctcggaggtcgagggccagaagctgcggaacgtgctggtgctgagcggcggggagggctacatcgacttccgcattggagacggagaggacgacgagacggaggagggcgcaggggacatgagccaggtgaagcccgtgctgtccaaggcagagcgcagtcacatcatcgtgtggcaggtgtcctacacccccgagtgaagctgctgccctgcctggcccgacctgtacataggacccccgaccacctgacccccgcccggcccgcggggtagccagccaggcgccgccgcccctcttctaacctctcaacctgcagctttcacctgagtctggcccctccagcgggcagggagtgcggggatgcggatcagctgggaggaggaggggaggggwrcttccacccgaggggaagatgctctcgggacagtttcccgggcagctcctggccagcttccagcccagagtcctcaagtccagggcaccttgggcccagcgcaggcagaatccgaggtggtcctggctctaccctgggcctcctactccccagcacccctggaggaggcaggggctccccgccgccgaggctgcctgccctgggcccacctctgcatgctgctcatggggccaccctgcctcctgggccctcactctgcctaggggagctgggccaggcactagcctttgcccagggaggtgggcctcaggctgcccaggtgcctgcaccccagccggccttctctggggcctccccgtcgtcaagcctctatcctgtctgtccccaccccagctgtcccctgcccagggarctggcataaaagcacgaggcccggctccctggggcagctgcttgagaacagagactgctaccccatcctgcccatgcaggcaggctcttgccagccccgttctgacccgtgtccccccaggctctgcctgggcagaagactcaccttggaggagtgggccctggagtcctgtccctcccagaagcccccagggtgggatttctcaggctgccagggcaggcccaggcctcaggaagaaggggaggcccctggcctctccgggatcagtcctaggacacaggctcagcctcaggttgatgggggatgatgtgctcccggggcctgcctcctgcacggggctccacggagcccagctcccagacacgctactaagtgcctagggttgcccgctgtggcctgctcccagggagcaacagagaggccaccaagcagaggcccgtggggctgaggatggagccgcccccagccgactccaagcccgcagagggcagacgccaccctggactgctctccctgcccagctgggcctctctggcctattcctaccttccaggcccactgcactcctgtctgggaggcccttatgagggcagcccagcccccgcacccacccccaaccagagaagcacagatcttggggagctgccccacaagccccgctggccaccgagggctgcagccgctgcgctgccggcttctccccaccaccctgccacctccactgtgatgtatgtccgctccctcgtctgttcccccaggatctcgaagtgactccgggctgagcagtggggcggctgggggaggggtgacgattctcctcaggctttggccctgcaagcaaacccacatatctgctctgtatgtaataaatgtcttaacgtcgtagctgcctgttcctgggcccaaaycgaa

SEQ ID NO: 7411 - DNA, 5703 bp, Homo sapiens
gacgggcgcagcctcggcagcggcggcggcggagccctgaggcgacagcagctgcgggaggcgacgggctgcggcctgcggaacctgaggcagctggggagggccgggcgcgccggccggatagcgagccgcgctggcggcggcggtggccgcgatgatggagatccagatggacgagggcggcggcgtggtggtgtaccaggacgactactgctccggctcggtgatgtcggagcgggtgtcgggcctggcgggctccatctaccgcgagttcgagcgcctcatccactgctacgacgaggaggtggtcaaggagctcatgccgctggtggtgaacgtgctggagaacctagactcggtgctcagcgagaaccaggagcacgaggtggagctggagctgctgcgcgaggacaacgagcagctgctcacccagtacgagcgtgagaaggcgctgcgcaggcaggcggaggagaaattcattgagtttgaagatgctctggaacaagagaagaaagagctgcaaatccaggtggagcactaygagttccagacgcgccagctggagctgaaggccaagaactatgccgatcagatttcccggttggaggagcgggagtcggagatgaagaaggagtacaatgccctgcaccagcggcacacagagatgatacagacctacgtggagcacattgagaggtccaagatgcagcaggtcggaggaaacagccagaccgagagcagcctgccggggcggagcaggaaggagcgccccacctccctgaacgtgttccccctggctgacggcasggtacgtgcacagatcgggggcaagctcgtgcctgcgggggaccactggcacctgagtgacctcggccagctgcagtccagctccagctaccagtgtccacaggatgaaatgtcygagtcaggccagtcctcggcggccgccacacccagcaccacaggcaccaagtccaacacgcccacatcctccgtgccctcggccgccgtcacacccctcaacgagagcctgcagcccctgggggactatggcgtgggctccaagaacagcaagcgtgcccgggagaagcgcgacagccgcaacatggaagtacaggtcacccaggagatgcgcaacgtcagtataggcatgggcagcagtgacgagtggtctgatgttcaagacattattgactccacgccagagctggacatgtgtccagagacccgcctggaccgcacaggaagcagcccaacccagggcatcgtgaacaaagctttcggcatcaacaccgactccstgtaccatgagctgtcgacggcagggtctgaggtcatcggggatgtggacgaaggggccgacctcctaggtgaaacctccgcaccttctgtttcaggaatgggcaaagaagtggggaatctgctactggaaaactcacagcttctggaaaccaaaaacgccttgaatgtggtgaagaatgacctgattgccaaggtcgaccagctgtccggggagcaggaggtgctgaggggcgagttggaggctgctaagcaggccaaagtcaagctggaaaaccgtatcaaggagctggaagaggaactgaaaagagtgaagtccgaggccatcatcgcccgccgtgaacccaaagaagaggcggaggatgtaagcagctatctctgtacagaatcggacaaaatccccatggcccagcgccgccgcttcacgcgggtggagatggcccgtgtgctcatggagcggaaccagtacaaggagcggctgatggagctgcaggaggctgtgcggtggactgagatgatcagagcgtcccgagagcacccatccgtccaggagaagaagaagtcgaccatctggcagttcttcagccgcctcttcagctcttcctccagcccccctccggccaagcgcccctatccctcggtgaacatccactacaaktcacccaccactgccggcttcagccagcgccgcaaccatgccatgtgcccgatctcsgcaggcagccggcccctggaattcttccctgacgacgactgcacgtcctccgcccgtcgagagcagaagcgcgagcagtaccgccaggtgcgtgagcacgtgcgtaacgacgacggccgtctgcaggcctgcggctggagcctgcccgccaagtacaagcagctgagtcccaacgggggccaggaggacacgcggatgaagaacgtgccggtgccggtgtactgccgccctctggtggagaaggaccccaccatgaagctgtggtgtgcygcgggcgtcaacctgagcgggtggaggcccaatgaggacgacgctgggaatggagtcaagccagcgccaggccgcgaycccctgacctgcgaccgcgaaggagacggcgagcccaagagcgcccacrcgtctcccgagaagaagaaggccaaggagctccctgaaatggacgccacctccagccgggtgtggatcctgaccagcaccctgaccaccagcaaggtggtgatcatcgacgccaaccagccgggcacggtggtggaccagttcaccgtctgcaacgcgcacgtgctgtgcatctccagcatccccgcggccagcgacagcgactaccctcccggggagatgttcctggacagcgacgtgaacccagaggacccgggcgcagatggcgtgctggccggtatcaccctggtgggctgtgccacccgctgcaacgtgccgcggagcaactgctcctcccgaggggacaccccagtgctagacaaggggcagggggaggtggccaccatcgccaacgggaaggtcaacccgtcccagtccacagaggaggccacagaggccacggaggtgccagaccctgggcccagcgagccagagacagccacattgcggcccgggcctctcacagagcacgtcttcactgacccagccccgaccccgtcctctggcccccagcctggcagcgagaacgggccagagcctgacagcagcagcacacggccagagccagagcccagcggggaccccacgggagcaggcagcagtgctgcacccaccatgtggctgggagcccagaacggctggctctatgtgcactcggctgtggccaactggaagaagtgcctgcactccatcaagctgaaggattctgtgctgagcctggtgcatgtcaaaggccgtgtgctggtggctctggcggacgggaccctggccatcttccaccgtggtgaagatggccagtgggatctgagcaactatcacctaatggacctgggccacccgcaccactccatccgctgcatggctgttgtgtacgaccgcgtgtggtgtggctacaagaacaaggtgcacgtcatccagcccaagaccatgcagatagaggcgaccatgactccacagaagtcatttgacgcccacccgcggcgggagagycaggtgcggcagctggcgtggatcggcgatggcgtatgggtgtccatccgcctggactccaccctgaggctctaccatgcacacacgcaccagcatctacaggacgtggacattgagccctacgtcagcaagatgctaggcactggcaagctgggtttctccttcgtacgcatcacggccctgcttgtcgcgggcagccggctctgggtgggcaccggcaacggagtggtcatctccatccccctgacagagactgtggtcctgcaccgaggccagctcctggggctccgagccaataagacatcccccacctctggggagggcgcccgtcccgggggcatcatccacgtgtatggcgatgacagcagtgacagggcggccagcagcttcatcccctactgctccatggcccaggcccagctatgcttccatgggcaccgcgatgccgtgaagttctttgtctcggtgccagggaacgtgctggccaccctgaatggsagtgtgctggacagcccagccgagggccctgggccagctgcccctgcctcggaggtcgagggccagaagctgcggaacgtgctggtgctgagcggcggggagggctacatcgacttccgcattggagacggagaggacgacgagacggaggagggcgcaggggacatgagccaggtgaagcccgtgctgtccaaggcagagcgcagtcacatcatcgtgtggcaggtgtcctacacccccgagtgaagctgctgccctgcctggcccgacctgtacataggacccccgaccacctgacccccgcccggcccgcggggtagccagccaggcgccgccgcccctcttctaacctctcaacctgcagctttcacctgagtctggcccctccagcgggcagggagtgcggggatgcggatcagctgggaggaggaggggaggggwrcttccacccgaggggaagatgctctcgggacagtttcccgggcagctcctggccagcttccagcccagagtcctcaagtccagggcaccttgggcccagcgcaggcagaatccgaggtggtcctggctctaccctgggcctcctactccccagcacccctggaggaggcaggggctccccgccgccgaggctgcctgccctgggcccacctctgcatgctgctcatggggccaccctgcctcctgggccctcactctgcctaggggagctgggccaggcactagcctttgcccagggaggtgggcctcaggctgcccaggtgcctgcaccccagccggccttctctggggcctccccgtcgtcaagcctctatcctgtctgtccccaccccagctgtcccctgcccagggarctggcataaaagcacgaggcccggctccctggggcagctgcttgagaacagagactgctaccccatcctgcccatgcaggcaggctcttgccagccccgttctgacccgtgtccccccaggctctgcctgggcagaagactcaccttggaggagtgggccctggagtcctgtccctcccagaagcccccagggtgggatttctcaggctgccagggcaggcccaggcctcaggaagaaggggaggcccctggcctctccgggatcagtcctaggacacaggctcagcctcaggttgatgggggatgatgtgctcccggggcctgcctcctgcacggggctccacggagcccagctcccagacacgctactaagtgcctagggttgcccgctgtggcctgctcccagggagcaacagagaggccaccaagcagaggcccgtggggctgaggatggagccgcccccagccgactccaagcccgcagagggcagacgccaccctggactgctctccctgcccagctgggcctctctggcctattcctaccttccaggcccactgcactcctgtctgggaggcccttatgagggcagcccagcccccgcacccacccccaaccagagaagcacagatcttggggagctgccccacaagccccgctggccaccgagggctgcagccgctgcgctgccggcttctccccaccaccctgccacctccactgtgatgtatgtccgctccctcgtctgttcccccaggatctcgaagtgactccgggctgagcagtggggcggctgggggaggggtgacgattctcctcaggctttggccctgcaagcaaacccacatatctgctctgtatgtaataaatgtcttaacgtcgtagctgcctgttcctgggcccaaaycgaa

SEQ ID NO: 7412 - DNA, 3031 bp, Homo sapiens
atgagagggcggggccgcatctatggccccgccccggccctttgtgacgcaggacaacgcctgccacgcgtcggaactcggccgcgggacatccacggggcgcgagtgacacgcgggagggagagcagtgttctgctggagccgatgccaaaaaccatgcatttcttattcagattcattgttttcttttatctgtggggcctttttactgctcagagacaaaagaaagaggagagcaccgaagaagtgaaaatagaagttttgcatcgtccagaaaactgctctaaracaagcaagaagggagacctactaaatgcccattatgacggctacctggctaaagacggctcgaaattctactgcagccggacacaaaatgaaggccaccccaaatggtttgttcttggtgttgggcaagtcataaaaggyctagacattgctatgacagatatgtgccctggagaaaagcgaaaagtagttatacccccttcatttgcatacggaaaggaaggctatggtagtacttgaagaagtctttcttctgcaaaatatccttgtctcatgtcacagaacaaccctgcatgtcttgaaatgcatgtgacttgttagtgcttaaataacaatacatgcgcagaaggcaagattccaccggatgctacattgatttttgagattgaactttatgctgtgaccaaaggaccacggagcattgagacatttaaacaaatagacatggacaatgacaggcagctctctaaagccgagataaacctctacttgcaaagggaatttgaaaaagatgagaagccacgtgacaagtcatatcaggatgcagttttagaagatatttttaagaagaatgaccatgatggtgatggcttcatttctcccaaggaatacaatgtataccaacacgatgaactatagcatatttgtatttctactttttttttttagctatttactgtactttatgtataaaacaaagtcacttttctccaagttgtatttgctatttttcccctatgagaagatattttgatctccccaatacattgattttggtataataaatgtgaggctgttttgcaaacttaacttgcaggaatggtatgactgtgtttcctactgctttattctgtaaacaagaattgtagcaccatgaaacagacctctgggtcccagtgggcattttttcccctttcaggatgtaggaggacatgtatagtatgtcaaaaactgcaagcttttcccaactttaaccttaccagcatgttaatatccagtttttttatagtttaaaagttaaagtgcctcatattttgaaaatatccattaaggacccaggaattagcatttcacttgtttatacatttttataacattatgaagacgatataaaaatcctagaactgaagagtcttcctttggtatatgtgcaggaagatagttgtatatctctgttccacaaagaacgcaacacagtctctaaactttttggtgtaagcttctagccttgggtattttccagtggggaatgtttaaaaatatttgaccaaaccaaagactttttgcctcttatagcaagcataaagactgtactgcctggcttttgtattccttcagacattattgtaaatgtgcaactcctcttccctcttgtaaacctttataagatgtctgccaccccaagcttttgtcttgatagttttaaattgatgccatgaaatttcttagttttcgttccctttctctagttatctctttccttatgtcacctcatttcccatcattcttgtcactaatgatgaatgatcattacaaattggtatgctgtcaaattttgataaatgtgccaaacaaaggaggatatacagtgccatggcaattttgtgtcatggtcaagttatgatatcatatgacttgagaatagtatgtaagagatgctgtagaagatcacgttggtaccaaagaaagggcacatgtctatcggaacatagattttgcatactgcatggtatggtcaggctttgtgtccacacccaaatctcatcttgaaattataatccccataatttccataatccccacatgtcaatggagagaccaggtggaggtaactgaatcatgggggtggttttccccgtgctgttctcatgcaatctgatggttttataagtgtttggtagttcctcttgcattcattctcccacccgccaccttgtgaagaaagtccttgcttccccgccttccaccatgattgtaagcttcctgaggcctccccagccatggggaaccatgagtcaatttaacctctttcctttacaaattacccagtctggggcagttctttatagcagtgtgaaaatggactactacactgcatatataggaaagtatggtcagacagtaaatagctctgttcaaaataattgagttccaaacaagtaaagttttttctaccttctgaaacttgctctttccaaaccattgttcatcctttaacttctttacactatcaaaaattctatttaaaaatagagggctttcagatgagtacatacaaaaacaaacaaaagtatacataggggtaacacaaccatgagattagtaaataatacatatggctagcacataatttgacaccttataaaacaagaatctgtactatcttttccttcctcccaatatttcttcatttctatgctcaattttctaatactttttcacatgcttaatcatttactctttcatcgccttccctcaaaaaaacctgctccgttgaagtaaactaagtaactcaatattctttattttggtttggaacctgtctcaattttttgtatccatattaagaagtcaccctataatctaaactttgtaattctaatttttttgtcccattatcatacaaagtgcttttaaacttgtttttaaaaaatgacagataatgccacatgaataggaagatgattcattctaaaacttgtatttacataattaaaaataaatttataatcattctacatac

SEQ ID NO: 7413 - DNA, 852 bp, Homo sapiens
atgagagggcggggccgcatctatggccccgccccggccctttgtgacgcaggacaacgcctgccacgcgtcggaactcggccgcgggacatccacggggcgcgagtgacacgcgggagggagagcagtgttctgctggagccgatgccaaaaaccatgcatttcttattcagattcattgttttcttttatctgtggggcctttttactgctcagagacaaaagaaagaggagagcaccgaagaagtgaaaatagaagttttgcatcgtccagaaaactgctctaaracaagcaagaagggagacctactaaatgcccattatgacggctacctggctaaagacggctcgaaattctactgcagccggacacaaaatgaaggccaccccaaatggtttgttcttggtgttgggcaagtcataaaaggyctagacattgctatgacagatatgtgccctggagaaaagcgaaaagtagttatacccccttcatttgcatacggaaaggaaggctatggtagtacttgaagaagtctttcttctgcaaaatatccttgtctcatgtcacagaacaaccctgcatgtcttgaaatgcatgtgacttgttagtgcttaaataacaatacatgcgaaggcaagattccaccggatgctacattgatttttgagattgaactttatgctgtgaccaaaggaccacggagcattgagacatttaaacaaatagacatggacaatgacaggcagctctctaaagccgagagtgaatagcagctgcagatgaattcgcatagtacccaagagctcagcctatgcacacagaccactcattatcacaggcacaccaagagc

SEQ ID NO: 7414 - DNA, 889 bp, Homo sapiens
atgagagggcggggccgcatctatggccccgccccggccctttgtgacgcaggacaacgcctgccacgcgtcggaactcggccgcgggacatccacggggcgcgagtgacacgcgggagggagagcagtgttctgctggagccgatgccaaaaaccatgcatttcttattcagattcattgttttcttttatctgtggggcctttttactgctcagagacaaaagaaagaggagagcaccgaagaagtgaaaatagaagttttgcatcgtccagaaaactgctctaaracaagcaagaagggagacctactaaatgcccattatgacggctacctggctaaagacggctcgaaattctactgcagccggacacaaaatgaaggccaccccaaatggtttgttcttggtgttgggcaagtcataaaaggyctagacattgctatgacagatatgtgccctggagaaaagcgaaaagtagttatacccccttcatttgcatacggaaaggaaggctatgcagaaggcaagattccaccggatgctacattgatttttgagattgaactttatgctgtgaccaaaggaccacggagcattgagacatttaaacaaatagacatggacaatgacaggcagctctctaaagccgagataaacctctacttgcaaagggaatttgaaaaagatgagaagccacgtgacaagtcatatcaggatgcagttttagaagatatttttaagaagaatgaccatgatggtgatggcttcatttctcccaaggaatacaatgtataccaacacgatgaactatatttctccaagttgtatttgctatttttcccctatgagaagatattttgatctccccaatacattgattttggtataa

SEQ ID NO: 7415 - DNA, 2917 bp, Homo sapiens
atgagagggcggggccgcatctatggccccgccccggccctttgtgacgcaggacaacgcctgccacgcgtcggaactcggccgcgggacatccacggggcgcgagtgacacgcgggagggagagcagtgttctgctggagccgatgccaaaaaccatgcatttcttattcagattcattgttttcttttatctgtggggcctttttactgctcagagacaaaagaaagaggagagcaccgaagaagtgaaaatagaagttttgcatcgtccagaaaactgctctaaracaagcaagaagggagacctactaaatgcccattatgacggctacctggctaaagacggctcgaaattctactgcagccggacacaaaatgaaggccaccccaaatggtttgttcttggtgttgggcaagtcataaaaggyctagacattgctatgacagatatgtgccctggagaaaagcgaaaagtagttatacccccttcatttgcatacggaaaggaaggctatgcagaaggcaagattccaccggatgctacattgatttttgagattgaactttatgctgtgaccaaaggaccacggagcattgagacatttaaacaaatagacatggacaatgacaggcagctctctaaagccgagataaacctctacttgcaaagggaatttgaaaaagatgagaagccacgtgacaagtcatatcaggatgcagttttagaagatatttttaagaagaatgaccatgatggtgatggcttcatttctcccaaggaatacaatgtataccaacacgatgaactatagcatatttgtatttctactttttttttttagctatttactgtactttatgtataaaacaaagtcacttttctccaagttgtatttgctatttttcccctatgagaagatattttgatctccccaatacattgattttggtataataaatgtgaggctgttttgcaaacttaacttgcaggaatggtatgactgtgtttcctactgctttattctgtaaacaagaattgtagcaccatgaaacagacctctgggtcccagtgggcattttttcccctttcaggatgtaggaggacatgtatagtatgtcaaaaactgcaagcttttcccaactttaaccttaccagcatgttaatatccagtttttttatagtttaaaagttaaagtgcctcatattttgaaaatatccattaaggacccaggaattagcatttcacttgtttatacatttttataacattatgaagacgatataaaaatcctagaactgaagagtcttcctttggtatatgtgcaggaagatagttgtatatctctgttccacaaagaacgcaacacagtctctaaactttttggtgtaagcttctagccttgggtattttccagtggggaatgtttaaaaatatttgaccaaaccaaagactttttgcctcttatagcaagcataaagactgtactgcctggcttttgtattccttcagacattattgtaaatgtgcaactcctcttccctcttgtaaacctttataagatgtctgccaccccaagcttttgtcttgatagttttaaattgatgccatgaaatttcttagttttcgttccctttctctagttatctctttccttatgtcacctcatttcccatcattcttgtcactaatgatgaatgatcattacaaattggtatgctgtcaaattttgataaatgtgccaaacaaaggaggatatacagtgccatggcaattttgtgtcatggtcaagttatgatatcatatgacttgagaatagtatgtaagagatgctgtagaagatcacgttggtaccaaagaaagggcacatgtctatcggaacatagattttgcatactgcatggtatggtcaggctttgtgtccacacccaaatctcatcttgaaattataatccccataatttccataatccccacatgtcaatggagagaccaggtggaggtaactgaatcatgggggtggttttccccgtgctgttctcatgcaatctgatggttttataagtgtttggtagttcctcttgcattcattctcccacccgccaccttgtgaagaaagtccttgcttccccgccttccaccatgattgtaagcttcctgaggcctccccagccatggggaaccatgagtcaatttaacctctttcctttacaaattacccagtctggggcagttctttatagcagtgtgaaaatggactactacactgcatatataggaaagtatggtcagacagtaaatagctctgttcaaaataattgagttccaaacaagtaaagttttttctaccttctgaaacttgctctttccaaaccattgttcatcctttaacttctttacactatcaaaaattctatttaaaaatagagggctttcagatgagtacatacaaaaacaaacaaaagtatacataggggtaacacaaccatgagattagtaaataatacatatggctagcacataatttgacaccttataaaacaagaatctgtactatcttttccttcctcccaatatttcttcatttctatgctcaattttctaatactttttcacatgcttaatcatttactctttcatcgccttccctcaaaaaaacctgctccgttgaagtaaactaagtaactcaatattctttattttggtttggaacctgtctcaattttttgtatccatattaagaagtcaccctataatctaaactttgtaattctaatttttttgtcccattatcatacaaagtgcttttaaacttgtttttaaaaaatgacagataatgccacatgaataggaagatgattcattctaaaacttgtatttacataattaaaaataaatttataatcattctacatac

SEQ ID NO: 7416 - DNA, 999 bp, Homo sapiens
atgagagggcggggccgcatctatggccccgccccggccctttgtgacgcaggacaacgcctgccacgcgtcggaactcggccgcgggacatccacggggcgcgagtgacacgcgggagggagagcagtgttctgctggagccgatgccaaaaaccatgcatttcttattcagattcattgttttcttttatctgtggggcctttttactgctcagagacaaaagaaagaggagagcaccgaagaagtgaaaatagaagttttgcatcgtccagaaaactgctctaaracaagcaagaagggagacctactaaatgcccattatgacggctacctggctaaagacggctcgaaattctactgcagccggacacaaaatgaaggccaccccaaatggtttgttcttggtgttgggcaagtcataaaaggyctagacattgctatgacagatatgtgccctggagaaaagcgaaaagtagttatacccccttcatttgcatacggaaaggaaggctatgtacttgaagaagtctttcttctgcaaaatatccttgtctcatgtcacagaacaaccctgcatgtcttgaaatgcatgtgacttgttagtgcttaaataacaatacatgcgcagaaggcaagattccaccggatgctacattgatttttgagattgaactttatgctgtgaccaaaggaccacggagcattgagacatttaaacaaatagacatggacaatgacaggcagctctctaaagccgagataaacctctacttgcaaagggaatttgaaaaagatgagaagccacgtgacaagtcatatcaggatgcagttttagaagatatttttaagaagaatgaccatgatggtgatggcttcatttctcccaaggaatacaatgtataccaacacgatgaactatatttctccaagttgtatttgctatttttcccctatgagaagatattttgatctccccaatacattgattttggtataa

SEQ ID NO: 7417 - DNA, 2067 bp, Homo sapiens
tcacgcgctccgggcctccaagagggcctccaagagggccaatcggaagggcaagcttcgagatgctgcgtgatcacgtgggaggagatgagctacttgaagaccaattagagtccgggaagcgcggcggggcctccagaccggggcgggcttaagggtgacatctgcgctttaaagggtccgggtcagctgactcccgactctgkggagtctagctgccagggtcgcggcagctgcggggagagatgactggggagcgacccagcacggcgctcccggacagacgctgggggccgcggattctgggcttctggggaggctgtagggtttgrgtgtttgccgcgatcttcctgctgctgtctctggcagcctcctggtccaaggctgagaacgacttcggtctggtgcagccgctggtgaccatggagcaactgctgtgggtgagcgkgagacagatcggctcagtggacaccttccgcatcccgctcatcacagccactccgcgggscactcttckcgcctttgctgaggcgaggaaaatgtcctcatccgatgagggggccaagttcatcgccctgcggaggtccatggaccagggcagcacatggtctcctacagcgttcattgtcaatgatggggatgtccccgatgggctgaaccttggggcagtagtgagcgatgttgagacaggagtagtatttcttttctactccctttgtgctcacaaggccggctgccaggtggcctctaccatgttggtatggagcaaggatgatggtgtttcctggrgcacaccccggaatctctccctggatattggcactgaagtgtttgcccctggaccgggctctggtattcagaaacagcgggagccacggaagggccgcctcatcgtgtgtggccatgggacgctggagcgggacrgagtcttctgtcwcctcagcgatgatcatggtgcctcctggcgctacrgaagtggggtcagcggcatcccctacggtcagcccaagcaggaaaatgattwcaatcctgatgaatgccagccctatgagytcccagatggctcagtcgtcatcaatgccygaaaccagaacaactaccactgccactgccgaattgtcctccgcagctatgatgyctgtgatacactaaggccccgtgatgtgaccttcgaccctgagctcgtggaccctktggtagctgcaggagctgtagtcaccagctccrgcattgtcttcttctccaaccmagcacatccagagttccgagtgaacctgaccctgcgatggagcttcagcaatggtacctcatggcggaaagagacagtccagcyatggccaggccccagtggctrttcatccctggcaaccctgkagggcagcatggatggagaggagcaggccccccagctctacgtcctgtatgagaaaggccggaaccactacacagagagcatctccgtggccaaaatcagtgtctatgggacactctgagctgtgccactgccacaggggtattctgccttcaggactctgccttcaggaacacrggtctgtagagggtctgctggagacgcctgaaagacagttccatcttcctttagactccagccttggcaaaatcaccttccctttaccagggaaatcacttcctttaggactgaaagctaggcgtcctctcccacaaaaaagtcctgccctcawctgagaatactgtctttccatatggctaagtgtggccccaccaccctctctgccctcccgggacattgattggtcctrtcttgggcaggtctagtgagctgtagaattgaatcaatgtgaactcaggkaactggggaaggctgagcctcctctttggtgttgcggtaagataaccgacagggctggtgaaagtccccagatggcaggatatttggtttcagagtaaggactrggtgcaccmccatgactgactatcaatcaaaatgtttgtaacttaaaatttttaatgaaggataatgaatatttgtagagtctctatggttctgtcaatgcacatcttcgtgtctgttttcctcatgtatcc

SEQ ID NO: 7418 - DNA, 1804 bp, Homo sapiens
tcacgcgctccgggcctccaagagggcctccaagagggccaatcggaagggcaagcttcgagatgctgcgtgatcacgtgggaggagatgagctacttgaagaccaattagagtccgggaagcgcggcggggcctccagaccggggcgggcttaagggtgacatctgcgctttaaagggtccgggtcagctgactcccgactctgkggagtctagctgccagggtcgcggcagctgcggggagagatgactggggagcgacccagcacggcgctcccggacagacgctgggggccgcggattctgggcttctggggaggctgtagggtttgrgtgtttgccgcgatcttcctgctgctgtctctggcagcctcctggtccaaggctgagaacgacttcggtctggtgcagccgctggtgaccatggagcaactgctgtgggtgagcgkgagacagatcggctcagtggacaccttccgcatcccgctcatcacagccactccgcgggscactcttckcgcctttgctgaggcgaggaaaatgtcctcatccgatgagggggccaagttcatcgccctgcggaggtccatggaccaggaaacagcgggagccacggaagggccgcctcatcgtgtgtggccatgggacgctggagcgggacrgagtcttctgtcwcctcagcgatgatcatggtgcctcctggcgctacrgaagtggggtcagcggcatcccctacggtcagcccaagcaggaaaatgattwcaatcctgatgaatgccagccctatgagytcccagatggctcagtcgtcatcaatgccygaaaccagaacaactaccactgccactgccgaattgtcctccgcagctatgatgyctgtgatacactaaggccccgtgatgtgaccttcgaccctgagctcgtggaccctktggtagctgcaggagctgtagtcaccagctccrgcattgtcttcttctccaaccmagcacatccagagttccgagtgaacctgaccctgcgatggagcttcagcaatggtacctcatggcggaaagagacagtccagcyatggccaggccccagtggctrttcatccctggcaaccctgkagggcagcatggatggagaggagcaggccccccagctctacgtcctgtatgagaaaggccggaaccactacacagagagcatctccgtggccaaaatcagtgtctatgggacactctgagctgtgccactgccacaggggtattctgccttcaggactctgccttcaggaacacrggtctgtagagggtctgctggagacgcctgaaagacagttccatcttcctttagactccagccttggcaaaatcaccttccctttaccagggaaatcacttcctttaggactgaaagctaggcgtcctctcccacaaaaaagtcctgccctcawctgagaatactgtctttccatatggctaagtgtggccccaccaccctctctgccctcccgggacattgattggtcctrtcttgggcaggtctagtgagctgtagaattgaatcaatgtgaactcaggkaactggggaaggctgagcctcctctttggtgttgcggtaagataaccgacagggctggtgaaagtccccagatggcaggatatttggtttcagagtaaggactrggtgcaccmccatgactgactatcaatcaaaatgtttgtaacttaaaatttttaatgaaggataatgaatatttgtagagtctctatggttctgtcaatgcacatcttcgtgtctgttttcctcatgtatcc

SEQ ID NO: 7419 - DNA, 4325 bp, Homo sapiens
cgaggacccgcacaaggtgcccgtggcggcgcctgacgggagcgtcgtgctcaggggtgtcctctcgtcctgcgtccgcgcccagcgccccgcgccccgcgctgttcctcgtgagaccggcgggcggcgagccgcgcggcccccggggcagtgtcggacacggcgggcgcgcactcgcaggcggggcacggccgcccccgccaggacccgcaggcccggaaacgctccctgtcacaaaggggggaacacgtgggcgccggctgccggggcggcgatcttagggaactagggtcacctggagagccgcccaccgtctctgcccgctcgactcctccgcccgggccgctcggccggtccagccgcggccggcgcctggctgtgaggtggattcccggcccagtctgaccatctccctccagtttttccacttcgttcggaccttctcataactatgtccaccctctacgtctcccctcacccagatgccttccccagcctccgagccctcatagccgctcgctatggggaggctggggagggtcccggatggggaggagcccacccccgcatctgtctccagccacccccgactagcaggactmsctttcccccaccccgcctgccggccctggagcaggggcccggtgggctctgggtgtggggggccacggctgtggcccagctgctgtggccagcaggcctggggggcccagggggcagccgggcggctgtccttgtccaacagtgggtcagttacgccgacacggagttaataccagctgcctgtggagcaacgctgccggccctgggactccgaagctcggcccaggacccccaggctgtgctgggggccctgggcagggccctgagccccttggaggagtggcttcggctgcacacctacttggccggggaggcccccactctggctgacctggcggctgtcacagccttgctgctgcctttccgatacgtcctagacccacctgccygccggatctggaataatgtgactcgctggtttgtcacgtgtgtccggcagccagaattccgagccgtgctaggagaagtggttctatactcaggagccaggcctctctctcatcagccaggcccygaggctcctgccctcccaaagacagctgctcagctcaagaaagaggcaaagaaacgggagaagctagagaaattccaacagaagcagaagatccaacagcagcagccacctccaggggagaagaaaccaaaaccagagaagagggagaaacgggatcctggggtcattacctatgacctcccaaccccacccggggaaaagaaagatgtcagtggccccatgcccgactcctacagccctcggtatgtggaggctgcctggtacccttggtgggagcagcagggcttcttcaagccagagtatgggcgtcctaatgtgtcagcagcaaatccccgaggtgtcttcatgatgtgcatcccaccccccaatgtgacaggctccctgcacctgggccatgcactsaccaacgccatccaggactccctgactcgatggcaccgcatgcgtggggagaccaccctgtggaaccctggctgtgaccatgcaggtattgccacccaggtggtggtggagaagaagctrtggcgtgagcagggactgagccggcaccagctgggccgcgaggcctttctacaggaagtctggaagtggaaggaggagaaaggtgaccggatttaccaccagttgaagaagcttggcagctccttggactgggatcgagcctgtttcaccatggaccctaaactctcagcagctgtgacagaggcctttgtccggcttcacgaggaaggcatcatctatcgcagtacccgccttgttaactggtcctgcaccctcaactccgccatctctgacattgaggtggataagaaggagctgacaggtcgcaccctgctctccgtgcctggctacaaggagaaggtggagttcggggtcctcgtgtcctttgcctataaggtccaaggctcagatagcgacgaggaggtggtggtggcaacaactcggatcgagacaatgctgggagatgtggctgtagctgtgcaccccaaagataccagataccagcacctgaaggggaagaacgtgatccacccattcctgtctcggagccttcccattgtcttcgatgaatttgtggacatggactttggcacaggtgctgtgaagatcacccccgcacatgaccaaaatgactatgaagttgggcagcggcacgggctggaggccatcagcatcatggactcccggggggccctcatcartgtgcctycgcctttcctgggcctgcccaggtttgaggccaggaaagcggtgctggtggcgctgaaggagcggggactgttccgtggcattgaggacaaccccatggtggtgccactttgcaaccggtcgaaggacgtggtagagcctctgctgcggccgcagtggtacgttcgctgcggggagatggcccaggctgccagcgccgctgtgactcggggtgacctccgcatcctgcctgaggcccatcagcgcacatggcatgcctggatggacaacatccgggagtggtgcatttccaggcagctgtggtggggccatcgcatcccagcctactttgtcactgtcagtgacccagcggtgccccctggggaggaccctgatgggcggtactgggtgagtggacgcaatgaggcggaggcccgggagaaggcagccaaggagttcggagtgtcccctgacaagatcagtctccagcaagatgaggatgtattggatacctggttctcctctggcctcttccccttatccattttgggctggcccaaccagtcagaagacctgagtgtgttctaccccgggacactgctggagaccggtcatgacatcctcttcttctgggtggcccggatggtcatgctgggcctgaagctcacgggcaggctgccctttagagaggtctacctccatgccatcgtgcgagatgctcacggccggaagatgagcaagtctctaggcaatgtcatcgatcccctggaygtcatctatggaatctccctgcagggcctccacaaccagctgctgaacagcaacctggatcccagcgaggtggagaaggccaaagaagggcagaaagctgacttcccagcggggattcctgaatgtggcaccgatgctctccggtttggattatgtgcctacatgtcccagggtcgtgacatcaacctggatgtgaaccggatactgggttaccgccacttctgcaacaagctctggaatgccaccaagtttgcccttcgtggccttgggaagggttttgtgccctcacccacctcccagcccggaggccatgagagcctggtggaccgctggatccgcagccgcctgacagaggctgtgaggctcagcaatcaaggcttccaggcctacgacttccyggccgtcaccactgcccagtacagcttctggctctatgagctctgtgatgtctacttggagtgcctgaaacctgtactgaatggggtggaccaggtggcagctgagtgtgcccgccagaccctgtacacttgcctggacgttggcctgcggctgctctcacccttcatgcccttcgtgacggaggagctgttccagaggctgccccggaggatgccgcaagctccccctagcctctgtgttaccccctacccggagccctcagagtgctcctggaaggaccccgaggcagaagccgcccttgagctggcgctaagcatcacgcgagccgtgcgctccctgcgggccgactacaacctcacccggatccggcctgactgtttcctggaagtggcggatgaggccacgggcgccctggcatcggcggtgtcgggctaygtgcaggccctggccagcgcaggtgtggtggctgttctggccctgggggctcccgccccccagggttgcgctgtggctctggcttctgatcgctgctccatccacctgcagcttcaggggctgrtggaccctgcacgggagctgggcaagctgcaagccaagcgagttgaggcccagcggcaggcccagcgtctgcgggaacgccgtgctgcctcgggctatcctgtcaaggtgccgctcgaagtccaggaggcagatgaagccaagctccaacagacagaagcagagctcaggaaggtggatgaggccatcgccctattccagaagatgctgtgatccaccacccagcttcacccctcacccccagcggctcaccatggggatggcagcaataaaatattttcccacaaaatcc

SEQ ID NO: 7420 - DNA, 4620 bp, Homo sapiens
cgaggacccgcacaaggtgcccgtggcggcgcctgacgggagcgtcgtgctcaggggtgtcctctcgtcctgcgtccgcgcccagcgccccgcgccccgcgctgttcctcgtgagaccggcgggcggcgagccgcgcggcccccggggcagtgtcggacacggcgggcgcgcactcgcaggcggggcacggccgcccccgccaggacccgcaggcccggaaacgctccctgtcacaaaggggggaacacgtgggcgccggctgccggggcggcgatcttagggaactagggtcacctggagagccgcccaccgtctctgcccgctcgactcctccgcccgggccgctcggccggtccagccgcggccggcgcctggctgtgaggtggattcccggcccagtctgaccatctccctccagtacgtacacgcggctcgaacccgcatccaaccagacgccgacccgctcctgagagccttccacactccccgaagccccgcgatggtggatagttcctcttccccaggaactccccactgacactgcccctctgagagccaggtcctcggctcctgacagcctgcctggtcagaccctcagtcctatgggactcgggtgtctgcggcgaaggagctcccgtgagggtcccctctctactcaaacataggacccacctcgatcccgcagtcttcccctgtctctctttctccttaggtttttccacttcgttcggaccttctcataactatgtccaccctctacgtctcccctcacccagatgccttccccagcctccgagccctcatagccgctcgctatggggaggctggggagggtcccggatggggaggagcccacccccgcatctgtctccagccacccccgactagcaggactmsctttcccccaccccgcctgccggccctggagcaggggcccggtgggctctgggtgtggggggccacggctgtggcccagctgctgtggccagcaggcctggggggcccagggggcagccgggcggctgtccttgtccaacagtgggtcagttacgccgacacggagttaataccagctgcctgtggagcaacgctgccggccctgggactccgaagctcggcccaggacccccaggctgtgctgggggccctgggcagggccctgagccccttggaggagtggcttcggctgcacacctacttggccggggaggcccccactctggctgacctggcggctgtcacagccttgctgctgcctttccgatacgtcctagacccacctgccygccggatctggaataatgtgactcgctggtttgtcacgtgtgtccggcagccagaattccgagccgtgctaggagaagtggttctatactcaggagccaggcctctctctcatcagccaggcccygaggctcctgccctcccaaagacagctgctcagctcaagaaagaggcaaagaaacgggagaagctagagaaattccaacagaagcagaagatccaacagcagcagccacctccaggggagaagaaaccaaaaccagagaagagggagaaacgggatcctggggtcattacctatgacctcccaaccccacccggggaaaagaaagatgtcagtggccccatgcccgactcctacagccctcggtatgtggaggctgcctggtacccttggtgggagcagcagggcttcttcaagccagagtatgggcgtcctaatgtgtcagcagcaaatccccgaggtgtcttcatgatgtgcatcccaccccccaatgtgacaggctccctgcacctgggccatgcactsaccaacgccatccaggactccctgactcgatggcaccgcatgcgtggggagaccaccctgtggaaccctggctgtgaccatgcaggtattgccacccaggtggtggtggagaagaagctrtggcgtgagcagggactgagccggcaccagctgggccgcgaggcctttctacaggaagtctggaagtggaaggaggagaaaggtgaccggatttaccaccagttgaagaagcttggcagctccttggactgggatcgagcctgtttcaccatggaccctaaactctcagcagctgtgacagaggcctttgtccggcttcacgaggaaggcatcatctatcgcagtacccgccttgttaactggtcctgcaccctcaactccgccatctctgacattgaggtggataagaaggagctgacaggtcgcaccctgctctccgtgcctggctacaaggagaaggtggagttcggggtcctcgtgtcctttgcctataaggtccaaggctcagatagcgacgaggaggtggtggtggcaacaactcggatcgagacaatgctgggagatgtggctgtagctgtgcaccccaaagataccagataccagcacctgaaggggaagaacgtgatccacccattcctgtctcggagccttcccattgtcttcgatgaatttgtggacatggactttggcacaggtgctgtgaagatcacccccgcacatgaccaaaatgactatgaagttgggcagcggcacgggctggaggccatcagcatcatggactcccggggggccctcatcartgtgcctycgcctttcctgggcctgcccaggtttgaggccaggaaagcggtgctggtggcgctgaaggagcggggactgttccgtggcattgaggacaaccccatggtggtgccactttgcaaccggtcgaaggacgtggtagagcctctgctgcggccgcagtggtacgttcgctgcggggagatggcccaggctgccagcgccgctgtgactcggggtgacctccgcatcctgcctgaggcccatcagcgcacatggcatgcctggatggacaacatccgggagtggtgcatttccaggcagctgtggtggggccatcgcatcccagcctactttgtcactgtcagtgacccagcggtgccccctggggaggaccctgatgggcggtactgggtgagtggacgcaatgaggcggaggcccgggagaaggcagccaaggagttcggagtgtcccctgacaagatcagtctccagcaagatgaggatgtattggatacctggttctcctctggcctcttccccttatccattttgggctggcccaaccagtcagaagacctgagtgtgttctaccccgggacactgctggagaccggtcatgacatcctcttcttctgggtggcccggatggtcatgctgggcctgaagctcacgggcaggctgccctttagagaggtctacctccatgccatcgtgcgagatgctcacggccggaagatgagcaagtctctaggcaatgtcatcgatcccctggaygtcatctatggaatctccctgcagggcctccacaaccagctgctgaacagcaacctggatcccagcgaggtggagaaggccaaagaagggcagaaagctgacttcccagcggggattcctgaatgtggcaccgatgctctccggtttggattatgtgcctacatgtcccagggtcgtgacatcaacctggatgtgaaccggatactgggttaccgccacttctgcaacaagctctggaatgccaccaagtttgcccttcgtggccttgggaagggttttgtgccctcacccacctcccagcccggaggccatgagagcctggtggaccgctggatccgcagccgcctgacagaggctgtgaggctcagcaatcaaggcttccaggcctacgacttccyggccgtcaccactgcccagtacagcttctggctctatgagctctgtgatgtctacttggagtgcctgaaacctgtactgaatggggtggaccaggtggcagctgagtgtgcccgccagaccctgtacacttgcctggacgttggcctgcggctgctctcacccttcatgcccttcgtgacggaggagctgttccagaggctgccccggaggatgccgcaagctccccctagcctctgtgttaccccctacccggagccctcagagtgctcctggaaggaccccgaggcagaagccgcccttgagctggcgctaagcatcacgcgagccgtgcgctccctgcgggccgactacaacctcacccggatccggcctgactgtttcctggaagtggcggatgaggccacgggcgccctggcatcggcggtgtcgggctaygtgcaggccctggccagcgcaggtgtggtggctgttctggccctgggggctcccgccccccagggttgcgctgtggctctggcttctgatcgctgctccatccacctgcagcttcaggggctgrtggaccctgcacgggagctgggcaagctgcaagccaagcgagttgaggcccagcggcaggcccagcgtctgcgggaacgccgtgctgcctcgggctatcctgtcaaggtgccgctcgaagtccaggaggcagatgaagccaagctccaacagacagaagcagagctcaggaaggtggatgaggccatcgccctattccagaagatgctgtgatccaccacccagcttcacccctcacccccagcggctcaccatggggatggcagcaataaaatattttcccacaaaatcc

SEQ ID NO: 7421 - DNA, 1815 bp, Homo sapiens
tacagcccygccgagagcgtgaactatcgctgcggaggggcagacctggaccggtggaaggccgggcggaagtgcgcgcctggggccgccttggttaccgcgttttccgctcctcgctacgtcatcgttgtgagcccgctatcagcrgccagcgcgggcgcggccggagaccgtggggmccccggttgccgccccctcgggagccaccatgttggtgataccccccggactgagcgaggaagaggaggctctgcagaagaaattcaacaagctcaagaaaaagaaaaaggcattgctggctctgaagaagcaaagtagcagcagcacaaccagccaaggtggtgtcaaacgctcactatcagagcagcctgtcatggacacagccacagcaacagagcaggcaaagcagctggtgaagtcaggagccatcagtgccatcaaggctgagaccaagaactcaggcttcaagcgttctcgaacccttgaggggaagttaaaggaccccgagaagggaccagtccccactttccagccgttccagaggagcatatctgctgatgatgacctgcaagagtcatccagacgtccccagaggaaatctctgtatgagagctttgtgtcttctagtgatcgacttcgagaactaggaccagatggagaagaggcagagggcccaggggctggtgatggtccccctcgaagctttgactggggctatgaagaacgcagtggtgcccactcctcagcctcccctccccgaagccgcagccgggaccgcagccatgagaggaaccgggacagagaccgagatcgggagcgggatcgagaccgggatcgagacagagacagagagcgggacagggatcgggatcgrgatcgagatcgagaccgggaacgggacagggatcgggagcgggatcgagaccgagaccgagagggtcctttccgcaggtcggattcattccctgaacggcgagcccctaggaaagggaatactctctatgtatatgkagaagacatgacacccacccttctccgtggggccttctctccttttggaaacatcattgacctctccatggacccacccagaaactgtgccttcgtcacctatgaaaagatggagtcagcagatcaggccgttgctgaggttggaacttcccaaatctgttcttcccatcgcttctgctgttctcatgtgttctcctcaaaatactagatgccaggaagaagttggttcctcttgataaagaaagcctctccctattcacacagaaaaactcacattctcagattccttattcagtctcctcctaggatagcaactcctggaataacttctttggtttatctgtaatgttttcctccccatcctctgcctcccctcttctgcttcagctcaacgggacccaggtggagtctgtacagctcaaagtcaacatagcccgaaaacagcccatgctggatgccgctactggcaagtctgtctggggctccctcgctgtccagaacagccctaagggttgccaccgggacaagaggacccagattgtctacagtgatgacgtctacaaggaaaaccttgtggatggcttctagggaacagagctggattccttgtgcctcatatgccccaatgctggtctcagtaaaacactgaggtggaagcttacacatctccctcagcctctggtttttcascacttgggattggggttaarcctttaaaaacrgctgtcaggtttgatctcagtgtaacracatggccagtgcctgttccccactcccttgccccaaaaggatctggaacacagg

SEQ ID NO: 7422 - DNA, 1566 bp, Homo sapiens
tacagcccygccgagagcgtgaactatcgctgcggaggggcagacctggaccggtggaaggccgggcggaagtgcgcgcctggggccgccttggttaccgcgttttccgctcctcgctacgtcatcgttgtgagcccgctatcagcrgccagcgcgggcgcggccggagaccgtggggmccccggttgccgccccctcgggagccaccatgttggtgataccccccggactgagcgaggaagaggaggctctgcagaagaaattcaacaagctcaagaaaaagaaaaaggcattgctggctctgaagaagcaaagtagcagcagcacaaccagccaaggtggtgtcaaacgctcactatcagagcagcctgtcatggacacagccacagcaacagagcaggcaaagcagctggtgaagtcaggagccatcagtgccatcaaggctgagaccaagaactcaggcttcaagcgttctcgaacccttgaggggaagttaaaggaccccgagaagggaccagtccccactttccagccgttccagaggagcatatctgctgatgatgacctgcaagagtcatccagacgtccccagaggaaatctctgtatgagagctttgtgtcttctagtgatcgacttcgagaactaggaccagatggagaagaggcagagggcccaggggctggtgatggtccccctcgaagctttgactggggctatgaagaacgcagtggtgcccactcctcagcctcccctccccgaagccgcagccgggaccgcagccatgagaggaaccgggacagagaccgagatcgggagcgggatcgagaccgggatcgagacagagacagagagcgggacagggatcgggatcgrgatcgagatcgagaccgggaacgggacagggatcgggagcgggatcgagaccgagaccgagagggtcctttccgcaggtcggattcattccctgaacggcgagcccctaggaaagggaatactctctatgtatatgkagaagacatgacacccacccttctccgtggggccttctctccttttggaaacatcattgacctctccatggacccacccagaaactgtgccttcgtcacctatgaaaagatggagtcagcagatcaggccgttgctgagctcaacgggacccaggtggagtctgtacagctcaaagtcaacatagcccgaaaacagcccatgctggatgccgctactggcaagtctgtctggggctccctcgctgtccagaacagccctaagggttgccaccgggacaagaggacccagattgtctacagtgatgacgtctacaaggaaaaccttgtggatggcttctagggaacagagctggattccttgtgcctcatatgccccaatgctggtctcagtaaaacactgaggtggaagcttacacatctccctcagcctctggtttttcascacttgggattggggttaarcctttaaaaacrgctgtcaggtttgatctcagtgtaacracatggccagtgcctgttccccactcccttgccccaaaaggatctggaacacag

SEQ ID NO: 7423 - DNA, 1434 bp, Homo sapiens
tacagcccygccgagagcgtgaactatcgctgcggaggggcagacctggaccggtggaaggccgggcggaagtgcgcgcctggggccgccttggttaccgcgttttccgctcctcgctacgtcatcgttgtgagcccgctatcagcrgccagcgcgggcgcggccggagaccgtggggmccccggttgccgccccctcgggagccaccatgttggtgataccccccggactgagcgaggaagaggaggctctgcagaagaaattcaacaagctcaagaaaaagaaaaaggcattgctggctctgaagaagcaaagtagcagcagcacaaccagccaaggtggtgtcaaacgctcactatcagagcagcctgtcatggacacagccacagcaacagagcaggcaaagcagctggtgaagtcaggagccatcagtgccatcaaggctgagaccaagaactcaggcttcaagcgttctcgaacccttgaggggaagttaaaggaccccgagaagggaccagtccccactttccagccgttccagaggagcatatctgctgatgatgacctgcaagagtcatccagacgtccccagaggaaatctctgtatgagagtgatcgacttcgagaactaggaccagatggagaagaggcagagggcccaggggctggtgatggtccccctcgaagctttgactggggctatgaagaacgcagtggtgcccactcctcagcctcccctccccgaagccgcagccgggaccgcagccatgaggatcgggagcgggatcgagaccgagaccgagagggtcctttccgcaggtcggattcattccctgaacggcgagcccctaggaaagggaatactctctatgtatatgkagaagacatgacacccacccttctccgtggggccttctctccttttggaaacatcattgacctctccatggacccacccagaaactgtgccttcgtcacctatgaaaagatggagtcagcagatcaggccgttgctgagctcaacgggacccaggtggagtctgtacagctcaaagtcaacatagcccgaaaacagcccatgctggatgccgctactggcaagtctgtctggggctccctcgctgtccagaacagccctaagggttgccaccgggacaagaggacccagattgtctacagtgatgacgtctacaaggaaaaccttgtggatggcttctagggaacagagctggattccttgtgcctcatatgccccaatgctggtctcagtaaaacactgaggtggaagcttacacatctccctcagcctctggtttttcascacttgggattggggttaarcctttaaaaacrgctgtcaggtttgatctcagtgtaacracatggccagtgcctgttccccactcccttgccccaaaaggatctggaacacag

SEQ ID NO: 7424 - DNA, 4493 bp, Homo sapiens
cgtagcgcccgcagagcaaygcaaagaggaagaacagagaaacggctatgagaaaaagggccgaagagtgagaagcagagggccttacccgagggggcggcaaccggggkccccacggtctccggccgcgcccgcgctggcygctgatagcgggctcacaacgatgacgtagcgaggagcggaaaacgcggtaaccaaggcggccccaggcgcgcacttccgcccggccttccaccggtccaggtctgcccctccgcagcgatagttcacgctctcggcrgggctgtaccggaagttscctctacttccgcccgttccggggcggggcttacttcgcagcgactacttgccgcacttccgggctgccaggcagctgctgtggctccaggatgatggagacagagcgacttgtgctaccccctccagatcccctggacctaccccttcgggccgtggagctcggatgcacggggcactgggagctgctgaacttgcctggagctccagagagtagccttccccatggcctccctccttgtgccccagatctgcagcaagaagcagaacrgttgtttctgtcatccccagcctggctgcctctgcatggtgtggagcactcagcccgaaaatggcagaggaagacggatccctggtctcttttggctgtcctgggagccccagtcccatccgacctacaggcccaaagacacccaaccacaggccagatactgggttacaaagaggtcttgctggagaacacaaatctctcggcyacaacctccttgtctcttcgccggcctccagggccagcctcccagtccttatggggaaatccaactcrgtatcccttctggccaggggggatggatgaacccaccataacagatctgaacacacgggaggaggctgaggaggagatagactttgagaaagatcttcttactattccacctggtttcaagaaaggcatggactttgcaccaaaagattgtccaactccagctcctggactactaagccttagctgtmtgttggagcctctggatttgggtgggggtgacgaggatgagaatgaggcagtgggacagccaggaggtcccagaggggacactgtttcagcctctccctgcagtgctcccctggcccgagcaagcagcttggaagacctagtgttgaaggaagcgtccacagctgtatccaccccagaggccccagagcctccatctcaggagcagtgggccatccctgtggacgccacctcccctgttggtgatttctatcgcctcattccccagccagccttccagtgggcatttgagccagatgtgtttcagaaacaggccatcctgcacttggaayggcatgactctgtctttgtcgcagctcacacatctgcaggaaaaacagttgtggctgaatatgccattgcyctggcccagaaacacatgacacgcaccatctacacttcgcccatcaaggccctgagcaaccagaagttccgggacttccgaaacacattcggggatgtggggctgctcaccggggatgtacagctgcatccggaggcctcctgcctcatcatgaccacrgagatccttcgctccatgctgtacagtggctcagatgttattcgggacctggagtgggtcatctttgatgaggttcactatatcaacgatgtcgagcgtggggtcgtgtgggaggaggtgcttatcatgctacctgaccacgtttctatcatccttctgagtgccaccgtccccaacgcccttgagtttgctgactggattgggcggctgaagcgtcgtcagatctatgtgattagcactgtaacccgccccgtgcccctggagcactatcttttcacagggaacagctccaagacccagggggagctctttttgttgctggactcccgaggagccttccatacaaaagggtactatgcagctgtggaggccaagaaggagagaatgagcaaacacgcccagacctttggggccaagcagcccacacatcaggggggccctgcacaggaccgcggagtgtacctgtccctcctggcctccctccgcacacgtgcccagttgcccgtggtggtgttcaccttctcccggggccgctgtgatgagcaggcctcaggcctcacctcccttgacctcaccaccagttcggagaagagcgagatccacctcttcctgcagcgctgccttgctcgcctccgtggctctgaccgccagctgccccaggtcctgcacatgtcagagctcctgaatcgcggcctgggtgtgcaccatagcggcatcctgcccatcctcaaggagatcgtggagatgctcttcagccgtggcctggtcaaggtcttgtttgccacagagacctttgccatgggagtaaacatgcctgctcgtacagtagtgtttgactccatgcgcaaacacgatggctccaccttccgggacctgctccctggggagtatgtgcagatggcaggccgggcagggcggaggggcctggaccccacaggcaccgttatcctgctctgcaagggccgagtgcccgagatggcagacctgcaccgcatgatgatggggaagccrtcccagctgcagtcccagttccgcctcacgtacactatgatcctcaacttgctgcgagtggatgccctcagggtggaggacatgatgaagaggagcttctctgagtttccctcccgcaaagacagcaaggcccatgaacaggccctggctgaactgaccaagaggctgggagctttggaggagcctgacatgactggccaactggtcgacctgcctgaatattacagctggggggaggaactgacagagacccagcacatgatccagcgacgcatcatggagtctgtgaacgggctgaagtctctctcagcaggaagggtggtggttgtgaagaatcaggagcatcacaacgcattgggagtgatcctacaggtctcctcgaactccaccagcagagtattcacaaccctggtcttgtgtgataagcccttgtcccaggacccacagracagggggccagccactgcagaggtgccctatccagatgacctcgtgggattcaagctgttcctgcctgaagggccttgtgaccacaccrtggtcaagctccagccaggagatatggctgccatcaccaccaaggtgctccgggtgaatggggagaagatcttggaggacttcagcaagaggcagcagccaaaattcaagtcagagatgctagggaggcccttctcctccagaggggcacgtagaggcagggaggggcagtggtctgsgagtttcctccagcctgagggagaccatgaagtggtggggttgtagtgagggggctcccccagcctaagggagactgtgaagtggaggttgtagtaagagggcttccacagcctgagggaggcttctgkgggagagaagatcttaccccagatcttaagatctgctccctcttcaggaaggatcctccccttgcagccgtgaccactgctgtccaggaactgctgcgtctggctcaggcccacccagccggacctcccaccctcgaccctgtcaatgacctgcagctcaaagatatgtcagttgtagagggygggcactgtgaagctggcagggcgggtggcttgtgccatgagcagccatgagttgctcctcactgagctcatgtttgacaatgcactgagcaccctgcggcctgaggagattgctgccttgctctctggcctggtctgccagagccctggggacgctggggatcagctcccaaacaccctcaagcagggaatagaacgtgtccgggctgtggccaagcggattggtgaggtccaggtggcttgtsgsctgaaccagacggtggaggaatttgtgggggagctgaattttgggctggttgaggttgtatatgagtgggcccggggcatgcccttctccgagttggcagggctctcagggacccctgagggcctggtggtccgctgcattcagcgcctggctgagatgtgtcgctcactgcggggggcagcccgcctggtaggagagcctgtgctgggtgccaagatggagacagcggctaccttgctacggcgggacatcgkatttgcggccagcctctacacccagtgaatgccccatgtaaaaacaygatgataaaacagcaaagcactgttgtgtgcttgagttgctggacagggatgactcasctaagaagacagcgagagaacytyttagaaatatgcttttattatctgcacacagagatatgactgcctccctctaaagcattactatttgggagagggagtcttggggggtgatgggaggtcctgagtcatagcttccacataccatatgggcaggaaggcgtaaggtgcatcttggtgtacagacacggtgactgggccgccaggctcccaagagaagagatgaacgagcctggggggcagatggaggcatcagttg

SEQ ID NO: 7425 - DNA, 4711 bp, Homo sapiens
cgtagcgcccgcagagcaaygcaaagaggaagaacagagaaacggctatgagaaaaagggccgaagagtgagaagcagagggccttacccgagggggcggcaaccggggkccccacggtctccggccgcgcccgcgctggcygctgatagcgggctcacaacgatgacgtagcgaggagcggaaaacgcggtaaccaaggcggccccaggcgcgcacttccgcccggccttccaccggtccaggtctgcccctccgcagcgatagttcacgctctcggcrgggctgtaccggaagttscctctacttccgcccgttccggggcggggcttacttcgcagcgactacttgccgcacttccgggctgccaggcagctgctgtggctccaggatgatggagacagagcgacttgtgctaccccctccagatcccctggacctaccccttcgggccgtggagctcggatgcacggggcactgggagctgctgaacttgcctggagctccagagagtagccttccccatggcctccctccttgtgccccagatctgcagcaagaagcagaacrgttgtttctgtcatccccagcctggctgcctctgcatggtgtggagcactcagcccgaaaatggcagaggaagacggatccctggtctcttttggctgtcctgggagccccagtcccatccgacctacaggcccaaagacacccaaccacaggccagatactgggttacaaagaggtcttgctggagaacacaaatctctcggcyacaacctccttgtctcttcgccggcctccagggccagcctcccagtccttatggggaaatccaactcrgtatcccttctggccaggggggatggatgaacccaccataacagatctgaacacacgggaggaggctgaggaggagatagactttgagaaagatcttcttactattccacctggtttcaagaaaggcatggactttgcaccaaaagattgtccaactccagctcctggactactaagccttagctgtmtgttggagcctctggatttgggtgggggtgacgaggatgagaatgaggcagtgggacagccaggaggtcccagaggggacactgtttcagcctctccctgcagtgctcccctggcccgagcaagcagcttggaagacctagtgttgaaggaagcgtccacagctgtatccaccccagaggccccagagcctccatctcaggagcagtgggccatccctgtggacgccacctcccctgttggtgatttctatcgcctcattccccagccagccttccagtgggcatttgagccagatgtgtttcagaaacaggccatcctgcacttggaayggcatgactctgtctttgtcgcagctcacacatctgcaggaaaaacagttgtggctgaatatgccattgcyctggcccagaaacacatgacacgcaccatctacacttcgcccatcaaggccctgagcaaccagaagttccgggacttccgaaacacattcggggatgtggggctgctcaccggggatgtacagctgcatccggaggcctcctgcctcatcatgaccacrgagatccttcgctccatgctgtacagtggctcagatgttattcgggacctggagtgggtcatctttgatgaggttcactatatcaacgatgtcgagcgtggggtcgtgtgggaggaggtgcttatcatgctacctgaccacgtttctatcatccttctgagtgccaccgtccccaacgcccttgagtttgctgactggattgggcggctgaagcgtcgtcagatctatgtgattagcactgtaacccgccccgtgcccctggagcactatcttttcacagggaacagctccaagacccagggggagctctttttgttgctggactcccgaggagccttccatacaaaagggtactatgcagctgtggaggccaagaaggagagaatgagcaaacacgcccagacctttggggccaagcagcccacacatcaggggggccctgcacaggaccgcggagtgtacctgtccctcctggcctccctccgcacacgtgcccagttgcccgtggtggtgttcaccttctcccggggccgctgtgatgagcaggcctcaggcctcacctcccttgacctcaccaccagttcggagaagagcgagatccacctcttcctgcagcgctgccttgctcgcctccgtggctctgaccgccagctgccccaggtcctgcacatgtcagagctcctgaatcgcggcctgggtgtgcaccatagcggcatcctgcccatcctcaaggagatcgtggagatgctcttcagccgtggcctggtcaaggtcttgtttgccacagagacctttgccatgggagtaaacatgcctgctcgtacagtagtgtttgactccatgcgcaaacacgatggctccaccttccgggacctgctccctggggagtatgtgcagatggcaggccgggcagggcggaggggcctggaccccacaggcaccgttatcctgctctgcaagggccgagtgcccgagatggcagacctgcaccgcatgatgatggggaagccrtcccagctgcagtcccagttccgcctcacgtacactatgatcctcaacttgctgcgagtggatgccctcagggtggaggacatgatgaagaggagcttctctgagtttccctcccgcaaagacagcaaggcccatgaacaggccctggctgaactgaccaagaggctgggagctttggaggagcctgacatgactggccaactggtcgacctgcctgaatattacagctggggggaggaactgacagagacccagcacatgatccagcgacgcatcatggagtctgtgaacgggctgaagtctctctcagcaggaagggtggtggttgtgaagaatcaggagcatcacaacgcattgggagtgatcctacaggtctcctcgaactccaccagcagagtattcacaaccctggtcttgtgtgataagcccttgtcccaggacccacagracagggggccagccactgcagaggtgccctatccagatgacctcgtgggattcaagctgttcctgcctgaagggccttgtgaccacaccrtggtcaagctccagccaggagatatggctgccatcaccaccaaggtgctccgggtgaatggggagaagatcttggaggacttcagcaagaggcagcagccaaaattcaagtcagagatgctagggaggcccttctcctccagaggggcacgtagaggcagggaggggcagtggtctgsgagtttcctccagcctgagggagaccatgaagtggtggggttgtagtgagggggctcccccagcctaagggagactgtgaagtggaggttgtagtaagagggcttccacagcctgagggaggcttctgkgggagagaagatcttaccccagatcttaagatctgctccctcttcaggaaggatcctccccttgcagccgtgaccactgctgtccaggaactgctgcgtctggctcaggcccacccagccggacctcccaccctcgaccctgtcaatgacctgcagctcaaagatatgtcagttgtagagggtgggctccgggcccggaagctggaggagctgatccagggggctcagtgtgtacacagcccccgttttcctgcccagtacctgaagctgcgggagcgaatgcagatacagaaggagatggagcggctgcgcttcctactgtcggatcagtcattgctgctgcttcctgagtaccatcagcgagtagaggtgctccgaaccctgggttaygtggaygaggygggcactgtgaagctggcagggcgggtggcttgtgccatgagcagccatgagttgctcctcactgagctcatgtttgacaatgcactgagcaccctgcggcctgaggagattgctgccttgctctctggcctggtctgccagagccctggggacgctggggatcagctcccaaacaccctcaagcagggaatagaacgtgtccgggctgtggccaagcggattggtgaggtccaggtggcttgtsgsctgaaccagacggtggaggaatttgtgggggagctgaattttgggctggttgaggttgtatatgagtgggcccggggcatgcccttctccgagttggcagggctctcagggacccctgagggcctggtggtccgctgcattcagcgcctggctgagatgtgtcgctcactgcggggggcagcccgcctggtaggagagcctgtgctgggtgccaagatggagacagcggctaccttgctacggcgggacatcgkatttgcggccagcctctacacccagtgaatgccccatgtaaaaacaygatgataaaacagcaaagcactgttgtgtgcttgagttgctggacagggatgactcasctaagaagacagcgagagaacytyttagaaatatgcttttattatctgcacacagagatatgactgcctccctctaaagcattactatttgggagagggagtcttggggggtgatgggaggtcctgagtcatagcttccacataccatatgggcaggaaggcgtaaggtgcatcttggtgtacagacacggtgactgggccgccaggctcccaagagaagagatgaacgagcctggggggcagatggaggcatcagttg

SEQ ID NO: 7426 - DNA, 4560 bp, Homo sapiens
cgtagcgcccgcagagcaaygcaaagaggaagaacagagaaacggctatgagaaaaagggccgaagagtgagaagcagagggccttacccgagggggcggcaaccggggkccccacggtctccggccgcgcccgcgctggcygctgatagcgggctcacaacgatgacgtagcgaggagcggaaaacgcggtaaccaaggcggccccaggcgcgcacttccgcccggccttccaccggtccaggtctgcccctccgcagcgatagttcacgctctcggcrgggctgtaccggaagttscctctacttccgcccgttccggggcggggcttacttcgcagcgactacttgccgcacttccgggctgccaggcagctgctgtggctccaggatgatggagacagagcgacttgtgctaccccctccagatcccctggacctaccccttcgggccgtggagctcggatgcacggggcactgggagctgctgaacttgcctggagctccagagagtagccttccccatggcctccctccttgtgccccagatctgcagcaagaagcagaacrgttgtttctgtcatccccagcctggctgcctctgcatggtgtggagcactcagcccgaaaatggcagaggaagacggatccctggtctcttttggctgtcctgggagccccagtcccatccgacctacaggcccaaagacacccaaccacaggccagatactgggttacaaagaggtcttgctggagaacacaaatctctcggcyacaacctccttgtctcttcgccggcctccagggccagcctcccagtccttatggggaaatccaactcrgtatcccttctggccaggggggatggatgaacccaccataacagatctgaacacacgggaggaggctgaggaggagatagactttgagaaagatcttcttactattccacctggtttcaagaaaggcatggactttgcaccaaaagattgtccaactccagctcctggactactaagccttagctgtmtgttggagcctctggatttgggtgggggtgacgaggatgagaatgaggcagtgggacagccaggaggtcccagaggggacactgtttcagcctctccctgcagtgctcccctggcccgagcaagcagcttggaagacctagtgttgaaggaagcgtccacagctgtatccaccccagaggccccagagcctccatctcaggagcagtgggccatccctgtggacgccacctcccctgttggtgatttctatcgcctcattccccagccagccttccagtgggcatttgagccagatgtgtttcagaaacaggccatcctgcacttggaayggcatgactctgtctttgtcgcagctcacacatctgcaggaaaaacagttgtggctgaatatgccattgcyctggcccagaaacacatgacacgcaccatctacacttcgcccatcaaggccctgagcaaccagaagttccgggacttccgaaacacattcggggatgtggggctgctcaccggggatgtacagctgcatccggaggcctcctgcctcatcatgaccacrgagatccttcgctccatgctgtacagtggctcagatgttattcgggacctggagtgggtcatctttgatgaggttcactatatcaacgatgtcgagcgtggggtcgtgtgggaggaggtgcttatcatgctacctgaccacgtttctatcatccttctgagtgccaccgtccccaacgcccttgagtttgctgactggattgggcggctgaagcgtcgtcagatctatgtgattagcactgtaacccgccccgtgcccctggagcactatcttttcacagggaacagctccaagacccagggggagctctttttgttgctggactcccgaggagccttccatacaaaagggtactatgcagctgtggaggccaagaaggagagaatgagcaaacacgcccagacctttggggccaagcagcccacacatcaggggggccctgcacaggaccgcggagtgtacctgtccctcctggcctccctccgcacacgtgcccagttgcccgtggtggtgttcaccttctcccggggccgctgtgatgagcaggcctcaggcctcacctcccttgacctcaccaccagttcggagaagagcgagatccacctcttcctgcagcgctgccttgctcgcctccgtggctctgaccgccagctgccccaggtcctgcacatgtcagagctcctgaatcgcggcctgggtgtgcaccatagcggcatcctgcccatcctcaaggagatcgtggagatgctcttcagccgtggcctggtcaaggtcttgtttgccacagagacctttgccatgggagtaaacatgcctgctcgtacagtagtgtttgactccatgcgcaaacacgatggctccaccttccgggacctgctccctggggagtatgtgcagatggcaggccgggcagggcggaggggcctggaccccacaggcaccgttatcctgctctgcaagggccgagtgcccgagatggcagacctgcaccgcatgatgatggggaagccrtcccagctgcagtcccagttccgcctcacgtacactatgatcctcaacttgctgcgagtggatgccctcagggtggaggacatgatgaagaggagcttctctgagtttccctcccgcaaagacagcaaggcccatgaacaggccctggctgaactgaccaagaggctgggagctttggaggagcctgacatgactggccaactggtcgacctgcctgaatattacagctggggggaggaactgacagagacccagcacatgatccagcgacgcatcatggagtctgtgaacgggctgaagtctctctcagcaggaagggtggtggttgtgaagaatcaggagcatcacaacgcattgggagtgatcctacaggtctcctcgaactccaccagcagagtattcacaaccctggtcttgtgtgataagcccttgtcccaggacccacagracagggggccagccactgcagaggtgccctatccagatgacctcgtgggattcaagctgttcctgcctgaagggccttgtgaccacaccrtggtcaagctccagccaggagatatggctgccatcaccaccaaggtgctccgggtgaatggggagaagatcttggaggacttcagcaagaggcagcagccaaaattcaagaaggatcctccccttgcagccgtgaccactgctgtccaggaactgctgcgtctggctcaggcccacccagccggacctcccaccctcgaccctgtcaatgacctgcagctcaaagatatgtcagttgtagagggtgggctccgggcccggaagctggaggagctgatccagggggctcagtgtgtacacagcccccgttttcctgcccagtacctgaagctgcgggagcgaatgcagatacagaaggagatggagcggctgcgcttcctactgtcggatcagtcattgctgctgcttcctgagtaccatcagcgagtagaggtgctccgaaccctgggttaygtggaygaggygggcactgtgaagctggcagggcgggtggcttgtgccatgagcagccatgagttgctcctcactgagctcatgtttgacaatgcactgagcaccctgcggcctgaggagattgctgccttgctctctggcctggtctgccagagccctggggacgctggggatcagctcccaaacaccctcaagcagggaatagaacgtgtccgggctgtggccaagcggattggtgaggtccaggtggcttgtsgsctgaaccagacggtggaggaatttgtgggggagctgaattttgggctggttgaggttgtatatgagtgggcccggggcatggtgagtacctgaggtttgggattttgcagacggctggctggggagaacctgcccaggctgagtgcatccagtcctcaccctactttccccacagcccttctccgagttggcagggctctcagggacccctgagggcctggtggtccgctgcattcagcgcctggctgagatgtgtcgctcactgcggggggcagcccgcctggtaggagagcctgtgctgggtgccaagatggagacagcggctaccttgctacggcgggacatcgkatttgcggccagcctctacacccagtgaatgccccatgtaaaaacaygatgataaaacagcaaagcactgttgtgtgcttgagttgctggacagggatgactcasctaagaagacagcgagagaacytyttagaaatatgcttttattatctgcacacagagatatgactgcctccctctaaagcattactatttgggagagggagtcttggggggtgatgggaggtcctgagtcatagcttccacataccatatgggcaggaaggcgtaaggtgcatcttggtgtacagacacggtgactgggccgccaggctcccaagagaagagatgaacgagcctggggggcagatggaggcatcagttg

SEQ ID NO: 7427 - DNA, 4466 bp, Homo sapiens
cgtagcgcccgcagagcaaygcaaagaggaagaacagagaaacggctatgagaaaaagggccgaagagtgagaagcagagggccttacccgagggggcggcaaccggggkccccacggtctccggccgcgcccgcgctggcygctgatagcgggctcacaacgatgacgtagcgaggagcggaaaacgcggtaaccaaggcggccccaggcgcgcacttccgcccggccttccaccggtccaggtctgcccctccgcagcgatagttcacgctctcggcrgggctgtaccggaagttscctctacttccgcccgttccggggcggggcttacttcgcagcgactacttgccgcacttccgggctgccaggcagctgctgtggctccaggatgatggagacagagcgacttgtgctaccccctccagatcccctggacctaccccttcgggccgtggagctcggatgcacggggcactgggagctgctgaacttgcctggagctccagagagtagccttccccatggcctccctccttgtgccccagatctgcagcaagaagcagaacrgttgtttctgtcatccccagcctggctgcctctgcatggtgtggagcactcagcccgaaaatggcagaggaagacggatccctggtctcttttggctgtcctgggagccccagtcccatccgacctacaggcccaaagacacccaaccacaggccagatactgggttacaaagaggtcttgctggagaacacaaatctctcggcyacaacctccttgtctcttcgccggcctccagggccagcctcccagtccttatggggaaatccaactcrgtatcccttctggccaggggggatggatgaacccaccataacagatctgaacacacgggaggaggctgaggaggagatagactttgagaaagatcttcttactattccacctggtttcaagaaaggcatggactttgcaccaaaagattgtccaactccagctcctggactactaagccttagctgtmtgttggagcctctggatttgggtgggggtgacgaggatgagaatgaggcagtgggacagccaggaggtcccagaggggacactgtttcagcctctccctgcagtgctcccctggcccgagcaagcagcttggaagacctagtgttgaaggaagcgtccacagctgtatccaccccagaggccccagagcctccatctcaggagcagtgggccatccctgtggacgccacctcccctgttggtgatttctatcgcctcattccccagccagccttccagtgggcatttgagccagatgtgtttcagaaacaggccatcctgcacttggaayggcatgactctgtctttgtcgcagctcacacatctgcaggaaaaacagttgtggctgaatatgccattgcyctggcccagaaacacatgacacgcaccatctacacttcgcccatcaaggccctgagcaaccagaagttccgggacttccgaaacacattcggggatgtggggctgctcaccggggatgtacagctgcatccggaggcctcctgcctcatcatgaccacrgagatccttcgctccatgctgtacagtggctcagatgttattcgggacctggagtgggtcatctttgatgaggttcactatatcaacgatgtcgagcgtggggtcgtgtgggaggaggtgcttatcatgctacctgaccacgtttctatcatccttctgagtgccaccgtccccaacgcccttgagtttgctgactggattgggcggctgaagcgtcgtcagatctatgtgattagcactgtaacccgccccgtgcccctggagcactatcttttcacagggaacagctccaagacccagggggagctctttttgttgctggactcccgaggagccttccatacaaaagggtactatgcagctgtggaggccaagaaggagagaatgagcaaacacgcccagacctttggggccaagcagcccacacatcaggggggccctgcacaggaccgcggagtgtacctgtccctcctggcctccctccgcacacgtgcccagttgcccgtggtggtgttcaccttctcccggggccgctgtgatgagcaggcctcaggcctcacctcccttgacctcaccaccagttcggagaagagcgagatccacctcttcctgcagcgctgccttgctcgcctccgtggctctgaccgccagctgccccaggtcctgcacatgtcagagctcctgaatcgcggcctgggtgtgcaccatagcggcatcctgcccatcctcaaggagatcgtggagatgctcttcagccgtggcctggtcaaggtcttgtttgccacagagacctttgccatgggagtaaacatgcctgctcgtacagtagtgtttgactccatgcgcaaacacgatggctccaccttccgggacctgctccctggggagtatgtgcagatggcaggccgggcagggcggaggggcctggaccccacaggcaccgttatcctgctctgcaagggccgagtgcccgagatggcagacctgcaccgcatgatgatggggaagccrtcccagctgcagtcccagttccgcctcacgtacactatgatcctcaacttgctgcgagtggatgccctcagggtggaggacatgatgaagaggagcttctctgagtttccctcccgcaaagacagcaaggcccatgaacaggccctggctgaactgaccaagaggctgggagctttggaggagcctgacatgactggccaactggtcgacctgcctgaatattacagctggggggaggaactgacagagacccagcacatgatccagcgacgcatcatggagtctgtgaacgggctgaagtctctctcagcaggaagggtggtggttgtgaagaatcaggagcatcacaacgcattgggagtgatcctacaggtctcctcgaactccaccagcagagtattcacaaccctggtcttgtgtgataagcccttgtcccaggacccacagracagggggccagccactgcagaggtgccctatccagatgacctcgtgggattcaagctgttcctgcctgaagggccttgtgaccacaccrtggtcaagctccagccaggagatatggctgccatcaccaccaaggtgctccgggtgaatggggagaagatcttggaggacttcagcaagaggcagcagccaaaattcaagaaggatcctccccttgcagccgtgaccactgctgtccaggaactgctgcgtctggctcaggcccacccagccggacctcccaccctcgaccctgtcaatgacctgcagctcaaagatatgtcagttgtagagggtgggctccgggcccggaagctggaggagctgatccagggggctcagtgtgtacacagcccccgttttcctgcccagtacctgaagctgcgggagcgaatgcagatacagaaggagatggagcggctgcgcttcctactgtcggatcagtcattgctgctgcttcctgagtaccatcagcgagtagaggtgctccgaaccctgggttaygtggaygaggygggcactgtgaagctggcagggcgggtggcttgtgccatgagcagccatgagttgctcctcactgagctcatgtttgacaatgcactgagcaccctgcggcctgaggagattgctgccttgctctctggcctggtctgccagagccctggggacgctggggatcagctcccaaacaccctcaagcagggaatagaacgtgtccgggctgtggccaagcggattggtgaggtccaggtggcttgtsgsctgaaccagacggtggaggaatttgtgggggagctgaattttgggctggttgaggttgtatatgagtgggcccggggcatgcccttctccgagttggcagggctctcagggacccctgagggcctggtggtccgctgcattcagcgcctggctgagatgtgtcgctcactgcggggggcagcccgcctggtaggagagcctgtgctgggtgccaagatggagacagcggctaccttgctacggcgggacatcgkatttgcggccagcctctacacccagtgaatgccccatgtaaaaacaygatgataaaacagcaaagcactgttgtgtgcttgagttgctggacagggatgactcasctaagaagacagcgagagaacytyttagaaatatgcttttattatctgcacacagagatatgactgcctccctctaaagcattactatttgggagagggagtcttggggggtgatgggaggtcctgagtcatagcttccacataccatatgggcaggaaggcgtaaggtgcatcttggtgtacagacacggtgactgggccgccaggctcccaagagaagagatgaacgagcctggggggcagatggaggcatcagttg

SEQ ID NO: 7428 - DNA, 1827 bp, Homo sapiens
cgactccacaggccctcgcttccgccgcctcttaactccaaaggtctccgggatcaggtgatgcctcttccagctcatatcccgggattttatggtaccggggaaggggtaggaatggagggaagagaacctgaaaatagggtcttccggcgcagagcagtgacgtacggtctccccgggcgtccctcctagaccaggtgatgacgaaaggagcgtcaacttgtcgtccctcaggcccgtcagtgctgggaggggcggtggcgacgcacataccagcatcacctccgccaggccgggccccacgccggccgcggattggctccctccaagggcacgcacgcccggggactcgttggcggcgtggaggggcgccggtgkccacgttggtgtcaacctccttcgtgaagctcacacctcccccgccccgggaggggtttgcccgccactgtcgctgaatgattgcatcatcgaaagcagaaaaccacttttgcatccttcggcctctggcgtgcctgccatgacgtcatagctctgcggaggtggaagttggggagctttgaggacctcatggatcccagggggaccaagagaggagctgagaagacagaggtagctgagcctcggaacaaactacctcgtccagcacctwctctgcccacagaccctgccctctaytctgggccctttcctttctaccggcgcccttcggaactgggctgcttctccctggatgctcaacgccagtaccatggagwwgcccgagccctgcgctactatagcccaccccccactaacggtccaggccccaactttgacctcagagacggatacccggatcgataccagccccgggacgaggaggtccaggaaaggctggaccacctgctgtgctggctcctggaacaccgaggccggttggaggggggtccaggctggctggcagaggccatagtgacgtggcgggggcacctgacaaaactgctgacgacaycgtatgagcggcaggagggctggcagctggcagcctcccggttccagggaacactatacctgagtgaagtggagacaccgaacgctcgggcccagaggcttgctcggccaccgctcctccgggagcttatgtacatgggatacaaatttgagcagtacatgtgtgcagacaaacctggaagctccccagacccctctggggaggttaacaccaacgtggccttctgctctgtgctacgcagccgcctgggaagccaccctctgctcttctcaggggaggtagactgcacagacccccaagccccatccacacagcccccracctgctatgtggagctcaagacctccaaggagatgcahagccctggccaatggaggagtttctacagacacaagctcctgaaatggtgggctcagtcattcctcccaggggtcccgaatgttgttgctggcttccgtaacccagacggttttgtctcttccctcaagacctttcctaccatgaagatgtttgaatatgtcaggaatgaccgtgacggctggaatccctctgtgtgcatgaacttctgtgccgccttccttagctttgcccagagcacggttgtccaggatgaccccaggctcgttcatctcttctcttgggagcctggcggcccagtcaccgtgtctgtacaccaagatgcaccttacgccttcctgcccatatggtatgtggaagctatgactcaggacctcccatcaccccccaagactccctctcccaaatagtaatgctttagagggaggcagtcatatctctgtgtgcagataataaaagcatatttctaarargttctc

SEQ ID NO: 7429 - DNA, 2074 bp, Homo sapiens
cgactccacaggccctcgcttccgccgcctcttaactccaaaggtctccgggatcaggtgatgcctcttccagctcatatcccgggattttatggtaccggggaaggggtaggaatggagggaagagaacctgaaaatagggtcttccggcgcagagcagtgacgtacggtctccccgggcgtccctcctagaccaggtgatgacgaaaggagcgtcaacttgtcgtccctcaggcccgtcagtgctgggaggggcggtggcgacgcacataccagcatcacctccgccaggccgggccccacgccggccgcggattggctccctccaagggcacgcacgcccggggactcgttggcggcgtggaggggcgccggtgkccacgttggtgtcaacctccttcgtgaagctcacacctcccccgccccgggaggggtttgcccgccactgtcgctgaatgattgcatcatcgaaagcagaaaaccacttttgcatccttcggcctctggcgtgcctgccatgacgtcatagctctgcggaggtggaagttggggagctttgaggtaactggattcttgatctgagcgcagacgtccttcctaacctcactgcatttggaggacctggagggagggtgggtgaagggcaaggaaagaggcaggatgagagcttggccgcggtggcgtctgaggggcctgaatgtttcaaggccagagcctggcgatcaggtggctcgcttagtcckaaaccagtcatccttctccaggcctcctctgtagaatggaaactctgtacccctgcttgtcttaggacctcatggatcccagggggaccaagagaggagctgagaagacagaggtagctgagcctcggaacaaactacctcgtccagcacctwctctgcccacagaccctgccctctaytctgggccctttcctttctaccggcgcccttcggaactgggctgcttctccctggatgctcaacgccagtaccatggagwwgcccgagccctgcgctactatagcccaccccccactaacggtccaggccccaactttgacctcagagacggatacccggatcgataccagccccgggacgaggaggtccaggaaaggctggaccacctgctgtgctggctcctggaacaccgaggccggttggaggggggtccaggctggctggcagaggccatagtgacgtggcgggggcacctgacaaaactgctgacgacaycgtatgagcggcaggagggctggcagctggcagcctcccggttccagggaacactatacctgagtgaagtggagacaccgaacgctcgggcccagaggcttgctcggccaccgctcctccgggagcttatgtacatgggatacaaatttgagcagtacatgtgtgcagacaaacctggaagctccccagacccctctggggaggttaacaccaacgtggccttctgctctgtgctacgcagccgcctgggaagccaccctctgctcttctcaggggaggtagactgcacagacccccaagccccatccacacagcccccracctgctatgtggagctcaagacctccaaggagatgcahagccctggccaatggaggagtttctacagacacaagctcctgaaatggtgggctcagtcattcctcccaggggtcccgaatgttgttgctggcttccgtaacccagacggttttgtctcttccctcaagacctttcctaccatgaagatgtttgaatatgtcaggaatgaccgtgacggctggaatccctctgtgtgcatgaacttctgtgccgccttccttagctttgcccagagcacggttgtccaggatgaccccaggctcgttcatctcttctcttgggagcctggcggcccagtcaccgtgtctgtacaccaagatgcaccttacgccttcctgcccatatggtatgtggaagctatgactcaggacctcccatcaccccccaagactccctctcccaaatagtaatgctttagagggaggcagtcatatctctgtgtgcagataataaaagcatatttctaarargttctc

SEQ ID NO: 7430 - DNA, 2176 bp, Homo sapiens
cgactccacaggccctcgcttccgccgcctcttaactccaaaggtctccgggatcaggtgatgcctcttccagctcatatcccgggattttatggtaccggggaaggggtaggaatggagggaagagaacctgaaaatagggtcttccggcgcagagcagtgacgtacggtctccccgggcgtccctcctagaccaggtgatgacgaaaggagcgtcaacttgtcgtccctcaggcccgtcagtgctgggaggggcggtggcgacgcacataccagcatcacctccgccaggccgggccccacgccggccgcggattggctccctccaagggcacgcacgcccggggactcgttggcggcgtggaggggcgccggtgkccacgttggtgtcaacctccttcgtgaagctcacacctcccccgccccgggaggggtttgcccgccactgtcgctgaatgattgcatcatcgaaagcagaaaaccacttttgcatccttcggcctctggcgtgcctgccatgacgtcatagctctgcggaggtggaagttggggagctttgaggacctcatggatcccagggggaccaagagaggagctgagaagacagaggtagctgagcctcggaacaaactacctcgtccagcacctwctctgcccacagaccctgccctctaytctgggccctttcctttctaccggcgcccttcggaactgggctgcttctccctggatgctcaacgccagtaccatggagwwgcccgagccctgcgctactatagcccaccccccactaacggtccaggccccaactttgacctcagagacggatacccggatcgataccagccccgggacgaggaggtccaggaaaggctggaccacctgctgtgctggctcctggaacaccgaggccggttggaggggggtccaggctggctggcagaggccatagtgacgtggcgggggcacctgacaaaactgctgacgacaycgtatgagcggcaggagggctggcagctggcagcctcccggttccagggaacactatacctgagtgaagtggagacaccgaacgctcgggcccagaggcttgctcggccaccgctcctccgggagcttatgtacatgggatacaaatttgagcagtacatgtgtgcaggtgagttgcccctgcttcatagcccccttccccttcccagaggttgagagcccsccamkcctgctgctgcttctctccttgtgcagacaaacctggaagctccccagacccctctggggaggttaacaccaacgtggccttctgctctgtgctacgcagccgcctgggaagccaccctctgctcttctcaggggaggtagactgcacagacccccaagccccatccacacagcccccracctgctatgtggagctcaagacctccaaggagatgcahagccctggccaatggaggagtttctacaggttcaggatcggggtgggcagggcgagassttaggcttgaaggctgggaaagggacttggggaggagggtgaaggcagaatggagggtgcacgaggggtcccactgatcccttgcttttcctgtcagacacaagctcctgaaatggtgggctcagtcattcctcccaggggtcccgaatgttgttgctggcttccgtaacccagacggttttgtctcttccctcaagacctttcctaccatgaagatgtttgaatatgtcagggtaagggaacgaygttgcagctcccacccgtatccccaaacaccaasrccacaggtctagcatccagggcaacagcctgccttctctcctcccaccacccccactgcccatcttctgcctcctcctctgcctgctccagaatgaccgtgacggctggaatccctctgtgtgcatgaacttctgtgccgccttccttagctttgcccagagcacggttgtccaggatgaccccaggctcgttcatctcttctcttgggagcctggcggcccagtcaccgtgtctgtacaccaagatgcaccttacgccttcctgcccatatggtatgtggaagctatgactcaggacctcccatcaccccccaagactccctctcccaaatagtaatgctttagagggaggcagtcatatctctgtgtgcagataataaaagcatatttctaarargtt

SEQ ID NO: 7431 - DNA, 1861 bp, Homo sapiens
cgactccacaggccctcgcttccgccgcctcttaactccaaaggtctccgggatcaggtgatgcctcttccagctcatatcccgggattttatggtaccggggaaggggtaggaatggagggaagagaacctgaaaatagggtcttccggcgcagagcagtgacgtacggtctccccgggcgtccctcctagaccaggtgatgacgaaaggagcgtcaacttgtcgtccctcaggcccgtcagtgctgggaggggcggtggcgacgcacataccagcatcacctccgccaggccgggccccacgccggccgcggattggctccctccaagggcacgcacgcccggggactcgttggcggcgtggaggggcgccggtgkccacgttggtgtcaacctccttcgtgaagctcacacctcccccgccccgggaggggtttgcccgccactgtcgctgaatgattgcatcatcgaaagcagaaaaccacttttgcatccttcggcctctggcgtgcctgccatgacgtcatagctctgcggaggtggaagttggggagctttgaggtaactggattcttgatctgagcgcagacgtccttcctaacctcactgcatttggaggacctggagggagggtgggtgaagggcaaggaaagaggcaggatgagagcttggccgcggtggcgtctgaggggcctgaatgtttcaaggccagagcctggcgatcaggtggctcgcttagtcckaaaccagtcatccttctccaggcctcctctgtagaatggaaactctgtacccctgcttgtcttaggacctcatggatcccagggggaccaagagaggagctgagaagacagaggtagctgagcctcggaacaaactacctcgtccagcacctwctctgcccacagaccctgccctctaytctgggccctttcctttctaccggcgcccttcggaactgggctgcttctccctggatgctcaacgccagtaccatggagwwgcccgagccctgcgctactatagcccaccccccactaacggtccaggccccaactttgacctcagagacggatacccggatcgataccagccccgggacgaggaggtccaggaaaggctggaccacctgctgtgctggctcctggaacaccgaggccggttggaggggggtccaggctggctggcagaggccatagtgacgtggcgggggcacctgacaaaactgctgacgacaycgtatgagcggcaggagggctggcagctggcagcctcccggttccagggaacactatacctgagtgaagtggagacaccgaacgctcgggcccagaggcttgctcggccaccgctcctccgggagcttatgtacatgggatacaaatttgagcagtacatgtgtgcagacaaacctggaagctccccagacccctctggggaggttaacaccaacgtggccttctgctctgtgctacgcagccgcctgggaagccaccctctgctcttctcaggggagacctttcctaccatgaagatgtttgaatatgtcaggaatgaccgtgacggctggaatccctctgtgtgcatgaacttctgtgccgccttccttagctttgcccagagcacggttgtccaggatgaccccaggctcgttcatctcttctcttgggagcctggcggcccagtcaccgtgtctgtacaccaagatgcaccttacgccttcctgcccatatggtatgtggaagctatgactcaggacctcccatcaccccccaagactccctctcccaaatagtaatgctttagagggaggcagtcatatctctgtgtgcagataataaaagcatatttctaarargtt

SEQ ID NO: 7432 - DNA, 1614 bp, Homo sapiens
cgactccacaggccctcgcttccgccgcctcttaactccaaaggtctccgggatcaggtgatgcctcttccagctcatatcccgggattttatggtaccggggaaggggtaggaatggagggaagagaacctgaaaatagggtcttccggcgcagagcagtgacgtacggtctccccgggcgtccctcctagaccaggtgatgacgaaaggagcgtcaacttgtcgtccctcaggcccgtcagtgctgggaggggcggtggcgacgcacataccagcatcacctccgccaggccgggccccacgccggccgcggattggctccctccaagggcacgcacgcccggggactcgttggcggcgtggaggggcgccggtgkccacgttggtgtcaacctccttcgtgaagctcacacctcccccgccccgggaggggtttgcccgccactgtcgctgaatgattgcatcatcgaaagcagaaaaccacttttgcatccttcggcctctggcgtgcctgccatgacgtcatagctctgcggaggtggaagttggggagctttgaggacctcatggatcccagggggaccaagagaggagctgagaagacagaggtagctgagcctcggaacaaactacctcgtccagcacctwctctgcccacagaccctgccctctaytctgggccctttcctttctaccggcgcccttcggaactgggctgcttctccctggatgctcaacgccagtaccatggagwwgcccgagccctgcgctactatagcccaccccccactaacggtccaggccccaactttgacctcagagacggatacccggatcgataccagccccgggacgaggaggtccaggaaaggctggaccacctgctgtgctggctcctggaacaccgaggccggttggaggggggtccaggctggctggcagaggccatagtgacgtggcgggggcacctgacaaaactgctgacgacaycgtatgagcggcaggagggctggcagctggcagcctcccggttccagggaacactatacctgagtgaagtggagacaccgaacgctcgggcccagaggcttgctcggccaccgctcctccgggagcttatgtacatgggatacaaatttgagcagtacatgtgtgcagacaaacctggaagctccccagacccctctggggaggttaacaccaacgtggccttctgctctgtgctacgcagccgcctgggaagccaccctctgctcttctcaggggagacctttcctaccatgaagatgtttgaatatgtcaggaatgaccgtgacggctggaatccctctgtgtgcatgaacttctgtgccgccttccttagctttgcccagagcacggttgtccaggatgaccccaggctcgttcatctcttctcttgggagcctggcggcccagtcaccgtgtctgtacaccaagatgcaccttacgccttcctgcccatatggtatgtggaagctatgactcaggacctcccatcaccccccaagactccctctcccaaatagtaatgctttagagggaggcagtcatatctctgtgtgcagataataaaagcatatttctaarargtt

SEQ ID NO: 7433 - DNA, 1878 bp, Homo sapiens
ggaactaacgtcatgccgagttgctgagcgccggcaggcggggccggggcggccaaaccaatgcgatggccggggcggagtcgggcgctctataagttgtcgataggcgggcactccgccctagtttctaaggatcatgtctgcgagccaggattcccgatccagagacaatggccccgatgggatggagcccgaaggcgtcatcgagagtaactggaatgagattgttgacagctttgatgacatgaacctctcggagtcccttctccgtggcatctacgcstatggttttgagaagcccyctgccatccagcagcgagccattctaccttgtatcaagggttatgatgtgattgctcaagcccaatctgggactgggaaaacggccacatttgccatatcrattctgcagcagattgaattagatctaaaagccacccaggccttggtcctagcacccactcgagaattggctcagcagatacagaaggtggtcatggcactaggagactacatgggcgcctcctgtcaygcctgtatcgggggcaccaacgtgcgtgctgaggtgcagaaactgcagatggaagctccccacatcatcgtgggtacccctggccgtgtgtttgatatgcttaaccgsagatacctgtcccccaaatacatcaagatgtttgtactggatgaagctgacgaaatgttaagccgtggattcaaggaccagatctatgacatattccaaaagctcaacagcaacacccaggtagttttgctgtcagccacaatgccttctgatgtgcttgaggtgaccaagaagttcatgagggaccccattcggattcttgtcaagaaggaagagttgaccctggagggtatccgccagttctacatcaacgtggaacgagaggagtggaagctggacacactatgtgacttgtatgaaaccctgaccatcacccaggcagtcatcttcatcaacacccggaggaaggtggactggctcaccgagaagatgcatgctcgagatttcactgtatccgccatgcatggagatatggaccaaaaggaacgagacgtgattatgagggagtttcgttctggctctagcagagttttgattaccactgacctgctggccagaggcattgatgtgcagcaggtttctttastcatcaactatgaccttcccaccaacagggaaaactatatccacagaatcggtcgaggtggacggtttggccgtaaaggtgtggctattaacatggtgacagaagaagacaagaggactcttcgagacattgagaccttctacaacacctccattgaggaaatgcccctcaatgttgctgacctcatctgaggggctgtcctgccacccagccccagccagggctcaatctctgggggctgaggagcagcaggaggggggagggaagggagccaagggatggacatcttgtcattttttttctttgaataaatgtcactttttgaggcaaaagaaggaaccgtgaacattttagacacccttttctttggggtaggctcttgccccaggcgccggctcttctcccaaaaaaaaaaaaaaaacactaatccatttccctaacctagtaacctccagatcccagaggctctcctcacctcagctgagctcctttgaaagtgattcaagggactrtgtcactcagcctcatttgctggaccaaatctggagggagaacccctaaaacycctaagtgaggttgcccagggggttgtccccaggtggggggaagcaggggagagaaaatggtagccatttttacattgttttgtatagtatttattgattcaggaaacaaacacaaaattctgaataaaatgacttggaaactgcct

SEQ ID NO: 7434 - DNA, 1637 bp, Homo sapiens
ggaactaacgtcatgccgagttgctgagcgccggcaggcggggccggggcggccaaaccaatgcgatggccggggcggagtcgggcgctctataagttgtcgataggcgggcactccgccctagtttctaaggatcatgtctgcgagccaggattcccgatccagagacaatggccccgatgggatggagcccgaaggcgtcatcgagagtaactggaatgagattgttgacagctttgatgacatgaacctctcggagtcccttctccgtggcatctacgcstatggttttgagaagcccyctgccatccagcagcgagccattctaccttgtatcaagggttatgatgtgattgctcaagcccaatctgggactgggaaaacggccacatttgccatatcrattctgcagcagattgaattagatctaaaagccacccaggccttggtcctagcacccactcgagaattggctcagcagatacagaaggtggtcatggcactaggagactacatgggcgcctcctgtcaygcctgtatcgggggcaccaacgtgcgtgctgaggtgcagaaactgcagatggaagctccccacatcatcgtgggtacccctggccgtgtgtttgatatgcttaaccgsagatacctgtcccccaaatacatcaagatgtttgtactggatgaagctgacgaaatgttaagccgtggattcaaggaccagatctatgacatattccaaaagctcaacagcaacacccaggtagttttgctgtcagccacaatgccttctgatgtgcttgaggtgaccaagaagttcatgagggaccccattcggattcttgtcaagaaggaagagttgaccctggagggtatccgccagttctacatcaacgtggaacgagaggagtggaagctggacacactatgtgacttgtatgaaaccctgaccatcacccaggcagtcatcttcatcaacacccggaggaaggtggactggctcaccgagaagatgcatgctcgagatttcactgtatccgccatgcatggagatatggaccaaaaggaacgagacgtgattatgagggagtttcgttctggctctagcagagttttgattaccactgacctgctgggaaaactatatccacagaatcggtcgaggtggacggtttggccgtaaaggtgtggctattaacatggtgacagaagaagacaagaggactcttcgagacattgagaccttctacaacacctccattgaggaaatgcccctcaatgttgctgacctcatctgaggggctgtcctgccacccagccccagccagggctcaatctctgggggctgaggagcagcaggaggggggagggaagggagccaagggatggacatcttgtcattttttttctttgaataaatgtcactttttgaggcaaaagaaggaaccgtgaacattttagacacccttttctttggggtaggctcttgccccaggcgccggctcttctcccaaaaaaaaaaaaaaaactggggggaagcaggggagagaaaatggtagccatttttacattgttttgtatagtatttattgattcaggaaacaaacacaaaattctgaataaaatgacttggaaactgc

SEQ ID NO: 7435 - DNA, 1699 bp, Homo sapiens
ggaactaacgtcatgccgagttgctgagcgccggcaggcggggccggggcggccaaaccaatgcgatggccggggcggagtcgggcgctctataagttgtcgataggcgggcactccgccctagtttctaaggatcatgtctgcgagccaggattcccgatccagagacaatggccccgatgggatggagcccgaaggcgtcatcgagagtaactggaatgagattgttgacagctttgatgacatgaacctctcggagtcccttctccgtggcatctacgcstatggttttgagaagcccyctgccatccagcagcgagccattctaccttgtatcaagggttatgatgtgattgctcaagcccaatctgggactgggaaaacggccacatttgccatatcrattctgcagcagattgaattagatctaaaagccacccaggccttggtcctagcacccactcgagaattggctcagcagatacagaaggtggtcatggcactaggagactacatgggcgcctcctgtcaygcctgtatcgggggcaccaacgtgcgtgctgaggtgcagaaactgcagatggaagctccccacatcatcgtgggtacccctggccgtgtgtttgatatgcttaaccgsagatacctgtcccccaaatacatcaagatgtttgtactggatgaagctgacgaaatgttaagccgtggattcaaggaccagatctatgacatattccaaaagctcaacagcaacacccaggtagttttgctgtcagccacaatgccttctgatgtgcttgaggtgaccaagaagttcatgagggaccccattcggattcttgtcaagaaggaagagttgaccctggagggtatccgccagttctacatcaacgtggaacgagaggagtggaagctggacacactatgtgacttgtatgaaaccctgaccatcacccaggcagtcatcttcatcaacacccggaggaaggtggactggctcaccgagaagatgcatgctcgagatttcactgtatccgccatgcatggagatatggaccaaaaggaacgagacgtgattatgagggagtttcgttctggctctagcagagttttgattaccactgacctgctggccagaggcattgatgtgcagcaggtttctttastcatcaactatgaccttcccaccaacagggaaaactatatccacagaatcggtcgaggtggacggtttggccgtaaaggtgtggctattaacatggtgacagaagaagacaagaggactcttcgagacattgagaccttctacaacacctccattgaggaaatgcccctcaatgttgctgacctcatctgaggggctgtcctgccacccagccccagccagggctcaatctctgggggctgaggagcagcaggaggggggagggaagggagccaagggatggacatcttgtcattttttttctttgaataaatgtcactttttgaggcaaaagaaggaaccgtgaacattttagacacccttttctttggggtaggctcttgccccaggcgccggctcttctcccaaaaaaaaaaaaaaaactggggggaagcaggggagagaaaatggtagccatttttacattgttttgtatagtatttattgattcaggaaacaaacacaaaattctgaataaaatgacttggaaactgc

SEQ ID NO: 7436 - DNA, 1880 bp, Homo sapiens
ggaactaacgtcatgccgagttgctgagcgccggcaggcggggccggggcggccaaaccaatgcgatggccggggcggagtcgggcgctctataagttgtcgataggcgggcactccgccctagtttctaaggatcatgtctgcgagccaggattcccgatccagagacaatggccccgatgggatggagcccgaaggcgtcatcgagagtaactggaatgagattgttgacagctttgatgacatgaacctctcggagtcccttctccgtggcatctacgcstatggttttgagaagcccyctgccatccagcagcgagccattctaccttgtatcaagggttatgatgtgattgctcaagcccaatctgggactgggaaaacggccacatttgccatatcrattctgcagcagattgaattagatctaaaagccacccaggccttggtcctagcacccactcgagaattggctcagcagatacagaaggtggtcatggcactaggagactacatgggcgcctcctgtcaygcctgtatcgggggcaccaacgtgcgtgctgaggtgcagaaactgcagatggaagctccccacatcatcgtgggtacccctggccgtgtgtttgatatgcttaaccgsagatacctgtcccccaaatacatcaagatgtttgtactggatgaagctgacgaaatgttaagccgtggattcaaggaccagatctatgacatattccaaaagctcaacagcaacacccaggtagttttgctgtcagccacaatgccttctgatgtgcttgaggtgaccaagaagttcatgagggaccccattcggattcttgtcaagaaggaagagttgaccctggagggtatccgccagttctacatcaacgtggaacgagaggagtggaagctggacacactatgtgacttgtatgaaaccctgaccatcacccaggcagtcatcttcatcaacacccggaggaaggtggactggctcaccgagaagatgcatgctcgagatttcactgtatccgccatggtcatggagatatggaccaaaaggaacgagacgtgattatgagggagtttcgttctggctctagcagagttttgattaccactgacctgctggccagaggcattgatgtgcagcaggtttctttastcatcaactatgaccttcccaccaacagggaaaactatatccacagaatcggtcgaggtggacggtttggccgtaaaggtgtggctattaacatggtgacagaagaagacaagaggactcttcgagacattgagaccttctacaacacctccattgaggaaatgcccctcaatgttgctgacctcatctgaggggctgtcctgccacccagccccagccagggctcaatctctgggggctgaggagcagcaggaggggggagggaagggagccaagggatggacatcttgtcattttttttctttgaataaatgtcactttttgaggcaaaagaaggaaccgtgaacattttagacacccttttctttggggtaggctcttgccccaggcgccggctcttctcccaaaaaaaaaaaaaaaacactaatccatttccctaacctagtaacctccagatcccagaggctctcctcacctcagctgagctcctttgaaagtgattcaagggactrtgtcactcagcctcatttgctggaccaaatctggagggagaacccctaaaacycctaagtgaggttgcccagggggttgtccccaggtggggggaagcaggggagagaaaatggtagccatttttacattgttttgtatagtatttattgattcaggaaacaaacacaaaattctgaataaaatgacttggaaactgcct

SEQ ID NO: 7437 - DNA, 1926 bp, Homo sapiens
gctgagtagggaatgactctgctctgccacagatcctgatggctgactcagaagcactcccctcccttgctggggacccagtggctgtggaagccttgctccgggccgtgtttggggttgttgtggatgaggccattcagaaaggaaccagtgtctcccagaagtgtcactactccatccagaagggagctgcgtttctgggacttggcaccgacagtgtccgagtggtcaaggctgatgagagagggaaaatggtccccgaggatctggagaggcagattggtatggccgaggctgagggtgctgtgccgttcctggtcagtgccacctctggcaccactgtgctaggggcctttgaccccctggaggcaattgctgatgtgtgccagcgtcatgggctatggctgcatgtggatgctgcctggggtgggagcgtcctgctgtcacagacacacaggcatctcctggatgggatccagagggctgactctgtggcctggaatccccacaagctcctcgcagcaggcctgcaatgctctgcacttcttctccaggatacctcgaacctgctcaagcgctgccatgggtcccaggccagctaccttttccagcaggacaagttctacgatgtggctctggacacgggagacaaggtggtgcagtgtggccgccgtgtggactgtctgaagctgtggctcatgtggaaggcacagggcgatcaagggctggagcggcgcatcgaccaggcctttgtccttgcccggtacctggtggaggaaatgaagaagcgggaagggtttgagctagtcatggagcctgagtttgtcaatgtgtgtttctggttcgtaccccccagcctgcgagggaagcaggagagtccagattaccacgaaaggctgtcaaaggtggcccccgtgctcaaggagcgcatggtgaaggagggctccatgatgattggctaccagccccacgggacccggggcaacttcttccgtgtggttgtggccaactctgcactgacctgtgctgatatggacttcctcctcaacgagctggagcggctaggccaggacctgtgagccttctctgtcttgctgccggccttgataccacccctcacccgcagagtcactgcattccctcccagcctttgaggccgggtgcagtggctcacgcctgtaatcccagcactttgggaggccgaggcgggtggatcacttgaggtcaggagttygagaccagcctggccaataaggtgaaaccctgtctctactaaaaatacaaaaattagccgagcatggtggcctgtgcctgtaaacccagctactcaggaggttggggcagaattgcttgaacccagggggcagaggttgcagtgagccgagattgcacccctgcactccaggctgggcaacagtacgagactctgttccaaaaaaaataaaaaagaacagcctttttaggccacagtgacctgcgcaatgtttatatgctttgacctactaactttctcctaactaaatatttgattttaggagagtgtttaaataaattacagtatgtctatatgatgaaatgttattttgccattaaaattttgtttacaaagataatttttattgacataaaaataactttaatgtaatttatgttgaaaaagctgaatacaagtctttatatagagtaatatttgagctgtgttcaaaaatacataggaaaagactgataaaatgaaatatggcaaaatgttaatagttttccctggaataggataataggcaattttaaaacagactcctttaaaaaaacaaacaaacaaaaaaaacatagacttctttatatcttttgagctccctcccttttattatgtaatgaatatgtgttgcttttgtaataggaaaataataaagttaaaatttcaactgc

SEQ ID NO: 7438 - DNA, 2644 bp, Homo sapiens
gcttggggacgcacrgagaggtgcagctgggccgtccagcatcaaacactagcctccacacgtggaaaagaccctgactcccacagtagactagtcttatgggagtcctggctcttgggccaggctgcattaggaaaatggaaaccagactgtcttcaaattcttctgcctagccttagccattagagagaggtcctgctaaagatggactgcaaatgcgcttgatggaaggagatgtcaattccactgaagtcctcatttctgctgagctacctgtgcaccctgcctccggctctcctgagcagagagatcctgatggctgactcagaagcactcccctcccttgctggggacccagtggctgtggaagccttgctccgggccgtgtttggggttgttgtggatgaggccattcagaaaggaaccagtgtctcccagaaggtctgtgagtggaaggagcctgaggagctgaagcagctgctggatttggagctgcggagccagggcgagtcacagaagcagatcctggagcggtgtcgggctgtgattcsctacagtgtcaagactgrtcaccctcggttcttcaaccagctcttctctgggttggatccccatgctctggccgggcgcattatcactgagagcctcaacaccagccagtacacatatgaaatcgcccccgtgtttgtgctcatggaagaggaggtgctgaggaaactgcgggccctggtgggctggagctctggggacggaatcttctgccctggtggctccatctccaacatgtatgctgtaaatctggcccgctatcagcgctacccggattgcaagcagaggggcctccgcacactgccgcccctggccctattcacatcgaaggagtgtcactactccatccagaagggagctgcgtttctgggacttggcaccgacagtgtccgagtggtcaaggctgatgagagagggaaaatggtccccgaggatctggagaggcagattggtatggccgaggctgagggtgctgtgccgttcctggtcagtgccacctctggcaccactgtgctaggggcctttgaccccctggaggcaattgctgatgtgtgccagcgtcatgggctatggctgcatgtggatgctgcctggggtgggagcgtcctgctgtcacagacacacaggcatctcctggatgggatccagagggctgactctgtggcctggaatccccacaagctcctcgcagcaggcctgcaatgctctgcacttcttctccaggatacctcgaacctgctcaagcgctgccatgggtcccaggccagctaccttttccagcaggacaagttctacgatgtggctctggacacgggagacaaggtggtgcagtgtggccgccgtgtggactgtctgaagctgtggctcatgtggaaggcacagggcgatcaagggctggagcggcgcatcgaccaggcctttgtccttgcccggtacctggtggaggaaatgaagaagcgggaagggtttgagctagtcatggagcctgagtttgtcaatgtgtgtttctggttcgtaccccccagcctgcgagggaagcaggagagtccagattaccacgaaaggctgtcaaaggtggcccccgtgctcaaggagcgcatggtgaaggagggctccatgatgattggctaccagccccacgggacccggggcaacttcttccgtgtggttgtggccaactctgcactgacctgtgctgatatggacttcctcctcaacgagctggagcggctaggccaggacctgtgagccttctctgtcttgctgccggccttgataccacccctcacccgcagagtcactgcattccctcccagcctttgaggccgggtgcagtggctcacgcctgtaatcccagcactttgggaggccgaggcgggtggatcacttgaggtcaggagttygagaccagcctggccaataaggtgaaaccctgtctctactaaaaatacaaaaattagccgagcatggtggcctgtgcctgtaaacccagctactcaggaggttggggcagaattgcttgaacccagggggcagaggttgcagtgagccgagattgcacccctgcactccaggctgggcaacagtacgagactctgttccaaaaaaaataaaaaagaacagcctttttaggccacagtgacctgcgcaatgtttatatgctttgacctactaactttctcctaactaaatatttgattttaggagagtgtttaaataaattacagtatgtctatatgatgaaatgttattttgccattaaaattttgtttacaaagataatttttattgacataaaaataactttaatgtaatttatgttgaaaaagctgaatacaagtctttatatagagtaatatttgagctgtgttcaaaaatacataggaaaagactgataaaatgaaatatggcaaaatgttaatagttttccctggaataggataataggcaattttaaaacagactcctttaaaaaaacaaacaaacaaaaaaaacatagacttctttatatcttttgagctccctcccttttattatgtaatgaatatgtgttgcttttgtaataggaaaataataaagttaaaatttcaactgc

SEQ ID NO: 7439 - DNA, 2432 bp, Homo sapiens
tagcgggggcagcctcagagcgggtgagcttggggacgcacrgagaggtgcagctggctacctgtgcaccctgcctccggctctcctgagcagagagatcctgatggctgactcagaagcactcccctcccttgctggggacccagtggctgtggaagccttgctccgggccgtgtttggggttgttgtggatgaggccattcagaaaggaaccagtgtctcccagaaggtctgtgagtggaaggagcctgaggagctgaagcagctgctggatttggagctgcggagccagggcgagtcacagaagcagatcctggagcggtgtcgggctgtgattcsctacagtgtcaagactgrtcaccctcggttcttcaaccagctcttctctgggttggatccccatgctctggccgggcgcattatcactgagagcctcaacaccagccagtacacatatgaaatcgcccccgtgtttgtgctcatggaagaggaggtgctgaggaaactgcgggccctggtgggctggagctctggggacggaatcttctgccctggtggctccatctccaacatgtatgctgtaaatctggcccgctatcagcgctacccggattgcaagcagaggggcctccgcacactgccgcccctggccctattcacatcgaaggagtgtcactactccatccagaagggagctgcgtttctgggacttggcaccgacagtgtccgagtggtcaaggctgatgagagagggaaaatggtccccgaggatctggagaggcagattggtatggccgaggctgagggtgctgtgccgttcctggtcagtgccacctctggcaccactgtgctaggggcctttgaccccctggaggcaattgctgatgtgtgccagcgtcatgggctatggctgcatgtggatgctgcctggggtgggagcgtcctgctgtcacagacacacaggcatctcctggatgggatccagagggctgactctgtggcctggaatccccacaagctcctcgcagcaggcctgcaatgctctgcacttcttctccaggatacctcgaacctgctcaagcgctgccatgggtcccaggccagctaccttttccagcaggacaagttctacgatgtggctctggacacgggagacaaggtggtgcagtgtggccgccgtgtggactgtctgaagctgtggctcatgtggaaggcacagggcgatcaagggctggagcggcgcatcgaccaggcctttgtccttgcccggtacctggtggaggaaatgaagaagcgggaagggtttgagctagtcatggagcctgagtttgtcaatgtgtgtttctggttcgtaccccccagcctgcgagggaagcaggagagtccagattaccacgaaaggctgtcaaaggtggcccccgtgctcaaggagcgcatggtgaaggagggctccatgatgattggctaccagccccacgggacccggggcaacttcttccgtgtggttgtggccaactctgcactgacctgtgctgatatggacttcctcctcaacgagctggagcggctaggccaggacctgtgagccttctctgtcttgctgccggccttgataccacccctcacccgcagagtcactgcattccctcccagcctttgaggccgggtgcagtggctcacgcctgtaatcccagcactttgggaggccgaggcgggtggatcacttgaggtcaggagttygagaccagcctggccaataaggtgaaaccctgtctctactaaaaatacaaaaattagccgagcatggtggcctgtgcctgtaaacccagctactcaggaggttggggcagaattgcttgaacccagggggcagaggttgcagtgagccgagattgcacccctgcactccaggctgggcaacagtacgagactctgttccaaaaaaaataaaaaagaacagcctttttaggccacagtgacctgcgcaatgtttatatgctttgacctactaactttctcctaactaaatatttgattttaggagagtgtttaaataaattacagtatgtctatatgatgaaatgttattttgccattaaaattttgtttacaaagataatttttattgacataaaaataactttaatgtaatttatgttgaaaaagctgaatacaagtctttatatagagtaatatttgagctgtgttcaaaaatacataggaaaagactgataaaatgaaatatggcaaaatgttaatagttttccctggaataggataataggcaattttaaaacagactcctttaaaaaaacaaacaaacaaaaaaaacatagacttctttatatcttttgagctccctcccttttattatgtaatgaatatgtgttgcttttgtaataggaaaataataaagttaaaatttcaactgc

SEQ ID NO: 7440 - DNA, 2420 bp, Homo sapiens
tagcgggggcagcctcagagcgggtgagcttggggacgcacrgagaggtgcagctggctacctgtgcaccctgcctccggctctcctgagcagagagatcctgatggctgactcagaagcactcccctcccttgctggggacccagtggctgtggaagccttgctccgggccgtgtttggggttgttgtggatgaggccattcagaaaggaaccagtgtctcccagaaggtctgtgagtggaaggagcctgaggagctgaagcagctgctggatttggagctgcggagccagggcgagtcacagaagcagatcctggagcggtgtcgggctgtgattcsctacagtgtcaagactgrtcaccctcggttcttcaaccagctcttctctgggttggatccccatgctctggccgggcgcattatcactgagagcctcaacaccagccagtacacatatgaaatcgcccccgtgtttgtgctcatggaagaggaggtgctgaggaaactgcgggccctggtgggctggagctctggggacggaatcttctgccctggtggctccatctccaacatgtatgctgtaaatctggcccgctatcagcgctacccggattgcaagcagaggggcctccgcacactgccgcccctggccctattcacatcgaaggaggtggggaagaggcacaggcccaaccctgggctcctgattctaatctccagccatgtcactactccatccagaagggagctgcgtttctgggacttggcaccgacagtgtccgagtggtcaaggctgatgagagagggaaaatggtccccgaggatctggagaggcagattggtatggccgaggctgagggtgctgtgccgttcctggtcagtgccacctctggcaccactgtgctaggggcctttgaccccctggaggcaattgctgatgtgtgccagcgtcatgggctatggctgcatgtggatggctgactctgtggcctggaatccccacaagctcctcgcagcaggcctgcaatgctctgcacttcttctccaggatacctcgaacctgctcaagcgctgccatgggtcccaggccagctaccttttccagcaggacaagttctacgatgtggctctggacacgggagacaaggtggtgcagtgtggccgccgtgtggactgtctgaagctgtggctcatgtggaaggcacagggcgatcaagggctggagcggcgcatcgaccaggcctttgtccttgcccggtacctggtggaggaaatgaagaagcgggaagggtttgagctagtcatggagcctgagtttgtcaatgtgtgtttctggttcgtaccccccagcctgcgagggaagcaggagagtccagattaccacgaaaggctgtcaaaggtggcccccgtgctcaaggagcgcatggtgaaggagggctccatgatgattggctaccagccccacgggacccggggcaacttcttccgtgtggttgtggccaactctgcactgacctgtgctgatatggacttcctcctcaacgagctggagcggctaggccaggacctgtgagccttctctgtcttgctgccggccttgataccacccctcacccgcagagtcactgcattccctcccagcctttgaggccgggtgcagtggctcacgcctgtaatcccagcactttgggaggccgaggcgggtggatcacttgaggtcaggagttygagaccagcctggccaataaggtgaaaccctgtctctactaaaaatacaaaaattagccgagcatggtggcctgtgcctgtaaacccagctactcaggaggttggggcagaattgcttgaacccagggggcagaggttgcagtgagccgagattgcacccctgcactccaggctgggcaacagtacgagactctgttccaaaaaaaataaaaaagaacagcctttttaggccacagtgacctgcgcaatgtttatatgctttgacctactaactttctcctaactaaatatttgattttaggagagtgtttaaataaattacagtatgtctatatgatgaaatgttattttgccattaaaattttgtttacaaagataatttttattgacataaaaataactttaatgtaatttatgttgaaaaagctgaatacaagtctttatatagagtaatatttgagctgtgttcaaaaatacataggaaaagactgataaaatgaaatatggcaaaatgttaatagttttccctggaataggataataggcaattttaaaacagactcctttaaaaaaacaaacaaacaaaaaaaacatagacttctttatatcttttgagctccctcccttttattatgtaatgaatatgtgttgcttttgtaataggaaaataataaagttaaaatttcaactgc

SEQ ID NO: 7441 - DNA, 2043 bp, Homo sapiens
actgcgaaggaaggaggcaacacgggcaagggctgcctgctgcccgctggagaccgcaccatggagccaggcggggcccgtctgcgtctgcagaggacagragggctgggaggggagcgggagcgccaaccctgtggagatggaaacactgagacgcacagagccccggacttggtacaatggacccgacacatggaggctgtgaaggcacaattgctggagcaagcgcagggacaactgagggagctgctggatcgggccatgcgggaggctatacaatcctacccatcacaagacaaacctctgcccccacctcccccaggttccttgagcaggacccaggagccatccctggggaaacagaaagttttcatcatccgcaagtccctgcttgatgagctgatggaggtgcagcatttccgcaccatctaccacatgttcatcgctggcctgtgtgtcttcatcatcagcaccctggccatcgacttcattgatgagggcaggctgctgctggagtttgacctactgatcttcagcttcggacagctgccattggcgctggtgacctgggtgcccatgtttctgtccaccctgttggcgccgtaccaggccctacggctgtgggccaggggcacctggacgcaggcgacgggcctgggctgtgcgctkytagccgcccacgccgtggtgctctgcgcgctgccggtccacgtggccgtggagcatcagctcccgccggcctcccgttgtgtcctggtcttcgagcaggttaggttcctgatgaaaagctactccttcctgagagaggctgtgcctgggayccttcgtgccagacgaggtgaggggatccaggcccccagtttctccagctacctctacttcctcttctgcccaacactcatctacagggagacttaccctaggacgccctatgtcaggtggaattatgtggccaagaactttgcccaggccctgggatgtgtgctctatgcctgcttcatcctgggccgcctctgtgttcctgtctttgccaacatgagccgagagcccttcagcacccgtgccctggtgctctctatcctgcatgccacgttgccaggcatcttcatgctgctgctcatcttctttgccttcctccattgctrgctcaacgcctttgccgagatgctacgatttggagacaggatgttctaccgggactggtggaactcaacgtccttctccaactactaccgcacttggaacgtggtggtccatgactggctstacagctacgtgtatcaggatgggctgcggctccttggtgcccgggcccgaggggtagccatgctgggtgtgttcctggtctcckcagtggcccatgagtatatcttctgcttcgtcctggggttcttctatcccgtcatgctgatactcttccttgtyattggaggaatgttgaacttcatgatgcatgaccagcgcaccggcccggcatggaacgtgctgatgtggaccatgctgtttctaggccagggaatccaggtcagcctgtactgccaggagtggtacgcacggcggcactgccccttaccccaggcaactttctgggggctggtgacacctcgatcttggtcctgccatacctagaggtcgggacagacgacgctacctgcccagacaccaccaagttctctgcctgcaaaacctgggaccaggactcctgtcygcattcccaaatttggctctgagtcgaggcaacctgcacacaagaccccaccaaggaatgtgcaaggactgagatctgcagacttgtgggtaactgatcacagacctcagcatgggggtgaccagggtgactcttcaatccctatccccatgggctgggtacaggatatcctcctaccccatgactgtcttagggagacttggggtaccttatggatttgatgaatgtgggggaactcagaggaactggggccaccaaggttggaaaagggtttggttcttgactttgtattccttccaatacagcaataaactttgtctccctttttattcatt

SEQ ID NO: 7442 - DNA, 3608 bp, Homo sapiens
cgcccatgtaacatcactagcgaccggtracctmtttttcccccttgcctggctcctgtggtggcaggctgggcacraggaccatgctgggccggagcctccgagaacctgactttgaaaccaaaagttggctaaggagaagaatgtcatgtcctccacctgtcctcaagctgatcagtgcatcacccttcatccactacactaagtgtagaggtttctgyggcactgaaacaaggccaaattacaccaacagagctctgtcaaaaatgtctctctcttatcaagaagaccaagtttctaaatgcctacattactgtgtcagaagaggtggccttaaaacaagctgaagaatcagaaaagagatataagaatggacagtcacttggggatttagatggaattcctattgcagtaaaagacaatttcagcacttctggcattgagacaacatgtgcatcaaatatgctgaaaggttatataccaccttataatgctacagtagttcagaagttgttggatcagggagctctactaatgggaaaaacaaatttagatgagtttgctatgggatctgggagcacagatggtgtatttggaccagttaaaaacccctggagttattcaaaacaatatagagaaaagaggaagcagaatccccacagcgagaatgaagattcagactggctgataactggaggaagctcaggtgggagtgcagctgctgtatcggcgttcacatgctacgcggctttaggatcagatacaggaggatcgaccagaaatcctgctgcccactgtgggcttgttggtttcaaaccaagctatggcttagtttcccgtcatggtctcattcccctggtgaattcgatggatgtgccaggaatcttaaccagatgtgtggatgatgcagcaattgtgttgggtgcactggccggacctgaccccagggactctaccacagtacatgaacctattartaaaccattcatgcttcccagtttggcagatgtgagcaaactatgtataggaattccaaaggaatatcttgtaccggaattatcaagtgaagtacagtctctttggtccaaagctgctgacctctttgagtctgagggggccaaagtaattgaagtatcccttcctcacaccagttattcaattgtctgctaccatgtattgtgcacatcagaagtggcatcgaatatggcaagatttgatgggctacaatatggtcacagatgtgacattgatgtgtccactgaagccatgtatgctgcaaccagacgagaagggtttaatgatgtggtgagaggaagaattctctcaggaaactttttcttattaaaagaaaactatgaaaattattttgtcaaagcacagaaagtgagacgcctcattgctaatgactttgtaaatgcttttaactctggagtagatgtcttgctaactcccaccaccttgagtgaggcagtaccatacttggagttcatcaaagaggacaacagaacccgaagtgcccaggatgatatttttacacaagctgtaaatatggcaggattgccagcagtgagtatccctgttgcactctcaaaccaagggttgccaataggactrcagtttattggacgtgcgttttgtgaccagcagcttcttacagtagccaaatggtttgaaaaacaagtacagtttcctgttattcaacttcaagaactcatggatgattgttcagcagtccttgaaaatgaaaagttagcctctgtctctctaaaacagtaaacatatcttacaaattaaaatgacttttaggctgggtgcagtggctcacacctgtaatcccagcactttgggaggscaaggcgagyggawcatgaggtcagaagatctagaacagcctggtcaacatggtgaaaccccgtctctactaaaaatacaaaaattagccaggcttagtggcgggcatctgtagtcccagctactcaggaggctgaggcaggagaatcacttgaaccctggaggtggaggttgcagtgagccgagatcatgccactgcactgcactccagcctgggtgacaaagcaagactgtgtctcaaaataaataaataaaataaaataaaatgacgtacagagattctatattctagagagtcaaatggtcttgctcaattcttgtaattaggttcttgttaatagtcattccatggaattactttttaaaattcctgtgacaattaataataaataacgtgtcagcatttrgtaagcatccactaagtgtacaatacttctacaataacacaagatacctgttcctcaaagacaatgcattctgccataatgttcattaaagagtttacagtaaaaataagattagggataaacttctcaaaaattgtacatctgtgtaactaaagcactaacaaaaacatgaatagtccttctagaggtaacttggatagcctaggcaggcaacttatcatgtggtgaaggccgcctcaggggttgttaaaaatgcacagaaacaattgagtgcgattattggcttctgagcgctgagcagagcaggtggaagaggaactttgagcacaggaggaaatgcaaccagtcagggcccagaatcatgcaaatctcaggggtatgcctctctggggaggagctccacttgcagggactccttttatttccctaagaaagagctgaaatgactgagaactttcctttcctccttagagttacaattttacttctgctattccggagcccatgcctagaagccagaacaactccatgttacactgagttcatgctcctatttactgatcacaaatgagctcattaatgtcatcgaaacatttattgtaacctaacagaccatcacagattggaaacttggtagatagcagagcatggtattagtgaaaaaggttcaaaatacacaagtaacatacactctgaaaaacatgcagataatttgctgatgaagcagaagaggggatgcgcatggcaagaacttgccttaccccagattctctatatctcatggtttccttttcctcttgactgtctttacgagtgttttttatttgggaccctcgagcccagagatattaatggatatctgtattcaatatttgacaaaatctaatggaaaccatccatttactcatgataaggcttcatcactggatttctgtgtcttcactagaacaccattgtcatctcatattgatcaggtattttaatctagcacttacatattgttgataaatgaaagctgaattgttacttaatgaattcactttgtttagtaaaaaaaaattgttttctaaatatgacgttcatgaagagaaaataatgagtcagaatcatctgcagaaccactggaatgtttcatcgtcacctgttagttttcataaacagttttctgtcctctctgagatcctcccgctcccaaatactcaacctgattaacttcacataaaagtcttatgtgccaggcttagtaatattcctatagattttgactctgaatccctgaaagaggaagaaatccatgagagaaaattgcattactttatagcaagaggaaaccgttttaagttttttaat

SEQ ID NO: 7443 - DNA, 3523 bp, Homo sapiens
agtgacaattaaagatggctgcgcccatgtaacatcactagcgaccggtracctmtttttcccccttgcctggctcctgtggtggcaggctgggcacraggaccatgctgggccggagcctccgagaagtttctgyggcactgaaacaaggccaaattacaccaacagagctctgtcaaaaatgtctctctcttatcaagaagaccaagtttctaaatgcctacattactgtgtcagaagaggtggccttaaaacaagctgaagaatcagaaaagagatataagaatggacagtcacttggggatttagatggaattcctattgcagtaaaagacaatttcagcacttctggcattgagacaacatgtgcatcaaatatgctgaaaggttatataccaccttataatgctacagtagttcagaagttgttggatcagggagctctactaatgggaaaaacaaatttagatgagtttgctatgggatctgggagcacagatggtgtatttggaccagttaaaaacccctggagttattcaaaacaatatagagaaaagaggaagcagaatccccacagcgagaatgaagattcagactggctgataactggaggaagctcaggtgggagtgcagctgctgtatcggcgttcacatgctacgcggctttaggatcagatacaggaggatcgaccagaaatcctgctgcccactgtgggcttgttggtttcaaaccaagctatggcttagtttcccgtcatggtctcattcccctggtgaattcgatggatgtgccaggaatcttaaccagatgtgtggatgatgcagcaattgtgttgggtgcactggccggacctgaccccagggactctaccacagtacatgaacctattartaaaccattcatgcttcccagtttggcagatgtgagcaaactatgtataggaattccaaaggaatatcttgtaccggaattatcaagtgaagtacagtctctttggtccaaagctgctgacctctttgagtctgagggggccaaagtaattgaagtatcccttcctcacaccagttattcaattgtctgctaccatgtattgtgcacatcagaagtggcatcgaatatggcaagatttgatgggctacaatatggtcacagatgtgacattgatgtgtccactgaagccatgtatgctgcaaccagacgagaagggtttaatgatgtggtgagaggaagaattctctcaggaaactttttcttattaaaagaaaactatgaaaattattttgtcaaagcacagaaagtgagacgcctcattgctaatgactttgtaaatgcttttaactctggagtagatgtcttgctaactcccaccaccttgagtgaggcagtaccatacttggagttcatcaaagaggacaacagaacccgaagtgcccaggatgatatttttacacaagctgtaaatatggcaggattgccagcagtgagtatccctgttgcactctcaaaccaagggttgccaataggactrcagtttattggacgtgcgttttgtgaccagcagcttcttacagtagccaaatggtttgaaaaacaagtacagtttcctgttattcaacttcaagaactcatggatgattgttcagcagtccttgaaaatgaaaagttagcctctgtctctctaaaacagtaaacatatcttacaaattaaaatgacttttaggctgggtgcagtggctcacacctgtaatcccagcactttgggaggscaaggcgagyggawcatgaggtcagaagatctagaacagcctggtcaacatggtgaaaccccgtctctactaaaaatacaaaaattagccaggcttagtggcgggcatctgtagtcccagctactcaggaggctgaggcaggagaatcacttgaaccctggaggtggaggttgcagtgagccgagatcatgccactgcactgcactccagcctgggtgacaaagcaagactgtgtctcaaaataaataaataaaataaaataaaatgacgtacagagattctatattctagagagtcaaatggtcttgctcaattcttgtaattaggttcttgttaatagtcattccatggaattactttttaaaattcctgtgacaattaataataaataacgtgtcagcatttrgtaagcatccactaagtgtacaatacttctacaataacacaagatacctgttcctcaaagacaatgcattctgccataatgttcattaaagagtttacagtaaaaataagattagggataaacttctcaaaaattgtacatctgtgtaactaaagcactaacaaaaacatgaatagtccttctagaggtaacttggatagcctaggcaggcaacttatcatgtggtgaaggccgcctcaggggttgttaaaaatgcacagaaacaattgagtgcgattattggcttctgagcgctgagcagagcaggtggaagaggaactttgagcacaggaggaaatgcaaccagtcagggcccagaatcatgcaaatctcaggggtatgcctctctggggaggagctccacttgcagggactccttttatttccctaagaaagagctgaaatgactgagaactttcctttcctccttagagttacaattttacttctgctattccggagcccatgcctagaagccagaacaactccatgttacactgagttcatgctcctatttactgatcacaaatgagctcattaatgtcatcgaaacatttattgtaacctaacagaccatcacagattggaaacttggtagatagcagagcatggtattagtgaaaaaggttcaaaatacacaagtaacatacactctgaaaaacatgcagataatttgctgatgaagcagaagaggggatgcgcatggcaagaacttgccttaccccagattctctatatctcatggtttccttttcctcttgactgtctttacgagtgttttttatttgggaccctcgagcccagagatattaatggatatctgtattcaatatttgacaaaatctaatggaaaccatccatttactcatgataaggcttcatcactggatttctgtgtcttcactagaacaccattgtcatctcatattgatcaggtattttaatctagcacttacatattgttgataaatgaaagctgaattgttacttaatgaattcactttgtttagtaaaaaaaaattgttttctaaatatgacgttcatgaagagaaaataatgagtcagaatcatctgcagaaccactggaatgtttcatcgtcacctgttagttttcataaacagttttctgtcctctctgagatcctcccgctcccaaatactcaacctgattaacttcacataaaagtcttatgtgccaggcttagtaatattcctatagattttgactctgaatccctgaaagaggaagaaatccatgagagaaaattgcattactttatagcaagaggaaaccgttttaagttttttaat

SEQ ID NO: 7444 - DNA, 1150 bp, Homo sapiens
gccatcccggcggctaaggagagcgggcaggcaaggagattccgggccagggtcgcggyggcagtcggcaagcrttcgattctctggcgttggatcgcgagcggtgtctgcttgtcccgccgaggsctcccaggacagggcagggatctagggggtttgcgcacctgctttttaatgccccgccccccyttttttttttaaagtggagggggtgaaagtgagggaggagaatggacagaatactgactggaacgttaattcgagcatttcatatgcgaagagcggaataacagttccgtattcttctttcagtttctccattagattagcttcattttcgaatgctccgttttgcatgcttaattttgaaastagcccgtggtttggcagaatttgactgaattcaggggtgagagtttgatccagtccaagtgtatttgaatttgagcacgcagttcaaccagtgtttacaatggaatttctgaagacttgtgtacttagaagaaatgcatgcactgcggtttgcttctggagaagcaaagttgtccaaaagccttcagttagaaggattagtactacctctccwaggagcactgtcatgcctgcttgggtgatagataaatatgggaagaatgaagtgcttcgattcactcagaacatgatgatgcctatyatacactatccaaatgaagtcattgtcaaagttcacgctgccagtgtaaatcctatagacgttaatatgagaagtggttatggagctacagctttaaatatgaagcgtgatcctttacacgtgaaaatcaaaggagaagaatttcctctgactctgggtcgggatgtctctggcgtggtgatggaatgtgggcttgatgtgaaatacttcaagcctggagatgaggtctgggctgcagttcctccttggaaacaaggcactctttcagagtttgttgtagtcagtgggaatgaggtctctcacaaacccaaatcactcactcatactcaagctgcctctttgccatatgtggctctcacagcctggtctgctataaacaaagttggtggcctgaatgacaagaattgcacaggaaaacgcatttctggaaaggagtccattatcgctgggcatttttcatggccagtggcccatgtt

SEQ ID NO: 7445 - DNA, 1990 bp, Homo sapiens
gccatcccggcggctaaggagagcgggcaggcaaggagattccgggccagggtcgcggyggcagtcggcaagcrttcgattctctggcgttggatcgcgagcggtgtctgcttgtcccgccgaggsctcccaggacagggcagggatctagggggtttgcgcacctgctttttaatgccccgccccccyttttttttttaaagtggagggggtgaaagtgagggaggagaatggacagaatactgactggaacgttaattcgagcatttcatatgcgaagagcggaataacagttccgtattcttctttcagtttctccattagattagcttcattttcgaatgctccgttttgcatgcttaattttgaaastagcccgtggtttggcagaatttgactgaattcaggggtgagagtttgatccagtccaagtgtatttgaatttgagcacgcagttcaaccagtgtttacaatggaatttctgaagacttgtgtacttagaagaaatgcatgcactgcggtttgcttctggagaagcaaagttgtccaaaagccttcagttagaaggattagtactacctctccwaggagcactgtcatgcctgcttgggtgatagataaatatgggaagaatgaagtgcttcgattcactcagaacatgatgatgcctatyatacactatccaaatgaagtcattgtcaaagttcacgctgccagtgtaaatcctatagacgttaatatgagaagtggttatggagctacagctttaaatatgaagcgtgatcctttacacgtgaaaatcaaaggagaagaatttcctctgactctgggtcgggatgtctctggcgtggtgatggaatgtgggcttgatgtgaaatacttcaagcctggagatgaggtctgggctgcagttcctccttggaaacaaggcactctttcagagtttgttgtagtcagtgggaatgaggtctctcacaaacccaaatcactcactcatactcaagctgcctctttgccatatgtggctctcacagcctggtctgctataaacaaagttggtggcctgaatgacaagaattgcacaggaaaacgtgttctaatcttaggcgcttcaggcggagttggtacttttgctatacaggtaatgaaagcatgggatgctcatgtgacagcagtttgctcccaagatgccagtgaacttgtaaggaagcttggtgcagacgatgtaattgattacaaatctggaagtgtggaagagcagttgaaatccttaaaaccatttgattttatccttgataatgttggcggatccactgaaacatgggctccagattttctcaagaaatggtcaggagccacctatgtgactttggtgactcctttcctcctgaacatggaccgattgggcatagcagatggcatgttgcagacaggagtcactgtaggttcaaaggcattaaagcatttctggaaaggagtccattatcgctgggcatttttcatggccagtggcccatgtttagatgacattgcagaactggtggatgcgggaaagatccggccagttattgaacaaacctttcctttttctaaagttccagaagccttcctgaaggtggaaagaggacacgcacgaggaaagactgtaattaatgttgtttaaataaaaatgcagtttagtgattgttgacgttcttatttggtgagtgcctgtgagcccaaatttttttctagccatccctttcaaacatttttccagattagattatacattccatgatacaagctttaaaaaataaacacaccattttggccagtaattgatataaaaatatcagcacttggatttgtctgtagtcagtagaaattcgaagttttttcaagctgttccttcacactggctttgcaggttgttgtggcaccttctgttttactagcttaaactactttattgtcttttttgttttagagacagggtctcgctgtgtca

SEQ ID NO: 7446 - DNA, 1430 bp, Homo sapiens
aggctcaggaagcggcgcggcggcacgtgctgggccagagccccgcgccctgcgtccagccgccgggtgtgtgcgcccgcgtagcccagcgtcgcgcctcggcgcccccacgcgcccacgcagcggcgcggggacccgggcgggggcagagggagggcccggcccagggaggagaaggggccggtcctcccggcgcaggcagcagccgcggcagcccaggaggcggaggcagcggcaacggcagagacagcaacgtgcccgccgcagtcagcccggcctcgtcggacccgcaccggcccgcccgcccgcccgcaccgcgtcggggcgccctctccactgcgcgcggtacaaggaaatggtagaactagtgatctcacccagcctcactgtaaacagcgattgtctggataaactgaagtttaaccgtgctgacgctgctgtgtggactctgagtgacagacaaggcatcaccaaatcggcccccctgagagtgtcccagctcttctccagatcttgcccacgtgtcctcccccgccagccttccacagccatggcagcctacggccagacgcagtacagtgcggggatccagcaggctaccycctatacagcttacccacctccagcacaagcctatggaatcccttcctacagcatcaagacagaagacagcttgaaccattcccctggccagagtggattcctcagctatggctccagcttcagcacctcacccactggacagagcccatacacctaccagatgcacggcacaacagggttctatcaaggaggaaatggactgggcaacgcagccggtttygggagtgtgcaccaggactatccttcctaccccggcttcccccagagccagtacccccagtattacggctcatcctacaaccctccctacgtcccggccagcagcatctgcccttcgcccctctccacgtccacctacgtcctccaggaggcatctcacaacgtccccaaccagagttccgagtcacttgctggtgaatacaacacacacaatggaccttccacaccagcgaaagagggagacrcagacaggccgcacygggcctccgaygggaagctccgaggccggtctaagaggagcagtgacccgtccccggcaggggacaatgagattgaggaaaagcaacttaaggatgtattcaagcaaaacaaggaagaaaaccaaggaagagagacttgggatccagaaaacagtggatccaacccagaaatacaatgaagggaagtctgcagcaagcctaaaaatgatccagtccacattggaggtttctatcactgaggatagatatctccaatacagagtgtgtggctgaatttgacattttaatgaaggtacattgttgcaaacaagaaaaaattaataaattctgacaaaaccaaaaaagtta

SEQ ID NO: 7447 - DNA, 2681 bp, Homo sapiens
aggctcaggaagcggcgcggcggcacgtgctgggccagagccccgcgccctgcgtccagccgccgggtgtgtgcgcccgcgtagcccagcgtcgcgcctcggcgcccccacgcgcccacgcagcggcgcggggacccgggcgggggcagagggagggcccggcccagggaggagaaggggccggtcctcccggcgcaggcagcagccgcggcagcccaggaggcggaggcagcggcaacggcagagacagcaacgtgcccgccgcagtcagcccggcctcgtcggacccgcaccggcccgcccgcccgcccgcaccgcgtcggggcgccctctccactgcgcgcggtacaaggaaatggtagaactagtgatctcacccagcctcactgtaaacagcgattgtctggataaactgaagtttaaccgtgctgacgctgctgtgtggactctgagtgacagacaaggcatcaccaaatcggcccccctgagagtgtcccagctcttctccagatcttgcccacgtgtcctcccccgccagccttccacagccatggcagcctacggccagacgcagtacagtgcggggatccagcaggctaccycctatacagcttacccacctccagcacaagcctatggaatcccttcctacagcatcaagacagaagacagcttgaaccattcccctggccagagtggattcctcagctatggctccagcttcagcacctcacccactggacagagcccatacacctaccagatgcacggcacaacagggttctatcaaggaggaaatggactgggcaacgcagccggtttygggagtgtgcaccaggactatccttcctaccccggcttcccccagagccagtacccccagtattacggctcatcctacaaccctccctacgtcccggccagcagcatctgcccttcgcccctctccacgtccacctacgtcctccaggaggcatctcacaacgtccccaaccagagttccgagtcacttgctggtgaatacaacacacacaatggaccttccacaccagcgaaagagggagacrcagacaggccgcacygggcctccgaygggaagctccgaggccggtctaagaggagcagtgacccgtccccggcaggggacaatgagattgagcgtgtgttcgtgtgggacttggatgagacaataattatttttcactccttactcacggggacatttgcatccagatacgggaaggacaccacgacgtccgtgcgcattggccttatgatggaagagatgatcttcaaccttgcagatacacatctgttcttcaatgacctggaggattgtgaccagatccacgttgatgacgtctcatcagatgacaatggccaagatttaagcacatacaacttctccgctgacggcttccacagttcggccccaggagccaacctgtgcctgggctctggcgtgcacggcggcgtggactggatgaggaagctggccttccgctaccggcgggtgaaggagatgtacaatacctacaagaacaacgttggtgggttgataggcactcccaaaagggagacctggctacagctccgagctgagctggaagctctcacagacctctggctgacccactccctgaaggcactaaacctcatcaactcccggcccaactgtgtcaatgtgctggtcaccaccactcaactaattcctgccctggccaaagtcctgctatatggcctggggtctgtgtttcctattgagaacatctacagtgcaaccaagacagggaaggagagctgcttcgagaggataatgcagagattcggcagaaaagctgtctacgtggtgatcggtgatggtgtggaagaggagcaaggagcgaaaaagcacaacatgcctttctggcggatatcctgccacgcagacctggaggcactgaggcaygccctggagctggagtatttatagcaggatcagcagcatctccacctgccatctcaccctcagaccccctcgccttccccacctccccaccgagaactccagagacccagatgttggacaccaggaaggggccccacagccgagacgacgtgtccagtgaccatctcagaagccgtccatcagtccaaatgggggttctgagaaggaaagtacccaacattggcttcggagtatttgactttggggaaaagggctggctcggagtctagactcttctgtaagactcacagaacaaaagcaaggaattgcyratttggggggtgcctggtgatgaggaggggatgggtttgtcttgtcttctttttaatttatggactagtctcattactccrgaattatgctcttgtacctgtgtggctgggtttcttagtcgttggtttggtttggttttttgaactggtatgtrgggtggttcacagttctaatgtaagcactctmttctccaagttgtgctttgtggggacaatcattctttgaacattagagaggaaggcagttcaagctgttgaaaagactattgcttatttttgtttttaaagacctacttgacgtcatgtggacagtgcacgtgccttacgctacatcttgttttctaggaagagggggatgctgggaaggaatgggtgctttgtgatggataaaaggcattaaataaaaccacgtttacattttg

SEQ ID NO: 7448 - DNA, 1732 bp, Homo sapiens
aggctcaggaagcggcgcggcggcacgtgctgggccagagccccgcgccctgcgtccagccgccgggtgtgtgcgcccgcgtagcccagcgtcgcgcctcggcgcccccacgcgcccacgcagcggcgcggggacccgggcgggggcagagggagggcccggcccagggaggagaaggggccggtcctcccggcgcaggcagcagccgcggcagcccaggaggcggaggcagcggcaacggcagagacagcaacgtgcccgccgcagtcagcccggcctcgtcggacccgcaccggcccgcccgcccgcccgcaccgcgtcggggcgccctctccactgcgcgcggtacaaggaaatggtagaactagtgatctcacccagcctcactgtaaacagcgattgtctggataaactgaagtttaaccgtgctgacgctgctgtgtggactctgagtgacagacaaggcatcaccaaatcggcccccctgagagtgtcccagctcttctccagatcttgcccacgtgtcctcccccgccagccttccacagccatggcagcctacggccagacgcagtacagtgcggggatccagcaggctaccycctatacagcttacccacctccagcacaagcctatggaatcccttcctacagcatcaagacagaagacagcttgaaccattcccctggccagagtggattcctcagctatggctccagcttcagcacctcacccactggacagagcccatacacctaccagatgcacggcacaacagggttctatcaaggaggaaatggactgggcaacgcagccggtttygggagtgtgcaccaggactatccttcctaccccggcttcccccagagccagtacccccagtattacggctcatcctacaaccctccctacgtcccggccagcagcatctgcccttcgcccctctccacgtccacctacgtcctccaggaggcatctcacaacgtccccaaccagagttccgagtcacttgctggtgaatacaacacacacaatggaccttccacaccagcgaaagagggagacrcagacaggccgcacygggcctccgaygggaagctccgaggccggtctaagaggagcagtgacccgtccccggcaggggacaatgagattgagcgtgtgttcgtgtgggacttggatgagacaataattatttttcactccttactcacggggacatttgcatccagatacgggaaggacaccacgacgtccgtgcgcattggccttatgatggaagagatgatcttcaaccttgcagatacacatctgttcttcaatgacctggaggattgtgaccagatccacgttgatgacgtctcatcagatgacaatggccaagatttaagcacatacaacttctccgctgacggcttccacagttcggccccaggagccaacctgtgcctgggctctggcgtgcacggcggcgtggactggatgaggaagctggccttccgctaccggcgggtgaaggagatgtacaatacctacaagaacaacgttggtgggaaggagagctgcttcgagaggataatgcagagattcggcagaaaagctgtctacgtggtgatcggtgatggtgtggaagaggagcaaggagcgaaaaagcacaacatgcctttctggcggatatcctgccacgcagacctggaggcactgaggcaygccctggagctggagtattta

SEQ ID NO: 7449 - DNA, 2336 bp, Homo sapiens
gtacaaggaaatggtagaactagtgatctcacccagcctcactgtaaacagcgattgtctggataaactgaagtttaaccgtgctgacgctgctgtgtggactctgagtgacagacaaggcatcaccaaatcggcccccctgagagtgtcccagctcttctccagatcttgcccacgtgtcctcccccgccagccttccacagccatggcagcctacggccagacgcagtacagtgcggggatccagcaggctaccycctatacagcttacccacctccagcacaagcctatggaatcccttcctacagcatcaagacagaagacagcttgaaccattcccctggccagagtggattcctcagctatggctccagcttcagcacctcacccactggacagagcccatacacctaccagatgcacggcacaacagggttctatcaaggaggaaatggactgggcaacgcagccggtttygggagtgtgcaccaggactatccttcctaccccggcttcccccagagccagtacccccagtattacggctcatcctacaaccctccctacgtcccggccagcagcatctgcccttcgcccctctccacgtccacctacgtcctccaggaggcatctcacaacgtccccaaccagagttccgagtcacttgctggtgaatacaacacacacaatggaccttccacaccagcgaaagagggagacrcagacaggccgcacygggcctccgaygggaagctccgaggccggtctaagaggagcagtgacccgtccccggcaggggacaatgagattgagcgtgtgttcgtgtgggacttggatgagacaataattatttttcactccttactcacggggacatttgcatccagatacgggaaggacaccacgacgtccgtgcgcattggccttatgatggaagagatgatcttcaaccttgcagatacacatctgttcttcaatgacctggaggattgtgaccagatccacgttgatgacgtctcatcagatgacaatggccaagatttaagcacatacaacttctccgctgacggcttccacagttcggccccaggagccaacctgtgcctgggctctggcgtgcacggcggcgtggactggatgaggaagctggccttccgctaccggcgggtgaaggagatgtacaatacctacaagaacaacgttggtgggttgataggcactcccaaaagggagacctggctacagctccgagctgagctggaagctctcacagacctctggctgacccactccctgaaggcactaaacctcatcaactcccggcccaactgtgtcaatgtgctggtcaccaccactcaactaattcctgccctggccaaagtcctgctatatggcctggggtctgtgtttcctattgagaacatctacagtgcaaccaagacagggaaggagagctgcttcgagaggataatgcagagattcggcagaaaagctgtctacgtggtgatcggtgatggtgtggaagaggagcaaggagcgaaaaagcacaacatgcctttctggcggatatcctgccacgcagacctggaggcactgaggcaygccctggagctggagtatttatagcaggatcagcagcatctccacctgccatctcaccctcagaccccctcgccttccccacctccccaccgagaactccagagacccagatgttggacaccaggaaggggccccacagccgagacgacgtgtccagtgaccatctcagaagccgtccatcagtccaaatgggggttctgagaaggaaagtacccaacattggcttcggagtatttgactttggggaaaagggctggctcggagtctagactcttctgtaagactcacagaacaaaagcaaggaattgcyratttggggggtgcctggtgatgaggaggggatgggtttgtcttgtcttctttttaatttatggactagtctcattactccrgaattatgctcttgtacctgtgtggctgggtttcttagtcgttggtttggtttggttttttgaactggtatgtrgggtggttcacagttctaatgtaagcactctmttctccaagttgtgctttgtggggacaatcattctttgaacattagagaggaaggcagttcaagctgttgaaaagactattgcttatttttgtttttaaagacctacttgacgtcatgtggacagtgcacgtgccttacgctacatcttgttttctaggaagagggggatgctgggaaggaatgggtgctttgtgatggataaaaggcattaaataaaaccacgtttacattttg

SEQ ID NO: 7450 - DNA, 1162 bp, Homo sapiens
cggtctttygcccaaagcacgttccctacttcctgtgctcttgcrgagacgcgcgcgtcgrggtttaacgcgtttctgggccgccgtaagcccggcctaggggcagctttgactcgagagccggctataggcgcatggaaggttccctggaacgggaggcgccagcgggggcgctggccgccgtgctaaagcacagctcgacgttgccgcccgaaagcacccaggtccggggctacgacttcaaccgcggtgtgaattaccgcgcactgctggaggccttcggcaccaccggcttccaagcaaccaacttcgggcgcgctgtacrgcaagtcaatgcyatgatcgagaagaagctggaaccactgtcacaggatgaagaccagcacgsggacctgacccagagccgccgsccacttaccagytgcaccattttyctgggrtatacatccaacctcatcagttcaggcatccgtgagaccattcgctaccttgtgcagcacaacatggtggacgtattggtgaccacagctggcggcgtggaggaagacctcatcaagtgcctggcgcccacatacttgggcgagtttagcctcagggggaaggagctccgggagaacgggatcaataggatcggaaacctgctggtgcccaatgasaattactgcaagtttgaggactggctgatgcccattctggaccagatggtgatggagcagaayacagagggtgtaaagtggacgccttcyaagatgatcgcccggctgggcaaggagatcaacaacccagagtcsgtgtattactgggcccagaagaaccacatccctgtgtttagtcccgcacttacagacggctcgctgggcgacatgatcttcttccattcctacaagaacccgggcctggtcctggacatcgttgagggtgcccgaccagacgaggctgtctcctggggcaagatccgggtggatgcacagcccgtcaaggtctatgctgacgyctccctggtcttccccctgcttgtggctgaaacctttgcccagaagatggatgccttcatgcatgagaagaacgaggactgagcggctgcggtcccaggaaggtcttacccccccctcccctactttttggtcagctacgtctctagaataagatggtatctgaagtc

SEQ ID NO: 7451 - DNA, 1393 bp, Homo sapiens
cggtctttygcccaaagcacgttccctacttcctgtgctcttgcrgagacgcgcgcgtcgrggtttaacgcgtttctgggccgccgtaagcccggcctaggggcagctttgactcgagagccggctataggcgcatggaaggttccctggaacgggaggcgccagcgggggcgctggccgccgtgctaaagcacagctcgacgttgccgcccgaaagcacccaggtccggggctacgacttcaaccgcggtgtgaattaccgcgcactgctggaggccttcggcaccaccggcttccaagcaaccaacttcgggcgcgctgtacrgcaagtcaatgcyatgatcgagaagaagctggaaccactgtcacaggatgaagaccagcacgsggacctgacccagagccgccgsccacttaccagytgcaccattttyctgggrtatacatccaacctcatcagttcaggcatccgtgagaccattcgctaccttgtgcagcacaacatggtggacgtattggtgaccacagctggcggcgtggaggaagacctcatcaagtgcctggcgcccacatacttgggcgagtttagcctcagggggaaggagctccgggagaacgggatcaataggatcggaaacctgctggtgcccaatgasaattactgcaagtttgaggactggctgatgcccattctggaccagatggtgatggagcagaayacagagggtgtaaagtggacgccttcyaagatgatcgcccggctgggcaaggagatcaacaacccagagtcsgtgtattactgggcccagaagaaccacatccctgtgtttagtcccgcacttacagacggctcgctgggcgacatgatcttcttccattcctacaagaacccgggcctggtcctggacatcgttgagggtgcccgaccagacgaggctgtctcctggggcaagatccgggtggatgcacagcccgtcaaggtctatgctgacgyctccctggtcttccccctgcttgtggctgaaacctttgcccagaagatggatgccttcatgcatgagaagaacgaggactgagcggctgcggtcccaggaaggtcttaccccctcttctatttattaattkgcagacccagcccctcccctactttttggtcagctacgtctctagaataagatggtatctgaagtccttccatgtctgtgtctcggtccttggtcctgttggtgggtcccctggcttcagcctgctccatcctctgcctcataggcctcctctygccagcactggacgctgcctcccatggcggtcagcaggcagggctctgttgggtggtaggccagcgactgcaccacacyggaacccacaggcagggccagagccagcgcaccct

SEQ ID NO: 7452 - DNA, 1420 bp, Homo sapiens
cggtctttygcccaaagcacgttccctacttcctgtgctcttgcrgagacgcgcgcgtcgrggtttaacgcgtttctgggccgccgtaagcccggcctaggggcagctttgactcgagagccggctataggcgcatggaaggttccctggaacgggaggcgccagcgggggcgctggccgccgtgctaaagcacagctcgacgttgccgcccgaaagcacccaggtccggggctacgacttcaaccgcggtgtgaattaccgcgcactgctggaggccttcggcaccaccggcttccaagcaaccaacttcgggcgcgctgtacrgcaagtcaatgcyatgatcgagaagaagctggaaccactgtcacaggatgaagaccagcacgsggacctgacccagagccgccgsccacttaccagytgcaccattttyctgggrtatacatccaacctcatcagttcaggcatccgtgagaccattcgctaccttgtgcagcacaacatggtggacgtattggtgaccacagctggcggcgtggaggaagacctcatcaagtgcctggcgcccacatacttgggcgagtttagcctcagggggaaggagctccgggagaacgggatcaataggatcggaaacctgctggtgcccaatgasaattactgcaagtttgaggactggctgatgcccattctggaccagatggtgatggagcagaayacagagggtgtaaagtggacgccttcyaagatgatcgcccggctgggcaaggagatcaacaacccagagtcsgtgtattactgggcccagaagaaccacatccctgtgtttagtcccgcacttacagacggctcgctgggcgacatgatcttcttccattcctacaagaacccgggcctggtcctggacatcgttgaggcccaggagtttgatggctctgactcaggtgcccgaccagacgaggctgtctcctggggcaagatccgggtggatgcacagcccgtcaaggtctatgctgacgyctccctggtcttccccctgcttgtggctgaaacctttgcccagaagatggatgccttcatgcatgagaagaacgaggactgagcggctgcggtcccaggaaggtcttaccccctcttctatttattaattkgcagacccagcccctcccctactttttggtcagctacgtctctagaataagatggtatctgaagtccttccatgtctgtgtctcggtccttggtcctgttggtgggtcccctggcttcagcctgctccatcctctgcctcataggcctcctctygccagcactggacgctgcctcccatggcggtcagcaggcagggctctgttgggtggtaggccagcgactgcaccacacyggaacccacaggcagggccagagccagcgcaccct

SEQ ID NO: 7453 - DNA, 1669 bp, Homo sapiens
cggtctttygcccaaagcacgttccctacttcctgtgctcttgcrgagacgcgcgcgtcgrggtttaacgcgtttctgggccgccgtaagcccggcctaggggcagctttgactcgagagccggctataggcgcatggaaggttccctggaacgggaggcgccagcgggggcgctggccgccgtgctaaagcacagctcgacgttgccgcccgaaagcacccaggtccggggctacgacttcaaccgcggtgtgaattaccgcgcactgctggaggccttcggcaccaccggcttccaagcaaccaacttcgggcgcgctgtacrgcaagtcaatgcyatgatcgagaagaagctggaaccactgtcacaggatgaagaccagcacgsggacctgacccagagccgccgsccacttaccagytgcaccattttyctgggrtatacatccaacctcatcagttcaggcatccgtgagaccattcgctaccttgtgcagcacaacatgcagagctccctcataagagtcactggacaaggatgaggttagaagttctgcccagaatgagggcaggggcttccttcttgggccaaattcactgccttgtggctgcaggtggacgtattggtgaccacagctggcggcgtggaggaagacctcatcaagtgcctggcgcccacatacttgggcgagtttagcctcagggggaaggagctccgggagaacgggatcaataggatcggaaacctgctggtgcccaatgasaattactgcaagtttgaggactggctgatgcccattctggaccagatggtgatggagcagaayacagagggtgtaaagtggacgccttcyaagatgatcgcccggctgggcaaggagatcaacaacccagagtcsgtgtattactgggcccagaagaaccacatccctgtgtttagtcccgcacttacagacggctcgctgggcgacatgatcttcttccattcctacaagaacccgggcctggtcctggacatcgttgaggacctgaggctcatcaacacacaggccatctttgccaagtgcactgggatgatcattctgggcgggggcgtggtcaagcaccacattgccaatgccaacctcatgcggaacggggccgactacgctgtttacatcaacacagcccaggagtttgatggctctgactcaggtgcccgaccagacgaggctgtctcctggggcaagatccgggtggatgcacagcccgtcaaggtctatgctgacgyctccctggtcttccccctgcttgtggctgaaacctttgcccagaagatggatgccttcatgcatgagaagaacgaggactgagcggctgcggtcccaggaaggtcttaccccctcttctatttattaattkgcagacccagcccctcccctactttttggtcagctacgtctctagaataagatggtatctgaagtccttccatgtctgtgtctcggtccttggtcctgttggtgggtcccctggcttcagcctgctccatcctctgcctcataggcctcctctygccagcactggacgctgcctcccatggcggtcagcaggcagggctctgttgggtggtaggccagcgactgcaccacacyggaacccacaggcagggccagagccagcgcaccct

SEQ ID NO: 7454 - DNA, 1330 bp, Homo sapiens
cggtctttygcccaaagcacgttccctacttcctgtgctcttgcrgagacgcgcgcgtcgrggtttaacgcgtttctgggccgccgtaagcccggcctaggggcagctttgactcgagagccggctataggcgcatggaaggttccctggaacgggaggcgccagcgggggcgctggccgccgtgctaaagcacagctcgacgttgccgcccgaaagcacccaggtccggggctacgacttcaaccgcggtgtgaattaccgcgcactgctggaggccttcggcaccaccggcttccaagcaaccaacttcgggcgcgctgtacrgcaagtcaatgcyatgatcgagaagaagctggaaccactgtcacaggatgaagaccagcacgsggacctgacccagagccgccgsccacttaccagytgcaccattttyctgggrtatacatccaacctcatcagttcaggcatccgtgagaccattcgctaccttgtgcagcacaacatggtggacgtattggtgaccacagctggcggcgtggaggaagacctcatcaagtgcctggcgcccacatacttgggcgagtttagcctcagggggaaggagctccgggagaacgggatcaataggatcggaaacctgctggtgcccaatgasaattactgcaagtttgaggactggctgatgcccattctggaccagatggtgatggagcagaayacagagggtgtaaagtggacgccttcyaagatgatcgcccggctgggcaaggagatcaacaacccagagtcsgtgtattactgggcccagaagaaccacatccctgtgtttagtcccgcacttacagacggctcgctgggcgacatgatcttcttccattcctacaagaacccgggcctggtcctggacatcgttgaggacctgaggctcatcaacacacaggccatctttgccaagtgcactgggatgatcattctgggcgggggcgtggtcaagcaccacattgccaatgccaacctcatgcggaacggggccgactacgctgtttacatcaacacagcccaggagtttgatggctctgactcaggtgcccgaccagacgaggctgtctcctggggcaagatccgggtggatgcacagcccgtcaaggtctatgctgacgyctccctggtcttccccctgcttgtggctgaaacctttgcccagaagatggatgccttcatgcatgagaagaacgaggactgagcggctgcggtcccaggaaggtcttacccccccctcccctactttttggtcagctacgtctctagaataagatggtatctgaagtc

SEQ ID NO: 7455 - DNA, 1189 bp, Homo sapiens
cggtctttygcccaaagcacgttccctacttcctgtgctcttgcrgagacgcgcgcgtcgrggtttaacgcgtttctgggccgccgtaagcccggcctaggggcagctttgactcgagagccggctataggcgcatggaaggttccctggaacgggaggcgccagcgggggcgctggccgccgtgctaaagcacagctcgacgttgccgcccgaaagcacccaggtccggggctacgacttcaaccgcggtgtgaattaccgcgcactgctggaggccttcggcaccaccggcttccaagcaaccaacttcgggcgcgctgtacrgcaagtcaatgcyatgatcgagaagaagctggaaccactgtcacaggatgaagaccagcacgsggacctgacccagagccgccgsccacttaccagytgcaccattttyctgggrtatacatccaacctcatcagttcaggcatccgtgagaccattcgctaccttgtgcagcacaacatggtggacgtattggtgaccacagctggcggcgtggaggaagacctcatcaagtgcctggcgcccacatacttgggcgagtttagcctcagggggaaggagctccgggagaacgggatcaataggatcggaaacctgctggtgcccaatgasaattactgcaagtttgaggactggctgatgcccattctggaccagatggtgatggagcagaayacagagggtgtaaagtggacgccttcyaagatgatcgcccggctgggcaaggagatcaacaacccagagtcsgtgtattactgggcccagaagaaccacatccctgtgtttagtcccgcacttacagacggctcgctgggcgacatgatcttcttccattcctacaagaacccgggcctggtcctggacatcgttgaggcccaggagtttgatggctctgactcaggtgcccgaccagacgaggctgtctcctggggcaagatccgggtggatgcacagcccgtcaaggtctatgctgacgyctccctggtcttccccctgcttgtggctgaaacctttgcccagaagatggatgccttcatgcatgagaagaacgaggactgagcggctgcggtcccaggaaggtcttacccccccctcccctactttttggtcagctacgtctctagaataagatggtatctgaagtc

SEQ ID NO: 7456 - DNA, 1288 bp, Homo sapiens
cggtctttygcccaaagcacgttccctacttcctgtgctcttgcrgagacgcgcgcgtcgrggtttaacgcgtttctgggccgccgtaagcccggcctaggggcagctttgactcgagagccggctataggcgcatggaaggttccctggaacgggaggcgccagcgggggcgctggccgccgtgctaaagcacagctcgacgttgccgcccgaaagcacccaggtccggggctacgacttcaaccgcggtgtgaattaccgcgcactgctggaggccttcggcaccaccggcttccaagcaaccaacttcgggcgcgctgtacrgcaagtcaatgcyatgcacgsggacctgacccagagccgccgsccacttaccagytgcaccattttyctgggrtatacatccaacctcatcagttcaggcatccgtgagaccattcgctaccttgtgcagcacaacatggtggacgtattggtgaccacagctggcggcgtggaggaagacctcatcaagtgcctggcgcccacatacttgggcgagtttagcctcagggggaaggagctccgggagaacgggatcaataggatcggaaacctgctggtgcccaatgasaattactgcaagtttgaggactggctgatgcccattctggaccagatggtgatggagcagaayacagagggtgtaaagtggacgccttcyaagatgatcgcccggctgggcaaggagatcaacaacccagagtcsgtgtattactgggcccagaagaaccacatccctgtgtttagtcccgcacttacagacggctcgctgggcgacatgatcttcttccattcctacaagaacccgggcctggtcctggacatcgttgaggacctgaggctcatcaacacacaggccatctttgccaagtgcactgggatgatcattctgggcgggggcgtggtcaagcaccacattgccaatgccaacctcatgcggaacggggccgactacgctgtttacatcaacacagcccaggagtttgatggctctgactcaggtgcccgaccagacgaggctgtctcctggggcaagatccgggtggatgcacagcccgtcaaggtctatgctgacgyctccctggtcttccccctgcttgtggctgaaacctttgcccagaagatggatgccttcatgcatgagaagaacgaggactgagcggctgcggtcccaggaaggtcttacccccccctcccctactttttggtcagctacgtctctagaataagatggtatctgaagtc

SEQ ID NO: 7457 - DNA, 1561 bp, Homo sapiens
cggtctttygcccaaagcacgttccctacttcctgtgctcttgcrgagacgcgcgcgtcgrggtttaacgcgtttctgggccgccgtaagcccggcctaggggcagctttgactcgagagccggctataggcgcatggaaggttccctggaacgggaggcgccagcgggggcgctggccgccgtgctaaagcacagctcgacgttgccgcccgaaagcacccaggtccggggctacgacttcaaccgcggtgtgaattaccgcgcactgctggaggccttcggcaccaccggcttccaagcaaccaacttcgggcgcgctgtacrgcaagtcaatgcyatgatcgagaagaagctggaaccactgtcacaggatgaagaccagcacgsggacctgacccagagccgccgsccacttaccagytgcaccattttyctgggrtatacatccaacctcatcagttcaggcatccgtgagaccattcgctaccttgtgcagcacaacatggtggacgtattggtgaccacagctggcggcgtggaggaagacctcatcaagtgcctggcgcccacatacttgggcgagtttagcctcagggggaaggagctccgggagaacgggatcaataggatcggaaacctgctggtgcccaatgasaattactgcaagtttgaggactggctgatgcccattctggaccagatggtgatggagcagaayacagagggtgtaaagtggacgccttcyaagatgatcgcccggctgggcaaggagatcaacaacccagagtcsgtgtattactgggcccagaagaaccacatccctgtgtttagtcccgcacttacagacggctcgctgggcgacatgatcttcttccattcctacaagaacccgggcctggtcctggacatcgttgaggacctgaggctcatcaacacacaggccatctttgccaagtgcactgggatgatcattctgggcgggggcgtggtcaagcaccacattgccaatgccaacctcatgcggaacggggccgactacgctgtttacatcaacacagcccaggagtttgatggctctgactcaggtgcccgaccagacgaggctgtctcctggggcaagatccgggtggatgcacagcccgtcaaggtctatgctgacgyctccctggtcttccccctgcttgtggctgaaacctttgcccagaagatggatgccttcatgcatgagaagaacgaggactgagcggctgcggtcccaggaaggtcttaccccctcttctatttattaattkgcagacccagcccctcccctactttttggtcagctacgtctctagaataagatggtatctgaagtccttccatgtctgtgtctcggtccttggtcctgttggtgggtcccctggcttcagcctgctccatcctctgcctcataggcctcctctygccagcactggacgctgcctcccatggcggtcagcaggcagggctctgttgggtggtaggccagcgactgcaccacacyggaacccacaggcagggccagagccagcgcaccct

SEQ ID NO: 7458 - DNA, 901 bp, Homo sapiens
gggggcgggggtggtggggcttctggactgagccgctgagggtgcgggctgaccctgtaagtggctgcggcgggaagatggcggagctgcgcgtgctcgtagctgtcaagagggtcatcgactacgccgtgaagatccgagtgaagcctgacaggaccggtgtggtcacggatggtgtgaagcactccatgaaccccttctgtgagatcgcggtggaggaggctgtgcggctcaaggagaagaagctggtgaaggaggtcatcgccgtcagctgtgggcctgcacagtgccaggagacgattcgtaccgccctggccatgggtgcagaccgaggtatccacgtggaggtgcccccagcagaagcagaacgcttgggtcccctgcaggtggctcgggtcctggccaagctggcagagaaggagaaggtggacctggtgctgctgggcaaacaggccatcgatgatgactgtaaccagacagggcagatgacagctggatttcttgactggccacagggcacattcgcctcccaggtgaygctggagggggacaagttgaaagtggagcrggagatcgatgggggcctggagaccctgcgcctgaagctgccagctgtggtgacagctgacctgaggctcaacgagccccgctacgccacgctgcccaacatcatgaaagccaagaagaagaagatcgaggtgatcaagcctggggacctgggtgtggacctgacctccaagctctctgtgatcagtgtggaggacccgccccagcgcacggccggcgtcaaggtggagaccactgaggacctggtggccaagctgaaggagattgggcggatttgagcccctcccagagatggcaataaaactgactctcaacatctatctctgttaactta

SEQ ID NO: 7459 - DNA, 2089 bp, Homo sapiens
cggagagaagagagagcccggccagacccactgcgatgagacagcaggacgcgcccaagcccactcctgcagccygccgctgctccggcctggcccggagggtgctgaccatcgccttcgccctgctcatcctgggcctcatgacctgggcctacgccgccggggtgcckctggcctccgatcgctacggcctcctggccttcggcctctacggggccttcctttcagcgcacctggtggcgcagagcctcttcgcgtacctggagcaycggcgggtggcggcggcggcgcgggggccgctggatgcagccaccgcgcgcagtgtggcgctgaccatctccgcctaccaggaggaccccgcgtacctgcgccagtgcctggcgtccgcccgcgccctgctgtacccgcgcgcgcggctgcgcgtcctcatggtggtggatggcaaccgcgccgaggacctmtayatggtcgacatgttccgcgaggtcttcgctgacgaggaccccgccacgtacgtgtgggacggcaactaccaccagccctgggaacccgcggcggcgggcgcggtgggcgccggagcctatcgggaggtggaggcggaggatcctgggcggctggcagtggaggcgctggtgaggactcgyaggtgcgtgtgcgtggcgcagcgctggggcggcaagcgcgaggtcatgtacacagccttcaaggcgctcggagattcggtggactacgtgcaggtctgtgactcrgacacaaggttggaccccatggcactgctggagctcgtgcgggtactggacgaggacccccgggtaggggctgttggtggggaygtgcggatccttaaccctctggactcctgggtcagcttcctaagcagcctgcgatactgggtagccttcaatgtggagcgggcttgtcagagctacttccactgtgtatcctgcatcagcggtcctctaggcctatataggaataacctcttgcagcagtttcttgaggcctggtacaaccagaagttcctgggtacccactgtacttttggggatgaccggcacctcaccaaccgcatgctcagcatgggttatgctaccaagtacacctccaggtcccgctgctactcagagacgccctcgtccttcctgcggtggctgagccagcagacacgctggtccaagtcgtacttccgtgagtggctgtacaacgcgctctggtggcaccggcaccatgcgtggatgacctacgaggcggtggtctccggcctgttccccttcttcgtggcggccactgtgctgcgtctgttctacgcgggccgcccttgggygctgctgtgggtgctgctgtgcgtgcagggcgtggcactggccaaggcggccttcgcggcctggctgcggggctgcctgcgcatggtgcttctgtcgctctacgcgcccctctacatgtgtggcctcctgcctgccaagttcctggcgctagtcaccatgaaccagagtggctggggcacctcgggccggcggaagctggccgctaactacgtccctctgctgcccctggcgctctgggcgctgctgctgcttgggggcctggtccgcagcgtagcacacgaggccagggccgactggagcggcccttcccgcgcagccgaggcctaccacttggccgcgggggccggcgcctacgtgggctactgggtggccatgttgacgctgtactgggtgggcgtgcggagrctttgccggcggcggaccgggggctaccgcgtccaggtgtgagtccagccacgcggatgccgcctcaagggtcttcaggggaggccagaggagagctgctgggccccgagccacgaacttgctgggtggttctctgggcctcagtttccctcctctgcmaaacgagggggtcagcccaagattcttcagtctggactatattgggactgggacttctgggtctccagggagggtatttattggtcagggtgtgggatctgaggagtggagggaaagggtcctgctttctcctcgttcttatttaatctccatttctactgtgtgatcaggatgtaataaagaattttatttattttccc

SEQ ID NO: 7460 - DNA, 2099 bp, Homo sapiens
tgggagagcaagccggagagaagagagagcccggccagacccactgcgatgagacaggacgcgcccaagcccactcctgcagccygccgctgctccggcctggcccggagggtgctgaccatcgccttcgccctgctcatcctgggcctcatgacctgggcctacgccgccggggtgcckctggcctccgatcgctacggcctcctggccttcggcctctacggggccttcctttcagcgcacctggtggcgcagagcctcttcgcgtacctggagcaycggcgggtggcggcggcggcgcgggggccgctggatgcagccaccgcgcgcagtgtggcgctgaccatctccgcctaccaggaggaccccgcgtacctgcgccagtgcctggcgtccgcccgcgccctgctgtacccgcgcgcgcggctgcgcgtcctcatggtggtggatggcaaccgcgccgaggacctmtayatggtcgacatgttccgcgaggtcttcgctgacgaggaccccgccacgtacgtgtgggacggcaactaccaccagccctgggaacccgcggcggcgggcgcggtgggcgccggagcctatcgggaggtggaggcggaggatcctgggcggctggcagtggaggcgctggtgaggactcgyaggtgcgtgtgcgtggcgcagcgctggggcggcaagcgcgaggtcatgtacacagccttcaaggcgctcggagattcggtggactacgtgcaggtctgtgactcrgacacaaggttggaccccatggcactgctggagctcgtgcgggtactggacgaggacccccgggtaggggctgttggtggggaygtgcggatccttaaccctctggactcctgggtcagcttcctaagcagcctgcgatactgggtagccttcaatgtggagcgggcttgtcagagctacttccactgtgtatcctgcatcagcggtcctctaggcctatataggaataacctcttgcagcagtttcttgaggcctggtacaaccagaagttcctgggtacccactgtacttttggggatgaccggcacctcaccaaccgcatgctcagcatgggttatgctaccaagtacacctccaggtcccgctgctactcagagacgccctcgtccttcctgcggtggctgagccagcagacacgctggtccaagtcgtacttccgtgagtggctgtacaacgcgctctggtggcaccggcaccatgcgtggatgacctacgaggcggtggtctccggcctgttccccttcttcgtggcggccactgtgctgcgtctgttctacgcgggccgcccttgggygctgctgtgggtgctgctgtgcgtgcagggcgtggcactggccaaggcggccttcgcggcctggctgcggggctgcctgcgcatggtgcttctgtcgctctacgcgcccctctacatgtgtggcctcctgcctgccaagttcctggcgctagtcaccatgaaccagagtggctggggcacctcgggccggcggaagctggccgctaactacgtccctctgctgcccctggcgctctgggcgctgctgctgcttgggggcctggtccgcagcgtagcacacgaggccagggccgactggagcggcccttcccgcgcagccgaggcctaccacttggccgcgggggccggcgcctacgtgggctactgggtggccatgttgacgctgtactgggtgggcgtgcggagrctttgccggcggcggaccgggggctaccgcgtccaggtgtgagtccagccacgcggatgccgcctcaagggtcttcaggggaggccagaggagagctgctgggccccgagccacgaacttgctgggtggttctctgggcctcagtttccctcctctgcmaaacgagggggtcagcccaagattcttcagtctggactatattgggactgggacttctgggtctccagggagggtatttattggtcagggtgtgggatctgaggagtggagggaaagggtcctgctttctcctcgttcttatttaatctccatttctactgtgtgatcaggatgtaataaagaattttatttattttccc

SEQ ID NO: 7461 - DNA, 2323 bp, Homo sapiens
ccgctgcgcgcagccaggggccaacgagagccgacgctgggcgggcagcgtccgggagcccctccgaccctgcgctcccctcgtccgcgccctgaccccgcgtctccgrccgtccagcccgcgccgcgtcacctcccctcccggagcgaagggccctgctcgcccgaggacggaggcccgcacgggacacggggccccagttyccgccccggaagcccaggacacggctccagtggcggcgcggcccagggcgcaggcgcgggtgtcggtyccaccgcgcgtcgtcctcgccccggccccggccaatcccttcgaatttggccgaggccgggaaatactagctaatcacggcgcgcgctgttgacgccggccaatgggagctccggaaggctgcgtggagacgccagcggcgggcggtggacagtcatggcggcccggcgcggggctctcatagtgctggagggcgtggaccgcgccgggaagagcacgcagagccgcaagctggtggaagcgctgtgcgccgcgggccaccgcgccgaactgctccggttcccggaaagatcaactgaaatcggcaaacttctgagttcctacttgcaaaagaaaagtgacgtggaggatcactcggtgcacctgcttttttctgcaaatcgctgggaacaagtgtaaaaaccattgcacactgctccctctgcccttgccactttccttcctcctgagattcagtgaacgcagcactcgattctgaatgacagtgacagtagtgctgggcctgatgttcttctgtttagcagtcctgtgggcagaggtggtgaagcgccctagttcccaaagggcgctaatgaatgctgtttcgtcctcctgctccccacaccccataactaatagacttcagtttttcgggtttttttagacggagttccgctctgtcgccaggcagaggtgtgatctcggctcactgcaacctccgcctcccaggttcaagcgattctcctgcgtcagcctcccgagtagctgggactacaggcgcgccccagcatgctcagctaatttttgcaattttaatttactttatttttaaatttaatttttgtatttttagtagagacagggtttcaccatgttggccaggatggtctctyttgaccttgtgatccactcgcctcggcctcccaaagttctgggattacgcaggtgtgagccaccgtacctggcccttttttttttatttttaagacaaggtattgctctgtggcccaggctggagtgcagtggcacccgatcatggctcactgcagcctcaacttcctaggctcaagcagtcctcccacctcagcatcctgagtagcttagggccataggggcatgctaccaagcccggctaatttttttttttttttttaatgtagagtcaaggtctcaccatatcacgcccaggctggtctcaaacccctggcctcatagacttaatgttttaaagatagctttaggtatatagaaaaactgatcaaaaagtagagtatgtagagcgctccctacatactacccctgccttccccccttccccattatttatgtgctgtgttatgttacatttgttaaaattgataaccaatattgatacattagtaactgagtttatatgaactctcctaccacctttttttgttttacatcattgtagtaggtttcctcttcattcaacacttaatgttgatgtgtgttctttcaatgtttttatttacatttatatacatatgtagaaactactatagttagaattttgttttttaacataaatgaggtcataccatacaaattatttggcagctttctttctaactctgccttacagatttctgcacttacagatcccctaactctgcccttctcattctctttaattgtcgtcgcattgtctctagaaccacggtacgtgtagccagttccctgctggtgaatcttcagtggttcctcatcatccgtgttacatgaaacactgcattactctcctccggcttagctttgtgtcttgcttggaaaggctgtccccactccaagtcttaaatgaaaatgagaccatttttaataatctttttaacacatctagaatttatggaggcaattgttcttctgattttgctttttgtggctttgtagaaaagtgatgaaacacgtatatgcccaatttaaaatgaagaataatcctgattttactttttagataataatcttatcccaggtacccagggctacgtctcttgtgtccatctattctcctacaggttacttgtttccctaatagatatttaagtttcctcta

SEQ ID NO: 7462 - DNA, 1450 bp, Homo sapiens
ccgctgcgcgcagccaggggccaacgagagccgacgctgggcgggcagcgtccgggagcccctccgaccctgcgctcccctcgtccgcgccctgaccccgcgtctccgrccgtccagcccgcgccgcgtcacctcccctcccggagcgaagggccctgctcgcccgaggacggaggcccgcacgggacacggggccccagttyccgccccggaagcccaggacacggctccagtggcggcgcggcccagggcgcaggcgcgggtgtcggtyccaccgcgcgtcgtcctcgccccggccccggccaatcccttcgaatttggccgaggccgggaaatactagctaatcacggcgcgcgctgttgacgccggccaatgggagctccggaaggctgcgtggagacgccagcggcgggcggtggacagtcatggcggcccggcgcggggctctcatagtgctggagggcgtggaccgcgccgggaagagcacgcagagccgcaagctggtggaagcgctgtgcgccgcgggccaccgcgccgaactgctccggttcccggaaagatcaactgaaatcggcaaacttctgagttcctacttgcaaaagaaaagtgacgtggaggatcactcggtgcacctgcttttttctgcaaatcgctgggaacaagtgccgttaattaaggaaaagttgagccagggcgtgaccctcgtcgtggacagatacgcattttctggtgtggccttcaccggtgccaaggagaatttttccctagaytggtgtaaacagccagacgtgggccttcccaaaccygacctggtcctgttcctccagttacagctggcggatgmtgccaagcggggagcgtttggccatgagcgctatgagaacggggctttccaggagcgggcgctccggtgtttccaccagctcatgaaagacacgactttgaactggaagatggtggatgcttccaaaagcatcgaagctgtccatgaggacatccgcgtgctctctgaggacgccatccgcactgccacagagaagccgctgggggagctatggaagtgacccaaggctgcccactggagacgcctctccctgcagtcccccgagaggtgggagactcgcrgaaggcccygtccccagcrgagtccagaccccacaacttcaggagctctttcccggcagcagagatctgcaggctgcctcttytgccccggagctggggtgcactggggacccccgtggtggggaccttggcagtgtggacatgagcagagcgatggagcagtctcctgccctctcccctgtcctgatggcactctgttgtattttcttactgaagttcagtgataactctgagcagtttcattgtgatcactgtaaatggtaatcagttggaattctcctaaatgtcttccagacactagtaaaaaamgacctgaaaattgtt

SEQ ID NO: 7463 - DNA, 1009 bp, Homo sapiens
ggcccagggcgcaggcgcgggtgtcggtyccaccgcgcgtcgtcctcgccccggccccggccaatcccttcgaatttggccgaggccgggaaatactagctaatcacggcgcgcgctgttgacgccggccaatgggagctccggaaggctgcgtggagacgccagcggcgggcggtggacagtcatggcggcccggcgcggggctctcatagtgctggagggcgtggaccgcgccgggaagagcacgcagagccgcaagctggtggaagcgctgtgcgccgcgggccaccgcgccgaactgctccggttcccggaaagatcaactgaaatcggcaaacttctgagttcctacttgcaaaagaaaagtgacgtggaggatcactcggtgcacctgcttttttctgcaaatcgctgggaacaagtgccgttaattaaggaaaagttgagccagggcgtgaccctcgtcgtggacagatacgcattttctggtgtggccttcaccggtgccaaggagaatttttccctagaytggtgtaaacagccagacgtgggccttcccaaaccygacctggtcctgttcctccagttacagctggcggatgmtgccaagcggggagcgtttggccatgagcgctatgagaacggggctttccaggagcgggcgctccggtgtttccaccagctcatgaaagacacgactttgaactggaagatggtggatgcttccaaaagcatcgaagctgtccatgaggacatccgcgtgctctctgaggacgccatccgcactgccacagagaagccgctgggggagctatggaatgtggacatgagcagagcgatggagcagtctcctgccctctcccctgtcctgatggcactctgttgtattttcttactgaagttcagtgataactctgagcagtttcattgtgatcactgtaaatggtaatcagttggaattctcctaaatgtcttccagacactagtaaaaaamgacctgaaaattgtt

SEQ ID NO: 7464 - DNA, 1160 bp, Homo sapiens
ccgctgcgcgcagccaggggccaacgagagccgacgctgggcgggcagcgtccgggagcccctccgaccctgcgctcccctcgtccgcgccctgaccccgcgtctccgrccgtccagcccgcgccgcgtcacctcccctcccggagcgaagggccctgctcgcccgaggacggaggcccgcacgggacacggggccccagttyccgccccggaagcccaggacacggctccagtggcggcgcggcccagggcgcaggcgcgggtgtcggtyccaccgcgcgtcgtcctcgccccggccccggccaatcccttcgaatttggccgaggccgggaaatactagctaatcacggcgcgcgctgttgacgccggccaatgggagctccggaaggctgcgtggagacgccagcggcgggcggtggacagtcatggcggcccggcgcggggctctcatagtgctggagggcgtggaccgcgccgggaagagcacgcagagccgcaagctggtggaagcgctgtgcgccgcgggccaccgcgccgaactgctccggttcccggaaagatcaactgaaatcggcaaacttctgagttcctacttgcaaaagaaaagtgacgtggaggatcactcggtgcacctgcttttttctgcaaatcgctgggaacaagtaatttttccctagaytggtgtaaacagccagacgtgggccttcccaaaccygacctggtcctgttcctccagttacagctggcggatgmtgccaagcggggagcgtttggccatgagcgctatgagaacggggctttccaggagcgggcgctccggtgtttccaccagctcatgaaagacacgactttgaactggaagatggtggatgcttccaaaagcatcgaagctgtccatgaggacatccgcgtgctctctgaggacgccatccgcactgccacagagaagccgctgggggagctatggaatgtggacatgagcagagcgatggagcagtctcctgccctctcccctgtcctgatggcactctgttgtattttcttactgaagttcagtgataactctgagcagtttcattgtgatcactgtaaatggtaatcagttggaattctcctaaatgtcttccagacactagtaaaaaamgacctgaaaattgtt

SEQ ID NO: 7465 - DNA, 2056 bp, Homo sapiens
cccgcggccccgcccgcctccgcctccggctccccgcactctccgggtccacgcatcgtcctcccgcgcgcccgcccgcccatggccgggaaggtgcggtcactgctgccgccgctgctgctggccgccgcgggcctcgccggcctcctactgctgtgcgtccccacccgcgacgtccgggagccgcccgccctcaagtatggcatcgtcctggacgctggttcttcacacacrtccatgtttatctacaagtggccggcagacaaggagaacgacacaggcattgtgggccagcacagctcctgtgatgttccaggtgggggcatctccagctatgcagacaacccttctggggccagccagagtcttgttggatgcctcgaacaggygcttcaggatgtgcccaaagagagacacgcgggcacacccctctacctgggagccacagcgggtatgcgcctgctcaacctgaccaatccagaggcctcgaccagtgtgctcatggcagtgactcacacactgacccagtacccctttgacttccggggtgcacgcatcctctcgggccaggaagagggggtgtttggctgggtgactgccaactacctgctggagaacttcatcaagtacggctgggtgggccggtggttccggccacrgaaggggacactgggggccatggacctggggggtgcctctacccagatcacttttgagacaaccagtccagctgaggacagagccagcgaggtccagctgcatctctacggccagcactaccgagtctacacccacagcttcctctgctatggccgtgaccaggtcctccagaggctgctggccagygccctccagacccacggcttccacccctgctggccgaggggcttttccacccaagtgctgctcggggatgtgtaccagtcaccatgcaccatggcccagcggccccagaacttcaacagcagtgccagggtcagcctgtcagggagcagtgacccccacctctgccgagatctggtttctgggctcttcagcttctcctcctgccccttctcccgatgctctttcaatggggtcttccagcccccagtggctgggaactttgtsgccttctctgccttcttctacactgtggactttttgcggacttcgatggggctgcccgtggccaccctgcagcagctggaggcagccgcagtgaatgtctgcaaccagacctgggctcagcagctgctgagtcgcggctacggcttcgatgagcgcgccttcggcggcgtgatcttccagaagaaggccgcggacactgcagtgggctgggcgctcggctacatgctgaacctgaccaacctgatccccgccgacccgccggggctgcgcaagggcacagacttcagctcctgggtcgtcctcctgctgctcttcgcctccgcgctcctggctgcgcttgtcctgctgctgcgtcaggtgcactccgccaagctgccaagcaccatttaggggccgacgggggcagctgccccatccctcccccaacccctgtatccccaccccgtactcccacccctcccacaacccctgtacctcccacccctgtatccccacccctccacccacccctctcccaacctctctccccgcccctgtatcctgcattcctccacccaccctctatcccccaccgctccaccccaccactgtcttctccatccttccaccccaccctcagcgtctctgcccctaaggcagcccaggaaataggaactgagactctggtacccacaggagcctgggtgggcaaagagcgctcaatccagctccttgaacccctccagcccgcttcagcctgggcatcactgcaggccccgtgctcctcctcctcctcctcagggctgggtctccagagagtggggccttggtcctgagaatcagcccttagaggctccttctgtgtagtctgggtctgtactggggagggtcacagcccacgggctggcagccagcccagcacctacttgtaaaaattttgtaataaaaagtttttcctagagacgtg

SEQ ID NO: 7466 - DNA, 1566 bp, Homo sapiens
cccgcggccccgcccgcctccgcctccggctccccgcactctccgggtccacgcatcgtcctcccgcgcgcccgcccgcccatggccgggaaggtgcggtcactgctgccgccgctgctgctggccgccgcgggcctcgccggcctcctactgctgtgcgtccccacccgcgacgtccgggagccgcccgccctcaagtatggcatcgtcctggacgctggttcttcacacacrtccatgtttatctacaagtggccggcagacaaggagaacgacacaggcattgtgggccagcacagctcctgtgatgttccaggtgggggcatctccagctatgcagacaacccttctggggccagccagagtcttgttggatgcctcgaacaggygcttcaggatgtgcccaaagagagacacgcgggcacacccctctacctgggagccacagcgggtatgcgcctgctcaacctgaccaatccagaggcctcgaccagtgtgctcatggcagtgactcacacactgacccagtacccctttgacttccggggtgcacgcatcctctcgggccaggaagagggggtgtttggctgggtgactgccaactacctgctggagaacttcatcaagtacggctgggtgggccggtggttccggccacrgaaggggacactgggggccatggacctggggggtgcctctacccagatcacttttgagacaaccagtccagctgaggacagagccagcgaggtccagctgcatctctacggccagcactaccgagtctacacccacagcttcctctgctatggccgtgaccaggtcctccagaggctgctggccagygccctccagacccacggcttccacccctgctggccgaggggcttttccacccaagtgctgctcggggatgtgtaccagtcaccatgcaccatggcccagcggccccagaacttcaacagcagtgccagggtcagcctgtcagggagcagtgacccccacctctgccgagatctggtttctgggctcttcagcttctcctcctgccccttctcccgatgctctttcaatggggtcttccagcccccagtggctgggaactttgtsgccttctctgccttcttctacactgtggactttttgcggacttcgatggggctgcccgtggccaccctgcagcagctggaggcagccgcagtgaatgtctgcaaccagacctgggctcagctgcaagctcgggtgccagggcaacgggcccgcctggccgactactgcgccggggccatgttcgtgcagcagctgctgagtcgcggctacggcttcgatgagcgcgccttcggcggcgtgatcttccagaagaaggccgcggacactgcagtgggctgggcgctcggctacatgctgaacctgaccaacctgatccccgccgacccgccggggctgcgcaagggcacagacttcagctcctgggtcgtcctcctgctgctcttcgcctccgcgctcctggctgcgcttgtcctgctgctgcgtcaggtgcactccgccaagctgccaagcaccatt

SEQ ID NO: 7467 - DNA, 2840 bp, Homo sapiens
ctcccagcagaagaggagaasaggttgtgtgggacaagctgctcccgacagaaggatgtcgctgctgagcctgccctggctgggcctcagacyggtggcaaygtccccatggctactcctgctgctggttgtgggctcctggctactcgcccgcatcctggcttggacctatgccttctataacaactgccgccggctccagtgtttcccacagcccccaaaacggaactggttttggggtcacctgggcctgatcactcctacagaggagggcttgaagractcgacccagatgtcggccacctattcccagggctttacggttcctgaagccctggctgggagaagggatmctgctgagtggcggtgacaagtggagccgccaccgtcggatgctgacgcccgccttccatttcaacatcctgaagtcctatataacgatcttcaacaagagtgcaaacatcatgcttgacaagtggcagcacctggcctcagagggcagcagtygtctggacatgtttgagcacatcagcctcatgaccttggacagtctacagaaatgcatcttcagctttgacagccattgtcaggagaggcccagtgaatatattgccaccatcttggagctcagtgcccttgtagagaaaagaagccagcatatcctccagyacatggactttctgtattacctctcccatgaygggyggcgcttccacagggcctgccgcctggtgcatgacttcacagacgctgtcatccgggagcggcgtcgcaccctccccactcagggtattgatgattttttcaaagacaaagccaagtccaagactttggatttcattgatgtgcttctgctgagcaaggtaggtttctctatgatrtgartttaggtgagagaatagagcttcatgtcaaatgtcaggtgaaataaattggttttgatccaaagggcactgggagccatggaagatgcttgagaaagggaaggtcacagataggttttagagatgactttaytgcatgcagcccacagggcactgctaattctgaaactgtgargagcatgatattttattcaacttayaagttagtgtgttagtctttcacatttttatgtgtatctatatgtctaygtctttgtctatgtctgtatctatgataaaagatgcaccaarcccctggatcacagcagcccattaattatttacagcagtaacagcaggtggagtaggatggtagtgctggctccccattcctagggcaacacaatgtttttacctgtaaatgcacaagaatttgcaccaaggagaggggcccccacgttatgagtattatagcttatataggacagctagctcatatgctccttctttattayagggtgaaagttagagacagagaaagagagagagagagaatgctttgttctggmgtataaactacccctctcctgtgagatggcaatttctagagttttataacccaaatatcttctggaaagataagattctctgggtttaccactctagaatgtcagcaaatatttttggagcaatacataatttctaacctccaaggcaaattgccattcaaatatcctgtaccccaggttgccagtatctttttctctgaaagtctgtattatgcagaaaaatgaaaatattcragaaccattgattcctgtcaccagggtccaaagaggaggcaaargatctgggggaagcccttggagttggggctttggtgatggtgaacaagagagatctagacgtgcagagtgcatttgagtttctggaagatcagagcttcagagattatctcargttagactccggagtctcagagatagtataatttgtgtgtgtgtgtgtgtgtgtgtgtgtgtgtgtgtgtgtgtgtcttgctttctcttcaggatgaagatgggaaggcattgtcagatgaggatataagagcagaggctgacaccttcatgtttgsaggccatgacaccacggccagtggcctctcctgggtcctgtacaaccttgcgaggcacccagartaccaggagcgctgccgacaggaggtgcaagagcttctgaaggaccgcgatcctaaagagattgaatgggacgacctggcccagctgcccttcctgaccatgtgcgtgaaggagagcctgaggttacatcccccagctcccttcatctcccgatgctgcacccaggacrttgttctcccagatggccgagtcatccccaaaggcattacctgcctcatcgatattataggggtccatcacaacccaactgtgtggccggatcctgaggtgctgccttccccattcaccaccacyacccccatcctctacttttgtgtgtgtgtgtgtgaattccaaggttcctagtggagggggcagggttttgatgaggaaaatccaacatcacctcrccccaaaacacacacaastgtctctccaaggctgctggacataggaaatcccackggcaaaccttctttgtytcacctgcaggtctacgaccccttccgctttgacccagagaacagcaaggggaggtcacctctggcttttattccyttctccgcagggcccaggarctgcatcgggcaggcgttcgccatggcggagatgaaagtggtcctggcgytgatgctgctgcacttccggttcctgccagaccacactgagccccgcaggaagctggaaytgatcatgcgcgccgagggcgggctttggctgcgggtggagcccctgaatgtargcttgcagtgactttctgacccatccacctgtttttttgcagattgtcatgaataaaacggtgctgtcacctctr

SEQ ID NO: 7468 - DNA, 1719 bp, Homo sapiens
ctcccagcagaagaggagaasaggttgtgtgggacaagctgctcccgacagaaggatgtcgctgctgagcctgccctggctgggcctcagacyggtggcaaygtccccatggctactcctgctgctggttgtgggctcctggctactcgcccgcatcctggcttggacctatgccttctataacaactgccgccggctccagtgtttcccacagcccccaaaacggaactggttttggggtcacctgggcctgatcactcctacagaggagggcttgaagractcgacccagatgtcggccacctattcccagggctttacgrtatggctgggtcccatcatccccttcatcgttttatgccaccctgacaccatccggtctatcaccaatgcctcagctgccattgcacycaaggataatctcttcatcaggttcctgaagccctggctgggagaagggatmctgctgagtggcggtgacaagtggagccgccaccgtcggatgctgacgcccgccttccatttcaacatcctgaagtcctatataacgatcttcaacaagagtgcaaacatcatgcttgacaagtggcagcacctggcctcagagggcagcagtygtctggacatgtttgagcacatcagcctcatgaccttggacagtctacagaaatgcatcttcagctttgacagccattgtcaggagaggcccagtgaatatattgccaccatcttggagctcagtgcccttgtagagaaaagaagccagcatatcctccagyacatggactttctgtattacctctcccatgaygggyggcgcttccacagggcctgccgcctggtgcatgacttcacagacgctgtcatccgggagcggcgtcgcaccctccccactcagggtattgatgattttttcaaagacaaagccaagtccaagactttggatttcattgatgtgcttctgctgagcaaggatgaagatgggaaggcattgtcagatgaggatataagagcagaggctgacaccttcatgtttgsargccatgacaccacggccagtggcctctcctgggtcctgtacaaccttgcgaggcacccagartaccaggagcgctgccgacaggaggtgcaagagcttctgaaggaccgcgatcctaaagagattgaatgggacgacctggcccagctgcccttcctgaccatgtgcgtgaaggagagcctgaggttacatcccccagctcccttcatctcccgatgctgcacccaggacrttgttctcccagatggccgagtcatccccaaaggcattacctgcctcatcgatattataggggtccatcacaacccaactgtgtggccggatcctgaggtctacgaccccttccgctttgacccagagaacagcaaggggaggtcacctctggcttttattccyttctccgcagggcccaggarctgcatcgggcaggcgttcgccatggcggagatgaaagtggtcctggcgytgatgctgctgcacttccggttcctgccagaccacactgagccccgcaggaagctggaaytgatcatgcgcgccgagggcgggctttggctgcgggtggagcccctgaatgtargcttgcagtgactttctgacccatccacctgtttttttgcagattgtcatgaataaaacggtgctgtcacctctgcctgggcctcactgacagcctgcar

SEQ ID NO: 7469 - DNA, 1803 bp, Homo sapiens
ctgggggtggcagggctggaargtcctggcctgggatgaagaggggactgcctaaggctggggtggctccaagatgctggcatgggaaactgggggtttcctggtaamtggactcctagcaaactcccaaggattcaggatgtcgctgctgagcctgccctggctgggcctcagacyggtggcaaygtccccatggctactcctgctgctggttgtgggctcctggctactcgcccgcatcctggcttggacctatgccttctataacaactgccgccggctccagtgtttcccacagcccccaaaacggaactggttttggggtcacctgggcctgatcactcctacagaggagggcttgaagractcgacccagatgtcggccacctattcccagggctttacgrtatggctgggtcccatcatccccttcatcgttttatgccaccctgacaccatccggtctatcaccaatgcctcagctgccattgcacycaaggataatctcttcatcaggttcctgaagccctggctgggagaagggatmctgctgagtggcggtgacaagtggagccgccaccgtcggatgctgacgcccgccttccatttcaacatcctgaagtcctatataacgatcttcaacaagagtgcaaacatcatgcttgacaagtggcagcacctggcctcagagggcagcagtygtctggacatgtttgagcacatcagcctcatgaccttggacagtctacagaaatgcatcttcagctttgacagccattgtcaggagaggcccagtgaatatattgccaccatcttggagctcagtgcccttgtagagaaaagaagccagcatatcctccagyacatggactttctgtattacctctcccatgaygggyggcgcttccacagggcctgccgcctggtgcatgacttcacagacgctgtcatccgggagcggcgtcgcaccctccccactcagggtattgatgattttttcaaagacaaagccaagtccaagactttggatttcattgatgtgcttctgctgagcaaggatgaagatgggaaggcattgtcagatgaggatataagagcagaggctgacaccttcatgtttgsargccatgacaccacggccagtggcctctcctgggtcctgtacaaccttgcgaggcacccagartaccaggagcgctgccgacaggaggtgcaagagcttctgaaggaccgcgatcctaaagagattgaatgggacgacctggcccagctgcccttcctgaccatgtgcgtgaaggagagcctgaggttacatcccccagctcccttcatctcccgatgctgcacccaggacrttgttctcccagatggccgagtcatccccaaaggcattacctgcctcatcgatattataggggtccatcacaacccaactgtgtggccggatcctgaggtctacgaccccttccgctttgacccagagaacagcaaggggaggtcacctctggcttttattccyttctccgcagggcccaggarctgcatcgggcaggcgttcgccatggcggagatgaaagtggtcctggcgytgatgctgctgcacttccggttcctgccagaccacactgagccccgcaggaagctggaaytgatcatgcgcgccgagggcgggctttggctgcgggtggagcccctgaatgtargcttgcagtgactttctgacccatccacctgtttttttgcagattgtcatgaataaaacggtgctgtcacctctgcctgggcctcactgacagcctgcar

SEQ ID NO: 7470 - DNA, 1898 bp, Homo sapiens
ctcccagcagaagaggagaasaggttgtgtgggacaagctgctcccgacagaaggatgtcgctgctgagcctgccctggctgggcctcagacyggtggcaaygtccccatggctactcctgctgctggttgtgggctcctggctactcgcccgcatcctggcttggacctatgccttctataacaactgccgccggctccagtgtttcccacagcccccaaaacggaactggttttggggtcacctgggcctgatcactcctacagaggagggcttgaagractcgacccagatgtcggccacctattcccagggctttacgrtatggctgggtcccatcatccccttcatcgttttatgccaccctgacaccatccggtctatcaccaatgcctcagctgccattgcacycaaggataatctcttcatcaggttcctgaagccctggctgggagaagggatmctgctgagtggcggtgacaagtggagccgccaccgtcggatgctgacgcccgccttccatttcaacatcctgaagtcctatataacgatcttcaacaagagtgcaaacatcatgcttgacaagtggcagcacctggcctcagagggcagcagtygtctggacatgtttgagcacatcagcctcatgaccttggacagtctacagaaatgcatcttcagctttgacagccattgtcaggagaggcccagtgaatatattgccaccatcttggagctcagtgcccttgtagagaaaagaagccagcatatcctccagyacatggactttctgtattacctctcccatgaygggyggcgcttccacagggcctgccgcctggtgcatgacttcacagacgctgtcatccgggagcggcgtcgcaccctccccactcagggtattgatgattttttcaaagacaaagccaagtccaagactttggatttcattgatgtgcttctgctgagcaaggatgaagatgggaaggcattgtcagatgaggatataagagcagaggctgacaccttcatgtttgsargccatgacaccacggccagtggcctctcctgggtcctgtacaaccttgcgaggcacccagartaccaggagcgctgccgacaggaggtgcaagagcttctgaaggaccgcgatcctaaagagattgaatgggacgacctggcccagctgcccttcctgaccatgtgcgtgaaggagagcctgaggttacatcccccagctcccttcatctcccgatgctgcacccaggacrttgttctcccagatggccgagtcatccccaaaggcattacctgcctcatcgatattataggggtccatcacaacccaactgtgtggccggatcctgaggtgctgccttccccattcaccaccacyacccccatcctctacttttgtgtgtgtgtgtgtgaattccaaggttcctagtggagggggcagggttttgatgaggaaaatccaacatcacctcrccccaaaacacacacaastgtctctccaaggctgctggacataggaaatcccackggcaaaccttctttgtytcacctgcaggtctacgaccccttccgctttgacccagagaacagcaaggggaggtcacctctggcttttattccyttctccgcagggcccaggarctgcatcgggcaggcgttcgccatggcggagatgaaagtggtcctggcgytgatgctgctgcacttccggttcctgccagaccacactgagccccgcaggaagctggaaytgatcatgcgcgccgagggcgggctttggctgcgggtggagcccctgaatgtargcttgcagtgactttctgacccatccacctgtttttttgcagattgtcatgaataaaacggtgctgtcacctctr

SEQ ID NO: 7471 - DNA, 1609 bp, Homo sapiens
ctcccagcagaagaggagaasaggttgtgtgggacaagctgctcccgacagaaggatgtcgctgctgagcctgccctggctgggcctcagacyggtggcaaygtccccatggctactcctgctgctggttgtgggctcctggctactcgcccgcatcctggcttggacctatgccttctataacaactgccgccggctccagtgtttcccacagcccccaaaacggaactggttttggggtcacctgggcctgatcactcctacagaggagggcttgaagractcgacccagatgtcggccacctattcccagggctttacggttcctgaagccctggctgggagaagggatmctgctgagtggcggtgacaagtggagccgccaccgtcggatgctgacgcccgccttccatttcaacatcctgaagtcctatataacgatcttcaacaagagtgcaaacatcatgcttgacaagtggcagcacctggcctcagagggcagcagtygtctggacatgtttgagcacatcagcctcatgaccttggacagtctacagaaatgcatcttcagctttgacagccattgtcaggagaggcccagtgaatatattgccaccatcttggagctcagtgcccttgtagagaaaagaagccagcatatcctccagyacatggactttctgtattacctctcccatgaygggyggcgcttccacagggcctgccgcctggtgcatgacttcacagacgctgtcatccgggagcggcgtcgcaccctccccactcagggtattgatgattttttcaaagacaaagccaagtccaagactttggatttcattgatgtgcttctgctgagcaaggatgaagatgggaaggcattgtcagatgaggatataagagcagaggctgacaccttcatgtttgsargccatgacaccacggccagtggcctctcctgggtcctgtacaaccttgcgaggcacccagartaccaggagcgctgccgacaggaggtgcaagagcttctgaaggaccgcgatcctaaagagattgaatgggacgacctggcccagctgcccttcctgaccatgtgcgtgaaggagagcctgaggttacatcccccagctcccttcatctcccgatgctgcacccaggacrttgttctcccagatggccgagtcatccccaaaggcattacctgcctcatcgatattataggggtccatcacaacccaactgtgtggccggatcctgaggtctacgaccccttccgctttgacccagagaacagcaaggggaggtcacctctggcttttattccyttctccgcagggcccaggarctgcatcgggcaggcgttcgccatggcggagatgaaagtggtcctggcgytgatgctgctgcacttccggttcctgccagaccacactgagccccgcaggaagctggaaytgatcatgcgcgccgagggcgggctttggctgcgggtggagcccctgaatgtargcttgcagtgactttctgacccatccacctgtttttttgcagattgtcatgaataaaacggtgctgtcacctctgcctgggcctcactgacagcctgcar

SEQ ID NO: 7472 - DNA, 2718 bp, Homo sapiens
  misc_feature (1)...(2718): n = A,T,C or G
cttttgcctcgagtattcccaggagggacagtccatccaggtgttctccaggaccaaggacccactgttcttcctcagtgacccaagaaaatgaagcctcctcctgttgggacggctcagaatggtggactccacagtccctccgcgagagacatggtttccatgcgtacaatagatcttyctcatcccccaaaccsaacaccctcctgctcaacaggcgttattcctraagtggcttcactgttcagactgaagagccacggtagccaaagtgatsagcggagtagamccgagcagtcrggagagatcttgttccctgtaggaaactgggcatckctgaggccctgagcatcccaggaggccgattgyacagagacctctggtcgctgaccccagtctgcctccacatccctggaatagcccatcatgggcccttcacccttggcaggtggaaaccattcaacctgctggggccggtgtgtccccatttcatggcaytgggggacaacaggattctctgtctaggtcccactgtactcaagtccttgggaagaygcccacccctgcttgggacttgagactccagagactggagcagctgygggccactgggtctggcccctttttmcctgggggcggcggtggaatgggggytacgcagccagccagcatctgggagcccggygagagcrgttcaggtgttctccgaagccgccgcgtacagtgtgacytttagacaattytgtctcacaggatggacgtggtagaggtcgygggcagttggtgggcacaagagcgagaggacatcattatgaaatacgaaaagggacaccgagctgggctgccagaggacaaggggcctaagccttttcgaagctacaacaacaacgtcgatcatttggggattgtacatgagacggagctgcctcctctgactgcgcgggaggcgaagcaaattcggcgggagatcagccgaaagagcaagtgggtgaaaatgctgggagaatgggacacctacaaaaacagcagaaagctcatagatcgagcrtaccagggaattcccatgaacatccggggcccgatgtggtcagtcctcctgaacaytgaggaaatcaagttgaaaaaccccggaagataccagatcatgaaggagaagggcaagaggtcatctgarcacatccagcagatggacckggacgtaagcgggacattaaggargcatatattcttcagggatcgatacggaaccaagcagcgggaactactttacatcctcctggcgtatgaggagtayaacccggaggtgggctactgcagggayctgagccacatcgccgccttgttcctcctytatyttcctgaggaggatgcattctgggcactggtgcagctgctggccagtgagaggcactcyctgcagggatttcacagcccaaatggcgggaccgtccaggggctccaagaccaacaggagcatgtggtagccacgtcacwayccaasaccatgkggcatyaggacaagaaagatctatgtgggcagtgttcgtccttaggctgcctcatccggatattgattgangggatctctctcgggctcaccctgcgcctgtgggacgtgtatctggtagaaggcgaacaggcgttgatgccgataacaagaatcgcctttaaggttcagyagaagcgcctcacgaagacgtccaggtgtggcccgtgggcacgtttttggaaccggttcgttgatgcctgggccagggatgakgacactgtgctcaagcatcttagggcctctatgaagaaactaacaagaaagmagggggacctgcmacccccagccaaacccgagcaagggtcgtcggcatccaggcctgtgccrgcttcacgkggcgggaagaccctctgcaagggggacagrcaggcccctccaggcccaccagccyggttcccryggcccatttggtcagcttccccgccacgggcacctcgttcttccacaccctgtcctggtggggctgtccgggaagacacctaccctgtgggcactcagggtgtgcccagcccggccctggctcagggaggacctcagggttcctggagattcctgcagtggaactccatgccccgcctcccaacsgacctggacgtaggggasccttggttccgccrttatgatttcagacagagctgctgggtccgtgccatatcccaggaggaccagccggccacctgctggcaggctgaacaccctgcggagcgggtgagatcggctttcactgcactgacactgattccgaccagggcacccccttcagagctagggacgaacagcmgtgtgctcccacctcaggaccttgcctctgcggcctccacttggaaagttctcagttccctccaggcttctagaagcatctgggccagggctcatggctggataatttccctaggcttaacaacccaagcaagcttcgcrtcctsgttttattttytgttaaacttatgagaatrtrttaagaaagagtgcagctcgagagasattcagagatggarcacaccagaccccagatcacaaagccaaccatgcccrgcccctcscarcaccccmagccccacgaccatcgttytgaattctgacgacrccgtgagcctgcctttgtacttyaaactcatggmaggatracyaccttcaygttttgaaataaatgtttcctgttgaaatgm

SEQ ID NO: 7473 - DNA, 1395 bp, Homo sapiens
  misc_feature (1)...(1395): n = A,T,C or G
ggggtttgggggcctctccagctgcccagctcttgcagctgatggctccacatcttgggggaaggctctgatttcaygatgggctgggggcttctcaggatttcacagcccaaatggcgggaccgtccaggggctccaagaccaacaggagcatgtggtagccacgtcacwayccaasaccatgkggcatyaggacaagaaagatctatgtgggcagtgttcgtccttaggctgcctcatccggatattgattgangggatctctctcgggctcaccctgcgcctgtgggacgtgtatctggtagaaggcgaacaggcgttgatgccgataacaagaatcgcctttaaggttcagyagaagcgcctcacgaagacgtccaggtgtggcccgtgggcacgtttttggaaccggttcgttgatgcctgggccagggatgakgacactgtgctcaagcatcttagggcctctatgaagaaactaacaagaaagmagggggacctgcmacccccagccaaacccgagcaagggtcgtcggcatccaggcctgtgccrgcttcacgkggcgggaagaccctctgcaagggggacagrcaggcccctccaggcccaccagccyggttcccryggcccatttggtcagcttccccgccacgggcacctcgttcttccacaccctgtcctggtggggctgtccgggaagacacctaccctgtgggcactcagggtgtgcccagcccggccctggctcagggaggacctcagggttcctggagattcctgcagtggaactccatgccccgcctcccaacsgacctggacgtaggggasccttggttccgccrttatgatttcagacagagctgctgggtccgtgccatatcccaggaggaccagccggccacctgctggcaggctgaacaccctgcggagcgggtgagatcggctttcactgcactgacactgattccgaccagggcacccccttcagagctagggacgaacagcmgtgtgctcccacctcaggaccttgcctctgcggcctccacttggaaagttctcagttccctccaggcttctagaagcatctgggccagggctcatggctggataatttccctaggcttaacaacccaagcaagcttcgcrtcctsgttttattttytgttaaacttatgagaatrtrttaagaaagagtgcagctcgagagasattcagagatggarcacaccagaccccagatcacaaagccaaccatgcccrgcccctcscarcaccccmagccccacgaccatcgttytgaattctgacgacrccgtgagcctgcctttgtacttyaaactcatggmaggatracyaccttcaygttttgaaataaatgtttcctgttgaaatgm

SEQ ID NO: 7474 - DNA, 2347 bp, Homo sapiens
  misc_feature (1)...(2347): n = A,T,C or G
tgtggcycgggtgcagggagaggcaggtggatgctgggaggtcagaacctgcaagggccttggggctgtcaagtgggatgggcccctggtgcacccagagtacacggggcaggtctcagggcaggctcccttgaccctggyggggtgatgtggtcactccctgagggactcctgtcagggcccggtcacccaccctgggcggcccccatcccatctcagggctaacctttctcagctccagcagaaagcaccacctcgagtccaggacgggcagccccaytgggcagcctgaccgccccccacgccaggggccccagtaacccyggccaggctgtccctacactccttcttctcccaggtcctgccsctcctgggartcagccccacaggaaggcccttgtcctcccttccctgtgccttctcctgggctgagccctgagctggaaagggacagagccagtcctttctgggggtcggcacccaggctggggccgctscaggccccgtgcagttcctcagctctgcctgggttgccttacagtgagacggagctgcctcctctgactgcgcgggaggcgaagcaaattcggcgggagatcagccgaaagagcaagtgggtgaaaatgctgggagaatgggacacctacaaaaacagcagaaagctcatagatcgagcrtaccagggaattcccatgaacatccggggcccgatgtggtcagtcctcctgaacaytgaggaaatcaagttgaaaaaccccggaagataccagatcatgaaggagaagggcaagaggtcatctgarcacatccagcagatggacckggacgtaagcgggacattaaggargcatatattcttcagggatcgatacggaaccaagcagcgggaactactttacatcctcctggcgtatgaggagtayaacccggaggtgggctactgcagggayctgagccacatcgccgccttgttcctcctytatyttcctgaggaggatgcattctgggcactggtgcagctgctggccagtgagaggcactcyctgcagggatttcacagcccaaatggcgggaccgtccaggggctccaagaccaacaggagcatgtggtagccacgtcacwayccaasaccatgkggcatyaggacaagaaagatctatgtgggcagtgttcgtccttaggctgcctcatccggatattgattgangggatctctctcgggctcaccctgcgcctgtgggacgtgtatctggtagaaggcgaacaggcgttgatgccgataacaagaatcgcctttaaggttcagyagaagcgcctcacgaagacgtccaggtgtggcccgtgggcacgtttttggaaccggttcgttgatgcctgggccagggatgakgacactgtgctcaagcatcttagggcctctatgaagaaactaacaagaaagmagggggacctgcmacccccagccaaacccgagcaagggtcgtcggcatccaggcctgtgccrgcttcacgkggcgggaagaccctctgcaagggggacagrcaggcccctccaggcccaccagccyggttcccryggcccatttggtcagcttccccgccacgggcacctcgttcttccacaccctgtcctggtggggctgtccgggaagacacctaccctgtgggcactcagggtgtgcccagcccggccctggctcagggaggacctcagggttcctggagattcctgcagtggaactccatgccccgcctcccaacsgacctggacgtaggggasccttggttccgccrttatgatttcagacagagctgctgggtccgtgccatatcccaggaggaccagccggccacctgctggcaggctgaacaccctgcggagcgggtgagatcggctttcactgcactgacactgattccgaccagggcacccccttcagagctagggacgaacagcmgtgtgctcccacctcaggaccttgcctctgcggcctccacttggaaagttctcagttccctccaggcttctagaagcatctgggccagggctcatggctggataatttccctaggcttaacaacccaagcaagcttcgcrtcctsgttttattttytgttaaacttatgagaatrtrttaagaaagagtgcagctcgagagasattcagagatggarcacaccagaccccagatcacaaagccaaccatgcccrgcccctcscarcaccccmagccccacgaccatcgttytgaattctgacgacrccgtgagcctgcctttgtacttyaaactcatggmaggatracyaccttcaygttttgaaataaatgtttcctgttgaaatgm

SEQ ID NO: 7475 - DNA, 2015 bp, Homo sapiens
  misc_feature (1)...(2015): n = A,T,C or G
aggactgcaggcctggtcrccagatttcctgcctactcgtgcaagcgtcaccttgctgggagggaatctgaatctagggctgggactacccggagctcaaggctagggatgccctggtgacctgaaggaaggaaaaggttcagatcagagtttcgactctgagtgtccatccactctttcagtcctgggaagggagaccctgtcccagcttgatctcacctctactgaggaatcayggggccaaaaccracaatttccagaatccccgggctctggtcctcactggggtcaccccgtggcctgygacaccagatyrttttctgcccacagctcatagatcgagcrtaccagggaattcccatgaacatccggggcccgatgtggtcagtcctcctgaacaytgaggaaatcaagttgaaaaaccccggaagataccagatcatgaaggagaagggcaagaggtcatctgarcacatccagcagatggacckggacgtaagcgggacattaaggargcatatattcttcagggatcgatacggaaccaagcagcgggaactactttacatcctcctggcgtatgaggagtayaacccggaggtgggctactgcagggayctgagccacatcgccgccttgttcctcctytatyttcctgaggaggatgcattctgggcactggtgcagctgctggccagtgagaggcactcyctgcagggatttcacagcccaaatggcgggaccgtccaggggctccaagaccaacaggagcatgtggtagccacgtcacwayccaasaccatgkggcatyaggacaagaaagatctatgtgggcagtgttcgtccttaggctgcctcatccggatattgattgangggatctctctcgggctcaccctgcgcctgtgggacgtgtatctggtagaaggcgaacaggcgttgatgccgataacaagaatcgcctttaaggttcagyagaagcgcctcacgaagacgtccaggtgtggcccgtgggcacgtttttggaaccggttcgttgatgcctgggccagggatgakgacactgtgctcaagcatcttagggcctctatgaagaaactaacaagaaagmagggggacctgcmacccccagccaaacccgagcaagggtcgtcggcatccaggcctgtgccrgcttcacgkggcgggaagaccctctgcaagggggacagrcaggcccctccaggcccaccagccyggttcccryggcccatttggtcagcttccccgccacgggcacctcgttcttccacaccctgtcctggtggggctgtccgggaagacacctaccctgtgggcactcagggtgtgcccagcccggccctggctcagggaggacctcagggttcctggagattcctgcagtggaactccatgccccgcctcccaacsgacctggacgtaggggasccttggttccgccrttatgatttcagacagagctgctgggtccgtgccatatcccaggaggaccagccggccacctgctggcaggctgaacaccctgcggagcgggtgagatcggctttcactgcactgacactgattccgaccagggcacccccttcagagctagggacgaacagcmgtgtgctcccacctcaggaccttgcctctgcggcctccacttggaaagttctcagttccctccaggcttctagaagcatctgggccagggctcatggctggataatttccctaggcttaacaacccaagcaagcttcgcrtcctsgttttattttytgttaaacttatgagaatrtrttaagaaagagtgcagctcgagagasattcagagatggarcacaccagaccccagatcacaaagccaaccatgcccrgcccctcscarcaccccmagccccacgaccatcgttytgaattctgacgacrccgtgagcctgcctttgtacttyaaactcatggmaggatracyaccttcaygttttgaaataaatgtttcctgttgaaatgm

SEQ ID NO: 7476 - DNA, 1883 bp, Homo sapiens
  misc_feature (1)...(1883): n = A,T,C or G
ggggctgacggatcggggagaggctggktgcataggggccaccctggagacttggaggatgaaggagtcgccccaggaggggctggagcggtggccgggagactctgcacatyggtttggaaccgtggaggaactgtacacccacagactgaactggggtgtgtgcaaactgaaaaaaaaaaaaaaaatcattcagagtgaaaaggatcaggcactgtacaactgggctatttgcatgtcacagatgtggattttactgaaacatttcttcaagagtctsaggycctgaagagctcactgcttatccggtgaatcatctgaacctgaaatgggatttgctgttaggctttgtagacaaagtgaaattaacaacatctgcacaaaacaaaccaaagccccctttctctgtttcctaggcagcgggaactactttacatcctcctggcgtatgaggagtayaacccggaggtgggctactgcagggayctgagccacatcgccgccttgttcctcctytatyttcctgaggaggatgcattctgggcactggtgcagctgctggccagtgagaggcactcyctgcagggatttcacagcccaaatggcgggaccgtccaggggctccaagaccaacaggagcatgtggtagccacgtcacwayccaasaccatgkggcatyaggacaagaaagatctatgtgggcagtgttcgtccttaggctgcctcatccggatattgattgangggatctctctcgggctcaccctgcgcctgtgggacgtgtatctggtagaaggcgaacaggcgttgatgccgataacaagaatcgcctttaaggttcagyagaagcgcctcacgaagacgtccaggtgtggcccgtgggcacgtttttggaaccggttcgttgatgcctgggccagggatgakgacactgtgctcaagcatcttagggcctctatgaagaaactaacaagaaagmagggggacctgcmacccccagccaaacccgagcaagggtcgtcggcatccaggcctgtgccrgcttcacgkggcgggaagaccctctgcaagggggacagrcaggcccctccaggcccaccagccyggttcccryggcccatttggtcagcttccccgccacgggcacctcgttcttccacaccctgtcctggtggggctgtccgggaagacacctaccctgtgggcactcagggtgtgcccagcccggccctggctcagggaggacctcagggttcctggagattcctgcagtggaactccatgccccgcctcccaacsgacctggacgtaggggasccttggttccgccrttatgatttcagacagagctgctgggtccgtgccatatcccaggaggaccagccggccacctgctggcaggctgaacaccctgcggagcgggtgagatcggctttcactgcactgacactgattccgaccagggcacccccttcagagctagggacgaacagcmgtgtgctcccacctcaggaccttgcctctgcggcctccacttggaaagttctcagttccctccaggcttctagaagcatctgggccagggctcatggctggataatttccctaggcttaacaacccaagcaagcttcgcrtcctsgttttattttytgttaaacttatgagaatrtrttaagaaagagtgcagctcgagagasattcagagatggarcacaccagaccccagatcacaaagccaaccatgcccrgcccctcscarcaccccmagccccacgaccatcgttytgaattctgacgacrccgtgagcctgcctttgtacttyaaactcatggmaggatracyaccttcaygttttgaaataaatgtttcctgttgaaatgm

SEQ ID NO: 7477 - DNA, 2062 bp, Homo sapiens
  misc_feature (1)...(2062): n = A,T,C or G
gttacacacaggcastggtatctgtgagcagctctgtggactcaaaggttttctccctgagaggcatgacccaggccagctgattcatcagagtcaggatggacgtggtagaggtcgygggcagttggtgggcacaagagcgagaggacatcattatgaaatacgaaaagggacaccgagctgggctgccagaggacaaggggcctaagccttttcgaagctacaacaacaacgtcgatcatttggggattgtacatgagacggagctgcctcctctgactgcgcgggaggcgaagcaaattcggcgggagatcagccgaaagagcaagtgggtgaaaatgctgggagaatgggacacctacaaaaacagcagaaagctcatagatcgagcrtaccagggaattcccatgaacatccggggcccgatgtggtcagtcctcctgaacaytgaggaaatcaagttgaaaaaccccggaagataccagatcatgaaggagaagggcaagaggtcatctgarcacatccagcagatggacckggacgtaagcgggacattaaggargcatatattcttcagggatcgatacggaaccaagcagcgggaactactttacatcctcctggcgtatgaggagtayaacccggaggtgggctactgcagggayctgagccacatcgccgccttgttcctcctytatyttcctgaggaggatgcattctgggcactggtgcagctgctggccagtgagaggcactcyctgcagggatttcacagcccaaatggcgggaccgtccaggggctccaagaccaacaggagcatgtggtagccacgtcacwayccaasaccatgkggcatyaggacaagaaagatctatgtgggcagtgttcgtccttaggctgcctcatccggatattgattgangggatctctctcgggctcaccctgcgcctgtgggacgtgtatctggtagaaggcgaacaggcgttgatgccgataacaagaatcgcctttaaggttcagyagaagcgcctcacgaagacgtccaggtgtggcccgtgggcacgtttttggaaccggttcgttgatgcctgggccagggatgakgacactgtgctcaagcatcttagggcctctatgaagaaactaacaagaaagmagggggacctgcmacccccagccaaacccgagcaagggtcgtcggcatccaggcctgtgccrgcttcacgkggcgggaagaccctctgcaagggggacagrcaggcccctccaggcccaccagccyggttcccryggcccatttggtcagcttccccgccacgggcacctcgttcttccacaccctgtcctggtggggctgtccgggaagacacctaccctgtgggcactcagggtgtgcccagcccggccctggctcagggaggacctcagggttcctggagattcctgcagtggaactccatgccccgcctcccaacsgacctggacgtaggggasccttggttccgccrttatgatttcagacagagctgctgggtccgtgccatatcccaggaggaccagccggccacctgctggcaggctgaacaccctgcggagcgggtgagatcggctttcactgcactgacactgattccgaccagggcacccccttcagagctagggacgaacagcmgtgtgctcccacctcaggaccttgcctctgcggcctccacttggaaagttctcagttccctccaggcttctagaagcatctgggccagggctcatggctggataatttccctaggcttaacaacccaagcaagcttcgcrtcctsgttttattttytgttaaacttatgagaatrtrttaagaaagagtgcagctcgagagasattcagagatggarcacaccagaccccagatcacaaagccaaccatgcccrgcccctcscarcaccccmagccccacgaccatcgttytgaattctgacgacrccgtgagcctgcctttgtacttyaaactcatggmaggatracyaccttcaygttttgaaataaatgtttcctgttgaaatgm

SEQ ID NO: 7478 - DNA, 1989 bp, Homo sapiens
cgaaagccaccaattagaagccaaggcagaaaaagttcttgtcgggagccaatgagaggctaagaaagacagcgagcgcgaggtcctcggccaatcccgaacgaaggccagggagcactcaggagcgtttccgaatccggggccaggcctggtgtgagtgtccaatccgagagcggcaaagacgagcctcgaagtccgccggccaatcgaaggcgggccccagcggcgcgtgcgcgccgcggccagcgcgcgcgggcgggggggcaggcgcgccccggacccaggatttataaaggcgaggccgggaccggcgcgcgctctcgtcgcccccgctgtcccggcggcgccaaccgaagcgccccgcctgmtccgtgtccgacatgctgcgccgcgctctgctgtgcctggccgtggccgccctggtgcgcgccgacgcccccgaggaggaggaccacgtcctggtgctgcggaaaagcaacttcgcggaggcgctggcggcccacaaatgccccttggtgtggccactgcaaggctctggcccctgagtatgccaaagccgctgggaagctgaaggcagaaggttccgagatcaggttggccaaggtggacgccacggaggagtctgacctrgcccagcagtacggcgtgcgcggctatcccacyatcaagttcttcaggaatggagacacggcttcccccaaggaatatacagctggcagagaggctgatgacatcgtgaactggctgaagaagcgcacgggcccggctgccaccaccctgcctgacggcgcagctgcagagtccttggtggagtccagcgaggtggctgtcatcggcttcttcaaggacgtggagtcggactctgccaagcagtttttgcaggcagcagaggccatcgatgacataccatttgggatcacttccaacagtgacgtgttctccaaataccagctcgacaaagatggggttgtcctctttaagaagtttgatgaaggccggaacaactttgaaggggaggtcaccaaggagaacctgctggactttatcaaacacaaccagctgccccttgtcatygagttcaccgagcagacagccccgaagatttttggaggtgaaatcaagactcacatcctgctgttcttgcccaagagtgtgtctgactatgacrgcaaactgagcaacttcaaaacagcagccgagagcttcaagggcaagatcctgttcatcttcatcgacagcgaccacaccgacaaccagcgcatcctcgagttctttggcctgaagaaggaagagtgcccggccgtgcgcctcatcaccctggaggaggagatgaccaagtacaaggctcctcctcctgtcgtgggctcattgtgaccactggcctctctacagcacggcctgtggcctgttcaaggcagaaccacgacccttgactcccgggtggggaggtggccaaggatgctggagctgaatcagacgctgacagttyttcaggcatttytatttcacaatcgaattgaacacattggccaaataaagttgaaattttaccacctgtccttgcctcgggtttatgatctcaccaagcccggagagctgggctggaatgcggacgccaaggccatctgccaggccttagtggggttactggtgctgagaggcctcgcccctgggacgaggggaggcaacaggagctctgtggtgtctgtgggtccccctgagggcaacggcagaggccctgaggatccagcagggctcatggtggtctcagagggcggccctcacaaactcggccgctccggctcctcctgcctcygctccaggctgtggagtatccggccagcatgccgcgaggacctgtgtcaacacgtcgccagcaccagccagcccgcacgcttcgcccacggtggagcaggcacgactgctgacggccggcttctgatggaacgtttcaagggtgaggagctccagggagtgtctatcatggcg

SEQ ID NO: 7479 - DNA, 2714 bp, Homo sapiens
ccccactgccacgttcgacgaaggaacgcgcagagtgcgcgcatcccttggccaatcaggaggcgcagagtccgtgctaccgaaaggggcagccattccagacccgtggaaggtgcaggcgaaagccaccaattagaagccaaggcagaaaaagttcttgtcgggagccaatgagaggctaagaaagacagcgagcgcgaggtcctcggccaatcccgaacgaaggccagggagcactcaggagcgtttccgaatccggggccaggcctggtgtgagtgtccaatccgagagcggcaaagacgagcctcgaagtccgccggccaatcgaaggcgggccccagcggcgcgtgcgcgccgcggccagcgcgcgcgggcgggggggcaggcgcgccccggacccaggatttataaaggcgaggccgggaccggcgcgcgctctcgtcgcccccgctgtcccggcggcgccaaccgaagcgccccgcctgmtccgtgtccgacatgctgcgccgcgctctgctgtgcctggccgtggccgccctggtgcgcgccgacgcccccgaggaggaggaccacgtcctggtgctgcggaaaagcaacttcgcggaggcgctggcggcccacaagtacctgctggtggagttctatgccccttggtgtggccactgcaaggctctggcccctgagtatgccaaagccgctgggaagctgaaggcagaaggttccgagatcaggttggccaaggtggacgccacggaggagtctgacctrgcccagcagtacggcgtgcgcggctatcccacyatcaagttcttcaggaatggagacacggcttcccccaaggaatatacagctggcagagaggctgatgacatcgtgaactggctgaagaagcgcacgggcccggctgccaccaccctgcctgacggcgcagctgcagagtccttggtggagtccagcgaggtggctgtcatcggcttcttcaaggacgtggagtcggactctgccaagcagtttttgcaggcagcagaggccatcgatgacataccatttgggatcacttccaacagtgacgtgttctccaaataccagctcgacaaagatggggttgtcctctttaagaagtttgatgaaggccggaacaactttgaaggggaggtcaccaaggagaacctgctggactttatcaaacacaaccagctgccccttgtcatygagttcaccgagcagacagccccgaagatttttggaggtgaaatcaagactcacatcctgctgttcttgcccaagagtgtgtctgactatgacrgcaaactgagcaacttcaaaacagcagccgagagcttcaagggcaagatcctgttcatcttcatcgacagcgaccacaccgacaaccagcgcatcctcgagttctttggcctgaagaaggaagagtgcccggccgtgcgcctcatcaccctggaggaggagatgaccaagtacaagcccgaatcggaggagctgacggcagagaggatcacagagttctgccaccgcttcctggagggcaaaatcaagccccacctgatgagccaggagctgccggaggactgggacaagcagcctgtcaaggtgcttgttgggaagaactttgaagacgtggcttttgatgagaaaaaaaacgtctttgtggagttctatgccccatggtgtggtcactgcaaacagttggctcccatttgggataaactgggagagacgtacaaggaccatgagaacatcgtcatcgccaagatggactcgactgccaacgaggtggaggccgtcaaagtgcacagcttccccacactcaagttctttcctgccagtgccgacaggacggtcatygattacaacggggaacgcacgctggatggttttaagaaattcctggagagcggtggccaggatggggcaggggatgatgacgatctcgaggacctggaagaagcagaggagccagacatggaggaagacgatgatcagaaagctgtgaaagatgaactgtaatacgcaaagccagacccgggcgctgccgagacccctcgggggctgcacacccagcagcagcgcacgcctccgaagcctgcggcctcgcttgaaggagggcgtcgccggaaacccagggaacctctctgaagtgacacctcacccctacacaccgtccgttcacccccgtctcttccttctgcttttcggtttttggaaagggatccatctccaggcmgcccaccctggtggggcttgtttcctgaaaccatgatgtactttttcatacatgagtctgtccagagtgcttgctaccgtgttcggagtctcgctgcctccctcccgcgggaggtttctcctctttttgaaaattccgtctgtgggatttttagacatttttcgacatcaggggtgtcccccatgcctggaagaggagctggtggctgccagccctgggbcccggcacaggcctggsccttccccttccctcaagccagggctcctcctcctgtcgtgggctcattgtgaccactggcctctctacagcacggcctgtggcctgttcaaggcagaaccacgacccttgactcccgggtggggaggtggccaaggatgctggagctgaatcagacgctgacagttyttcaggcatttytatttcacaatcgaattgaacacattggccaaataaagttgaaattttaccacc

SEQ ID NO: 7480 - DNA, 2441 bp, Homo sapiens
cgaaagccaccaattagaagccaaggcagaaaaagttcttgtcgggagccaatgagaggctaagaaagacagcgagcgcgaggtcctcggccaatcccgaacgaaggccagggagcactcaggagcgtttccgaatccggggccaggcctggtgtgagtgtccaatccgagagcggcaaagacgagcctcgaagtccgccggccaatcgaaggcgggccccagcggcgcgtgcgcgccgcggccagcgcgcgcgggcgggggggcaggcgcgccccggacccaggatttataaaggcgaggccgggaccggcgcgcgctctcgtcgcccccgctgtcccggcggcgccaaccgaagcgccccgcctgmtccgtgtccgacatgctgcgccgcgctctgctgtgcctggccgtggccgccctggtgcgcgccgacgcccccgaggaggaggaccacgtcctggtgctgcggaaaagcaacttcgcggaggcgctggcggcccacaaatgccccttggtgtggccactgcaaggctctggcccctgagtatgccaaagccgctgggaagctgaaggcagaaggttccgagatcaggttggccaaggtggacgccacggaggagtctgacctrgcccagcagtacggcgtgcgcggctatcccacyatcaagttcttcaggaatggagacacggcttcccccaaggaatatacaggacgtggagtcggactctgccaagcagtttttgcaggcagcagaggccatcgatgacataccatttgggatcacttccaacagtgacgtgttctccaaataccagctcgacaaagatggggttgtcctctttaagaagtttgatgaaggccggaacaactttgaaggggaggtcaccaaggagaacctgctggactttatcaaacacaaccagctgccccttgtcatygagttcaccgagcagacagccccgaagatttttggaggtgaaatcaagactcacatcctgctgttcttgcccaagagtgtgtctgactatgacrgcaaactgagcaacttcaaaacagcagccgagagcttcaagggcaagatcctgttcatcttcatcgacagcgaccacaccgacaaccagcgcatcctcgagttctttggcctgaagaaggaagagtgcccggccgtgcgcctcatcaccctggaggaggagatgaccaagtacaagcccgaatcggaggagctgacggcagagaggatcacagagttctgccaccgcttcctggagggcaaaatcaagccccacctgatgagccaggagctgccggaggactgggacaagcagcctgtcaaggtgcttgttgggaagaactttgaagacgtggcttttgatgagaaaaaaaacgtctttgtggagttctatgccccatggtgtggtcactgcaaacagttggctcccatttgggataaactgggagagacgtacaaggaccatgagaacatcgtcatcgccaagatggactcgactgccaacgaggtggaggccgtcaaagtgcacagcttccccacactcaagttctttcctgccagtgccgacaggacggtcatygattacaacggggaacgcacgctggatggttttaagaaattcctggagagcggtggccaggatggggcaggggatgatgacgatctcgaggacctggaagaagcagaggagccagacatggaggaagacgatgatcagaaagctgtgaaagatgaactgtaatacgcaaagccagacccgggcgctgccgagacccctcgggggctgcacacccagcagcagcgcacgcctccgaagcctgcggcctcgcttgaaggagggcgtcgccggaaacccagggaacctctctgaagtgacacctcacccctacacaccgtccgttcacccccgtctcttccttctgcttttcggtttttggaaagggatccatctccaggcmgcccaccctggtggggcttgtttcctgaaaccatgatgtactttttcatacatgagtctgtccagagtgcttgctaccgtgttcggagtctcgctgcctccctcccgcgggaggtttctcctctttttgaaaattccgtctgtgggatttttagacatttttcgacatcaggggtgtcccccatgcctggaagaggagctggtggctgccagccctgggbcccggcacaggcctggsccttccccttccctcaagccagggctcctcctcctgtcgtgggctcattgtgaccactggcctctctacagcacggcctgtggcctgttcaaggcagaaccacgacccttgactcccgggtggggaggtggccaaggatgctggagctgaatcagacgctgacagttyttcaggcatttytatttcacaatcgaattgaacacattggccaaataaagttgaaattttaccacc

SEQ ID NO: 7481 - DNA, 2560 bp, Homo sapiens
cgaaagccaccaattagaagccaaggcagaaaaagttcttgtcgggagccaatgagaggctaagaaagacagcgagcgcgaggtcctcggccaatcccgaacgaaggccagggagcactcaggagcgtttccgaatccggggccaggcctggtgtgagtgtccaatccgagagcggcaaagacgagcctcgaagtccgccggccaatcgaaggcgggccccagcggcgcgtgcgcgccgcggccagcgcgcgcgggcgggggggcaggcgcgccccggacccaggatttataaaggcgaggccgggaccggcgcgcgctctcgtcgcccccgctgtcccggcggcgccaaccgaagcgccccgcctgmtccgtgtccgacatgctgcgccgcgctctgctgtgcctggccgtggccgccctggtgcgcgccgacgcccccgaggaggaggaccacgtcctggtgctgcggaaaagcaacttcgcggaggcgctggcggcccacaaatgccccttggtgtggccactgcaaggctctggcccctgagtatgccaaagccgctgggaagctgaaggcagaaggttccgagatcaggttggccaaggtggacgccacggaggagtctgacctrgcccagcagtacggcgtgcgcggctatcccacyatcaagttcttcaggaatggagacacggcttcccccaaggaatatacagctggcagagaggctgatgacatcgtgaactggctgaagaagcgcacgggcccggctgccaccaccctgcctgacggcgcagctgcagagtccttggtggagtccagcgaggtggctgtcatcggcttcttcaaggacgtggagtcggactctgccaagcagtttttgcaggcagcagaggccatcgatgacataccatttgggatcacttccaacagtgacgtgttctccaaataccagctcgacaaagatggggttgtcctctttaagaaggtgagccggaacaactttgaaggggaggtcaccaaggagaacctgctggactttatcaaacacaaccagctgccccttgtcatygagttcaccgagcagccccgaagatttttggaggtgaaatcaagactcacatcctgctgttcttgcccaagagtgtgtctgactatgacrgcaaactgagcaacttcaaaacagcagccgagagcttcaagggcaagatcctgttcatcttcatcgacagcgaccacaccgacaaccagcgcatcctcgagttctttggcctgaagaaggaagagtgcccggccgtgcgcctcatcaccctggaggaggagatgaccaagtacaagcccgaatcggaggagctgacggcagagaggatcacagagttctgccaccgcttcctggagggcaaaatcaagccccacctgatgagccaggagctgccggaggactgggacaagcagcctgtcaaggtgcttgttgggaagaactttgaagacgtggcttttgatgagaaaaaaaacgtctttgtggagttctatgccccatggtgtggtcactgcaaacagttggctcccatttgggataaactgggagagacgtacaaggaccatgagaacatcgtcatcgccaagatggactcgactgccaacgaggtggaggccgtcaaagtgcacagcttccccacactcaagttctttcctgccagtgccgacaggacggtcatygattacaacggggaacgcacgctggatggttttaagaaattcctggagagcggtggccaggatggggcaggggatgatgacgatctcgaggacctggaagaagcagaggagccagacatggaggaagacgatgatcagaaagctgtgaaagatgaactgtaatacgcaaagccagacccgggcgctgccgagacccctcgggggctgcacacccagcagcagcgcacgcctccgaagcctgcggcctcgcttgaaggagggcgtcgccggaaacccagggaacctctctgaagtgacacctcacccctacacaccgtccgttcacccccgtctcttccttctgcttttcggtttttggaaagggatccatctccaggcmgcccaccctggtggggcttgtttcctgaaaccatgatgtactttttcatacatgagtctgtccagagtgcttgctaccgtgttcggagtctcgctgcctccctcccgcgggaggtttctcctctttttgaaaattccgtctgtgggatttttagacatttttcgacaggtgtcccccatgcctggaagaggagctggtggctgccagccctgggbcccggcacaggcctggsccttccccttccctcaagccagggctcctcctcctgtcgtgggctcattgtgaccactggcctctctacagcacggcctgtggcctgttcaaggcagaaccacgacccttgactcccgggtggggaggtggccaaggatgctggagctgaatcagacgctgacagttyttcaggcatttytatttcacaatcgaattgaacacattggccaaataaagttgaaattttaccacc

SEQ ID NO: 7482 - DNA, 2492 bp, Homo sapiens
ccccactgccacgttcgacgaaggaacgcgcagagtgcgcgcatcccttggccaatcaggaggcgcagagtccgtgctaccgaaaggggcagccattccagacccgtggaaggtgcaggcgaaagccaccaattagaagccaaggcagaaaaagttcttgtcgggagccaatgagaggctaagaaagacagcgagcgcgaggtcctcggccaatcccgaacgaaggccagggagcactcaggagcgtttccgaatccggggccaggcctggtgtgagtgtccaatccgagagcggcaaagacgagcctcgaagtccgccggccaatcgaaggcgggccccagcggcgcgtgcgcgccgcggccagcgcgcgcgggcgggggggcaggcgcgccccggacccaggatttataaaggcgaggccgggaccggcgcgcgctctcgtcgcccccgctgtcccggcggcgccaaccgaagcgccccgcctgmtccgtgtccgacatgctgcgccgcgctctgctgtgcctggccgtggccgccctggtgcgcgccgacgcccccgaggaggaggaccacgtcctggtgctgcggaaaagcaacttcgcggaggcgctggcggcccacaagtacctgctggtggagttctatgccccttggtgtggccactgcaaggctctggcccctgagtatgccaaagccgctgggaagctgaaggcagaaggttccgagatcaggttggccaaggtggacgccacggaggagtctgacctrgcccagcagtacggcgtgcgcggctatcccacyatcaagttcttcaggaatggagacacggcttcccccaaggaatatacagctggcagagaggctgatgacatcgtgaactggctgaagaagcgcacgggcccggctgccaccaccctgcctgacggcgcagctgcagagtccttggtggagtccagcgaggtggctgtcatcggcttcttcaaggacgtggagtcggactctgccaagcagtttttgcaggcagcagaggccatcgatgacataccatttgggatcacttccaacagtgacgtgttctccaaataccagctcgacaaagatggggttgtcctctttaagaagtttgatgaaggccggaacaactttgaaggggaggtcaccaaggagaacctgctggactttatcaaacacaaccagctgccccttgtcatygagttcaccgagcagacagccccgaagatttttggaggtgaaatcaagactcacatcctgctgttcttgcccaagagtgtgtctgactatgacrgcaaactgagcaacttcaaaacagcagccgagagcttcaagggcaagatcctgttcatcttcatcgacagcgaccacaccgacaaccagcgcatcctcgagttctttggcctgaagaaggaagagtgcccggccgtgcgcctcatcaccctggaggaggagatgaccaagtacaagcccgaatcggaggagctgacggcagagaggatcacagagttctgccaccgcttcctggagggcaaaatcaagccccacctgatgagccaggagctgccggaggactgggacaagcagcctgtcaaggtgcttgttgggaagaactttgaagacgtggcttttgatgagaaaaaaaacgtctttgtggagttctatgccccatggtgtggtcactgcaaacagttggctcccatttgggataaactgggagagacgtacaaggaccatgagaacatcgtcatcgccaagatggactcgactgccaacgaggtggaggccgtcaaagtgcacagcttccccacactcaagttctttcctgccagtgccgacaggacggtcatygattacaacggggaacgcacgctggatggttttaagaaattcctggagagcggtggccaggatggggcaggggatgatgacgatctcgaggacctggaagaagcagaggagccagacatggaggaagacgatgatcagaaagctgtgaaagatgaactktaatacgcaaagccagacccgggcgctgccgagacccctcgggggctgcacacccagcagcagcgcacgcctccgaagcctgcggcctcgcttgaaggagggcgtcgccggaaacccagggaacctctctgaagtgacacctcacccctacacaccgtccgttcacccccgtctcttccttctgcttttcggtttttggaaagggatccatctccaggcmgcccaccctggtggggcttgtttcctgaaaccatgatgtactttttcatacatgagtctgtccagagtgcttgctaccgtgttcggagtctcgctgcctccctcccgcgggaggtttctcctctttttgaaaattccgtctgtgggatttttagacatttttcgacatcagggtatttgcctcctcggagaagcttgtcccccgtgtgggagggacggagccggactggacatggtcactcagtaccgc

SEQ ID NO: 7483 - DNA, 3001 bp, Homo sapiens
ccccactgccacgttcgacgaaggaacgcgcagagtgcgcgcatcccttggccaatcaggaggcgcagagtccgtgctaccgaaaggggcagccattccagacccgtggaaggtgcaggcgaaagccaccaattagaagccaaggcagaaaaagttcttgtcgggagccaatgagaggctaagaaagacagcgagcgcgaggtcctcggccaatcccgaacgaaggccagggagcactcaggagcgtttccgaatccggggccaggcctggtgtgagtgtccaatccgagagcggcaaagacgagcctcgaagtccgccggccaatcgaaggcgggccccagcggcgcgtgcgcgccgcggccagcgcgcgcgggcgggggggcaggcgcgccccggacccaggatttataaaggcgaggccgggaccggcgcgcgctctcgtcgcccccgctgtcccggcggcgccaaccgaagcgccccgcctgmtccgtgtccgacatgctgcgccgcgctctgctgtgcctggccgtggccgccctggtgcgcgccgacgcccccgaggaggaggaccacgtcctggtgctgcggaaaagcaacttcgcggaggcgctggcggcccacaagtacctgctggtggagttctatgccccttggtgtggccactgcaaggctctggcccctgagtatgccaaagccgctgggaagctgaaggcagaaggttccgagatcaggttggccaaggtggacgccacggaggagtctgacctrgcccagcagtacggcgtgcgcggctatcccacyatcaagttcttcaggaatggagacacggcttcccccaaggaatatacagctggcagagaggctgatgacatcgtgaactggctgaagaagcgcacgggcccggctgccaccaccctgcctgacggcgcagctgcagagtccttggtggagtccagcgaggtggctgtcatcggcttcttcaaggacgtggagtcggactctgccaagcagtttttgcaggcagcagaggccatcgatgacataccatttgggatcacttccaacagtgacgtgttctccaaataccagctcgacaaagatggggttgtcctctttaagaagtttgatgaaggccggaacaactttgaaggggaggtcaccaaggagaacctgctggactttatcaaacacaaccagctgccccttgtcatygagttcaccgagcagacagccccgaagatttttggaggtgaaatcaagactcacatcctgctgttcttgcccaagagtgtgtctgactatgacrgcaaactgagcaacttcaaaacagcagccgagagcttcaagggcaagatcctgttcatcttcatcgacagcgaccacaccgacaaccagcgcatcctcgagttctttggcctgaagaaggaagagtgcccggccgtgcgcctcatcaccctggaggaggagatgaccaagtacaagcccgaatcggaggagctgacggcagagaggatcacagagttctgccaccgcttcctggagggcaaaatcaagccccacctgatgagccaggagctgccggaggactgggacaagcagcctgtcaaggtgcttgttgggaagaactttgaagacgtggcttttgatgagaaaaaaaacgtctttgtggagttctatgccccatggtgtggtcactgcaaacagttggctcccatttgggataaactgggagagacgtacaaggaccatgagaacatcgtcatcgccaagatggactcgactgccaacgaggtggaggccgtcaaagtgcacagcttccccacactcaagttctttcctgccagtgccgacaggacggtcatygattacaacggggaacgcacgctggatggttttaagaaattcctggagagcggtggccaggatggggcaggggatgatgacgatctcgaggacctggaagaagcagaggagccagacatggaggaagacgatgatcagaaagctgtgaaagatgaactgtaatacgcaaagccagacccgggcgctgccgagacccctcgggggctgcacacccagcagcagcgcacgcctccgaagcctgcggcctcgcttgaaggagggcgtcgccggaaacccagggaacctctctgaagtgacacctcacccctacacaccgtccgttcacccccgtctcttccttctgcttttcggtttttggaaagggatccatctccaggcmgcccaccctggtggggcttgtttcctgaaaccatgatgtactttttcatacatgagtctgtccagagtgcttgctaccgtgttcggagtctcgctgcctccctcccgcgggaggtttctcctctttttgaaaattccgtctgtgggatttttagacatttttcgacatcagggtatttkttccaccttggccaggcctcctcggagaagcttgtcccccgtgtgggagggacggagccggactggacatggtcactcagtaccgcctgcagtgtcgccatgactgatcatggctcttgcatttttgggtaaatggagacttccggatcctgtcagggtgtcccccatgcctggaagaggagctggtggctgccagccctgggbcccggcacaggcctggsccttccccttccctcaagccagggctcctcctcctgtcgtgggctcattgtgaccactggcctctctacagcacggcctgtggcctgttcaaggcagaaccacgacccttgactcccgggtggggaggtggccaaggatgctggagctgaatcagacgctgacagttyttcaggcatttytatttcacaatcgaattgaacacattggccaaataaagttgaaattttaccacctgtccttgcctcgggtttatgatctcaccaagcccggagagctgggctggaatgcggacgccaaggccatctgccaggccttagtggggttactggtgctgagaggcctcgcccctgggacgag

SEQ ID NO: 7484 - DNA, 3623 bp, Homo sapiens
tcaaaagggggaccggccctgtgacccctcaccggggccgtgggcccgagccccggacttccctaagccggcaatvaccgcctgcgcccgccgagcgggtgggcttccggaccccgggctctgcggtcccgcgtggtgggctccgtccctgccccgcctcccccgggccctgccccggctcccgctcctgctgytcctgcttctgctgcagccccccgccctctccgccgtgttcacggtgggggtcctgggcccctgggcttgcgaccccatcttctctcgggctcgcccggacctggccgcccgcctggccgccgcccgcctgaaccgcgaccccggcctggcaggcggtccccgcttcgaggtagcgctgctgcccgagccttrccggacgccgggctcgctgggggccgtgtcctccgcgctggcccgcgtgtcgggcctcgtgggtccggtgaamcctgcggcctgccggccagccgagctgctcgccgaagaagccgggatcgcgctggtgccctggggctgcccctggacgcaggcggagggcaccacggcccctgccgtgacccccgccgcggatgccctctacgccctgcttcgcgcattcggctgggcgcgcgtggccctggtcaccgccccccaggacctgtgggtggaggcgggacgctcactgtccacggcactcagggcccggggcctgcctgtcgcctccgtgacttccatggagcccttggacctgtctggagcccgggaggccctgaggaaggttcgggacgggcccagggtcacagcagtgatcatggtgatgcaytcggtgctgctgggtggcgaggagcagcgctacctcctggaggccgcagaggagctgggcctgaccgatggctccctggtcttcctgcccttcgacacgatccactacgccttgtccccaggcccggaggccttggccgcactcgccaacagctcccagcttcgcagggcccacgatgccgtgctcaccctcacgygccactgtccctctgaaggcagcgtgctggacagccygcgcagggctcaagagcgccgcgagctgccctctgacctcaatctgcagcaggtctccccactctttggcaccatctatgacgcggtcttcttgctggcaaggggcgtggcagaagcgcgggctgccgcaggtggcagatgggtgtccggagcagctgtggcccgccacatccgggatgcgcaggtccctggcttctgcggggacctaggaggagacgaggagcccccattcgtgctgctagacacggacgcggcgggagaccggctttttgccacatacatgctggatcctgcccggggctccttcctctccgccggtacccggatgcacttcccgcgtgggggatcagcacccggacctgacccctcgtgctggttcgatccaaacaacatctgcggtggaggactggagccgggcctcgtctttcttggcttcctcctggtggttgggatggggctggctggggccttcctggcccattatgtgaggcaccggctacttcacatgcaaatggtctccggccccaacaagatcatcctgaccgtggacgacatcacctttctccacccacatgggggcacctctcgaaaggtggcccaggggagtcgatcaagtctgggtgcccgcagcatgtcagacattygcagcggccccagccaacacttggacagccccaacattggtgtctatgagggagacagggtttggctgaagaaattcccaggggatcagcacatagctatccgccyagcaaccaagacggcctyctccaagctccaggagctccggcatgagaacgtggccctctacctggggcttttcctggctcggggagcagaaggccctgcggccctctgggagggcaacctggctgtggtctcagagcactgcacgcggggctctcttcaggacctcctcgctcagagagaaataaagctggactggatgttcaagtcctccctcctgctggaccttatcaagggaataaggtatctgcaccatcgaggcgtggctcatgggcggctgaagtcacggaactgcatagtggatggcagattcgtactcaagatcactgaccacggccacgggagactgctggaagcacagaaggtgctaccggagcctyccagagcggaggaccagctgtggacagccccggagctgcttagggacccagccctggagcgcyggggaacgctggccggcgacgtctttagcttggccatcatcatgcaagaagtagtgtgccgcagtgccccttatgccatgctggagctcactcccgaggaagtggtgcagagggtgcggagcccccctccactgtgtcggcccttggtgtccatggaccaggcacctgtcgagtgtatccdcctgatgaagcagtgctgggcagagcagccggaacttcggccctccatggaccacaccttcgacctgttcaagaacatcaacaagggccggaagacgaacatcattgactcgatgcttcggatgctggagcagtactctagtaacctggaggatctgatccgggaghrcayrgaggagctggagctggaaaagcagaagacagaccggctgcttacayagatgctgyctcccgtctgtggctgaggccttgaagacggggacaccagtggagcccgagtactttgagcaagtgacactgtactttagtgacattgtgggcttcaccaccatctctgccatgagtgagcccattgaggttgtggacctgctcaacgatctctacacactctttgatgccatcattggttcccacgatgtctacaaggtggagacaataggggacgcctatatggtggcctcggggctgccccagcggaatgggcagcgacacgcggcagagatcgccaacatgtcacyggacatcctcagtgccgtgggcactttccgcatgcgccatatgcctgaggttcccgtgcgcatcckcataggcctgcactcgggtccatgcgtggcaggcgtggtgggcctcaccatgccgcggtactgcctgtttggggacacggtcaacaccgcctcrcgcmtggagtccaccgggctgccttaccgcatccmcgtgaacttgagcactgtggggattctccgtgctctggactcgggctaccaggtggagctgcgaggccgcacggagctgaagggcaagggcgccgaggacactttctggctagtgggcagacgcggcttcaacaagcccatccccaaaccgcctgacctgcaaccggggtccagcaaccacggcatcagcctgcaggagatcccacccgagcggcgacggaagctggagaaggcgcggccgggccagttctcttgagaagtgaggcccggccccggacagggtctgggccctgctccctgtcccatctgcagtggaccccaggcacccccctttgaggaggtggggtgaactgctccttggcagggatttgtgacactgcattgctgggctgtgttccycgggctcttctggaccttgcaccgtggataccaggccatgtgccatggtatttgggtcctgggagggtgggtgaaataaaggcatgctgtcttc

SEQ ID NO: 7485 - DNA, 1611 bp, Homo sapiens
gcggaactgggcgaacccgggggttcgtttctgctgactccagtgtcccgagaggcgccgcttcttccgctttctcgtcaggctcctgcrrccccaggcatgaaccaaggtttctgaactactgggcgggagccaacgtctcttctttctcccgctctggcggaggctttgtcgctgcgggctgggccccagggtgtcccccatggcggggccgcgggtggaggtcgatggcagcatcatggaagggggcggccagatcctgagagtctctacggccttgagctgtctcctaggcctccccttgcgggtgcagaagatccgagccggccggagcacgccaggcctgagttctggaggctggaagtccaagatcaaggtcctgacaaggcctcaacatttatctggactggaaatgattcgagatttgtgtgatgggcaactggagggggcagaaattggctcaacagaaataacctttacaccagagaagatcaaaggtggaatccacacagcagataccaagacagcagggagtgtgtgcctcttgatgcaggtctcaatgccgtgtgttctctttgctgcttctccatcagaacttcatttgaaaggtggaactaatgctgaaatggcaccacagatcgattatacagtgatggtcttcaagccaattgttgaaaaatttggtttcatatttaattgtgacattaaaacaaggggatattacccaaaagggggtggtgaagtgattgttcgaatgtcaccagttaaacaattgaaccctataaatttaactgagcgtggctgtgtgactaagatatatggaagagctttcgttgctggtgttttgccatttaaagtagcaaaagatatggcagcggcagcagttagatgcatcagaaaggagatccgggatttgtatgttaacatccagcctgttcaagaacctaaagaccaagcatttggcaatggaaatggaataataattattgctgagacctccactggctgtttgtttgctggatcatcgcttggtaaacgaggtgtaaatgcagacaaagttggaattgaagctgccgaaatgctattagcaaatcttagacatggtggtactgtggatgagtatctgcaagaccagctgattgttttcatggcattagccaatggagtttccagaataaaaacaggaccagttacactccatacgcaaaccgcgatacattttgctgaacaaatagcaaaggctaaatttattgtgaagaaatcagaagatgaagaagacgccgctaaagatacttatattattgaatgccaaggaattgggatgacaaatccaaatctatagagtatttgcctcttaaatgatacctcattgatatattgcactatttcataaatactataaaataatgactaggaagtaacttattaaaggctatgacttaaatttgaagatgaagtacagtgttctaggtttgctgagaaggcttcattaaattaatctcactttgaatatctcctgagagatggacaatgaaatatcagttggtggatatgtgtgatagctgatttcaatattgaagtattgaaataaaatattctttacacctgaag

SEQ ID NO: 7486 - DNA, 1572 bp, Homo sapiens
gcggaactgggcgaacccgggggttcgtttctgctgactccagtgtcccgagaggcgccgcttcttccgctttctcgtcaggctcctgcrrccccaggcatgaaccaaggtttctgaactactgggcgggagccaacgtctcttctttctcccgctctggcggaggctttgtcgctgcgggctgggccccagggtgtcccccatggcggggccgcgggtggaggtcgatggcagcatcatggaagggggcggccagatcctgagagtctctacggccttgagctgtctcctaggcctccccttgcgggtgcagaagatccgagccggccggagcacgccaggcctgaggcctcaacatttatctggactggaaatgattcgagatttgtgtgatgggcaactggagggggcagaaattggctcaacagaaataacctttacaccagagaagatcaaaggtggaatccacacagcagataccaagacagcagggagtgtgtgcctcttgatgcaggtctcaatgccgtgtgttctctttgctgcttctccatcagaacttcatttgaaaggtggaactaatgctgaaatggcaccacagatcgattatacagtgatggtcttcaagccaattgttgaaaaatttggtttcatatttaattgtgacattaaaacaaggggatattacccaaaagggggtggtgaagtgattgttcgaatgtcaccagttaaacaattgaaccctataaatttaactgagcgtggctgtgtgactaagatatatggaagagctttcgttgctggtgttttgccatttaaagtagcaaaagatatggcagcggcagcagttagatgcatcagaaaggagatccgggatttgtatgttaacatccagcctgttcaagaacctaaagaccaagcatttggcaatggaaatggaataataattattgctgagacctccactggctgtttgtttgctggatcatcgcttggtaaacgaggtgtaaatgcagacaaagttggaattgaagctgccgaaatgctattagcaaatcttagacatggtggtactgtggatgagtatctgcaagaccagctgattgttttcatggcattagccaatggagtttccagaataaaaacaggaccagttacactccatacgcaaaccgcgatacattttgctgaacaaatagcaaaggctaaatttattgtgaagaaatcagaagatgaagaagacgccgctaaagatacttatattattgaatgccaaggaattgggatgacaaatccaaatctatagagtatttgcctcttaaatgatacctcattgatatattgcactatttcataaatactataaaataatgactaggaagtaacttattaaaggctatgacttaaatttgaagatgaagtacagtgttctaggtttgctgagaaggcttcattaaattaatctcactttgaatatctcctgagagatggacaatgaaatatcagttggtggatatgtgtgatagctgatttcaatattgaagtattgaaataaaatattctttacacctgaag

SEQ ID NO: 7487 - DNA, 2896 bp, Homo sapiens
ctagkagctggcggtcmgagctgtggcttgraagaccgacgcgatgaagcccagacctgcagrgttcgtggataataaactcaagcagcgagtcatccagtaccttaccagtaacaaatgtggcaaatatgtggacattggagtcttagcgtctgatttacaaagagtgtacagtatagactatggtcgaagaaaaagaaatgcttttaggattcaggtagaaaaagtatttagcataattagtagtgagaaggaacttaagaatttaacagaattagaagatgaacatttggcaaaaagggcaagacaaggtgaagaggataatgagtatactgaaagctattctgatgatgattcaagtatggaagactacccagatccacagtcagcaaatcacatgaacagttccctgctgtctttatatcggaaaggaaatcctgattctgtttcaaatactcctgagatggagcaaagagaaaccacctcttcaacaccacrrataagttccaaaacaggctccattcccttgaagacccctgccaaagattctgaaggaggatggtttattgacaaaaccccaagtgtaaagaaagacagttttttcttggacctgtcatgtgagaaaagtaatcctaagaagccartaactgagrtacaggattcaaaagattcttctcttttggagagtgatatgaaacggaaaggcaagctaaagaataaaggaagcaaaaggaagaaagaagatcttcaggaagtagatggagaaattgaagctgtcctrcaaaagaaagctaaagccagggggttagaattccagatctccaacgtgaagtttgaagatgtgggaggcaatgatatgacattaaaagaggtctgcaagatgctcatacacatgcgtcacccggaggtgtaccaccacctgggcgtcgtgccccctcgtggagttctccttcatggaccaccaggctgtgggaagacattacttgcacatgcaattgctggggaacttgacctgccaattttgaaagtggctgctccagagattgtgtctggrgtatccggagagtctgagcagaagctgagagaactatttgagcaagctgtgtcaaatgcaccatgtatcattttcattgatgaaattgatgctattacccccaaaagagaagtggcttcaaaagatatggaacgaagaattgtagcccaactcctaacctgcatggatgatctgaataatgtggctgctacagcccggrtcctagttattggagctactaatcgaccagactcgttagaccctgctttgagacgtgcgggaaggttcgaccgagaaatatgcctaggtatcccagatgaagcatccagggaaagaatacttcaaacattgtgcagaaaactgaggcttcctcaagcttttgatttctgtcacttagcacacctaactccaggctttgttggtgctgatctcatggcactgtgccgagaggcagcaatgtgtgcagtcaatagagtcttaatgaagctacaggaacagcagaagaaaaatcctgaaatggaagatttgccatctaaaggagtccaggaggaaaggctgggaactgagcccacttctgaaacacaggatgaattacaaaggctgctggggttgctaagagaccaagatcccctctcagaggagcagatgcaaggactgtgcattgaactgaatgatttcattgttgctctatcctcagtccaaccctctgccaaaagggaaggctttgtcactgtccctaatgtgacatgggcagatattggtgccctggaagacattagagaggagctcaccatggcaatattggcaccagtacgcaacccagaccagttcaaagctcttggattggtgactccagctggggtcctccttgctggtcctcctggctgtgggaagactctgctggcgaaggctgttgcaaatgagtccggactaaattttatatctgtcaagggccccgaattactaaacatgtatgttggtgagagtgaacgtgctgtgcgacaagtttttcaacgagccaagaactcagcaccctgtgtgatattctttgatgaagtggatgctttatgtcctcgaagatcagaccgagagacaggggcaagtgtccgagtggtgaatcagctacttacagagatggatggtctggaagcacgccagcaggtttttattatggcagccactaacaggccagatataattgaccctgcaatcctgcgcccgggccgcctggacaaaacactgtttgtgggtttaccgccccctgcagatcgccttgccatcttaaaaactatcacaaaaaatggtaccaaaccaccactggatgcagatgtaaatttggaagcaattgctggtgaccttcgctgtgattgctatacgggcgcagatctctctgctttggtacgagaagcttctatctgtgccctgagacaggaaatggcaagacagaagagtggaaatgaaaaaggtgaactcaaggttagtcataagcattttgaagaagctttcaagaaagtaagatcatctatatcaaaaaaggatcaaatcatgtatgaacgtttgcaggagtccctcagccggtgatgtctccagcagccggcttagaggagctagcccatcaagccggcagagaatcccccacacgctctgaaggacccactttcagctggacacaggcgcggcctcatgtaaacattttattttcaaatgaatgaggccaagctgaagctgaagctgaagattcttcccatctggccagccttgtgtgaaaatgccttcttcctctttaagaaaaaggacaatttttaaactgctgaaataaaatgactgttacatttttcaaataaaacttttactttgaactat

SEQ ID NO: 7488 - DNA, 2828 bp, Homo sapiens
ggttgactagkagctggcggtcmgagctgtggcttgraagaccgacgcgatgaagcccagacctgcagrgttcgtggataataaactcaagcagcgagtcatccagtatagactatggtcgaagaaaaagaaatgcttttaggattcaggtagaaaaagtatttagcataattagtagtgagaaggaacttaagaatttaacagaattagaagatgaacatttggcaaaaagggcaagacaaggtgaagaggataatgagtatactgaaagctattctgatgatgattcaagtatggaagactacccagatccacagtcagcaaatcacatgaacagttccctgctgtctttatatcggaaaggaaatcctgattctgtttcaaatactcctgagatggagcaaagagaaaccacctcttcaacaccacrrataagttccaaaacaggctccattcccttgaagacccctgccaaagattctgaaggaggatggtttattgacaaaaccccaagtgtaaagaaagacagttttttcttggacctgtcatgtgagaaaagtaatcctaagaagccartaactgagrtacaggattcaaaagattcttctcttttggagagtgatatgaaacggaaaggcaagctaaagaataaaggaagcaaaaggaagaaagaagatcttcaggaagtagatggagaaattgaagctgtcctrcaaaagaaagctaaagccagggggttagaattccagatctccaacgtgaagtttgaagatgtgggaggcaatgatatgacattaaaagaggtctgcaagatgctcatacacatgcgtcacccggaggtgtaccaccacctgggcgtcgtgccccctcgtggagttctccttcatggaccaccaggctgtgggaagacattacttgcacatgcaattgctggggaacttgacctgccaattttgaaagtggctgctccagagattgtgtctggrgtatccggagagtctgagcagaagctgagagaactatttgagcaagctgtgtcaaatgcaccatgtatcattttcattgatgaaattgatgctattacccccaaaagagaagtggcttcaaaagatatggaacgaagaattgtagcccaactcctaacctgcatggatgatctgaataatgtggctgctacagcccggrtcctagttattggagctactaatcgaccagactcgttagaccctgctttgagacgtgcgggaaggttcgaccgagaaatatgcctaggtatcccagatgaagcatccagggaaagaatacttcaaacattgtgcagaaaactgaggcttcctcaagcttttgatttctgtcacttagcacacctaactccaggctttgttggtgctgatctcatggcactgtgccgagaggcagcaatgtgtgcagtcaatagagtcttaatgaagctacaggaacagcagaagaaaaatcctgaaatggaagatttgccatctaaaggagtccaggaggaaaggctgggaactgagcccacttctgaaacacaggatgaattacaaaggctgctggggttgctaagagaccaagatcccctctcagaggagcagatgcaaggactgtgcattgaactgaatgatttcattgttgctctatcctcagtccaaccctctgccaaaagggaaggctttgtcactgtccctaatgtgacatgggcagatattggtgccctggaagacattagagaggagctcaccatggcaatattggcaccagtacgcaacccagaccagttcaaagctcttggattggtgactccagctggggtcctccttgctggtcctcctggctgtgggaagactctgctggcgaaggctgttgcaaatgagtccggactaaattttatatctgtcaagggccccgaattactaaacatgtatgttggtgagagtgaacgtgctgtgcgacaagtttttcaacgagccaagaactcagcaccctgtgtgatattctttgatgaagtggatgctttatgtcctcgaagatcagaccgagagacaggggcaagtgtccgagtggtgaatcagctacttacagagatggatggtctggaagcacgccagcaggtttttattatggcagccactaacaggccagatataattgaccctgcaatcctgcgcccgggccgcctggacaaaacactgtttgtgggtttaccgccccctgcagatcgccttgccatcttaaaaactatcacaaaaaatggtaccaaaccaccactggatgcagatgtaaatttggaagcaattgctggtgaccttcgctgtgattgctatacgggcgcagatctctctgctttggtacgagaagcttctatctgtgccctgagacaggaaatggcaagacagaagagtggaaatgaaaaaggtgaactcaaggttagtcataagcattttgaagaagctttcaagaaagtaagatcatctatatcaaaaaaggatcaaatcatgtatgaacgtttgcaggagtccctcagccggtgatgtctccagcagccggcttagaggagctagcccatcaagccggcagagaatcccccacacgctctgaaggacccactttcagctggacacaggcgcggcctcatgtaaacattttattttcaaatgaatgaggccaagctgaagctgaagctgaagattcttcccatctggccagccttgtgtgaaaatgccttcttcctctttaagaaaaaggacaatttttaaactgctgaaataaaatgactgttacatttttcaaataaaacttttactttgaactat

SEQ ID NO: 7489 - DNA, 2176 bp, Homo sapiens
tccgacccgccccgcggcgcattgtgggatctgtcggcttgtcaggtggtggaggaaaaggcgctccgtcatggggatccagacgagccccgtcctgctggcctccctgggggtggggctggtcactctgctcggcctggctgtgggctcctacttggttcggaggtcccgccggcctcaggtcactctcctggaccccartgaaaagtacctgctacgactgctagacaagacgactgtgagccacaacaccaagaggttccgctttgccctgcccaccgcccaccacactctggggctgcctgtgggtaaggaaagtgtggaatgggctcctttccctggtatcctcagaaggtgactcccctcctgggatctcatgaaacacgctgcttcaaccggtttgctccacacaccattccccttcccccacttggctctgcatcctccaagctgtgaggtgccactgggcccctctagagtgtggcttccatgacccccatccagctttaacactcaacagtcttgcctcttccctgcaggatttgctaattactccctctgagcaagcactactaactttttcccattgcccagacccttttggctcatctgtcaaggtcctggcagtaactggcaggaaacgctggaaataagtgtttcctcaactgggcgcttataagagatccaactgagggctcaatggggcaaatcttccctgccttgtagctccttgggaccacagcaggaagcaagacatcttgttctctcaaatctctttgagtattttgagggatgcagcacatcacagacaacccttatgtagctctctgcacggtccccaggcaaacatatctacctctccacccgaattgatggcagcctggtcatcaggccatacactcctgtcaccagtgatgaggatcaaggctatgtggatcttgtcatcaaggtctacctgaagggtgtgcaycccaaatttcctgagggagggaagatgtctcagtacctggatagcctgaaggttggggatgtggtggagtttcgggggccaagcgggttgctcacttacactggaaaagggcattttaacattcagcccaacaagaaatctccaccagaacccmgagtggcgaagaaactgggaatgattgccggcgggacaggaatcaccccaatgctacagctgatccgggccatcctgaaagtccctgaagatccaacccagtgctttctgctttttgccaaccagacagaaaaggatatcatcttgcgggaggacttagaggaactgcaggcccgctatcccaatcgctttaagctctggttcactctggatcatcccccaaaagattgggcctacagcaagggctttgtgactgccgacatgatccgggaacacctgcccgctccaggggatgatgtgytggtactgctttgtgggccacccccaatggtgcagctggcctgccatcccaacttggacaaactgggctactcacaaaagatgcgattcacctactgagcatcctccagcttccctggtgctgttcgctgcagttgttccccatcagtactcaagcactataagccttagattcctttcctcagagtttcaggttttttcagttacatctagagctgaaatctggatagtacctgcaggaacaatattcctgtagccatggaagagggccaaggctcagtcactccttggatggcctcctaaatctccccgtggcaacaggtccaggagaggcccatggagcagtctcttccatggagtaagaaggaagggagcatgtacgcttggtccaagattggctagttccttgatagcatcttactctcacctyctttgtgtctgtgatgaaaggaacagtctgtgcwatgggttttacttaaacttcactgttcaacctatgagcaaatctgtatgtgtgagtataagttgagcatagcatacttccagaggtggtcttatggagatggcaagaaaggaggaaatgatttcttcagatctcaaaggagtctgaaatatcatatttctgtgtgtgtctctctcagcccctgcccaggctagagggaaacagctactgataatcgaaaactgctgtttgtggcaggaacccctggctgtgcaaataaatggggctgaggcccctgtgtgatattgaaa

SEQ ID NO: 7490 - DNA, 1642 bp, Homo sapiens
tccgacccgccccgcggcgcattgtgggatctgtcggcttgtcaggtggtggaggaaaaggcgctccgtcatggggatccagacgagccccgtcctgctggcctccctgggggtggggctggtcactctgctcggcctggctgtgggctcctacttggttcggaggtcccgccggcctcaggtcactctcctggaccccartgaaaagtacctgctacgactgctagacaagacgactgtgagccacaacaccaagaggttccgctttgccctgcccaccgcccaccacactctggggctgcctgtgggcaaacatatctacctctccacccgaattgatggcagcctggtcatcaggccatacactcctgtcaccagtgatgaggatcaaggctatgtggatcttgtcatcaaggtctacctgaagggtgtgcaycccaaatttcctgagggagggaagatgtctcagtacctggatagcctgaaggttggggatgtggtggagtttcgggggccaagcgggttgctcacttacactggaaaagggcattttaacattcagcccaacaagaaatctccaccagaacccmgagtggcgaagaaactgggaatgattgccggcgggacaggaatcaccccaatgctacagctgatccgggccatcctgaaagtccctgaagatccaacccagtgctttctgctttttgccaaccagacagaaaaggatatcatcttgcgggaggacttagaggaactgcaggcccgctatcccaatcgctttaagctctggttcactctggatcatcccccaaaagattgggcctacagcaagggctttgtgactgccgacatgatccgggaacacctgcccgctccaggggatgatgtgytggtactgctttgtgggccacccccaatggtgcagctggcctgccatcccaacttggacaaactgggctactcacaaaagatgcgattcacctactgagcatcctccagcttccctggtgctgttcgctgcagttgttccccatcagtactcaagcactataagccttagattcctttcctcagagtttcaggttttttcagttacatctagagctgaaatctggatagtacctgcaggaacaatattcctgtagccatggaagagggccaaggctcagtcactccttggatggcctcctaaatctccccgtggcaacaggtccaggagaggcccatggagcagtctcttccatggagtaagaaggaagggagcatgtacgcttggtccaagattggctagttccttgatagcatcttactctcacctyctttgtgtctgtgatgaaaggaacagtctgtgcwatgggttttacttaaacttcactgttcaacctatgagcaaatctgtatgtgtgagtataagttgagcatagcatacttccagaggtggtcttatggagatggcaagaaaggaggaaatgatttcttcagatctcaaaggagtctgaaatatcatatttctgtgtgtgtctctctcagcccctgcccaggctagagggaaacagctactgataatcgaaaactgctgtttgtggcaggaacccctggctgtgcaaataaatggggctgaggcccctgtgtgatattgaaa

SEQ ID NO: 7491 - DNA, 1642 bp, Homo sapiens
tccgacccgccccgcggcgcattgtgggatctgtcggcttgtcaggtggtggaggaaaaggcgctccgtcatggggatccagacgagccccgtcctgctggcctccctgggggtggggctggtcactctgctcggcctggctgtgggctcctacttggttcggaggtcccgccggcctcaggtcactctcctggaccccartgaaaagtacctgctacgactgctagacaagacgactgtgagccacaacaccaagaggttccgctttgccctgcccaccgcccaccacactctggggctgcctgtgggcaaacatatctacctctccacccgaattgatggcagcctggtcatcaggccatacactcctgtcaccagtgatgaggatcaaggctatgtggatcttgtcatcaaggtctacctgaagggtgtgcaycccaaatttcctgagggagggaagatgtctcagtacctggatagcctgaaggttggggatgtggtggagtttcgggggccaagcgggttgctcacttacactggaaaagggcattttaacattcagcccaacaagaaatctccaccagaacccmgagtggcgaagaaactgggaatgattgccggcgggacaggaatcaccccaatgctacagctgatccgggccatcctgaaagtccctgaagatccaacccagtgctttctgctttttgccaaccaggttgaaaaggatatcatcttgcgggaggacttagaggaactgcaggcccgctatcccaatcgctttaagctctggttcactctggatcatcccccaaaagattgggcctacagcaagggctttgtgactgccgacatgatccgggaacacctgcccgctccaggggatgatgtgytggtactgctttgtgggccacccccaatggtgcagctggcctgccatcccaacttggacaaactgggctactcacaaaagatgcgattcacctactgagcatcctccagcttccctggtgctgttcgctgcagttgttccccatcagtactcaagcactataagccttagattcctttcctcagagtttcaggttttttcagttacatctagagctgaaatctggatagtacctgcaggaacaatattcctgtagccatggaagagggccaaggctcagtcactccttggatggcctcctaaatctccccgtggcaacaggtccaggagaggcccatggagcagtctcttccatggagtaagaaggaagggagcatgtacgcttggtccaagattggctagttccttgatagcatcttactctcacctyctttgtgtctgtgatgaaaggaacagtctgtgcwatgggttttacttaaacttcactgttcaacctatgagcaaatctgtatgtgtgagtataagttgagcatagcatacttccagaggtggtcttatggagatggcaagaaaggaggaaatgatttcttcagatctcaaaggagtctgaaatatcatatttctgtgtgtgtctctctcagcccctgcccaggctagagggaaacagctactgataatcgaaaactgctgtttgtggcaggaacccctggctgtgcaaataaatggggctgaggcccctgtgtgatattgaaa

SEQ ID NO: 7492 - DNA, 1462 bp, Homo sapiens
tccgacccgccccgcggcgcattgtgggatctgtcggcttgtcaggtggtggaggaaaaggcgctccgtcatggggatccagacgagccccgtcctgctggcctccctgggggtggggctggtcactctgctcggcctggctgtgggctcctacttggttcggaggtcccgccggcctcaggtcactctcctggaccccartgaaaagtacctgctacgactgctagacaagacggtctacctgaagggtgtgcaycccaaatttcctgagggagggaagatgtctcagtacctggatagcctgaaggttggggatgtggtggagtttcgggggccaagcgggttgctcacttacactggaaaagggcattttaacattcagcccaacaagaaatctccaccagaacccmgagtggcgaagaaactgggaatgattgccggcgggacaggaatcaccccaatgctacagctgatccgggccatcctgaaagtccctgaagatccaacccagtgctttctgctttttgccaaccagacagaaaaggatatcatcttgcgggaggacttagaggaactgcaggcccgctatcccaatcgctttaagctctggttcactctggatcatcccccaaaagattgggcctacagcaagggctttgtgactgccgacatgatccgggaacacctgcccgctccaggggatgatgtgytggtactgctttgtgggccacccccaatggtgcagctggcctgccatcccaacttggacaaactgggctactcacaaaagatgcgattcacctactgagcatcctccagcttccctggtgctgttcgctgcagttgttccccatcagtactcaagcactataagccttagattcctttcctcagagtttcaggttttttcagttacatctagagctgaaatctggatagtacctgcaggaacaatattcctgtagccatggaagagggccaaggctcagtcactccttggatggcctcctaaatctccccgtggcaacaggtccaggagaggcccatggagcagtctcttccatggagtaagaaggaagggagcatgtacgcttggtccaagattggctagttccttgatagcatcttactctcacctyctttgtgtctgtgatgaaaggaacagtctgtgcwatgggttttacttaaacttcactgttcaacctatgagcaaatctgtatgtgtgagtataagttgagcatagcatacttccagaggtggtcttatggagatggcaagaaaggaggaaatgatttcttcagatctcaaaggagtctgaaatatcatatttctgtgtgtgtctctctcagcccctgcccaggctagagggaaacagctactgataatcgaaaactgctgtttgtggcaggaacccctggctgtgcaaataaatggggctgaggcccctgtgtgatattgaaa

SEQ ID NO: 7493 - DNA, 4100 bp, Homo sapiens
cacgaagcgctcactcgcaccctttctctctctctctctctctctaacacgcacgcacactcccagttgttcacactcgggtcctctccagcccgacgttctcctggcacccacctgctccgcggcgccctgcgcgcccccctcggtcgygccccttgcgctctcggcccagaccgtcgcagctacagggggcctcgagccccggggtgagcgtccccgtcccgctcctgctccttcccatagggacgcgcctgatgcctrsgaccggccgctgagcccaaggggaccgaggaggccatggtaggagcgctcgcctgctgcggtgcccgctgaggccatgcyggggccccggmgccccgctggctcccgcctgcgcctgctcctgctcctgctgctgccgccgctgctgctgctgctccggggcagccacgcgggcaacctgacggtagccgtggtactgccgctggccaatacctcgtacccctggtcgtgggcgcgcgtgggacccgccgtggagctggccctggcccaggtgaaggcgcgccccgacttgctgccgggctggacggtccgcacggtgctgggcagcagcgaaaacgcgctgggcgtctgctccgacaccgcagcgcccctggccgcggtggacctcaagtgggagcacaaccccgctgtgttcctgggccccggctgcgtgtacgccgccgccccagtggggcgcttcaccgcgcactggcgggtcccgctgctgaccgccggcgccccggcgctgggcttcggtgtcaaggacgagtatgcgctgaccacccgcgcggggcccagctacgccaagctgggggacttcgtggcggcgctgcaccgacggctgggctgggagcgccaagcgctcatgctctacgcctaccggccgggtgacgaagagcactgcttcttcctcgtggaggggctgttcatgcgggtccgcgaccgcctcaatattacggtggaccacctggagttcgccgaggacgacctcagccactacaccaggctgctgcggaccatgccgcgcaaaggccgagttatctacatctgcagctcccctgatgccttcagaaccctcatgctcctggccctggaagctggcttgtgtggggaggactacgttttcttccacctggatatctttgggcaaagcctgcaaggtggacagggccctgctccccgcaggccctgggagagaggggatgggcaggatgtcagtgcccgccaggcctttcaggctgccaaaatcattacatataaagacccagataatcccgagtacttggaattcctgaagcagttaaaacacctggcctatgagcagttcaacttcaccatggaggatggcctggtgaacaccatcccagcatccttccacgacgggctcctgctctatatccaggcagtgacggagactctggcacatgggggaactgttactgatggggagaacatcactcagcggatgtggaaccgaagctttcaaggtgtgacaggatacctgaaaattgatagcagtggcgatcgggaaacagacttctccctctgggatatggatcccgagaatggtgccttcagggttgtactgaactacaatgggacttcccaagagctggtggctgtgtcggggcrcaaactgaactggcccctggggtaccctcctcctgacatccccaaatgtggctttgacaacgaagacccagcatgcaaccaagatcacctttccaccctggaggtgctggctttggtgggcagcctctccttgctcggcattctgattgtctccttcttcatatacaggaagatgcagctggagaaggaactggcctcggagctgtggcgggtgcgctgggaggacgttgagcccagtagccttgagaggcacctgcggagtgcaggcagccggctgaccctgagcgggagaggctccaattacggctccctgctaaccacagagggccagttccaagtctttgccaagacagcatattataagggcaacctcgtggctgtgaaacgtgtgaaccgtaaacgcattgagctgacacgaaaagtcctgtttgaactgaagcatatgcgggatgtgcagaatgaacacctgaccaggtttgtgggagcctgcaccgacccccccaatatctgcatcctcacagagtactgtccccgtgggagcctgcaggacattctggagaatgagagcatcaccctggactggatgttccggtactcactcaccaatgacatcgtcaagggcatgctgtttctacacaatggggctatctgttcccatgggaacctcaagtcatccaactgcgtggtagatgggcgctttgtgctcaagatcaccgactatgggctggagagcttcagggacctggacccagagcaaggacacaccgtttatgccaaaaagctgtggacggcccctgagctcctgcgaatggcttcaccccctgtgcggggctcccaggctggtgacgtatacagctttgggatcatccttcaggagattgccctgaggagtggggtcttccacgtggaaggtttggacctgagccccaaagagatcatcgagcgggtgactcggggtgagcagccccccttccggccctccctggccctgcagagtcacctggaggagttggggctgctcatgcagcggtgctgggctgaggacccacaggagaggccaccattccagcagatccgcctgacgttgcgcaaatttaacagggagaacagcagcaacatcctggacaacctgctgtcccgcatggagcagtacgcgaacaatctggaggaactggtggaggagcggacccaggcatacctggaggagaagcgcaaggctgaggccctgctctaccagatcctgcctcactcagtggctgagcagctgaagcgtggggagacggtgcaggccgaagcctttgacagtgttaccatctacttcagtgacattgtgggtttcacagcgctgtcggcggagagcacacccatgcaggtggtgaccctgctcaatgacctgtacacttgctttgatgctgtcatagacaactttgatgtgtacaaggtggagacaattggcgatgcctacatggtggtgtcagggctccctgtgcggaacgggcrgctacacgcctgcgaggtagcccgcatggccctggcactgctggatgctgtgcgctccttccgaatccgccaccggccccaggagcagctgcgcttgcgcattggcatccacacaggacctgtgtgtgctggagtggtgggactgaagatgccccgttactgtctctttggggatacagtcaacacagcctcaagaatggagtctaatggggaagccctgaagatccacttgtcttctgagaccaaggctgtcctggaggagtttggtggtttcgagctggagcttcgaggggatgtagaaatgaagggcaaaggcaaggttcggacctactggctccttggggagagggggagtagcacccgaggctgacctgcctcctctcctatccctccacacctccctaccctgtgccagaagcaacagaggtgccaggcctcagcctcacccacagcagccccatcgccaaaggatggaagtaatttgaatagctcaggtgtgctgaccccagtgaagacaccagataggacctctgagaggggactggcatggggggatctcagagcttacaggctgagccaagcccacggccatgcacagggacactcacacaggcacacgcacctgctctccacctggactcaggccgggctgggctgtggattcctgatcccctcccctccccatgctctcctccctcagccttgctaccctgtgacttactgggaggagaaagagtcacctgaaggggaacatgaaaagagactaggtgaagagagggcaggggagcccacatctggggctggcccacaatacctgctcccccgaccccctccacccagcagtagacacagtgcacaggggagaagaggggtggcgcagaagggttgggggcctgtatgccttgcttctaccatgagcagagacaattaaaatctttattccagtg

SEQ ID NO: 7494 - DNA, 3652 bp, Homo sapiens
cgcgcagaccgaggcggctgcatcgaccgagccggcgaccaggaggcgacggcggccccggcggcggcggcgggtgaacgacgcggagccggggagcccggaggcgccgcaggggaggcgccgggggagcgcagcaccagcgccagcgccgaggcggccccagatggaccggccctggaggaggcggccggacccctggtccccggcctggtgctgggggggttcgggaagaggaaggcgccgaaggtccagcctttcctgccaaggtggctggctgagcctaactgtgtcagaaggaatgtcaycgaagacctggttcctatcgaggacatccctgacgtccatcctgacctgcagaagcagctgcgggcacacggcatctcgtcctactttccagtccaggcagctgtgattcctgccctcctggagagcgcagcctgtgggtttctggtgggcagaggtggctaccrgcctagcgacctctgtgtttctgccccaacaggcagtgggaagacactggccttcgtcatccctgtggtgcaggccctgctttcgagagtggtctgccacatccgtgccctggttgtgctgcccaccaaggagctggcccrgcagtaggtggacaccagctacctccaggccagtgacagacttctcctgcaggtgagcaaagttttcaacatctacacagatgccacacctctgagagtctccctggttacgggacagaagtctctggycaaggagcaggagagcctcgtccagaaaacagctgatgggtaccgctgcttggctgacatcgtggtagccacccccggccgcctggtggaccacatcgaccagaccccaggattcagcctccagcagctccgcttcctgattatygacgaggctgaccggatgattgacagcatgcatcagtcctggctgccgcgggtggtggcggccgccttccagagcgaggaccccgcggacccctgtgccctgctccagcgaaggcaggcccaggctgtgacagccgccagcacctgctgtccccagatgcccctgcagaagctgctcttctcagctactctgacccagaaccctgaaaagctgcagcagctgggcctccaccagccccggcttttctccacagggctagcacacaggggcctggaagatacagatggggacggggattcggggaagtatgcctttcctgttgggctcacgcaccactacgtgccctgcagcctcagctctaagccgctggtcgtcctgcacctggtcctggagatgggcttctcgagggttctctgcttcactaactcccgagagaactcccacaggctcttcctgctggtgcaagcttttgggggtgtggacgtggctgagttctcctcgcgctacgggcctggccagaggaggatgatcctgaagcagtttgaacaggggaagatccagctgctcatcagcacggacgccaccgcgcgaggcatcgacgtgcagggtgtggagctggtggtgaactacgacgccccycagtacctgagaacctacgtgcaccgggttgggaggacagctcgcgctgggaaaactggacrggccttcacrctgctcctgaaagtgcaggagaggagattcctccgaatgctaactgaagctggggcacctgagttgcagcggcacgagctytccagcaagctgctgcagccgctggttcctcggtacgaggaggccctgtcccagctggaggagtctgtcaaggaagagcgcaagcagagggcggcctaggctggggctcagagggccggagggactgaacgctcaccaccctgacyctccttccagagcagtgctgatcactrgatcctgtatgtgaggaaaggaatcccccagtggacacagccttcctccccaagcacgtggtctctgcgccaggcagcccgggcgtcagagctcaagcacctgccccgactggagacttcagggcttgtcactttcagagtgtggaggtcaggatggctgcgggcaatgaagccttagtaaaacggtgaaaagtactcccagacggacgcgggcacccgtcatgcttttgctgagagttgggggcattaaccttgagctaatgttaaaartcaagctcttggccaggcatggtggctcatgcctgtaattccagcactttgggaggccaaggcgggtggatcacctgaggtcasgagttcgagaccagcctgaccaacatggagaaaccctgtctctactaaaaatacaaaattagccaggcgtggtggtgcatgcctgtaatccagctacttgggaggctgaggcaggaaaatggcttgaacccgggaggtggaggttgcagtgagctgagattgcrccactgcactccagcctgggcaacaagagcaaaactccrtctcaaaaaaaaaaattgccgggcgcggtggcaaatgcctgtaatcccagcactttgggaggccgaggcaggtggatcacaaggtcaggagatagagaccatcattgctaacatggtgaaaccccgtctctactaaaaatacaaaaaaaaaaaaaaaacaactagcygggcgtggtggcgggcacctatagtcccagctactcgggaggctgaggcaggagaatggcgtgaacccgggaggcggagcttgcagtgagcggagactgcgccactgcactccagcctgggcaacagagtgagactccgtcaaaaaaaaagctctcctccccagatttgtgaaccttgtgactgttcagtggacacctcacatattgctggtgggaaggtcacgtggagacagctgggcaaagccttggggcgttaaacacagagtcactcatgacccagcacttcctctcctatgcaccttgtacaccccagatcaatgaaacctacatccacacagaaacgtacacaaatctctcagcagcactgttcacagtagccaaaaactagaaaccacatgtccgtcagctgatgaatggagaataaaacgtgggaaatccacaccaggagagaaaaaggagtgaggcaccagcataggcaccccgtggatgaacccggaacctgacgctaactgaaggaaggctccggctatagggagtgtcccaggcacagccagagattgaagggtgccggggccgggagttggtgggggttggggctggggacacagtggccagtgtgtgggtttgttttggggatgatgaaaatgttcttaggttgtgtgtggtgatggctgctcacctctataaaccttttactaaaaaccatggactgggtggatacagtgtgtgaattctctcagtccagtgctttgtttgaaaaaggtggatgatgccaacatcactaaccgccagggagacgcaggccacggccacacccggctcactggagttgtgaggatggaaacaccagcccaccccactcagttcagacctcagcttagatgcaaagaatgtctgggatggggactggcagctgattagagatgcaaccactgaacctgtggactgtgttcaaacaaatgccagcagaacacaaaaggcgactgttacaggaggctgaggcaggcgcatcacctgaggtcaggagatcgagaccatcctggccaacatggtgaaaccccatctctactaaaaatac

SEQ ID NO: 7495 - DNA, 2212 bp, Homo sapiens
agcagtctgccggtcggttgtctggctgcgcgcgccacccgggcctctccagtgccccgcctggctcggcatccacccccagcccgactcacacgtgggttcccgcacgtccgccggccccccccgctgacgtcagcatagctgttccacttaaggcccctcccgcgcccagctcagagtgctgcagccgctgccgccgattccggatctcattgccacgcgcccccgacgaccgcccgacgtgcattcccgattccttttggttccaagtccaatatggcaactctaaaggatcagctgatttataatcttctaaaggaagaacagaccccccagaataagattacagttgttggggttggtgctgttggcatggcctgtgccatcagtatcttaatgaaggacttggcagatgaacttgctcttgttgatgtcatcgaagacaaattgaagggagagatgatggatctccaacatggcagccttttccttagaacaccaaagattgtctctggcaaagactataatgtaactgcaaactccaagctggtcattatcacggctggggcacgtcagcaagagggagaaagccgtcttaatttggtccagcgtaacgtgaacatmtttaaattcatcattcctaatgttgtaaaatacagcccgaactgcaagttgcttattgtttcaaatccagtggatatcttgacctacgtggcttggaagataagtggttttcccaaaaaccgtgttattggaagyggttgcaatctggattcagcccgattccgttacctratgggggaaaggctgggagttcacccattaagctgtcatgggtgggtccttggggaacatggagattccagtgtgcctgtatggagtgsaatgaatgttgctggtgtctctctgaagactctgcacccagatttagggactgataaagataaggaacagtggaaagaggttcacaagcaggtggttgagagtgcttatgaggtgatcaaactcaaaggctacacatcctgggctattggactctctgtagcagatttggcagagagtataatgaagaatcttaggcgggtgcacccagtttccaccatgattaagggtctttacggaataaaggatgatgtcttccttagtgttccttgcattttgggacagaatggaatctcagaccttgtgaaggtgactctgacttctgaggaagaggcccgtttgaagaagagtgcagatacactttgggggatccaaaagkagctgcaattttaaagtcttctgatgtcatatcatttcactgtctaggctacaacaggattctaggtggaggttgtgcatgttgtcctttttatctgatctgtgattaaagcagtaatattttaagatggactgggaaaaacatcaactcctgaagttagaaataagaatggtttgtaaaatccacagctatatcctgatgctggatggtattaatcttgtgtagtcttcaactggttagtgtgaaatagttctgccacctctgacgcaccactgccaatgctgtacgtactgcatttgccccttgagccaggtggatgtttaccgtgtgttatataacttcctggctccttcactgaacatgcctagtccaacattttttmccagtgagtcacatcctgggatccagtgtataaatccaatatcatgtcttgtgyataattcttccaaaggatcttattttgtgaactatatcagtagtgtacattaccatataatgtaaaaagatctacatacaaacaatgcaaccaactatccaagtgttataccaactaaaacccccaataaaccttgaacagtgactactttggttaattyattatattaagatataaagtcataaagctgctagttattrtattaatttggaaataytaggctattcttgggcaaccctgcaacgattttttctaacagggatattattgactaatagcagaggatgtaatagtcaastgagttgtattggtaccacttccattgtaagtcccaaagtattatatatttgataataatgctaatcataattggaaagtaacattctatatgtaaatgtaaaatttatttgccaactgaatataggcaatgatagtgtgtcactatagggaacacagatttttgagatcttgtcctctggaagctggtaacaattaaaaacaatcttaaggcaggg

SEQ ID NO: 7496 - DNA, 1988 bp, Homo sapiens
gtgctgcagccgctgccgccgattccggatctcattgccacgcgcccccgacgaccgcccgacgtgcattcccggtacgattccttttggttccaagtccaatatggcaactctaaaggatcagctgatttataatcttctaaaggaagaacagaccccccagaataagattacagttgttggggttggtgctgttggcatggcctgtgccatcagtatcttaatgaaggacttggcagatgaacttgctcttgttgatgtcatcgaagacaaattgaagggagagatgatggatctccaacatggcagccttttccttagaacaccaaagattgtctctggcaaagactataatgtaactgcaaactccaagctggtcattatcacggctggggcacgtcagcaagagggagaaagccgtcttaatttggtccagcgtaacgtgaacatmtttaaattcatcattcctaatgttgtaaaatacagcccgaactgcaagttgcttattgtttcaaatccagtggatatcttgacctacgtggcttggaagataagtggttttcccaaaaaccgtgttattggaagyggttgcaatctggattcagcccgattccgttacctratgggggaaaggctgggagttcacccattaagctgtcatgggtgggtccttggggaacatggagattccagtgtgcctgtatggagtgsaatgaatgttgctggtgtctctctgaagactctgcacccagatttagggactgataaagataaggaacagtggaaagaggttcacaagcaggtggttgagagtgcttatgaggtgatcaaactcaaaggctacacatcctgggctattggactctctgtagcagatttggcagagagtataatgaagaatcttaggcgggtgcacccagtttccaccatgattaagggtctttacggaataaaggatgatgtcttccttagtgttccttgcattttgggacagaatggaatctcagaccttgtgaaggtgactctgacttctgaggaagaggcccgtttgaagaagagtgcagatacactttgggggatccaaaagkagctgcaattttaaagtcttctgatgtcatatcatttcactgtctaggctacaacaggattctaggtggaggttgtgcatgttgtcctttttatctgatctgtgattaaagcagtaatattttaagatggactgggaaaaacatcaactcctgaagttagaaattcttgtgtagtcttcaactggttagtgtgaaatagttctgccacctctgacgcaccactgccaatgctgtacgtactgcatttgccccttgagccaggtggatgtttaccgtgtgttatataacttcctggctccttcactgaacatgcctagtccaacattttttmccagtgagtcacatcctgggatccagtgtataaatccaatatcatgtcttgtgyataattcttccaaaggatcttattttgtgaactatatcagtagtgtacattaccatataatgtaaaaagatctacatacaaacaatgcaaccaactatccaagtgttataccaactaaaacccccaataaaccttgaacagtgactactttggttaattyattatattaagatataaagtcataaagctgctagttattrtattaatttggaaataytaggctattcttgggcaaccctgcaacgattttttctaacagggatattattgactaatagcagaggatgtaatagtcaastgagttgtattggtaccacttccattgtaagtcccaaagtattatatatttgataataatgctaatcataattggaaagtaacattctatatgtaaatgtaaaatttatttgccaactgaatataggcaatgatagtgtgtcactatagggaacacagatttttgagatcttgtcctctggaagctggtaacaattaaaaacaatcttaaggcaggg

SEQ ID NO: 7497 - DNA, 2824 bp, Homo sapiens
ggactcgcatttgcccccgaggacaattactatattgagatggagttaccagggctgaagtagaaaagtcagagcaaaaccacgcctgtgtcttcctcctgcctcagggacgaacaccttccttccaggtccgtggcaaatatctccaaaagccctgccgcctgccaacaccccttcaagttcccagttccacggaggcggaagcaaagcccccggaaaggccggtttgtccgccctgtgttgtttaaaggggatagacgaccttggagcgccccgccccctcccgccaaggaaggaccccattggctctccccggaggcttcactctcattggtcagcgagtgaatgccgacctgcagactggggcctaagtttcttttagtttccggtgtctctgcaatggcggctctagactccctgtcgmtcttcactagcytcggcctgagcgagcagaaggcccgcgagacgctcaagaactcggctctgagcgcgcagctgcgcgaggccgctactcaggctcagcagaccctgggttccaccattgacaaagctaccgggatcctgttatatggcttggcctcccgactcagggatacccggcgtctctccttccttgtaagctacatagccagtaagaagatccacactgagccccagctaagcgctgcccttgagtatgtgcggagtcaccccttggaccccatcgacactgtggacttcgagcgggaatgtggcgtgggtgtcattgtgaccccagagcagattgaggaggctgtggaggctgctattaacaggcaycggccccagctcctggtggaacgttaccatttcaacatggggctgctgatgggagaggctcgggctgtgctgaagtgggcagatggcaaaatgatcaagaatgaagtggacatgcaggtcctccaccttctgggccccaagttggaggctgatctggagaagaagttcaaggtggcaaaagctcggctagaagaaacagaccggaggacggcaaaggatgtggtggagaatggcgagactgctgaccagaccctgtctctgatggagcagctccggggggaggcccttaagttccacaagcctggtgagaactacaagacyccaggctatgtggtcactccacacaccatgaatctactaaagcagcacctggagattactggtgggcaggtacgtacccggttcccgccagaacccaatggaatcctgcatattggacatgccaaagccatcartttcaactttggctatgccaaggccaacaatggcatctgttttctgcgttttgatgacaccaaccctgagaaggaggaagcaaagttcttcacggccatctgtgacatggtagcctggctaggctacacaccttacaaagtcacatatgcgtctgactaytttgaccagctatatgcgtgggctgtggagctcatccgcaggggtctggcttatgtgtgccaccagcgaggagaggagctcaaaggccataatactctgccttcaccctggagagaccgtcccatggaggagtcactgctgctctttgaggcaatgcgcaagggcaagttttcagagggcgaggccacactacggatgaagctggtgatggaggatggcaagatggaccctgtagcctatcgagtcaagtatacaccacaccaccgcacaggggacaaatggtgcatctatcccacctacgactacacacactgcctctgtgactccatcgagcacatcactcactcactctgcaccaaggaattccaggcccgacgctcttcctacttctggctttgcaatgcactggacgtctattgccctgtgcagtgggagtatggccgcctcaacctgcactatgctgttgtctctaagaggaagatcctccagcttgtagcaactggtgctgtgcgggactgggatgacccacggctctttacactcacggccctgcgacggcggggcttcccacctgaggccatcaacaacttctgtgcccgggtgggagtgactgtggcacaraccacaatggagccacatcttctagaagcctgtgtgcgtgatgtgctgaatgacacagccccacgagccatggctgtgctggagtcactacgggtcatcatcaccaactttcctgctgccaagtccttggacatccaggtgcccaacttcccagctgatgagaccaaaggcttccatcaggttccctttrcacccattgtcttcattgagaggactgacttcaaggaggagccagagccaggatttaagcgcctggcttggggccagcctgtgggcctgaggcatacaggctacgtcattgagctgcagcatgttgtcaagggccccagtggttgtgtagagagtctggaggtgacctgcagacgggcagatgctggagagaagccaaaggcctttattcactgggtgtcacagcctttgatgtgtgaggttcgcctctatgagcgactattccagcacaagaaccctgaagatcctactgaggtgcctggtggatttttaagtgacctgaacctggcatcactacacgtggtggatgcagcattagtggactgctctgtggccctggcaaaacccttcgacaagttccagtttgagcgtcttggatatttctccgtggatccagacagccatcagggaaagcttgtctttaaccgaactgtcacactgaaggaagacccaggaaaggtgtgagctggaagcactgaacctacctcatcctcctggagggtgtggctaccctcgccaccccaaattccatgtcaataaagaacagctaaattctcctaga

SEQ ID NO: 7498 - DNA, 2461 bp, Homo sapiens
aagtagaaaagtcagagcaaaaccacgcctgtgtcttcctcctgcctcagggacgaacaccttccttccagcytcggcctgagcgagcagaaggcccgcgagacgctcaagaactcggctctgagcgcgcagctgcgcgaggccgctactcaggctcagcagaccctgggttccaccattgacaaagctaccgggatcctgttatatggcttggcctcccgactcagggatacccggcgtctctccttccttgtaagctacatagccagtaagaagatccacactgagccccagctaagcgctgcccttgagtatgtgcggagtcaccccttggaccccatcgacactgtggacttcgagcgggaatgtggcgtgggtgtcattgtgaccccagagcagattgaggaggctgtggaggctgctattaacaggcaycggccccagctcctggtggaacgttaccatttcaacatggggctgctgatgggagaggctcgggctgtgctgaagtgggcagatggcaaaatgatcaagaatgaagtggacatgcaggtcctccaccttctgggccccaagttggaggctgatctggagaagaagttcaaggtggcaaaagctcggctagaagaaacagaccggaggacggcaaaggatgtggtggagaatggcgagactgctgaccagaccctgtctctgatggagcagctccggggggaggcccttaagttccacaagcctggtgagaactacaagacyccaggctatgtggtcactccacacaccatgaatctactaaagcagcacctggagattactggtgggcaggtacgtacccggttcccgccagaacccaatggaatcctgcatattggacatgccaaagccatcartttcaactttggctatgccaaggccaacaatggcatctgttttctgcgttttgatgacaccaaccctgagaaggaggaagcaaagttcttcacggccatctgtgacatggtagcctggctaggctacacaccttacaaagtcacatatgcgtctgactaytttgaccagctatatgcgtgggctgtggagctcatccgcaggggtctggcttatgtgtgccaccagcgaggagaggagctcaaaggccataatactctgccttcaccctggagagaccgtcccatggaggagtcactgctgctctttgaggcaatgcgcaagggcaagttttcagagggcgaggccacactacggatgaagctggtgatggaggatggcaagatggaccctgtagcctatcgagtcaagtatacaccacaccaccgcacaggggacaaatggtgcatctatcccacctacgactacacacactgcctctgtgactccatcgagcacatcactcactcactctgcaccaaggaattccaggcccgacgctcttcctacttctggctttgcaatgcactggacgtctattgccctgtgcagtgggagtatggccgcctcaacctgcactatgctgttgtctctaagaggaagatcctccagcttgtagcaactggtgctgtgcgggactgggatgacccacggctctttacactcacggccctgcgacggcggggcttcccacctgaggccatcaacaacttctgtgcccgggtgggagtgactgtggcacaraccacaatggagccacatcttctagaagcctgtgtgcgtgatgtgctgaatgacacagccccacgagccatggctgtgctggagtcactacgggtcatcatcaccaactttcctgctgccaagtccttggacatccaggtgcccaacttcccagctgatgagaccaaaggcttccatcaggttccctttrcacccattgtcttcattgagaggactgacttcaaggaggagccagagccaggatttaagcgcctggcttggggccagcctgtgggcctgaggcatacaggctacgtcattgagctgcagcatgttgtcaagggccccagtggttgtgtagagagtctggaggtgacctgcagacgggcagatgctggagagaagccaaaggcctttattcactgggtgtcacagcctttgatgtgtgaggttcgcctctatgagcgactattccagcacaagaaccctgaagatcctactgaggtgcctggtggatttttaagtgacctgaacctggcatcactacacgtggtggatgcagcattagtggactgctctgtggccctggcaaaacccttcgacaagttccagtttgagcgtcttggatatttctccgtggatccagacagccatcagggaaagcttgtctttaaccgaactgtcacactgaaggaagacccaggaaaggtgtgagctggaagcactgaacctacctcatcctcctggagggtgtggctaccctcgccaccccaaattccatgtcaataaagaacagctaaattctcctaga

SEQ ID NO: 7499 - protein, 382 aa, Homo sapiens
MTEFWLISAPGEKTCQQTWEKLHAATSKNNNLAVTSKFNIPDLKVGTLDVLVGLSDELAKLDAFVEGVVKKVAQYMADVLEDSKDKVQENLLANGVDLVTYITRFQWDMAKYPIKQSLKNISEIIAKGVTQIDNDLKSRASAYNNLKGNLQNLERKNAGSLLTRSLAEIVKKDDFVLDSEYLVTLLVVVPKLNHNDWIKQYETLAEMVVPRSSNVLSEDQDSYLCNVTLFRKAVDDFRHKARENKFIVRDFQYNEEEMKADKEEMNRLSTDKKKQFGPLVRWLKVNFSEAFIAWIHVKALRVFVESVLRYGLPVNFQAMLLQPNKKTLKKLREVLHELYKHLDSSAAAIIDAPMDIPGLNLSQQEYYPYVYYKIDCNLLEFK

SEQ ID NO: 7500 - protein, 382 aa, Homo sapiens; identical to SEQ ID NO: 7499

SEQ ID NO: 7501 - protein, 409 aa, Homo sapiens
MRGEQGAAGARVLQFTNCRILRGGKLLREDLWVRGGRILDPEKLFFEERRVADERRDCGGRILAPGFIDVQINGGFGVDFSQATEDVGSGVALVARRILSHGVTSFCPTLVTSPPEVYHKVVPQIPVKSGGPHGAGVLGLHLEGPFISREKRGAHPEAHLRSFEADAFQDLLATYGPLDNVRIVTLAPELGRSHEVIRALTARGICVSLGHSVADLRAAEDAVWSGATFITHLFNAMLPFHHRDPGIVGLLTSDRLPAGRCIFYGMIADGTHTNPAALRIAHRAHPQGLVLVTDAIPALGLGNGRHTLGQQEVEVDGLTAYVAGTKTLSGSIAPMDVCVRHFLQATGCSMESALEAASLHPAQLLGLEKSKGTLDFGADADFVVLDDSLHVQATYISGELVWQADAARQ

SEQ ID NO: 7502 - protein, 325 aa, Homo sapiens
MRGEQGAAGARVLQFTNCRILRGGKLLREDLWVRGGRILDPEKLFFEERRVADERRDCGGRILAPGFIDVQINGGFGVDFSQATEDVGSGVALVARRILSHGVTSFCPTLVTSPPEVYHKVVPQIPVKSGGPHGAGVLGLHLEGPFISREKRGAHPEAHLRSFEADAFQDLLATYGPLDNVRIVTLAPELGRSHEVIRALTARGICVSLGHSVADLRAAEDAVWSGATFITHLFNAMLPFHHRDPGIVGLLTSDRLPAGRCIFYGMIADGTHTNPAALRIAHRAHPQGSEPLLPQGWCWSPMPSLPWAWATAGTRWDSRKWKWTV

SEQ ID NO: 7503 - protein, 439 aa, Homo sapiens
MRGEQGAAGARVLQFTNCRILRGGKLLREDLWVRGGRILDPEKLFFEERRVADERRDCGGRILAPGFIDVQINGGFGVDFSQATEDVGSGVALVARRILSHGVTSFCPTLVTSPPEVYHKVVPQIPVKSGGPHGAGVLGLHLEGPFISREKRGAHPEAHLRSFEADAFQDLLATYGPLDNVRIVTLAPELGRSHEVIRALTARGICVSLGHSVADLRAAEDAVWSGATFITHLFNAMLPFHHRDPGIVGLLTSDRLPAGRCIFYGMIADGTHTNPAALRIAHRAHPQGLVLVTDAIPALGLGNGRHTLGQQEVEVDGLTAYVAGERPDPLGPRSQPACQVAHDPPRACPLCSQGTKTLSGSIAPMDVCVRHFLQATGCSMESALEAASLHPAQLLGLEKSKGTLDFGADADFVVLDDSLHVQATYISGELVWQADAARQ

SEQ ID NO: 7504 - protein, 660 aa, Homo sapiens
MSHVVVKNDPELDQQLANLDLNSEKQSGGASTASKGRYIPPHLRNREASKGFHDKDSSGWSCSKDKDAYSSFGSRDSRGKPGYFSERGSGSRGRFDDRGRSDYDGIGNRERPGFGRFERSGHSRWCDKSVEDDWSKPLPPSERLEQELFSGGNTGINFEKYDDIPVEATGSNCPPHIENFSDIDMGEIIMGNIELTRYTRPTPVQKHAIPIIKGKRDLMACAQTGSGKTAAFLLPILSQIYTDGPGEALKAVKENGRYGRRKQYPISLVLAPTRELAVQIYEEARKFSYRSRVRPCVVYGGADIGQQIRDLERGCHLLVATPGRLVDMMERGKIGLDFCKYLVLDEADRMLDMGFEPQIRRIVEQDTMPPKGVRHTMMFSATFPKEIQMLARDFLDEYIFLAVGRVGSTSENITQKVVWVEDLDKRSFLLDILGATGSDSLTLVFVETKKGADSLEDFLYHEGYACTSIHGDRSQRDREEALHQFRSGKSPILVATAVAARGLDISNVRHVINFDLPSDIEEYVHRIGRTGRVGNLGLATSFFNEKNMNITKDLLDLLVEAKQEVPSWLENMAYEHHYKGGSRGRSKSNRFSGGFGARDYRQSSGSSSSGFGASRGSSSRSGGGGYGNSRGFGGGGYGGFYNSDGYGGNYNSQGVDWWGN

SEQ ID NO: 7505 - protein, 660 aa, Homo sapiens; identical to SEQ ID NO: 7504

SEQ ID NO: 7506 - protein, 224 aa, Homo sapiens
MASSTPSSSATSSNAGADPNTTNLRPTTYDTWCGVAHGCTRKLGLKICGFLQRTNSLEEKSRLVSAFKERQSSKNLLSCENSDRDARFRRTETDFSNLFARDLLPAKNGEEQTVQFLLEVVDILLNYVRKTFDRSTKVLDFHHPHQLLEGMEGFNLELSDHPESLEQILVDCRDTLKYGVRTGHPRFFNQLSTGLDIIGLAGEWLTSTANTNMPSDMRECWLLR

SEQ ID NO: 7507 - protein, 224 aa, Homo sapiens; identical to SEQ ID NO: 7506

SEQ ID NO: 7508 - protein, 251 aa, Homo sapiens
  VARIANT (1)...(251): Xaa = Any Amino Acid
MASSTPSSSATSSNAGADPNTTNLRPTTYDTWCGVAHGCTRKLGLKICGFLQRTNSLEEKSRLVSAFKERQSSKNLLSCENSDRDARFRRTETDFSNLFARDLLPAKNGEEQTVQFLLEVVDILLNYVRKTFDRSTKVLDFHHPHQLLEGMEGFNLELSDHPESLEQILVDCRDTLKYGVRTGHPRFFNQLSTGLDIIGLAGEWLTSTANTNMFTYEIAPVFVLMEQITLKKMREIVGWSSKDGDGIFSPX

SEQ ID NO: 7509 - protein, 594 aa, Homo sapiens
MASSTPSSSATSSNAGADPNTTNLRPTTYDTWCGVAHGCTRKLGLKICGFLQRTNSLEEKSRLVSAFKERQSSKNLLSCENSDRDARFRRTETDFSNLFARDLLPAKNGEEQTVQFLLEVVDILLNYVRKTFDRSTKVLDFHHPHQLLEGMEGFNLELSDHPESLEQILVDCRDTLKYGVRTGHPRFFNQLSTGLDIIGLAGEWLTSTANTNMFTYEIAPVFVLMEQITLKKMREIVGWSSKDGDGIFSPGGAISNMYSIMAARYKYFPEVKTKGMAAVPKLVLFTSEQSHYSIKKAGAALGFGTDNVILIKCNERGKIIPADFEAKILEAKQKGYVPFYVNATAGTTVYGAFDPIQEIADICEKYNLWLHVDAAWGGGLLMSRKHRHKLNGIERANSVTWNPHKMMGVLLQCSAILVKEKGILQGCNQMCAGYLFQPDKQYDVSYDTGDKAIQCGRHVDIFKFWLMWKAKGTVGFENQINKCLELAEYLYAKIKNREEFEMVFNGEPEHTNVCFWYIPQSLRGVPDSPQRREKLHKVAPKIKALMMESGTTMVGYQPQGDKANFFRMVISNPAATQSDIDFLIEEIERLGQDL

SEQ ID NO: 7510 - protein, 594 aa, Homo sapiens; identical to SEQ ID NO: 7509

SEQ ID NO: 7511 - protein, 211 aa, Homo sapiens
MCPGNWLWASMTFMARFSRSSSRSPVRTRGTLEEMPTVQHPFLNVFELERLLYTGKTACNHADEVWPGLYLGDQDMANNRRELRRLGITHVLNASHSRWRGTPEAYEGLGIRYLGVEAHDSPAFDMSIHFQTAADFIHRALSQPGGKILVHCAVGVSRSATLVLAYLMLYHHLTLVEAIKKVKDHRGIIPNRGFLRQLLALDRRLRQGLEA

SEQ ID NO: 7512 - protein, 211 aa, Homo sapiens; identical to SEQ ID NO: 7511

SEQ ID NO: 7513 - protein, 357 aa, Homo sapiens
MGIKVQRPRCFFDIAINNQPAGRVVFELFSDVCPKTCENFRCLCTGEKGTGKSTQKPLHYKSCLFHRVVKDFMVQGGDFSEGNGRGGESIYGGFFEDESFAVKHNKEFLLSMANRGKDTNGSQFFITTKPTPHLDGHHVVFGQVISGQEVVREIENQKTDAASKPFAEVRILSCGELIPKSKVKKEEKKRHKSSSSSSSSSSDSDSSSDSQSSSDSSDSESATEEKSKKRKKKHRKNSRKHKKEKKKRKKSKKSASSESEAENLEAQPQSTVRPEEIPPIPENRFLMRKSPPKADEKERKNRERERERECNPPNSQPASYQRRLLVTRSGRKIKGRGPRVGDSFPRDLHNIAFVFLK

SEQ ID NO: 7514 - protein, 754 aa, Homo sapiens
MGIKVQRPRCFFDIAINNQPAGRVVFELFSDVCPKTCENFRCLCTGEKGTGKSTQKPLHYKSCLFHRVVKDFMVQGGDFSEGNGRGGESIYGGFFEDESFAVKHNKEFLLSMANRGKDTNGSQFFITTKPTPHLDGHHVVFGQVISGQEVVREIENQKTDAASKPFAEVRILSCGELIPKSKVKKEEKKRHKSSSSSSSSSSDSDSSSDSQSSSDSSDSESATEEKSKKRKKKHRKNSRKHKKEKKKRKKSKKSASSESEAENLEAQPQSTVRPEEIPPIPENRFLMRKSPPKADEKERKNRERERERECNPPNSQPASYQRRLLVTRSGRKIKGRGPRRYRTPSRSRSRDRFRRSETPPHWRQEMQRAQRMRVSSGERWIKGDKSELNEIKENQRSPVRVKERKITDHRNVSESPNRKNEKEKKVKDHKSNSKERDIRRNSEKDDKYKNKVKKRAKSKSRSKSKEKSKSKERDSKHNRNEEKRMRSRSKGRDHENVKEKEKQSDSKGKDQERSRSKEKSKQLESKSNEHDHSKSKEKDRRAQSRSRECDITKGKHSYNSRTRERSRSRDRSRRVRSRTHDRDRSRSKEYHRYREQEYRRRGRSRSRERRTPPGRSRSKDRRRRRRDSRSSEREESQSRNKDKYRNQESKSSHRKENSESEKRMYSKSRDHNSSNNSREKKADRDQSPFSKIKQSSQDDELKSSMLKNKEDEKIRSSVEKENQKSKGQENDHVHEKNKKFDHESSPGTDEDKSG

SEQ ID NO: 7515 - protein, 754 aa, Homo sapiens; identical to SEQ ID NO: 7514

SEQ ID NO: 7516 - protein, 365 aa, Homo sapiens
MFAEAAKTTRPCGMAEFKEKPEAPTEQLDVACGQENLPVGAWPPGAAPAPFQYTPDHVVGPGADIDPTQITFPGCICVKTPCLPGTCSCLRHGENYDDNSCLRDIGSGGKYAEPVFECNVLCRCSDHCRNRVVQKGLQFHFQVFKTHKKGWGLRTLEFIPKGRFVCEYAGEVLGFSEVQRRIHLQTKSDSNYIIAIREHVYNGQVMETFVDPTYIGNIGRFLNHSCEPNLLMIPVRIDSMVPKLALFAAKDIVPEEELSYDYSGRYLNLTVSEDKERLDHGKLRKPCYCGAKSCTAFLPFDSSLYCPVEKSNISCGNEKEPSMCGSAPSVFPSCKRLTLEVSLFSDKQLAPPYSGRQWLASFTSA

SEQ ID NO: 7517 - protein, 684 aa, Homo sapiens
MFAEAAKTTRPCGMAEFKEKPEAPTEQLDVACGQENLPVGAWPPGAAPAPFQYTPDHVVGPGADIDPTQITFPGCICVKTPCLPGTCSCLRHGENYDDNSCLRDIGSGGKYAEPVFECNVLCRCSDHCRNRVVQKGLQFHFQVFKTHKKGWGLRTLEFIPKGRFVCEYAGEVLGFSEVQRRIHLQTKSDSNYIIAIREHVYNGQVMETFVDPTYIGNIGRFLNHSCEPNLLMIPVRIDSMVPKLALFAAKDIVPEEELSYDYSGRYLNLTVSEDKERLDHGKLRKPCYCGAKSCTAFLPFDSSLYCPVEKSNISCGNEKEPSMCGSAPSVFPSCKRLTLETMKMMLDKKQIRAIFLFEFKMGRKAAETTRNINNAFGPGTANERTVQWWFKKFCKGDESLEDEERSGRPSEVDNDQLRAIIEADPLTTTREVAEELNVNHSTVVRHLKQIGKVKKLDKWVPHELTENQKNRRFEVSSSLILRNHNEPFLDRIVTCDEKWILYDNRRRSAQWLDQEEAPKHFPKPILHPKKVMVTIWWSAAGLIHYSFLNPGETITSEKYAQEIDEMNQKLQRLQLALVNRKGPILLHDNARPHVAQPTLQKLNELGYEVLPHPPYSPDLLPTNYHVFKHLNNFLQGKRFHNQQDAENAFQEFVESQSTDFYATGINQLISRWQKCVDCNGSYFD

SEQ ID NO: 7518 - protein, 448 aa, Homo sapiens
MPRPGPFSVDPRHHLSKGVVLFSPFPEAQNRRPCENLAFCPVLSSELKEASRGESFTSLVSGVSHSSLYCPVEKSNISCGNEKEPSMCGSAPSVFPSCKRLTLETMKMMLDKKQIRAIFLFEFKMGRKAAETTRNINNAFGPGTANERTVQWWFKKFCKGDESLEDEERSGRPSEVDNDQLRAIIEADPLTTTREVAEELNVNHSTVVRHLKQIGKVKKLDKWVPHELTENQKNRRFEVSSSLILRNHNEPFLDRIVTCDEKWILYDNRRRSAQWLDQEEAPKHFPKPILHPKKVMVTIWWSAAGLIHYSFLNPGETITSEKYAQEIDEMNQKLQRLQLALVNRKGPILLHDNARPHVAQPTLQKLNELGYEVLPHPPYSPDLLPTNYHVFKHLNNFLQGKRFHNQQDAENAFQEFVESQSTDFYATGINQLISRWQKCVDCNGSYFD

SEQ ID NO: 7519 - protein, 1014 aa, Homo sapiens
MAESSDKLYRVEYAKSGRASCKKCSESIPKDSLRMAIMVQSPMFDGKVPHWYHFSCFWKVGHSIRHPDVEVDGFSELRWDDQQKVKKTAEAGGVTGKGQDGIGSKAEKTLGDFAAEYAKSNRSTCKGCMEKIEKGQVRLSKKMVDPEKPQLGMIDRWYHPGCFVKNREELGFRPEYSASQLKGFSLLATEDKEALKKQLPGVKSEGKRKGDEVDGVDEVAKKKSKKEKDKDSKLEKALKAQNDLIWNIKDELKKVCSTNDLKELLIFNKQQVPSGESAILDRVADGMVFGALLPCEECSGQLVFKSDAYYCTGDVTAWTKCMVKTQTPNRKEWVTPKEFREISYLKKLKVKKQDRIFPPETSASVAATPPPSTASAPAAVNSSASADKPLSNMKILTLGKLSRNKDEVKAMIEKLGGKLTGTANKASLCISTKKEVEKMNKKMEEVKEANIRVVSEDFLQDVSASTKSLQELFLAHILSPWGAEVKAEPVEVVAPRGKSGAALSKKSKGQVKEEGINKSEKRMKLTLKGGAAVDPDSGLEHSAHVLEKGGKVFSATLGLVDIVKGTNSYYKLQLLEDDKENRYWIFRSWGRVGTVIGSNKLEQMPSKEDAIEHFMKLYEEKTGNAWHSKNFTKYPKKFYPLEIDYGQDEEAVKKLTVNPGTKSKLPKPVQDLIKMIFDVESMKKAMVEYEIDLQKMPLGKLSKRQIQAAYSILSEVQQAVSQGSSDSQILDLSNRFYTLIPHDFGMKKPPLLNNADSVQAKVEMLDNLLDIEVAYSLLRGGSDDSSKDPIDVNYEKLKTDIKVVDRDSEEAEIIRKYVKNTHATTHNAYDLEVIDIFKIEREGECQRYKPFKQLHNRRLLWHGSRTTNFAGILSQGLRIAPPEAPVTGYMFGKGIYFADMVSKSANYCHTSQGDPIGLILLGEVALGNMYELKHASHISKLPKGKHSVKGLGKTTPDPSANISLDGVDVPLGTGISSGVNDTSLLYNEYIVYDIAQVNLKYLLKLKFNFKTSLW

SEQ ID NO: 7520 - protein, 1014 aa, Homo sapiens; identical to SEQ ID NO: 7519

SEQ ID NO: 7521 - protein, 1008 aa, Homo sapiens [sequence omitted]

SEQ ID NO: 7522 - protein, 386 aa, Homo sapiens
MRAAPLLLARAASLSLGFLFLLFFWLDRSVLAKELKFVTLVFRHGDRSPIDTFPTDPIKESSWPQGFGQLTQLGMEQHYELGEYIRKRYRKFLNESYKHEQVYIRSTDVDRTLMSAMTNLAALFPPEGVSIWNPILLWQPIPVHTVPLSEDQLLYLPFRNCPRFQELESETLKSEEFQKRLHPYKDFIATLGKLSGLHGQDLFGIWSKVYDPLYCESVHNFTLPSWATEDTMTKLRELSELSLLSLYGIHKQKEKSRLQGGVLVNEILNHMKRATQIPSYKKLIMYSAHDTTVSGLQMALDVYNGLLPPYASCHLTELYFEKGEYFVEMYYRNETQHEPYPLMLPGCSPSCPLERFAELVGPVIPQDWSTECMTTNSHQGTEDSTD

SEQ ID NO: 7523 - protein, 386 aa, Homo sapiens; identical to SEQ ID NO: 7522

SEQ ID NO: 7524 - protein, 418 aa, Homo sapiens [sequence omitted]

SEQ ID NO: 7525 - protein, 386 aa, Homo sapiens [sequence omitted]

SEQ ID NO: 7526 - protein, 386 aa, Homo sapiens
MKDCSNGCSAECTGEGGSKEVVGTFKAKDLIVTPATILKEKPDPNNLVFGTVFTDHMLTVEWSSEFGWEKPHIKPLQNLSLHPGSSALHYAVELFEGLKAFRGVDNKIRLFQPNLNMDRMYRSAVRATLPVFDKEELLECIQQLVKLDQEWVPYSTSASLYIRPTFIGTEPSLGVKKPTKALLFVLLSPVGPYFSSGTFNPVSLWANPKYVRAWKGGTGDCKMGGNYGSSLFAQCEAVDNGCQQVLWLYGEDHQITEVGTMNLFLYWINEDGEEELATPPLDGIILPGVTRRCILDLAHQWGEFKVSERYLTMDDLTTALEGNRVREMFGSGTACVVCPVSDILYKGETIHIPTMENGPKLASRILSKLTDIQYGREESDWTIVLS

SEQ ID NO: 7527 - protein, 400 aa, Homo sapiens [sequence omitted]

SEQ ID NO: 7528 - protein, 330 aa, Homo sapiens
MLTVEWSSEFGWEKPHIKPLQNLSLHPGSSALHYAVELFEGLKAFRGVDNKIRLFQPNLNMDRMYRSAVRATLPVFDKEELLECIQQLVKLDQEWVPYSTSASLYIRPTFIGTEPSLGVKKPTKALLFVLLSPVGPYFSSGTFNPVSLWANPKYVRAWKGGTGDCKMGGNYGSSLFAQCEAVDNGCQQVLWLYGEDHQITEVGTMNLFLYWINEDGEEELATPPLDGIILPGVTRRCILDLAHQWGEFKVSERYLTMDDLTTALEGNRVREMFGSGTACVVCPVSDILYKGETIHIPTMENGPKLASRILSKLTDIQYGREESDWTIVLS

SEQ ID NO: 7529 - protein, 386 aa, Homo sapiens; identical to SEQ ID NO: 7526

SEQ ID NO: 7530 - protein, 922 aa, Homo sapiens
MDSLLPPSRFSYFKKYPLHAIRRYLSTLRNQRAEEQVARFQKIPNGENETMIPVLTSKKASELPVSEVASILQADLQNGLNKCEVSHRRAFHGWNEFDISEDEPLWKKYISQFKNPLIMLLLASAVISVLMHQFDDAVSITVAILIVVTVAFVQEYRSEKSLEELSKLVPPECHCVREGKLEHTLARDLVPGDTVCLSVGDRVPADLRLFEAVDLSIDESSLTGETTPCSKVTAPQPAATNGDLASRSNIAFMGTLVRCGKAKGVVIGTGENSEFGEVFKMMQAEEAPKTPLQKSMDLLGKQLSFYSFGIIGIIMLVGWLLGKDILEMFTISVSLAVAAIPEGLPIVVTVTLALGVMRMVKKRAIVKKLPIVETLGCCNVICSDKTGTLTKNEMTVTHIFTSDGLHAEVTGVGYNQFGEVIVDGDVVHGFYNPAVSRIVEAGCVCNDAVIRNNTLMGKPTEGALIALAMKMGLDGLQQDYIRKAEYPFSSEQKWMAVKCVHRTQQDRPEICFMKGAYEQVIKYCTTYQSKGQTLTLTQQQRDVYQQEKARMGSAGLRVLALASGPELGQLTFLGLVGIIDPPRTGVKEAVTTLIASGVSIKMITGDSQETAVAIASRLGLYSKTSQSVSGEEIDAMDVQQLSQIVPKVAVFYRASPRHKMKIIKSLQKNGSVVAMTGDGVNDAVALKAADIGVAMGQTGTDVCKEAADMILVDDDFQTIMSAIEEGKGIYNNIKNFVRFQLSTSIAALTLISLATLMNFPNPLNAMQILWINIIMDGPPAQSLGVEPVDKDVIRKPPRNWKDSILTKNLILKILVSSIIIVCGTLFVFWRELRDNVITPRDTTMTFTCFVFFDMFNALSSRSQTKSVFEIGLCSNRMFCYAVLGSIMGQLLVIYFPPLQKVFQTESLSILGLALGEEWTAAG

SEQ ID NO: 7531 - protein, 973 aa, Homo sapiens
MDSLLPPSRFSYFKKYPLHAIRRYLSTLRNQRAEEQVARFQKIPNGENETMIPVLTSKKASELPVSEVASILQADLQNGLNKCEVSHRRAFHGWNEFDISEDEPLWKKYISQFKNPLIMLLLASAVISVLMHQFDDAVSITVAILIVVTVAFVQEYRSEKSLEELSKLVPPECHCVREGKLEHTLARDLVPGDTVCLSVGDRVPADLRLFEAVDLSIDESSLTGETTPCSKVTAPQPAATNGDLASRSNIAFMGTLVRCGKAKGVVIGTGENSEFGEVFKMMQAEEAPKTPLQKSMDLLGKQLSFYSFGIIGIIMLVGWLLGKDILEMFTISVSLAVAAIPEGLPIVVTVTLALGVMRMVKKRAIVKKLPIVETLGCCNVICSDKTGTLTKNEMTVTHIFTSDGLHAEVTGVGYNQFGEVIVDGDVVHGFYNPAVSRIVEAGCVCNDAVIRNNTLMGKPTEGALIALAMKMGLDGLQQDYIRKAEYPFSSEQKWMAVKCVHRTQQDRPEICFMKGAYEQVIKYCTTYQSKGQTLTLTQQQRDVYQQEKARMGSAGLRVLALASGPELGQLTFLGLVGIIDPPRTGVKEAVTTLIASGVSIKMITGDSQETAVAIASRLGLYSKTSQSVSGEEIDAMDVQQLSQIVPKVAVFYRASPRHKMKIIKSLQKNGSVVAMTGDGVNDAVALKAADIGVAMGQTGTDVCKEAADMILVDDDFQTIMSAIEEGKGIYNNIKNFVRFQLSTSIAALTLISLATLMNFPNPLNAMQILWINIIMDGPPAQSLGVEPVDKDVIRKPPRNWKDSILTKNLILKILVSSIIIVCGTLFVFWRELRDNVITPRDTTMTFTCFVFFDMFNALSSRSQTKSVFEIGLCSNRMFCYAVLGSIMGQLLVIYFPPLQKVFQTESLSILDLLFLLGLTSSVCIVAEIIKKVERSREKIQKHVWLWERSGQQLVEIHPHLETGLPLTEDVSCV

SEQ ID NO: 7532 - protein, 919 aa, Homo sapiens
MKVARFQKIPNGENETMIPVLTSKKASELPVSEVASILQADLQNGLNKCEVSHRRAFHGWNEFDISEDEPLWKKYISQFKNPLIMLLLASAVISVLMHQFDDAVSITVAILIVVTVAFVQEYRSEKSLEELSKLVPPECHCVREGKLEHTLARDLVPGDTVCLSVGDRVPADLRLFEAVDLSIDESSLTGETTPCSKVTAPQPAATNGDLASRSNIAFMGTLVRCGKAKGVVIGTGENSEFGEVFKMMQAEEAPKTPLQKSMDLLGKQLSFYSFGIIGIIMLVGWLLGKDILEMFTISVSLAVAAIPEGLPIVVTVTLALGVMRMVKKRAIVKKLPIVETLGCCNVICSDKTGTLTKNEMTVTHIFTSDGLHAEVTGVGYNQFGEVIVDGDVVHGFYNPAVSRIVEAGCVCNDAVIRNNTLMGKPTEGALIALAMKMGLDGLQQDYIRKAEYPFSSEQKWMAVKCVHRTQQDRPEICFMKGAYEQVIKYCTTYQSKGQTLTLTQQQRDVYQQEKARMGSAGLRVLALASGPELGQLTFLGLVGIIDPPRTGVKEAVTTLIASGVSIKMITGDSQETAVAIASRLGLYSKTSQSVSGEEIDAMDVQQLSQIVPKVAVFYRASPRHKMKIIKSLQKNGSVVAMTGDGVNDAVALKAADIGVAMGQTGTDVCKEAADMILVDDDFQTIMSAIEEGKGIYNNIKNFVRFQLSTSIAALTLISLATLMNFPNPLNAMQILWINIIMDGPPAQSLGVEPVDKDVIRKPPRNWKDSILTKNLILKILVSSIIIVCGTLFVFWRELRDNVITPRDTTMTFTCFVFFDMFNALSSRSQTKSVFEIGLCSNRMFCYAVLGSIMGQLLVIYFPPLQKVFQTESLSILDLLFLLGLTSSVCIVAEIIKKVERSREKIQKHVSSTSSSFLEV

SEQ ID NO: 7533 - protein, 953 aa, Homo sapiens
MDSLLPPSRFSYFKKYPLHAIRRYLSTLRNQRAEEQVARFQKIPNGENETMIPVLTSKKASELPVSEVASILQADLQNGLNKCEVSHRRAFHGWNEFDISEDEPLWKKYISQFKNPLIMLLLASAVISVLMHQFDDAVSITVAILIVVTVAFVQEYRSEKSLEELSKLVPPECHCVREGKLEHTLARDLVPGDTVCLSVGDRVPADLRLFEAVDLSIDESSLTGETTPCSKVTAPQPAATNGDLASRSNIAFMGTLVRCGKAKGVVIGTGENSEFGEVFKMMQAEEAPKTPLQKSMDLLGKQLSFYSFGIIGIIMLVGWLLGKDILEMFTISVSLAVAAIPEGLPIVVTVTLALGVMRMVKKRAIVKKLPIVETLGCCNVICSDKTGTLTKNEMTVTHIFTSDGLHAEVTGVGYNQFGEVIVDGDVVHGFYNPAVSRIVEAGCVCNDAVIRNNTLMGKPTEGALIALAMKMGLDGLQQDYIRKAEYPFSSEQKWMAVKCVHRTQQDRPEICFMKGAYEQVIKYCTTYQSKGQTLTLTQQQRDVYQQEKARMGSAGLRVLALASGPELGQLTFLGLVGIIDPPRTGVKEAVTTLIASGVSIKMITGDSQETAVAIASRLGLYSKTSQSVSGEEIDAMDVQQLSQIVPKVAVFYRASPRHKMKIIKSLQKNGSVVAMTGDGVNDAVALKAADIGVAMGQTGTDVCKEAADMILVDDDFQTIMSAIEEGKGIYNNIKNFVRFQLSTSIAALTLISLATLMNFPNPLNAMQILWINIIMDGPPAQSLGVEPVDKDVIRKPPRNWKDSILTKNLILKILVSSIIIVCGTLFVFWRELRDNVITPRDTTMTFTCFVFFDMFNALSSRSQTKSVFEIGLCSNRMFCYAVLGSIMGQLLVIYFPPLQKVFQTESLSILDLLFLLGLTSSVCIVAEIIKKVERSREKIQKHVSSTSSSFLEV

SEQ ID NO: 7534 - protein, 543 aa, Homo sapiens
MGTSLSPNDPWPLNPLSIQQTTLLLLLSVLATVHVGQRLLRQRRRQLRSAPPGPFAWPLIGNAAAVGQAAHLSFARLARRYGDVFQIRLGSCPIVVLNGERAIHQALVQQGSAFADRPAFASFRVVSGGRSMAFGHYSEHWKVQRRAAHSMMRNFFTRQPRSRQVLEGHVLSEARELVALLVRGSADGAFLDPRPLTVVAVANVMSAVCFGCRYSHDDPEFRELLSHNEEFGRTVGAGSLVDVMPWLQYFPNPVRTVFREFEQLNRNFSNFILDKFLRHCESLRPGAAPRDMMDAFILSAEKKAAGDSHGGGARLDLENVPATITDIFGASQDTLSTALQWLLLLFTRYPDVQTRVQAELDQVVGRDRLPCMGDQPNLPYVLAFLYEAMRFSSFVPVTIPHATTANTSVLGYHIPKDTVVFVNQWSVNHDPVKWPNPENFDPARFLDKDGLINKDLTSRVMIFSVGKRRCIGEELSKMQLFLFISILAHQCDFRANPNEPAKMNFSYGLTIKPKSFKVNVTLRESMELLDSAVQNLQAKETCQ

SEQ ID NO: 7535 - protein, 543 aa, Homo sapiens; identical to SEQ ID NO: 7534

SEQ ID NO: 7536 - protein, 64 aa, Homo sapiens
MTKLRAQQCRFWTSFFPKVLEMTGNIDEAEWEWKAGFHRWNNYMMDWKNQFNDYTSKKESCVGL

SEQ ID NO: 7537 - protein, 643 aa, Homo sapiens [sequence omitted]

SEQ ID NO: 7538 - protein, 643 aa, Homo sapiens [sequence omitted]

SEQ ID NO: 7539 - protein, 61 aa, Homo sapiens [sequence omitted]

SEQ ID NO: 7540 - protein, 1171 aa, Homo sapiens
MENNLKTCPKEDGDFVSDKIKFKIEEEDDDGIPPDSLERMDFKSEQEDMKQTDSGGERAGLGGTGCSCKPPGKYLSAESEDDYGALFSQYSSTLYDVAMEAVTQSLLSSRNMSSRKKSPAWKHFFISPRDSTKAICMYCVKEFSRGKNEKDLSTSCLMRHVRRAHPTVLIQENGSVSAVSSFPSPSLLLPPQPADAGDLSTILSPIKLVQKVASKIPSPDRITEESVSVVSSEEISSDMSVSEKCGREEALVGSSPHLPALHYDEPAENLAEKSLPLPKSTSGSRRRSAVWKHFYLSPLDNSKAVCIHCMNEFSRGKNGKDLGTSCLIRHMWRAHRAIVLQENGGTGIPPLYSTPPTLLPSLLPPEGELSSVSSSPVKPVRESPSASSSPDRLTEDLQSHLNPGDGLMEDVAAFSSSDDIGEASASSPEKQQADGLSPRLFESGAIFQQNKKVMKRLKSEVWHHFSLAPMDSLKAECRYCGCAISRGKKGDVGTSCLMRHLYRRHPEVVGSQKGFLGASLANSPYATLASAESSSSKLTDLPTVVTKNNQVMFPVNSKKTSKLWNHFSICSADSTKVVCLHCGRTISRGKKPTNLGTSCLLRHLQRFHSNVLKTEVSETARPSSPDTRVPRGTELSGASSFDDTNEKFYDSHPVAKKITSLIAEMIALDLQPYSFVDNVGFNRLLEYLKPQYSLPAPSYFSRTAIPGMYDNVKQIIMSHLKEAESGVIHFTSGIWMSNQTREYLTLTAHWVSFESPARPRCDDHHCSALLDVSQVDCDYSGNSIQKQLECWWEAWVTSTGLQVGITVTDNASIGKTLNEGEHSSVQCFSHTVNLIVSEAIKSQRMVQNLLSLARKICERVHRSPKAKEKLAELQREYALPQHHLIQDVPSKWSTSFHMLERLIEQKRAINEMSVECNFRELISCDQWEVMQSVCRALKPFEAASREMSTQMSTLSQVIPMVHILNRKVEMLFEETMGIDTMLRSLKEAMVSRLSATLHDPRYVFATLLDPRYKASLFTEEEAEQYKQDLIRELELMNSTSEDVAASHRCDAGSPSKDSAAEENLWSLVAKVKKKDPREKLPEAMVLAYLEEEVLEHSCDPLTYWNLKKASWPGLSALAVRFLGCPPSIVPSEKLFNTPTENGSLGQSRLMMEHFEKLIFLKVNLPLIYFQY

SEQ ID NO: 7541 - protein, 574 aa, Homo sapiens
MWTFLGIATFTYFYKKFGDFITLANREVLLCVLVFLSLGLVLSYRCRHRNGGLLGRQQSGSQFALFSDILSGLPFIGFFWAKSPPESENKEQLEARRRRKGTNISETSLIGTAACTSTSSQNDPEVIIVGAGVLGSALAAVLSRDGRKVTVIERDLKEPDRIVGEFLQPGGYHVLKDLGLGDTVEGLDAQVVNGYMIHDQESKSEVQIPYPLSENNQVQSGRAFHHGRFIMSLRKAAMAEPNAKFIEGVVLQLLEEDDVVMGVQYKDKETGDIKELHAPLTVVADGLFSKFRKSLVSNKVSVSSHFVGFLMKNAPQFKANHAELILANPSPVLIYQISSSETRVLVDIRGEMPRNLREYMVEKIYPQIPDHLKEPFLEATDNSHLRSMPASFLPPSSVKKRGVLLLGDAYNMRHPLTGGGMTVAFKDIKLWRKLLKGIPDLYDDAAIFEAKKSFYWARKTSHSFVVNILAQALYELFSATDDSLHQLRKACFLYFKLGGECVAGPVGLLSVLSPNPLVLIGHFFAVAIYAVYFCFKSEPWITKPRALLSSGAVLYKACSVIFPLIYSEMKYMVH

SEQ ID NO: 7542 - protein, 58 aa, Homo sapiens
MDTQKDVQPPKQQPMIYICGECHTENEIKSRDPIRCRECGYRIMYKKRTKRLVVFDAR

SEQ ID NO: 7543 - protein, 58 aa, Homo sapiens; identical to SEQ ID NO: 7542

SEQ ID NO: 7544 - protein, 207 aa, Homo sapiens
MRVVVIGAGVIGLSTALCIHERYHSVLQPLDIKVYADRFTPLTTTDVAAGLWQPYLSDPNNPQEADWSQQTFDYLLSHVHSPNAENLGLFLISGYNLFHEAIPDPSWKDTVLGFRKLTPRELDMFPDYGQRGLGPDELADLSRRQQRVEAPDFLSYPGPGTLVSWSLVQLLQRGYPLKPGLGLGSYGWFHTSLILEGKNYLQWLTER

SEQ ID NO: 7545 - protein, 347 aa, Homo sapiens
MRVVVIGAGVIGLSTALCIHERYHSVLQPLDIKVYADRFTPLTTTDVAAGLWQPYLSDPNNPQEADWSQQTFDYLLSHVHSPNAENLGLFLISGYNLFHEAIPDPSWKDTVLGFRKLTPRELDMFPDYGYGWFHTSLILEGKNYLQWLTERLTERGVKFFQRKVESFEEVAREGADVIVNCTGVWAGALQRDPLLQPGRGQIMKVDAPWMKHFILTHDPERGIYNSPYIIPGTQTVTLGGIFQLGNWSELNNIQDHNTIWEGCCRLEPTLKNARIIGERTGFRPVRPQIRLEREQLRTGPSNTEVIHNYGHGGYGLTIHWGCALEAAKLFGRILEEKKLSRMPPSHL

SEQ ID NO: 7546 - protein, 347 aa, Homo sapiens; identical to SEQ ID NO: 7545

SEQ ID NO: 7547 - protein, 351 aa, Homo sapiens
MGDPERPEAAGLDQDERSSSDTNESEIKSNEEPLLRKSSRRFVIFPIQYPDIWKMYKQAQASFWTAEEVDLSKDLPHWNKLKADEKYFISHILAFFAASDGIVNENLVERFSQEVQVPEARCFYGFQILIENVHSEMYSLLIDTYIRDPKKREFLFNAIETMPYVKKKADWALRWIADRKSTFGERVVAFAAVEGVFFSGSFAAIFWLKKRGLMPGLTFSNELISRDEGLHCDFACLMFQYLVNKPSEERVREIIVDAVKIEQEFLTEALPVGLIGMNCILMKQYIEFVADRLLVELGFSKVFQAENPFDFMENISLEGKTNFFEKRVSEYQRFAVMAETTDNVFTLDADF

SEQ ID NO: 7548 - protein, 160 aa, Homo sapiens
MKEVGRPREVRGRPGKSRIQKELADITLDPPPNCSAGPKGDNIYEWRSTILGPPGSVYEGGVFFLDITFTPEYPFKPPKVTFRTRIYHCNINSQGVICLDILKDNWSPALTISKVLLSICSLLTDCNPADPLVGSIATQYMTNRAEHDRMARQWTKRYAT

SEQ ID NO: 7549 - protein, 193 aa, Homo sapiens
MSDDDSRASTSSSSSSSSNQQTEKETNTPKKKESKVSMSKNSKLLSTSAKRIQKELADITLDPPPNCSAGPKGDNIYEWRSTILGPPGSVYEGGVFFLDITFTPEYPFKPPKVTFRTRIYHCNINSQGVICLDILKDNWSPALTISKVLLSICSLLTDCNPADPLVGSIATQYMTNRAEHDRMARQWTKRYAT

SEQ ID NO: 7550 - protein, 165 aa, Homo sapiens
GLRAGRVLSEASDLRPVGGALPGIQKELADITLDPPPNCSAGPKGDNIYEWRSTILGPPGSVYEGGVFFLDITFTPEYPFKPPKVTFRTRIYHCNINSQGVICLDILKDNWSPALTISKVLLSICSLLTDCNPADPLVGSIATQYMTNRAEHDRMARQWTKRYAT

SEQ ID NO: 7551 - protein, 193 aa, Homo sapiens; identical to SEQ ID NO: 7549

SEQ ID NO: 7552 - protein, 1074 aa, Homo sapiens
MSLKNEPRVNTSALQKIAADMSNIIENLDTRELHFEGEEVDYDVSPSDPKIQEVYIPFSAIYNTQGFKEPNIQTYLSGCPIKAQVLEVERFTSTTRVPSINLYTIELTHGEFKWQVKRKFKHFQEFHRELLKYKAFIRIPIPTRRHTFRRQNVREEPREMPSLPRSSENMIREEQFLGRRKQLEDYLTKILKMPMYRNYHATTEFLDISQLSFIHDLGPKGIEGMIMKRSGGHRIPGLNCCGQGRACYRWSKRWLIVKDSFLLYMKPDSGAIAFVLLVDKEFKIKVGKKETETKYGIRIDNLSRTLILKCNSYRHARWWGGAIEEFIQKHGTNFLKDHRFGSYAAIQENALAKWYVNAKGYFEDVANAMEEANEEIFITDWWLSPEIFLKRPVVEGNRWRLDCILKRKAQQGVRIFIMLYKEVELALGINSEYTKRTLMRLHPNIKVMRHPDHVSSTVYLWAHHEKLVIIDQSVAFVGGIDLAYGRWDDNEHRLTDVGSVKRVTSGPSLGSLPPAAMESMESLRLKDKNEPVQNLPIQKSIDDVDSKLKGIGKPRKFSKFSLYKQLHRHHLHDADSISSIDSTSSYFNHYRSHHNLIHGLKPHFKLFHPSSESEQGLTRPHADTGSIRSLQTGVGELHGETRFWHGKDYCNFVFKDWVQLDKPFADFIDRYSTPRMPWHDIASAVHGKAARDVARHFIQRWNFTKIMKSKYRSLSYPFLLPKSQTTAHELRYQVPGSVHANVQLLRSAADWSAGIKYHEESIHAAYVHVIENSRHYIYIENQFFISCADDKVVFNKIGDAIAQRILKAHRENQKYRVYVVIPLLPGFEGDISTGGGNALQAIMHFNYRTMCRGENSILGQLKAELGNQWINYISFCGLRTHAELEGNLVTELIYVHSKLLIADDNTVIIGSANINDRSMLGKRDSEMAVIVQDTETVPSVMDGKEYQAGRFARGLRLQCFRVVLGYLDDPSEDIQDPVSDKFFKEVWVSTAARNATIYDKVFRCLPNDEVHNLIQLRDFINKPVLAKEDPIRAEEELKKIRGFLVQFPFYFLSEESLLPSVGTKEAIVPMEVWT

SEQ ID NO: 7553 - protein, 1074 aa, Homo sapiens; identical to SEQ ID NO: 7552

SEQ ID NO: 7554 - protein, 534 aa, Homo sapiens
MMEALGFLKLEVNGPMVTVALSVALLALLKWYSTSAFSRLEKLGLRHPKPSPFIGNLTFFRQGFWESQMELRKLYGPLCGYYLGRRMFIVISEPDMIKQVLVENFSNFTNRMASGLEFKSVADSVLFLRDKRWEEVRGALMSAFSPEKLNEMVPLISQACDLLLAHLKRYAESGDAFDIQRCYCNYTTDVVASVAFGTPVDSWQAPEDPFVKHCKRFFEFCIPRPILVLLLSFPSIMVPLARILPNKNRDELNGFFNKLIRNVIALRDQQAAEERRRDFLQMVLDARHSASPMGVQDFDIVRDVFSSTGCKPNPSRQHQPSPMARPLTVDEIVGQAFIFLIAGYEIITNTLSFATYLLATNPDCQEKLLREVDVFKEKHMAPEFCSLEEGLPYLDMVIAETLRMYPPAFRFTREAAQDCEVLGQRIPAGAVLEMAVGALHHDPEHWPSPETFNPERFTAEARQQHRPFTYLPFGAGPRSCLGVRLGLLEVKLTLLHVLHKFRFQACPETQVPLQLESKSALGPKNGVYIKIVSR

SEQ ID NO: 7555 - protein, 534 aa, Homo sapiens; identical to SEQ ID NO: 7554

SEQ ID NO: 7556 - protein, 460 aa, Homo sapiens
MMEALGFLKLEVNGPMVTVALSVALLALLKWYSTSAFSRLEKLGLRHPKPSPFIGNLTFFRQGFWESQMELRKLYGPLCGYYLGRRMFIVISEPDMIKQVLVENFSNFTNRMASGLEFKSVADSVLFLRDKRWEEVRGALMSAFSPEKLNEMVPLISQACDLLLAHLKRYAESGDAFDIQRCYCNYTTDVVASVAFGTPVDSWQAPEDPFVKHCKRFFEFCIPRPILVLLLSFPSIMVPLARILPNKNRDELNGFFNKLIRNVIALRDQQAAEERRRDFLQMVLDARHSASPMGVQDFDIVRDVFSSTGCKPNPSRQHQPSPMARPLTVDEIVGQAFIFLIAGYEIITNTLSFATYLLATNPDCQEKLLREVDVFKEKHMAPEFCSLEEGLPYLDMVIAETLRMYPPAFRFTREAAQDCEVLGQRIPAGAVLEMAVGALHHDPEHWPSPETFNPERYRCS

SEQ ID NO: 7557 - protein, 254 aa, Homo sapiens
MAPGSFAEYTVVPASIATPVPSVKPEYLTLLVSGTTAYISLKELGGLSEGKKVLVTAAAGGTGQFAMQLSKKAKCHVIGTCSSDEKSAFLKSLGCDRPINYKTEPVGTVLKQEYPEGVDVVYESVGGAMFDLAVDALATKGRLIVIGFISGYQTPTGLSPVKAGTLPAKLLKKSASVQGFFLNHYLSKYQAAMSHLLEMCVSGDLVCEVDLGDLSPEGRFTGLESIFRAVNYMYMGKNTGKIVVELPHSVNSKL

SEQ ID NO: 7558 - protein, 377 aa, Homo sapiens
MLRLVPTGARAIVDMSYARHFLDFQGSAIPQAMQKLVVTRLSPNFREAVTLSRDCPVPLPGDGDLLVRNRFVGVNASDINYSAGRYDPSVKPPFDIGFEGIGEVVALGLSASARYTVGQAVAYMAPGSFAEYTVVPASIATPVPSVKPEYLTLLVSGTTAYISLKELGGLSEGKKVLVTAAAGGTGQFAMQLSKKAKCHVIGTCSSDEKSAFLKSLGCDRPINYKTEPVGTVLKQEYPEGVDVVYESVGGAMFDLAVDALATKGRLIVIGFISGYQTPTGLSPVKAGTLPAKLLKKSASVQGFFLNHYLSKYQAAMSHLLEMCVSGDLVCEVDLGDLSPEGRFTGLESIFRAVNYMYMGKNTGKIVVELPHSVNSKL

SEQ ID NO: 7559 - protein, 111 aa, Homo sapiens
MAGKQAVSASGKWLDGIRKWYYNAAGFNKLGLMRDDTIYEDEDVKEAIRRLPENLYNDRMFRIKRALDLNLKHQILPKEQWTKYEEENFYLEPYLKEVIRERKEREEWAKK

SEQ ID NO: 7560 - protein, 256 aa, Homo sapiens
MRPAALRGALLGCLCLALLCLGGADKRLRDNHEWKKLIMVQHWPETVCEKIQNDCRDPPDYWTIHGLWPDKSEGCNRSWPFNLEEIKDLLPEMRAYWPDVIHSFPNRSRFWKHEWEKHGTCAAQVDALNSQKKYFGRSLELYRELDLNSVLLKLGIKPSINYYQVADFKDALARVYGVIPKIQCLPPSQDEEVQTIGQIELCLTKQDQQLQNCTEPGEQPSPKQEVWLANGAAESRGLRVCEDGPVFYPPPKKTKH

SEQ ID NO: 7561 - protein, 218 aa, Homo sapiens
MVQHWPETVCEKIQNDCRDPPDYWTIHGLWPDKSEGCNRSWPFNLEEIKDLLPEMRAYWPDVIHSFPNRSRFWKHEWEKHGTCAAQVDALNSQKKYFGRSLELYRELDLNSVLLKLGIKPSINYYQVADFKDALARVYGVIPKIQCLPPSQDEEVQTIGQIELCLTKQDQQLQNCTEPGEQPSPKQEVWLANGAAESRGLRVCEDGPVFYPPPKKTKH

SEQ ID NO: 7562 - protein, 256 aa, Homo sapiens; identical to SEQ ID NO: 7560

SEQ ID NO: 7563 - protein, 154 aa, Homo sapiens
MRPAALRGALLGCLCLALLCLGGADKRLRDNHEWKKLIMVQHWPETVCEKIQNDCRDPPDYWTIHGLWPDKSEGCNRSWPFNLEEIKKNWMEITDSSLPSPSTWDLRRPGGCAQLPEEVLWQKPGTLQGAGPQQVGAPFPRLHFPVGISAVAQA

SEQ ID NO: 7564 - protein, 164 aa, Homo sapiens
MRAYWPDVIHSFPNRSRFWKHEWEKHGTCAAQVDALNSQKKYFGRSLELYRELDLNSVLLKLGIKPSINYYQVADFKDALARVYGVIPKIQCLPPSQDEEVQTIGQIELCLTKQDQQLQNCTEPGEQPSPKQEVWLANGAAESRGLRVCEDGPVFYPPPKKTKH

SEQ ID NO: 7565 - protein, 55 aa, Homo sapiens
VGKAWDLRRPGGCAQLPEEVLWQKPGTLQGAGPQQVGAPFPRLHFPVGISAVAQA

SEQ ID NO: 7566 - protein, 169 aa, Homo sapiens
MRPAALRGALLGCLCLALLCLGGADKRLRDNHEWKKLIMVQHWPETVCEKIQNDCRDPPDYWTIHGLWPDKSEGCNRSWPFNLEEIKDLLPEMRAYWPDVIHSFPNRSRFWKHEWEKHGTCAAQVDALNSQKKYFGRSLELYRELDLNSVLLKLGIKPSINYYQELKAA

SEQ ID NO: 7567 - protein, 218 aa, Homo sapiens; identical to SEQ ID NO: 7561

SEQ ID NO: 7568 - protein, 256 aa, Homo sapiens; identical to SEQ ID NO: 7560

SEQ ID NO: 7569 - protein, 502 aa, Homo sapiens
MSGRRFHLSTTDRVIKAVPFPPTQRLTFKEVFENGKPKVDVLKNHLVKEGRLEEEVALKIINDGAAILRQEKTMIEVDAPITVCGDIHGQFFDLMKLFEVGGSPSNTRYLFLGDYVDRGYFSIECVLYLWSLKINHPKTLFLLRGNHECRHLTDYFTFKQECRIKYSEQVYDACMETFDCLPLAALLNQQFLCVHGGMSPEITSLDDIRKLDRFTEPPAFGPVCDLLWSDPSEDYGNEKTLEHYTHNTVRGCSYFYSYPAVCEFLQNNNLLSIIRAHEAQDAGYRMYRKSQATGFPSLITIFSAPNYLDVYNNKAAVLKYENNVMNIRQFNCSPHPYWLPNFMDVFTWSLPFVGEKVTEMLVNVLNICSDDELISDDEAEGSTTVRKEIIRNKIRAIGKMARVFSILRQESESVLTLKGLTPTGTLPLGVLSGGKQTIETAIRGFSLQHKIRSFEEARGLDRINERMPPRKDSIHAGGPMKSVTSAHSHAAHRSDQGKKAHS

SEQ ID NO: 7570 - protein, 512 aa, Homo sapiens
MSGRRFHLSTTDRVIKAVPFPPTQRLTFKEVFENGKPKVDVLKNHLVKEGRLEEEVALKIINDGAAILRQEKTMIEVDAPITVCGDIHGQFFDLMKLFEVGGSPSNTRYLFLGDYVDRGYFSIECVLYLWSLKINHPKTLFLLRGNHECRHLTDYFTFKQECRIKYSEQVYDACMETFDCLPLAALLNQQFLCVHGGMSPEITSLDDIRKLDRFTEPPAFGPVCDLLWSDPSEDYGNEKTLEHYTHNTVRGCSYFYSYPAVCEFLQNNNLLSIIRAHEAQDAGYRMYRKSQATGFPSLITIFSAPNYLDVYNNKAAVLKYENNVMNIRQFNCSPHPYWLPNFMDVFTWSLPFVGEKVTEMLVNVLNICSDDELISDDEAEGSTTVRKEIIRNKIRAIGKMARVFSILRQESESVLTLKGLTPTGTLPLGVLSGGKQTIETATVEAVEAREAIRGFSLQHKIRSFEEARGLDRINERMPPRKDSIHAGGPMKSVTSAHSHAAHRSDQGKKAHS

SEQ ID NO: 7571 - protein, 919 aa, Homo sapiens
MQRSIMSFFHPKKEGKAKKPEKEASNSSRETEPPPKAALKEWNGVVSESDSPVKRPGRKAARVLGSEGEEEDEALSPAKGQKPALDCSQVSPPRPATSPENNASLSDTSPMDSSPSGIPKRRTARKQLPKRTIQEVLEEQSEDEDREAKRKKEEEEEETPKESLTEAEVATEKEGEDGDQPTTPPKPLKTSKAETPTESVSEPEVATKQELQEEEEQTKPPRRAPKTLSSFFTPRKPAVKKEVKEEEPGAPGKEGAAEGPLDPSGYNPAKNNYHPVEDACWKPGQKVPYLAVARTFEKIEEVSARLRMVETLSNLLRSVVALSPPDLLPVLYLSLNHLGPPQQGLELGVGDGVLLKAVAQATGRQLESVRAEAAEKGDVGLVAENSRSTQRLMLPPPPLTASGVFSKFRDIARLTGSASTAKKIDIIKGLFVACRHSEARFIARSLSGRLRLGLAEQSVLAALSQAVSLTPPGQEFPPAMVDAGKGKTAEARKTWLEEQGMILKQTFCEVPDLDRIIPVLLEHGLERLPEHCKLSPGIPLKPMLAHPTRGISEVLKRFEEAAFTCEYKYDGQRAQIHALEGGEVKIFSRNQEDNTGKYPDIISRIPKIKLPSVTSFILDTEAVAWDREKKQIQPFQVLTTRKRKEVDASEIQVQVCLYAFDLIYLNGESLVREPLSRRRQLLRENFVETEGEFVFATSLDTKDIEQIAEFLEQSVKDSCEGLMVKTLDVDATYEIAKRSHNWLKLKKDYLDGVGDTLDLVVIGAYLGRGKRAGRYGGFLLASYDEDSEELQAICKLGTGFSDEELEEHHQSLKALVLPSPRPYVRIDGAVIPDHWLDPSAVWEVKCADLSLSPIYPAARGLVDSDKGISLRFPRFIRVREDKQPEQATTSAQVACLYRKQSQIQNQQGEDSGSDPEDTY

SEQ ID NO: 7572 - protein, 889 aa, Homo sapiens
MQRSIMAALKEWNGVVSESDSPVKRPGRKAARVLGSEGEEEDEALSPAKGQKPALDCSQVSPPRPATSPENNASLSDTSPMDSSPSGIPKRRTARKQLPKRTIQEVLEEQSEDEDREAKRKKEEEEEETPKESLTEAEVATEKEGEDGDQPTTPPKPLKTSKAETPTESVSEPEVATKQELQEEEEQTKPPRRAPKTLSSFFTPRKPAVKKEVKEEEPGAPGKEGAAEGPLDPSGYNPAKNNYHPVEDACWKPGQKVPYLAVARTFEKIEEVSARLRMVETLSNLLRSVVALSPPDLLPVLYLSLNHLGPPQQGLELGVGDGVLLKAVAQATGRQLESVRAEAAEKGDVGLVAENSRSTQRLMLPPPPLTASGVFSKFRDIARLTGSASTAKKIDIIKGLFVACRHSEARFIARSLSGRLRLGLAEQSVLAALSQAVSLTPPGQEFPPAMVDAGKGKTAEARKTWLEEQGMILKQTFCEVPDLDRIIPVLLEHGLERLPEHCKLSPGIPLKPMLAHPTRGISEVLKRFEEAAFTCEYKYDGQRAQIHALEGGEVKIFSRNQEDNTGKYPDIISRIPKIKLPSVTSFILDTEAVAWDREKKQIQPFQVLTTRKRKEVDASEIQVQVCLYAFDLIYLNGESLVREPLSRRRQLLRENFVETEGEFVFATSLDTKDIEQIAEFLEQSVKDSCEGLMVKTLDVDATYEIAKRSHNWLKLKKDYLDGVGDTLDLVVIGAYLGRGKRAGRYGGFLLASYDEDSEELQAICKLGTGFSDEELEEHHQSLKALVLPSPRPYVRIDGAVIPDHWLDPSAVWEVKCADLSLSPIYPAARGLVDSDKGISLRFPRFIRVREDKQPEQATTSAQVACLYRKQSQIQNQQGEDSGSDPEDTY

SEQ ID NO: 7573 - protein, 2294 aa, Homo sapiens [sequence omitted]

SEQ ID NO: 7574 - protein, 2466 aa, Homo sapiens [sequence omitted]

SEQ ID NO: 7575 - protein, 2490 aa, Homo sapiens [sequence omitted]

SEQ ID NO: 7576 - protein, 2485 aa, Homo sapiens [sequence omitted]

SEQ ID NO: 7577 - protein, 2555 aa, Homo sapiens
MTAITHGSPVGGNDSQGQVLDGQSQHLFQQNQTSSPDSSNENSVATPPPEEQGQGDAPPQHEDEEPAFPHTELANLDDMINRPRWVVPVLPKGELEVLLEAAIDLSVKGLDVKSEACQRFFRDGLTISFTKILMDEAVSGWKFEIHRCIINNTHRLVELCVAKLSQDWFPLLELLAMALNPHCKFHIYNGTRPCELISSNAQLPEDELFARSSDPRSPKGWLVDLINKFGTLNGFQILHDRFFNGSALNIQIIAALIKPFGQCYEFLSQHTLKKYFIPVIEIVPHLLENLTDEELKKEAKNEAKNDALSMIIKSLKNLASRISGQDETIKNLEIFRLKMILRLLQISSFNGKMNALNEINKVISSVSYYTHRHSNPEEEEWLTAERMAEWIQQNNILSIVLQDSLHQPQYVEKLEKILRFVIKEKALTLQDLDNIWAAQAGKHEAIVKNVHDLLAKLAWDFSPGQLDHLFDCFKASWTNASKKQREKLLELIRRLAEDDKDGVMAHKVLNLLWNLAQSDDVPVDIMDLALSAHIKILDYSCSQDRDAQKIQWIDHFIEELRTNDKWVIPALKQIREICSLFGEASQNLSQTQRSPHIFYRHDLINQLQQNHALVTLVAENLATYMNSIRLYAGDHEDYDPQTVRLGSRYSHVQEVQERLNFLRFLLKDGQLWLCAPQAKQIWKCLAENAVYLCDREACFKWYSKLMGDEPDLDPDINKDFFESNVLQLDPSLLTENGMKCFERFFKAVNCRERKLIAKRRSYMMDDLELIGLDYLWRVVIQSSDEIANRAIDLLKEIYTNLGPRLKANQVVIHEDFIQSCFDRLKASYDTLCVFDGDKNSINCARQEAIRMVRVLTVIKEYINECDSDYHKERMILPMSRAFRGKHLSLIVRFPNQGRQVDELDIWSHTNDTIGSVRRCIVNRIKANVAHKKIELFVGGELIDSEDDRKLIGQLNLKDKSLITAKLTQINFNMPSSPDSSSDSSTASPGNHRNHYNDGPNLEVESCLPGVIMSVHPRYISFLWQVADLGSNLNMPPLRDGARVLMKLMPPDRTAVEKLRAVCLDHAKLGEGKLSPPLDSLFFGPSASQVLYLTEVVYALLMPAGVPLTDGSSDFQVHFLKSGGLPLVLSMLIRNNFLPNTDMETRRGAYLNALKIAKLLLTAIGYGHVRAVAEACQPVVDGTDPITQINQVTHDQAVVLQSALQSIPNPSSECVLRNESILLAQEISNEASRYMPDICVIRAIQKIIWASACGALGLVFSPNEEITKIYQMTTNGSNKLEVEDEQVCCEALEVMTLCFALLPTALDALSKEKAWQTFIIDLLLHCPSKTVRQLAQEQFFLMCTRCCMGHRPLLFFITLLFTILGSTAREKGKYSGDYFTLLRHLLNYAYNGNINIPNAEVLLVSEIDWLKRIRDNVKNTGETGVEEPILEGHLGVTKELLAFQTSEKKYHFGCEKGGANLIKELIDDFIFPASKVYLQYLRSGELPAEQAIPVCSSPVTINAGFELLVALAIGCVRNLKQIVDCLTEMYYMGTAITTCEALTEWEYLPPVGPRPPKGFVGLKNAGATCYMNSVIQQLYMIPSIRNSILAIEGTGSDLHDDMFGDEKQDSESNVDPRDDVFGYPHQFEDKPALSKTEDRKEYNIGVLRHLQVIFGHLAASQLQYYVPRGFWKQFRLWGEPVNLREQHDALEFFNSLVDSLDEALKALGHPAILSKVLGGSFADQKICQGCPHRYECEESFTTLNVDIRNHQNLLDSLEQYIKGDLLEGANAYHCEKCDKKVDTVKRLLIKKLPRVLAIQLKRFDYDWERECAIKFNDYFEFPRELDMGPYTVAGVANLERDNVNSENELIEQKEQSDNETAGGTKYRLVGVLVHSGQASGGHYYSYIIQRNGKDDQTDHWYKFDDGDVTECKMDDDEEMKNQCFGGEYMGEVFDHMMKRMSYRRQKRWWNAYILFYEQMDMIDEDDEMIRYISELTIARPHQIIMSPAIERSVRKQNVKFMHNRLQYSLEYFQFVKKLLTCNGVYLNPAPGQDYLLPEAEEITMISIQLAARFLFTTGFHTKKIVRGPASDWYDALCVLLRHSKNVRFWFTHNVLFNVSNRFSEYLLECPSAEVRGAFAKLIVFIAHFSLQDGSCPSPFASPGPSSQACDNLSLSDHLLRATLNLLRREVSEHGHHLQQYFNLFVMYANLGVAEKTQLLKLNVPATFMLVSLDEGPGPPIKYQYAELGKLYSVVSQLIRCCNVSSTMQSSINGNPPLPNPFGDLNLSQPIMPIQQNVLDILFVRTSYVKKIIEDCSNSEDTIKLLRFCSWENPQFSSTVLSELLWQVAYSYTYELRPYLDLLFQILLIEDSWQTHRIHNALKGIPDDRDGLFDTIQRSKNHYQKRAYQCIKCMVALFSSCPVAYQILQGNGDLKRKWTWAVEWLGDELERRPYTGNPQYSYNNWSPPVQSNETANGYFLERSHSARMTLAKACELCPEEEPDDQDAPDEHEPSPSEDAPLYPHSPASQYQQNNHVHGQPYTGPAAHHLNNPQKTGQRTQENYEGNEEVSSPQMKDQ

SEQ ID NO: 7578 - protein, 1584 aa, Homo sapiens [sequence omitted]

SEQ ID NO: 7579 - protein, 827 aa, Homo sapiens
MLGGNLRMLGGNLRMLGENLRMLGRNLRELGGNLRKLGGNLRMLRVPGHGFPAPFRPSRKRSGSFRYLPLVHRKRVATRQVPARKKRPKRLRTGNMVRSGNKAAVVLCMDVGFTMSNSIPGIESPFEQAKKVITMFVQRQVFAENKDEIALVLFGTDGTDNPLSGGDQYQNITVHRHLMLPDFDLLEDIESKIQPGSQQADFLDALIVSMDVIQHETIGKKFEKRHIEIFTDLSSRFSKSQLDIIIHSLKKCDISLQFFLPFSLGKEDGSGDRGDGPFRLGGHGPSFPLKGITEQQKEGLEIVKMVMISLEGEDGLDEIYSFSESLRKLCVFKKIERHSIHWPCRLTIGSNLSIRIAAYKSILQERVKKTWTVVDAKTLKKEDIQKETVYCLNDDDETEVLKEDIIQGFRYGSDIVPFSKVDEEQMKYKSEGKCFSVLGFCKSSQVQRRFFMGNQVLKVFAARDDEAAAVALSSLIHALDDLDMVAIVRYAYDKRANPQVGVAFPHIKHNYECLVYVQLPFMEDLRQYMFSSLKNSKKYAPTEAQLNAVDALIDSMSLAKKDEKTDTLEDLFPTTKIPNPRFQRLFQCLLHRALHPREPLPPIQQHIWNMLNPPAEVTTKSQIPLSKIKTLFPLIEAKKKDQVTAQEIFQDNHEDGPTAKKLKTEQGGAHFSVSSLAEGSVTSVGSVNPAENFRVLVKQKKASFEEASNQLINHIEQFLDTNETPYFMKSIDCIRAFREEAIKFSEEQRFNNFLKALQEKVEIKQLNHFWEIVVQDGITLITKEEASGSSVTAEEAKKFLAPKDKPSGDTAAVFEEGGDVDDLLDMI

SEQ ID NO: 7580 - protein, 827 aa, Homo sapiens; identical to SEQ ID NO: 7579

SEQ ID NO: 7581 - protein, 732 aa, Homo sapiens
MVRSGNKAAVVLCMDVGFTMSNSIPGIESPFEQAKKVITMFVQRQVFAENKDEIALVLFGTDGTDNPLSGGDQYQNITVHRHLMLPDFDLLEDIESKIQPGSQQADFLDALIVSMDVIQHETIGKKFEKRHIEIFTDLSSRFSKSQLDIIIHSLKKCDISLQFFLPFSLGKEDGSGDRGDGPFRLGGHGPSFPLKGITEQQKEGLEIVKMVMISLEGEDGLDEIYSFSESLRKLCVFKKIERHSIHWPCRLTIGSNLSIRIAAYKSILQERVKKTWTVVDAKTLKKEDIQKETVYCLNDDDETEVLKEDIIQGFRYGSDIVPFSKVDEEQMKYKSEGKCFSVLGFCKSSQVQRRFFMGNQVLKVFAARDDEAAAVALSSLIHALDDLDMVAIVRYAYDKRANPQVGVAFPHIKHNYECLVYVQLPFMEDLRQYMFSSLKNSKKYAPTEAQLNAVDALIDSMSLAKKDEKTDTLEDLFPTTKIPNPRFQRLFQCLLHRALHPREPLPPIQQHIWNMLNPPAEVTTKSQIPLSKIKTLFPLIEAKKKDQVTAQEIFQDNHEDGPTAKKLKTEQGGAHFSVSSLAEGSVTSVGSVNPAENFRVLVKQKKASFEEASNQLINHIEQFLDTNETPYFMKSIDCIRAFREEAIKFSEEQRFNNFLKALQEKVEIKQLNHFWEIVVQDGITLITKEEASGSSVTAEEAKKFLAPKDKPSGDTAAVFEEGGDVDDLLDMI

SEQ ID NO: 7582 - protein, 430 aa, Homo sapiens
MALLHSGRVLPGIAAAFHPGLAAAASARASSWWTHVEMGPPDPILGVTEAFKRDTNSKKMNLGVGAYRDDNGKPYVLPSVRKAEAQIAAKNLDKEYLPIGGLAEFCKASAELALGENSEVLKSGRFVTVQTISGTGALRIGASFLQRFFKFSRDVFLPKPTWGNHTPIFRDAGMQLQGYRYYDPKTCGFDFTGAVEDISKIPEQSVLLLHACAHNPTGVDPRPEQWKEIATVVKKRNLFAFFDMAYQGFASGDGDKDAWAVRHFIEQGINVCLCQSYAKNMGLYGERVGAFTMVCKDADEAKRVESQLKILIRPMYSNPPLNGARIAAAILNTPDLRKQWLQEVKGMADRIIGMRTQLVSNLKKEGSTHNWQHITDQIGMFCFTGLKPEQVERLIKEFSIYMTKDGRISVAGVTSSNVGYLAHAIHQVTK

SEQ ID NO: 7583 - protein, 430 aa, Homo sapiens; identical to SEQ ID NO: 7582

SEQ ID NO: 7584 - protein, 519 aa, Homo sapiens
MAAPSRLLIRGGRVVNDDFSEVADVLVEDGVVRALGHDLLPPGGAPAGLRVLDAAGKLVLPGGIDTHTHMQFPFMGSRSIDDFHQGTKAALSGGTTMIIDFAIPQKGGSLIEAFETWRSWADPKVCCDYSLHVAVTWWSDQVKEEMKILVQDKGVNSFKMFMAYKDLYMVTDLELYEAFSRCKEIGAIAQVHAENGDLIAEGAKKMLALGITGPEGHELCRPEAVEAEATLRAITIASAVNCPLYIVHVMSKSAAKVIADARRDGKVVYGEPIAASLGTDGTHYWNKEWHHAAHHVMGPPLRPDPSTPDFLMNLLANDDLTTTGTDNCTFNTCQKALGKDDFTKIPNGVNGVEDRMSVIWEKGVHSGKMDENRFVAVTSTNAAKIFNLYPRKGRIAVGSDADIVIWDPKGTRTISAKTHHQAVNFNIFEGMVCHGVPLVTISRGKVVYEAGVFSVTAGDGKFIPRKPFAEYIYKRIKQRDRTCTPTPVERAPYKGEVATLKSRVTKEDATAGTRKQAHP

SEQ ID NO: 7585 - protein, 227 aa, Homo sapiens
MDCPYNLANNRQVRMLSDLTLVGCYNLSVMPEKQRNKVLLESAKSNLKHMAFFGLTEFQRKTQYLFEKTFNMNFISPFTQYNTTRASSVEINEEIQKRIEGLNFLDMELYSYAKDLFLQRYQFMRQKEHQEARRKRQEQRKFLKGRLLQTHFQSQGQGQSQNPNQNQSQNPNPNANQNLTQNLMQNLTQSLSQKENRESPKQNSGKEQNDNTSNGTNDYIGSVEKWR

SEQ ID NO: 7586 - protein, 505 aa, Homo sapiens
MASVGNMDEKSNKLLLALVMLFLFAVIVLQYVCPGTECQLLRLQAFSSPVPDPYRSEDESSARFVPRYNFTRGDLLRKVDFDIKGDDLIVFLHIQKTGGTTFGRHLVRNIQLEQPCECRVGQKKCTCHRPGKRETWLFSRFSTGWSCGLHADWTELTSCVPSVVDGKRDARLRPSRWRIFQILDAASKDKRGSPNTNAGANSPSSTKTRNTSKSGKNFHYITILRDPVSRYLSEWRHVQRGATWKASLHVCDGRPPTSEELPSCYTGDDWSGCPLKEFMDCPYNLANNRQVRMLSDLTLVGCYNLSVMPEKQRNKVLLESAKSNLKHMAFFGLTEFQRKTQYLFEKTFNMNFISPFTQYNTTRASSVEINEEIQKRIEGLNFLDMELYSYAKDLFLQRYQFMRQKEHQEARRKRQEQRKFLKGRLLQTHFQSQGQGQSQNPNQNQSQNPNPNANQNLTQNLMQNLTQSLSQKENRESPKQNSGKEQNDNTSNGTNDYIGSVEKWR

SEQ ID NO: 7587 - protein, 125 aa, Homo sapiens [sequence omitted]

SEQ ID NO: 7588 - protein, 358 aa, Homo sapiens
MDPLRRSPSPCLSSQPSSPSTPPCEMLGPVGIEAVLDQLKIKAMKMGFEFNIMVVGQSGLGKSTMVNTLFKSKVWKSNPPGLGVPTPQTLQLHSLTHVIEEKGVKLKLTVTDTPGFGDQINNDNCWDPILGYINEQYEQYLQEEILITRQRHIPDTRVHCCVYFVPPTGHCLRPLDIEFLQRLCRTVNVVPVIARADSLTMEEREAFRRRIQQNLRTHCIDVYPQMCFDEDINDKILNSKLRDRIPFAVVGADQEHLVNGRCVLGRKTKWGIIEVENMAHCEFPLLRDLLIRSHLQDLKDITHNIHYENYRVIRLNESHLLPRGPGWVNLAPASPGQLTTPRTFKVCRGAHDDSDDEF

SEQ ID NO: 7589 - protein, 208 aa, Homo sapiens
MSSEPPPPYPGGPTAPLLEEKSGAPPTPGRSSPAVMQPPPGMPLPPADIGPPPYEPPGHPMPQPGFIPPHMSADGTYMPPGFYPPPGPHPPMGYYPPGPYTPGPYPGPGGHTATVLVPSGAATTVTVLQGEIFEGAPVQTVCPHCQQAITTKISYEIGLMNFVLGFFCCFMGCDLGCCLIPCLINDFKDVTHTCPSCKAYIYTYKRLC

SEQ ID NO: 7590 - protein, 208 aa, Homo sapiens; identical to SEQ ID NO: 7589

SEQ ID NO: 7591 - protein, 558 aa, Homo sapiens
MGGAGATCCSRRPVRRRWLGGKMAAVSLRLGDLVWGKLGRYPPWPGKIVNPPKDLKKPRGKKCFFVKFFGTEDHAWIKVEQLKPYHAHKEEMIKINKGKRFQQAVDAVEEFLRRAKGKDQTSSHNSSDDKNRRNSSEERSRPNSGDEKRKLSLSEGKVKKNMGEGKKRVSSGSSERGSKSPLKRAQEQSPRKRGRPPKDEKDLTIPESSTVKGMMAGPMAAFKWQPTASEPVKDADPHFHHFLLSQTEKETGSTSIQAADSTAVNGSITPTDKKIGFLGLGLMGSGIVSNLLKMGHTVTVWNRTAEKCDLFIQEGARLGRTPAEVVSTCDITFACVSDPKAAKDLVLGPSGVLQGIRPGKCYVDMSTVDADTVTELAQVIVSRGGRFLEAPVSGNQQLSNDGMLVILAAGDRGLYEDCSSCFQAMGKTSFFLGEVGNAAKMMLIVNMVQGSFMATIAEGLTLAQVTGQSQQTLLDILNQGQLASIFLDQKCQNILQGNFKPDFYLKYIQKDLRLAIALGDAVNHPTPMAAAANEVYKRAKALDQSDNDMSAVYRAYIH

SEQ ID NO: 7592 - protein, 558 aa, Homo sapiens; identical to SEQ ID NO: 7591

SEQ ID NO: 7593 - protein, 478 aa, Homo sapiens
MIKINKGKRFQQAVDAVEEFLRRAKGKDQTSSHNSSDDKNRRNSSEERSRPNSGDEKRKLSLSEGKVKKNMGEGKKRVSSGSSERGSKSPLKRAQEQSPRKRGRPPKDEKDLTIPESSTVKGMMAGPMAAFKWQPTASEPVKDADPHFHHFLLSQTEKPAVCYQAITKKLKICEEETGSTSIQAADSTAVNGSITPTDKKIGFLGLGLMGSGIVSNLLKMGHTVTVWNRTAEKEGARLGRTPAEVVSTCDITFACVSDPKAAKDLVLGPSGVLQGIRPGKCYVDMSTVDADTVTELAQVIVSRGGRFLEAPVSGNQQLSNDGMLVILAAGDRGLYEDCSSCFQAMGKTSFFLGEVGNAAKMMLIVNMVQGSFMATIAEGLTLAQVTGQSQQTLLDILNQGQLASIFLDQKCQNILQGNFKPDFYLKYIQKDLRLAIALGDAVNHPTPMAAAANEVYKRAKALDQSDNDMSAVYRAYIH

SEQ ID NO: 7594 - protein, 569 aa, Homo sapiens
MGGAGATCCSRRPVRRRWLGGKMAAVSLRLGDLVWGKLGRYPPWPGKIVNPPKDLKKPRGKKCFFVKFFGTEDHAWIKVEQLKPYHAHKEEMIKINKGKRFQQAVDAVEEFLRRAKGKDQTSSHNSSDDKNRRNSSEERSRPNSGDEKRKLSLSEGKVKKNMGEGKKRVSSGSSERGSKSPLKRAQEQSPRKRGRPPKDEKDLTIPESSTVKGMMAGPMAAFKWQPTASEPVKDADPHFHHFLLSQTEKPAVCYQAITKKLKICEEETGSTSIQAADSTAVNGSITPTDKKIGFLGLGLMGSGIVSNLLKMGHTVTVWNRTAEKEGARLGRTPAEVVSTCDITFACVSDPKAAKDLVLGPSGVLQGIRPGKCYVDMSTVDADTVTELAQVIVSRGGRFLEAPVSGNQQLSNDGMLVILAAGDRGLYEDCSSCFQAMGKTSFFLGEVGNAAKMMLIVNMVQGSFMATIAEGLTLAQVTGQSQQTLLDILNQGQLASIFLDQKCQNILQGNFKPDFYLKYIQKDLRLAIALGDAVNHPTPMAAAANEVYKRAKALDQSDNDMSAVYRAYIH

SEQ ID NO: 7595 - protein, 569 aa, Homo sapiens; identical to SEQ ID NO: 7594

SEQ ID NO: 7596 - protein, 153 aa, Homo sapiens
RWRRQLLASDARCGLISFPSFLTSPSPDPVRRRDQTVPVARSQQPPLSSPGRPSPNARLPLAGGAPLVPAACLALRAVAGGAGGVWIRPPARPSGPRTHARQGGGGGPCVFASLHLGTGRRRRLWVLGRGRGLGGGREREGAALEWRTRRKAP

SEQ ID NO: 7597 - protein, 2798 aa, Homo sapiens [sequence omitted]

SEQ ID NO: 7598 - protein, 1647 aa, Homo sapiens [sequence omitted]

SEQ ID NO: 7599 - protein, 2799 aa, Homo sapiens [sequence omitted]

SEQ ID NO: 7600 - protein, 302 aa, Homo sapiens
MDQAITVGAPVIGLNDSGGARIQEGVESLAGYADIFLRNVTASGVIPQISLIMGPCAGGAVYSPALTDFTFMVKDTSYLFITGPDVVKSVTNEDVTQEELGGAKTHTTMSGVAHRAFENDVDALCNLRDFFNYLPLSSQDPAPVRECHDPSDRLVPELDTIVPLESTKAYNMVDIIHSVVDEREFFEIMPNYAKNIIVGFARMNGRTVGIVGNQPKVASGCLDINSSVKGARFVRFCDAFNIPLITFVDVPGFLPGKFLTEWGLGELPFPVRCPLYLEIFLQNSPRTCDFSMYSGCPEDRAV

SEQ ID NO: 7601 - protein, 539 aa, Homo sapiens
MAAALRVAAVGARLSVLASGLRAAVRSLCSQATSVNERIENKRRTALLGGGQRRIDAQHKRGKLTARERISLLLDPGSFVESDMFVEHRCADFGMAADKNKFPGDSVVTGRGRINGRLVYVFSQDFTVFGGSLSGAHAQKICKIMDQAITVGAPVIGLNDSGGARIQEGVESLAGYADIFLRNVTASGVIPQISLIMGPCAGGAVYSPALTDFTFMVKDTSYLFITGPDVVKSVTNEDVTQEELGGAKTHTTMSGVAHRAFENDVDALCNLRDFFNYLPLSSQDPAPVRECHDPSDRLVPELDTIVPLESTKAYNMVDIIHSVVDEREFFEIMPNYAKNIIVGFARMNGRTVGIVGNQPKVASGCLDINSSVKGARFVRFCDAFNIPLITFVDVPGFLPGTAQEYGGIIRHGAKLLYAFAEATVPKVTVITRKAYGGAYDVMSSKHLCGDTNYAWPTAEIAVMGAKGAVEIIFKGHENVEAAQAEYIEKFANPFPAAVRGFVDDIIQPSSTRARICCDLDVLASKKVQRPWRKHANIPL

SEQ ID NO: 7602 - protein, 852 aa, Homo sapiens
MVEKCWKLMDKVVRLCQNPKLALKNSPPYILDLLPDTYQHLRTILSRYEGKMETLGENEYFRVFMENLMKKTKQTISLFKEGKERMYEENSQPRRNLTKLSLIFSHMLAELKGIFPSGLFQGDTFRITKADAAEFWRKAFGEKTIVPWKSFRQALHEVHPISSGLEAMALKSTIDLTCNDYISVFEFDIFTRLFQPWSSLLRNWNSLAVTHPGYMAFLTYDEVKARLQKFIHKPGSYIFRLSCTRLGQWAIGYVTADGNILQTIPHNKPLFQALIDGFREGFYLFPDGRNQNPDLTGLCEPTPQDHIKVTQEQYELYCEMGSTFQLCKICAENDKDVKIEPCGHLMCTSCLTSWQESEGQGCPFCRCEIKGTEPIVVDPFDPRGSGSLLRQGAEGAPSPNYDDDDDERADDTLFMMKELAGAKVERPPSPFSMAPQASLPPVPPRLDLLPQRVCVPSSASALGTASKAASGSLHKDKPLPVPPTLRDLPPPPPPDRPYSVGAESRPQRRPLPCTPGDCPSRDKLPPVPSSRLGDSWLPRPIPKVPVSAPSSSDPWTGRELTNRHSLPFSLPSQMEPRPDVPRLGSTFSLDTSMSMNSSPLVGPECDHPKIKPSSSANAIYSLAARPLPVPKLPPGEQCEGEEDTEYMTPSSRPLRPLDTSQSSRACDCDQQIDSCTYEAMYNIQSQAPSITESSTFGEGNLAAAHANTGPEESENEDDGYDVPKPPVPAVLARRTLSDISNASSSFGWLSLDGDPTTNVTEGSQVPERPPKPFPRRINSERKAGSCQQGSGPAASAATASPQLSSEIENLMSQGYSYQDIQKALVIAQNNIEMAKNILREFVSISSPAHVAT

SEQ ID NO: 7603 - protein, 134 aa, Homo sapiens
MKEQGLLDAVTYLAGVSGSTWAISSLYTNDGDMEALEADLKHRFTRQEWDLAKSLQKTIQAARSENYSLTDFWAYMVISKQTRELPESHLSNMKKPVEEGTLPYPIFAAIDNDLQPSWQEARAPGKQTFRGRER

SEQ ID NO: 7604 - protein, 384 aa, Homo sapiens
MGSSEVSIIPGLQKEEKAAVERRRLHVLKALKKLRIEADEAPVVAVLGSGGGLRAHIACLGVLSEMKEQGLLDAVTYLAGVSGSTWAISSLYTNDGDMEALEADLKHRFTRQEWDLAKSLQKTIQAARSENYSLTDFWAYMVISKQTRELPESHLSNMKKPVEEGTLPYPIFAAIDNDLQPSWQEARAPETWFEFTPHHAGFSALGAFVSITHFGSKFKKGRLVRTHPERDLTFLRGLWGSALGNTEVIREYIFDQLRNLTLKGLWRRAVANAKSIGHLIFARLLRLQESSQGEHPPPEDEGGEPEHTWLTEMLENWTRTSLEKQEQPHEDPERKGSLSNLMDFVKKTGICASKWEWGTTHNFLYKHEFDSFHQQEEPFPEVLS

SEQ ID NO: 7605 - protein, 541 aa, Homo sapiens
MGSSEVSIIPGLQKEEKAAVERRRLHVLKALKKLRIEADEAPVVAVLGSGGGLRAHIACLGVLSEMKEQGLLDAVTYLAGVSGSTWAISSLYTNDGDMEALEADLKHRFTRQEWDLAKSLQKTIQAARSENYSLTDFWAYMVISKQTRELPESHLSNMKKPVEEGTLPYPIFAAIDNDLQPSWQEARAPETWFEFTPHHAGFSALGAFVSITHFGSKFKKGRLVRTHPERDLTFLRGLWGSALGNTEVIREYIFDQLRNLTLKGLWRRAVANAKSIGHLIFARLLRLQESSQGEHPPPEDEGGEPEHTWLTEMLENWTRTSLEKQEQPHEDPERKGSLSNLMDFVKKTGICASKWEWGTTHNFLYKHGGIRDKIMSSRKHLHLVDAGLAINTPFPLVLPPTREVHLILSFDFSAGDPFETIRATTDYCRRHKIPFPQVEEAELDLWSKAPASCYILKGETGPVVMHFPLFNIDACGGDIEAWSDTYDTFKLADTYTLDVVVLLLALAKKNVRENKKKILRELMNVAGLYYPKDSARSCCLA

SEQ ID NO: 7606 - protein, 541 aa, Homo sapiens; identical to SEQ ID NO: 7605

SEQ ID NO: 7607 - protein, 350 aa, Homo sapiens
MASPPPFHSQKLPGEYFRYKGVPFPVGLYSLESISLAENTQDVRDDDIFIITYPKSGTTWMIEIICLILKEGDPSWIRSVPIWERAPWCETIVGAFSLPDQYSPRLMSSHLPIQIFTKAFFSSKAKVIYMGRNPRDVVVSLYHYSKIAGQLKDPGTPDQFLRDFLKGEVQFGSWFDHIKGWLRMKGKDNFLFITYEELQQDLQGSVERICGFLGRPLGKEALGSVVAHSTFSAMKANTMSNYTLLPPSLLDHRRGAFLRKGVCGDWKNHFTVAQSEAFDRAYRKQMRGMPTFPWDEDPEEDGSPDPEPSPEPEPKPSLEPNTSLEREPRPNSSPSPSPGQASETPHPRPS

SEQ ID NO: 7608 - protein, 365 aa, Homo sapiens
MDGPAEPQIPGLWDTYEDDISEISQKLPGEYFRYKGVPFPVGLYSLESISLAENTQDVRDDDIFIITYPKSGTTWMIEIICLILKEGDPSWIRSVPIWERAPWCETIVGAFSLPDQYSPRLMSSHLPIQIFTKAFFSSKAKVIYMGRNPRDVVVSLYHYSKIAGQLKDPGTPDQFLRDFLKGEVQFGSWFDHIKGWLRMKGKDNFLFITYEELQQDLQGSVERICGFLGRPLGKEALGSVVAHSTFSAMKANTMSNYTLLPPSLLDHRRGAFLRKGVCGDWKNHFTVAQSEAFDRAYRKQMRGMPTFPWDEDPEEDGSPDPEPSPEPEPKPSLEPNTSLEREPRPNSSPSPSPGQASETPHPRPS

SEQ ID NO: 7609 - protein, 326 aa, Homo sapiens
MGAAARLSAPRALVLWAALGAAAHIGPAPDPEDWWSYKDNLQGNFVPGPPFWGLVNAAWSLCAVGKRQSPVDVELKRVLYDPFLPPLRLSTGGEKLRGTLYNTGRHVSFLPAPRPVVNVSGGPLLYSHRLSELRLLFGARDGAGSEHQINHQGFSAEVQLIHFNQELYGNFSAASRGPNGLAILSLFVNVASTSNPFLSRLLNRDTITRISYKNDAYFLQDLSLELLFPESFGFITYQGSLSTPPCSETVTWILIDRALNITSLQMHSLRLLSQNPPSQIFQSLSGNSRPLQPLAHRALRGNRDPRHPERRCRGPNYRLHAQCFST

SEQ ID NO: 7610 - protein, 328 aa, Homo sapiens
MGAAARLSAPRALVLWAALGAAAHIGPAPDPEDWWSYKDNLQGNFVPGPPFWGLVNAAWSLCAVGKRQSPVDVELKRVLYDPFLPPLRLSTGGEKLRGTLYNTGRHVSFLPAPRPVVNVSGGPLLYSHRLSELRLLFGARDGAGSEHQINHQGFSAEVQLIHFNQELYGNFSAASRGPNGLAILSLFVNVASTSNPFLSRLLNRDTITRISYKNDAYFLQDLSLELLFPESFGFITYQGSLSTPPCSETVTWILIDRALNITSLQMHSLRLLSQNPPSQIFQSLSGNSRPLQPLAHRALRGNRDPRHPERRCRGPNYRLHVDGVPHGR

SEQ ID NO: 7611 - protein, 318 aa, Homo sapiens
MGAAARLSAPRALVLWAALGAAAHIGPAPDPEDWWSYKDNLQGNFVPAWSLCAVGKRQSPVDVELKRVLYDPFLPPLRLSTGGEKLRGTLYNTGRHVSFLPAPRPVVNVSGGPLLYSHRLSELRLLFGARDGAGSEHQINHQGFSAEVQLIHFNQELYGNFSAASRGPNGLAILSLFVNVASTSNPFLSRLLNRDTITRISYKNDAYFLQDLSLELLFPESFGFITYQGSLSTPPCSETVTWILIDRALNITSLQMHSLRLLSQNPPSQIFQSLSGNSRPLQPLAHRALRGNRDPRHPERRCRGPNYRLHVDGVPHGR

SEQ ID NO: 7612 - protein, 654 aa, Homo sapiens
MNGHLEAEEQQDQRPDQELTGSWGHGPRSTLVRAKAMAPPPPPLAASTPLLHGEFGSYPARGPRFALTLTSQALHIQRLRPKPEARPRGGLVPLAEVSGCCTLRSRSPSDSAAYFCIYTYPRGRRGARRRATRTFRADGAATYEENRAEAQRWATALTCLLRGLPLPGDGEITPDLLPRPPRLLLLVNPFGGRGLAWQWCKNHVLPMISEAGLSFNLIQTERQNHARELVQGLSLSEWDGIVTVSGDGLLHEVLNGLLDRPDWEEAVKMPVGILPCGSGNALAGAVNQHGGFEPALGLDLLLNCSLLLCRGGGHPLDLLSVTLASGSRCFSFLSVAWGFVSDVDIQSERFRALGSARFTLGTVLGLATLHTYRGRLSYLPATVEPASPTPAHSLPRAKSELTLTPDPAPPMAHSPLHRSVSDLPLPLPQPALASPGSPEPLPILSLNGGGPELAGDWGGAGDAPLSPDPLLSSPPGSPKAALHSPVSEGAPVIPPSSGLPLPTPDARVGASTCGPPDHLLPPLGTPLPPDWVTLEGDFVLMLAISPSHLGADLVAAPHARFDDGLVHLCWVRSGISRAALLRLFLAMERGSHFSLGCPQLGYAAARAFRLEPLTPRGVLTVDGEQVEYGPLQAQMHPGIGTLLTGPPGCPGREP

SEQ ID NO: 7613 - protein, 654 aa, Homo sapiens; identical to SEQ ID NO: 7612

SEQ ID NO: 7614 - protein, 385 aa, Homo sapiens
MNGHLEAEEQQDQRPDQELTGSWGHGPRSTLVRAKAMAPPPPPLAASTPLLHGEFGSYPARGPRFALTLTSQALHIQRLRPKPEARPRGGLVPLAEVSGCCTLRSRSPSDSAAYFCIYTYPRGRRGARRRATRTFRADGAATYEENRAEAQRWATALTCLLRGLPLPGDGEITPDLLPRPPRLLLLVNPFGGRGLAWQWCKNHVLPMISEAGLSFNLIQTERQNHARELVQGLSLSEWDGIVTVSGDGLLHEVLNGLLDRPDWEEAVKMPVGILPCGSGNALAGAVNQHGGPREDSDSSTSSSACPLWTTARSCPRAAASMPGSCPLLPQQLALGFSRFIQDRVNGGGGRIGSLTCRGHTQRTLPAPAREGGGSLFLKNINVFIC

SEQ ID NO: 7615 - protein, 672 aa, Homo sapiens
MNGHLEAEEQQDQRPDQELTGSWGHGPRSTLVRAKAMAPPPPPLAASTPLLHGEFGSYPARGPRFALTLTSQALHIQRLRPKPEARPRGGLVPLAEVSGCCTLRSRSPSDSAAYFCIYTYPRGRRGARRRATRTFRADGAATYEENRAEAQRWATALTCLLRGLPLPGDGEITPDLLPRPPRLLLLVNPFGGRGLAWQWCKNHVLPMISEAGLSFNLIQTERQNHARELVQGLSLSEWDGIVTVSGDGLLHEVLNGLLDRPDWEEAVKMPVGILPCGSGNALAGAVNQHGGFEPALGLDLLLNCSLLLCRGGGHPLDLLSVTLASGSRCFSFLSVAWGFVSDVDIQSERFRALGSARFTLGTVLGLATLHTYRGRLSYLPATVEPASPTPAHSLPRAKSELTLTPDPAPPMAHSPLHRSVSDLPLPLPQPALASPGSPEPLPILSLNGGGPELAGDWGGAGDAPLSPDPLLSSPPGSPKAALHSPVSEGAPVIPPSSGLPLPTPDARVGASTCGPPDHLLPPLGTPLPPDWVTLEGDFVLMLAISPSHLGADLVAAPHARFDDGLVHLCWVRSGISRAALLRLFLAMERGSHFSLGCPQLGYAAARAFRLEPLTPRGVLTVDGEQVEYGPLQAQMHPGIGTLLTGPPGCPGREIALAFMGPDVMLEGGRRHG

SEQ ID NO: 7616 - protein, 618 aa, Homo sapiens
MAPPPPPLAASTPLLHGEFGSYPARGPRFALTLTSQALHIQRLRPKPEARPRGGLVPLAEVSGCCTLRSRSPSDSAAYFCIYTYPRGRRGARRRATRTFRADGAATYEENRAEAQRWATALTCLLRGLPLPGDGEITPDLLPRPPRLLLLVNPFGGRGLAWQWCKNHVLPMISEAGLSFNLIQTERQNHARELVQGLSLSEWDGIVTVSGDGLLHEVLNGLLDRPDWEEAVKMPVGILPCGSGNALAGAVNQHGGFEPALGLDLLLNCSLLLCRGGGHPLDLLSVTLASGSRCFSFLSVAWGFVSDVDIQSERFRALGSARFTLGTVLGLATLHTYRGRLSYLPATVEPASPTPAHSLPRAKSELTLTPDPAPPMAHSPLHRSVSDLPLPLPQPALASPGSPEPLPILSLNGGGPELAGDWGGAGDAPLSPDPLLSSPPGSPKAALHSPVSEGAPVIPPSSGLPLPTPDARVGASTCGPPDHLLPPLGTPLPPDWVTLEGDFVLMLAISPSHLGADLVAAPHARFDDGLVHLCWVRSGISRAALLRLFLAMERGSHFSLGCPQLGYAAARAFRLEPLTPRGVLTVDGEQVEYGPLQAQMHPGIGTLLTGPPGCPGREP

SEQ ID NO: 7617 - protein, 684 aa, Homo sapiens
MCGIFAYMNYRVPRTRKEIFETLIKGLQRLEYRGYDSAGVAIDGNNHEVKERHIQLVKKRGKVKALDEELYKQDSMDLKVEFETHFGIAHTRWATHGVPSAVNSHPQRSDKGNEFVVIHNGIITNYKDLRKFLESKGYEFESETDTETIAKLIKYVFDNRETEDITFSTLVERVIQQLEGAFALVFKSVHYPGEAVATRRGSPLLIGVRSKYKLSTEQIPILYRTCTLENVKNICKTRMKRLDSSACLHAVGDKAVEFFFASDASAIIEHTNRVIFLEDDDIAAVADGKLSIHRVKRSASDDPSRAIQTLQMELQQIMKGRCNFSAFMQKEIFEQPESVFNTMRGRVNFETNTVLLGGLKDHLKEIRRCRRLIVIGCGTSYHAAVATRQVLEELTELPVMVELASDFLDRNTPVFRDDVCFFISQSGETADTLLALRYCKDRGALTVGVTNTVGSSISRETDCGVHINAGPEIGVASTKAYTSQFISLVMFGLMMSEDRISLQNRRQEIIRGLRSLPELIKEVLSLEEKIHDLALELYTQRSLLVMGRGYNYATCLEGALKIKEITYMHSEGILAGELKHGPLALIDKQMPVIMVIMKDPCFAKCQNALQQVTARQGRPIILCSKDDTESSKFAYKTIELPHTVDCLQGILSVIPLQLLSFHLAVLRGYDVDFPRNLAKSVTVE

SEQ ID NO: 7618 - protein, 682 aa, Homo sapiens
MCGIFAYMNYRVPRTRKEIFETLIKGLQRLEYRGYDSAGVAIDGNNHEVKERHIQLVKKRGKVKALDEELYKQDSMDLKVEFETHFGIAHTRWATHGVPSAVNSHPQRSDKGNEFVVIHNGIITNYKDLRKFLESKGYEFESETDTETIAKLIKYVFDNRETEDITFSTLVERVIQQLEGAFALVFKSVHYPGEAVATRRGSPLLIGVRSKYKLSTEQIPILYRTCTLENVKNICKTRMKRLDSSACLHAVGDKAVEFFFASDASAIIEHTNRVIFLEDDDIAAVADGKLSIHRVKRSASDDPSRAIQTLQMELQQIMKGNFSAFMQKEIFEQPESVFNTMRGRVNFETNTVLLGGLKDHLKEIRRCRRLIVIGCGTSYHAAVATRQVLEELTELPVMVELASDFLDRNTPVFRDDVCFFISQSGETADTLLALRYCKDRGALTVGVTNTVGSSISRETDCGVHINAGPEIGVASTKAYTSQFISLVMFGLMMSEDRISLQNRRQEIIRGLRSLPELIKEVLSLEEKIHDLALELYTQRSLLVMGRGYNYATCLEGALKIKEITYMHSEGILAGELKHGPLALIDKQMPVIMVIMKDPCFAKCQNALQQVTARQGRPIILCSKDDTESSKFAYKTIELPHTVDCLQGILSVIPLQLLSFHLAVLRGYDVDFPRNLAKSVTVE

SEQ ID NO: 7619 - protein, 160 aa, Homo sapiens
MKDEVALLAAVTLLGVLLQAYFSLQVISARRAFRVSPPLTTGPPEFERVYRAQGGGPVRPGLPVRAPPLLPGLRALRAAQAGTAVRERARPLAAGGAGCARPARPLPPGRAARRAPRTAPDAAAVGLRPRPPGRRSRERRAGASSCPGEGRSLPHPSLYH

SEQ ID NO: 7620 - protein, 150 aa, Homo sapiens
MKDEVALLAAVTLLGVLLQAYFSLQVISARRAFRVSPPLTTGPPEFERVYRAQVNCSEYFPLFLATLWVAGIFFHEGAAALCGLVYLFARLRYFQGYARSAQLRLAPLYASARALWLLVALAALGLLAHFLPAALRAALLGRLRTLLPWA

SEQ ID NO: 7621 - protein, 548 aa, Homo sapiens
MRLRNGTFLTLLLFCLCAFLSLSWYAALSGQKGDVVDVYQREFLALRDRLHAAEQESLKRSKELNLVLDEIKRAVSERQALRDGDGNRTWGRLTEDPRLKPWNGSHRHVLHLPTVFHHLPHLLAKESSLQPAVRVGQGRTGVSVVMGIPSVRREVHSYLTDTLHSLISELSPQEKEDSVIVVLIAETDSQYTSAVTENIKALFPTEIHSGLLEVISPSPHFYPDFSRLRESFGDPKERVRWRTKQNLDYCFLMMYAQSKGIYYVQLEDDIVAKPNYLSTMKNFALQQPSEDWMILEFSQLGFIGKMFKSLDLSLIVEFILMFYRDKPIDWLLDHILWVKVCNPEKDAKHCDRQKANLRIRFKPSLFQHVGTHSSLAGKIQKLKDKDFGKQALRKEHVNPPAEVSTSLKTYQHFTLEKAYLREDFFWAFTPAAGDFIRFRFFQPLRLERFFFRSGNIEHPEDKLFNTSVEVLPFDNPQSDKEALQEGRTATLRYPRSPDGYLQIGSFYKGVAEGEVDPAFGPLEALRLSIQTDSPVWVILSEIFLKKAD

SEQ ID NO: 7622 - protein, 229 aa, Homo sapiens [sequence omitted]

SEQ ID NO: 7623 - protein, 614 aa, Homo sapiens [sequence omitted]

SEQ ID NO: 7624 - protein, 597 aa, Homo sapiens [sequence omitted]

SEQ ID NO: 7625 - protein, 313 aa, Homo sapiens
MMYAQSKGIYYVQLEDDIVAKPNYLSTMKNFALQQPSEDWMILEFSQLGFIGKMFKSLDLSLIVEFILMFYRDKPIDWLLDHILWVKVCNPEKDAKHCDRQKANLRIRFKPSLFQHVGTHSSLAGKIQKLKDKDFGKQALRKEHVNPPAEVSTSLKTYQHFTLEKAYLREDFFWAFTPAAGDFIRFRFFQPLRLERFFFRSGNIEHPEDKLFNTSVEVLPFDNPQSDKEALQEGRTATLRYPRSPDGYLQIGSFYKGVAEGEVDPAFGPLEALRLSIQTDSPVWVILSEVRLGRARPGTGSSQGDPGGAQRPC

SEQ ID NO: 7626 - protein, 595 aa, Homo sapiens [sequence omitted]

SEQ ID NO: 7627 - protein, 589 aa, Homo sapiens
MLHAKLFPCRRRRRLPTPAPRPRSPGPCSLGPAGARRAPEEMRLRNGTFLTLLLFCLCAFLSLSWYAALSGQKGDVVDVYQREFLALRDRLHAAEQESLKRSKELNLVLDEIKRAVSERQALRDGDGNRTWGRLTEDPRLKPWNGSHRHVLHLPTVFHHLPHLLAKESSLQPAVRVGQGRTGVSVVMGIPSVRREVHSYLTDTLHSLISELSPQEKEDSVIVVLIAETDSQYTSAVTENIKALFPTEIHSGLLEVISPSPHFYPDFSRLRESFGDPKERVRWRTKQNLDYCFLMMYAQSKGIYYVQLEDDIVAKPNYLSTMKNFALQQPSEDWMILEFSQLGFIGKMFKSLDLSLIVEFILMFYRDKPIDWLLDHILWVKVCNPEKDAKHCDRQKANLRIRFKPSLFQHVGTHSSLAGKIQKLKDKDFGKQALRKEHVNPPAEVSTSLKTYQHFTLEKAYLREDFFWAFTPAAGDFIRFRFFQPLRLERFFFRSGNIEHPEDKLFNTSVEVLPFDNPQSDKEALQEGRTATLRYPRSPDGYLQIGSFYKGVAEGEVDPAFGPLEALRLSIQTDSPVWVILSEIFLKKAD

SEQ ID NO: 7628 - protein, 588 aa, Homo sapiens [sequence omitted]

SEQ ID NO: 7629 - protein, 563 aa, Homo sapiens
MSRVAGTRTDVNELLQRWTPRCVRWHTGGARRVALDRPLVTACLPPAGDVVDVYQREFLALRDRLHAAEQESLKRSKELNLVLDEIKRAVSERQALRDGDGNRTWGRLTEDPRLKPWNGSHRHVLHLPTVFHHLPHLLAKESSLQPAVRVGQGRTGVSVVMGIPSVRREVHSYLTDTLHSLISELSPQEKEDSVIVVLIAETDSQYTSAVTENIKALFPTEIHSGLLEVISPSPHFYPDFSRLRESFGDPKERVRWRTKQNLDYCFLMMYAQSKGIYYVQLEDDIVAKPNYLSTMKNFALQQPSEDWMILEFSQLGFIGKMFKSLDLSLIVEFILMFYRDKPIDWLLDHILWVKVCNPEKDAKHCDRQKANLRIRFKPSLFQHVGTHSSLAGKIQKLKDKDFGKQALRKEHVNPPAEVSTSLKTYQHFTLEKAYLREDFFWAFTPAAGDFIRFRFFQPLRLERFFFRSGNIEHPEDKLFNTSVEVLPFDNPQSDKEALQEGRTATLRYPRSPDGYLQIGSFYKGVAEGEVDPAFGPLEALRLSIQTDSPVWVILSEIFLKKAD

SEQ ID NO: 7630 - protein, 645 aa, Homo sapiens
MRPRKAFLLLLLLGLVQLLAVAGAEGPDEDSSNRENAIEDEEEEEEEDDDEEEDDLEVKEENGVLVLNDANFDNFVADKDTVLLEFYAPWCGHCKQFAPEYEKIANILKDKDPPIPVAKIDATSASVLASRFDVSGYPTIKILKKGQAVDYEGSRTQEEIVAKVREVSQPDWTPPPEVTLVLTKENFDEVVNDADIILVEFYAPWCGHCKKLAPEYEKAAKELSKRSPPIPLAKVDATAETDLAKRFDVSGYPTLKIFRKGRPYDYNGPREKYGIVDYMIEQSGPPSKEILTLKQVQEFLKDGDDVIIIGVFKGESDPAYQQYQDAANNLREDYKFHHTFSTEIAKFLKVSQGQLVVMQPEKFQSKYEPRSHMMDVQGSTQDSAIKDFVLKYALPLVGHRKVSNDAKRYTRRPLVVVYYSVDFSFDYRAATQFWRSKVLEVAKDFPEYTFAIADEEDYAGEVKDLGLSESGEDVNAAILDESGKKFAMEPEEFDSDTLREFVTAFKKGKLKPVIKSQPVPKNNKGPVKVVVGKTFDSIVMDPKKDVLIEFYAPWCGHCKQLEPVYNSLAKKYKGQKGLVIAKMDATANDVPSDRYKVEGFPTIYFAPSGDKKNPVKFEGGDRDLEHLSKFIEEHATKLSRTKEEL

SEQ ID NO: 7631 - protein, 645 aa, Homo sapiens; identical to SEQ ID NO: 7630

SEQ ID NO: 7632 - protein, 110 aa, Homo sapiens
MCDWLIHVSSSNRAGRGGASIYGKQFEDELHPDLKFTGAGILAMANAGPDTNGSQFFVTLAPTQWLDGKHTIFGRVCQGIGMVNRVGMVETNSQDRPVDDVKIIKAYPSG

SEQ ID NO: 7633 - protein, 166 aa, Homo sapiens
MAAIPPDSWQPPNVYLETSMGIIVLELYWKHAPKTCKNFAELARRGYYNGTKFHRIIKDFMIQGGDPTGTGRGGASIYGKQFEDELHPDLKFTGAGILAMANAGPDTNGSQFFVTLAPTQWLDGKHTIFGRVCQGIGMVNRVGMVETNSQDRPVDDVKIIKAYPSG

SEQ ID NO: 7634 - protein, 166 aa, Homo sapiens; identical to SEQ ID NO: 7633

SEQ ID NO: 7635 - protein, 456 aa, Homo sapiens
MAFAETYPAASSLPNGDCGRPRARPGGNRVTVVLGAQWGDEGKGKVVDLLAQDADIVCRCQGGNNAGHTVVVDSVEYDFHLLPSGIINPNVTAFIGNGVVIHLPGLFEEAEKNVQKGKGLEGWEKRLIISDRAHIVFDFHQAADGIQEQQRQEQAGKNLGTTKKGIGPVYSSKAARSGLRMCDLVSDFDGFSERFKVLANQYKSIYPTLEIDIEGELQKLKGYMEKIKPMVRDGVYFLYEALHGPPKKILVEGANAALLDIDFGTYPFVTSSNCTVGGVCTGLGMPPQNVGEVYGVVKAYTTRVGIGAFPTEQDNEIGELLQTRGREFGVTTGRKRRCGWLDLVLLKYAHMINGFTALALTKLDILDMFTEIKVGVAYKLDGEIIPHIPANQEVLNKVEVQYKTLPGWNTDISNARAFKELPVNAQNYVRFIEDELQIPVKWIGVGKSRESMIQLF

SEQ ID NO: 7636 - protein, 456 aa, Homo sapiens; identical to SEQ ID NO: 7635

SEQ ID NO: 7637 - protein, 246 aa, Homo sapiens
MAAPGPALCLFDVDGTLTAPRQKITKEMDDFLQKLRQKIKIGVVGGSDFEKVQEQLGNDVVEKYDYVFPENGLVAYKDGKLLCRQNIQSHLGEALIQDLINYCLSYIAKIKLPKKRGTFIEFRNGMLNVSPIGRSCSQEERIEFYELDKKENIRQKFVADLRKEFAGKGLTFSIGGQISFDVFPDGWDKRYCLRHVENDGYKTIYFFGDKTMPGGNDHEIFTDPRTMGYSVTAPEDTRRICELLFS

SEQ ID NO: 7638 - protein, 246 aa, Homo sapiens; identical to SEQ ID NO: 7637

SEQ ID NO: 7639 - protein, 218 aa, Homo sapiens
MATRSPGVVISDDEPGYDLDLFCIPNHYAEDLERVFIPHGLIMDRTERLARDVMKEMGGHHIVALCVLKGGYKFFADLLDYIKALNRNSDRSIPMTVDFIRLKSYCNDQSTGDIKVIGGDDLSTLTGKNVLIVEDIIDTGKTMQTLLSLVRQYNPKMVKVASLLVKRTPRSVGYKPDFVGFEIPDKFVVGYALDYNEYFRDLNHVCVISETGKAKYKA

SEQ ID NO: 7640 - protein, 218 aa, Homo sapiens; identical to SEQ ID NO: 7639

SEQ ID NO: 7641 - protein, 616 aa, Homo sapiens
MGRIGISCLFPASWHFSISPVGCPRILNTNLRQIMVISVLAAAVSLLYFSVVIIRNKYGRLTRDKKFQRYLARVTDIEATDTNNPNVNYGIVVDCGSSGSRVFVYCWPRHNGNPHDLLDIRQMRDKNRKPVVMKIKPGISEFATSPEKVSDYISPLLNFAAEHVPRAKHKETPLYILCTAGMRILPESQQKAILEDLLTDIPVHFDFLFSDSHAEVISGKQEGVYAWIGINFVLGRFEHIEDDDEAVVEVNIPGSESSEAIVRKRTAGILDMGGVSTQIAYEVPKTVSFASSQQEEVAKNLLAEFNLGCDVHQTEHVYRVYVATFLGFGGNAARQRYEDRIFANTIQKNRLLGKQTGLTPDMPYLDPCLPLDIKDEIQQNGQTIYLRGTGDFDLCRETIQPFMNKTNETQTSLNGVYQPPIHFQNSEFYGFSEFYYCTEDVLRMGGDYNAAKFTKAAKDYCATKWSILRERFDRGLYASHADLHRLKYQCFKSAWMFEVFHRGFSFPVNYKSLKTALQVYDKEVQWTLGAILYRTRFLPLRDIQQEAFRASHTHWRGVSFVYNHYLFSGCFLVVLLAILLYLLRLRRIHRRTPRSSSAAALWMEEGLPAQNAPGTL

SEQ ID NO: 7642 - protein, 608 aa, Homo sapiens
MGRIGISCLFPASWHFSISPVGCPRILNTNLRQIMVISVLAAAVSLLYFSVVIIRNKYGRLTRDKKFQRYLARVTDIEATDTNNPNVNYGIVVDCGSSGSRVFVYCWPRHNGNPHDLLDIRQMRDKNRKPVVMKIKPGISEFATSPEKVSDYISPLLNFAAEHVPRAKHKETPLYILCTAGMRILPESQQKAILEDLLTDIPVHFDFLFSDSHAEVISGKQEGVYAWIGINFVLGRFEHIEDDDEAVVEVNIPGSESSEAIVRKRTAGILDMGGVSTQIAYEVPKTEEVAKNLLAEFNLGCDVHQTEHVYRVYVATFLGFGGNAARQRYEDRIFANTIQKNRLLGKQTGLTPDMPYLDPCLPLDIKDEIQQNGQTIYLRGTGDFDLCRETIQPFMNKTNETQTSLNGVYQPPIHFQNSEFYGFSEFYYCTEDVLRMGGDYNAAKFTKAAKDYCATKWSILRERFDRGLYASHADLHRLKYQCFKSAWMFEVFHRGFSFPVNYKSLKTALQVYDKEVQWTLGAILYRTRFLPLRDIQQEAFRASHTHWRGVSFVYNHYLFSGCFLVVLLAILLYLLRLRRIHRRTPRSSSAAALWMEEGLPAQNAPGTL

SEQ ID NO: 7643 - protein, 616 aa, Homo sapiens; identical to SEQ ID NO: 7641

SEQ ID NO: 7644 - protein, 1598 aa, Homo sapiens
MEAVPRMPMIWLDLKEAGDFHFQPAVKKFVLKNYGENPEAYNEELKKLELLRQNAVRVPRDFEGCSVLRKYLGQLHYLQSRVPMGSGQEAAVPVTWTEIFSGKSVAHEDIKYEQACILYNLGALHSMLGAMDKRVSEEGMKVSCTHFQCAAGAFAYLREHFPQAYSVDMSRQILTLNVNLMLGQAQECLLEKSMLDNRKSFLVARISAQVVDYYKEACRALENPDTASLLGRIQKDWKKLVQMKIYYFAAVAHLHMGKQAEEQQKFGERVAYFQSALDKLNEAIKLAKGQPDTVQDALRFTMDVIGGKYNSAKKDNDFIYHEAVPALDTLQPVKGAPLVKPLPVNPTDPAVTGPDIFAKLVPMAAHEASSLYSEEKAKLLREMMAKIEDKNEVLDQFMDSMQLDPETVDNLDAYSHIPPQLMEKCAALSVRPDTVRNLVQSMQVLSGVFTDVEASLKDIRDLLEEDELLEQKFQEAVGQAGAISITSKAELAEVRREWAKYMEVHEKASFTNSELHRAMNLHVGNLRLLSGPLDQVRAALPTPALSPEDKAVLQNLKRILAKVQEMRDQRVSLEQQLRELIQKDDITASLVTTDHSEMKVGWKLFEEQLKKYDQLKVYLEQNLAAQDRVLCALTEANVQYAAVRRVLSDLDQKWNSTLQTLVASYEAYEDLMKKSQEGRDFYADLESKVAALLERTQSTCQAREAARQQLLDRELKKKPPPRPTAPKPLLPRREESEAVEAGDPPEELRSLPPDMVAGPRLPDTFLGSATPLHFPPSPFPSSTGPGPHYLSGPLPPGTYSGPTQLIQPRAPGPHAMPVAPGPALYPAPAYTPELGLVPRSSPQHGVVSSPYVGVGPAPPVAGLPSAPPPQFSGPELAMAVRPATTTVDSIQAPIPSHTAPRPNPTPAPPPPCFPVPPPQPLPTPYTYPAGAKQPIPAQHHFSSGIPAGFPAPRIGPQPQPHPQPHPSQAFGPQPPQQPLPLQHPHLFPPQAPGLLPPQSPYPYAPQPGVLGQPPPPLHTQLYPGPAQDPLPAHSGALPFPSPGPPQPPHPPLAYGPAPSTRPMGPQAAPLTIRGPSSAGQSTPSPHLVPSPAPSPGPGPVPPRPPAAEPPPCLRRGAAAADLLSSSPESQHGGTQSPGGGQPLLQPTKVDAAEGRRPQALRLIERDPYEHPERLRQLQQELEAFRGQLGDVGALDTVWRELQDAQEHDARGRSIAIARCYSLKNRHQDVMPYDSNRVVLRSGKDDYINASCVEGLSPYCPPLVATQAPLPGTAADFWLMVHEQKVSVIVMLVSEAEMEKQKVARYFPTERGQPMVHGALSLALSSVRSTETHVERVLSLQFRDQSLKRSLVHLHFPTWPELGLPDSPSNLLRFIQEVHAHYLHQRPLHTPIIVHCSSGVGRTGAFALLYAAVQEVEAGNGIPELPQLVRRMRQQRKHMLQEKLHLRFCYEAVVRHVEQVLQRHGVPPPCKPLASASISQKNHLPQDSQDLVLGGDVPISSIQATIAKLSIRPPGGLESPPKEEPPVPEAPSSGPPSSSLELLASLTPEAFSLDSSLRGKQRMSKHNFLQAHNGQGLRATRPSDDPLSLLDPLWTLNKT

SEQ ID NO: 7645 - protein, 1636 aa, Homo sapiens
MEAVPRMPMIWLDLKEAGDFHFQPAVKKFVLKNYGENPEAYNEELKKLELLRQNAVRVPRDFEGCSVLRKYLGQLHYLQSRVPMGSGQEAAVPVTWTEIFSGKSVAHEDIKYEQACILYNLGALHSMLGAMDKRVSEEGMKVSCTHFQCAAGAFAYLREHFPQAYSVDMSRQILTLNVNLMLGQAQECLLEKSMLDNRKSFLVARISAQVVDYYKEACRALENPDTASLLGRIQKDWKKLVQMKIYYFAAVAHLHMGKQAEEQQKFGERVAYFQSALDKLNEAIKLAKGQPDTVQDALRFTMDVIGGKYNSAKKDNDFIYHEAVPALDTLQPVKGAPLVKPLPVNPTDPAVTGPDIFAKLVPMAAHEASSLYSEEKAKLLREMMAKIEDKNEVLDQFMDSMQLDPETVDNLDAYSHIPPQLMEKCAALSVRPDTVRNLVQSMQVLSGVFTDVEASLKDIRDLLEEDELLEQKFQEAVGQAGAISITSKAELAEVRREWAKYMEVHEKASFTNSELHRAMNLHVGNLRLLSGPLDQVRAALPTPALSPEDKAVLQNLKRILAKVQEMRDQRVSLEQQLRELIQKDDITASLVTTDHSEMKKLFEEQLKKYDQLKVYLEQNLAAQDRVLCALTEANVQYAAVRRVLSDLDQKWNSTLQTLVASYEAYEDLMKKSQEGRDFYADLESKVAALLERTQSTCQAREAARQQLLDRELKKKPPPRPTAPKPLLPRREESEAVEAGDPPEELRSLPPDMVAGPRLPDTFLGSATPLHFPPSPFPSSTGPGPHYLSGPLPPGTYSGPTQLIQPRAPGPHAMPVAPGPALYPAPAYTPELGLVPRSSPQHGVVSSPYVGVGPAPPVAGLPSAPPPQFSGPELAMAVRPATTTVDSIQAPIPSHTAPRPNPTPAPPPPCFPVPPPQPLPTPYTYPAGAKQPIPAQHHFSSGIPAGFPAPRIGPQPQPHPQPHPSQAFGPQPPQQPLPLQHPHLFPPQAPGLLPPQSPYPYAPQPGVLGQPPPPLHTQLYPGPAQDPLPAHSGALPFPSPGPPQPPHPPLAYGPAPSTRPMGPQAAPLTIRGPSSAGQSTPSPHLVPSPAPSPGPGPVPPRPPAAEPPPCLRRGAAAADLLSSSPESQHGGTQSPGGGQPLLQPTKVDAAEGRRPQALRLIERDPYEHPERLRQLQQELEAFRGQLGDVGALDTVWRELQDAQEHDARGRSIAIARCYSLKNRHQDVMPYDSNRVVLRSGKDDYINASCVEGLSPYCPPLVATQAPLPGTAADFWLMVHEQKVSVIVMLVSEAEMEKQKVARYFPTERGQPMVHGALSLALSSVRSTETHVERVLSLQFRDQSLKRSLVHLHFPTWPELGLPDSPSNLLRFIQEVHAHYLHQRPLHTPIIVHCSSGVGRTGAFALLYAAVQEVEAGNGIPELPQLVRRMRQQRKHMLQEKLHLRFCYEAVVRHVEQVLQRHGVPPPCKPLASASISQKNHLPQDSQDLVLGGDVPISSIQATIAKLSIRPPGGLESPVASLPGPAEPPGLPPASLPESTPIPSSSPPPLSSPLPEAPQPKEEPPVPEAPSSGPPSSSLELLASLTPEAFSLDSSLRGKQRMSKHNFLQAHNGQGLRATRPSDDPLSLLDPLWTLNKT

SEQ ID NO: 7646 - protein, 430 aa, Homo sapiens [sequence omitted]

SEQ ID NO: 7647 - protein, 304 aa, Homo sapiens
MDGFQRHFDSQVIIYGKQVIINLINQKGSEKPLEQTFATMVSSLGSGMMRYIAFDFHKECKNMRWDRLSILLDQVAEMQDELSYFLVDSAGQVVANQEGVFRSNCMDCLDRTNVIQSLLARRSLQAQLQRLGVLHVGQKLEEQDEFEKIYKNAWADNANACAKQYAGTGALKTDFTRQTGKRTHLGLIMDGWNSMIRYYKNNFSDGFRQDSIDLFLGNYSVDELESHSPLSVPRDWKFLALPIIMVVAFSMCIICLLMAGDTWTETLAYVLFWGVASIGTFFIILYNGKDFVDAPRLVQKEKID

SEQ ID NO: 7648 - protein, 303 aa, Homo sapiens
MDGFQRHFDSQVIIYGKQVIINLINQKGSEKPLEQTFATMVSSLGSGMMRYIAFDFHKECKNMRWDRLSILLDQVAEMQDELSYFLVDSAGQVVANQEGVFRSNCMDCLDRTNVIQSLLARRSLQAQLQRLGVLHVGQKLEEQDEFEKIYKNAWADNANACAKQYAGTGALKTDFTRTGKRTHLGLIMDGWNSMIRYYKNNFSDGFRQDSIDLFLGNYSVDELESHSPLSVPRDWKFLALPIIMVVAFSMCIICLLMAGDTWTETLAYVLFWGVASIGTFFIILYNGKDFVDAPRLVQKEKID

SEQ ID NO: 7649 - protein, 587 aa, Homo sapiens
MATAAYEQLKLHITPEKFYVEACDDGADDVLTIDRVSTEVTLAVKKDVPPSAVTRPIFGILGTIHLVAGNYLIVITKKIKVGEFFSHVVWKATDFDVLSYKKTMLHLTDIQLQDNKTFLAMLNHVLNVDGFYFSTTYDLTHTLQRLSNTSPEFQEMSLLERADQRFVWNGHLLRELSAQPEVHRFALPVLHGFITMHSCSINGKYFDWILISRRSCFRAGVRYYVRGIDSEGHAANFVETEQIVHYNGSKASFVQTRGSIPVFWSQRPNLKYKPLPQISKVANHMDGFQRHFDSQVIIYGKQVIINLINQKGSEKPLEQTFATMVSSLGSGMMRYIAFDFHKECKNMRWDRLSILLDQVAEMQDELSYFLVDSAGQVVANQEGVFRSNCMDCLDRTNVIQSLLARRSLQAQLQRLGVLHVGQKLEEQDEFEKIYKNAWADNANACAKQYAGTGALKTDFTRTGKRTHLGLIMDGWNSMIRYYKNNFSDGFRQDSIDLFLGNYSVDELESHSPLSVPRDWKFLALPIIMVVAFSMCIICLLMAGDTWTETLAYVLFWGVASIGTFFIILYNGKDFVDAPRLVQKEKID

SEQ ID NO: 7650 - protein, 903 aa, Homo sapiens
MASVWQRLGFYASLLKRQLNGGPDVIKWERRVIPGCTRSIYSATGKWTKEYTLQTRKDVEKWWHQRIKEQASKISEADKSKPKFYVLSMFPYPSGKLHMGHVRVYTISDTIARFQKMRGMQVINPMGWDAFGLPAENAAVERNLHPQSWTQSNIKHMRKQLDRLGLCFSWDREITTCLPDYYKWTQYLFIKLYEAGLAYQKEALVNWDPVDQTVLANEQVDEHGCSWRSGAKVEQKYLRQWFIKTTAYAKAMQDALADLPEWYGIKGMQAHWIGDCVGCHLDFTLKVHGQATGEKLTAYTATPEAIYGTSHVAISPSHRLLHGHSSLKEALRMALVPGKDCLTPVMAVNMLTQQEVPVVILAKADLEGSLDSKIGIPSTSSEDTILAQTLGLAYSEVIETLPDGTERLSSSAEFTGMTRQDAFLALTQKARGKRVGGDVTSDKLKDWLISRQRYWGTPIPIVHCPVCGPTPVPLEDLPVTLPNIASFTGKGGPPLAMASEWVNCSCPRCKGAAKRETDTMDTFVDSAWYYFRYTDPHNPHSPFNTAVADYWMPVDLYIGGKEHAVMHLFYARFFSHFCHDQKMVKHREPFHKLLAQGLIKGQTFRLPSGQYLQREEVDLTGSVPVHAKTKEKLEVTWEKMSKSKHNGVDPEEVVEQYGIDTIRLYILFAAPPEKDILWDVKTDALPGVLRWQQRLWTLTTRFIEARASGKSPQPQLLSNKEKAEARKLWEYKNSVISQVTTHFTEDFSLNSAISQLMGLSNALSQASQSVILHSPEFEDALCALMVMAAPLAPHVTSEIWAGLALVPRKLCAHYTWDASVLLQAWPAVDPEFLQQPEVVQMAVLINNKACGKIPVPQQVARDQDKVHEFVLQSELGVRLLQGRSIKKSFLSPRTALINFLVQD

SEQ ID NO: 7651 - protein, 684 aa, Homo sapiens
MMDASKELQVLHIDFLNQDNAVSHHTWEFQTSSPVFRRGQVFHLRLVLNQPLQSYHQLKLEFSTGPNPSIAKHTLVVLDPRTPSDHYNWQATLQNESGKEVTVAVTSSPNAILGKYQLNVKTGNHILKSEENILYLLFNPWCKEDMVFMPDEDERKEYILNDTGCHYVGAARSIKCKPWNFGQFEKNVLDCCISLLTESSLKPTDRRDPVLVCRAMCAMMSFEKGQGVLIGNWTGDYEGGTAPYKWTGSAPILQQYYNTKQAVCFGQCWVFAGILTTVLRALGIPARSVTGFDSAHDTERNLTVDTYVNENGEKITSMTHDSVWNFHVWTDAWMKRPDLPKGYDGWQAVDATPQERSQGVFCCGPSPLTAIRKGDIFIVYDTRFVFSEVNGDRLIWLVKMVNGQEELHVISMETTSIGKNISTKAVGQDRRRDITYEYKYPEGSSEERQVMDHAFLLLSSEREHRRPVKENFLHMSVQSDDVLLGNSVNFTVILKRKTAALQNVNILGSFELQLYTGKKMAKLCDLNKTSQIQGQVSEVTLTLDSKTYINSLAILDDEPVIRGFIIAEIVESKEIMASEVFTSFQYPEFSIELPNTGRIGQLLVCNCIFKNTLAIPLTDVKFSLESLGISSLQTSDHGTVQPGETIQSQIKCTPIKTGPKKFIVKLSSKQVKEINAQKIVLITK

SEQ ID NO: 7652 - protein, 684 aa, Homo sapiens; identical to SEQ ID NO: 7651

SEQ ID NO: 7653 - protein, 461 aa, Homo sapiens
MLELRHRGSCPGPREAVSPPHREGEAAGGDHETESTSDKETDIDDRYGDLDSRTDSDIPEIPPSSDRTPEILKKALSGLSSRWKNWWIRGILTLTMISLFFLIIYMGSFMLMLLVLGIQVKCFHEIITIGYRVYHSYDLPWFRTLSWYFLLCVNYFFYGETVADYFATFVQREEQLQFLIRYHRFISFALYLAGFCMFVLSLVKKHYRLQFYMFAWTHVTLLITVTQSHLVIQNLFEGMIWFLVPISSVICNDITAYLFGFFFGRTPLIKLSPKKTWEGFIGGFFSTVVFGFIAAYVLSKYQYFVCPVEYRSDVNSFVTECEPSELFQLQTYSLPPFLKAVLRQERVSLYPFQIHSIALSTFASLIGPFGGFFASGFKRAFKIKDFANTIPGHGGIMDRFDCQYLMATFVHVYITSFIRGPNPSKVLQQLLVLQPEQQLNIYKTLKTHLIEKGILQPTLKV

SEQ ID NO: 7654 - protein, 461 aa, Homo sapiens; identical to SEQ ID NO: 7653

SEQ ID NO: 7655 - protein, 497 aa, Homo sapiens
MPTPDATTPQAKGFRRAVSELDAKQAEAIMSPRFIGRRQSLIEDARKEREAAVAAAAAAVPSEPGDPLEAVAFEEKEGKAVLNLLFSPRATKPSALSRAVKVFETFEAKIHHLETRPAQRPRAGGPHLEYFVRLEVRRGDLAALLSGVRQVSEDVRSPAGPKVPWFPRKVSELDKCHHLVTKFDPDLDLDHPGFSDQVYRQRRKLIAEIAFQYRHGDPIPRVEYTAEEIATWKEVYTTLKGLYATHACGEHLEAFALLERFSGYREDNIPQLEDVSRFLKERTGFQLRPVAGLLSARDFLASLAFRVFQCTQYIRHASSPMHSPEPDCCHELLGHVPMLADRTFAQFSQDIGLASLGASDEEIEKLSTLYWFTVEFGLCKQNGEVKAYGAGLLSSYGELLHCLSEEPEIRAFDPEAAAVQPYQDQTYQSVYFVSESFSDAKDKLRSYASRIQRPFSVKFDPYTLAIDVLDSPQAVRRSLEGVQDELDTLAHALSAIG

SEQ ID NO: 7656 - protein, 444 aa, Homo sapiens
DLHTEPCPPPTPPRHRPRASAGPCLSWTPSRQRPSWATKPSALSRAVKVFETFEAKIHHLETRPAQRPRAGGPHLEYFVRLEVRRGDLAALLSGVRQVSEDVRSPAGPKVPWFPRKVSELDKCHHLVTKFDPDLDLDHPGFSDQVYRQRRKLIAEIAFQYRHGDPIPRVEYTAEEIATWKEVYTTLKGLYATHACGEHLEAFALLERFSGYREDNIPQLEDVSRFLKERTGFQLRPVAGLLSARDFLASLAFRVFQCTQYIRHASSPMHSPEPDCCHELLGHVPMLADRTFAQFSQDIGLASLGASDEEIEKLSTLYWFTVEFGLCKQNGEVKAYGAGLLSSYGELLHCLSEEPEIRAFDPEAAAVQPYQDQTYQSVYFVSESFSDAKDKLRSYASRIQRPFSVKFDPYTLAIDVLDSPQAVRRSLEGVQDELDTLAHALSAIG

SEQ ID NO: 7657 - protein, 524 aa, Homo sapiens
MPTPDATTPQAKGFRRAVSELDAKQAEAIMGAPGPSLTGSPWPGTAAPAASYTPTPRSPRFIGRRQSLIEDARKEREAAVAAAAAAVPSEPGDPLEAVAFEEKEGKAVLNLLFSPRATKPSALSRAVKVFETFEAKIHHLETRPAQRPRAGGPHLEYFVRLEVRRGDLAALLSGVRQVSEDVRSPAGPKVPWFPRKVSELDKCHHLVTKFDPDLDLDHPGFSDQVYRQRRKLIAEIAFQYRHGDPIPRVEYTAEEIATWKEVYTTLKGLYATHACGEHLEAFALLERFSGYREDNIPQLEDVSRFLKERTGFQLRPVAGLLSARDFLASLAFRVFQCTQYIRHASSPMHSPEPDCCHELLGHVPMLADRTFAQFSQDIGLASLGASDEEIEKLSTLYWFTVEFGLCKQNGEVKAYGAGLLSSYGELLHCLSEEPEIRAFDPEAAAVQPYQDQTYQSVYFVSESFSDAKDKLRSYASRIQRPFSVKFDPYTLAIDVLDSPQAVRRSLEGVQDELDTLAHALSAIG

SEQ ID NO: 7658 - protein, 501 aa, Homo sapiens
MPTPDATTPQAKGFRRAVSELDAKQAEAIMVRGQSPRFIGRRQSLIEDARKEREAAVAAAAAAVPSEPGDPLEAVAFEEKEGKAVLNLLFSPRATKPSALSRAVKVFETFEAKIHHLETRPAQRPRAGGPHLEYFVRLEVRRGDLAALLSGVRQVSEDVRSPAGPKVPWFPRKVSELDKCHHLVTKFDPDLDLDHPGFSDQVYRQRRKLIAEIAFQYRHGDPIPRVEYTAEEIATWKEVYTTLKGLYATHACGEHLEAFALLERFSGYREDNIPQLEDVSRFLKERTGFQLRPVAGLLSARDFLASLAFRVFQCTQYIRHASSPMHSPEPDCCHELLGHVPMLADRTFAQFSQDIGLASLGASDEEIEKLSTLYWFTVEFGLCKQNGEVKAYGAGLLSSYGELLHCLSEEPEIRAFDPEAAAVQPYQDQTYQSVYFVSESFSDAKDKLRSYASRIQRPFSVKFDPYTLAIDVLDSPQAVRRSLEGVQDELDTLAHALSAIG

SEQ ID NO: 7659 - protein, 528 aa, Homo sapiens
MPTPDATTPQAKGFRRAVSELDAKQAEAIMVRGQGAPGPSLTGSPWPGTAAPAASYTPTPRSPRFIGRRQSLIEDARKEREAAVAAAAAAVPSEPGDPLEAVAFEEKEGKAVLNLLFSPRATKPSALSRAVKVFETFEAKIHHLETRPAQRPRAGGPHLEYFVRLEVRRGDLAALLSGVRQVSEDVRSPAGPKVPWFPRKVSELDKCHHLVTKFDPDLDLDHPGFSDQVYRQRRKLIAEIAFQYRHGDPIPRVEYTAEEIATWKEVYTTLKGLYATHACGEHLEAFALLERFSGYREDNIPQLEDVSRFLKERTGFQLRPVAGLLSARDFLASLAFRVFQCTQYIRHASSPMHSPEPDCCHELLGHVPMLADRTFAQFSQDIGLASLGASDEEIEKLSTLYWFTVEFGLCKQNGEVKAYGAGLLSSYGELLHCLSEEPEIRAFDPEAAAVQPYQDQTYQSVYFVSESFSDAKDKLRSYASRIQRPFSVKFDPYTLAIDVLDSPQAVRRSLEGVQDELDTLAHALSAIG

SEQ ID NO: 7660 - protein, 332 aa, Homo sapiens
MSTVKEQLIEKLIEDDENSQCKITIVGTGAVGMACAISILLKDLADELALVDVALDKLKGEMMDLQHGSLFFSTSKITSGKDYSVSANSRIVIVTAGARQQEGETRLALVQRNVAIMKSIIPAIVHYSPDCKILVVSNPVDILTYIVWKISGLPVTRVIGSGCNLDSARFRYLIGEKLGVHPTSCHGWIIGEHGDSSVPLWSGVNVAGVALKTLDPKLGTDSDKEHWKNIHKQVIQSAYEIIKLKGYTSWAIGLSVMDLVGSILKNLRRVHPVSTMVKGLYGIKEELFLSIPCVLGRNGVSDVVKINLNSEEEALFKKSAETLWNIQKDLIF

SEQ ID NO: 7661 - protein, 332 aa, Homo sapiens; identical to SEQ ID NO: 7660

SEQ ID NO: 7662 - protein, 444 aa, Homo sapiens
MIEDNKENKDHSLERGRASLIFSLKNEVGGLIKALKIFQEKHVNLLHIESRKSKRRNSEFEIFVDCDINREQLNDIFHLLKSHTNVLSVNLPDNFTLKEDGMETVPWFPKKISDLDHCANRVLMYGSELDADHPGFKDNVYRKRRKYFADLAMNYKHGDPIPKVEFTEEEIKTWGTVFQELNKLYPTHACREYLKNLPLLSKYCGYREDNIPQLEDVSNFLKERTGFSIRPVAGYLSPRDFLSGLAFRVFHCTQYVRHSSDPFYTPEPDTCHELLGHVPLLAEPSFAQFSQEIGLASLGASEEAVQKLATCYFFTVEFGLCKQDGQLRVFGAGLLSSISELKHALSGHAKVKPFDPKITCKQECLITTFQDVYFVSESFEDAKEKMREFTKTIKRPFGVKYNPYTRSIQILKDTKSITSAMNELQHDLDVVSDALAKVSRKPSI

SEQ ID NO: 7663 - protein, 444 aa, Homo sapiens; identical to SEQ ID NO: 7662

SEQ ID NO: 7664 - protein, 565 aa, Homo sapiens
MNYEGARSERENHAADDSEGGALDMCCSERLPGLPQPIVMEALDEAEGLQDSQREMPPPPPPSPPSDPAQKPPPRGAGSHSLTVRSSLCLFAASQFLLACGVLWFSGYGHIWSQNATNLVSSLLTLLKQLEPTAWLDSGTWGVPSLLLVFLSVGLVLVTTLVWHLLRTPPEPPTPLPPEDRRQSVSRQPSFTYSEWMEEKIEDDFLDLDPVPETPVFDCVMDIKPEADPTSLTVKSMGLQERRGSNVSLTLDMCTPGCNEEGFGYLMSPREESAREYLLSASRVLQAEELHEKALDPFLLQAEFFEIPMNFVDPKEYDIPGLVRKNRYKTILPNPHSRVCLTSPDPDDPLSSYINANYIRGYGGEEKVYIATQGPIVSTVADFWRMVWQEHTPIIVMITNIEEMNEKCTEYWPEEQVAYDGVEITVQKVIHTEDYRLRLISLKSGTEERGLKHYWFTSWPDQKTPDRAPPLLHLVREVEEAAQQEGPHCAPIIVHCSAGIGRTGCFIATSICCQQLRQEGVVDILKTTCQLRQDRGGMIQTCEQYQFVHHVMSLYEKQLSHQSPE

SEQ ID NO: 7665 - protein, 719 aa, Homo sapiens [sequence omitted]

SEQ ID NO: 7666 - protein, 553 aa, Homo sapiens
MNYEGARSERENHAADDSEGGALDMCCSERLPGLPQPIVMEALDEAEGLQDSQREMPPPPPPSPPSDPAQKPPPRGAGSHSLTVRSSLCLFAASQFLLACGVLWFSGYGHIWSQNATNLVSSLLTLLKQLEPTAWLDSGTWGVPSLLLVFLSVGLVLVTTLVWHLLRTPPEPPTPLPPEDRRQSVSRQPSFTYSEWMEEKIEDDFLDLDPVPETPVFDCVMDIKPEADPTSLTVKSMGLQERRGSNVSLTLDMCTPGCNEEGFGYLMSPREESAREYLLSASRVLQAEELHEKALDPFLLQAEFFEIPMNFVDPKEYDIPGLVRKNRYKTILPNPHSRVCLTSPDPDDPLSSYINANYIRGYGGEEKVYIATQGPIVSTVADFWRMVWQEHTPIIVMITNIEEMNEKCTEYWPEEQVAYDGVEITVQKVIHTEDYRLRLISLKSGTEERGLKHYWFTSWPDQKTPDRAPPLLHLVREVEEAAQQEGPHCAPIIVHCSAGIGRTGCFIATSICCQQLRQEGVVDILKTTCQLRQDSPSLHDPAPTVHLCRAGAA

SEQ ID NO: 7667 - protein, 232 aa, Homo sapiens
MRAVPVCAPRHEPLRKAAVPPVPRMTALLLQGSLGTAQPESRPSPRALPRVLGLLPASSPSVSSLCPLSAWPDPYPPALLFLLYILGSGGQGREGTCQARPGAPGPDPHHADPGLQFLTMVPSIPDPECFRATLCVLLQCVLSVHPSLPSVPDTVSPQPGRGNELQPLSNRTCLPRPHPHFSQKADDGELGMGSSRRSPESFQLRESSLGWSGHHSQGGLWVSDALRRVPSL

SEQ ID NO: 7668 - protein, 541 aa, Homo sapiens
MCCSERLPGLPQPIVMEALDEAEGLQDSQREMPPPPPPSPPSDPAQKPPPRGAGSHSLTVRSSLCLFAASQFLLACGVLWFSGYGHIWSQNATNLVSSLLTLLKQLEPTAWLDSGTWGVPSLLLVFLSVGLVLVTTLVWHLLRTPPEPPTPLPPEDRRQSVSRQPSFTYSEWMEEKIEDDFLDLDPVPETPVFDCVMDIKPEADPTSLTVKSMGLQERRGSNVSLTLDMCTPGCNEEGFGYLMSPREESAREYLLSASRVLQAEELHEKALDPFLLQAEFFEIPMNFVDPKEYDIPGLVRKNRYKTILPNPHSRVCLTSPDPDDPLSSYINANYIRGYGGEEKVYIATQGPIVSTVADFWRMVWQEHTPIIVMITNIEEMNEKCTEYWPEEQVAYDGVEITVQKVIHTEDYRLRLISLKSGTEERGLKHYWFTSWPDQKTPDRAPPLLHLVREVEEAAQQEGPHCAPIIVHCSAGIGRTGCFIATSICCQQLRQEGVVDILKTTCQLRQDRGGMIQTCEQYQFVHHVMSLYEKQLSHQSPE

SEQ ID NO: 7669 - protein, 979 aa, Homo sapiens
MRRPRRPGGLGGSGGLRLLLCLLLLSSRPGGCSAVSAHGCLFDRRLCSHLEVCIQDGLFGQCQVGVGQARPLLQVTSPVLQRLQGVLRQLMSQGLSWHDDLTQYVISQEMERIPRLRPPEPRPRDRSGLAPKRPGPAGELLLQDIPTGSAPAAQHRLPQPPVGKGGAGASSSLSPLQAELLPPLLEHLLLPPQPPHPSLSYEPALLQPYLFHQFGSRDGSRVSEGSPGMVSVGPLPKAEAPALFSRTASKGIFGDHPGHSYGDLPGPSPAQLFQDSGLLYLAQELPAPSRARVPRLPEQGSSSRAEDSPEGYEKEGLGDRGEKPASPAVQPDAALQRLAAVLAGYGVELRQLTPEQLSTLLTLLQLLPKGAGRNPGGVVNVGADIKKTMEGPVEGRDTAELPARTSPMPGHPTASPTSSEVQQVPSPVSSEPPKAARPPVTPVLLEKKSPLGQSQPTVAGQPSARPAAEEYGYIVTDQKPLSLAAGVKLLEILAEHVHMSSGSFINISVVGPALTFRIRHNEQNLSLADVTQQAGLVKSELEAQTGLQILQTGVGQREEAAAVLPQTAHSTSPMRSVLLTLVALAGVAGLLVALAVALCVRQHARQQDKERLAALGPEGAHGDTTFEYQDLCRQHMATKSLFNRAEGPPEPSRVSSVSSQFSDAAQASPSSHSSTPSWCEEPAQANMDISTGHMILAYMEDHLRNRDRLAKEWQALCAYQAEPNTCATAQGEGNIKKNRHPDFLPYDHARIKLKVESSPSRSDYINASPIIEHDPRMPAYIATQGPLSHTIADFWQMVWESGCTVIVMLTPLVEDGVKQCDRYWPDEGASLYHVYEVNLVSEHIWCEDFLVRSFYLKNVQTQETRTLTQFHFLSWPAEGTPASTRPLLDFRRKVNKCYRGRSCPIIVHCSDGAGRTGTYILIDMVLNRMAKGVKEIDIAATLEHVRDQRPGLVRSKDQFEFALTAVAEEVNAILKALPQ

SEQ ID NO: 7670 - protein, 591 aa, Homo sapiens
MEGPVEGRDTAELPARTSPMPGHPTASPTSSEVQQVPSPVSSEPPKAARPPVTPVLLEKKSPLGQSQPTVAGQPSARPAAEEYGYIVTDQKPLSLAAGVKLLEILAEHVHMSSGSFINISVVGPALTFRIRHNEQNLSLADVTQQAGLVKSELEAQTGLQILQTGVGQREEAAAVLPQTAHSTSPMRSVLLTLVALAGVAGLLVALAVALCVRQHARQQDKERLAALGPEGAHGDTTFEYQDLCRQHMATKSLFNRAEGPPEPSRVSSVSSQFSDAAQASPSSHSSTPSWCEEPAQANMDISTGHMILAYMEDHLRNRDRLAKEWQALCAYQAEPNTCATAQGEGNIKKNRHPDFLPYDHARIKLKVESSPSRSDYINASPIIEHDPRMPAYIATQGPLSHTIADFWQMVWESGCTVIVMLTPLVEDGVKQCDRYWPDEGASLYHVYEVNLVSEHIWCEDFLVRSFYLKNVQTQETRTLTQFHFLSWPAEGTPASTRPLLDFRRKVNKCYRGRSCPIIVHCSDGAGRTGTYILIDMVLNRMAKGVKEIDIAATLEHVRDQRPGLVRSKDQFEFALTAVAEEVNAILKALPQ

SEQ ID NO: 7671 - protein, 391 aa, Homo sapiens
MPCNCTSYREGHHWYQLRQALNQRLLKPAEAALYTDAFNEVIDDFMTRLDQLRAESASGNQVSDMAQLFYYFALEAICYILFEKRIGCLQRSIPEDTVTFVRSIGLMFQNSLYATFLPKWTRPVLPFWKRYLDGWNAIFSFGKKLIDEKLEDMEAQLQAAGPDGIQVSGYLHFLLASGQLSPREAMGSLPELLMAGVDTTSNTLTWALYHLSKDPEIQEALHEEVVGVVPAGQVPQHKDFAHMPLLKAVLKETLRLYPVVPTNSRIIEKEIEVDGFLFPKNTQFVFCHYVVSRDPTAFSEPESFQPHRWLRNSQPATPRIQHPFGSVPFGYGVRACLGRRIAELEMQLLLARLIQKYKVVLAPETGELKSVARIVLVPNKKVGLQFLQRQC

SEQ ID NO: 7672 - protein, 531 aa, Homo sapiens
MAALGCARLRWALRGAGRGLCPHGARAKAAIPAALPSDKATGAPGAGPGVRRRQRSLEEIPRLGQLRFFFQLFVQGYALQLHQLQVLYKAKYGPMWMSYLGPQMHVNLASAPLLEQVMRQEGKYPVRNDMELWKEHRDQHDLTYGPFTTEGHHWYQLRQALNQRLLKPAEAALYTDAFNEVIDDFMTRLDQLRAESASGNQVSDMAQLFYYFALEAICYILFEKRIGCLQRSIPEDTVTFVRSIGLMFQNSLYATFLPKWTRPVLPFWKRYLDGWNAIFSFGKKLIDEKLEDMEAQLQAAGPDGIQVSGYLHFLLASGQLSPREAMGSLPELLMAGVDTTSNTLTWALYHLSKDPEIQEALHEEVVGVVPAGQVPQHKDFAHMPLLKAVLKETLRLYPVVPTNSRIIEKEIEVDGFLFPKNTQFVFCHYVVSRDPTAFSEPESFQPHRWLRNSQPATPRIQHPFGSVPFGYGVRACLGRRIAELEMQLLLARLIQKYKVVLAPETGELKSVARIVLVPNKKVGLQFLQRQC

SEQ ID NO: 7673 - protein, 411 aa, Homo sapiens
MTKIFTLLRKYEPHGPLVNSEYYTGWLDYWGQNHSTRSVSAVTKGLENMLKLGASVNMYMFHGGTNFGYWNGADKKGRFLPITTSYDYDAPISEAGDPTPKLFALRDVISKFQEVPLGPLPPPSPKMMLGPVTLHLVGHLLAFLDLLCPRGPIHSILPMTFEAVKQDHGFMLYRTYMTHTIFEPTPFWVPNNGVHDRAYVMVDGVFQGVVERNMRDKLFLTGKLGSKLDILVENMGRLSFGSNSSDFKGLLKPPILGQTILTQWMMFPLKIDNLVKWWFPLQLPKWPYPQAPSGPTFYSKTFPILGSVGDTFLYLPGWTKGQVWINGFNLGRYWTKQGPQQTLYVPRFLLFPRGALNKITLLELEDVPLQPQVQFLDKPILNSTSTLHRTHINSLSADTLSASEPMELSGH

SEQ ID NO: 7674 - protein, 411 aa, Homo sapiens; identical to SEQ ID NO: 7673

SEQ ID NO: 7675 - protein, 411 aa, Homo sapiens; identical to SEQ ID NO: 7673

SEQ ID NO: 7676 - protein, 411 aa, Homo sapiens; identical to SEQ ID NO: 7673

SEQ ID NO: 7677 - protein, 473 aa, Homo sapiens
MLKAVILIGGPQKGTRFRPLSFEVPKPLFPVAGVPMIQHHIEACAQVPGMQEILLIGFYQPDEPLTQFLEAAQQEFNLPVRYLQEFAPLGTGGGLYHFRDQILAGSPEAFFVLNADVCSDFPLSAMLEAHRRQRHPFLLLGTTANRTQSLNYGCIVENPQTHEVLHYVEKPSTFISDIINCGIYLFSPEALKPLRDVFQRNQQDGQLEDSPGLWPGAGTIRLEQDVFSALAGQGQIYVHLTDGIWSQIKSAGSALYASRLYLSRYQDTHPERLAKHTPGGPWIRGTQPAPIPNLWLPPQPSEPGFLTSSPELKPQSLPLPDQIRFGIFAPRASLLLLGNVYIHPTAKVAPSAVLGPNVSIGKGVTVGEGVRLRESIVLHGATLQEHTCVLHSIVGWGSTVGRWARVEGTPSDPNPNDPRARMDSESLFKDGKLLPAITILGCRVRIPAEVLILNSIVLPHKELSRSFTNQIIL

SEQ ID NO: 7678 - protein, 420 aa, Homo sapiens
MLKAVILIGGPQKGTRFRPLSFEVPKPLFPVAGVPMIQHHIEACAQVPGMQEILLIGFYQPDEPLTQFLEAAQQEFNLPVRYLQEFAPLGTGGGLYHFRDQILAGSPEAFFVLNADVCSDFPLSAMLEAHRRQRHPFLLLGTTANRTQSLNYGCIVENPQTHEVLHYVEKPSTFISDIINCGIYLFSPEALKPLRDVFQRNQQDGQLEDSPGLWPGAGTIRLEQDVFSALAGQGQIYVHLTDGIWSQIKSAGSALYASRLYLSRYQDTHPERLAKHTPGGPWIRGNVYIHPTAKVAPSAVLGPNVSIGKGVTVGEGVRLRESIVLHGATLQEHTCVLHSIVGWGSTVGRWARVEGTPSDPNPNDPRARMDSESLFKDGKLLPAITILGCRVRIPAEVLILNSIVLPHKELSRSFTNQIIL

SEQ ID NO: 7679 - protein, 165 aa, Homo sapiens
MLEAHRRQRHPFLLLGTTANRTQSLNYGCIVENPQTHEVLHYVEKPSTFISDIINCGIYLFSPEALKPLRDVFQRNQQDGQLEDSPGLWPGAGTIRLEQDVFSALAGQGQIYVHLTDGIWSQIKSAGSALYASRLYLSRYQDTHPERLAKHTPGGPWIRGPLFCF

SEQ ID NO: 7680 - protein, 420 aa, Homo sapiens; identical to SEQ ID NO: 7678

SEQ ID NO: 7681 - protein, 728 aa, Homo sapiens [sequence omitted]

SEQ ID NO: 7682 - protein, 726 aa, Homo sapiens
MSPAPDAAPAPASISLFDLSADAPVFQGLSLVSHAPGEALARAPRTSCSGSGERESPERKLLQGPMDISEKLFCSTCDQTFQNHQEQREHYKLDWHRFNLKQRLKDKPLLSALDFEKQSSTGDLSSISGSEDSDSASEEDLQTLDRERATFEKLSRPPGFYPHRVLFQNAQGQFLYAYRCVLGPHQDPPEEAELLLQNLQSRGPRDCVVLMAAAGHFAGAIFQGREVVTHKTFHRYTVRAKRGTAQGLRDARGGPSHSAGANLRRYNEATLYKDVRDLLAGPSWAKALEEAGTILLRAPRSGRSLFFGGKGAPLQRGDPRLWDIPLATRRPTFQELQRVLHKLTTLHVYEEDPREAVRLHSPQTHWKTVREERKKPTEEEIRKICRDEKEALGQNEESPKQGSGSEGEDGFQVELELVELTVGTLDLCESEVLPKRRRRKRNKKEKSRDQEAGAHRTLLQQTQEEEPSTQSSQAVAAPLGPLLDEAKAPGQPELWNALLAACRAGDVGVLKLQLAPSPADPRVLSLLSAPLGSGGFTLLHAAAAAGRGSVVRLLLEAGADPTVQDSRARPPYTVAADKSTRNEFRRFMEKNPDAYDYNKAQVPGPLTPEMEARQATRKREQKAARRQREEQQQRQQEQEEREREEQRRFAALSDREKRALAAERRLAAQLGAPTSPIPDSAIVNTRRCWSCGASLQGLTPFHYLDFSFCSTRCLQDHRRQAGRPSS

SEQ ID NO: 7683 - protein, 726 aa, Homo sapiens; identical to SEQ ID NO: 7682

SEQ ID NO: 7684 - protein, 260 aa, Homo sapiens
MAESEAETPSTPGEFESKYFEFHGVRLPPFCRGKMEEIANFPVRPSDVWIVTYPKSGTSLLQEVVYLVSQGADPDEIGLMNIDEQLPVLEYPQPGLDIIKELTSPRLIKSHLPYRFLPSDLHNGDSKVIYMARNPKDLVVSYYQFHRSLRTMSYRGTFQEFCRRFMNDKLGYGSWFEHVQEFWEHRMDSNVLFLKYEDMHRDLVTMVEQLARFLGVSCDKAQLEALTEHCHQLVDQCCNAEALPVGRAHCVFARKIFLSW

SEQ ID NO: 7685 - protein, 286 aa, Homo sapiens
MAESEAETPSTPGEFESKYFEFHGVRLPPFCRGKMEEIANFPVRPSDVWIVTYPKSGTSLLQEVVYLVSQGADPDEIGLMNIDEQLPVLEYPQPGLDIIKELTSPRLIKSHLPYRFLPSDLHNGDSKVIYMARNPKDLVVSYYQFHRSLRTMSYRGTFQEFCRRFMNDKLGYGSWFEHVQEFWEHRMDSNVLFLKYEDMHRTALPAPIGQVQRDPGIDLECSRSISKASFSSVAGRTASGPSSSLVCVSGRVGLWKDIFTVSMNEKFDLVYKQKMGKCDLTFDFYL

SEQ ID NO: 7686 - protein, 284 aa, Homo sapiens
MAESEAETPSTPGEFESKYFEFHGVRLPPFCRGKMEEIANFPVRPSDVWIVTYPKSGTSLLQEVVYLVSQGADPDEIGLMNIDEQLPVLEYPQPGLDIIKELTSPRLIKSHLPYRFLPSDLHNGDSKVIYMARNPKDLVVSYYQFHRSLRTMSYRGTFQEFCRRFMNDKLGYGSWFEHVQEFWEHRMDSNVLFLKYEDMHRDLVTMVEQLARFLGVSCDKAQLEALTEHCHQLVDQCCNAEALPVGRGRVGLWKDIFTVSMNEKFDLVYKQKMGKCDLTFDFYL

SEQ ID NO: 7687 - protein, 561 aa, Homo sapiens
MLKLAQQCLERAQSTAAKLGKTRLKPTMPAAAPIPQPAGRHRRVYSDEGGKLSPFLPPEIFQKLQGAESQSCKKELTPLEEASLQNQKLKAAYEARMARLDPSQAMQKTSLTLSLQRQMMENLVIAKAREETLQRKMEERRLRLQEAANRRFCSQVALTPEEREQRALYAAILEYEQDHDWPKHWKAKLKRNPGDLSLVTSLVSHLLSLPDHPIAQLLRRLQCSVYSALYPAVSRAAAPAPGCCPPTPNPGSRRLRPSQSLHCMLSPPEPSAAPRPQDSPPTPPLQPGPVGSPSPLGDTASGLPDKDSSFEDLEQFLGTSERQGRGRGVQPEPQLQQLKTAVEEIHNAVDRLLSLTLLAFEGLNTAASKDRCLACIEEPFFSPLWPLLLALYRSVHRAREAALSRSMELYRNAPPTAIGIPTKLLPQNPEAKGATGYPYCAAAQELGLLVLESCPQKKLECIVRTLRIICVCAEDYCPTPEATPQAGPPPIAAAAIGADDLLPILSFVVLRSGLPQLVSECAALEEFIHEGYLIGEEGYCLTSLQSALSYVELLPRGGLAK

SEQ ID NO: 7688 - protein, 638 aa, Homo sapiens
MAAAAGDGTVKPLQSAMKLANGAIELDTGNRPREAYTEYLRSIHYISQVLLEEVETTKEAGETVPPDTSKMLKLAQQCLERAQSTAAKLGKTRLKPTMPAAAPIPQPAGRHRRVYSDEGGKLSPFLPPEIFQKLQGAESQSCKKELTPLEEASLQNQKLKAAYEARMARLDPSQAMQKTSLTLSLQRQMMENLVIAKAREETAAFLTALLQRKMEERRLRLQEAANRRFCSQVALTPEEREQRALYAAILEYEQDHDWPKHWKAKLKRNPGDLSLVTSLVSHLLSLPDHPIAQLLRRLQCSVYSALYPAVSRAAAPAPGCCPPTPNPGSRRLRPSQSLHCMLSPPEPSAAPRPQDSPPTPPLQPGPVGSPSPLGDTASGLPDKDSSFEDLEQFLGTSERQGRGRGVQPEPQLQQLKTAVEEIHNAVDRLLSLTLLAFEGLNTAASKDRCLACIEEPFFSPLWPLLLALYRSVHRAREAALSRSMELYRNAPPTAIGIPTKLLPQNPEAKGATGYPYCAAAQELGLLVLESCPQKKLECIVRTLRIICVCAEDYCPTPEATPQAGPPPIAAAAIGADDLLPILSFVVLRSGLPQLVSECAALEEFIHEGYLIGEEGYCLTSLQSALSYVELLPRGGLAK

SEQ ID NO: 7689 - protein, 569 aa, Homo sapiens
MLKLAQQCLERAQSTAAKLGKTRLKPTMPAAAPIPQPAGRHRRVYSDEGGKLSPFLPPEIFQKLQGAESQSCKKELTPLEEASLQNQKLKAAYEARMARLDPSQAMQKTSLTLSLQRQMMENLVIAKAREETAAFLTALLQRKMEERRLRLQEAANRRFCSQVALTPEEREQRALYAAILEYEQDHDWPKHWKAKLKRNPGDLSLVTSLVSHLLSLPDHPIAQLLRRLQCSVYSALYPAVSRAAAPAPGCCPPTPNPGSRRLRPSQSLHCMLSPPEPSAAPRPQDSPPTPPLQPGPVGSPSPLGDTASGLPDKDSSFEDLEQFLGTSERQGRGRGVQPEPQLQQLKTAVEEIHNAVADRLLSLTLLAFEGLNTAASKDRCLACIEEPFFSPLWPLLLALYRSVHRAREAALSRSMELYRNAPPTAIGIPTKLLPQNPEAKGATGYPYCAAAQELGLLVLESCPQKKLECIVRTLRIICVCAEDYCPTPEATPQAGPPPIAAAAIGADDLLPILSFVVLRSGLPQLVSECAALEEFIHEGYLIGEEGYCLTSLQSALSYVELLPRGGLAK

SEQ ID NO: 7690 - protein, 58 aa, Homo sapiens
MDAVAVYHGKISRETGEKLLLATGLDGSYLLRDSESVPGVYCLCVLQHLGYIKDISGK

SEQ ID NO: 7691 - protein, 62 aa, Homo sapiens
MDAVAVYHGKISRETGEKLLLATGLDGSYLLRDSESVPGVYCLCVLISEARSRHCNTSAVSS

SEQ ID NO: 7692 - protein, 128 aa, Homo sapiens
MDAVAVYHGKISRETGEKLLLATGLDGSYLLRDSESVPGVYCLCVLYHGYIYTYRVSQTETGSWSAETAPGVHKRYFRKIKNLISAFQKPDQGIVIPLQYPVEKKSSARSTQGTTGIREDPDVCLKAP

SEQ ID NO: 7693 - protein, 376 aa, Homo sapiens
MELRSYQWEVIMPALEGKNIIIWLPTGAGKTRAAAYVAKRHLETVDGAKVVVLVNRVHLVTQHGEEFRRMLDGRWTVTTLSGDMGPRAGFGHLARCHDLLICTAELLQMALTSPEEEEHVELTVFSLIVVDECHHTHKDTVYNVIMSQYLELKLQRAQPLPQVLGLTASPGTGGASKLDGAINHVLQLCANLDTWCIMSPQNCCPQLQEHSQQPCKQYNLCHRRSQDPFGDLLKKLMDQIHDHLEMPELSRKFGTQMYEQQVVKLSEAAALAGLQEQRVYALHLRRYNDALLIHDTVRAVDALAALQDFYHREHVTKTQILCAERRLLALFDEGPARSDPEVPRWNPEPSGGHECGGGGAGHPTLQCGGALWALDQ

SEQ ID NO: 7694 - protein, 678 aa, Homo sapiens
MELRSYQWEVIMPALEGKNIIIWLPTGAGKTRAAAYVAKRHLETVDGAKVVVLVNRVHLVTQHGEEFRRMLDGRWTVTTLSGDMGPRAGFGHLARCHDLLICTAELLQMALTSPEEEEHVELTVFSLIVVDECHHTHKDTVYNVIMSQYLELKLQRAQPLPQVLGLTASPGTGGASKLDGAINHVLQLCANLDTWCIMSPQNCCPQLQEHSQQPCKQYNLCHRRSQDPFGDLLKKLMDQIHDHLEMPELSRKFGTQMYEQQVVKLSEAAALAGLQEQRVYALHLRRYNDALLIHDTVRAVDALAALQDFYHREHVTKTQILCAERRLLALFDDRKNELAHLATHGPENPKLEMLEKILQRQFSSSNSPRGIIFTRTRQSAHSLLLWLQQQQGLQTVDIRAQLLIGAGNSSQSTHMTQRDQQEVIQKFQDGTLNLLVATSVAEEGLDIPHCNVVVRYGLLTNEISMVQARGRARADQSVYAFVATEGSRELKRELINEALETLMEQAVAAVQKMDQAEYQAKIRDLQQAALTKRAAQAAQRENQRQQFPVEHVQLLCINCMVAVGHGSDLRKVEGTHHVNVNPNFSNYYNVSRDPVVINKVFKDWKPGGVISCRNCGEVWGLQMIYKSVKLPVLKVRSMLLETPQGRIQAKKWSRVPFSVPDFDFLQHCAENLSDLSLD

SEQ ID NO: 7695 - protein, 678 aa, Homo sapiens; identical to SEQ ID NO: 7694

SEQ ID NO: 7696 - protein, 368 aa, Homo sapiens
MELRSYQWEVIMPALEGKNIIIWLPTGAGKTRAAAYVAKRHLETVDGAKVVVLVNRVHLVTQHGEEFRRMLDGRWTVTTLSGDMGPRAGFGHLARCHDLLICTAELLQMALTSPEEEEHVELTVFSLIVVDECHHTHKDTVYNVIMSQYLELKLQRAQPLPQVLGLTASPGTGGASKLDGAINHVLQLCANLDTWCIMSPQNCCPQLQEHSQQPCKQYNLCHRRSQDPFGDLLKKLMDQIHDHLEMPELSRKFGTQMYEQQVVKLSEAAALAGLQEQRVYALHLRRYNDALLIHDTVRAVDALAALQDFYHREHVTKTQILCAERRLLALFDDRKNELAHLATHVPFSVPDFDFLQHCAENLSDLSLD

SEQ ID NO: 7697 - protein, 14 aa, Homo sapiens
MSLRHHGEGEGQSK

SEQ ID NO: 7698 - protein, 473 aa, Homo sapiens
MASCVGSRTLSKDDVNYKMHFRMINEQQVEDITIDFFYRPHTITLLSFTIVSLMYFAFTRDDSVPEDNIWRGILSVIFFFLIISVLAFPNGPFTRPHPALWRMVFGLSVLYFLFLVFLLFLNFEQVKSLMYWLDPNLRYATREADVMEYAVNCHVITWERIISHFDIFAFGHFWGWAMKALLIRSYGLCWTISITWELTELFFMHLLPNFAECWWDQVILDILLCNGGGIWLGMVVCRFLEMRTYHWASFKDIHTTTGKIKRAVLQFTPASWTYVRWFDPKSSFQRVAGVYLFMIIWQLTELNTFFLKHIFVFQASHPLSWGRILFIGGITAPTVRQYYAYLTDTQCKRVGTQCWVFGVIGFLEAIVCIKFGQDLFSKTQILYVVLWLLCVAFTTFLCLYGMIWYAEHYGHREKTYSECEDGTYSPEISWHHRKGTKGSEDSPPKHAGNNESHSSRRRNRHSKSKVTNGVGKK

SEQ ID NO: 7699 - protein, 108 aa, Homo sapiens
MASCVGSRTLSKDDVNYKMHFRMINEQQVEDITIDFFYRPHTITLLSFTIVSLMYFAFTRDDSVPEDNIWRGILSVIFFFLIISVLAFPNGVCCELPCDHLGEDYQPL

SEQ ID NO: 7700 - protein, 387 aa, Homo sapiens
MGAFLDKPKTEKHNAHGAGNGLRYGLSSMQGWRVEMEDAHTAVVGIPHGLEDWSFFAVYDGHAGSRVANYCSTHLLEHITTNEDFRAAGKSGSALELSVENVKNGIRTGFLKIDEYMRNFSDLRNGMDRSGSTAVGVMISPKHIYFINCGDSRAVLYRNGQVCFSTQDHKPCNPREKERIQNAGGSVMIQRVNGSLAVSRALGDYDYKCVDGKGPTEQLVSPEPEVYEILRAEEDEFIILACDGIWDVMSNEELCEYVKSRLEVSDDLENVCNWVVDTCLHKGSRDNMSIVLVCFSNAPKVSDEAVKKDSELDKHLESRVEEIMEKSGEEGMPDLAHVMRILSAENIPNLPPGGGLAGKRNVIEAVYSRLNPHRESDGGAGDLEDPW

SEQ ID NO: 7701 - protein, 289 aa, Homo sapiens
MGAFLDKPKTEKHNAHGAGNGLRYGLSSMQGWRVEMEDAHTAVVGIPHGLEDWSFFAVYDGHAGSRVANYCSTHLLEHITTNEDFRAAGKSGSALELSVENVKNGIRTGFLKIDEYMRNFSDLRNGMDRSGSTAVGVMISPKHIYFINCGDSRAVLYRNGQVCFSTQDHKPCNPREKERIQNAGGSVMIQRVNGSLAVSRALGDYDYKCVDGKGPTEQLVSPEPEVYEILRAEEDEFIILACDGIWDVMSNEELCEYVKSRLEVSDDLENVCNWVVDTCLHKVCKLFCH

SEQ ID NO: 7702 - protein, 479 aa, Homo sapiens
MGAFLDKPKTEKHNAHGAGNGLRYGLSSMQGWRVEMEDAHTAVVGIPHGLEDWSFFAVYDGHAGSRVANYCSTHLLEHITTNEDFRAAGKSGSALELSVENVKNGIRTGFLKIDEYMRNFSDLRNGMDRSGSTAVGVMISPKHIYFINCGDSRAVLYRNGQVCFSTQDHKPCNPREKERIQNAGGSVMIQRVNGSLAVSRALGDYDYKCVDGKGPTEQLVSPEPEVYEILRAEEDEFIILACDGIWDVMSNEELCEYVKSRLEVSDDLENVCNWVVDTCLHKGSRDNMSIVLVCFSNAPKVSDEAVKKDSELDKHLESRVEEIMEKSGEEGMPDLAHVMRILSAENIPNLPPGGGLAGKRNVIEAVYSRLNPHRESDGASDEAEESGSQGKLVEALRQMRINHRGNYRQLLEEMLTSYRLAKVEGEESPAEPAATATSSNSDAGNPVTMQESHTESESGLAELDSSNEDAGTKMSGEKI

SEQ ID NO: 7703 - protein, 100 aa, Homo sapiens
MSIVLVCFSNAPKVSDEAVKKDSELDKHLESRVEEIMEKSGEEGMPDLAHVMRILSAENIPNLPPGGGLAGKRNVIEAVYSRLNPHRESDGGAGDLEDPW

SEQ ID NO: 7704 - protein, 479 aa, Homo sapiens; identical to SEQ ID NO: 7702

SEQ ID NO: 7705 - protein, 274 aa, Homo sapiens
MLSVAARSGPFAPVLSATSRGVAGALRPLVQATVPATPEQPVLDLKRPFLSRESLSGQAVRRPLVASVGLNVPASVCYSHTDIKVPDFSEYRRLEVLDSTKSSRESSEARKGFSYLVTGVTTVGVAYAAKNAVTQFVSSMSASADVLALAKIEIKLSDIPEGKNMAFKWRGKPLFVRHRTQKEIEQEAAVELSQLRDPQHDLDRVKKPEWVILIGVCTHLGCVPIANAGDFGGYYCPCHGSHYDASGRIRLGPAPLNLEVPTYEFTSDDMVIVG

SEQ ID NO: 7706 - protein, 274 aa, Homo sapiens; identical to SEQ ID NO: 7705

SEQ ID NO: 7707 - protein, 362 aa, Homo sapiens
MEEYQQSQVKLQDFFQCGTYVCPFISDALVLRRTILPTQVENMQQPNAHRISQPIRQIIYGLLLNASPHLDKTSWNALPPQPLAFSEVERINKNIRTSIIDAVELAKDHSDLSRLTELSLRRRQMLLLETLKVKQTILEPIPTSLKLPIAVSCYWLQHTETKAKLHHLQSLLLTMLVGPLIAIINSPGKEELQEDGAKMLYAEFQRVKAQTRLGTRLDLDTAHIFCQWQSCLQMGMYLNQLLSTPLPEPDLTRLYSGSLVHGLCQQLLASTSVESLLSICPEAKQLYEYLFNATRSYAPAEIFLPKGRSNSKKKRQKKQNTSCSKNRGRTTAHTKCWYEGNNRFGLLMVENLEEHSEASNIE

SEQ ID NO: 7708 - protein, 679 aa, Homo sapiens
MGIRGLMSFVEDHSNEFFTDLKLRDTKIVIDGYALFHRLCFSSNLDLRYGGDYDSFADVVQKFFESLFACNICPYVVLDGGCDISDKKLTTLKDRAREKIQMAHSLSVGGSGYVCPLLIREVFIQVLIKLRVCFVQCFSEADRDIMTLANHWNCPVLSSDSDFCIFDLKTGFCPLNSFQWRNMNTIKGTQNYIPAKCFSLDAFCHHFSNMNKALLPLFAVLCGNDHVNLPIMETFLSKARLPLGATSSKGRRHHRILGLLNWLSHFANPTEALDNVLKYLPKKDRENVKELLCCSMEEYQQSQVKLQDFFQCGTYVCPDALNLGLPEWVLVALAKGQLSPFISDALVLRRTILPTQVENMQQPNAHRISQPIRQIIYGLLLNASPHLDKTSWNALPPQPLAFSEVERINKNIRTSIIDAVELAKDHSDLSRLTELSLRRRQMLLLETLKVKQTILEPIPTSLKLPIAVSCYWLQHTETKAKLHHLQSLLLTMLVGPLIAIINSPGKEELQEDGAKMLYAEFQRVKAQTRLGTRLDLDTAHIFCQWQSCLQMGMYLNQLLSTPLPEPDLTRLYSGSLVHGLCQQLLASTSVESLLSICPEAKQLYEYLFNATRSYAPAEIFLPKGRSNSKKKRQKKQNTSCSKNRGRTTAHTKCWYEGNNRFGLLMVENLEEHSEASNIE

SEQ ID NO: 7709 - protein, 511 aa, Homo sapiens [sequence omitted]

SEQ ID NO: 7710 - protein, 563 aa, Homo sapiens
MKPGATGESDLAEVLPQHKFDSKSLEAYLNQHLSGFGAEREATLTIAQYRAGKSNPTFYLQKGFQTYVLRKKPPGSLLPKAHQIDREFKVQKALFSIGFPVPKPILYCSDTSVIGTEFYVMEHVQGRIFRDLTIPGLSPAERSAIYVATVETLAQLHSLNIQSLQLEGYGIGAGYCKRQVSTWTKQYQAAAHQDIPAMQQLSEWLMKNLPDNDNEENLIHGDFRLDNIVFHPKECRVIAVLDWELSTIGHPLSDLAHFSLFYFWPRTVPMINQGSYSENSGIPSMEELISIYCRCRGINSILPNWNFFLALSYFKMAGIAQGVYSRYLLGNNSSEDSFLFANIVQPLAETGLQLSKRTFSTVLPQIDTTGQLFVQTRKGQEVLIKVKHFMKQHILPAEKEVTEFYVQNENSVDKWGKPLVIDKLKEMAKVEGLWNLFLPAVSGLSHVDYALIAEETGKCFFAPDVFNCQAPDTGNMEVLHLYGSEEQKKQWLEPLLQGNITSCFCMTEPDVASSDATNIECSIQRDEDSYVINGKKWWSSGAGNPKCKIAIVLGRTQNTSLSR

SEQ ID NO: 7711 - protein, 660 aa, Homo sapiens
MEHVQGRIFRDLTIPGLSPAERSAIYVATVETLAQLHSLNIQSLQLEGYGIGAGYCKRQVSTWTKQYQAAAHQDIPAMQQLSEWLMKNLPDNDNEENLIHGDFRLDNIVFHPKECRVIAVLDWELSTIGHPLSDLAHFSLFYFWPRTVPMINQGSYSENSGIPSMEELISIYCRCRGINSILPNWNFFLALSYFKMAGIAQGVYSRYLLGNNSSEDSFLFANIVQPLAETGLQLSKRTFSTVLPQIDTTGQLFVQTRKGQEVLIKVKHFMKQHILPAEKEVTEFYVQNENSVDKWGKPLVIDKLKEMAKVEGLWNLFLPAVSGLSHVDYALIAEETGKCFFAPDVFNCQAPDTGNMEVLHLYGSEEQKKQWLEPLLQGNITSCFCMTEPDVASSDATNIECSIQRDEDSYVINGKKWWSSGAGNPKCKIAIVLGRTQNTSLSRHKQHSMILVPMNTPGVKIIRPLSVFGYTDNFHGGHFEIHFNQVRVPATNLILGEGRGFEISQGRLGPGRIHHCMRTVGLAERALQIMCERATQRIAFKKKLYAHEVVAHWIAESRIAIEKIRLLTLKAAHSMDTLGSAGAKKEIAMIKVAAPRAVSKIVDWAIQVCGGAGVSQDYPLANMYAITRVLRLADGPDEVHLSAIATMELRDQAKRLTAKI

SEQ ID NO: 7712 - protein, 693 aa, Homo sapiens
MKPGATGESDLAEVLPQHKFDSKSLEAYLNQHLSGFGAEREATLTIAQYRAGKSNPTFYLQKGFQTYVLRKKPPGSLLPKAHQIDREFKVQKALFSIGFPVPKPILYCSDTSVIGTEFYVMEHVQGRIFRDLTIPGLSPAERSAIYVATVETLAQLHSLNIQSLQLEGYGIGAGYCKRQVSTWTKQYQAAAHQDIPAMQQLSEWLMKNLPDNDNEENLIHGDFRLDNIVFHPKEGVYSRYLLGNNSSEDSFLFANIVQPLAETGLQLSKRTFSTVLPQIDTTGQLFVQTRKGQEVLIKVKHFMKQHILPAEKEVTEFYVQNENSVDKWGKPLVIDKLKEMAKVEGLWNLFLPAVSGLSHVDYALIAEETGKCFFAPDVFNCQAPDTGNMEVLHLYGSEEQKKQWLEPLLQGNITSCFCMTEPDVASSDATNIECSIQRDEDSYVINGKKWWSSGAGNPKCKIAIVLGRTQNTSLSRHKQHSMILVPMNTPGVKIIRPLSVFGYTDNFHGGHFEIHFNQVRVPATNLILGEGRGFEISQGRLGPGRIHHCMRTVGLAERALQIMCERATQRIAFKKKLYAHEVVAHWIAESRIAIEKIRLLTLKAAHSMDTLGSAGAKKEIAMIKVAAPRAVSKIVDWAIQVCGGAGVSQDYPLANMYAITRVLRLADGPDEVHLSAIATMELRDQAKRLTAKI

SEQ ID NO: 7713 - protein, 404 aa, Homo sapiens
MAESVERLQQRVQELERELAQERSLQVPRSGDGGGGRVRIEKMSSEVVDSNPYSRLMALKRMGIVSDYEKIRTFAVAIVGVGGVGSVTAEMLTRCGIGKLLLFDYDKVELANMNRLFFQPHQAGLSKVQAAEHTLRNINPDVLFEVHNYNITTVENFQHFMDRISNGGLEEGKPVDLVLSCVDNFEARMTINTACNELGQTWMESGVSENAVSGHIQLIIPGESACFACAPPLVVAANIDEKTLKREGVCAASLPTTMGVVAGILVQNVLKFLLNFGTVSFYLGYNAMQDFFPTMSMKPNPQCDDRNCRKQQEEYKKKVAALPKQEVIQEEEEIIHEDNEWGIELVSEVSEEELKNFSGPVPDLPEGITVAYTIPKKQEDSVTELTVEDSGESLEDLMAKMKNM

SEQ ID NO: 7714 - protein, 404 aa, Homo sapiens; identical to SEQ ID NO: 7713

SEQ ID NO: 7715 - protein, 391 aa, Homo sapiens
MDMASESVGGKILFATDDFFAPAENLIKSDSPCFKEHEYTEFGKWMDGWETRRKRIPGHDWCVLRLGIQGVIRGFDVDVSYFTGDYAPRVSIQAANLEEDKLPEIPERGTRTGAAATPEEFEAIAELKSDDWSYLVPMTELKPGNPASGHNYFLVNSQQRWTHIRLNIFPDGGIARLRVFGTGQKDWTATDPKEPADLVAIAFGGVCVGFSNAKFGHPNNIIGVGGAKSMADGWETARRLDRPPILENDENGILLVPGCEWAVFRLAHPGVITRIEIDTKYFEGNAPDSCKVDGCILTTQEEEAVIRQKWILPAHKWKPLLPVTKLSPNQSHLFDSLTLELQDVITHARLTIVPDGGVSRLRLRGFPSSICLLRPREKPMLKFSVSFKANP

SEQ ID NO: 7716 - protein, 162 aa, Homo sapiens
MADGWETARRLDRPPILENDENGILLVPGCEWAVFRLAHPGVITRIEIDTKYFEGNAPDSCKVDGCILTTQEEEAVIRQKWILPAHKWKPLLPVTKLSPNQSHLFDSLTLELQDVITHARLTIVPDGGVSRLRLRGFPSSICLLRPREKPMLKFSVSFKANP

SEQ ID NO: 7717 - protein, 79 aa, Homo sapiens
MAKELWGSRFIGLICLYPEILHLVMVASVFPPSGHPILFTEVHSLVSWGIFVVVEWKLHIQASCICVSWVHNHLLFLLH

SEQ ID NO: 7718 - protein, 522 aa, Homo sapiens
MNINDLKLTLSKAGQEHLLRFWNELEEAQQVELYAELQAMNFEELNFFFQKAIEGFNQSSHQKNVDARMEPVPREVLGSATRDQDQLQAWESEGLFQISQNKVAVLLLAGGQGTRLGVAYPKGMYDVGLPSRKTLFQIQAERILKLQQVAEKYYGNKCIIPWYIMTSGRTMESTKEFFTKHKYFGLKKENVIFFQQGMLPAMSFDGKIILEEKNKVSMAPDGNGGLYRALAAQNIVEDMEQRGIWSIHVYCVDNILVKVADPRFIGFCIQKGADCGAKVVEKTNPTEPVGVVCRVDGVYQVVEYSEISLATAQKRSSDGRLLFNAGNIANHFFTVPFLRDVVNVYEPQLQHHVAQKKIPYVDTQGQLIKPDKPNGIKMEKFVFDIFQFAKKFVVYEVLREDEFSPLKNADSQNGKDNPTTARHALMSLHHCWVLNAGGHFIDENGSRLPAIPRSATNGKSETITADVNHNLKDANDVPIQCEISPLISYAGEGLESYVADKEFHAPLIIDENGVHELVKNGI

SEQ ID NO: 7719 - protein, 505 aa, Homo sapiens
MNINDLKLTLSKAGQEHLLRFWNELEEAQQVELYAELQAMNFEELNFFFQKAIEGFNQSSHQKNVDARMEPVPREVLGSATRDQDQLQAWESEGLFQISQNKVAVLLLAGGQGTRLGVAYPKGMYDVGLPSRKTLFQIQAERILKLQQVAEKYYGNKCIIPWYIMTSGRTMESTKEFFTKHKYFGLKKENVIFFQQGMLPAMSFDGKIILEEKNKVSMAPDGNGGLYRALAAQNIVEDMEQRGIWSIHVYCVDNILVKVADPRFIGFCIQKGADCGAKVVEKTNPTEPVGVVCRVDGVYQVVEYSEISLATAQKRSSDGRLLFNAGNIANHFFTVPFLRDVVNVYEPQLQHHVAQKKIPYVDTQGQLIKPDKPNGIKMEKFVFDIFQFAKKFVVYEVLREDEFSPLKNADSQNGKDNPTTARHALMSLHHCWVLNAGGHFIDENGSRLPAIPRLKDANDVPIQCEISPLISYAGEGLESYVADKEFHAPLIIDENGVHELVKNGI

SEQ ID NO: 7720 - protein, 353 aa, Homo sapiens
MVGQEAALSLGAAMLEAPGPSDGCELSNPSASRVSCAGQMLEVQPGLYFGGAAAVAEPDHLREAGITAVLTVDSEEPSFKAGPGVEDLWRLFVPALDKPETDLLSHLDRCVAFIGQARAEGRAVLVHCHAGVSRSVAIITAFLMKTDQLPFEKAYEKLQILKPEAKMNEGFEWQLKLYQAMGYEVDTSSAIYKQYRLQKVTEKYPELQNLPQELFAVDPTTVSQGLKDEVLYKCRKCRRSLFRSSSILDHREGSGPIAFAHKRMTPSSMLTTGRQAQCTSYFIEPVQWMESALLGVMDGQLLCPKCSAKLGSFNWYGEQCSCGRWITPAFQIHKNRVDEMKILPVLGSQTGKI

SEQ ID NO: 7721 - protein, 468 aa, Homo sapiens
MEAGGGREVTTALLPPQGRGVAQCGSNHQASPVPSAPPQAEPVAGLPVHFCSGKFIKLKMSKKISGGSVVEMQGDEMTQIIWELNKEKLIFPYVELDVHSYDLGIEYCDATNDQVTKDAAEAIKKYNVGVKCATITADEKRVEEFKLKQMWKSPNGTIQNILVGTVLREAIICKNIPQLVSGWVKSIIVGRIAYGDQYRAADFVVPGPGKVEITYTLSDRTQKVTYLLSTKNTILKKYDGRFKDIFQEIYDKQYKSQFEAQKIWYEHRLADDMVAQAMKSEGGFIWACKNYDGDMQSDSVAQGYGSLGMMTSMLVCPHGKTVEAEAAHWTVTRHFCMYQKGQEISTNPIASIFAWTRGLALRAKTDNNKELAFFANALEEVCIETIEAGFMTKDLAACIKGLPSAQCSDYLNTFEFMDKLGENLKIKLAQAKLYVHTWAEEDKCLLITRSTGFHFSVSHSRIKAKSIV

SEQ ID NO: 7722 - protein, 196 aa, Homo sapiens
MVAQAMKSEGGFIWACKNYDGDMQSDSVAQGYGSLGMMTSMLVCPHGKTVEAEAAHWTVTRHFCMYQKGQEISTNPIASIFAWTRGLALRAKTDNNKELAFFANALEEVCIETIEAGFMTKDLAACIKGLPSAQCSDYLNTFEFMDKLGENLKIKLAQAKLYVHTWAEEDKCLLITRSTGFHFSVSHSRIKAKSIV

SEQ ID NO: 7723 - protein, 296 aa, Homo sapiens [sequence omitted]

SEQ ID NO: 7724 - protein, 301 aa, Homo sapiens
MATTKRVLYVGGLAEEVDDKVLHAAFIPFGDITDIQIPLDYETEKHRGFAFVEFELAEDAAAAIDNMNESELFGRTIRVNLAKPMRIKEGSSRPVWSDDDWLKKFSGKTLEENKEEEGSEPPKAETQEGEPIAKKARSNPQVYMDIKIGNKPAGRIQMLLRSDVVPMTAENFRCLCTHEKGFGFKGSSFHRIIPQFMCQGGDFTNHNGTGGKSIYGKKFDDENFILKHTGPGLLSMANSGPNTNGSQFFLTCDKTDWLDGKHVVFGEVTEGLDVLRQIEAQGSKDGKPKQKVIIADCGEYV

SEQ ID NO: 7725 - protein, 342 aa, Homo sapiens
MASVTRAVFGELPSGGGTVEKFQLQSDLLRVDIISWGCTITALEVKDRQGRASDVVLGFAELEGYLQKQPYFGAVIGRVANRIAKGTFKVDGKEYHLAINKEPNSLHGGVRGFDKVLWTPRVLSNGVQFSRISPDGEEGYPGELKVWVTYTLDGGELIVNYRAQASQATPVNLTNHSYFNLAGQASPNINDHEVTIEADTYLPVDETLIPTGEVAPVQGTAFDLRKPVELGKHLQDFHLNGFDHNFCLKGSKEKHFCARVHHAASGRVLEVYTTQPGVQFYTGNFLDGTLKGKNGAVYPKHSGFCLETQNWPDAVNQPRFPPVLLRPGEEYDHTTWFKFSVA

SEQ ID NO: 7726 - protein, 742 aa, Homo sapiens
MAAFSEMGVMPEIAQAVEEMDWLLPTDIQAESIPLILGGGDVLMAAETGSGKTGAFSIPVIQIVYETLKDQQEGKKGKTTIKTGASVLNKWQMNPYDRGSAFAIGSDGLCCQSREVKEWHGCRATKGLMKGKHYYEVSCHDQGLCRVGWSTMQASLDLGTDKFGFGFGGTGKKSHNKQFDNYGEEFTMHDTIGCYLDIDKGHVKFSKNGKDLGLAFEIPPHMKNQALFPACVLKNAELKFNFGEEEFKFPPKDGFVALSKAPDGYIVKSQHSGNAQVTQTKFLPNAPKALIVEPSRELAEQTLNNIKQFKKYIDNPKLRELLIIGGVAARDQLSVLENGVDIVVGTPGRLDDLVSTGKLNLSQVRFLVLDEADGLLSQGYSDFINRMHNQIPQVTSDGKRLQVIVCSATLHSFDVKKLSEKIMHFPTWVDLKGEDSVPDTVHHVVVPVNPKTDRLWERLGKSHIRTDDVHAKDNTRPGANSPEMWSEAIKILKGEYAVRAIKEHKMDQAIIFCRTKIDCDNLEQYFIQQGGGPDKKGHQFSCVCLHGDRKPHERKQNLERFKKGDVRFLICTDVAARGIDIHGVPYVINVTLPDEKQNYVHRIGRVGRAERMGLAISLVATEKEKVWYHVCSSRGKGCYNTRLKEDGGCTIWYNEMQLLSEIEEHLNCTISQVEPDIKVPVDEFDGKVTYGQKRAAGGGSYKGHVDILAPTVQELAALEKEAQTSFLHLGYLPNQLFRTFCE

SEQ ID NO: 7727 - protein, 740 aa, Homo sapiens
MAAFSEMGVMPEIAQAVEEMDWLLPTDIQAESIPLILGGGDVLMAAETGSGKTGAFSIPVIQIVYETLKDQQEGKKGKTTIKTGASVLNKWQMNPYDRGSAFAIGSDGLCCQSREVKEWHGCRATKGLMKGKHYYEVSCHDQGLCRVGWSTMQASLDLGTDKFGFGFGGTGKKSHNKQFDNYGEEFTMHDTIGCYLDIDKGHVKFSKNGKDLGLAFEIPPHMKNQALFPACVLKNAELKFNFGEEEFKFPPKDGFVALSKAPDGYIVKSQHSGNAQVTQTKFLPNAPKALIVEPSRELAEQTLNNIKQFKKYIDNPKLRELLIIGGVAARDQLSVLENGVDIVVGTPGRLDDLVSTGKLNLSQVRFLVLDEADGLLSQGYSDFINRMHNQIPQVTSDGKRLQVIVCSATLHSFDVKKLSEKIMHFPTWVDLKGEDSVPDTVHHVVVPVNPKTDRLWERLGKSHIRTDDVHAKDNTRPGANSPEMWSEAIKILKGEYAVRAIKEHKMDQAIIFCRTKIDCDNLEQYFIQQGGGPDKKGHQFSCVCLHGDRKPHERKQNLERFKKGDVRFLICTDVAARGIDIHGVPYVINVTLPDEKQNYVHRIGRVGRAERMGLAISLVATEKEKVWYHVCSSRGKGCYNTRLKEDGGCTIWYNEMQLLSEIEEHLNCTISQVEPDIKVPVDEFDGKVTYGQKRAAGGGSYKGHVDILAPTVQELAALEKEAQTSFLHLGYLPNQLFRTF

SEQ ID NO: 7728 - protein, 740 aa, Homo sapiens; identical to SEQ ID NO: 7727

SEQ ID NO: 7729 - protein, 533 aa, Homo sapiens
MADREDWNEIDPIKKKDLHHSNGEEKAQSMETLPPGKVRWPDFNQEAYVGGTMVRSGQDPYARNKFNQVESDKLRMDRAIPDTRHDQCQRKQWRVDLPATSVVITFHNEARSALLRTVVSVLKKSPPHLIKEIILVDDYSNDPEDGALLGKIEKVRVLRNDRREGLMRSRVRGADAAQAKVLTFLDSHCECNEHWLEPLLERVAEDRTRVVSPIIDVINMDNFQYVGASADLKGGFDWNLVFKWDYMTPEQRRSRQGNPVAPIKTPMIAGGLFVMDKFYFEELGKYDMMMDVWGGENLEISFRVWQCGGSLEIIPCSRVGHVFRKQHPYTFPGGSGTVFARNTRRAAEVWMDEYKNFYYAAVPSARNVPYGNIQSRLELRKKLSCKPFKWYLENVYPELRVPDHQDIAFGALQQGTNCLDTLGHFADGVVGVYECHNAGGNQEWALTKEKSVKHMDLCLTVVDRAPGSLIKLQGCRENDSRQKWEQIEGNSKLRHVGSNLCLDSRTAKSGGLSVEVCGPALSQQWKFTLNLQQ

SEQ ID NO: 7730 - protein, 508 aa, Homo sapiens [sequence omitted]

SEQ ID NO: 7731 - protein, 533 aa, Homo sapiens; identical to SEQ ID NO: 7729

SEQ ID NO: 7732 - protein, 571 aa, Homo sapiens
MRRRSRMLLCFAFLWVLGIAYYMYSGGGSALAGGAGGGAGRKEDWNEIDPIKKKDLHHSNGEEKAQSMETLPPGKVRWPDFNQEAYVGGTMVRSGQDPYARNKFNQVESDKLRMDRAIPDTRHDQCQRKQWRVDLPATSVVITFHNEARSALLRTVVSVLKKSPPHLIKEIILVDDYSNDPEDGALLGKIEKVRVLRNDRREGLMRSRVRGADAAQAKVLTFLDSHCECNEHWLEPLLERVAEDRTRVVSPIIDVINMDNFQYVGASADLKGGFDWNLVFKWDYMTPEQRRSRQGNPVAPIKTPMIAGGLFVMDKFYFEELGKYDMMMDVWGGENLEISFRVWQCGGSLEIIPCSRVGHVFRKQHPYTFPGGSGTVFARNTRRAAEVWMDEYKNFYYAAVPSARNVPYGNIQSRLELRKKLSCKPFKWYLENVYPELRVPDHQDIAFGALQQGTNCLDTLGHFADGVVGVYECHNAGGNQEWALTKEKSVKHMDLCLTVVDRAPGSLIKLQGCRENDSRQKWEQIEGNSKLRHVGSNLCLDSRTAKSGGLSVEVCGPALSQQWKFTLNLQQ

SEQ ID NO: 7733 - protein, 414 aa, Homo sapiens
MSKKISGGSVVEMQGDEMTRIIWELIKEKLIFPYVELDLHSYDLGIENRDATNDQVTKDAAEAIKKHNVGVKCATITPDEKRVEEFKLKQMWKSPNGTIRNILGGTVFREAIICKNIPRLVSGWVKPIIIGRHAYGDQYRATDFVVPGPGKVEITYTPSDGTQKVTYLVHNFEEGGGVAMGMYNQDKSIEDFAHSSFQMALSKGWPLYLSTKNTILKKYDGRFKDIFQEIYDKQYKSQFEAQKIWYEHRLIDDMVAQAMKSEGGFIWACKNYDGDVQSDSVAQGYGSLGMMTSVLVCPDGKTVEAEAAHGTVTRHYRMYQKGQETSTNPIASIFAWTRGLAHRAKLDNNKELAFFANALEEVSIETIEAGFMTKDLAACIKGLPNVQRSDYLNTFEFMDKLGENLKIKLAQAKL

SEQ ID NO: 7734 - protein, 286 aa, Homo sapiens
MSKKISGGSVVEMQGDEMTRIIWELIKEKLIFPYVELDLHSYDLGIENRDATNDQVTKDAAEAIKKHNVGVKCATITPDEKRVEEFKLKQMWKSPNGTIRNILGGTVFREAIICKNIPRLVSGWVKPIIIGRHAYGDQYRATDFVVPGPGKVEITYTPSDGTQKVTYLVHNFEEGGGVAMGMYNQDKSIEDFAHSSFQMALSKGWPLYLSTKNTILKKYDGRFKDIFQEIYDQRAGLSRWQDSRSRGCPRDCNPSLPHVPERTGDVHQSHCFHFCLDQRVSPQSKA

SEQ ID NO: 7735 - protein, 414 aa, Homo sapiens; identical to SEQ ID NO: 7733

SEQ ID NO: 7736 - protein, 414 aa, Homo sapiens; identical to SEQ ID NO: 7733

SEQ ID NO: 7737 - protein, 146 aa, Homo sapiens
VAFAEIIPQNQKAIASFLKSWNETLTSRLAALPENPPVIDWAYYKANVAKAGLVDDFKKFNALKVPVPEDKYTAQVDAEEKDVKSCAEWVSLSKARIVEYEKQMEKMKNLIPFDQMTTEDLNEAFPETKLDEKKYPYWPHQLIENL

SEQ ID NO: 7738 - protein, 335 aa, Homo sapiens
MKLKLKNVFLAYFLVSIAGLLYALVQLGQPCDCLPPLRAAAEQLRQKDLRISQLQAELRRPPPAPAQPPEPEALPTIYVVTPTYARLVQKAELVRLSQTLSLVPRLHWLLVEDAEGPTPLVSGLLAASGLLFTHLVVLTPKAQRLREGEPGWVHPRGVEQRNKALDWLRGRGGAVGGEKDPPPPGTQGVVYFADDDNTYSRELFEEMRWTRGVSVWPVGLVGGLRFEGPQVQDGRVVGFHTAWEPSRPFPVDMAGFAVALPLLLDKPNAQFDSTAPRGHLESSLLSHLVDPKDLEPRAANCTRVLVWHTRTEKPKMKQEEQLQRQGRGSDPAIEV

SEQ ID NO: 7739 - protein, 393 aa, Homo sapiens
PEACPGGAASPSWELVGECEEGGTQGGAAAGAGPADRSRGLGREPLVPCRPRLLGRGRRRGHEAEAEERVSRLLPGVDRRPPLRAGQPCDCLPPLRAAAEQLRQKDLRISQLQAELRRPPPAPAQPPEPEALPTIYVVTPTYARLVQKAELVRLSQTLSLVPRLHWLLVEDAEGPTPLVSGLLAASGLLFTHLVVLTPKAQRLREGEPGWVHPRGVEQRNKALDWLRGRGGAVGGEKDPPPPGTQGVVYFADDDNTYSRELFEEMRWTRGVSVWPVGLVGGLRFEGPQVQDGRVVGFHTAWEPSRPFPVDMAGFAVALPLLLDKPNAQFDSTAPRGHLESSLLSHLVDPKDLEPRAANCTRVLVWHTRTEKPKMKQEEQLQRQGRGSDPAIEV

SEQ ID NO: 7740 - protein, 623 aa, Homo sapiens
MESYHKPDQQKLQALKDTANRLRISSIQATTAAGSGHPTSCCSAAEIMAVLFFHTMRYKSQDPRNPHNDRFVLSKGHAAPILYAVWAEAGFLAEAELLNLRKISSDLDGHPVPKQAFTDVATGSLGQGLGAACGMAYTGKYFDKASYRVYCLLGDGELSEGSVWEAMAFASIYKLDNLVAILDINRLGQSDPAPLQHQMDIYQKRCEAFGWHAIIVDGHSVEELCKAFGQAKHQPTAIIAKTFKGRGITGVEDKESWHGKPLPKNMAEQIIQEIYSQIQSKKKILATPPQEDAPSVDIANIRMPSLPSYKVGDKIATRKAYGQALAKLGHASDRIIALDGDTKNSTFSEIFKKEHPDRFIECYIAEQNMVSIAVGCATRNRTVPFCSTFAAFFTRAFDQIRMAAISESNINLCGSHCGVSIGEDGPSQMALEDLAMFRSVPTSTVFYPSDGVATEKAVELAANTKGICFIRTSRPENAIIYNNNEDFQVGQAKVVLKSKDDQVTVIGAGVTLHEALAAAELLKKEKINIRVLDPFTIKPLDRKLILDSARATKGRILTVEDHYYEGGIGEAVSSAVVGEPGITVTHLAVNRVPRSGKPAELLKMFGIDRDAIAQAVRGLITKA

SEQ ID NO: 7741 - protein, 623 aa, Homo sapiens; identical to SEQ ID NO: 7740

SEQ ID NO: 7742 - protein, 340 aa, Homo sapiens
MRKELQLSLSVTLLLVCGFLYQFTLKSSCLFCLPSFKSHQGLEALLSHRRGIVFLETSERMEPPHLVSCSVESAAKIYPEWPVVFFMKGLTDSTPMPSNSTYPAFSFLSAIDNVFLFPLDMKRLLEDTPLFSWYNQINASAERNWLHISSDASRLAIIWKYGGIYMDTDVISIRPIPEENFLAAQASRYSSNGIFGFLPHHPFLWECMENFVEHYNSAIWGNQGPELMTRMLRVWCKLEDFQEVSDLRCLNISFLHPQRFYPISYREWRRYYEVWDTEPSFNVSYALHLWNHMNQEGRAVIRGSNTLVENLYRKHCPRTYRDLIKGPEGSVTGELGPGNK

SEQ ID NO: 7743 - protein, 723 aa, Homo sapiens
MAEYTRLHNALALIRLRNPPVNAISTTLLRDIKEGLQKAVIDHTIKAIVICGAEGKFSAGADIRGFSAPRTFGLTLGHVVDEIQRNEKPVVAAIQGMAFGGGLELALGCHYRIAHAEAQVGLPEVTLGLLPGARGTQLLPRLTGVPAALDLITSGRRILADEALKLGILDKVVNSDPVEEAIRFAQRVSDQPLESRRLCNKPIQSLPNMDSIFSEALLKMRRQHPGCLAQEACVRAVQAAVQYPYEVGIKKEEELFLYLLQSGQARALQYAFFAERKANKWSTPSGASWKTASARPVSSVGVVGLGTMGRGIVISFARARIPVIAVDSDKNQLATANKMITSVLEKEASKMQQSGHPWSGPKPRLTSSVKELGGVDLVIEAVFEEMSLKKQVFAELSAVCKPEAFLCTNTSALDVDEIASSTDRPHLVIGTHFFSPAHVMKLLEVIPSQYSSPTTIATVMNLSKKIKKIGVVVGNCFGFVGNRMLNPYYNQAYFLLEEGSKPEEVDQVLEEFGFKMGPFRVSDLAGLDVGWKSRKGQGLTGPTLLPGTPARKRGNRRYCPIPDVLCELGRFGQKTGKGWYQYDKPLGRIHKPDPWLSKFLSRYRKTHHIEPRTISQDEILERCLYSLINEAFRILGEGIAASPEHIDVVYLHGYGWPRHKGGPMFYASTVGLPTVLEKLQKYYRQNPDIPQLEPSDYLKKLASQGNPPLKEWQSLAGSPSSKL

SEQ ID NO: 7744 - protein, 385 aa, Homo sapiens
MITSVLEKEASKMQQSGHPWSGPKPRLTSSVKELGGVDLVIEAVFEEMSLKKQVFAELSAVCKPEAFLCTNTSALDVDEIASSTDRPHLVIGTHFFSPAHVMKLLEVIPSQYSSPTTIATVMNLSKKIKKIGVVVGNCFGFVGNRMLNPYYNQAYFLLEEGSKPEEVDQVLEEFGFKMGPFRVSDLAGLDVGWKSRKGQGLTGPTLLPGTPARKRGNRRYCPIPDVLCELGRFGQKTGKGWYQYDKPLGRIHKPDPWLSKFLSRYRKTHHIEPRTISQDEILERCLYSLINEAFRILGEGIAASPEHIDVVYLHGYGWPRHKGGPMFYASTVGLPTVLEKLQKYYRQNPDIPQLEPSDYLKKLASQGNPPLKEWQSLAGSPSSKL

SEQ ID NO: 7745 - protein, 723 aa, Homo sapiens; identical to SEQ ID NO: 7743

SEQ ID NO: 7746 - protein, 740 aa, Homo sapiens [sequence omitted]

SEQ ID NO: 7747 - protein, 737 aa, Homo sapiens
MGGCTVKPQLLLLALVLHPWNPCLGADSEKPSSIPTDKLLVITVATKESDGFHRFMQSAKYFNYTVKVLGQGEEWRGGDGINSIGGGQKVRLMKEVMEHYADQDDLVVMFTECFDVIFAGGPEEVLKKFQKANHKVVFAADGILWPDKRLADKYPVVHIGKRYLNSGGFIGYAPYVNRIVQQWNLQDNDDDQLFYTKVYIDPLKREAINITLDHKCKIFQTLNGAVDEVVLKFENGKARAKNTFYETLPVAINGNGPTKILLNYFGNYVPNSWTQDNGCTLCEFDTVDLSAVDVHPNVSIGVFIEQPTPFLPRFLDILLTLDYPKEALKLFIHNKEVYHEKDIKVFFDKAKHEIKTIKIVGPEENLSQAEARNMGMDFCRQDEKCDYYFSVDADVVLTNPRTLKILIEQNRKIIAPLVTRHGKLWSNFWGALSPDGYYARSEDYVDIVQGNRVGVWNVPYMANVYLIKGKTLRSEMNERNYFVRDKLDPDMALCRNAREMGVFMYISNRHEFGRLLSTANYNTSHYNNDLWQIFENPVDWKEKYINRDYSKIFTENIVEQPCPDVFWFPIFSEKACDELVEEMEHYGKWSGGKHHDSRISGGYENVPTDDIHMKQVDLENVWLHFIREFIAPVTLKVFAGYYTKGFALLNFVVKYSPERQRSLRPHHDASTFTINIALNNVGEDFQGGGCKFLRYNCSIESPRKGWSFMHPGRLTHLHEGLPVKNGTRYIAVSFIDP

SEQ ID NO: 7748 - protein, 293 aa, Homo sapiens
MATNESVSIFSSASLAVEYVDSLLPENPLQEPFKNAWNYMLNNYTKFQIATWGSLIVHEALYFLFCLPGFLFQFIPYMKKYKIQKDKPETWENQWKCFKVLLFNHFCIQLPLICGTYYFTEYFNIPYDWERMPRWYFLLARCFGCAVIEDTWHYFLHRLLHHKRIYKYIHKVHHEFQAPFGMEAEYAHPLETLILGTGFFIGIVLLCDHVILLWAWVTIRLLETIDVHSGYDIPLNPLNLIPFYAGSRHHDFHHMNFIGNYASTFTWWDRIFGTDSQYNAYNEKRKKFEKKTE

SEQ ID NO: 7749 - protein, 293 aa, Homo sapiens; identical to SEQ ID NO: 7748

SEQ ID NO: 7750 - protein, 400 aa, Homo sapiens
MASEKPLAAVTCTAPVNIAVIKYWGKRDEELVLPINSSLSVTLHQDQLKTTTTAVISKDFTEDRIWLNGREEDVGQPRLQACLREIRCLARKRRNSRDGDPLPSSLSCKVHVASVNNFPTAAGLASSAAGYACLAYTLARVYGVESDLSEVARRGSGSACRSLYGGFVEWQMGEQADGKDSIARQVAPESHWPELRVLILVVSAEKKLTGSTVGMRASVETSPLLRFRAESVVPARMAEMARCIRERDFPSFAQLTMKDSNQFHATCLDTFPPISYLNAISWRIIHLVHRFNAHHGDTKVAYTFDAGPNAVIFTLDDTVAEFVAAVWHGFPPGSNGDTFLKGLQVRPAPLSAELQAALAMEPTPGGVKYIIVTQVGPGPQILDDPCAHLLGPDGLPKPAA

SEQ ID NO: 7751 - protein, 269 aa, Homo sapiens [sequence omitted]

SEQ ID NO: 7752 - protein, 186 aa, Homo sapiens
MRASVETSPLLRFRAESVVPARMAEMARCIRERDFPSFAQLTMKDSNQFHATCLDTFPPISYLNAISWRIIHLVHRFNAHHGDTKVAYTFDAGPNAVIFTLDDTVAEFVAAVWHGFPPGSNGDTFLKGLQVRPAPLSAELQAALAMEPTPGGVKYIIVTQVGPGPQILDDPCAHLLGPDGLPKPAA

SEQ ID NO: 7753 - protein, 529 aa, Homo sapiens
MFTVLTRQPCEQAGLKALYRTPTIIALVVLLVSIVVLVSITVIQIHKQEVLPPGLKYGIVLDAGSSRTTVYVYQWPAEKENNTGVVSQTFKCSVKGSGISSYGNNPQDVPRAFEECMQKVKGQVPSHLHGSTPIHLGATAGMRLLRLQNETAANEVLESIQSYFKSQPFDFRGAQIISGQEEGVYGWITANYLMGNFLEKNLWHMWVHPHGVETTGALDLGGASTQISFVAGEKMDLNTSDIMQVSLYGYVYTLYTHSFQCYGRNEAEKKFLAMLLQNSPTKNHLTNPCYPRDYSISFTMGHVFDSLCTVDQRPESYNPNDVITFEGTGDPSLCKEKVASIFDFKACHDQETCSFDGVYQPKIKGPFVAFAGFYYTASALNLSGSFSLDTFNSSTWNFCSQNWSQLPLLLPKFDEVYARSYCFSANYIYHLFVNGYKFTEETWPQIHFEKEVGNSSIAWSLGYMLSLTNQIPAESPLIRLPIEPPVFVGTLAFFTAAALLCLAFLAYLCSATRRKRHSEHAFDHAVDSD

SEQ ID NO: 7754 - protein, 774 aa, Homo sapiens
MEAEQRPAAGASEGATPGLEAVPPVAPPPATAASGPIPKSGPEPKRRHLGTLLQPTVNKFSLRVFGSHKAVEIEQERVKSAGAWIIHPYSDFRFYWDLIMLLLMVGNLIVLPVGITFFKEENSPPWIVFNVLSDTFFLLDLVLNFRTGIVVEEGAEILLAPRAIRTRYLRTWFLVDLISSIPVDYIFLVVELEPRLDAEVYKTARALRIVRFTKILSLLRLLRLSRLIRYIHQWEEIFHMTYDLASAVVRIFNLIGMMLLLCHWDGCLQFLVPMLQDFPPDCWVSINHMVNHSWGRQYSHALFKAMSHMLCIGYGQQAPVGMPDVWLTMLSMIVGATCYAMFIGHATALIQSLDSSRRQYQEKYKQVEQYMSFHKLPADTRQRIHEYYEHRYQGKMFDEESILGELSEPLREEIINFTCRGLVAHMPLFAHADPSFVTAVLTKLRFEVFQPGDLVVREGSVGRKMYFIQHGLLSVLARGARDTRLTDGSYFGEICLLTRGRRTASVRADTYCRLYSLSVDHFNAVLEEFPMMRRAFETVAMDRLLRIGKKNSILQRKRSEPSPGSSGGIMEQHLVQHDRDMARGVRGRAPSTGAQLSGKPVLWEPLVHAPLQAAAVTSNVAIALTHQRGPLPLSPDSPATLLARSAWRSAGSPASPLVPVRAGPWASTSRLPAPPARTLHASLSRAGRSQVSLLGPPPGGGGRRLGPRGRPLSASQPSLPQRATGDGSPGRKGSGSERLPPSGLLAKPPRTAQPPRPPVPEPATPRGLQLSANM

SEQ ID NO: 7755 - protein, 518 aa, Homo sapiens
MMLLLCHWDGCLQFLVPMLQDFPPDCWVSINHMVNHSWGRQYSHALFKAMSHMLCIGYGQQAPVGMPDVWLTMLSMIVGATCYAMFIGHATALIQSLDSSRRQYQEKYKQVEQYMSFHKLPADTRQRIHEYYEHRYQGKMFDEESILGELSEPLREEIINFTCRGLVAHMPLFAHADPSFVTAVLTKLRFEVFQPGDLVVREGSVGRKMYFIQHGLLSVLARGARDTRLTDGSYFGEICLLTRGRRTASVRADTYCRLYSLSVDHFNAVLEEFPMMRRAFETVAMDRLLRIGKKNSILQRKRSEPSPGSSGGIMEQHLVQHDRDMARGVRGRAPSTGAQLSGKPVLWEPLVHAPLQAAAVTSNVAIALTHQRGPLPLSPDSPATLLARSAWRSAGSPASPLVPVRAGPWASTSRLPAPPARTLHASLSRAGRSQVSLLGPPPGGGGRRLGPRGRPLSASQPSLPQRATGDGSPGRKGSGSERLPPSGLLAKPPRTAQPPRPPVPEPATPRGLQLSANM

SEQ ID NO: 7756 - protein, 774 aa, Homo sapiens; identical to SEQ ID NO: 7754

SEQ ID NO: 7757 - protein, 303 aa, Homo sapiens
MEAEQRPAAGASEGATPGLEAVPPVAPPPATAASGPIPKSGPEPKRRHLGTLLQPTVNKFSLRVFGSHKAVEIEQERVKSAGAWIIHPYSDFRFYWDLIMLLLMVGNLIVLPVGITFFKEENSPPWIVFNVLSDTFFLLDLVLNFRTGIVVEEGAEILLAPRAIRTRYLRTWFLVDLISSIPVDYIFLVVELEPRLDAEVYKTARALRIVRFTKILSLLRLLRLSRLIRYIHQWEEIFHMTYDLASAVVRIFNLIGMMLLLCHWDGCLQFLVPMLQDFPPDCWVSINHMVVRSPHSSAFPGPS

SEQ ID NO: 7758 - protein, 604 aa, Homo sapiens
MSIQENISSLQLRSWVSKSQRDLAKSILIGAPGAQLGLMPLTTQQCGADPQRGRPREVCSGMEGPAGYLRRASVAQLTQELGTAFFQQQQLPAAMADTFLEHLCLLDIDSEPVAARSTSIIATIGPASRSVERLKEMIKAGMNIARLNFSHGSHEYHAESIANVREAVESFAGSPLSYRPVAIALDTKGPEIRTGILQGGPESEVELVKGSQVLVTVDPAFRTRGNANTVWVDYPNIVRVVPVGGRIYIDDGLISLVVQKIGPEGLVTQVENGGVLGSRKGVNLPGAQVDLPGLSEQDVRDLRFGVEHGVDIVFASFVRKASDVAAVRAALGPEGHGIKIISKIENHEGVKRFDEILEVSDGIMVARGDLGIEIPAEKVFLAQKMMIGRCNLAGKPVVCATQMLESMITKPRPTRAETSDVANAVLDGADCIMLSGETAKGNFPVEAVKMQHAIAREAEAAVYHRQLFEELRRAAPLSRDPTEVTAIGAVEAAFKCCAAAIIVLTTTGRSAQLLSRYRPRAAVIAVTRSAQAARQVHLCRGVFPLLYREPPEAIWADDVDRRVQFGIESGKLRGFLRVGDLVIVVTGWRPGSGYTNIMRVLSIS

SEQ ID NO: 7759 - protein, 585 aa, Homo sapiens
MVPQPQAHTESMSIQENISSLQLRSWVSKSQRDLAKSILIGAPGGPAGYLRRASVAQLTQELGTAFFQQQQLPAAMADTFLEHLCLLDIDSEPVAARSTSIIATIGPASRSVERLKEMIKAGMNIARLNFSHGSHEYHAESIANVREAVESFAGSPLSYRPVAIALDTKGPEIRTGILQGGPESEVELVKGSQVLVTVDPAFRTRGNANTVWVDYPNIVRVVPVGGRIYIDDGLISLVVQKIGPEGLVTQVENGGVLGSRKGVNLPGAQVDLPGLSEQDVRDLRFGVEHGVDIVFASFVRKASDVAAVRAALGPEGHGIKIISKIENHEGVKRFDEILEVSDGIMVARGDLGIEIPAEKVFLAQKMMIGRCNLAGKPVVCATQMLESMITKPRPTRAETSDVANAVLDGADCIMLSGETAKGNFPVEAVKMQHAIAREAEAAVYHRQLFEELRRAAPLSRDPTEVTAIGAVEAAFKCCAAAIIVLTTTGRSAQLLSRYRPRAAVIAVTRSAQAARQVHLCRGVFPLLYREPPEAIWADDVDRRVQFGIESGKLRGFLRVGDLVIVVTGWRPGSGYTNIMRVLSIS

SEQ ID NO: 7760 - protein, 1405 aa, Homo sapiens
MSEKKLETTAQQRKCPEWMNVQNKRCAVEERKACVRKSVFEDDLPFLEFTGSIVYSYDASDCSFLSEDISMSLSDGDVVGFDMEWPPLYNRGKLGKVALIQLCVSESKCYLFHVSSMSVFPQGLKMLLENKAVKKAGVGIEGDQWKLLRDFDIKLKNFVELTDVANKKLKCTETWSLNSLVKHLLGKQLLKDKSIRCSNWSKFPLTEDQKLYAATDAYAGFIIYRNLEILDDTVQRFAINKEEEILLSDMNKQLTSISEEVMDLAKHLPHAFSKLENPRRVSILLKDISENLYSLRRMIIGSTNIETELRPSNNLNLLSFEDSTTGGVQQKQIREHEVLIHVEDETWDPTLDHLAKHDGEDVLGNKVERKEDGFEDGVEDNKLKENMERACLMSLDITEHELQILEQQSQEEYLSDIAYKSTEHLSPNDNENDTSYVIESDEDLEMEMLKSLENLNSGTVEPTHSKCLKMERNLGLPTKEEEEDDENEANEGEEDDDKDFLWPAPNEEQVTCLKMYFGHSSFKPVQWKVIHSVLEERRDNVAVMATGYGKSLCFQYPPVYVGKIGLVISPLISLMEDQVLQLKMSNIPACFLGSAQSENVLTDIKLGKYRIVYVTPEYCSGNMGLLQQLEADIGITLIAVDEAHCISEWGHDFRDSFRKLGSLKTALPMVPIVALTATASSSIREDIVRCLNLRNPQITCTGFDRPNLYLEVRRKTGNILQDLQPFLVKTSSHWEFEGPTIIYCPSRKMTQQVTGELRKLNLSCGTYHAGMSFSTRKDIHHRFVRDEIQCVIATIAFGMGINKADIRQVIHYGAPKDMESYYQEIGRAGRDGLQSSCHVLWAPADINLNRHLLTEIRNEKFRLYKLKMMAKMEKYLHSSRCRRQIILSHFEDKQVQKASLGIMGTEKCCDNCRSRLDHCYSMDDSEDTSWDFGPQAFKLLSAVDILGEKFGIGLPILFLRGSNSQRLADQYRRHSLFGTGKDQTESWWKAFSRQLITEGFLVEVSRYNKFMKICALTKKGRNWLHKANTESQSLILQANEELCPKKLLLPSSKTVSSGTKEHCYNQVPVELSTEKKSNLEKLYSYKPCDKISSGSNISKKSIMVQSPEKAYSSSQPVISAQEQETQIVLYGKLVEARQKHANKMDVPPAILATNKILVDMAKMRPTTVENVKRIDGVSEGKAAMLAPLLEVIKHFCQTNSVQTDLFSSTKPQEEQKTSLVAKNKICTLSQSMAITYSLFQEKKMPLKSIAESRILPLMTIGMHLSQAVKAGCPLDLERAGLTPEVQKIIADVIRNPPVNSDMSKISLIRMLVPENIDTYLIHMAIEILKHGPDSGLQPSCDVNKRRCFPGSEEICSSSKRSKEEVGINTETSSAERKRRLPVWFAKGSDTSKKLMDKTKRGGLFS

SEQ ID NO: 7761 - protein, 1406 aa, Homo sapiens
MSEKKLETTAQQRKCPEWMNVQNKRCAVEERKACVRKSVFEDDLPFLEFTGSIVYSYDASDCSFLSEDISMSLSDGDVVGFDMEWPPLYNRGKLGKVALIQLCVSESKCYLFHVSSMSVFPQGLKMLLENKAVKKAGVGIEGDQWKLLRDFDIKLKNFVELTDVANKKLKCTETWSLNSLVKHLLGKQLLKDKSIRCSNWSKFPLTEDQKLYAATDAYAGFIIYRNLEILDDTVQRFAINKEEEILLSDMNKQLTSISEEVMDLAKHLPHAFSKLENPRRVSILLKDISENLYSLRRMIIGSTNIETELRPSNNLNLLSFEDSTTGGVQQKQIREHEVLIHVEDETWDPTLDHLAKHDGEDVLGNKVERKEDGFEDGVEDNKLKENMERACLMSLDITEHELQILEQQSQEEYLSDIAYKSTEKHLSPNDNENDTSYVIESDEDLEMEMLKSLENLNSGTVEPTHSKCLKMERNLGLPTKEEEEDDENEANEGEEDDDKDFLWPAPNEEQVTCLKMYFGHSSFKPVQWKVIHSVLEERRDNVAVMATGYGKSLCFQYPPVYVGKIGLVISPLISLMEDQVLQLKMSNIPACFLGSAQSENVLTDIKLGKYRIVYVTPEYCSGNMGLLQQLEADIGITLIAVDEAHCISEWGHDFRDSFRKLGSLKTALPMVPIVALTATASSSIREDIVRCLNLRNPQITCTGFDRPNLYLEVRRKTGNILQDLQPFLVKTSSHWEFEGPTIIYCPSRKMTQQVTGELRKLNLSCGTYHAGMSFSTRKDIHHRFVRDEIQCVIATIAFGMGINKADIRQVIHYGAPKDMESYYQEIGRAGRDGLQSSCHVLWAPADINLNRHLLTEIRNEKFRLYKLKMMAKMEKYLHSSRCRRQIILSHFEDKQVQKASLGIMGTEKCCDNCRSRLDHCYSMDDSEDTSWDFGPQAFKLLSAVDILGEKFGIGLPILFLRGSNSQRLADQYRRHSLFGTGKDQTESWWKAFSRQLITEGFLVEVSRYNKFMKICALTKKGRNWLHKANTESQSLILQANEELCPKKLLLPSSKTVSSGTKEHCYNQVPVELSTEKKSNLEKLYSYKPCDKISSGSNISKKSIMVQSPEKAYSSSQPVISAQEQETQIVLYGKLVEARQKHANKMDVPPAILATNKILVDMAKMRPTTVENVKRIDGVSEGKAAMLAPLLEVIKHFCQTNSVQTDLFSSTKPQEEQKTSLVAKNKICTLSQSMAITYSLFQEKKMPLKSIAESRILPLMTIGMHLSQAVKAGCPLDLERAGLTPEVQKIIADVIRNPPVNSDMSKISLIRMLVPENIDTYLIHMAIEILKHGPDSGLQPSCDVNKRRCFPGSEEICSSSKRSKEEVGINTETSSAERKRRLPVWFAKGSDTSKKLMDKTKRGGLFS

SEQ ID NO: 7762 - protein, 1436 aa, Homo sapiens [sequence omitted]

SEQ ID NO: 7763 - protein, 792 aa, Homo sapiens
MHVIKRDGRQERVMFDKITSRIQKLCYGLNMDFVDPAQITMKVIQGLYSGVTTVELDTLAAETAATLTTKHPDYAILAARIAVSNLHKETKKVFSDVMEDLYNYINPHNGKHSPMVAKSTLDIVLANKDRLNSAIIYDRDFSYNYFGFKTLERSYLLKINGKVAERPQHMLMRVSVGIHKEDIDAAIETYNLLSERWFTHASPTLFNAGTNRPQLSSCFLLSMKDDSIEGIYDTLKQCALISKSAGGIGVAVSCIRATGSYIAGTNGNSNGLVPMLRVYNNTARYVDQGGNKRPGAFAIYLEPWHLDIFEFLDLKKNTGKEEQRARDLFFALWIPDLFMKRVETNQDWSLMCPNECPGLDEVWGEEFEKLYASYEKQGRVRKVVKAQQLWYAIIESQTETGTPYMLYKDSCNRKSNQQNLGTIKCSNLCTEIVEYTSKDEVAVCNLASLALNMYVTSEHTYDFKKLAEVTKVVVRNLNKIIDINYYPVPEACLSNKRHRPIGIGVQGLADAFILMRYPFESAEAQLLNKQIFETIYYGALEASCDLAKEQGPYETYEGSPVSKGILQYDMWNVTPTDLWDWKVLKEKIAKYGIRNSLLIAPMPTASTAQILGNNESIEPYTSNIYTRRVLSGEFQIVNPHLLKDLTERGLWHEEMKNQIIACNGSIQSIPEIPDDLKQLYKTVWEISQKTVLKMAAERGAFIDQSQSLNIHIAEPNYGKLTSMHFYGWKQGLKTGMYYLRTRPAANPIQFTLNKEKLKDKEKVSKEEEEKERNTAAMVCSLENRDECLMCGS

SEQ ID NO: 7764 - protein, 327 aa, Homo sapiens
MQMPAMMSLLLVSVGLMEALQAQSHPITRRDLFSQEIQLDMALASFDDQYAGCAAAMTAALPDLNHTEFQANQVYADSWTLASSQWQERQARWPEWSLSPTRPSPPPLGFRDEHGVALLAYTANSPLHKEFNAAVREAGRSRAHYLHHFSFKTLHFLLTEALQLLGSGQRPPRCHQVFRGVHGLRFRPAGPRATVRLGGFASASLKHVAAQQFGEDTFFGIWTCLGAPIKGYSFFPGEEEVLIPPFETFQVINASRLAQGPARIYLRALGKHSTYNCEYIKDKKCKSGPCHLDNSAMGQSPLSAVWSLLLLLWFLVVRAFPDGPGLL

SEQ ID NO: 7765 - protein, 67 aa, Homo sapiens
MLQRQKNVSPRSGRLTACMRTIHCTCMWTRRQSPGIWAEESTVSDEETETQKETATGPGSPACRCLL

SEQ ID NO: 7766 - protein, 948 aa, Homo sapiens
MEVPAAGRVPAEGAPTAAVAEVRCPGPAPLRLLEWRVAAGAAVRIGSVLAVFEAAASAQSSGASQSRVASGGCVRPARPERRLRSERAGVVRELCAQPGQVVAPGAVLVRLEGCSHPVVMKGLCAECGQDLTQLQSKNGKQQVPLSTATVSMVHSVPELMVSSEQAEQLGREDQQRLHRNRKLVLMVDLDQTLIHTTEQHCQQMSNKGIFHFQLGRGEPMLHTRLRPHCKDFLEKIAKLYELHVFTFGSRLYAHTIAGFLDPEKKLFSHRILSRDECIDPFSKTGNLRNLFPCGDSMVCIIDDREDVWKFAPNLITVKKYVYFQGTGDMNAPPGSRESQTRKKVNHSRGTEVSEPSPPVRDPEGVTQAPGVEPSNGLEKPARELNGSEAATPRDSPRPGKPDERDIWPPAQAPTSSQELAGAPEPQGSCAQGGRVAPGQRPAQGATGTDLDFDLSSDSESSSESEGTKSSSSASDGESEGKRGRQKPKAAPEGAGALAQGSSLEPGRPAAPSLPGEAEPGAHAPDKEPELGGQEEGERDGLCGLGNGCADRKEAETESQNSELSGVTAGESLDQSMEEEEEEDTDEDDHLIYLEEILVRVHTDYYAKYDRYLNKEIEEAPDIRKIVPELKSKVLADVAIIFSGLHPTNFPIEKTREHYHATALGAKILTRLVLSPDAPDRATHLIAARAGTEKVLQAQECGHLHVVNPDWLWSCLERWDKVEEQLFPLRDDHTKAQRENSPAAFPDREGVPPTALFHPMPVLPKAQPGPEVRIYDSNTGKLIRTGARGPPAPSSSLPIRQEPSSFRAVPPPQPQMFGEELPDAQDGEQPGPSRRKRQPSMSETMPLYTLCKEDLESMDKEVDDILGEGSDDSDSEKRRPEEQEEEPQPRKPGTRRERTLGAPAGHKRKLNEEDAASESSRESSNEDEGSSSEADEMAKALEAELNDLM

SEQ ID NO: 7767 - protein, 961 aa, Homo sapiens
MEVPAAGRVPAEGAPTAAVAEVRCPGPAPLRLLEWRVAAGAAVRIGSVLAVFEAAASAQSSGASQSRVASGGCVRPARPERRLRSERAGVVRELCAQPGQVVAPGAVLVRLEGCSHPVVMKGLCAECGQDLTQLQSKNGKQQVPLSTATVSMVHSVPELMVSSEQAEQLGREDQQRLHRNRKLVLMVDLDQTLIHTTEQHCQQMSNKGIFHFQLGRGEPMLHTRLRPHCKDFLEKIAKLYELHVFTFGSRLYAHTIAGFLDPEKKLFSHRILSRDECIDPFSKTGNLRNLFPCGDSMVCIIDDREDVWKFAPNLITVKKYVYFQGTGDMNAPPGSRESQTRKKVNHSRGTEVSEPSPPVRDPEGVTQAPGVEPSNGLEKPARELNGSEAATPRDSPRPGKPDERDIWPPAQAPTSSQELAGAPEPQGSCAQGGRVAPGQRPAQGATGTDLDFDLSSDSESSSESEGTKSSSSASDGESEGKRGRQKPKAAPEGAGALAQGSSLEPGRPAAPSLPGEAEPGAHAPDKEPELGGQEEGERDGLCGLGNGCADRKEAETESQNSELSGVTAGESLDQSMEEEEEEDTDEDDHLIYLEEILVRVHTDYYAKYDRYLNKEIEEAPDIRKIVPELKSKVLADVAIIFSGLHPTNFPIEKTREHYHATALGAKILTRLVLSPDAPDRATHLIAARAGTEKVLQAQECGHLHVVNPDWLWSCLERWDKVEEQLFPLRDDHTKAQRENSPAAFPDREGVPPTALFHPMPVLPKAQPGPEVRIYDSNTGKLIRTGARGPPAPSSSLPIRQEPSSFRAVPPPQPQMFGEELPDAQDGEQPGPSRRKRQPSMSETMPLYTLCKEDLESMDKEVDDILGEGSDDSDSEKRRPEEQEEEPQPRKPGTRRERTLGAPASSERSAAGGRGPRGHKRKLNEEDAASESSRESSNEDEGSSSEADEMAKALEAELNDLM

SEQ ID NO: 7768 - protein, 867 aa, Homo sapiens
MEVPAAGRVPAEGAPTAAVAEVRCPGPAPLRLLEWRVAAGAAVRIGSVLAVFEAAASAQSSGASQSRVASGGCVRPARPERRLRSERAGVVRELCAQPGQVVAPGAVLVRLEGCSHPVVMKGLCAECGQDLTQLQSKNGKQQVPLSTATVSMVHSVPELMVSSEQAEQLGREDQQRLHRNRKLVLMVDLDQTLIHTTEQHCQQMSNKGIFHFQLGRGEPMLHTRLRPHCKDFLEKIAKLYELHVFTFGSRLYAHTIAGFLDPEKKLFSHRILSRDECIDPFSKTGNLRNLFPCGDSMVCIIDDREDVWKFAPNLITVKKYVYFQGTGDMNAPPGSRESQTRKKVNHSRGTEVSEPSPPVRDPEGVTQAPGVEPSNGLEKPARELNGSEAATPRDSPRPGKPDERDIWPPAQAPTSSQELAGAPEPQGSCAQGGRVAPGQRPAQGATGTDLDFDLSSDSESSSESEGTKSSSSASDGESEGKRGRQKPKAAPEGAGALAQGSSLEPGRPAAPSLPGEAEPGAHAPDKEPELGGQEEGERDGLCGLGNGCADRKEAETESQNSELSGVTAGESLDQSMEEEEEEDTDEDDHLIYLEEILVRVHTDYYAKYDRYLNKEIEEAPDIRKIVPELKSKVLADVAIIFSGLHPTNFPIEKTREHYHATALGAKILTRLVLSPDAPDRATHLIAARAGTEKVLQAQECGHLHVVNPDWLWSCLERWDKVEEQLFPLRDDHTKAQRENSPAAFPDREGVPPTALFHPMPVLPKAQPGPEVRIYDSNTGKLIRTGARGPPAPSSSLPIRQEPSSFRWTTSLEKAATTATARRGGLRSRRRSPSPGSQGPAGSGRSGHLRPARGARQGAGGPEATRGS

SEQ ID NO: 7769 - protein, 160 aa, Homo sapiens
MFGEELPDAQDGEQPGPSRRKRQPSMSETMPLYTLCKEDLESMDKEVSQPHAPVPAPALVLGPQSSGRPLIEGSTTVRMLGMGDLRSTVLRRLFFRRTVLENHIPCPPVFMFPPEPILPARLAPLSSGESHHSVCIQKAAEVLEEENSSCVSSTVAEKCR

SEQ ID NO: 7770 - protein, 238 aa, Homo sapiens
MRVRGPARLIASGARLLLRMLSALPGWGPAHLQRPLLGPASCLGILRPAMTAHSFALPVIIFTTFWGLVGIAGPWFVPKGPNRGPCEVLAAFVLTRVLFCCRVIITMLVATAVCCYLLACLVPGSLPSLPSQPGPWGALGTAAAEGMSCSNTRTALEFALFPKEMLLGSWYGWGLSLYRRGRCQDSAHPEEDTCPHGEGAPAQAGESVPSQQLCHHPAGNWGGLYWVIGKAFSLAWNC

SEQ ID NO: 7771 - protein, 463 aa, Homo sapiens
MATVTATTKVPEIRDVTRIERIGAHSHIRGLGLDDALEPRQASQGMVGQLAARRAAGVVLEMIREGKIAGRAVLIAGQPGTGKTAIAMGMAQALGPDTPFTAIAGSEIFSLEMSKTEALTQAFRRSIGVRIKEETEIIEGEVVEIQIDRPATGTGSKVGKLTLKTTEMETIYDLGTKMIESLTKDKVQAGDVITIDKATGKISKLGRSFTRARDYDAMGSQTKFVQCPDGELQKRKEVVHTVSLHEIDVINSRTQGFLALFSGDTGEIKSEVREQINAKVAEWREEGKAEIIPGVLFIDEVHMLDIESFSFLNRALESDMAPVLIMATNRGITRIRGTSYQSPHGIPIDLLDRLLIVSTTPYSEKDTKQILRIRCEEEDVEMSEDAYTVLTRIGLETSLRYAIQLITAASLVCRKRKGTEVQVDDIKRVYSLFLDESRSTQYMKEYQDAFLFNELKGETMDTS

SEQ ID NO: 7772 - protein, 418 aa, Homo sapiens
MVGQLAARRAAGVVLEMIREGKIAGRAVLIAGQPGTGKTAIAMGMAQALGPDTPFTAIAGSEIFSLEMSKTEALTQAFRRSIGVRIKEETEIIEGEVVEIQIDRPATGTGSKVGKLTLKTTEMETIYDLGTKMIESLTKDKVQAGDVITIDKATGKISKLGRSFTRARDYDAMGSQTKFVQCPDGELQKRKEVVHTVSLHEIDVINSRTQGFLALFSGDTGEIKSEVREQINAKVAEWREEGKAEIIPGVLFIDEVHMLDIESFSFLNRALESDMAPVLIMATNRGITRIRGTSYQSPHGIPIDLLDRLLIVSTTPYSEKDTKQILRIRCEEEDVEMSEDAYTVLTRIGLETSLRYAIQLITAASLVCRKRKGTEVQVDDIKRVYSLFLDESRSTQYMKEYQDAFLFNELKGETMDTS

SEQ ID NO: 7773 - protein, 418 aa, Homo sapiens; identical to SEQ ID NO: 7772

SEQ ID NO: 7774 - protein, 418 aa, Homo sapiens; identical to SEQ ID NO: 7772

SEQ ID NO: 7775 - protein, 392 aa, Homo sapiens
MAAAALGQIWARKLLSVPWLLCGPRRYASSSFKAADLQLEMTQKPHKKPGPGEPLVFGKTFTDHMLMVEWNDKGWGQPRIQPFQNLTLHPASSSLHYSLQLFEGMKAFKGKDQQVRLFRPWLNMDRMLRSAMRLCLPSFDKLELLECIRRLIEVDKDWVPDAAGTSLYVRPVLIGNEPSLGVSQPTRALLFVILCPVGAYFPGGSVTPVSLLADPAFIRAWVGGVGNYKLGGNYGPTVLVQQEALKRGCEQVLWLYGPDHQLTEVGTMNIFVYWTHEDGVLELVTPPLNGVILPGVVRQSLLDMAQTWGEFRVVERTITMKQLLRALEEGRVREVFGSGTACQVCPVHRILYKDRNLHIPTMENGPELILRFQKELKEIQYGIRAHEWMFPV

SEQ ID NO: 7776 - protein, 352 aa, Homo sapiens
MTQKPHKKPGPGEPLVFGKTFTDHMLMVEWNDKGWGQPRIQPFQNLTLHPASSSLHYSLQLFEGMKAFKGKDQQVRLFRPWLNMDRMLRSAMRLCLPSFDKLELLECIRRLIEVDKDWVPDAAGTSLYVRPVLIGNEPSLGVSQPTRALLFVILCPVGAYFPGGSVTPVSLLADPAFIRAWVGGVGNYKLGGNYGPTVLVQQEALKRGCEQVLWLYGPDHQLTEVGTMNIFVYWTHEDGVLELVTPPLNGVILPGVVRQSLLDMAQTWGEFRVVERTITMKQLLRALEEGRVREVFGSGTACQVCPVHRILYKDRNLHIPTMENGPELILRFQKELKEIQYGIRAHEWMFPV

SEQ ID NO: 7777 - protein, 352 aa, Homo sapiens; identical to SEQ ID NO: 7776

SEQ ID NO: 7778 - protein, 365 aa, Homo sapiens
MWLRSHRQLCLAFLLVCVLSVIFFLHIHQDSFPHGLGLSILCPDRRLVTPPVAIFCLPGTAMGPNASSSCPQHPASLSGTWTVYPNGRFGNQMGQYATLLALAQLNGRRAFILPAMHAALAPVFRITLPVLAPEVDSRTPWRELQLHDWMSEEYADLRDPFLKLSGFPCSWTFFHHLREQIRREFTLHDHLREEAQSVLGQLRLGRTGDRPRTFVGVHVRRGDYLQVMPQRWKGVVGDSAYLRQAMDWFRARHEAPVFVVTSNGMEWCKENIDTSQGDVTFAGDGQEATPWKDFALLTQCNHTIMTIGTFGFWAAYLAGGDTVYLANFTLPDSEFLKIFKPEAAFLPEWVGINADLSPLWTLAKP

SEQ ID NO: 7779 - protein, 141 aa, Homo sapiens
MEMLQGLLLLLLLSMGGAWASREPLRPWCHPINAILAVEKEGCPVCITVNTTICAGYCPTMMRVLQAVLPPLPQVVCTYRDVRFESIRLPGCPRGVDPVVSFPVALSCRCGPCRRSTSDCGGPKDHPLTCDHPQLSGLLFL

SEQ ID NO: 7780 - protein, 127 aa, Homo sapiens
MGGAWASREPLRPWCHPINAILAVEKEGCPVCITVNTTICAGYCPTMMRVLQAVLPPLPQVVCTYRDVRFESIRLPGCPRGVDPVVSFPVALSCRCGPCRRSTSDCGGPKDHPLTCDHPQLSGLLFL

SEQ ID NO: 7781 - protein, 594 aa, Homo sapiens
MWRWIRQQLGFDPPHQSDTRTIYVANRFPQNGLYTPQKFIDNRIISSKYTVWNFVPKNLFEQFRRVANFYFLIIFLVQLMIDTPTSPVTSGLPLFFVITVTAIKQGYEDWLRHNSDNEVNGAPVYVVRSGGLVKTRSKNIRVGDIVRIAKDEIFPADLVLLSSDRLDGSCHVTTASLDGETNLKTHVAVPETALLQTVANLDTLVAVIECQQPEADLYRFMGRMIITQQMEEIVRPLGPESLLLRGARLKNTKEIFGVAVYTGMETKMALNYKSKSQKRSAVEKSMNTFLIIYLVILISEAVISTILKYTWQAEEKWDEPWYNQKTEHQRNSSKILRFISDFLAFLVLYNFIIPISLYVTVEMQKFLGSFFIGWDLDLYHEESDQKAQVNTSDLNEELGQVEYVFTDKTGTLTENEMQFRECSINGMKYQEINGRLVPEGPTPDSSEGNLSYLSSLSHLNNLSHLTTSSSFRTSPENETELIKEHDLFFKAVSLCHTVQISNVQTDCTGDGPWQSNLAPSQLEYYASSPDEKALVEAAARIGIVFIGNSEETMEVKTLGKLERYKLLHILEFDSDRRRMSVIVQAPSGNQSKLS

SEQ ID NO: 7782 - protein, 1170 aa, Homo sapiens
MWRWIRQQLGFDPPHQSDTRTIYVANRFPQNGLYTPQKFIDNRIISSKYTVWNFVPKNLFEQFRRVANFYFLIIFLVQLMIDTPTSPVTSGLPLFFVITVTAIKQGYEDWLRHNSDNEVNGAPVYVVRSGGLVKTRSKNIRVGDIVRIAKDEIFPADLVLLSSDRLDGSCHVTTASLDGETNLKTHVAVPETALLQTVANLDTLVAVIECQQPEADLYRFMGRMIITQQMEEIVRPLGPESLLLRGARLKNTKEIFGVAVYTGMETKMALNYKSKSQKRSAVEKSMNTFLIIYLVILISEAVISTILKYTWQAEEKWDEPWYNQKTEHQRNSSKILRFISDFLAFLVLYNFIIPISLYVTVEMQKFLGSFFIGWDLDLYHEESDQKAQVNTSDLNEELGQVEYVFTDKTGTLTENEMQFRECSINGMKYQEINGRLVPEGPTPDSSEGNLSYLSSLSHLNNLSHLTTSSSFRTSPENETELIKEHDLFFKAVSLCHTVQISNVQTDCTGDGPWQSNLAPSQLEYYASSPDEKALVEAAARIGIVFIGNSEETMEVKTLGKLERYKLLHILEFDSDRRRMSVIVQAPSGEKLLFAKGAESSILPKCIGGEIEKTRIHVDEFALKGLRTLCIAYRKFTSKEYEEIDKRIFEARTALQQREEKLAAVFQFIEKDLILLGATAVEDRLQDKVRETIEALRMAGIKVWVLTGDKHETAVSVSLSCGHFHRTMNILELINQKSDSECAEQLRQLARRITEDHVIQHGLVVDGTSLSLALREHEKLFMEVCRNCSAVLCCRMAPLQKAKVIRLIKISPEKPITLAVGDGANDVSMIQEAHVGIGIMGKEGRQAARNSDYAIARFKFLSKLLFVHGHFYYIRIATLNVCFITPQFLYQFYCLFSQQTLYDSVYLTLYNICFTSLPILIYSLLEQHVDPHVLQNKPTLYRDISKNRLLSIKTFLYWTILGFSHAFIFFFGSYLLIGKDTSLLGNGQMFGNWTFGTLVFTVMVITVTVKMALETHFWTWINHLVTWGSIIFYFVFSLFYGGILWPFLGSQNMYFVFIQLLSSGSAWFAIILMVVTCLFLDIIKKVFDRHLHPTSTEKAQLTETNAGIKCLDSMCCFPEGEAACASVGRMLERVIGRCSPTHISRSWSASDPFYTNDRSILTLSTMDSSTC

SEQ ID NO: 7783 - protein, 1098 aa, Homo sapiens
MIDTPTSPVTSGLPLFFVITVTAIKQGYEDWLRHNSDNEVNGAPVYVVRSGGLVKTRSKNIRVGDIVRIAKDEIFPADLVLLSSDRLDGSCHVTTASLDGETNLKTHVAVPETALLQTVANLDTLVAVIECQQPEADLYRFMGRMIITQQMEEIVRPLGPESLLLRGARLKNTKEIFGVAVYTGMETKMALNYKSKSQKRSAVEKSMNTFLIIYLVILISEAVISTILKYTWQAEEKWDEPWYNQKTEHQRNSSKILRFISDFLAFLVLYNFIIPISLYVTVEMQKFLGSFFIGWDLDLYHEESDQKAQVNTSDLNEELGQVEYVFTDKTGTLTENEMQFRECSINGMKYQEINGRLVPEGPTPDSSEGNLSYLSSLSHLNNLSHLTTSSSFRTSPENETELIKEHDLFFKAVSLCHTVQISNVQTDCTGDGPWQSNLAPSQLEYYASSPDEKALVEAAARIGIVFIGNSEETMEVKTLGKLERYKLLHILEFDSDRRRMSVIVQAPSGEKLLFAKGAESSILPKCIGGEIEKTRIHVDEFALKGLRTLCIAYRKFTSKEYEEIDKRIFEARTALQQREEKLAAVFQFIEKDLILLGATAVEDRLQDKVRETIEALRMAGIKVWVLTGDKHETAVSVSLSCGHFHRTMNILELINQKSDSECAEQLRQLARRITEDHVIQHGLVVDGTSLSLALREHEKLFMEVCRNCSAVLCCRMAPLQKAKVIRLIKISPEKPITLAVGDGANDVSMIQEAHVGIGIMGKEGRQAARNSDYAIARFKFLSKLLFVHGHFYYIRIATLVQYFFYKNVCFITPQFLYQFYCLFSQQTLYDSVYLTLYNICFTSLPILIYSLLEQHVDPHVLQNKPTLYRDISKNRLLSIKTFLYWTILGFSHAFIFFFGSYLLIGKDTSLLGNGQMFGNWTFGTLVFTVMVITVTVKMALETHFWTWINHLVTWGSIIFYFVFSLFYGGILWPFLGSQNMYFVFIQLLSSGSAWFAIILMVVTCLFLDIIKKVFDRHLHPTSTEKAQLTETNAGIKCLDSMCCFPEGEAACASVGRMLERVIGRCSPTHISRSWSASDPFYTNDRSILTLSTMDSSTC

SEQ ID NO: 7784 - protein, 1177 aa, Homo sapiens
MWRWIRQQLGFDPPHQSDTRTIYVANRFPQNGLYTPQKFIDNRIISSKYTVWNFVPKNLFEQFRRVANFYFLIIFLVQLMIDTPTSPVTSGLPLFFVITVTAIKQGYEDWLRHNSDNEVNGAPVYVVRSGGLVKTRSKNIRVGDIVRIAKDEIFPADLVLLSSDRLDGSCHVTTASLDGETNLKTHVAVPETALLQTVANLDTLVAVIECQQPEADLYRFMGRMIITQQMEEIVRPLGPESLLLRGARLKNTKEIFGVAVYTGMETKMALNYKSKSQKRSAVEKSMNTFLIIYLVILISEAVISTILKYTWQAEEKWDEPWYNQKTEHQRNSSKILRFISDFLAFLVLYNFIIPISLYVTVEMQKFLGSFFIGWDLDLYHEESDQKAQVNTSDLNEELGQVEYVFTDKTGTLTENEMQFRECSINGMKYQEINGRLVPEGPTPDSSEGNLSYLSSLSHLNNLSHLTTSSSFRTSPENETELIKEHDLFFKAVSLCHTVQISNVQTDCTGDGPWQSNLAPSQLEYYASSPDEKALVEAAARIGIVFIGNSEETMEVKTLGKLERYKLLHILEFDSDRRRMSVIVQAPSGEKLLFAKGAESSILPKCIGGEIEKTRIHVDEFALKGLRTLCIAYRKFTSKEYEEIDKRIFEARTALQQREEKLAAVFQFIEKDLILLGATAVEDRLQDKVRETIEALRMAGIKVWVLTGDKHETAVSVSLSCGHFHRTMNILELINQKSDSECAEQLRQLARRITEDHVIQHGLVVDGTSLSLALREHEKLFMEVCRNCSAVLCCRMAPLQKAKVIRLIKISPEKPITLAVGDGANDVSMIQEAHVGIGIMGKEGRQAARNSDYAIARFKFLSKLLFVHGHFYYIRIATLVQYFFYKNVCFITPQFLYQFYCLFSQQTLYDSVYLTLYNICFTSLPILIYSLLEQHVDPHVLQNKPTLYRDISKNRLLSIKTFLYWTILGFSHAFIFFFGSYLLIGKDTSLLGNGQMFGNWTFGTLVFTVMVITVTVKMALETHFWTWINHLVTWGSIIFYFVFSLFYGGILWPFLGSQNMYFVFIQLLSSGSAWFAIILMVVTCLFLDIIKKVFDRHLHPTSTEKAQLTETNAGIKCLDSMCCFPEGEAACASVGRMLERVIGRCSPTHISRSWSASDPFYTNDRSILTLSTMDSSTC

SEQ ID NO: 7785 - protein, 837 aa, Homo sapiens
MDPGSRWRNLPSGPSLKHLTDPSYGIPREQQKAALQELTRAHVESFNYAVHEGLGLAVQAIPPFEFAFKDERISFTILDAVISPPTVPKGTICKEANVYPAECRGRRSTYRGKLTADINWAVNGISKGIIKQFLGYVPIMVKSKLCNLRNLPPQALIEHHEEAEEMGGYFIINGIEKVIRMLIMPRRNFPIAMIRPKWKTRGPGYTQYGVSMHCVREEHSAVNMNLHYLENGTVMLNFIYRKELFFLPLGFALKALVSFSDYQIFQELIKGKEDDSFLRNSVSQMLRIVMEEGCSTQKQVLNYLGECFRVKLNVPDWYPNEQAAEFLFNQCICIHLKSNTEKFYMLCLMTRKLFALAKGECMEDNPDSLVNQEVLTPGQLFLMFLKEKLEGWLVSIKIAFDKKAQKTSVSMNTDNLMRIFTMGIDLTKPFEYLFATGNLRSKTGLGLLQDSGLCVVADKLNFIRYLSHFRCVHRGADFAKMRTTTVRRLLPESWGFLCPVHTPDGEPCGLMNHLTAVCEVVTQFVYTASIPALLCNLGVTPIDGAPHRSYSECYPVLLDGVMVGWVDKDLAPGIADSLRHFKVLREKRIPPWMEVVLIPMTGKPSLYPGLFLFTTPCRLVRPVQNLALGKEELIGTMEQIFMNVAIFEDEVFAGVTTHQELFPHSLLSVIANFIPFSDHNQSPRNMYQCQMGKQTMGFPLLTYQDRSDNKLYRLQTPQSPLVRPSMYDYYDMDNYPIGTNAIVAVISYTGYDMEDAMIVNKASWERGFAHGSVYKSEFIDLSEKIKQGDSSLVFGIKPGDPRVLQKLDDDGLPFIGAKLQYGDPYYSYLNLNTGESF

SEQ ID NO: 7786 - protein, 1079 aa, Homo sapiens
MDPGSRWRNLPSGPSLKHLTDPSYGIPREQQKAALQELTRAHVESFNYAVHEGLGLAVQADINWAVNGISKGIIKQFLGYVPIMVKSKLCNLRNLPPQALIEHHEEAEEMGGYFIINGIEKVIRMLIMPRRNFPIAMIRPKWKTRGPGYTQYGVSMHCVREEHSAVNMNLHYLENGTVMLNFIYRKELFFLPLGFALKALVSFSDYQIFQELIKGKEDDSFLRNSVSQMLRIVMEEGCSTQKQVLNYLGECFRVKLNVPDWYPNEQAAEFLFNQCICIHLKSNTEKFYMLCLMTRKLFALAKGECMEDNPDSLVNQEVLTPGQLFLMFLKEKLEGWLVSIKIAFDKKAQKTSVSMNTDNLMRIFTMGIDLTKPFEYLFATGNLRSKTGLGLLQDSGLCVVADKLNFIRYLSHFRCVHRGADFAKMRTTTVRRLLPESWGFLCPVHTPDGEPCGLMNHLTAVCEVVTQFVYTASIPALLCNLGVTPIDGAPHRSYSECYPVLLDGVMVGWVDKDLAPGIADSLRHFKVLREKRIPPWMEVVLIPMTGKPSLYPGLFLFTTPCRLVRPVQNLALGKEELIGTMEQIFMNVAIFEDEVFAGVTTHQELFPHSLLSVIANFIPFSDHNQSPRNMYQCQMGKQTMGFPLLTYQDRSDNKLYRLQTPQSPLVRPSMYDYYDMDNYPIGTNAIVAVISYTGYDMEDAMIVNKASWERGFAHGSVYKSEFIDLSEKIKQGDSSLVFGIKPGDPRVLQKLDDDGLPFIGAKLQYGDPYYSYLNLNTGESFVMYYKSKENCVVDNIKVCSNDTGSGKFKCVCITMRVPRNPTIGDKFASRHGQKGILSRLWPAEDMPFTESGMVPDILFNPHGFPSRMTIGMLIESMAGKSAALHGLCHDATPFIFSEENSALEYFGEMLKAAGYNFYGTERLYSGISGLELEADIFIGVVYYQRLRHMVSDKFQVRTTGARDRVTNQPIGGRNVQGGIRFGEMERDALLAHGTSFLLHDRLFNCSDRSVAHVCVKCGSLLSPLLEKPPPSWSAMRNRKYNCTLCSRSDTIDTVSVPYVFRYFVAELAAMNIKVKLDVV

SEQ ID NO: 7787 - protein, 824 aa, Homo sapiens [sequence omitted]

SEQ ID NO: 7788 - protein, 1135 aa, Homo sapiens
MDPGSRWRNLPSGPSLKHLTDPSYGIPREQQKAALQELTRAHVESFNYAVHEGLGLAVQAIPPFEFAFKDERISFTILDAVISPPTVPKGTICKEANVYPAECRGRRSTYRGKLTADINWAVNGISKGIIKQFLGYVPIMVKSKLCNLRNLPPQALIEHHEEAEEMGGYFIINGIEKVIRMLIMPRRNFPIAMIRPKWKTRGPGYTQYGVSMHCVREEHSAVNMNLHYLENGTVMLNFIYRKELFFLPLGFALKALVSFSDYQIFQELIKGKEDDSFLRNSVSQMLRIVMEEGCSTQKQVLNYLGECFRVKLNVPDWYPNEQAAEFLFNQCICIHLKSNTEKFYMLCLMTRKLFALAKGECMEDNPDSLVNQEVLTPGQLFLMFLKEKLEGWLVSIKIAFDKKAQKTSVSMNTDNLMRIFTMGIDLTKPFEYLFATGNLRSKTGLGLLQDSGLCVVADKLNFIRYLSHFRCVHRGADFAKMRTTTVRRLLPESWGFLCPVHTPDGEPCGLMNHLTAVCEVVTQFVYTASIPALLCNLGVTPIDGAPHRSYSECYPVLLDGVMVGWVDKDLAPGIADSLRHFKVLREKRIPPWMEVVLIPMTGKPSLYPGLFLFTTPCRLVRPVQNLALGKEELIGTMEQIFMNVAIFEDEVFAGVTTHQELFPHSLLSVIANFIPFSDHNQSPRNMYQCQMGKQTMGFPLLTYQDRSDNKLYRLQTPQSPLVRPSMYDYYDMDNYPIGTNAIVAVISYTGYDMEDAMIVNKASWERGFAHGSVYKSEFIDLSEKIKQGDSSLVFGIKPGDPRVLQKLDDDGLPFIGAKLQYGDPYYSYLNLNTGESFVMYYKSKENCVVDNIKVCSNDTGSGKFKCVCITMRVPRNPTIGDKFASRHGQKGILSRLWPAEDMPFTESGMVPDILFNPHGFPSRMTIGMLIESMAGKSAALHGLCHDATPFIFSEENSALEYFGEMLKAAGYNFYGTERLYSGISGLELEADIFIGVVYYQRLRHMVSDKFQVRTTGARDRVTNQPIGGRNVQGGIRFGEMERDALLAHGTSFLLHDRLFNCSDRSVAHVCVKCGSLLSPLLEKPPPSWSAMRNRKYNCTLCSRSDTIDTVSVPYVFRYFVAELAAMNIKVKLDVV

SEQ ID NO: 7789 - protein, 494 aa, Homo sapiens [sequence omitted]

SEQ ID NO: 7790 - protein, 759 aa, Homo sapiens
MASLLQDQLTTDQDLLLMQEGMPMRKVRSKSWKKLRYFRLQNDGMTVWHARQARGSAKPSFSISDVETIRNGHDSELLRSLAEELPLEQGFTIVFHGRRSNLDLMANSVEEAQIWMRGLQLLVDLVTSMDHQERLDHDWFQRGDKNQDGKMSFQEVQRLLHLMNVEMDQEYAFSLFQAADTSQSGTLEGEEFVQFYKALTKRAEVQELFESFSADGQKLTLLEFLDFLQEEQKERDCTSELALELIDRYEPSDSGKLRHVLSMDGFLSYLCSKDGDIFNPACLPIYQDMTQPLNHYFICSSHNTYLVGDQLCGQSSVEGYIRALKRGCRCVEVDVWDGPSGEPVVYHGHTLTSRILFKDVVATVAQYAFQTSDYPVILSLETHCSWEQQQTMARHLTEILGEQLLSTTLDGVLPTQLPSPEELRRKILVKGKKLTLEEDLEYEEEEAEPELEESELALESQFETEPEPQEQNLQNKDKKKKSKPILCPALSSLVIYLKSVSFRSFTHSKEHYHFYEISSFSETKAKRLIKEAGNEFVQHNTWQLSRVYPSGLRTDSSNYNPQELWNAGCQMVAMNMQTAGLEMDICDGHFRQNGGCGYVLKPDFLRDIQSSFHPEKPISPFKAQTLLIQVISGQQLPKVDKTKEGSIVDPLVKVQIFGVRLDTARQETNYVENNGFNPYWGQTLCFRVLVPELAMLRFVVMDYDWKSRNDFIGQYTLPWTCMQQGYRHIHLLSKDGISLRPASIFVYICIQEGLEGDES

SEQ ID NO: 7791 - protein, 762 aa, Homo sapiens
MASLLQDQLTTDQDLLLMQEGMPMRKVRSKSWKKLRYFRLQNDGMTVWHARQARGSAKPSFSISDVETIRNGHDSELLRSLAEELPLEQGFTIVFHGRRSNLDLMANSVEEAQIWMRGLQLLVDLVTSMDHQERLDQWLSDWFQRGDKNQDGKMSFQEVQRLLHLMNVEMDQEYAFSLFQAADTSQSGTLEGEEFVQFYKALTKRAEVQELFESFSADGQKLTLLEFLDFLQEEQKERDCTSELALELIDRYEPSDSGKLRHVLSMDGFLSYLCSKDGDIFNPACLPIYQDMTQPLNHYFICSSHNTYLVGDQLCGQSSVEGYIRALKRGCRCVEVDVWDGPSGEPVVYHGHTLTSRILFKDVVATVAQYAFQTSDYPVILSLETHCSWEQQQTMARHLTEILGEQLLSTTLDGVLPTQLPSPEELRRKILVKGKKLTLEEDLEYEEEEAEPELEESELALESQFETEPEPQEQNLQNKDKKKKSKPILCPALSSLVIYLKSVSFRSFTHSKEHYHFYEISSFSETKAKRLIKEAGNEFVQHNTWQLSRVYPSGLRTDSSNYNPQELWNAGCQMVAMNMQTAGLEMDICDGHFRQNGGCGYVLKPDFLRDIQSSFHPEKPISPFKAQTLLIQVISGQQLPKVDKTKEGSIVDPLVKVQIFGVRLDTARQETNYVENNGFNPYWGQTLCFRVLVPELAMLRFVVMDYDWKSRNDFIGQYTLPWTCMQQGYRHIHLLSKDGISLRPASIFVYICIQEGLEGDES

SEQ ID NO: 7792 - protein, 300 aa, Homo sapiens
MNIILEILLLLITIIYSYLESLVKFFIPQRRKSVAGEIVLITGAGHGIGRQTTYEFAKRQSILVLWDINKRGVEETAAECRKLGVTAHAYVVDCSNREEIYRSLNQVKKEVGDVTIVVNNAGTVYPADLLSTKDEEITKTFEVNILGHFWITKALLPSMMERNHGHIVTVASVCGHEGIPYLIPYCSSKFAAVGFHRGLTSELQALGKTGIKTSCLCPVFVNTGFTKNPSTRLWPVLETDEVVRSLIDGILTNKKMIFVPSYINIFLRLQKFLPERASAILNRMQNIQFEAVVGHKIKMK

SEQ ID NO: 7793 - protein, 232 aa, Homo sapiens
  VARIANT (1)...(232): Xaa = Any Amino Acid
MNIILEILLLLITIIYSYLESLVKFFIPQRRKSVAGEIVLITGAGHGIGRQTTYEFAKRQSILVLWDINKRGVEETAAECRKLGVTAHAYVVDCSNREEIYRSLNQVKKEVGDVTIVVNNAGTVYPADLLSTKDEEITKTFEVNILGHFWITKALLPSMMERNHGHIVTVASVCGHEGIPYLIPYCSSKFAAVGFHRGLTSELQALGKTGIKTSCLCPVFVNTGFTKNPSTX

SEQ ID NO: 7794 - protein, 324 aa, Homo sapiens
MAGVNGFGRIGCLVTRVAFNSGKVDIVAINDRFIDLNYMAENGKLVISGNPITIFQERDPSKIKWGNADAEYVVESTGVFTPMEKAGAHLQEGAKRVIISPHFVDAPMLVMGMNHEKYDNSLKIISNAFCTTNCLAPLANVIHDNFGIVEGLMTTVHAITATQKTVDGPSGKLWRDSCRALQNIIPASTGAAKAVGKALSELNGKLTGMAFCVTTAKVSVINLTCHLEKPAKYDDIKKVVKQTSEGPLKGILGYTEHQAVSSNFNSNTHSSTFNVRAGIALNNHFVKIISWYSDEFGYSNKVVDLMAHMASKRKTTRPPAPERA

SEQ ID NO: 7795 - protein, 432 aa, Homo sapiens
MASPVAAQAGKLLRALALRPRFLAAGSQAVQLTSRRWLNLQEYQSKKLMSDNGVRVQRFFVADTANEALEAAKRLNAKEIVLKAQILAGGRGKGVFNSGLKGGVHLTKDPNVVGQLAKQMIGYNLATKQTPKEGVKVNKVMVAEALDISRETYLAILMDRSCNGPVLVGSPQGGVDIEEVAASNPELIFKEQIDIFEGIKDSQAQRMAENLGFVGPLKSQAADQITKLYNLFLKIDATQVEVNPFGETPEGQVVCFDAKINFDDNAEFRQKDIFAMDDKSENEPIENEAAKYDLKYIGLDGNIACFVNGAGLAMATCDIIFLNGGKPANFLDLGGGVKEAQVYQAFKLLTADPKVEAILVNIFGGIVNCAIIANGITKACRELELKVPLVVRLEGTNVQEAQKILNNSGLPITSAIDLEDAAKKAVASVAKK

SEQ ID NO: 7796 - protein, 432 aa, Homo sapiens; identical to SEQ ID NO: 7795

SEQ ID NO: 7797 - protein, 309 aa, Homo sapiens [sequence omitted]

SEQ ID NO: 7798 - protein, 228 aa, Homo sapiens
MAKHIQKEIQRGVESWVSLGNRRPHLSIILVGDNPASHTYVRNKIRAASAVGICSELILKPKDVSQEELLDVTDQLNMDPRVSGILVQLPLPDHVDERTICNGIAPEKDVDGFHIINIGRLCLDQHSLIPATASAVWEIIKRTGIQTFGKNVVVAGRSKNVGMPIAMLLHTDGEHERPGGDATVTIAHRYTPKEQLKIHTQLADIIIVAAGSLSISHAGVQWRNHGSL

SEQ ID NO: 7799 - protein, 70 aa, Homo sapiens
MVKEGAAVIDVGINYVHDPVTGKTKLVGDVDFEAVKKKAGFITPVPGGVGPMTVAMLLKNTLLAAKKIIY

SEQ ID NO: 7800 - protein, 289 aa, Homo sapiens
MAKHIQKEIQRGVESWVSLGNRRPHLSIILVGDNPASHTYVRNKIRAASAVGICSELILKPKDVSQEELLDVTDQLNMDPRVSGILVQLPLPDHVDERTICNGIAPEKDVDGFHIINIGRLCLDQHSLIPATASAVWEIIKRTGIQTFGKNVVVAGRSKNVGMPIAMLLHTDGEHERPGGDATVTIAHRYTPKEQLKIHTQLADIIIVAAGKSLLITSDMVKEGAAVIDVGINYVHDPVTGKTKLVGDVDFEAVKKKAGFITPVPGGVGPMTVAMLLKNTLLAAKKIIY

SEQ ID NO: 7801 - protein, 289 aa, Homo sapiens
MAKHIQKEIQRGVESWVSLGNRRPHLSIILVGDNPASHTYVRNKIRAASAVGICSELILKPKDVSQEELLDVTDQLNMDPRVSGILVQLPLPDHVDERTICNGIAPEKDVDGFHIINIGRLCLDQHSLIPATASAVWEIIKRTGIQTFGKNVVVAGRSKNVGMPIAMLLHTDGEHERPGGDATVTIAHRYTPKEQLKIHTQLADIIIVAAGIPKLITSDMVKEGAAVIDVGINYVHDPVTGKTKLVGDVDFEAVKKKAGFITPVPGGVGPMTVAMLLKNTLLAAKKIIY

SEQ ID NO: 7802 - protein, 289 aa, Homo sapiens; identical to SEQ ID NO: 7801

SEQ ID NO: 7803 - protein, 840 aa, Homo sapiens
MVSVFRSEEMCLSQLFLQVEAAYCCVAELGELGLVQFKDLNMNVNSFQRKFVNEVRRCESLERILRFLEDEMQNEIVVQLLEKSPLTPLPREMITLETVLEKLEGELQEANQNQQALKQSFLELTELKYLLKKTQDFFETETNLADDFFTEDTSGLLELKAVPAYMTGKLGFIAGVINRERMASFERLLWRICRGNVYLKFSEMDAPLEDPVTKEEIQKNIFIIFYQGEQLRQKIKKICDGFRATVYPCPEPAVERREMLESVNVRLEDLITVITQTESHRQRLLQEAAANWHSWLIKVQKMKAVYHILNMCNIDVTQQCVIAEIWFPVADATRIKRALEQGMELSGSSMAPIMTTVQSKTAPPTFNRTNKFTAGFQNIVDAYGVGSYREINPAPYTIITFPFLFAVMFGDCGHGTVMLLAALWMILNERRLLSQKTDNEIWNTFFHGRYLILLMGIFSIYTGLIYNDCFSKSLNIFGSSWSVQPMFRNGTWNTHVMEESLYLQLDPAIPGVYFGNPYPFGIDPIWNLASNKLTFLNSYKMKMSVILGIVQMVFGVILSLFNHIYFRRTLNIILQFIPEMIFILCLFGYLVFMIIFKWCCFDVHVSQHAPSILIHFINMFLFNYSDSSNAPLYKHQQEVQSFFVVMALISVPWMLLIKPFILRASHRKSQLQASRIQEDATENIEGDSSSPSSRSGQRTSADTHGALDDHGEEFNFGDVFVHQAIHTIEYCLGCISNTASYLRLWALSLAHAQLSEVLWTMVMNSGLQTRGWGGIVGVFIIFAVFAVLTVAILLIMEGLSAFLHALRLHWVEFQNKFYVGDGYKFSPFSFKHILDGTAEE

SEQ ID NO: 7804 - protein, 840 aa, Homo sapiens; identical to SEQ ID NO: 7803

SEQ ID NO: 7805 - protein, 680 aa, Homo sapiens
MVSVFRSEEMCLSQLFLQVEAAYCCVAELGELGLVQFKDLNMNVNSFQRKFVNEVRRCESLERILRFLEDEMQNEIVVQLLEKSPLTPLPREMITLETVLEKLEGELQEANQNQQALKQSFLELTELKYLLKKTQDFFETETNLADDFFTEDTSGLLELKAVPAYMTGKLGFIAGVINRERMASFERLLWRICRGNVYLKFSEMDAPLEDPVTKEEIQKNIFIIFYQGEQLRQKIKKICDGFRATVYPCPEPAVERREMLESVNVRLEDLITVITQTESHRQRLLQEAAANWHSWLIKVQKMKAVYHILNMCNIDVTQQCVIAEIWFPVADATRIKRALEQGMELSGSSMAPIMTTVQSKTAPPTFNRTNKFTAGFQNIVDAYGVGSYREINPAPYTIITFPFLFAVMFGDCGHGTVMLLAALWMILNERRLLSQKTDNEIWNTFFHGRYLILIHFINMFLFNYSDSSNAPLYKHQQEVQSFFVVMALISVPWMLLIKPFILRASHRKSQLQASRIQEDATENIEGDSSSPSSRSGQRTSADTHGALDDHGEEFNFGDVFVHQAIHTIEYCLGCISNTASYLRLWALSLAHAQLSEVLWTMVMNSGLQTRGWGGIVGVFIIFAVFAVLTVAILLIMEGLSAFLHALRLHWVEFQNKFYVGDGYKFSPFSFKHILDGTAEE

SEQ ID NO: 7806 - protein, 840 aa, Homo sapiens; identical to SEQ ID NO: 7803

SEQ ID NO: 7807 - protein, 840 aa, Homo sapiens; identical to SEQ ID NO: 7803

SEQ ID NO: 7808 - protein, 840 aa, Homo sapiens; identical to SEQ ID NO: 7803

SEQ ID NO: 7809 - protein, 414 aa, Homo sapiens
MADYLIRGGTSYMPEDGLTAQQLFTGAAARDRLTYNNFLILPGFIDFIADKVDLTSALTWKITLKMPLISSPMDAVTEADMAIAMALMGGIGFIHHHCTPEFQANEVRKVKKFERGFIMDPVVLSPSHTVGDVLEAKMQHGFSGIPITETGTMGSKLDSHKQLLCGAAVGTREDDKYRLDLLTQVGVDVIVLDLSQGNSLYQMAMVYYIKQKYPHLQVIGGNMVTAAQAKNLIDAGVEGLHVGMGCSSICITQEVMAYSWPQGTAVYKVAEYARHFANGGIQTMGNMVKALALGASTVMMGSLLAATTEVPSKYFFSDGVWLKKYRGMGSLDALEKSSGSQKQYFMEGDKLKIAQGVSSSIQDKGSIQKFVSYLIAGIQHGCQDTGVCNLSVLLSMMYSGERKFEKWTMLAQIK

SEQ ID NO: 7810 - protein, 304 aa, Homo sapiens [sequence omitted]

SEQ ID NO: 7811 - protein, 250 aa, Homo sapiens
MERRLGVRAWVKENRGSFQPPVCNKLMHQEQLKVMFIGGPNTRKDYHIEEGEEVFYQLEGDMVLRVLEQGKHRDVVIRQGEIFLLPARVPHSPQRFANTVGLVVERRRLETELDGLRYYVGDTMDVLFEKWFYCKDLGTQLAPIIQEFFSSEQYRTGKPIPDQLLKEPPFPLSTRSIMEPMSLDAWLDSHHRELQAGTPLSLFGDTYETQVIAYGQGSSEGLRQNVDVWLWQLARLLGGDNGGTAPEPGP

SEQ ID NO: 7812 - protein, 341 aa, Homo sapiens
MRSGCSLGITNDVTQSMEISSTFWVLGVVPALSRAFSLLCKIATLKEKLIVPVAEEEATVQNNKITVVSVGQVGMACAISILGKSLADEFAFVDVLEDKLKGEMMDLQHGSLFLKTLKIVADKDYSVTASYKIVVVTAGVLQQEGERRDILTYVTWKISGLLKHHVIGSGCNPDSARFHCLMDEKFGIHPSSCHGRILGEHSDSSVAVWIGMNVTGFSLQELNPEIGTDNDSENWKEVHKMVVENAYEVNKLNGYTHWDIGLSVADLIESMLKNLSRIHLVSTMVKGMYGIENEVFLSLPYILNARGLTSVINQKLKDDEVAQFKKSTDTPWDIQKDLKDL

SEQ ID NO: 7813 - protein, 107 aa, Homo sapiens
MGRKRLITDSYPVVKRREGPAGHSKGELAPELGEEPQPRDEEEAELELLRQFDLAWQYGPCTGITRLQRWCRAKQMGLEPPPEVWQVLKTHPGDPRFQCSLWHLYPL

SEQ ID NO: 7814 - protein, 107 aa, Homo sapiens; identical to SEQ ID NO: 7813

SEQ ID NO: 7815 - protein, 414 aa, Homo sapiens
MTKARLFRLWLVLGSVFMILLIIVYWDSAGAAHFYLHTSFSRPHTGPPLPTPGPDRDRELTADSDVDEFLDKFLSAGVKQSDLPRKETEQPPAPGSMEESVRGYDWSPRDARRSPDQGRQQAERRSVLRGFCANSSLAFPTKERAFDDIPNSELSHLIVDDRHGAIYCYVPKVACTNWKRVMIVLSGSLLHRGAPYRDPLRIPREHVHNASAHLTFNKFWRRYGKLSRHLMKVKLKKYTKFLFVRDPFVRLISAFRSKFELENEEFYRKFAVPMLRLYANHTSLPASAREAFRAGLKVSFANFIQYLLDPHTEKLAPFNEHWRQVYRLCHPCQIDYDFVGKLETLDEDAAQLLQLLQVDRQLRFPPSYRNRTASSWEEDWFAKIPLAWRQQLYKLYEADFVLFGYPKPENLLRD

SEQ ID NO: 7816 - protein, 414 aa, Homo sapiens; identical to SEQ ID NO: 7815

SEQ ID NO: 7817 - protein, 178 aa, Homo sapiens
MLEKGSDRQQALHKGGPSPGALISAFCGSSGSGREICGSDSATAEAAAAPPAPRSPPARHQPLPPGRGRTNSRAWSSRIPSSRGPPCACCHLNGAPRPRRPQPWSLQTPAAPAGRSGYPLNDLSLQKPQPCPSGRGNRAFSPGTVGLRPPLRAPGHRDTAGKALARAEAPSGRQHNKP

SEQ ID NO: 7818 - protein, 303 aa, Homo sapiens
MGRKVHSNGSQFAEHSRSPRRTGRDCKPVRAPSMALGVSQLAGRSRCLCSESQGGYERFSSEYPEFCSKTKALAAIPPPVPPSATEPLDLGCSSCGTPLHDQGGPVEILPFLYLGSAYHAARRDMLDALGITALLNVSSDCPNHFEGHYQYKCIPVEDNHKADISSWFMEAIEYIDAVKDCRGRVLVHCQAGISRSATICLAYLMMKKRVRLEEAFEFVKQRRSIISPNFSFMGQLLQFESQVLATSCAAEAASPSGPLRERGKTPATPTSQFVFSFPVSVGVHSAPSSLPYLHSPITTSPSC

SEQ ID NO: 7819 - protein, 394 aa, Homo sapiens
MVTMEELREMDCSVLKRLMNRDENGGGAGGSGSHGTLGLPSGGKCLLLDCRPFLAHSAGYILGSVNVRCNTIVRRRAKGSVSLEQILPAEEEVRARLRSGLYSAVIVYDERSPRAESLREDSTVSLVVQALRRNAERTDICLLKGGYERFSSEYPEFCSKTKALAAIPPPVPPSATEPLDLGCSSCGTPLHDQGGPVEILPFLYLGSAYHAARRDMLDALGITALLNVSSDCPNHFEGHYQYKCIPVEDNHKADISSWFMEAIEYIDAVKDCRGRVLVHCQAGISRSATICLAYLMMKKRVRLEEAFEFVKQRRSIISPNFSFMGQLLQFESQVLATSCAAEAASPSGPLRERGKTPATPTSQFVFSFPVSVGVHSAPSSLPYLHSPITTSPSC

SEQ ID NO: 7820 - protein, 394 aa, Homo sapiens; identical to SEQ ID NO: 7819

SEQ ID NO: 7821 - protein, 394 aa, Homo sapiens; identical to SEQ ID NO: 7819

SEQ ID NO: 7822 - protein, 126 aa, Homo sapiens
MAGEIAKAQVARPGGNTVFGKIICKEIPAKIIFEDDQCLAFHDTSPQAPTRFLLISKKHISQISAAEDNDESLLGHLMIVGKKCAADLGLNKGYQMVVNKGSDGGQSVCQVHLHVLGGWQMHWPPG

SEQ ID NO: 7823 - protein, 664 aa, Homo sapiens
MSGVRGLSRLLSARRLALAKAWPTVLQTGTRGFHFTVDGNKRASAKVSDSISAQYPVVDHEFDAVVVGAGGAGLRAAFGLSEAGFNTACVTKLFPTRSHTVAAQGGINAALGNMEEDNWRWHFYDTVKGSDWLGDQDAIHYMTEQAPAAVVELENYGMPFSRTEDGKIYQRAFGGQSLKFGKGGQAHRCCCVADRTGHSLLHTLYGRSLRYDTSYFVEYFALDLLMENGECRGVIALCIEDGSIHRIRAKNTVVATGGYGRTYFSCTSAHTSTGDGTAMITRAGLPCQDLEFVQFHPTGIYGAGCLITEGCRGEGGILINSQGERFMERYAPVAKDLASRDVVSRSMTLEIREGRGCGPEKDHVYLQLHHLPPEQLATRLPGISETAMIFAGVDVTKEPIPVLPTVHYNMGGIPTNYKGQVLRHVNGQDQIVPGLYACGEAACASVHGANRLGANSLLDLVVFGRACALSIEESCRPGDKVPPIKPNAGEESVMNLDKLRFADGSIRTSELRLSMQKSMQNHAAVFRVGSVLQEGCGKISKLYGDLKHLKTFDRGMVWNTDLVETLELQNLMLCALQTIYGAEARKESRGAHAREDYKVRIDEYDYSKPIQGQQKKPFEEHWRKHTLSYVDVGTGKVTLEYRPVIDKTLNEADCATVPPAIRSY

SEQ ID NO: 7824 - protein, 664 aa, Homo sapiens; identical to SEQ ID NO: 7823

SEQ ID NO: 7825 - protein, 292 aa, Homo sapiens
MALAALMIALGSLGLHTWQAQAVPTILPLGLAPDTFDDTYVGCAEEMEEKAAPLLKEEMAHHALLRESWEAAQETWEDKRRGLTLPPGFKAQNGIAIMVYTNSSNTLYWELNQAVRTGGGSRELYMRHFPFKALHFYLIRALQLLRGSGGCSRGPGEVVFRGVGSLRFEPKRLGDSVRLGQFASSSLDKAVAHRFGNATLFSLTTCFGAPIQAFSVFPKEREVLIPPHEVFLVTRFSQDGAQSLVTLWSYNQTCSHFNCAYLGGEKRRGCVSAPGALGTGDLHMTKRHLQQP

SEQ ID NO: 7826 - protein, 292 aa, Homo sapiens; identical to SEQ ID NO: 7825

SEQ ID NO: 7827 - protein, 113 aa, Homo sapiens [sequence omitted]

SEQ ID NO: 7828 - protein, 550 aa, Homo sapiens
MPRIPASPLSCCPPDMLGPCMLLLLLLLGLRLQLSLGIIPVEEENPDFWNREAAEALGAAKKLQPAQTAAKNLIIFLGDGMGVSTVTAARILKGQKKDKLGPEIPLAMDRFPYVALSKTYNVDKHVPDSGATATAYLCGVKGNFQTIGLSAAARFNQCNTTRGNEVISVMNRAKKAGKSVGVVTTTRVQHASPAGTYAHTVNRNWYSDADVPASARQEGCQDIATQLISNMDIDVILGGGRKYMFRMGTPDPEYPDDYSQGGTRLDGKNLVQEWLAKRQGARYVWNRTELMQASLDPSVTHLMGLFEPGDMKYEIHRDSTLDPSLMEMTEAALRLLSRNPRGFFLFVEGGRIDHGHHESRAYRALTETIMFDDAIERAGQLTSEEDTLSLVTADHSHVFSFGGYPLRGSSIFGLAPGKARDRKAYTVLLYGNGPGYVLKDGARPDVTESESGSPEYRQQSAVPLDEETHAGEDVAVFARGPQAHLVHGVQEQTFIAHVMAFAACLEPYTACDLAPPAGTTDAAHPGRSVVPALLPLLAGTLLLLETATAP

SEQ ID NO: 7829 - protein, 229 aa, Homo sapiens
MNIRNAQPDDLMNMQHCNLLCLPENYQMKYYLYHGLSWPQLSYIAEDEDGKIVGYVLAKMEEEPDDVPHGHITSLAVKRSHRRLGLAQKLMDQASRAMIENFNAKYVSLHVRKSNRPALHLYSNTLNFQISEVEPKYYADGEDAYAMKRDLSQMADELRRQMDLKKGGYVVLGSRENQETQGSTLSDSEEACQQKNPATEESGSDSKEPKESVESTNVQDSSESSDSTS

SEQ ID NO: 7830 - protein, 553 aa, Homo sapiens
MAAPKTAAVGPLVGAVVQGTNSTRFLVFNSKTAELLSHHKVELTQEFPKEGWVEQDPKEILQSVYECIARTCEKLDELNIDISNIKAVGVSNQRETTVIWDKLTGEPLYNAVVWLDLRTQTTVEDLSKKIPGNSNFVKSKTGLPLSTYFSAVKLRWMLDNVRNVQKAVEEGRALFGTIDSWLIWSLTGGVNGGVHCTDVTNASRTMLFNIHSLEWDKELCDFFEIPMDLLPNVFSSSEIYGLIKTGALEGVPISGCLGDQCAALVGQMCFQEGQAKNTYGTGCFLLCNTGRKCVFSEHGLLTTVAYKLGREKPAYYALEGSVAIAGAVIRWLRDNLGIIETSGDIERLAKEVGTSYGCYFVPAFSGLYAPYWEPSARGILCGLTQFTNKCHIAFAALEAVCFQTREILEAMNRDCGIPLRHLQVDGGMTNNKVLMQLQADILHIPVIKPFMPETTALGAAMAAGAAEGVSVWSLEPQALSVLRMERFEPQIQATESEIRYATWKKAVMKSMGWVTSQSPEGGDPSIFSSLPLGFFIVSSMVMLIGARYISGVP

SEQ ID NO: 7831 - protein, 509 aa, Homo sapiens
MADYLISGGTRYQPEDGLTAQQLFASADDLTYNDFLILPGFIDFLAGEVDLTSALTRKITLKTPLISFPTDTVIEADMAIAMALMGGIGFIHHNCTPEFQANKVQKVKKFEQGFITDPVVLSPLHTVGDVLEAKMRHGFSGIPITETGTIGSKLVGILTSRDIDFLAEKDHTPSSVRMELVVAPAGVTFKEANEILQRSKKGKLPVVNDHDELVAIIARTDLKKNRDYPLASKDSHKQLLCGAVVGTCEDDKFRLGLLTQAGVDVIVLDSSQGNSVYQIAMVRYIKQKYPHLQVIGRNVVTAAQAKNLIDAGVDGLHVGMGCGSICITLEMMACGRTHGTAVYKVAEYAWRFGVPIIADGGIQTVGHVVKALALGASTVMMGSLLATTTEASGEYFFSDGVPLKKYQGMGSVDAMEKSSSSQKRYFSEADKVKFSQGILGSIQDKGSIQKFVPYLIAGIQHSCQDIGARSLAVLRSMMYSGELKFEKGTVSAQIEGGVHGLHSYERWLY

SEQ ID NO: 7832 - protein, 336 aa, Homo sapiens [sequence omitted]

SEQ ID NO: 7833 - protein, 327 aa, Homo sapiens
MADGELNVDSLITRLLEVRGCRPGKIVQMTEAEVRGLCIKSREIFLSQPILLELEAPLKICGDIHGQYTDLLRLFEYGGFPPEANYLFLGDYVDRGKQSLETICLLLAYKIKYPENFFLLRGNHECASINRIYGFYDECKRRFNIKLWKTFTDCFNCLPIAAIVDEKIFCCHGGLSPDLQSMEQIRRIMRPTDVPDTGLLCDLLWSDPDKDVQGWGENDRGVSFTFGADVVSKFLNRHDLDLICRAHQVVEDGYEFFAKRQLVTLFSAPNYCGEFDNAGGMMSVDETLMCSFQILKPSEKKAKYQYGGLNSGRPVTPPRTANPPKKR

SEQ ID NO: 7834 - protein, 327 aa, Homo sapiens; identical to SEQ ID NO: 7833

SEQ ID NO: 7835 - protein, 296 aa, Homo sapiens
MLNYDYVWDMVFHPNGAIEIRLHTTGYISSAFPFGAAQRYGNKVSEHTLGTVHTHSAHFKVDLDVAGLENWVWAEDMAFVPMAVPWSPEHQMQRLQVTRKLLETEEQATFPMGGATPRYLYLASNHSNKWGHPRGYRIQVRSFSGEPLPQNSSVERGFSWGRYQLVVTQRKEEEPSSTSIYNLNDPWTPTVDFTDFINNETIAGQDLVAWVTAGFLHIPHAEDIPNTVTVGNSVGFFLRPYNFFDEDPSFYSADSIYFRGDQDAGACEVNPLACLPQAAACAPDLPAFSHGGFSHN

SEQ ID NO: 7836 - protein, 130 aa, Homo sapiens [sequence omitted]

SEQ ID NO: 7837 - protein, 369 aa, Homo sapiens [sequence omitted]

SEQ ID NO: 7838 - protein, 246 aa, Homo sapiens
MSTTGQVIRCKAAILWKPGAPFSIEEVEVAPPKAKEVRIKVVATGLCGTEMKVLGSKHLDLLYPTILGHEGAGIVESIGEGVSTVKPGDKVITLFLPQCGECTSCLNSEGNFCIQFKQSKTQLMSDGTSRFTCKGKSIYHFGNTSTFCEYTVIKEISVAKIDAVAPLEKVCLISCGFSTGFGAAINTAKVTPGSTCAVLAWEESACLLSWVVKQQEQPGSLEWMSTRRNLRRHRNWVLLSASTLRT

SEQ ID NO: 7839 - protein, 246 aa, Homo sapiens; identical to SEQ ID NO: 7838

SEQ ID NO: 7840 - protein, 240 aa, Homo sapiens
MEPEGIIESNWNEIVDSFDDMSFSESLLCGTYAHGFGKPSDIQQCINMCAKVQKLQMEAPHIIMGTPGRVSDMLNWRYLSPKYIKMFVLDEADEMLSHRFKDQICDIFQMLNSNTQVVLLSATIPSDVLEVTKKFMRDPIRILVKKEELTLKDFTVSAMHGDMDQKERDVVMREYRSGSSRVLITTDLLPRGIDVQQLSLVINYDLPTNRENYIHRIGRGGQFGHKGVAINMVAEDKRTL

SEQ ID NO: 7841 - protein, 316 aa, Homo sapiens [sequence omitted]

SEQ ID NO: 7842 - protein, 275 aa, Homo sapiens [sequence omitted]

SEQ ID NO: 7843 - protein, 98 aa, Homo sapiens
MVSLLNCVVTVSPQNMGIGKNEDLPWPPLRNEFRYFQRVTTTSSVEGKQNLVIMGRKIWFSIPEKNRPLKNRINLVLRRDHKNLHKEINFLQEVWMMP

SEQ ID NO: 7844 - protein, 105 aa, Homo sapiens [sequence omitted]

SEQ ID NO: 7845 - protein, 90 aa, Homo sapiens
MAPKYILEQFLQQKLLIDITEYELVPEYVVMTKEEVTVLLALYKLRENQLPRIQAGDAVARYFGIKHGQVVKIIRPSEMAGRYLTYRLMQ

SEQ ID NO: 7846 - protein, 1075 aa, Homo sapiens [sequence omitted]

SEQ ID NO: 7847 - protein, 102 aa, Homo sapiens [sequence omitted]

SEQ ID NO: 7848 - protein, 447 aa, Homo sapiens
MRFRIYKRKVLILTLVVAACGFVLWSSNGRQRKNEALAPPLLDAEPARGAGGRGGDHPSVAVGIRRVSNVSAASLVPAVPQPEADNLTLRYRSLVYQLNFDQTLRNVDKAGTWAPRELVLVVQVHNRPEYLRLLLDSLRKAQGIDNVLVIFSHDFWSTEINQLIAGVNFCPVLQVFFPFSIQLYPNEFPGSDPRDCPRDLPKNAALKLGCINAEYPDSFGHYREAKFSQTKHHWWWKLHFVWERVKILRDYAGLILFLEEDHYLAPDFYHVFKKMWKLKQQECPECDVLSLGTYSASRSFYGMADKVDVKTWKSTEHNMGLALTRNAYQKLIECTDTFCTYDDYNWDWTLQYLTVSCLPKFWKVLVPQIPRIFHAGDCGMHHKKTCRPSTQSAQIESLLNNNKQYMFPETLTISEKFTVVAISPPRKNGGWGDIRDHELCKSYRRLQ

SEQ ID NO: 7849 - protein, 98 aa, Homo sapiens [sequence omitted]

SEQ ID NO: 7850 - protein, 192 aa, Homo sapiens
MKRSHEKVIIIQLIAKADTLIPEECQQFKKQIMKEIQEHKIKIYDFPEIDDEEENKLAKKDLKDVTNNVHYENYRSRKLAAVTYNGVDNNKNKGQLTKSPLAQMEEERREYAAKMKKIEMEMEQVLEMKDSEAELQWRRELMKKNLEAQHKELEEKRRQFEDEKANWEAQQHILEQNSSRTLEKNKKKGKIF

SEQ ID NO: 7851 - protein, 1029 aa, Homo sapiens
MGLWGKKGTVAPHDQSPRRRPKKGLIKKKMVKREKQKRNMEELKKEVVMDDHKLTLEELSTKYSVDLTKGHSHQRAKEILTRDGPNTVTPPPTTPEWVKFCKQLFGGFSLLLWTGAILCFVAYSIQIYFNEEPTKDNLYLSIVLSVVVIVTGCFSYYQEAKSSKIMESFKNMVPQQALVIRGGEKMQINVQEVVLGDLVEIKGGDRVPADLRLISAQGCKVDNSSLTGESEPQSRSPDFTHENPLETRNICFFSTNCVEGTARGIVIATGDSTVMGRIASLTSGLAVGQTPIAAEIEHFIHLITVVAVFLGVTFFALSLLLGYGWLEAIIFLIGIIVANVPEGLLATVTVCLTLTAKRMARKNCLVKNLEAVETLGSTSTICSDKTGTLTQNRMTVAHMWFDMTVYEADTTEEQTGKTFTKSSDTWFMLARIAGLCNRADFKANQEILPIAKRATTGDASESALLKFIEQSYSSVAEMREKNPKVAEIPFNSTNKYQMSIHLREDSSQTHVLMMKGAPERILEFCSTFLLNGQEYSMNDEMKEAFQNAYLELGGLGERVLGFCFLNLPSSFSKGFPFNTDEINFPMDNLCFVGLISMIDPPRAAVPDAVSKCRSAGIKVIMVTGDHPITAKAIAKGVGIISEGTETAEEVAARLKIPISKVDASAAKAIVVHGAELKDIQSKQLDQILQNHPEIVFARTSPQQKLIIVEGCQRLGAVVAVTGDGVNDSPALKKADIGIAMGISGSDVSKQAADMILLDDNFASIVTGVEEGRLIFDNLKKSIMYTLTSNIPEITPFLMFIILGIPLPLGTITILCIDLGTDMVPAISLAYESAESDIMKRLPRNPKTDNLVNHRLIGMAYGQIGMIQALAGFFTYFVILAENGFRPVDLLGIRLHWEDKYLNDLEDSYGQQWTYEQRKVVEFTCQTAFFVTIVVVQWADLIISKTRRNSLFQQGMRNKVLIFGILEETLLAAFLSYTPGMDVALRMYPLKITWWLCAIPYSILIFVYDEIRKLLIRQHPDGWVERETYY

SEQ ID NO: 7852 - protein, 408 aa, Homo sapiens [sequence omitted]

SEQ ID NO: 7853 - protein, 187 aa, Homo sapiens
MFLLLNCIVAVSQNMGIGKNGDLPRPPLRNEFRYFQRMTTTSSVEGKQNLVIMGRKTWFSIPEKNRPLKDRINLVLSRELKEPPQGAHFLARSLDDALKLTERPELANKVDMIWIVGGSSVYKEAMNHLGHLKLFVTRIMQDFESDTFFSEIDLEKYKLLPEYPGVLSDVQEGKHIKYKFEVCEKDD

SEQ ID NO: 7854 - protein, 187 aa, Homo sapiens; identical to SEQ ID NO: 7853

SEQ ID NO: 7855 - protein, 216 aa, Homo sapiens
MADHLISGGTGYVPQDWLTVQQLFLGANCRTHNNFLILPWFIDFIADEVDLTSALTRKIMLKTPLISSPMDTETEADMAIAMALMGGIGFIHHNCTPEFQANEVHKVKKFEQGFITDPVVLSPSHTVGDVLEAKIRHGFSCILITEMGTMGSKLVGIISSRDINFLAEKDHTTLLSEVMTPRIKLMVAPAGMTLKQANEILQPSKGSCLWSMIAMS

SEQ ID NO: 7856 - protein, 254 aa, Homo sapiens [sequence omitted]

SEQ ID NO: 7857 - protein, 254 aa, Homo sapiens [sequence omitted]

SEQ ID NO: 7858 - protein, 102 aa, Homo sapiens
MREPQPDPSPGRLPYPEAWGMLGSTGAQIWLVDRSTWRVGELFKKTSLSTSLSADSDSIKEYLLQVWWLTPVIPALWEAEVDGPRCQEFKTSLANMVKPHLS

SEQ ID NO: 7859 - protein, 58 aa, Homo sapiens
MGIILRNEPMKLPSDVVTAKPKIVMLGRCVYDFKIMDFWPSQPVATSSGFTSAGGQGG

SEQ ID NO: 7860 - protein, 267 aa, Homo sapiens
MFSKLAPLQRFAVLSRGAHSSVASATSVATKKTVQGPPTSDYIFERESKCGAHNYHPLPVALERGKCIYLWDVEGRKYFDFLSSYSAVNQGHCHPKIVNALKSQGKKLTLTSRAFYNNVLGEYEEYITKLFNYHKVLPMNTGMEAGETACKLAHKWGYTVKGIQKYKAKVISAAGNFWGRTFSAISSSTDLTSYDGFGPFMPGFDVIPCNDLPALESAFQNPNVAAFMVEPIQGEAGVVPDPGYLMGVRELCTRHQDLYIADEIQSG

SEQ ID NO: 7861 - protein, 308 aa, Homo sapiens
MFSKLAPLQRFAVLSRGAHSSKTVQGPPTSDYIFERESKCGAHNYHPLPVALERGKCIYLWDVEGRKYFDFLSSYSAVNQGHCHPKIVNALKSQGKKLTLTSRAFYNNVLGEYEEYITKLFNYHKVLPMNTGMEAGETACKLAHKWGYTVKGIQKYKAKVISAAGNFWGRTFSAISSSTDLTSYDGFGPFMPGFDVIPCNDLPALESAFQNPNVAAFMVEPIQGEAGVVPDPVLWDDDIMLTIKPGECGSTYGGNPLGCQVTIAALEVLEEENLAENTEKKWVSPLLVVKGDEIRESSELINKAILSF

SEQ ID NO: 7862 - protein, 247 aa, Homo sapiens
MSLKWMSVFLLMQLSCYFSSGSCGKVLVWPTEYSHWINMKTILEELVQRGHEVIVLTSSASILVNASKSSAIKLEVYPTSLTKNDLEDFFMKMFDRWTYSISKNTFWSYFSQLQELCWEYSDYNIKLCEDAVLNKKLMRKLQESKFDVLLADAVNPCGELLAELLNIPFLYSLRFSVGYTVEKNGGGFLFPPSYVPVVMSELSDQMIFMERIKNMIYMLYFDFWFQAYDLKKWDQFYSEVLGGSMEI

SEQ ID NO: 7863 - protein, 247 aa, Homo sapiens; identical to SEQ ID NO: 7862

SEQ ID NO: 7864 - protein, 247 aa, Homo sapiens; identical to SEQ ID NO: 7862

SEQ ID NO: 7865 - protein, 307 aa, Homo sapiens
MVFIVILRSVISGDTFACVLILAVFLSLQTEDNNTYVIQLLFTELKGTGYKVPQDVLQKLLESLQNHFQEDEQFLGAFMPRLGIGMDTCHSFETRDLYAMGVTECDNMLMLLGVSNKMTNREMDKVMPLIIQGFKDAAEEAETSVMGGQTVLNPWIVLGRVTTTVCQPSEFIMPDNAVPGDVLVLTKPLGTQGAVAVHQWLDIPKKWNNIKLVVTQEDVELAYEEVMMNMARLNRTGGLLICLPCEQTARFCAEIKSPKYGEDHQAWIIGIVEKGNHTARIIDKPLIIEIAPQVATQNVNPTPGATS

SEQ ID NO: 7866 - protein, 284 aa, Homo sapiens
MSCKNCWNLYRTTSKKMSSFWEPLCQGLALEWILVIPLRHGGLSLVQTTDYIYPIVDDSYVTGRIACANVLSDLYAMGVTECDNMLMLLGVSNKMTNREMDKVMPLIIQGFKDAAEEAETSVMGGQTVLNPWIVLGRVTTTVCQPSEFIMPDNAVPGDVLVLTKPLGTQGAVAVHQWLDIPKKWNNIKLVVTQEDVELAYEEVMMNMARLNRTGGLLICLPCEQTARFCAEIKSPKYGEDHQAWIIGIVEKGNHTARIIDKPLIIEIAPQVATQNVNPTPGATS

SEQ ID NO: 7867 - protein, 125 aa, Homo sapiens
MGEKGFGCKGSRFHRIIPGFMCQGGDFTRHNGTGGKSIYGEKFDDENFILKHTGPGILSMANAGPNTNGSQFFICTAKSEWLDGKHVVFGKMKEGINIVEATGRFGSRNGKTSKKITIADCGQLE

SEQ ID NO: 7868 - protein, 138 aa, Homo sapiens [sequence omitted]

SEQ ID NO: 7869 - protein, 266 aa, Homo sapiens
MAFSEATVKHDAFGELPVVAMAASSQLGSAPKDQRKERRKLRLGDNGFTQISVVWRQKNLLSTRGVDGSFLARPSKSTPGDFTCSIRRNRAVTHIKIQNTGPVWGEKFATSAELVQYYMEHHRQLKEKNGDVVELKYPLNCADPASERWFHGHLFGKEAEKLTEKGKHGSFLIRESQSHPGDFVLSVRTSDDKKESNDSKCKVTHVMIRCQELKYDVGGGKRFDSLTDLVEHYKKNPMLETLGTVLRLKQPLNMTRINAAEIESRV

SEQ ID NO: 7870 - protein, 143 aa, Homo sapiens
MVNPTVFFHISVDGESLGRISFELFADKFPKTAENFWFMCHGGDFTHHNGTGGKSIYGEKVDDDNFILKHTGPGILSMANAGPNTNGSQFFICTAKSEWLDSKHVVIGKVKEGMNIVEAMEHFGSRNGKTSKKVTIPDFGQLE

SEQ ID NO: 7871 - protein, 138 aa, Homo sapiens [sequence omitted]

SEQ ID NO: 7872 - protein, 64 aa, Homo sapiens
MGILRQITVNDLPVDCSVDETLRLVQAFQFTDKHREVCPAGWKPGSDTIKTDVQKSKEYLSKQE

SEQ ID NO: 7873 - protein, 379 aa, Homo sapiens
MEERKLLHSFLAKSQDGLPPRRMKDSYIEVLLPLGSEPELREKYLTVQNTVRFGRILEDLDSLGVLICYMHNKIHSAKMSPLSIVTALVDKIDMCKKSLSPEQDIKFSGHVSWVGKTSMEVKMQMFQLHGDEFCPVLDATFVMVARDSENKGPAFVNPLIPESPEEEELFRQGELNKGRRIAFSSTSLLKMAPSAEERTTIHEMFLSTLDPKTISFRSRVLPSNAVWMENSKLKSLEICHPQERNIFNRIFGGFLMRKAYELAWATACSFGGSRPFVVAVDDIMFQKPVEVGSLLFLSSQVCFTQNNYIQVRVHSEVASLQEKQHTTTNVFHFTFMSEKEVPLVFPKTYGESMLYLDGQRHFNSMSGPATLRKDYLVEP

SEQ ID NO: 7874 - protein, 439 aa, Homo sapiens
MRRAALRLCALGKGQLTPGRGLTQGPQNPKKQGIFHIHEVRDKLREIVGASTNWRDHVKAMEERKLLHSFLAKSQDGLPPRRMKDSYIEVLLPLGSEPELREKYLTVQNTVRFGRILEDLDSLGVLICYMHNKIHSAKMSPLSIVTALVDKIDMCKKSLSPEQDIKFSGHVSWVGKTSMEVKMQMFQLHGDEFCPVLDATFVMVARDSENKGPAFVNPLIPESPEEEELFRQGELNKGRRIAFSSTSLLKMAPSAEERTTIHEMFLSTLDPKTISFRSRVLPSNAVWMENSKLKSLEICHPQERNIFNRIFGGFLMRKAYELAWATACSFGGSRPFVVAVDDIMFQKPVEVGSLLFLSSQVCFTQNNYIQVRVHSEVASLQEKQHTTTNVFHFTFMSEKEVPLVFPKTYGESMLYLDGQRHFNSMSGPATLRKDYLVEP

SEQ ID NO: 7875 - protein, 125 aa, Homo sapiens
MKNGIPANQIILGGFSQGRALSLYMALTCPHPLAGILALSCWPPLHRAFPQAANGSAKDLAILQCHGELDPMVPVRFGALMAEKLRSVVTPARVQFQTYLGVMHSSCPQEMAAVKEFLEKLLPPV

SEQ ID NO: 7876 - protein, 120 aa, Homo sapiens
MCGNTMSVPLLNDAATVSGAERETAVVIFLHGLGDTGHSWADALSTIRLPHVKYICSHEPRIPVTLNMKMVMPSWFDLMGLSPDAPEDEAGIKKAAENRAGPCPSTWPSPAPTLWLASWL

SEQ ID NO: 7877 - protein, 164 aa, Homo sapiens
MKMVMPSWFDLMGLSPDAPEDEAGIKKAAENIKALIEHEMKNGIPANQIILGGFSQGRALSLYMALTCPHPLAGILALSCWPPLHRAFPQAANGSAKDLAILQCHGELDPMVPVRFGALMAEKLRSVVTPARVQFQTYLGVMHSSCPQEMAAVKEFLEKLLPPV

SEQ ID NO: 7878 - protein, 109 aa, Homo sapiens
MKMVMPSWFDLMGLSPDAPEDEAGIKKAAENIKALIEHEMKNGIPANQIILGGFSQGRALSLYMALTCPHLSHPHFVPTLEQGGSGGGVVSCLLSPCGFWVFFFLCPGF

SEQ ID NO: 7879 - protein, 231 aa, Homo sapiens [sequence omitted]

SEQ ID NO: 7880 - protein, 149 aa, Homo sapiens [sequence omitted]

SEQ ID NO: 7881 - protein, 520 aa, Homo sapiens
MSLLSLSWLGLRPVAASPWLLLLVVGASWLLARILAWTYAFYHNGRRLRCFPQPRKQNWFLGHLGLVTPTEEGLRVLTQLVATYPQGFVRWLGPITPIINLCHPDIVRSVINTSDAITDKDIVFYKTLKPWLGDGLLLSVGDKWRHHRRLLTPAFHFNILKPYIKIFSKSANIMHAKWQRLAMEGSTCLDVFEHISLMTLDSLQKCIFSFDSNCQEKPSEYITAIMELSALVVKRNNQFFRYKDFLYFLTPCGRRFHRACRLVHDFTDAVIQERRRTLTSQGVDDFLQAKAKSKTLDFIDVLLLSEDKNGKELSDEDIRAEADTFMFGGHDTTASGLSWVLYNLARHPEYQERCRQEVQELLKDREPKEIEWDDLAQLPFLTMCLKESLRLHPPIPTFARGCTQDVVLPDSRVIPKGNVCNINIFAIHHNPSVWPDPEVYDPFRFDPENAQKRSPMAFIPFSAGPRNCIGQKFAMAEMKVVLALTLLRFRILPDHREPRRTPEIVLRAEDGLWLRVEPLG

SEQ ID NO: 7882 - protein, 605 aa, Homo sapiens
MAGLYSLGVSVFSDQGGRKYMEDVTQIVVEPEPTAEEKPSPRRSLSQPLPPRPSPAALPGGEVSGKGPAVAAREARDPLPDAGASPAPSRCCRRRSSVAFFAVCDGHGGREAAQFAREHLWGFIKKQKGFTSSEPAKVCAAIRKGFLACHLAMWKKLAEWPKTMTGLPSTSGTTASVVIIRGMKMYVAHVGDSGVVLGIQDDPKDDFVRAVEVTQDHKPELPKERERIEGLGGSVMNKSGVNRVVWKRPRLTHNGPVRRSTVIDQIPFLAVARALGDLWSYDFFSGEFVVSPEPDTSVHTLDPQKHKYIILGSDGLWNMIPPQDAISMCQDQEEKKYLMGEHGQSCAKMLVNRALGRWRQRMLRADNTSAIVICISPEVDNQGNFTNEDELYLNLTDSPSYNSQETCVMTPSPCSTPPVKSLEEDPWPRVNSKDHIPALVRSNAFSENFLEVSAEIARENVQGVVIPSKDPEPLEENCAKALTLRIHDSLNNSLPIGLVPTNSTNTVMDQKNLKMSTPGQMKAQEIERTPPTNFKRTLEESNSGPLMKKHRRNGLSRSSGAQPASLPTTSQRKNSVKLTMRRRLRGQKKIGNPLLHQHRKTVCVC

SEQ ID NO: 7883 - protein, 229 aa, Homo sapiens [sequence omitted]

SEQ ID NO: 7884 - protein, 736 aa, Homo sapiens
MGVNDLWQILEPVKQHIPLRNLGGKTIAVDLSLWVCEAQTVKKMMGSVMKPHLRNLFFRISYLTQMDVKLVFVMEGEPPKLKADVISKRNQTRYGSSGKSWSQKTGRSHFKSVLRECLHMLECLGIPWVQAAGEAEAMCAYLNAGGHVDGCLTNDGDTFLYGAQTVYRNFTMNTKDPHVDCYTMSSIKSKLGLDRDALVGLAILLGCDYLPKVIQEFLLNKDKLVKVIRIVKTRIRNGVHCFEIEWEKPEHYAMEDKQHGEFALLTIEEESLFEAAYPEIVAVYQKQKLEIKGKKQKRIKPKENNLPEPDEVMSFQSHMTLKPTCEIFHKQNSKLNSGISPDPTLPQESISASLNSLLLPKNTPCLNAQEQFMSSLRPLAIQQIKAVSKSLISESSQPNTSSHNISVIADLHLSTIDWEGTSFSNSPAIQRNTFSHDLKSEVESELSAIPDGFENIPEQLSCESERYTANIKKVLDEDSDGISPEEHLLSGITDLCLQDLPLKERIFIKLSYPQDNLQPDVNLKTLSILSVKESCIANSGSDCTSHLSKDLPGIPLQNESRDSKILKGDQLLQEDYKVNTSVPYSVSNTVVKTCNVRPPNTALDHSRKVDMQTTRKILMKKSVCLDRHSSDEQSAPVFGKAKYTTQRMKHSSQKHNSSHFKESGHNKLSSPKIHIKETEQCVRSYETAENEESCFPDSTKSSLSSLQCHKKENNSGTCLDSPLPLRQRLKLRFQST

SEQ ID NO: 7885 - protein, 215 aa, Homo sapiens [sequence omitted]

SEQ ID NO: 7886 - protein, 205 aa, Homo sapiens
MASPDDPLRADHMVKEPVEDTDPSTLSFNMSDKYPIQDTELPKAEECDTITLNCPRNSDMKNQGEENGFPDSTGDPLPEISKDNSCKENCTCSSCLLRAPTISDLLNDQDLLDVIRIKLDPCHPTVKNWRNFASKWGMSYDELCFLEQRPQSPTLEFLLRNSQRTVGQLMELCRLYHRADVEKVLRRWVDEEWPKRERGDPSRHF

SEQ ID NO: 7887 - protein, 121 aa, Homo sapiens
MLKYTHWNAVSLTNRNQISTKADQEEVYPPTYKFPRELSSRRFDSGQTTSEHLLAICCFFHGKLQRIKKPNSTSPWASGRLNRWGEALKLLVTKRDFSSPWSHGPPAPRRPASPARTLVCP

SEQ ID NO: 7888 - protein, 388 aa, Homo sapiens
MSILKIHARELFDSRGNPTVEVDLFTSEGLFRAAVPSGASTGIYEVLELQDNDKTRYMGKGVSKPVEPINKTIAPVLVSKKLNVTEQEKIDKLMIEMDGTENKSKFGANAILGVSLAACKASAVEKGVPLYHHIADLSGNSKVILPVPVFNVINGSSHAVTKLAMQEFMVLPVGAANFREAMPIGAEVYHSLKNVIKEKYGKDATGVGDGGAFAPNILENKEGLELLKTAIGKAGYTDKVIVSMDVEASEFFRSGKYDLEFKFLDDPTRYISPDCLADLYKSFIKNYPVVSTEDPFDQDDWGAWQKFTASAGIQVVEDDLRVTNPKRTASAVNEKKCNCLLLKVNQIRSVTESLQACKLAQANGWCVMVPHHSGETENTFITDLVVGL

SEQ ID NO: 7889 - protein, 205 aa, Homo sapiens [sequence omitted]

SEQ ID NO: 7890 - protein, 295 aa, Homo sapiens
MGNSRGNAWSRKHKTLSIDQDEFWAFSYDEMARFDLPAVINFILQKTGQEKIYYVGYSQGTTMGFIAFSTMPELAQKIKMYFALAPIATVKHAKSPGTKFLLLPDMMIKGLFGKKEFLYQTRFLRQLVIYLCGQVILDQICSNIMLLLGGFNTNNMNMSRASVYAAHTLAGTSVQNILHWSQAVNSGELRAFDWGSETKNLEKCNQPTPVRYRVRDMTVPTAMWTGGQDWLSNPEDVKMLLSEVTNLIYHKNIPEWAHVDFIWGLDAPHRMYNEIIHLMQQEETNLSQGRCEAVL

SEQ ID NO: 7891 - protein, 170 aa, Homo sapiens [sequence omitted]

SEQ ID NO: 7892 - protein, 167 aa, Homo sapiens
MCLDQYSMLPATPCGVWEIIKRTDIPTLGKNVVVAGRSKSVEMPIAMLLHTDGVHERPGGDATVTISYRYTSKEQLKKHTILADIVISAAGIPNLITADMIKEEAAVTDMGINRVHDPVTAKLKLVGDVDFEGVRQKAGYITPVPGGVGPMTVAMLMKNTIIFPEIF

SEQ ID NO: 7893 - protein, 220 aa, Homo sapiens
MANPTVFFNIAIDSESLGCISFKLFADKVLKMEENFCALNTGEKVFELFRGVCQGGDFTHHNGTGGKSLYSKEFDDENFILSIQLLASCPRQMLDPPQMVPSFSSVLPRQRMDDSMWSLASPQELQTTVARGLLPTGFEYELRQEKQKPGPDGNSQEEGSMVMSNIKDIKDKSSQDRNEEKDALVKVSLKSVVNLDVPFLQPENGKCQMPPNCPESVHPF

SEQ ID NO: 7894 - protein, 29 aa, Homo sapiens
MLDPPQMVPSFSSVLPRQRMDDSMWSLAR

SEQ ID NO: 7895 - protein, 419 aa, Homo sapiens
MHFLFLTDRHYLHSAIKKNFQLMAGKFMIQYLNIRDRACQMRVVLSWIHPESQATITRCSQPLVGPNDKRCKEDEKYLQTIMDANAQSHKLIIFDARQNSVADTNKTKGGGYESESAYPNAELVFLEIHNIHVMRESLRKLKEIVYPSIDEARWLSNVDGTHWLEYIRMLLAGAVRIADKIESGKTSVVVHCSDGWDRTAQLTSLAMLMLDSYYRTIKGFETLVEKEWISFGHRFALRVGHGNDNHADADRSPIFLQFVDCVWQMTRQFPSAFEFNELFLITILDHLYSCLFGTFLCNCEQQRFKEDVYTKTISLWSYINSQLDEFSNPFFVNYENHVLYPVASLSHLELWVNYYVRWNPRMRPQMPIHQNLKELLAVRAELQKRVEGLQREVATRAVSSSSERGSSPSHSATSVHTSV

SEQ ID NO: 7896 - protein, 571 aa, Homo sapiens
MEEAPLFPGESIKAIVKDVMYICPFMGAVSGTLTVTDFKLYFKNVERDPHFILDVPLGVISRVEKIGAQSHGDNSCGIEIVCKDMRNLRLAYKQEEQSKLGIFENLNKHAFPLSNGQALFAFSYKEKFPINGWKVYDPVSEYKRQGLPNESWKISKINSNYEFCDTYPAIIVVPTSVKDDDLSKVAAFRAKGRVPVLSWIHPESQATITRCSQPLVGPNDKRCKEDEKYLQTIMDANAQSHKLIIFDARQNSVADTNKTKGGGYESESAYPNAELVFLEIHNIHVMRESLRKLKEIVYPSIDEARWLSNVDGTHWLEYIRMLLAGAVRIADKIESGKTSVVVHCSDGWDRTAQLTSLAMLMLDSYYRTIKGFETLVEKEWISFGHRFALRVGHGNDNHADADRSPIFLQFVDCVWQMTRQFPSAFEFNELFLITILDHLYSCLFGTFLCNCEQQRFKEDVYTKTISLWSYINSQLDEFSNPFFVNYENHVLYPVASLSHLELWVNYYVRWNPRMRPQMPIHQNLKELLAVRAELQKRVEGLQREVATRAVSSSSERGSSPSHSATSVHTSV

SEQ ID NO: 7897 - protein, 665 aa, Homo sapiens
MDRPAAAAAAGCEGGGGPNPGPAGGRRPPRAAGGATAGSRQPSVETLDSPTGSHVEWCKQLIAATISSQISGSVTSENVSRDYKALRDGNKLAQMEEAPLFPGESIKAIVKDVMYICPFMGAVSGTLTVTDFKLYFKNVERDPHFILDVPLGVISRVEKIGAQSHGDNSCGIEIVCKDMRNLRLAYKQEEQSKLGIFENLNKHAFPLSNGQALFAFSYKEKFPINGWKVYDPVSEYKRQGLPNESWKISKINSNYEFCDTYPAIIVVPTSVKDDDLSKVAAFRAKGRVPVLSWIHPESQATITRCSQPLVGPNDKRCKEDEKYLQTIMDANAQSHKLIIFDARQNSVADTNKTKGGGYESESAYPNAELVFLEIHNIHVMRESLRKLKEIVYPSIDEARWLSNVDGTHWLEYIRMLLAGAVRIADKIESGKTSVVVHCSDGWDRTAQLTSLAMLMLDSYYRTIKGFETLVEKEWISFGHRFALRVGHGNDNHADADRSPIFLQFVDCVWQMTRQFPSAFEFNELFLITILDHLYSCLFGTFLCNCEQQRFKEDVYTKTISLWSYINSQLDEFSNPFFVNYENHVLYPVASLSHLELWVNYYVRWNPRMRPQMPIHQNLKELLAVRAELQKRVEGLQREVATRAVSSSSERGSSPSHSATSVHTSV

SEQ ID NO: 7898 - protein, 665 aa, Homo sapiens; identical to SEQ ID NO: 7897

SEQ ID NO: 7899 - protein, 461 aa, Homo sapiens
MHFLFLTDRHYLHSAIKKNFQLMAGKFMIQYLNIRGLPNESWKISKINSNYEFCDTYPAIIVVPTSVKDDDLSKVAAFRAKGRVPVLSWIHPESQATITRCSQPLVGPNDKRCKEDEKYLQTIMDANAQSHKLIIFDARQNSVADTNKTKGGGYESESAYPNAELVFLEIHNIHVMRESLRKLKEIVYPSIDEARWLSNVDGTHWLEYIRMLLAGAVRIADKIESGKTSVVVHCSDGWDRTAQLTSLAMLMLDSYYRTIKGFETLVEKEWISFGHRFALRVGHGNDNHADADRSPIFLQFVDCVWQMTRQFPSAFEFNELFLITILDHLYSCLFGTFLCNCEQQRFKEDVYTKTISLWSYINSQLDEFSNPFFVNYENHVLYPVASLSHLELWVNYYVRWNPRMRPQMPIHQNLKELLAVRAELQKRVEGLQREVATRAVSSSSERGSSPSHSATSVHTSV

SEQ ID NO: 7900 - protein, 189 aa, Homo sapiens
MRESLRKLKEIVYPSIDEARWLSNVDGTHWLEYIRMLLAGAVRIADKIESGKTSVVVHCSDGWDRTAQLTSLAMLMLDSYYRTIKGFETLVEKEWISFGHRFALRVGHGNDNHADADRSPIFLQFVDCVWQMTRQFPSAFEFNELFLITILDHLYSCLFGTFLCNCEQQRFKEAWGAGTQRARGSLRSR

SEQ ID NO: 7901 - protein, 568 aa, Homo sapiens
MDRPAAAAAAGCEGGGGPNPGPAGGRRPPRAAGGATAGSRQPSVETLDSPTGSHVEWCKQLIAATISSQISGSVTSENVSRDYKALRDGNKLAQMEEAPLFPGESIKAIVKDVMYICPFMGAVSGTLTVTDFKLYFKNVERDPHFILDVPLGVISRVEKIGAQSHGDNSCGIEIVCKDMRNLRLAYKQEEQSKLGIFENLNKHAFPLSNGQALFAFSYKEKFPINGWKVYDPVSEYKRQGLPNESWKISKINSNYEFCDTYPAIIVVPTSVKDDDLSKVAAFRAKGRVPVLSWIHPESQATITRCSQPLVGPNDKRCKEDEKYLQTIMDANAQSHKLIIFDARQNSVADTNKTKGGGYESESAYPNAELVFLEIHNIHVMRESLRKLKEIVYPSIDEARWLSNVDGTHWLEYIRMLLAGAVRIADKIESGKTSVVVHCSDGWDRTAQLTSLAMLMLDSYYRTIKGFETLVEKEWISFGHRFALRVGHGNDNHADADRSPIFLQFVDCVWQMTRQFPSAFEFNELFLITILDHLYSCLFGTFLCNCEQQRFKEAWGAGTQRARGSLRSR

SEQ ID NO: 7902 - protein, 363 aa, Homo sapiens
MDRPAAAAAAGCEGGGGPNPGPAGGRRPPRAAGGATAGSRQPSVETLDSPTGSHVEWCKQLIAATISSQISGSVTSENVSRDYKALRDGNKLAQMEEAPLFPGESIKAIVKDVMYICPFMGAVSGTLTVTDFKLYFKNVERDPHFILDVPLGVISRVEKIGAQSHGDNSCGIEIVCKDMRNLRLAYKQEEQSKLGIFENLNKHAFPLSNGQALFAFSYKEKFPINGWKVYDPVSEYKRQGLPNESWKISKINSNYEFCDTYPAIIVVPTSVKDDDLSKVAAFRAKGRVPVLSWIHPESQATITRCSQPLVGPNDKRCKEDEKYLQTIMDANAQSHKLIIFDARQNSVADTNKLWYQDTASLME

SEQ ID NO: 7903 - protein, 370 aa, Homo sapiens
MSHPSPQAKPSNPSNPRVFFDVDIGGERVGRIVLELFADIVPKTAENFRALCTGEKGIGHTTGKPLHFKGCPFHRIIKKFMIQGGDFSNQNGTGGESIYGEKFEDENFHYKHDREGLLSMANAGRNTNGSQFFITTVPTPHLDGKHVVFGQVIKGIGVARILENVEVKGEKPAKLCVIAECGELKEGDDGGIFPKDGSGDSHPDFPEDADIDLKDVDKILLITEDLKNIGNTFFKSQNWEMAIKKYAEVLRYVDSSKAVIETADRAKLQPIALSCVLNIGACKLKMSNWQGAIDSCLEALELDPSNTKALYRRAQGWQGLKEYDQALADLKKAQGIAPEDKAIQAELLKVKQKIKAQKDKEKAVYAKMFA

SEQ ID NO: 7904 - protein, 350 aa, Homo sapiens
MSAACWEEPWGLPGGFAKRVLVTGGAGFIASHMIVSLVEDYPNYMIINLDKLDYCASLKNLETISNKQNYKFIQGDICDSHFVKLLFETEKIDIVLHFAAQTHVDLSFVRAFEFTYVNVYGTHVLVSAAHEARVEKFIYVSTDEVYGGSLDKEFDESSPKQPTNPYASSKAAAECFVQSYWEQYKFPVVITRSSNVYGPHQYPEKVIPKFISLLQHNRKCCIHGSGLQTRNFLYATDVVEAFLTVLKKGKPGEIYNIGTNFEMSVVQLAKELIQLIKETNSESEMENWVDYVNDRPTNDMRYPMKSEKIHGLGWRPKVPWKEGIKKTIEWYRENFHNWKNVEKALEPFPV

SEQ ID NO: 7905 - protein, 96 aa, Homo sapiens [sequence omitted]

SEQ ID NO: 7906 - protein, 338 aa, Homo sapiens
MADQAPFDTDVNTLTRFVMEEGRKARGTGELTQLLNSLCTAVKAISSAVRKAGIAHLYGIAGSTNVTGDQVKKLDVLSNDLVMNMLKSSFATCVLVSEEDKHAIIVEPEKRGKYVVCFDPLDGSSNIDCLVSVGTIFGIYRKKSTDEPSEKDALQPGRNLVAAGYALYGSATMLVLAMDCGVNCFMLDPAIGEFILVDKDVKIKKKGKIYSLNEGYAKDFDPAVTEYIQRKKFPPDNSAPYGARYVGSMVADVHRTLVYGGIFLYPANKKSPNGKLRLLYECNPMAYVMEKAGGMATTGKEAVLDVIPTDIHQRAPVILGSPDDVLEFLKVYEKHSAQ

SEQ ID NO: 7907 - protein, 353 aa, Homo sapiens
MSKPPDLLLRLLRGAPRQRVCTLFIIGFKFTFFVSIMIYWHVVGEPKEKGQLYNLPAEIPCPTLTPPTPPSHGPTPGNIFFLETSDRTNPNFLFMCSVESAARTHPESHVLVLMKGLPGGNASLPRHLGISLLSCFPNVQMLPLDLRELFRDTPLADWYAAVQGRWEPYLLPVLSDASRIALMWKFGGIYLDTDFIVLKNLRNLTNVLGTQSRYVLNGAFLAFERRHEFMALCMRDFVDHYNGWIWGHQGPQLLTRVFKKWCSIRSLAESRACRGVTTLPPEAFYPIPWQDWKKYFEDINPEELPRLLSATYAVHVWNKKSQGTRFEATSRALLAQLHARYCPTTHEAMKMYL

SEQ ID NO: 7908 - protein, 353 aa, Homo sapiens; identical to SEQ ID NO: 7907

SEQ ID NO: 7909 - protein, 260 aa, Homo sapiens [sequence omitted]

SEQ ID NO: 7910 - protein, 260 aa, Homo sapiens [sequence omitted]

SEQ ID NO: 7911 - protein, 465 aa, Homo sapiens
MLPLWTLSLLLGAVAGKEVCYERLGCFSDDSPWSGITERPLHILPWSPKDVNTRFLLYTNENPNNFQEVAADSSSISGSNFKTNRKTRFIIHGFIDKGEENWLANVCKNLFKVESVNCICVDWKGGSRTGYTQASQNIRIVGAEVAYFVEFLQSAFGYSPSNVHVIGHSLGAHAAGEAGRRTNGTIGRITGLDPAEPCFQGTPELVRLDPSDAKFVDVIHTDGAPIVPNLGFGMSQVVGHLDFFPNGGVEMPGCKKNILSQIVDIDGIWEGTRDFAACNHLRSYKYYTDSIVNPDGFAGFPCASYNVFTANKCFPCPSGGCPQMGHYADRYPGKTNDVGQKFYLDTGDASNFARWRYKVSVTLSGKKVTGHILVSLFGNKGNSKQYEIFKGTLKPDSTHSNEFDSDVDVGDLQMVKFIWYNNVINPTLPRVGASKIIVETNVGKQFNFCSPETVREEVLLTLTPC

SEQ ID NO: 7912 - protein, 146 aa, Homo sapiens
MQVLTKRYPKNCLLTVMDRYAAEVHNMEQVVMIPSLLRDVQLSGPGGQAQAEAPDLYTYFTMLKAICVDVDHGLLPREEWQAKVAGSEENGTAETEEVEDESASGELDLEAQFHLHFSSLHHILMHLTEKAQEVTRKYQEMTGQVW

SEQ ID NO: 7913 - protein, 576 aa, Homo sapiens
MPPRPSSGELWGIHLMPPRILVECLLPNGMIVTLECLREATLITIKHELFKEARKYPLHQLLQDESSYIFVSVTQEAEREEFFDETRRLCDLRLFQPFLKVIEPVGNREEKILNREIGFAIGMPVCEFDMVKDPEVQDFRRNILNVCKEAVDLRDLNSPHSRAMYVYPPNVESSPELPKHIYNKLDKGQIIVVIWVIVSPNNDKQKYTLKINHDCVPEQVIAEAIRKKTRSMLLSSEQLKLCVLEYQGKYILKVCGCDEYFLEKYPLSQYKYIRSCIMLGRMPNLMLMAKESLYSQLPMDCFTMPSYSRRISTATPYMNGETSTKSLWVINSALRIKILCATYVNVNIRDIDKIYVRTGIYHGGEPLCDNVNTQRVPCSNPRWNEWLNYDIYIPDLPRAARLCLSICSVKGRKGAKEEHCPLAWGNINLFDYTDTLVSGKMALNLWPVPHGLEDLLNPIGVTGSNPNKETPCLELEFDWFSSVVKFPDMSVIEEHANWSVSREAGFSYSHAGLDRLIHSINKITPYYVPGHVQCTQNTEINGMQSHPHTSHVRADFQQAKNATRDVLICNELNYNF

SEQ ID NO: 7914 - protein, 1068 aa, Homo sapiens
MPPRPSSGELWGIHLMPPRILVECLLPNGMIVTLECLREATLITIKHELFKEARKYPLHQLLQDESSYIFVSVTQEAEREEFFDETRRLCDLRLFQPFLKVIEPVGNREEKILNREIGFAIGMPVCEFDMVKDPEVQDFRRNILNVCKEAVDLRDLNSPHSRAMYVYPPNVESSPELPKHIYNKLDKGQIIVVIWVIVSPNNDKQKYTLKINHDCVPEQVIAEAIRKKTRSMLLSSEQLKLCVLEYQGKYILKVCGCDEYFLEKYPLSQYKYIRSCIMLGRMPNLMLMAKESLYSQLPMDCFTMPSYSRRISTATPYMNGETSTKSLWVINSALRIKILCATYVNVNIRDIDKIYVRTGIYHGGEPLCDNVNTQRVPCSNPRWNEWLNYDIYIPDLPRAARLCLSICSVKGRKGAKEEHCPLAWGNINLFDYTDTLVSGKMALNLWPVPHGLEDLLNPIGVTGSNPNKETPCLELEFDWFSSVVKFPDMSVIEEHANWSVSREAGFSYSHAGLSNRLARDNELRENDKEQLKAISTRDPLSEITEQEKDFLWSHRHYCVTIPEILPKLLLSVKWNSRDEVAQMYCLVKDWPPIKPEQAMELLDCNYPDPMVRGFAVRCLEKYLTDDKLSQYLIQLVQVLKYEQYLDNLLVRFLLKKALTNQRIGHFFFWHLKSEMHNKTVSQRFGLLLESYCRACGMYLKHLNRQVEAMEKLINLTDILKQEKKDETQKVQMKFLVEQMRRPDFMDALQGFLSPLNPAHQLGNLRLEECRIMSSAKRPLWLNWENPDIMSELLFQNNEIIFKNGDDLRQDMLTLQIIRIMENIWQNQGLDLRMLPYGCLSIGDCVGLIEVVRNSHTIMQIQCKGGLKGALQFNSHTLHQWLKDKNKGEIYDAAIDLFTRSCAGYCVATFILGIGDRHNSNIMVKDDGQLFHIDFGHFLDHKKKKFGYKRERVPFVLTQDFLIVISKGAQECTKTREFERFQEMCYKAYLAIRQHANLFINLFSMMLGSGMPELQSFDDIAYIRKTLALDKTEQEALEYFMKQMNDAHHGGWTTKMDWIFHTIKQHALN

SEQ ID NO: 7915 - protein, 252 aa, Homo sapiens
MIKEAGAIISTRHCNPQNGDRCVAALARVECTHFLWPMCIGEVAHVSAEITYTSKHSVEVQVNMMSENILTGAKKLTNKATLWYAPLSLTNVDKVLEEPPVVYFRQEQEEEGQKRYKTQKLERMETNWRNGDIVQPVLNPEPNTVSYSQSSLIHLVGPSDCTLHSFVHEGVTMKVMDEVAGILAARHCKTNLVTASMEAINFDNKIRKGCIKTISGRMTFTSNKSVEIEVLVDADCVVDSSQKRYRAASVFT

SEQ ID NO: 7916 - protein, 165 aa, Homo sapiens [sequence omitted]

SEQ ID NO: 7917 - protein, 234 aa, Homo sapiens [sequence omitted]

SEQ ID NO: 7918 - protein, 164 aa, Homo sapiens
MTPSYEIRALGNKSRQKFLCEVQVEGKEEQEVQATLESEEVDLNAGLHGNWTLENAKTHLNQYFQKEKIQGEYKYTQVGPDHNRSFTAEITIYIKQLGRRISAHEHGSNKKLAAQSCALSLVRQLYHLGVVEAYFRLTKKEGERVEPYKVNLSQDLEHQPQNII

SEQ ID NO: 7919 - protein, 464 aa, Homo sapiens
MTHFVPSPKTKKKDKDDDGGEDDDANCNLICGDEYGPETRMSMSQLNEKETPFELVEALFKYIETLNIPRAVLEQRKVFDPVPVGVTKVILSTNIAETSIIINDVYVVDSCKQKVKLFATHNNMTNYATVWGSKTNLEQWKGQPGRIRPGFCFHLCSRARFERLETHMTPEMFQTPLHEVALSIKLPCLVGIGQFLAKAIETLPLDAVIEAEHTLRELDALDANDDLTPLGRILANLLIEPRFGKMMIMEKTKILTTEGCNALIHKSSVNCPFSSQDMKYPSPFFAFGEKIRTRAISAKGMTLVTPLQLLLFASKKVQSDGQIVLADDWIKLQISHEAAACITALQAATEALVVEVTKQPAIISQLDPVNESILNMIRQISRPSAADINLMIGSTWYGDGPGPPKMAQYDNGSGYRRGGSSYGSEGYGSGYSSGGYRSGGYGGSSSSCRAGYGAGVGGGYREVS

SEQ ID NO: 7920 - protein, 246 aa, Homo sapiens
MMGRLDGKVIILTAAAQGIGQAAALAFVREGAKVIATDINVSKLQELEKYLGIQTRVLDVTKKKQIDQFANEVERLDVLFNVAGFVHHGTVLDCEEKDWDFSMNLNVRSTYLMIKAFLPKMLAQKSGNIITMFSVVSSIKGVVNRCVYSTTKAAVIGLTKSVAADFIQQGIRCNCVCPGTVDTPSLQERIQARGNPEEARNDFLKRQKMGRFATAEEIAMLCVYVASDESAYVTGNPVIIDGGWSL

SEQ ID NO: 7921 - protein, 81 aa, Homo sapiens
MANAGPNTNGSQFFICTAKSEWLDGKHVLFGKVKEGTNIVEAWSALGPGMARPARRSPLLTVDNSNKFDLCFILTTRPFLP

SEQ ID NO: 7922 - protein, 583 aa, Homo sapiens
MKYILVTGGVISGIGKGIIASSIGTILKSCGLRVTAIKIDPYINIDAGTFSPYEHGEVFVLNDGGEVDLDLGNYERFLDINLYKDNNITTGKIYQHVINKERRGDYLGKTVQVVPHITDAVQEWVMNQAKVPVDGNKEEPQICLGGTIGDIEGMPFVEAFRQFQFKAKRENFCNIHVSLVPQLSATGEQKTKPTQNSVRALRGLGLSPDLIVCRSSTPIEMAVKEKISMFCHVNPEQVICIHDVSSTYRVPVLLEEQSIVKYFKERLHLPIGDSASNLLFKWRNMADRYERLQKICSIALVGKYTKLRDCYASVFKALEHSALAINHKLNLMYIDSIDLEKITETEDPVKFHEAWQKLCKADGILVPGGFGIRGTLGKLQAISWARTKKIPFLGVCLGMQLAVIEFARNCLNLKDADSTEFRPNAPVPLVIDMPEHNPGNLGGTMRLGIRRTVFKTENSILRKLYGDVPFIEERHRHRFEVNPNLIKQFEQNDLSFVGQDVDGDRMEIIELANHPYFVGVQFHPEFSSRPMKPSPPYLGLLLAATGNLNAYLQQGCKLSSSDRYSDASDDSFSEPRIAELEIS

SEQ ID NO: 7923 - protein, 586 aa, Homo sapiens
MKYILVTGGVISGIGKGIIASSIGTILKSCGLRVTAIKIDPYINIDAGTFSPYEHGEVFVLNDGGEVDLDLGNYERFLDINLYKDNNITTGKIYQHVINKERRGDYLGKTVQVVPHITDAVQEWVMNQAKVPVDGNKEEPQICVIELGGTIGDIEGMPFVEAFRQFQFKAKRENFCNIHVSLVPQLSATGEQKTKPTQNSVRALRGLGLSPDLIVCRSSTPIEMAVKEKISMFCHVNPEQVICIHDVSSTYRVPVLLEEQSIVKYFKERLHLPIGDSASNLLFKWRNMADRYERLQKICSIALVGKYTKLRDCYASVFKALEHSALAINHKLNLMYIDSIDLEKITETEDPVKFHEAWQKLCKADGILVPGGFGIRGTLGKLQAISWARTKKIPFLGVCLGMQLAVIEFARNCLNLKDADSTEFRPNAPVPLVIDMPEHNPGNLGGTMRLGIRRTVFKTENSILRKLYGDVPFIEERHRHRFEVNPNLIKQFEQNDLSFVGQDVDGDRMEIIELANHPYFVGVQFHPEFSSRPMKPSPPYLGLLLAATGNLNAYLQQGCKLSSSDRYSDASDDSFSEPRIAELEIS

SEQ ID NO: 7924 - protein, 597 aa, Homo sapiens [sequence omitted]

SEQ ID NO: 7925 - protein, 144 aa, Homo sapiens
MPRMCHNVNRVICIFGPPVKEPPTDVTPTFLTTGVLSTLRQADFEAHNILRESGYAGKISQMPVILTPLHFDRDPLQKQPSCQRSVVIRTFITSDSLTGIPATPGNEIPVEVVLKMVTEIKKIPGISRIMYDLTSKPPGTTEWE

SEQ ID NO: 7926 - protein, 501 aa, Homo sapiens
MVLWGPVLGALLVVIAGYLCLPGMLRQRRPWEPPLDKGTVPWLGHAMAFRKNMFEFLKRMRTKHGDVFTVQLGGQYFTFVMDPLSFGSILKDTQRKLDFGQYAKKLVLKVFGYRSVQGDHEMIHSASTKHLRGDGLKDLNETMLDSLSFVMLTSKGWSLDASCWHEDSLFRFCYYILFTAGYLSLFGYTKDKEQDLLQAGELFMEFRKFDLLFPRFVYSLLWPREWLEVGRLQRLFHKMLSVSHSQEKEGISNWLGNMLQFLREQGVPSAMQDKFNFMMLWASQGNTGPTSFWALLYLLKHPEAIRAVREEATQVLGEARLETKQSFAFKLGALQHTPVLDSVVEETLRLRAAPTLLRLVHEDYTLKMSSGQEYLFRHGDILALFPYLSVHMDPDIHPEPTVFKYDRFLNPNGSRKVDFFKTGKKIHHYTMPWGSGVSICPGRFFALSEVKLFILLMVTHFDLELVDPDTPLPHVDPQRWGFGTMQPSHDVRFRYRLHPTE

SEQ ID NO: 7927 - protein, 234 aa, Homo sapiens
MGAFCQRPSSDKEQEKEKKSVICVEGNIASGKTTCLEFFSNATDVEVLTEPVSKWRNVRGHNPLGLMYHDASRWGLTLQTYVQLTMLDRHTRPQVSSVRLMERSIHSARYIFVENLYRSGKMPEVDYVVLSEWFDWILRNMDVSVDLIVYLRTNPETCYQRLKKRCREEEKVIPLEYLEAIHHLHEEWLIKGSLFPMAAPVLVIEADHHMERMLELFEQNRDRILTPENRKHCP

SEQ ID NO: 7928 - protein, 240 aa, Homo sapiens
MLLWPLRGWAARALRCFGPGSRGSPASGPGPRRVQRRAWPPDKEQEKEKKSVVLTEPVSKWRNVRGHNPLGLMYHDASRWGLTLQTYVQLTMLDRHTRPQVSSVRLMERSIHSARYIFVENLYRSGKMPEVDYVVLSEWFDWILRNMDVSVDLIVYLRTNPETCYQRLKKRCREEEKVIPLEYLEAIHHLHEEWLIKGSLFPMAAPVLVIEADHHMERMLELFEQNRDRILTPENRKHCP

SEQ ID NO: 7929 - protein, 265 aa, Homo sapiens
MLLWPLRGWAARALRCFGPGSRGSPASGPGPRRVQRRAWPPDKEQEKEKKSVICVEGNIASGKTTCLEFFSNATDVEVLTEPVSKWRNVRGHNPLGLMYHDASRWGLTLQTYVQLTMLDRHTRPQVSSVRLMERSIHSARYIFVENLYRSGKMPEVDYVVLSEWFDWILRNMDVSVDLIVYLRTNPETCYQRLKKRCREEEKVIPLEYLEAIHHLHEEWLIKGSLFPMAAPVLVIEADHHMERMLELFEQNRDRILTPENRKHCP

SEQ ID NO: 7930 - protein, 234 aa, Homo sapiens; identical to SEQ ID NO: 7927

SEQ ID NO: 7931 - protein, 105 aa, Homo sapiens
MGDVEKGKKIFIMKRSQCHIVEKGGKHKTGPNLHGLFGRKTGQAPGHSYIATIKNKDIIWGEDTLMEYLENPKKYIPGTKMIFVGIKKEEAGHDLIAYLKKATNE

SEQ ID NO: 7932 - protein, 88 aa, Homo sapiens [sequence omitted]

SEQ ID NO: 7933 - protein, 136 aa, Homo sapiens
MVKKKVVFCPVKEALEVDWSSKKAKAALKRTTSDHFLLQVLLKFRTDKGRDPSSDTHGEDSELLLQIRNDVLDSLGIIPDPRFITYFFSEMAPVCAVVGGILAQEIVKALSQQDPPHNFFFNGMKGNGILEWLGPK

SEQ ID NO: 7934 - protein, 339 aa, Homo sapiens [sequence omitted]

SEQ ID NO: 7935 - protein, 375 aa, Homo sapiens
MAPPTELLARPERGSAPGSRAMGRLVAVGLLGIALALLGERLLALRNRLKASREVESVDLPHCHLIKGIEAGSEDIDILPNGLAFFSVGLKFPGLHSFAPDKPGGILMMDLKEEKPRARELRISRGFDLASFNPHGISTFIDNDDTVYLFVVNHPEFKNTVEIFKFEEAENSLLHLKTVKHELLPSVNDITAVGPAHFYATNDHYFSDPFLKYLETYLNLHWANVVYYSPNEVKVVAEGFDSANGINISPDDKYIYVADILAHEIHVLEKHTNMNLTQLKVLELDTLVDNLSIDPSSGDIWVGCHPNGQKLFVYDPNNPPSSEVLRIQNILSEKPTVTTVYANNGSVLQGSSVASVYDGKLLIGTLYHRALYCEL

SEQ ID NO: 7936 - protein, 363 aa, Homo sapiens
MAPPTELLARPERGSAPGSRAMGRLVAVGLLGIALALLGERLLALRNRLKASREVESVDLPHCHLIKGIEAGSEDIDILPNGLAFFSVGLKFPGLHSFAPDKPGGILMMDLKEEKPRARELRISRGFDLASFNPHGISTFIDNEFKNTVEIFKFEEAENSLLHLKTVKHELLPSVNDITAVGPAHFYATNDHYFSDPFLKYLETYLNLHWANVVYYSPNEVKVVAEGFDSANGINISPDDKYIYVADILAHEIHVLEKHTNMNLTQLKVLELDTLVDNLSIDPSSGDIWVGCHPNGQKLFVYDPNNPPSSEVLRIQNILSEKPTVTTVYANNGSVLQGSSVASVYDGKLLIGTLYHRALYCEL

SEQ ID NO: 7937 - protein, 49 aa, Homo sapiens
MELNLLTGIPIVCKLDKSSKPIRCMEFLGDEGTLCKAMEAVAAQGKAKK

SEQ ID NO: 7938 - protein, 517 aa, Homo sapiens
MLRFLAPRLLSLQGRTARYSSAAALPSPILNPDIPYNQLFINNEWQDAVSKKTFPTVNPTTGEVIGHVAEGDRADVDRAVKAAREAFRLGSPWRRMDASERGRLLNLLADLVERDRVYLASLETLDNGKPFQESYALDLDEVIKVYRYFAGWADKWHGKTIPMDGQHFCFTRHEPVGVCGQIIPWNFPLVMQGWKLAPALATGNTVVMKVAEQTPLSALYLASLIKEAGFPPGVVNIITGYGPTAGAAIAQHMDVDKVAFTGSTEVGHLIQKAAGDSNLKRVTLELGGKSPSIVLADADMEHAVEQCHEALFFNMGQCCCAGSRTFVEESIYNEFLERTVEKAKQRKVGNPFELDTQQGPQVDKEQFERVLGYIQLGQKEGAKLLCGGERFGERGFFIKPTVFGGVQDDMRIAKEEIFGPVQPLFKFKKIEEVVERANNTRYGLAAAVFTRDLDKAMYFTQALQAGTVWVNTYNIVTCHTPFGGFKESGNGRELGEDGLKAYTEVKTVTIKVPQKNS

SEQ ID NO: 7939 - protein, 169 aa, Homo sapiens [sequence omitted]

SEQ ID NO: 7940 - protein, 440 aa, Homo sapiens
MLRQENCLNLGDRGCSEPRSHHCTPAWASEQDSVSKTNKPGRETSTCSLRIISAPTMATFVELSTKAKMPIVGLGTWRSLLGKVKEAVKVAIDAEYRHIDCAYFYENQHEVGEAIQEKIQEKAVMREDLFIVSKVHMAHLVWPTFFERPLVRKAFEKTLKDLKLSYLDVYLIHWPQGFKSLKKWYADVVFSKHQDPETLLNRTKCPDADSSKLFILYLQTGDDFFPKDDKGNMISGKGTFLDAWEAMEELVDEGLVKALGVSNFNHFQIERLLNKPGLKYKPVTNQNSLGTMQNRAGFPRDEDCLLLQVECHPYLTQEKLIQYCHSKGITVTAYSPLGSPDRPWAKPEDPSLLEDPKIKEIAAKHKKTTAQVLIRFHIQRNVTVIPKSMTPAHIVENIQVFDFKLSDEEMATILSFNRNWRAFDFKEFSHLEDFPFDAEY

SEQ ID NO: 7941 - protein, 372 aa, Homo sapiens
MLRQENCLNLGDRGCSEPRSHHCTPAWASEQDSVSKTNKPGRETSTCSLRIISAPTMATFVELSTKAKMPIVGLGTWRSLLGKVKEAVKVAIDAEYRHIDCAYFYENQHEVGEAIQEKIQEKAVMREDLFIVSKVWPTFFERPLVRKAFEKTLKDLKLSYLDVYLIHWPQGFKTGDDFFPKDDKGNMISGKGTFLDAWEAMEELVDEGLVKALGVSNFNHFQIERLLNKPGLKYKPVTNQVECHPYLTQEKLIQYCHSKGITVTAYSPLGSPDRPWAKPEDPSLLEDPKIKEIAAKHKKTTAQVLIRFHIQRNVTVIPKSMTPAHIVENIQVFDFKLSDEEMATILSFNRNWRAFDFKEFSHLEDFPFDAEY

SEQ ID NO: 7942 - protein, 156 aa, Homo sapiens
MALEKSLVRLLLLVLILLVLGWVQPSLGKESRAKKFQRQHMDSDSSPSSSSTYCNQMMRRRNMTQGRCKPVNTFVHEPLVDVQNVCFQEKVTCKNGQGNCYKSNSSMHITDCRLTNGSRYPNCAYRTSPKERHIIVACEGSPYVPVHFDASVEDST

SEQ ID NO: 7943 - protein, 156 aa, Homo sapiens; identical to SEQ ID NO: 7942

SEQ ID NO: 7944 - protein, 150 aa, Homo sapiens
MVLCFPLLLLLLVLWGPVCPLHAWPKRLTKAHWFEIQHIQPSPLQCNRAMSGINNYTQHCKHQNTFLHDSFQNVAAVCDLLSIVCKNRRHNCHQSSKPVNMTDCRLTSGKYPQCRYSAAAQYKFFIVACDPPQKSDPPYKLVPVHLDSIL

SEQ ID NO: 7945 - protein, 150 aa, Homo sapiens; identical to SEQ ID NO: 7944

SEQ ID NO: 7946 - protein, 150 aa, Homo sapiens; identical to SEQ ID NO: 7944

SEQ ID NO: 7947 - protein, 525 aa, Homo sapiens [sequence omitted]

SEQ ID NO: 7948 - protein, 466 aa, Homo sapiens
MVRSVAWAGFMVLLMIPWGSAAKLVCYFTNWAQYRQGEARFLPKDLDPSLCTHLIYAFAGMTNHQLSTTEWNDETLYQEFNGLKKMNPKLKTLLAIGGWNFGTQKFTDMVATANNRQTFVNSAIRFLRKYSFDGLDLDWEYPGSQGSPAVDKERFTTLVQDLANAFQQEAQTSGKERLLLSAAVPAGQTYVDAGYEVDKIAQNLDFVNLMAYDFHGSWEKVTGHNSPLYKRQEESGAAASLNVDAAVQQWLQKGTPASKLILGMPTYGRSFTLASSSDTRVGAPATGSGTPGPFTKEGGMLAYYEVCSWKGATKQRIQDQKVPYIFRDNQWVGFDDVESFKTKVSYLKQKGLGGAMVWALDLDDFAGFSCNQGRYPLIQTLRQELSLPYLPSGTPELEVPKPGQPSEPEHGPSPGQDTFCQGKADGLYPNPRERSSFYSCAAGRLFQQSCPTGLVFSNSCKCCTWN

SEQ ID NO: 7949 - protein, 573 aa, Homo sapiens
MEEEQDLPEQPVKKAKMQESGEQTISQVSNPDVSDQKPETSSLASNLPMSEEIMTCTDYIPRSSNDYTSQMYSAKPYAHILSVPVSETAYPGQTQYQTLQQTQPYAVYPQATQTYGLPPFGALWPGMKPESGLIQTPSPSQHSVLTCTTGLTTSQPSPAHYSYPIQASSTNASLISTSSTIANIPAAAVASISNQDYPTYTILGQNQYQACYPSSSFGVTGQTNSDAESTTLAATTYQSEKPSVMAPAPAAQRLSSGDPSTSPSLSQTTPSKDTDDQSRKNMTSKNRGKRKADATSSQDSELERVFLWDLDETIIIFHSLLTGSYAQKYGKDPTVVIGSGLTMEEMIFEVADTHLFFNDLEECDQVHVEDVASDDNGQDLSNYSFSTDGFSGSGGSGSHGSSVGVQGGVDWMRKLAFRYRKVREIYDKHKSNVGGLLSPQRKEALQRLRAEIEVLTDSWLGTALKSLLLIQSRKNCVNVLITTTQLVPALAKVLLYGLGEIFPIENIYSATKIGKESCFERIVSRFGKKVTYVVIGDGRDEEIAAKQHNMPFWRITNHGDLVSLHQALELDFL

SEQ ID NO: 7950 - protein, 447 aa, Homo sapiens
MKPESGLIQTPSPSQHSVLTCTTGLTTSQPSPAHYSYPIQASSTNASLISTSSTIANIPAAAVASISNQDYPTYTILGQNQYQACYPSSSFGVTGQTNSDAESTTLAATTYQSEKPSVMAPAPAAQRLSSGDPSTSPSLSQTTPSKDTDDQSRKNMTSKNRGKRKADATSSQDSELERVFLWDLDETIIIFHSLLTGSYAQKYGKDPTVVIGSGLTMEEMIFEVADTHLFFNDLEECDQVHVEDVASDDNGQDLSNYSFSTDGFSGSGGSGSHGSSVGVQGGVDWMRKLAFRYRKVREIYDKHKSNVGGLLSPQRKEALQRLRAEIEVLTDSWLGTALKSLLLIQSRKNCVNVLITTTQLVPALAKVLLYGLGEIFPIENIYSATKIGKESCFERIVSRFGKKVTYVVIGDGRDEEIAAKQHNMPFWRITNHGDLVSLHQALELDFL

SEQ ID NO: 7951 - protein, 73 aa, Homo sapiens [sequence omitted]

SEQ ID NO: 7952 - protein, 109 aa, Homo sapiens
MAAVGVFSVSRLLGRSRPQLGRPMSSGAHGEEGSARMWKTLTFFVALPGVAVSMLNVYLKSHHGEHERPEFIAYPHLRIRTKPFPWGDGNHTLFHNPHVNPLPTGYEDE

SEQ ID NO: 7953 - protein, 372 aa, Homo sapiens
MASLSRALRVAAAHPRQSPTRGMGPCNLSSAAGPTAEKSVPYQRTLKEGQGTSVVAQGPSRPLPSTANVVVIGGGSLGCQTLYHLAKLGMSGAVLLERERLTSGTTWHTAGLLWQLRPSDVEVELLAHTRRVVSRELEEETGLHTGWIQNGGLFIASNRQRLDEYKRLMSLGKAYGVESHVLSPAETKTLYPLMNVDDLYGTLYVPHDGTMDPAGTCTTLARAASARGAQVIENCPVTGIRVWTDDFGVRRVAGVETQHGSIQTPCVVNCAGVWASAVGRMAGVKVPLVAMHHAYVVTERIEGIQNMPNVRDHDASVYLRLQGDALSVGGYEANPIFWEEAVKYRPRAAGGLCLKTSTEKVCAVWSDDLRRA

SEQ ID NO: 7954 - protein, 572 aa, Homo sapiens [sequence omitted]

SEQ ID NO: 7955 - protein, 918 aa, Homo sapiens
MASLSRALRVAAAHPRQSPTRGMGPCNLSSAAGPTAEKSVPYQRTLKEGQGTSVVAQGPSRPLPSTANVVVIGGGSLGCQTLYHLAKLGMSGAVLLERERLTSGTTWHTAGLLWQLRPSDVEVELLAHTRRVVSRELEEETGLHTGWIQNGGLFIASNRQRLDEYKRLMSLGKAYGVESHVLSPAETKTLYPLMNVDDLYGTLYVPHDGTMDPAGTCTTLARAASARGAQVIENCPVTGIRVWTDDFGVRRVAGVETQHGSIQTPCVVNCAGVWASAVGRMAGVKVPLVAMHHAYVVTERIEGIQNMPNVRDHDASVYLRLQGDALSVGGYEANPIFWEEVSDKFAFGLFDLDWEVFTQHIEGAINRVPVLEKTGIKSTVCGPESFTPDHKPLMGEAPELRGFFLGCGFNSAGMMLGGGCGQELAHWIIHGRPEKDMHGYDIRRFHHSLTDHPRWIRERSHESYAKNYSVVFPHDEPLAGRNMRRDPLHEELLGQGCVFQERHGWERPGWFHPRGPAPVLEYDYYGAYGSRAHEDYAYRRLLADEYTFAFPPHHDTIKKECLACRGAAAVFDMSYFGKFYLVGLDARKAADWLFSADVSRPPGSTVYTCMLNHRGGTESDLTVSRLAPSHQASPLAPAFEGDGYYLAMGGAVAQHNWSHITTVLQDQKSQCQLIDSSEDLGMISIQGPASRAILQEVLDADLSNEAFPFSTHKLLRAAGHLVRAMRLSFVGELGWELHIPKASCVPVYRAVMAAGAKHGLINAGYRAIDSLSIEKGYRHWHADLRPDDSPLEAGLAFTCKLKSPVPFLGREALEQQRAAGLRRRLVCFTMEDKVPMFGLEAIWRNGQVVGHVRRADFGFAIDKTIAYGYIHDPSGGPVSLDFVKSGDYALERMGVTYGAQAHLKSPFDPNNKRVKGIY

SEQ ID NO: 7956 - protein, 918 aa, Homo sapiens; identical to SEQ ID NO: 7955

SEQ ID NO: 7957 - protein, 396 aa, Homo sapiens
MASLSRALRVAAAHPRQSPTRGMGPCNLSSAAGPTAEKSVPYQRTLKEGQGTSVVAQGPSRPLPSTANVVVIGGGSLGCQTLYHLAKLGMSGAVLLERERLTSGTTWHTAGLLWQLRPSDVEVELLAHTRRVVSRELEEETGLHTGWIQNGGLFIASNRQRLDEYKRLMSLGKAYGVESHVLSPAETKTLYPLMNVDDLYGTLYVPHDGTMDPAGTCTTLARAASARGAQVIENCPVTGIRVWTDDFGVRRVAGVETQHGSIQTPCVVNCAGVWASAVGRMAGVKVPLVAMHHAYVVTERIEGIQSFTLLPTLEYSGTVSAHCNLRLPGSSNSRASASHVAGIKCARHHTRLIFFCILVETEFHHVAKAGLELLSSGNPPISDFQSARITGVSHHA

SEQ ID NO: 7958 - protein, 181 aa, Homo sapiens [sequence omitted]

SEQ ID NO: 7959 - protein, 1637 aa, Homo sapiens [sequence omitted]

SEQ ID NO: 7960 - protein, 1634 aa, Homo sapiens
MSSTQGNGEHWKSLESVGISRKELAMAEALQMEYDALSRLRHDKEENRAKQNADPSLISWDEPGVDFYSKPAGRRTDLKLLRGLSGSDPTLNYNSLSPQEGPPNHSTSQGPQPGSDPWPKGSLSGDYLYIFDGSDGGVSSSPGPGDIEGSCKKLSPPPLPPRASIWDTPPLPPRKGSPSSSKISQPSDINTFSLVEQLPGKLLEHRILEEEEVLGGGGQGRLLGSVDYDGINDAITRLNLKSTYDAEMLRDATRGWKEGRGPLDFSKDTSGKPVARSKTMPPQVPPRTYASRYGNRKNATPGKNRRISAAPVGSRPHTVANGHELFEVSEERDEEVAAFCHMLDILRSGSDIQDYFLTGYVWSAVTPSPEHLGDEVNLKVTVLCDRLQEALTFTCNCSSTVDLLIYQTLCYTHDDLRNVDVGDFVLKPCGLEEFLQNKHALGSHEYIQYCRKFDIDIRLQLMEQKVVRSDLARTVNDDQSPSTLNYLVHLQERPVKQTISRQALSLLFDTYHNEVDAFLLADGDFPLKADRVVQSVKAICNALAAVETPEITSALNQLPPCPSRMQPKIQKDPSVLAVRENREKVVEALTAAILDLVELYCNTFNADFQTAVPGSRKHDLVQEACHFARSLAFTVYATHRIPIIWATSYEDFYLSCSLSHGGKELCSPLQTRRAHFSKYLFHLIVWDQQICFPVQVNRLPRETLLCATLYALPIPPPGSSSEANKQRRVPEALGWVTTPLFNFRQVLTCGRKLLGLWPATQENPSARWSAPNFHQPDSVILQIDFPTSAFDIKFTSPPGDKFSPRYEFGSLREEDQRKLKDIMQKESLYWLTDADKKRLWEKRYYCHSEVSSLPLVLASAPSWEWACLPDIYVLLKQWTHMNHQDALGLLHATFPDQEVRRMAVQWIGSLSDAELLDYLPQLVQALKYECYLDSPLVRFLLKRAVSDLRVTHYFFWLLKDGLKDSQFSIRYQYLLAALLCCCGKGLREEFNRQCWLVNALAKLAQQVREAAPSARQGILRTGLEEVKQFFALNGSCRLPLSPSLLVKGIVPRDCSYFNSNAVPLKLSFQNVDPLGENIRVIFKCGDDLRQDMLTLQMIRIMSKIWVQEGLDMRMVIFRCFSTGRGRGMVEMIPNAETLRKIQVEHGVTGSFKDRPLADWLQKHNPGEDEYEKAVENFIYSCAGCCVATYVLGICDRHNDNIMLKTTGHMFHIDFGRFLGHAQMFGNIKRDRAPFVFTSDMAYVINGGDKPSSRFHDFVDLCCQAYNLIRKHTHLFLNLLGLMLSCGIPELSDLEDLKYVYDALRPQDTEANATTYFTRLIESSLGSVATKLNFFIHNLAQMKFTGSDDRLTLSFASRTHTLKSSGRISDVFLCRHEKIFHPNKGYIYVVKVMRENTHEATYIQRTFEEFQELHNKLRLLFPSSHLPSFPSRFVIGRSRGEAVAERRREELNGYIWHLIHAPPEVAECDLVYTFFHPLPRDEKAMGTSPAPKSSDGTWARPVGKVGGEVKLSISYKNNKLFIMVMHIRGLQLLQDGNDPDPYVKIYLLPDPQKTTKRKTKVARKTCNPTYNEMLVYDGIPKGDLQQRELQLSVLSEQGFWENVLLGEVNIRLRELDLAQEKTGWFALGSRSHGTL

SEQ ID NO: 7961 - protein, 425 aa, Homo sapiens
MVSENSWQVKKIAYSPALSPAASARARVVHCTLKTDSRRRELVPLIPDVMSSKGSVVLAYSGGLDTSCILVWLKEQGYDVTAYLANIGQKEDFEEARKKAPKLGTKKVFTEGVSREFVEEFIWPAIQSSSLYEDGYLLGTSHTRPCTARKQIKVIAPWSMPEFYNHFKGCSDLTEYTKQHGIPIPVTPKNPWNMDENLMHISYEAGILEDPQEPSASRSLHEDPGLAKAPNTPDILEIEFKKGVFLKVTNVKDGTTHQTSLALFMYLNEVTGKHCVGRIDIVENCFIGMKSRGIYETPAGTILYHAHLDIETFTMDWEVRKIKQGLGLKCAELVYTGFWHSPECEFVRHSIAKSQERVERKVQVSLFKDQVYILGWESPRSLYNEELVSMNVHGDYEPIDATGFININSLRLKEYHHLQSKVTAN

SEQ ID NO: 7962 - protein, 123 aa, Homo sapiens
MVNPTVSFNIAVNGEPLGCVSFKLFADKFPKTAENFRALSTGEKGFDYKCSSFHRIIPGVVTSHAIMALFFICTAKTEWLDGKPMVFGKVKDGMNIVEAMEHFGSGNGKTIKKITIADCTQLD

SEQ ID NO: 7963 - protein, 131 aa, Homo sapiens
MVNPTVSFNIAVNGEPLGCVSFKLFADKFPKTAENFRALSTGEKGFDYKCSSFHRIIPGFMCQGGDFTRHNGTGGKSIYGEKFDDENFILKHTGPGILSMANAGPNTNDSRFSSALPRLSGWMASPWSLAR

SEQ ID NO: 7964 - protein, 358 aa, Homo sapiens
  VARIANT (1)...(358): Xaa = Any Amino Acid
MLSVLVFGNRYRYGDPEFLRLLNLFSDNFCIISSRWGEMYICLSLMDWLPGPHHRIFRNFSELRVISEQIQRHWQMRQPAEPRDFIDCLTRWTSVMTTHFFFGVTETTSTTLCYGLLILLKYLEVAAKVQELDPVVGWRPAPSLDYRVCLPYANAVLLEIQCFISVVPLGLPRTLTLDTHLHSHCLPKGNPSCMYPQGTFVIPLLVTAHRDPTQFKDPDCFNPTNFLDKGKFQGNDAFMPFASGAGRGGRGPAWTGSGVPGAHCAPVYPAKQMCLGTGLAHSGIFLFLTATLQRFCLLPVVRPGTINLTCSALAWAVSPQTSSSSQWPAEVRLHYGGLTGPQTSIPSSVNKGPKLQMX

SEQ ID NO: 7965 - protein, 224 aa, Homo sapiens
MGIMAASRPLSRFWEWGKNIVCVGRNYADHVREMRSAVLSEPVLFLKPSTAYAPEGSPILMPAYTRNLHHELELGVVMGKRCRAVPEAAAMDYVGGYALCLDMTARDVQDECKKKGLPWTLAKSFTASCPVSAFVPKEKIPDPHKLKLWLKVNGELRQEGETSSMIFSIPYIISYVSKIITLEEGDIILTGTPKGVGPVKENDEIEAGIHGLVSMTFKVEKPEY

SEQ ID NO: 7966 - protein, 61 aa, Homo sapiens [sequence omitted]

SEQ ID NO: 7967 - protein, 217 aa, Homo sapiens
MNSDLKPQLRELNITTTKEIEIVDSWKVIIIFVPIPKLKSFQKIQVWLLHELRRSSDRQKEEVQGDKIPFKIIKETQRLLAEPVPGIKAEPDESNARYFHVVIAGESKDSPFEGGTFKRELLLAEEYPMAAPKVRFMTKIYHPNVDKLERISLDILKDKWSPALQIRTVLLSIQALLNAPNPDDPLANDVVEQWKTNEAQAIETARAWTRLYAMNSI

SEQ ID NO: 7968 - protein, 153 aa, Homo sapiens
MAELPHRIIKETQRLLAEPVPGIKAEPDESNARYFHVVIAGESKDSPFEGGTFKRELLLAEEYPMAAPKVRFMTKIYHPNVDKLERISLDILKDKWSPALQIRTVLLSIQALLNAPNPDDPLANDVVEQWKTNEAQAIETARAWTRLYAMNSI

SEQ ID NO: 7969 - protein, 161 aa, Homo sapiens [sequence omitted]

SEQ ID NO: 7970 - protein, 212 aa, Homo sapiens [sequence omitted]

SEQ ID NO: 7971 - protein, 104 aa, Homo sapiens [sequence omitted]

SEQ ID NO: 7972 - protein, 212 aa, Homo sapiens [sequence omitted]

SEQ ID NO: 7973 - protein, 623 aa, Homo sapiens
MLLFSLSYCNRSYLSLGTGGPLQEAYDAVLTISQESGPIDKAFAAARPDGEAAAHLEPEQVGVLLVQTPNALSGGPGQGCTRSGLSELGSPGDARFLVLRRQQCLEVVTDVDADGLLATWERCDWGPADASGPGVPDPSPRQRACVKTVFSALLTQLGLTVRQKWKRGEESLGIHQLQLVWGPHRILLTAQELTFIHPPLNRQRLHVDGEWRSVADGGSLRCFVLKVTDHELLWTAPELLPGPGRPGRRTLTGDIFSTGIILQEVLTRAHSTAPRDFQWKNHNDDDNDKQAVSFTPVGNRHASVCVARLEERAALSRFQDHWWALLATEQRQLLRGLRVGESLPGPQARPMVLVAEIIRRVASPPPLCRPLKCWDEAPEDRPSMDQIYSQFKSINQGKRTSVADSMLWLLEKYSQNLEDLIQEQTEELELKREKTERLLCQMIPPSVAEARKMGATVEPGYFDQVTIYFSDIVGFTIISALSEPIEAVGLLNDLYMLFDAVLGSHDLYKVETIGDAYMVVWGLPQCNGSQHAAEINNMALDILGSVGDFRKRHAPNVPICIRAGLHSGPCAAGVVGLTMPWYCLSGDTVNTASQMESTGLHEYLTLLSCPGRDSFNNLCGLAV

SEQ ID NO: 7974 - protein, 865 aa, Homo sapiens
MLLFSLSYCNRSYLSLGTGGPLQEAYDAVLTISQESGPIDKAFAAARPDGEAAAHLEPEQVGVLLVQTPNALSGGPGQGCTRSGLSELGSPGDARFLVLRRQQCLEVVTDVDADGLLATWERCDWGPADASGPGVPDPSPRQRACVKTVFSALLTQLGLTVRQKWKRGEESLGIHQLQLVWGPHRILLTAQELTFIHPPLNRQRLHVDGEWRSVADGGSLRCFVLKVTDHELLWTAPELLPGPGRPGRRTLTGDIFSTGIILQEVLTRAHSTAPRDFQWKNHNDDDNDKQAVSFTPVGNRHASVCVARLEERAALSRFQDHWWALLATEQRQLLRGLRVGESLPGPQARPMVLVAEIIRRVASPPPLCRPLKCWDEAPEDRPSMDQIYSQFKSINQGKRTSVADSMLWLLEKYSQNLEDLIQEQTEELELKREKTERLLCQMIPPSVAEARKMGATVEPGYFDQVTIYFSDIVGFTIISALSEPIEAVGLLNDLYMLFDAVLGSHDLYKVETIGDAYMVVWGLPQCNGSQHAAEINNMALDILGSVGDFRKRHAPNVPICIRAGLHSDLLELTGYIRVSGPCAAGVVGLTMPWYCLSGDTVNTASQMESTGLHEYLTLLSCPGRDSFNNLPDTTMKTSPAFLALTGSRSYHDGLARAAKMLKPQVLCLWLSYRIHVSQSTVQILLSLDESYQIDIRGEGHRRDLLGGGKAGFPRPLPAPVDIRPGSGCSLNGSFWGFTAPRIAKLQQPLKPGPPASPVRQPNTMPSSWRLRTYPYPLASLEPPEPLGRQNRGEDSTFQLSTTSTISHQVLCGLPRWSPTSVHNKGTRLHAALLPLFPPLIYLQRRPCDVTFRLSKCALLMTKGLC

SEQ ID NO: 7975 - protein, 306 aa, Homo sapiens [sequence omitted]

SEQ ID NO: 7976 - protein, 640 aa, Homo sapiens
MALSRGLPRELAEAVAGGRVLVVGAGGIGCELLKNLVLTGFSHIDLIDLDTIDVSNLNRQFLFQKKHVGRSKAQVAKESVLQFYPKANIVAYHDSIMNPDYNVEFFRQFILVMNALDNRAARNHVNRMCLAADVPLIESGTAGYLGQVTTIKKGVTECYECHPKPTQRTFPGCTIRNTPSEPIHCIVWAKYLFNQLFGEEDADQEVSPDRADPEAAWEPTEAEARARASNEDGDIKRISTKEWAKSTGYDPVKLFTKLFKDDIRYLLTMDKLWRKRKPPVPLDWAEVQSQGEETNASDQQNEPQLGLKDQQVLDVKSYARLFSKSIETLRVHLAEKGDGAELIWDKDDPSAMDFVTSAANLRMHIFSMNMKSRFDIKSMAGNIIPAIATTNAVIAGLIVLEGLKILSGKIDQCRTIFLNKQPNPRKKLLVPCALDPPNPNCYVCASKPEVTVRLNVHKVTVLTLQDKIVKEKFAMVAPDVQIEDGKGTILISSEEGETEANNHKKLSEFGIRNGSRLQADDFLQDYTLLINILHSEDLGKDVEFEVVGDAPEKVGPKQAEDAAKSITNGSDDGAQPSTSTAQEQDDVLIVDSDEEDSSNNADVSEEERSRKRKLDEKENLSAKRSRIEQKEELDDVIALD

SEQ ID NO: 7977 - protein, 640 aa, Homo sapiens; identical to SEQ ID NO: 7976

SEQ ID NO: 7978 - protein, 224 aa, Homo sapiens
MRLWKARVLKLVLKTAKDSRLGLNSKWLSLKLGDAGNPRSLAIRFILTNYNKLSIQSWFSLRRVEIISNNSIQAVFNPTGVYAPSGYSYRCQRVGSLQQDQALLLPSDTDDGSSLWEVTFIDFQIQGFAIKGGRFTKAQDCASSFSPAFLIGLAMSLILLLVLAYALHMLIYLRYLDQQYDLIASPAHFSQLKARDTAEEKELLRSQGAECYKLRSQQISKIYV

SEQ ID NO: 7979 - protein, 490 aa, Homo sapiens
MTSFSTSAQCSTSDSACRISPGQINQVRPKLPLLKILHAAGAQGEMFTVKEVMHYLGQYIMVKQLYDQQEQHMVYCGGDLLGELLGRQSFSVKDPSPLYDMLRKNLVTLATATTDAAQTLALAQDHSMDIPSQDQLKQSAEESSTSRKRTTEDDIPTLPTSEHKCIHSREDEDLIENLAQDETSRLDLGFEEWDVAGLPWWFLGNLRSNYTPRSNGSTDLQTNQDVGTAIVSDTTDDLWFLNESVSEQLGVGIKVEAADTEQTSEEVGKVSDKKVIEVGKNDDLEDSKSLSDDTDVEVTSEDEWQCTECKKFNSPSKRYCFRCWALRKDWYSDCSKLTHSLSTSDITAIPEKENEGNDVPDCRRTISAPVVRPKDAYIKKENSKLFDPCNSVEFLDLAHSSESQETISSMGEQLDNLSEQRTDTENMEDCQNLLKPCSLCEKRPRDGNIIHGRTGHLVTCFHCARRLKKAGASCPICKKEIQLVIKVFIA

SEQ ID NO: 7980 - protein, 490 aa, Homo sapiens; identical to SEQ ID NO: 7979

SEQ ID NO: 7981 - protein, 378 aa, Homo sapiens [sequence omitted]

SEQ ID NO: 7982 - protein, 367 aa, Homo sapiens [sequence omitted]

SEQ ID NO: 7983 - protein, 367 aa, Homo sapiens [sequence omitted]

SEQ ID NO: 7984 - protein, 378 aa, Homo sapiens [sequence omitted]

SEQ ID NO: 7985 - protein, 389 aa, Homo sapiens [sequence omitted]

SEQ ID NO: 7986 - protein, 367 aa, Homo sapiens [sequence omitted]

SEQ ID NO: 7987 - protein, 49 aa, Homo sapiens
MRIVYLLFILQIQKVGPDICHRTFHLYTTLTMEKNPENCILLIKFNKRF

SEQ ID NO: 7988 - protein, 299 aa, Homo sapiens
MDLVLRVADYYFFTPYVYPATWPEDDIFRQAISLLIVTNVGAYILYFFCATLSYYFVFDHALMKHPQFLKNQVRREIKFTVQALPWISILTVALFLLEIRGYSKLHDDLGEFPYGLFELVVSIISFLFFTDMFIYWIHRGLHHRLVYKRLHKPHHIWKIPTPFASHAFHPIDGFLQSLPYHIYPFIFPLHKVVYLSLYILVNIWTISIHDGDFRVPQILQPFINGSAHHTDHHMFFDYNYGQYFTLWDRIGGSFKNPSSFEGKGPLSYVKEMTEGKRSSHSGNGCKNEKLFNGEFTKTE

SEQ ID NO: 7989 - protein, 209 aa, Homo sapiens
MDLVLRVADYYFFTPYVYPATWPEDDIFRQAISLLIVTNVGAYILYFFCATLSYYFVFDHALMKHPQFLKNQVRREIKFTVQALPWISILTVALFLLEIRGYSKLHDDLGEFPYGLFELVVSIISFLFFTDMFIYWIHRGLHHRLVYKVKSFVVKREKRLHISAMYDYKFCSLFPRISSTHIKCLSSHNHNRYRVHFVHILLYGSKGLS

SEQ ID NO: 7990 - protein, 299 aa, Homo sapiens; identical to SEQ ID NO: 7988

SEQ ID NO: 7991 - protein, 116 aa, Homo sapiens [sequence omitted]

SEQ ID NO: 7992 - protein, 291 aa, Homo sapiens [sequence omitted]

SEQ ID NO: 7993 - protein, 291 aa, Homo sapiens [sequence omitted]

SEQ ID NO: 7994 - protein, 168 aa, Homo sapiens
MAEVNLPQKAGGFLMKKELNYFAEALESPERPFLAILGRTKVADKIQLIKNMLGKVNEMIIGSGMACTFLKVLSNMEIGTSLFDEEGAKTVKDLMSKAEKNGVKIILPVDFVTAGKFDENTKTGQATVASGIPAGWLGLDCGPESSKKYAGAVTQAKQIVWNGPVGGF

SEQ ID NO: 7995 - protein, 394 aa, Homo sapiens
MAVPPSAPQPRASFHLRRHTPCPQCSWGMEEKAAASASCREPPGPPRAAAVAYFGISVDPDDILPGALRLIQELRPHWKPEQVRTKRFTDGITNKLVACYVEEDMQDCVLVRVYGERTELLVDRENEVRNFQLLRAHSCAPKLYCTFQNGLCYEYMQGVALEPEHIREPRLFRLIALEMAKIHTIHANGSLPKPILWHKMHNYFTLVKNEINPSLSADVPKVEVLERELAWLKEHLSQLESPVVFCHNDLLCKNIIYDSIKGHVRFIDYEYAGYNYQAFDIGNHFNEFAGVNEVDYCLYPARETQLQWLHYYLQAQKGMAVTPREVQRLYVQVNKFALGPSCVSSTMTASLQCCRVGNRHGEIARLTLSGLFPGVSLLLGSLGPHPEPVLHHRL

SEQ ID NO: 7996 - protein, 394 aa, Homo sapiens; identical to SEQ ID NO: 7995

SEQ ID NO: 7997 - protein, 386 aa, Homo sapiens
MAVPPSAPQPRASFHLRRHTPCPQCSWGMEEKAAASASCREPPGPPRAAAVAYFGISVDPDDILPGALRLIQELRPHWKPEQVRTKRFTDGITNKLVACYVEEDMQDCVLVRVYGERTELLVDRENEVRNFQLLRAHSCAPKLYCTFQNGLCYEYMQGVALEPEHIREPRLFRLIALEMAKIHTIHANGSLPKPILWHKMHNYFTLVKNEINPSLSADVPKVEVLERELAWLKEHLSQLESPVVFCHNDLLCKNIIYDSIKGHVRFIDYEYAGYNYQAFDIGNHFNEFAGVNEVDYCLYPARETQLQWLHYYLQAQKGMAVTPREVQRLYVQVNKFALASHFFWALWALIQNQYSTIDFDFLRYAVIRFNQYFKVKPQASALEMPK

SEQ ID NO: 7998 - protein, 1207 aa, Homo sapiens [sequence omitted]

SEQ ID NO: 7999 - protein, 1196 aa, Homo sapiens [sequence omitted]

SEQ ID NO: 8000 - protein, 663 aa, Homo sapiens
MAPKRVVQLSLKMPTHAVCVVGVEAHVDIHSDVPKGANSFRVSGSSGVEVFMVYNRTRVKEPIGKARWPLDTDADMVVSVGTASKELKDFKVRVSYFGEQEDQALGRSVLYLTGVDISLEVDTGRTGKVKRSQGDKKTWRWGPEGYGAILLVNCDRDNHRSAEPDLTHSWLMSLADLQDMSPMLLSCNGPDKLFDSHKLVLNVPFSDSKRVRVFCARGGNSLSDYKQVLGPQCLSYEVERQPGEQEIKFYVEGLTFPDADFLGLVSLSVSLVDPGTLPEVTLFTDTVGFRMAPWIMTPNTQPPEELYVCRVMDTHGSNEKFLEDMSYLTLKANCKLTICPQVENRNDRWIQDEMEFGYIEAPHKSFPVVFDSPRNRGLKDFPYKRILGPDFGYVTREIPLPGPSSLDSFGNLDVSPPVTVGGTEYPLGRILIGSSFPKSGGRQMARAVRNFLKAQQVQAPVELYSDWLSVGHVDEFLTFVPTSDQKGFRLLLASPSACLKLFQEKKEEGYGEAAQFDGLKHQAKRSINEMLADRHLQRDNLHAQKCIDWNRNVLKRELGLAESDIVDIPQLFFLKNFYAEAFFPDMVNMVVLGKYLGIPKPYGPIINGRCCLEEKVQSLLEPLGLHCIFIDDYLSYHELQGEIHCGTNVRRKPFPFKWWNMVP

SEQ ID NO: 8001 - protein, 156 aa, Homo sapiens
MWKRSDHQPKIKAEDGPLVGQFEVLGSVPEPAMPHPLELSEFESFPVFQDIRLHIREVGAQLVKKVNAVFQLDITKNGKTILRWTIDLKNGSGDMYPGPARLPADTVFTIPESVFMELVLGKMNPQKAFLAGKFKVSGKVLLSWKLERVFKDWAKF

SEQ ID NO: 8002 - protein, 194 aa, Homo sapiens
MWSAVSTTAPGLLHTLKVAPLPLAQSMLVPVPAPRKEYESSFSNEETQKAQALQLASYLNLAMCHLKLQAFSAATESCNKALELGSNNEKGLFHWGEAHLAVNDFELAQADFQKVLQLYPNNEAAKAQLAVCQQQICRQLAWEKTLYANTFERLAEEENKAKAEASSGDNLTDTEMEEQKSNTTESQSQVETEA

SEQ ID NO: 8003 - protein, 132 aa, Homo sapiens
MCHLKLQAFSAATESCNKALELGSNNEKGLFHWGEAHLAVNDFELAQADFQKVLQLYPNNEAAKAQLAVCQQQICRQLAWEKTLYANTFERLAEEENKAKAEASSGDNLTDTEMEEQKSNTTESQSQVETEA

SEQ ID NO: 8004 - protein, 104 aa, Homo sapiens
MVNPTVFFDIAVDGEPLGRVSFELFADKVPKTAENFRALSTGEKGFGYKGSCFHRIIPGFMCQGGDFTRHNGTGGKSIYGEKFEHEYCGGHGALWVQEWQDQQE

SEQ ID NO: 8005 - protein, 165 aa, Homo sapiens
MVNPTVFFDIAVDGEPLGRVSFELFADKVPKTAENFRALSTGEKGFGYKGSCFHRIIPGFMCQGGDFTRHNGTGGKSIYGEKFEDENFILKHTGPGILSMANAGPNTNGSQFFICTAKTEWLDGKHVVFGKVKEGMNIVEAMERFGSRNGKTSKKITIADCGQLE

SEQ ID NO: 8006 - protein, 165 aa, Homo sapiens
MAGTALKRLMAEYKQLTLNPPEGIVAGPMNEENFFEWEALIMGPEDTCFEFGVFPAILSFPLDYPLSPPKMRFTCEMFHPNIYPDGRVCISILHAPGDDPMGYESSAERWSPVQSVEKILLSVVSMLAEPNDESGANVDASKMWRDDREQFYKIAKQIVQKSLGL

SEQ ID NO: 8007 - protein, 111 aa, Homo sapiens
MAGTALKRLMAEYKQLTLNPPEGIVAGPMNEENFFEWEALIMGPEDTCFEFGVFPAILSFPLDYPLSPPKMRFTCEMFHPNMSPYGTNSWRRQHRSGKLPDFVDVDLRWTA

SEQ ID NO: 8008 - protein, 165 aa, Homo sapiens; identical to SEQ ID NO: 8006

SEQ ID NO: 8009 - protein, 59 aa, Homo sapiens
MNEENFFEWEALIMGPEDTCFEFGVFPAILSFPLDYPLSPPKMRFTCEMFHPNSKCFWK

SEQ ID NO: 8010 - protein, 137 aa, Homo sapiens
MNEENFFEWEALIMGPEDTCFEFGVFPAILSFPLDYPLSPPKMRFTCEMFHPNIYPDGRVCISILHAPGDDPMGYESSAERWSPVQSVEKILLSVVSMLAEPNDESGANVDASKMWRDDREQFYKIAKQIVQKSLGL

SEQ ID NO: 8011 - protein, 558 aa, Homo sapiens
MCHTSCSSGCQPACCAPSPCQASCYIPVGCQSSVCVPVSFKPAVCVPVRCQSSVCVPAALWLTTGNIAGAGLLFFGGGIGGTILYAKWASHFRERVEKTIPYSDKLFEVVLGSAPYNVPLPKKSTQSGPLKISSVSEVTKEFKQPASQLQKQKGDTPASATAGDTVLVPGVQHEESLKTDHPAIDEGKPTPALSEEASSSSIRERPCEEIAACLAQEEKQEQVKTESLAKSFEDALRQTANVTLQAIAAQNTVVQAVNAHSNILKAAMDNSEIEGKKKSAKWHTVQGALKEHRKAVDEAANALLKAKEEVQAAQFEAKLVSQYHELVGQAQDDFKRQLDSITPEVLPGWKGMSVSDPADKLSTDDLNSLIARAHRHIDQLNRELAEQKATEKQHITLALEKQTLEEKRVQEQELKYEFEQNLSEKLSEQELQFHHLSQEQVHNFTLDINTAYARLRGIEHAVQSHAVAEEEARKAYQLWLSVEALKYSMKTSSAEMPAVPLGSAVEAIKANCSDNEFTKALATAIPPESLTHGVYSEETLRVRFYAVQKLARRVAMID

SEQ ID NO: 8012 - protein, 69 aa, Homo sapiens [sequence omitted]

SEQ ID NO: 8013 - protein, 274 aa, Homo sapiens
IRSVAARSGPFAPVLSATSRGVAGALRPLVQATVPATPEQPVLDLKRPFLSRESLSGQAVRRPLVASVGLNVPASVCYSHTDVKVPDFSEYRRLEVLDSTKSSRESTEARKGFSYLVTGVTTVGVAYAAKNAVTQFVSSMSASADVLALAKIEIKLSDIPEGKNMAFKWRGKPLFVRHRTQKEIKQEAAVELSQLRDPQHDLDRVKKPEWVILIGVCTHLGCVPIANAGDFGGYYCPCHGSHYDASGRIRLGPATLNLEVPTYEFTSDDMVIVG

SEQ ID NO: 8014 - protein, 290 aa, Homo sapiens
MTGWSCLVTGAGGFLGQRIICLLVEETELKEIRALDRPNHSNDLTSAHTELQNKIKLTVLEGDILDEPFLKRACQDVSVVIHTACIIDVFGVTHRQSIMNVNVKACSFWAGTQLLLEACVQATVPVFIYTSTLQLAGPNSYKEIIENAHEEDFLENTWSAPYPYSKKFAEKAVLAANGWTLKNGDTLYTCALRPMYIYGEGSPFLTANINEALNNNGILSSVSKFSTANPVYVGNVAWAHILALRALRDPKKAPSVLGQFYYISDDTPHQSYDNLNYILSKEFGPCLDSR

SEQ ID NO: 8015 - protein, 201 aa, Homo sapiens
MNVNVKGRGYFLTLKACSFWAGTQLLLEACVQATVPVFIYTSTLQLAGPNSYKEIIENAHEEDFLENTWSAPYPYSKKFAEKAVLAANGWTLKNGDTLYTCALRPMYIYGEGSPFLTANINEALNNNGILSSVSKFSTANPVYVGNVAWAHILALRALRDPKKAPSVLGQFYYISDDTPHQSYDNLNYILSKEFGPCLDSR

SEQ ID NO: 8016 - protein, 395 aa, Homo sapiens
MWLPRVSSTAVTALLLAQTFLLLFLVSRPGPSSPAGGEARVHVLVLSSWRSGSSFVGQLFNQHPDVFYLMEPAWHVWTTLSQGSAATLHMAVRDLVRSVFLCDMDVFDAYLPWRRNLSDLFQWAVSRALCSPPACSAFPRGAISSEAVCKPLCARQSFTLAREACRSYSHVVLKEVRFFNLQVLYPLLSDPALNLRIVHLVRDPRAVLRSREQTAKALARDNGIVLGTNGTWVEADPGLRVVREVCRSHVRIAEAATLKPPPFLRGRYRLVRFEDLAREPLAEIRALYAFTGLSLTPQLEAWIHNITHGSGPGARREAFKTSSRNALNVSQAWRHALPFAKIRRVQELCAGALQLLGYRPVYSEDEQRNLALDLVLPRGLNGFTWASSTASHPRN

SEQ ID NO: 8017 - protein, 395 aa, Homo sapiens; identical to SEQ ID NO: 8016

SEQ ID NO: 8018 - protein, 148 aa, Homo sapiens [sequence omitted]

SEQ ID NO: 8019 - protein, 712 aa, Homo sapiens
MRVLLHLPALLASLILLQAAASTTRAQTTRTSAISDTVSQAKVQVNKAFLDSRTRLKTAMSSETPTSRQLSEYLKHAKGRTRTAIRNGQVWEESLKRLRQKASLTNVTDPSLDLTSLSLEVGCGAPAPVVRCDPCSPYRTITGDCNNRRKPALGAANRALARWLPAEYEDGLSLPFGWTPGKTRNGFPLPLAREVSNKIVGYLNEEGVLDQNRSLLFMQWGQIVDHDLDFAPDTELGSSEYSKAQCDEYCIQGDNCFPIMFPPNDPKAGTQGKCMPFFRAGFVCPTPPYKSLAREQINALTSFLDASFVYSSEPSLASRLRNLSSPLGLMAVNQEVSDHGLPYLPYDSKKPSPCEFINTTARVPCFLAGDSRASEHILLATSHTLFLREHNRLARELKRLNPQWDGEKLYQEARKILGAFVQIITFRDYLPILLGDHMQKWIPPYQGYSESVDPRISNVFTFAFRFGHLEVPSSMFRLDENYQPWGPEPELPLHTLFFNTWRMVKDGGIDPLVRGLLAKKSKLMKQNKMMTGELRNKLFQPTHRIHGFDLAAINTQRCRDHGQPGYNSWRAFCDLSQPQTLEELNTVLKSKMLAKKLLGLYGTPDNIDIWIGAIAEPLVERGRVGPLLACLLGKQFQQIRDGDRFWWENPGVFTNEQKDSLQKMSFSRLVCDNTRITKVPRDPFWANSYPYDFVDCSAIDKLDLSPWASVKN

SEQ ID NO: 8020 - protein, 670 aa, Homo sapiens
MRVLLHLPALLASLILLQAAASTTRAQTTRTSAISDTVSQAKVQVNKAFLDSRTRLKTAMSSETPTSRQLSEYLKHAKGRTRTAIRNGQVWEESLKRLRQKASLTNVTDPSLDLTSLSLEVGCGAPAPVVRCDPCSPYRTITGDCNNRRKPALGAANRALARWLPAEYEDGLSLPFGWTPGKTRNGFPLPLAREVSNKIVGYLNEEGVLDQNRSLLFMQWGQIVDHDLDFAPDTELGSSEYSKAQCDEYCIQGDNCFPIMFPPNDPKAGTQGKCMPFFRAGFVCPTPPYKSLAREQINALTSFLDASFVYSSEPSLASRLRNLSSPLGLMAVNQEVSDHGLPYLPYDSKKPSPCEFINTTARVPCFLAGDSRASEHILLATSHTLFLREHNRLARELKRLNPQWDGEKLYQEARKILGAFVQIITFRDYLPILLGDHMQKWIPPYQGYSESVDPRISNVFTFAFRFGHLEVPSSMFRLDENYQPWGPEPELPLHTLFFNTWRMVKDGGIDPLVRGLLAKKSKLMKQNKMMTGELRNKLFQPTHRIHGFDLAAINTQRCRDHGQPGYNSWRAFCDLSQPQTLEELNTVLKSKMLAKKLLGLYGTPDNIDIWIGAIAEPLVERGRVGPLLACLLGKQFQQIRDGDVLVGKPWGLHERAEGLSTENVLLTPCL

SEQ ID NO: 8021 - protein, 239 aa, Homo sapiens
MTTKEVERGKSKCVKYWPDEYALKEYGIVHVRNVKESTTHDYKLRKLKLSKIGQGNMERMVWQYHLWTWLYHGVPCDPKGMLHFLDEVHHKQESIMDAGLVVVPCSAGIGQTGTFIVIDILIDIIREKGVDCEIDVPKTIQMVRSQRSEMVQTEAQYRFIYTVVQHHIETLQRRIEEEQKSKRKGHEYTNIKYSLVDQTSGDQSPLLPYTPMPPCAEMREESARVYENVGLMQQQKHLR

SEQ ID NO: 8022 - protein, 308 aa, Homo sapiens [sequence omitted]

SEQ ID NO: 8023 - protein, 100 aa, Homo sapiens [sequence omitted]

SEQ ID NO: 8024 - protein, 445 aa, Homo sapiens
MLKKQSAGLVLWGAILFVAWNALLLLFFWTRPAPGRPPSVSALDGDPASLTREVIRLAQDAEVELERQRGLLQQIGDALSSQRGRVPTAAPPAQPRVPVTPAPAVIPILVIACDRSTVRRCLDKLLHYRPSAELFPIIVSQDCGHEETAQAIASYGSAVTHIRQPDLSSIAVPPDHRKFQGYYKIARHYRWALGQVFRQFRFPAAVVVEDDLEVAPDFFEYFRATYPLLKADPSLWCVSAWNDNGKEQMVDASRPELLYRTDFFPGLGWLLLAELWAELEPKWPKAFWDDWMRRPEQRQGRACIRPEISRTMTFGRKGVSHGQFFDQHLKFIKLNQQFVHFTQLDLSYLQREAYDRDFLARVYGAPQLQVEKVRTNDRKELGEVRVQYTGRDSFKAFAKALGVMDDLKSGVPRAGYRGIVTFQFRGRRVHLAPPLTWEGYDPSWN

SEQ ID NO: 8025 - protein, 91 aa, Homo sapiens
MSCCACAEGVELASSRRLLFRKSYPDEYTGSYTSPLLCPEPGREQVCDTRRQVTDRGIQGKQIISICLADVPAGITLMDEALQSYGQYLHI

SEQ ID NO: 8026 - protein, 445 aa, Homo sapiens; identical to SEQ ID NO: 8024

SEQ ID NO: 8027 - protein, 445 aa, Homo sapiens; identical to SEQ ID NO: 8024

SEQ ID NO: 8028 - protein, 445 aa, Homo sapiens; identical to SEQ ID NO: 8024

SEQ ID NO: 8029 - protein, 445 aa, Homo sapiens; identical to SEQ ID NO: 8024

SEQ ID NO: 8030 - protein, 445 aa, Homo sapiens; identical to SEQ ID NO: 8024

SEQ ID NO: 8031 - protein, 83 aa, Homo sapiens [sequence omitted]

SEQ ID NO: 8032 - protein, 170 aa, Homo sapiens
MGFTNMAEIQHKTIRPLLEGRDLLAAVKTGSGKTLAVLIPAIELVVKLKFMPRNGTGVLILSPTRQLAMQTFGVLKELMTHHVHTYGLIIGGSNRSAEAQKLANGINIIVVTPGRLLDHTQNTPGFMYKNLQGLAIDEADCILDIGFEDKLKQIIKLLPTHRQTMLFSAT

SEQ ID NO: 8033 - protein, 356 aa, Homo sapiens
MAEIQHKTIRPLLEGRDLLAAVKTGSGKTLAVLIPAIELVVKLKFMPRNGTGVLILSPTRQLAMQTFGVLKELMTHHVHTYGLIIGGSNRSAEAQKLANGINIIVVTPGRLLDHTQNTPGFMYKNLQVEDLARISPKKEPLYVGVDEDKANATVDGLEQGHFVCPSEKRYLLLFTFLKKNQKKKLMVFFSACMSVKYPYGLLKYIDLLSWPFMESKSKISIQPHSSSTATQIQEHYCSQLEKLIEKNYFLHKSAQETYKSYIRAYDSYSLKQIFNINNLNLPHIALSFGFKLPPFVDLNMNSNEGKQKKQGGFGYQKTKKVEKSIIFKHISKKSSAAGSSLTQEMPVFILNNFVLT

SEQ ID NO: 8034 - protein, 104 aa, Homo sapiens [sequence omitted]

SEQ ID NO: 8035 - protein, 239 aa, Homo sapiens [sequence omitted]

SEQ ID NO: 8036 - protein, 230 aa, Homo sapiens [sequence omitted]

SEQ ID NO: 8037 - protein, 187 aa, Homo sapiens
MVSYQESRLWCECELIMQDAAAAAGIPILSAVVNPAVFFDIAVDKKVPKTAENFHALNFHAFMERTDLVIRVPAFTEIFQGFMCQGGDFTYHNDTGGKSIYREKFDDENFILKHTGPGILSMANAGPNMNGSQFFICTAKTEWLDGKHVVFGKVKEGMKIMEAMERFGSRSGKTSKKITIADCGQLQ

SEQ ID NO: 8038 - protein, 475 aa, Homo sapiens
MEGLLTRCRALPALATCSRQLSGYVPCRFHHCAPRRGRRLLLSRVFQPQNLREDRVLSLQDKSDDLTCKSQRLMLQVGLIYPASPGCYHLLPYTVRAMEKLVRVIDQEMQAIGGQKVNMPSLSPAELWQATNRWDLMGKELLRLRDRHGKEYCLGPTHEEAITALIASQKKLSYKQLPFLLYQVTRKFRDEPRPRFGLLRGREFYMKDMYTFDSSPEAAQQTYSLVCDAYCSLFNKLGLPFVKVQADVGTIGGTVSHEFQLPVDIGEDRLAICPRCSFSANMETLDLSQMNCPACQGPLTKTKGIEVGHTFYLGTKYSSIFNAQFTNVCGKPTLAEMGCYGLGVTRILAAAIEVLSTEDCVRWPSLLAPYQACLIPPKKGSKEQAASELIGQLYDHITEAVPQLHGEVLLDDRTHLTIGNRLKDANKFGYPFVIIAGKRALEDPAHFEVWCQNTGEVAFLTKDGVMDLLTPVQTV

SEQ ID NO: 8039 - protein, 145 aa, Homo sapiens [sequence omitted]

SEQ ID NO: 8040 - protein, 136 aa, Homo sapiens
MTKYHRDDYIKFLRSISSDTCSSTASRCRFNVSKDCPVFNGLFEFLQLSTGGSLASAVKLNKQQIDIAVNWAGGLNHAKKPEASGFYYINDIVLAILELLTYHQRVLYIDIDIHHGDGMEEAFYTTDWVMTMSSPK

SEQ ID NO: 8041 - protein, 136 aa, Homo sapiens; identical to SEQ ID NO: 8040

SEQ ID NO: 8042 - protein, 417 aa, Homo sapiens
MSLSKKLTLDKLDVRGKRVIMRVDFNVPMKKNQITNNQRIKASIPSIKYCLDNGAKAVVLMSHLGRPDGVPMPDKYSLAPVAVELKSLLGKDVLFLKDCVGAEVEKACANPAPGSVILLENLRFHVEEEGKGQDPSGKKIKAEPDKIEAFRASLSKLGDVYVNDAFGTAHRAHSSMVGVNLPHKASGFLMKKELDYFAKALENPVRPFLAILGGAKVADKIQLIKNMLDKVNEMIIGGGMAYTFLKVLNNMEIGASLFDEEGAKIVKDIMAKAQKNGVRITFPVDFVTGDKFDENAQVGKATVASGISPGWMGLDCGPESNKNHAQVVAQARLIVWNGPLGVFEWDAFAKGTKALMDEIVKATSKGCITVIGGGDTATCCAKWNTEDKVSHVSTGGGASLELLEGKILPGVEALSNM

SEQ ID NO: 8043 - protein, 607 aa, Homo sapiens [sequence omitted]

SEQ ID NO: 8044 - protein, 152 aa, Homo sapiens
MGGVATVVCRPSAFIMPDNAAIGDVLVLTKPLGTQVAVNAHQWLEDTERWNQVKMVVFGEEVDLAYQEAMLNMATINRTAAGLMHKFNAHVATDITGFGILGHSQNLVKQQRNDVSFVICNLPVIAKMAAISKARGQFGLLQGTSAETSGDY

SEQ ID NO: 8045 - protein, 170 aa, Homo sapiens [sequence omitted]

SEQ ID NO: 8046 - protein, 344 aa, Homo sapiens
MVNPTVFSDIAVNGEPLGRISFELFANKFPKTAENFHALSTGEKGVGYKGSCFHRNIPGFMYQGGDFTRRNGTGGKSIYGEKFEDENFILKHTGPGILSMANAGPNTNGSQFSTRTAKTEWLNASTWSPARSAVTRKRPHSKKTPGAGAPCSSDLTQFTPGILTQHLPPEVWSEVPREEAESLAEQIRFSPSLPGKRRCAKPPMVNALTCSYPRQITNQLDGIGFVISKACSHQIHYAIMARSREQQNGFWSCRTRPLMQNPWLPWLSFTTNTTITSHEEPIYLLSNRRPWAPGAAPGGSQGGRISGPEERRGCSRAEHSPWRTPGCCRPALGGAAPSASGISR

SEQ ID NO: 8047 - protein, 329 aa, Homo sapiens
MKLLRRAWRRRAALGLGTLALCGAALLYLARCAAEPGDPRAMSGRSPPPPAPARAAAFLAVLVASAPRAAERRSVIRSTWLARRGAPGDVWARFAVGTAGLGAEERRALEREQARHGDLLLLPALRDAYENLTAKVLAMLAWLDEHVAFEFVLKADDDSFARLDALLAELRAREPARRRRLYWGFFSGRGRVKPGGRWREAAWQLCDYYLPYALGGGYVLSADLVHYLRLSRDYLRAWHSEDVSLGAWLAPVDVQREHDPRFDTEYRSRGCSNQYLVTHKQSLEDMLEKHATLAREGRLCKREVQLRLSYVYDWSAPPSQCCQRREGIP

SEQ ID NO: 8048 - protein, 378 aa, Homo sapiens
MRMLVSGRRVKKWQLIIQLFATCFLASLMFFWEPIDNHIVSHMKSYSYRYLINSYDFVNDTLSLKHTSAGPRYQYLINHKEKCQAQDVLLLLFVKTAPENYDRRSGIRRTWGNENYVRSQLNANIKTLFALGTPNPLEGEELQRKLAWEDQRYNDIIQQDFVDSFYNLTLKLLMQFSWANTYCPHAKFLMTADDDIFIHMPNLIEYLQSLEQIGVQDFWIGRVHRGAPPIRDKSSKYYVSYEMYQWPAYPDYTAGAAYVISGDVAAKVYEASQTLNSSLYIDDVFMGLCANKIGIVPQDHVFFSGEGKTPYHPCIYEKMMTSHGHLEDLQDLWKNATDPKVKTISKGFFGQIYCRLMKIILLCKISYVDTYPCRAAFI

SEQ ID NO: 8049 - protein, 378 aa, Homo sapiens; identical to SEQ ID NO: 8048

SEQ ID NO: 8050 - protein, 378 aa, Homo sapiens; identical to SEQ ID NO: 8048

SEQ ID NO: 8051 - protein, 378 aa, Homo sapiens; identical to SEQ ID NO: 8048

SEQ ID NO: 8052 - protein, 512 aa, Homo sapiens
MASASSQPSLAVGFSSFDPGAPSCTASSASGILSPTASEVPYASGMPIKKTGHRGVDSSGETTYKKTTSTALKGAIQLGITYTVGSLSTKPERDVLMQDFYVVESIFFPSEGSNLTPAHHYNAFRFKTYAPVAFRYFRELFGIPPDDYLCSLCSEPLIELCSSGASGSLFYVSSDDELIIKTLQHKEAEFLQKLLPGYYLNLSQNPRTLLPKFFGLYCVQTGGKNIRIVVMNNLLPRSVKMHIKYDLKGSTYKRRASQKEREKPLPTFKDLDFLQDIPDGLFLDADTYNALCKTLQRDCLVLQSFKIMDYSLWLSIHNIDHAQREPLSSDTLQVSIDTQRLAPQKALYSTAMEFIQGEARLGDTMEADDHMGGIPAQNSKGERLLLYIGIIDILQSYTFLKKLEHSWKAVVHDGDAVSVHRPGFYAERFQHFMCNAVFKKIPLKPSPSKKFRSGLSFSLHTGSSGNSCITYQPLVSEEHKSQVIKVQVEPGVHLGRSDVLPQTSESTFGGNQ

SEQ ID NO: 8053 - protein, 101 aa, Homo sapiens
MKKNYFLHKSAQEAYKSYIRVNDSHSLRQIFNVNNLNLPQVALSFGFKVPPSVDVNVNSNEGKHKKRGGESRFSYQKTKKVKSIIFKNISKKSSDSRQFCH

SEQ ID NO: 8054 - protein, 254 aa, Homo sapiens
MGSALVVTPGHLLGCMQNSAGFKYKNLWRLVMDEANDILDAGHSFPEAKLRVELHFFQFCNADSGILCTDEAGRELDIPGWIVQYYPPDDPKEYVHRGGTIARDLNERGHALLSFCPEELGFVCYLKQPKVPLSEFDFSWPKISDIQSWFVKLMKKNYFLHKSAQEAYKSYIRVNDSHSLRQIFNVNNLNLPQVALSFGFKVPPSVDVNVNSNEGKHKKRGGESRFSYQKTKKVKSIIFKNISKKSSDSRQFCH

SEQ ID NO: 8055 - protein, 74 aa, Homo sapiens
MWRSSARASVVMTVFALRGEGMCDHFQRLTCIPQIVWMSYNLNLQTQYSQTLGSDSLQASCTSPRKRACFPLDM

SEQ ID NO: 8056 - protein, 486 aa, Homo sapiens
MKGRRRRRREYCKFALLLVLYTLVLLLVPSVLDGGRDGDKGAEHCPGLQRSLGVWSLEAAAAGEREQGAEARAAEEGGANQSPRFPSNLSGAVGEAVSREKQHIYVHATWRTGSSFLGELFNQHPDVFYLYEPMWHLWQALYPGDAESLQGALRDMLRSLFRCDFSVLRLYAPPGDPAARAPDTANLTTAALFRWRTNKVICSPPLCPGAPRARAEVGLVEDTACERSCPPVAIRALEAECRKYPVVVIKDVRLLDLGVLVPLLRDPGLNLKVVQLFRDPRAVHNSRLKSRQGLLRESIQVLRTRQRGDRFHRVLLAHGVGARPGGQSRALPAAPRADFFLTGALEVICEAWLRDLLFARGAPAWLRRRYLRLRYEDLVRQPRAQLRRLLRFSGLRALAALDAFALNMTRGAAYGADRPFHLSARDAREAVHAWRERLSREQVRQVEAACAPAMRLLAYPRSGEEGDAEQPREGETPLEMDADGAT

SEQ ID NO: 8057 - protein, 62 aa, Homo sapiens
MAEQSDKGIKYYTLGEIKKHNHSKSTWVILHHKVYDVTRFFDEHFCGEEVFREQAVGDAPEN

SEQ ID NO: 8058 - protein, 97 aa, Homo sapiens [sequence omitted]

SEQ ID NO: 8059 - protein, 198 aa, Homo sapiens [sequence omitted]

SEQ ID NO: 8060 - protein, 54 aa, Homo sapiens
MKPNHPFYSNISKDGRYADLTEDQLPSCEHLKDTTTRALLFWNEEIAPQIKEGK

SEQ ID NO: 8061 - protein, 161 aa, Homo sapiens [sequence omitted]

SEQ ID NO: 8062 - protein, 556 aa, Homo sapiens
MAVAAAAAAGPVFWRRLLGLLPGRPGLAALLGRLSDRLGRNRDRQRRRSPWLLLAPLLSPAVPQVTSPPCCLCPEGVHRFQWIRNLVPEFGVSSSHVRVLSSPAEFFELMKGQIRVAKRRVVMASLYLGTGPLEQELVDCLESTLEKSLQAKFPSNLKVSILLDFTRGSRGRKNSRTMLLPLLRRFPEQVRVSLFHTPHLRGLLRLLIPERFNETIGLQHIKVYLFDNSVILSGANLSDSYFTNRQDRYVFLQDCAEIADFFTELVDAVGDVSLQLQGDDTVQVVDGMVHPYKGDRAEYCKAANKRVMDVINSARTRQQMLHAQTFHSNSLLTQEDAAAAGDRRPAPDTWIYPLIQMKPFEIQIDEIVTETLLTEAERGAKVYLTTGYFNLTQAYMDLVLGTRAEYQILLASPEVNGFFGAKGVAGAIPAAYVHIERQFFSEVCSLGQQERVQLQEYWRRGWTFHAKGLWLYLAGSSLPCLTLIGSPNFGYRSVHRDLEAQIAIVTENQALQQQLHQEQEQLYLRSGVVSSATFEQPSRQVKLWVKMVTPLIKNFF

SEQ ID NO: 8063 - protein, 530 aa, Homo sapiens
MAVAAAAAAGPVFWRRLLGLLPGRPGLAALLGRLSDRLGRNRDRQRRRSPWLLLAPLLSPAVPQVTSPPCCLCPEGVHRFQWIRNLVPEFGVSSSHVRVLSSPAEFFELMKVDCLESTLEKSLQAKFPSNLKVSILLDFTRGSRGRKNSRTMLLPLLRRFPEQVRVSLFHTPHLRGLLRLLIPERFNETIGLQHIKVYLFDNSVILSGANLSDSYFTNRQDRYVFLQDCAEIADFFTELVDAVGDVSLQLQGDDTVQVVDGMVHPYKGDRAEYCKAANKRVMDVINSARTRQQMLHAQTFHSNSLLTQEDAAAAGDRRPAPDTWIYPLIQMKPFEIQIDEIVTETLLTEAERGAKVYLTTGYFNLTQAYMDLVLGTRAEYQILLASPEVNGFFGAKGVAGAIPAAYVHIERQFFSEVCSLGQQERVQLQEYWRRGWTFHAKGLWLYLAGSSLPCLTLIGSPNFGYRSVHRDLEAQIAIVTENQALQQQLHQEQEQLYLRSGVVSSATFEQPSRQVKLWVKMVTPLIKNFF

SEQ ID NO: 8064 - protein, 556 aa, Homo sapiens; identical to SEQ ID NO: 8062

SEQ ID NO: 8065 - protein, 239 aa, Homo sapiens
MEGTVESQTPDLRDVEGKVGRKTPEGLLRGLRGECELGTSGALLLPGASSTGHDLGDKIMALKMELAYLRAIDVKILQQLVTLNEGIEAVRWLLEERGTLTSHCSSLTSSQYSLTGGSPGRSRRGSWDSLPDTSTTDRLDSVSIGSFLDTVAPSELDEQGPPGAPRSEMDWAKVIAGGERARTEVDVAATRLGSLRAVWKPPGERLQGGPPESPEDESAKLGFEAHWFWEQCQDDVTFL

SEQ ID NO: 8066 - protein, 115 aa, Homo sapiens
MALQAARSMRAVLCSLRALWAPAVPCLPRPWQLGAGAIWTLLTGPVLLWVCKFTEKHEWITTENGIGTVGINNFANEALGDVVYCSLSEVGTKLNKQDEFCALESVKAASEIYSL

SEQ ID NO: 8067 - protein, 347 aa, Homo sapiens
MARFWVCVAGAGFFLAFLVLHSRFCGSPVLRNFTFAVSWRTEKILYRLDVGWPKHPEYFTGTTFCVAVDSLNGLVYIGQRGDNIPKILVFTEDGYFLRAWNYTVDTPHGIFAASTLYEQSVWITDVGSGFFGHTVKKYSSFGDLVQVLGTPGKKGTSLNPLQFDNPAELYVEDTGDIYIVDGDGGLNNRLIKLSQDFMILWLHGENGTGPAKFNIPHSVTLDSAGRVWVADRGNKRIQVFDKDTGEWLGAWNNCFTEEGPSSVRFTPDGKYLIVAQLNLSRLSVVAAPPVGSIGECSVISTIQLADQVLPHLLEVDRKTGAVYVAEIGAKQVQKYVPLNSYVPSFGS

SEQ ID NO: 8068 - protein, 320 aa, Homo sapiens
PVLRNFTFAVSWRTEKILYRLDVGWPKHPEYFTGTTFCVAVDSLNGLVYIGQRGDNIPKILVFTEDGYFLRAWNYTVDTPHGIFAASTLYEQSVWITDVGSGFFGHTVKKYSSFGDLVQVLGTPGKKGTSLNPLQFDNPAELYVEDTGDIYIVDGDGGLNNRLIKLSQDFMILWLHGENGTGPAKFNIPHSVTLDSAGRVWVADRGNKRIQVFDKDTGEWLGAWNNCFTEEGPSSVRFTPDGKYLIVAQLNLSRLSVVAAPPVGSIGECSVISTIQLADQVLPHLLEVDRKTGAVYVAEIGAKQVQKYVPLNSYVPSFGS

SEQ ID NO: 8069 - protein, 216 aa, Homo sapiens [sequence omitted]

SEQ ID NO: 8070 - protein, 398 aa, Homo sapiens
MDTVTEADVAIAMALMGDTGFIHHNCTPELQAKELRKVKKFEQGFITDPTVLSPSHTVGDVLEAKMRHGFSGIPITETGTMGSKLVGIVTSRDINFLAEKDHTTLLSEVMTPRLELVVAPACVTLKEANEILQRSKKGKLPIINDRNELVAIITGSDLKKNQDYPLASKDSHKQLLCGAAVGTREDDKYRLDLLTQVGVDIIVLDSSQGNLVYQIAMVHYIKQKYPHLQVIGRNVVTAAQAKNLIDAGVDGLCVGMGCGSICVTREVMACGQPQGTAVYKEAKYARRFGVPIIANGSIQTMGHIVKALALGVSTVMMGSLLAITMEAPGEYFSDEVRLKKYWGMGSLDAMEKSSSSQKRYFSKGDKVKIVQGVLGSIQDKGSIQKFVPYLIVGIQHGC

SEQ ID NO: 8071 - protein, 256 aa, Homo sapiens
MPPGPAHPGGCQCCSLGLIPRELGVSDHHGALHQTEVPPPPGDWGERGDSSPGQEPDGRSCGRAACGHGLRLHLHYPESDGLRLAPGHCCVQGGQVCPVLWCAHHSRWWHPDCGARGQGPGPWSLHSDDGLLLATTTEAPGEYFFLERVQLKKYQGMGSLDAMEKSSSSQKRYFSKGDKVKIAQGVSGSIQDKGSIQKFVPYLIAGIQHSCQDIGARSLSVLWSMMYSGELKFEKQTMSAQIKGGIHGLHSYEKQL

SEQ ID NO: 8072 - protein, 158 aa, Homo sapiens [sequence omitted]

SEQ ID NO: 8073 - protein, 93 aa, Homo sapiens
MDLPYYHGRLTKQDCETLLLKEGVDGNFLLRDSESIPGVLCLCVSFKNIVYTYRIFREKHGYYRIQVRTKRTTTTTTQKLGEKNLGTCLLPEP

SEQ ID NO: 8074 - protein, 40 aa, Homo sapiens
MVVHLLKPIKRTSPSLRWRGLKLELETFVNSNSDYVDVLP

SEQ ID NO: 8075 - protein, 132 aa, Homo sapiens
MDLPYYHGRLTKQDCETLLLKEGVDGNFLLRDSESIPGVLCLCVSFKNIVYTYRIFREKHGYYRIQTAEGSPKQVFPSLKELISKFEKPNQGMVVHLLKPIKRTSPSLRWRGLKLELETFVNSNSDYVDVLP

SEQ ID NO: 8076 - protein, 44 aa, Homo sapiens
RAGTADYLKPRAEEERRIAAEEKKKQDELKRIARELAEDDSILK

SEQ ID NO: 8077 - protein, 113 aa, Homo sapiens [sequence omitted]

SEQ ID NO: 8078 - protein, 355 aa, Homo sapiens
MDFLHRNGVLIIQHLQKDYRAYYTFLNFMSNVGDPRNIFFIYFPLCFQFNQTVGTKMIWVAVIGDWLNLIFKWILFGHRPYWWVQETQIYPNHSSPCLEQFPTTCETGPGSPSGHAMGASCVWYVMVTAALSHTVCGMDKFSITLHRLTWSFLWSVFWLIQISVCISRVFIATHFPHQVILGVIGGMLVAEAFEHTPGIQTASLGTYLKTNLFLFLFAVGFYLLLRVLNIDLLWSVPIAKKWCANPDWIHIDTTPFAGLVRNLGVLFGLGFAINSEMFLLSCRGGNNYTLSFRLLCALTSLTILQLYHFLQIPTHEEHLFYVLSFCKSASIPLTVVAFIPYSVHMLMKQSGKKSQ

SEQ ID NO: 8079 - protein, 737 aa, Homo sapiens [sequence omitted]

SEQ ID NO: 8080 - protein, 105 aa, Homo sapiens [sequence omitted]

SEQ ID NO: 8081 - protein, 206 aa, Homo sapiens
MPYQYPLLTPEQKELSDMTHRIVALGKGIPAADESTGSTAKWLQSIGTENTEENRCFYRQLWLTADNRVNPCIKGVILFHETLYQKADDGRPFPQVIKSKGNVVSIKVDKGVVPLERANGETTTQGLDGLSERCAPYKKDGAHFAKWHHVLKIGKHTPSALTIIENANISWARVSMSWPTMPASASRMALCSSWSLRILPSGDHDL

SEQ ID NO: 8082 - protein, 218 aa, Homo sapiens
MVKVKARVNRFGHIGHQITRAAFNSGKVDIVAISDPFTGLNYMVYVFQCGSTHGKFHGTVKAENGKLVINGNLITIFQERDPTKIKWDNVDAEYIWVSTASLAKLIHDNFGIVEGLMTTTHTITATQKTVDGPSRKLWCDGHGALQIIIPASTGAAKAVGKVIPEMNGKITSMAFRVPTTNVSVMHLTCHLENPAKYDDIKKVVKQASEAPQGHPGLH

SEQ ID NO: 8083 - protein, 165 aa, Homo sapiens [sequence omitted]

SEQ ID NO: 8084 - protein, 87 aa, Homo sapiens
MEGLMTTAPLGNWRDKHHPCIYWHGQGCGQIPALNRKLTGTAFRVPATNVLVVDPTCHLEKPAKYDDLKKVVKQALGGPPQGHPGLH

SEQ ID NO: 8085 - protein, 303 aa, Homo sapiens [sequence omitted]

SEQ ID NO: 8086 - protein, 298 aa, Homo sapiens
MPWQPAPFPHRLPGTRRTCQPSELRGAVQAEPLPEPLLHVLGLSFPLQTCRPILRCPPGLMKPLVVFVHGGPGALASLRKMATHTFLQESYFMMKGRAQIHSMTSENIVMETTTCTTRKMQKKRSETLETVRGGEEEENGACSGCEQPRGWGWIIPKASSPSTSLLRRGGLGRRVTWPGKRFYPAAPRNPAAALPPRPMAAALALVAGVLSGAVLPLWSALPQYKKKITDRCFHHSECYSGCCLMDLDSGGAFCAPRARITMICLPQTKGATNIICPCRMGLTCISKDLMCSRRCHMI

SEQ ID NO: 8087 - protein, 371 aa, Homo sapiens [sequence omitted]

SEQ ID NO: 8088 - protein, 201 aa, Homo sapiens
MTLRPSLLPLHLLLLLLLSAAVCRAEAGLETESPVRTLQVETLVEPPEPCAEPAAFGDTLHIHYTGSLVDGRIIDTSLTRDPLVIELGQKQVIPGLEQSLLDMCVGEKRRAIIPSHLAYGKRGFPPSVPADAVVQYDVELIALIRANYWLKLVKGILPLVGMAMVPALLGLIGYHLYRKANRPKVSKKKLKEEKRNKSKKK

SEQ ID NO: 8089 - protein, 481 aa, Homo sapiens
MKVLSEGQLKLCVVQPVHLTSWLLIFFILKSISCLKPARLPIYQRKPFIAAWNAPTDQCLIKYNLRLNLKMFPVIGSPLAKARGQNVTIFYVNRLGYYPWYTSQGVPINGGLPQNISLQVHLEKADQDINYYIPAEDFSGLAVIDWEYWRPQWARNWNSKDVYRQKSRKLISDMGKNVSATDIEYLAKVTFEESAKAFMKETIKLGIKSRPKGLWGYYLYPDCHNYNVYAPNYSGSCPEDEVLRNNELSWLWNSSAALYPSIGVWKSLGDSENILRFSKFRVHESMRISTMTSHDYALPVFVYTRLGYRDEPLFFLSKQDLVSTIGESAALGAAGIVIWGDMNLTASKANCTKVKQFVSSDLGSYIANVTRAAEVCSLHLCRNNGRCIRKMWNAPSYLHLNPASYHIEASEDGEFTVKGKASDTDLAVMADTFSCHCYQGYEGADCREIKTADGCSGVSPSPGSLMTLCLLLLASYRSIQL

SEQ ID NO: 8090 - protein, 289 aa, Homo sapiens [sequence omitted]

SEQ ID NO: 8091 - protein, 527 aa, Homo sapiens
MSLQMVTVSNNIALIQPGFSLMNFDGQVFFFGQKGWPKRSCPTGVFHLDVKHNHVKLKPTIFSKDSCYLPPLRYPATCTFKGSLESEKHQYIIHGGKTPNNEVSDKIYVMSIVCKNNKKVTFRCTEKDLVGDVPEARYGHSINVVYSRGKSMGVLFGGRSYMPSTHRTTEKWNSVADCLPCVFLVDFEFGCATSYILPELQDGLSFHVSIAKNDTIYILGGHSLANNIRPANLYRIRVDLPLGSPAVNCTVLPGGISVSSAILTQTNNDEFVIVGGYQLENQKRMICNIISLEDNKIEIREMETPDWTPDIKHSKIWFGSNMGNGTVFLGIPGDNKQVVSEGFYFYMLKCAEDDTNEEQTTFTNSQTSTEDPGDSTPFEDSEEFCFSAEANSFDGDDEFDTYNEDDEEDESETGYWITCCPTCDVDINTWVPFYSTELNKPAMIYCSHGDGHWVHAQCMDLAERTLIHLSAGSNKYYCNEHVEIARALHTPQRVLPLKKPPMKSLRKKGSGKILTPAKKSFLRRLFD

SEQ ID NO: 8092 - protein, 397 aa, Homo sapiens
MSVGRRRIKLLGILMMANVFIYFIMEVSKSSSQEKNGKGEVIIPKEKFWKISTPPEAYWNREQEKLNRQYNPILSMLTNQTGEAGRLSNISHLNYCEPDLRVTSVVTGFNNLPDRFKDFLLYLRCRNYSLLIDQPDKCAKKPFLLLAIKSLTPHFARRQAIRESWGQESNAGNQTVVRVFLLGQTPPEDNHPDLSDMLKFESEKHQDILMWNYRDTFFNLSLKEVLFLRWVSTSCPDTEFVFKGDDDVFVNTHHILNYLNSLSKTKAKDLFIGDVIHNAGPHRDKKLKYYIPEVVYSGLYPPYAGGGGFLYSGHLALRLYHITDQVHLYPIDDVYTGMCLQKLGLVPEKHKGFRTFDIEEKNKNNICSYVDLMLVHSRKPQEMIDIWSQLQSAHLKC

SEQ ID NO: 8093 - protein, 397 aa, Homo sapiens; identical to SEQ ID NO: 8092

SEQ ID NO: 8094 - protein, 411 aa, Homo sapiens
MWPRSPALAPAPPSWSCSRTRIKLLGILMMANVFIYFIMEVSKSSSQEKNGKGEVIIPKEKFWKISTPPEAYWNREQEKLNRQYNPILSMLTNQTGEAGRLSNISHLNYCEPDLRVTSVVTGFNNLPDRFKDFLLYLRCRNYSLLIDQPDKCAKKPFLLLAIKSLTPHFARRQAIRESWGQESNAGNQTVVRVFLLGQTPPEDNHPDLSDMLKFESEKHQDILMWNYRDTFFNLSLKEVLFLRWVSTSCPDTEFVFKGDDDVFVNTHHILNYLNSLSKTKAKDLFIGDVIHNAGPHRDKKLKYYIPEVVYSGLYPPYAGGGGFLYSGHLALRLYHITDQVHLYPIDDVYTGMCLQKLGLVPEKHKGFRTFDIEEKNKNNICSYVDLMLVHSRKPQEMIDIWSQLQSAHLKC

SEQ ID NO: 8095 - protein, 397 aa, Homo sapiens; identical to SEQ ID NO: 8092

SEQ ID NO: 8096 - protein, 349 aa, Homo sapiens [sequence omitted]

SEQ ID NO: 8097 - protein, 354 aa, Homo sapiens
MGPVSLLPKYQKLNTWNGDLAKMTHLQAGLSPETIEKARLELNENPDVLHQDIQQVRDMIITRPDIGFLRTDDAFILRFLRARKFHQADAFRLLAQYFQYRQLNLDMFKNFKADDPGIKRALIDGFPGVLENRDHYGRKILLLFAANWDQSRNSFTDILRAILLSLEVLIEDPELQINGFILIIDWSNFSFKQASKLTPSILKLAIEGLQDSFPARFGGVHFVNQPWYIHALYTLIKPFLKDKTRKRIFLHGNNLNSLHQLIHPEFLPSEFGGTLPPYDMGTWARTLLGPDYSDENDYTHTSYNAMHVKHTSSNLERECSPKLMKRSQSVVEAGTLKHEEKGENENTQPLLALD

SEQ ID NO: 8098 - protein, 208 aa, Homo sapiens
MSMELLQEAGVSVSKGYVAKSPDEAYAIAKKVGSKEVEMKAQVSADGRGKGTFESGLKGGVKIVFSPEEAKAVSSEMIGKKLFTKQMGEKGGICNQALKRKYPRGEDYFAIGMERSFQGPILIGSSHGGVNIADVAAETPDAIKEPVDIVEGIKKEQALRLEQKMGFPPNIVDSAAENMVKLYSLFLKYDATMIRNKSNGEDSDGAVL

SEQ ID NO: 8099 - protein, 95 aa, Homo sapiens
MAPGSRAALHPLSSPSPSIPLGRNLKRETSAVVNTGTKLADLENYIHRISRDGWFGRKGVAINMVTEEDKGTFQNIENFYNTSIEEIPLNVPDLI

SEQ ID NO: 8100 - protein, 73 aa, Homo sapiens
ARGIDVQQVSLVNHDLPTNRENYIHRISRDGWFGRKGVAINMVTEEDKGTFQNIENFYNTSIEEIPLNVPDLI

SEQ ID NO: 8101 - protein, 152 aa, Homo sapiens
MVNSTVFFDIAINSQQISKNNENFHALSTVEKGFGYKGSCFHRIISEFMCQGGDFPCHNGTDGKFIYGEKFDDENFILKHTGPGILSIANARPNSNGSQFFICTAKTEWLDGKHVVFGKVKEGMNIVEAMDRSGSRNGKTNKKIIIADCGQL

SEQ ID NO: 8102 - protein, 505 aa, Homo sapiens
MGRVVAELVSSLLGLWLLLCSCGCPEGAELRAPPDKIAIIGAGIGGTSAAYYLRQKFGKDVKIDLFEREEVGGRLATMMVQGQEYEAGGSVIHPLNLHMKRFVKDLGLSAVQASGGLLGIYNGETLVFEESNWFIINVIKLVWRYGFQSLRMHMWVEDVLDKFMRIYRYQSHDYAFSSVEKLLHALGGDDFLGMLNRTLLETLQKAGFSEKFLNEMIAPVMRVNYGQSTDINAFVGAVSLSCSDSGLWAVEGGNKLVCSGLLQASKSNLISGSVMYIEEKTKTKYTGNPTKMYEVVYQIGTETRSDFYDIVLVATPLNRKMSNITFLNFDPPIEEFHQYYQHIVTTLVKGELNTSIFSSRPIDKFGLNTVLTTDNSDLFINSIGIVPSVREKEDPEPSTDGTYVWKIFSQETLTKAQILKLFLSYDYAVKKPWLAYPHYKPPEKCPSIILHDRLYYLNGIECAASAMEMSAIAAHNAALLAYHRWNGHTDMIDQDGLYEKLKTEL

SEQ ID NO: 8103 - protein, 119 aa, Homo sapiens
MIARRNPEPLRFLPDEARSLPPPKLTDPRLLYIGFLGYCSGLIDNLIRRRPIATAGLHRQLLYITAFFFAGYYLVKREDYLYAVRDREMFGYMKLHPEDFPEEDKKTYGEIFEKFHPIR

SEQ ID NO: 8104 - protein, 119 aa, Homo sapiens; identical to SEQ ID NO: 8103

SEQ ID NO: 8105 - protein, 200 aa, Homo sapiens [sequence omitted]

SEQ ID NO: 8106 - protein, 200 aa, Homo sapiens [sequence omitted]

SEQ ID NO: 8107 - protein, 381 aa, Homo sapiens [sequence omitted]

SEQ ID NO: 8108 - protein, 136 aa, Homo sapiens
MVIPDLYMNAKGETASNFEWLKNLNHVSYGCLTFKYERECNYHLLISVQENLARKFGKHSGTILIIPTAEFQDRISGASEKDTMHADLVYAMESSARQILCIAMRYNLGLDMRTTVYVNAIEKVFKVYNEARVTFT

SEQ ID NO: 8109 - protein, 540 aa, Homo sapiens
MALARPVRLFSLVTRLLLAPRRGLTVRSPDEPLPVVRIPVALQRQLEQRQSRRRNLPRPVLVRPGPLLVSARRPELNQPARLTLGRWERAPLASQGWKSRRARRDHFSIERAQQEAPAVRKLSSKGSFADLGLEPRVLHALQEAAPEVVQPTTVQSSTIPSLLRGRHVVCAAETGSGKTLSYLLPLLQRLLGQPSLDSLPIPAPRGLVLVPSRELAQQVRAVAQPLGRSLGLLVRDLEGGHGMRRIRLQLSRQPSADVLVATPGALWKALKSRLISLEQLSFLVLDEADTLLDESFLELVDYILEKSHIAEGPADLEDPFNPKAQLVLVGATFPEGVGQLLNKVASPDAVTTITSSKLHCIMPHVKQTFLRLKGADKVAELVHILKHRDRAERTGPSGTVLVFCNSSSTVNWLGYILDDHKIQHLRLQGQMPALMRVGIFQSFQKSSRDILLCTDIASRGLDSTGVELVVNYDFPPTLQDYIHRAGRVGRVGSEVPGTVISFVTHPWDVSLVQKIELAARRRRSLPGLASSVKEPLPQAT

SEQ ID NO: 8110 - protein, 230 aa, Homo sapiens
MVNHTMFFDVAVDSEPLDHVSFELFAEKFPKTAENVRALSTEEKGFGYKGPCFHRIIPAFMCQGGDFTHHNGTGGKSIYGEKFEDEKFILKRTGPGILSMANSGPNTNCSVFHLHCQDGVVGWQACSLWQGTLGLFSQGQLFLPTASPQHIFLLLYSKTFFNTNVPNPWAIDFTAHLHGRRAARERGKTNWITQKLSLRFPVPGNGLVAPYPSTLSSEEIFCMFSGHLKL

SEQ ID NO: 8111 - protein, 158 aa, Homo sapiens
MVNHTMFFDVAVDSEPLDHVSFELFAEKFPKTAENVRALSTEEKGFGYKGPCFHRIIPAFMCQGGDFTHHNGTGGKSIYGEKFEDEKFILKRTGPGILSMANSGPNTNCSVFHLHCQDGVVGWQACSLWQGERRHEYFGGHRAIWVQEWQDQQEDHHC

SEQ ID NO: 8112 - protein, 160 aa, Homo sapiens
MVNPTVFFDTEPLGRISFELFADKFPKTAGNFHALSTGEKGFGYKGSCFHRIVPGFMCQGGDFTCHDGTGGKSIYREKFDDKNFIRKHTVSGILSMANAGPNANSSQFFICAAKTEWLDGKHVVFSKVKEGMNIVETMECFGSRNGKTSKKITIADCGQL

SEQ ID NO: 8113 - protein, 156 aa, Homo sapiens [sequence omitted]

SEQ ID NO: 8114 - protein, 180 aa, Homo sapiens
MGFADAAATGSPLLSAMVNPTVFLDIAVHGEPLGGIPFELFADKIPKTPENFHALSTGEKGFGYKGSCFHRIIPGVMCQRGDFTSHNGTGGKSIQGEKFDDKNFILKHAGPGILSMANTGPNTNSFQCFICTAKAEWLDGKHVVFGKVKEGINIVEAMERFGSRNGKTSKKITISDCGKL

SEQ ID NO: 8115 - protein, 441 aa, Homo sapiens
MSQCCAGPASITRVHCPDGAKRIGAPEGDAEPRPGLPAVVTGRRCHLQHSVKNMLAAFISRVLRRVAQKSARRVLVASRNSSNDATFEIKKCDLYLLEEGPPVTTVLTRAEGLKYYRMMLTVRRMELKADQLYKQKFIRGFCHLCDGQEACCVGLEAGINPSDHVITSYRAHGVCYTRGLSVRSILAELTGRRGGCAKGKGGSMHMYTKNFYGGNGIVGAQGPLGAGIALACKYKGNDEICLTLYGDGAANQGQIAEAFNMAALWKLPCVFICENNLYGMGTSTERAAASPDYYKRGNFIPGLKVDGMDVLCVREATKFAANYCRSGKGPILMELQTYRYHGHSMSDPGVSYRTREEIQEVRSKRDPIIILQDRMVNSKLATVEELKEIGAEVRKEIDDAAQFATTDPEPHLEELGHHIYSSDSSFEVRGANPWIKFKSVS

SEQ ID NO: 8116 - protein, 441 aa, Homo sapiens; identical to SEQ ID NO: 8115

SEQ ID NO: 8117 - protein, 168 aa, Homo sapiens
MRNQSAQKWSCFSVEVRVCLGWRREEVGAEKFREQHSVVKSRLGVILKRRPEKTQRHEHRITMPFLAIQKRFGLNIDQWWTIQSAEQPYKIAARCHAFEKEWIECAYGISVIRAEKECKIESDDFVECLLRQKTMRRAGTIRKQQDKLIKEGKYTPPPHHIGKEEPQP

SEQ ID NO: 8118 - protein, 162 aa, Homo sapiens
MRCWKKECPVKQERLSETSPASRILSVEPRLQANFTIREDANPSSRQRRLKRFRANPEANWSPQPHAWPGSKAAGEAMEERRRLLPKEWKEPPEDRAQRAALLKTFPCKRGVKEGTCQCGDQCCYSHSPLTPGVSADAALHCPETSNHRPPGPGAATGPGID

SEQ ID NO: 8119 - protein, 201 aa, Homo sapiens [sequence omitted]

SEQ ID NO: 8120 - protein, 98 aa, Homo sapiens [sequence omitted]

SEQ ID NO: 8121 - protein, 88 aa, Homo sapiens
MESVVPVKDKKLLEVKLGELPSWILMWDFSPSGLDGAFQRGYYWYYNKYINVKKGSISGFTMVLAGYMLFIYCLSYKELKHERLCKYH

SEQ ID NO: 8122 - protein, 135 aa, Homo sapiens
METDDHMGGIPAQNSEGERILLCIGITDILQSYRFVKKLEHSWKALVCDGDTVSVHRPGFYTERFQCFMCNTAFKKIPARCRVHLGCPDVLPQTPPLEEISEGLPIPDPSFSPVVGETLQMLTTSTTLEKLDIAE

SEQ ID NO: 8123 - protein, 300 aa, Homo sapiens [sequence omitted]

SEQ ID NO: 8124 - protein, 308 aa, Homo sapiens
MTDGECVVNPTRKEMSSSTLNVVVAGAPKSQTVMLEASAENILQQDFCHAIKVGVKYTQQIIQGIQQLVKEIGVTKRTPQKLFTPSQEIVKHAHKLTMERLYAVFTDYEHDKISRDEAVNKIRLDTEEQLKEIFPEVDLYEIIESFNTVAKKVFRSIILNEYKRCDGRDLTLLRNISCEVDMFKTLHGSELFQRGQTQLLCAVTFDSLESSIKLDRVITTINGIKDKNFMLHYEFPPYATNEIVKVTGINRRELGPDALAEKALYPVIPKDFPFAIRVTSEVLESNGSSSMASACGGSLALMDSGLPI

SEQ ID NO: 8125 - protein, 69 aa, Homo sapiens
MGPPDPILGVTEAFKRDINSKKMNLGVGMIMGSRTCCLACSRQRPRLLQKMWTRNPCQLGDWLNFARHL

SEQ ID NO: 8126 - protein, 158 aa, Homo sapiens
MSFDSNRRTIEKQEGTLYLRGELNALQEELKNFGVIVLAFPCNQFGKQEPGTNSEILLGLKYVCPGSGFVPSFQLFEKGDVNGEKEQKVFTFLKVHEYKPGMDGQLFWEPMKVHDIRWNFEKFLVGPDGVPVMHWFHQAPVSTVKSDILEYLKQFNTH

SEQ ID NO: 8127 - protein, 327 aa, Homo sapiens [sequence omitted]

SEQ ID NO: 8128 - protein, 217 aa, Homo sapiens [sequence omitted]

SEQ ID NO: 8129 - protein, 1249 aa, Homo sapiens
MSSMWSEYTIGGVKIYFPYKAYPSQLAMMNSILRGLNSKQHCLLESPTGSGKSLALLCSALAWQQSLSGKPADEGVSEKAEVQLSCCCACHSKDFTNNDMNQGTSRHFNYPSTPPSERNGTSSTCQDSPEKTTLAAKLSAKKQASIYRDENDDFQVEKKRIRPLETTQQIRKRHCFGTEVHNLDAKVDSGKTVKLNSPLEKINSFSPQKPPGHCSRCCCSTKQGNSQESSNTIKKDHTGKSKIPKIYFGTRTHKQIAQITRELRRTAYSGVPMTILSSRDHTCVHPEVVGNFNRNEKCMELLDGKNGKSCYFYHGVHKISDQHTLQTFQGMCKAWDIEELVSLGKKLKACPYYTARELIQDADIIFCPYNYLLDAQIRESMDLNLKEQVVILDEAHNIEDCARESASYSVTEVQLRFARDELDSMVNNNIRKKDHEPLRAVCCSLINWLEANAEYLVERDYESACKIWSGNEMLLTLHKMGITTATFPILQGHFSAVLQKEEKISPIYGKEEAREVPVISASTQIMLKGLFMVLDYLFRQNSRFADDYKIAIQQTYSWTNQIDISDKNGLLVLPKNKKRSRQKTAVHVLNFWCLNPAVAFSDINGKVQTIVLTSGTLSPMKSFSSELGVTFTIQLEANHIIKNSQVWVGTIGSGPKGRNLCATFQNTETFEFQDEVGALLLSVCQTVSQGILCFLPSYKLLEKLKERWLSTGLWHNLELVKTVIVEPQGGEKTNFDELLQVYYDAIKYKGEKDGALLVAVCRGKVSEGLDFSDDNARAVITIGIPFPNVKDLQVELKRQYNDHHSKLRGLLPGRQWYEIQAYRALNQALGRCIRHRNDWGALILVDDRFRNNPSRYISGLSKWVRQQIQHHSTFESALESLAEFSKKHQKVLNVSIKDRTNIQDNESTLEVTSLKYSTSPYLLEAASHLSPENFVEDEAKICVQELQCPKIITKNSPLPSSIISRKEKNDPVFLEEAGKAEKIVISRSTSPTFNKQTKRVSWSSFNSLGQYFTGKIPKATPELGSSENSASSPPRFKTEKMESKTVLPFTDKCESSNLTVNTSFGSCPQSETIISSLKIDATLTRKNHSEHPLCSEEALDPDIELSLVSEEDKQSTSNRDFETEAEDESIYFTPELYDPEDTDEEKNDLAETDRGNRLANNSDCILAKDLFEIRTIKEVDSAREVKAEDCIDTKLNGILHIEESKIDDIDGNVKTTWINELELGKTHEIEIKNFKPSPSKNKGMFPGFK

SEQ ID NO: 8130 - protein, 1249 aa, Homo sapiens; identical to SEQ ID NO: 8129

SEQ ID NO: 8131 - protein, 1249 aa, Homo sapiens; identical to SEQ ID NO: 8129

SEQ ID NO: 8132 - protein, 1249 aa, Homo sapiens; identical to SEQ ID NO: 8129

SEQ ID NO: 8133 - protein, 113 aa, Homo sapiens [sequence omitted]

SEQ ID NO: 8134 - protein, 957 aa, Homo sapiens [sequence omitted]

SEQ ID NO: 8135 - protein, 864 aa, Homo sapiens
METKMALNYQGKSQKRSAVEKSINAFLIVYLFILLTKAAVCTTLKYVWQSTPYNDEPWYNQKTQKERETLKVLKMFTDFLSFMVLFNFIIPVSMYVTVEMQKFLGSFFISWDKDFYDEEINEGALVNTSDLNEELGQVDYVFTDKTGTLTENSMEFIECCIDGHKYKGVTQEVDGLSQTDGTLTYFDKVDKNREELFLRALCLCHTVEIKTNDAVDGATESAELTYISSSPDEIALVKGAKRYGFTFLGNRNGYMRVENQRKEIEEYELLHTLNFDAVRRRMSVIVKTQEGDILLFCKGADSAVFPRVQNHEIELTKVHVERNAMDGYRTLCVAFKEIAPDDYERINRQLIEAKMALQDREEKMEKVFDDIETNMNLIGATAVEDKLQDQAAETIEALHAAGLKVWVLTGDKMETAKSTCYACRLFQTNTELLELTTKTIEESERKEDRLHELLIEYRKKLLHEFPKSTRSFKKAWTEHQEYGLIIDGSTLSLILNSSQDSSSNNYKSIFLQICMKCTAVLCCRMAPLQKAQIVRMVKNLKGSPITLSIGDGANDVSMILESHVGIGIKGKEGRQAARNSDYSVPKFKHLKKLLLAHGHLYYVRIAHLVQYFFYKNLCFILPQFLYQFFCGFSQQPLYDAAYLTMYNICFTSLPILAYSLLEQHINIDTLTSDPRLYMKISGNAMLQLGPFLYWTFLAAFEGTVFFFGTYFLFQTASLEENGKVYGNWTFGTIVFTVLVFTVTLKLALDTRFWTWINHFVIWGSLAFYVFFSFFWGGIIWPFLKQQRMYFVFAQMLSSVSTWLAIILLIFISLFPEILLIVLKNVRRRSARRNLSCRRASDSLSARPSVRPLLLRTFSDESNVL

SEQ ID NO: 8136 - protein, 950 aa, Homo sapiens
MFHQWVYFILLTPTILALGLALIIFHLECAGEEKRVGTRTVFVGNHPVSETEAYIAQRFCDNRIVSSKYTLWNFLPKNLFEQFRRIANFYFLIIFLVQVTVDTPTSPVTSGLPLFFVITVTAIKQGYEDWLRHRADNEVNKSTVYIIENAKRVRKESEKIKVGDVVEVQADETFPCDLILLSSCTTDGTCYVTTASLDGESNCKTHYAVRDTIALCTAESIDTLRAAIECEQPQPDLYKSINAFLIVYLFILLTKAAVCTTLKYVWQSTPYNDEPWYNQKTQKERETLKVLKMFTDFLSFMVLFNFIIPVSMYVTVEMQKFLGSFFISWDKDFYDEEINEGALVNTSDLNEELGQVDYVFTDKTGTLTENSMEFIECCIDGHKYKGVTQEVDGLSQTDGTLTYFDKVDKNREELFLRALCLCHTVEIKTNDAVDGATESAELTYISSSPDEIALVKGAKRYELLHTLNFDAVRRRMSVIVKTQEGDILLFCKGADSAVFPRVQNHEIELTKVHVERNAMDGYRTLCVAFKEIAPDDYERINRQLIEAKMALQDREEKMEKVFDDIETNMNLIGATAVEDKLQDQAAETIEALHAAGLKVWVLTGDKMETAKSTCYACRLFQTNTELLELTTKTIEESERKEDRLHELLIEYRKKLLHEFPKSTRSFKKAWTEHQEYGLIIDGSTLSLILNSSQDSSSNNYKSIFLQICMKCTAVLCCRMAPLQKAQIVRMVKNLKGSPITLSIGDGANDVSMILESHVGIGIKGKEGRQAARNSDYSVPKFKHLKKLLLAHGHLYYVRIAHLVQYFFYKPLYDAAYLTMYNICFTSLPILAYSLLEQHINIDTLTSDPRLYMKISGNAMLQLGPFLYWTFLAAFEGTVFFFGTYFLFQTASLEENGKLICPHQLGLLLPSSSWLPLPEDLGLGPPRYYHYFIPCPFPSTEISAALHLLAT

SEQ ID NO: 8137 - protein, 470 aa, Homo sapiens
MPSPSANENQVRENYSSLILTCKLLSLLCTLDTRLYSVDLVDMNRLLSLHSNYLLGLEANLKNKGERNPVLTTSSLKLSCYQLKIVNYKMDFWVEPSGKVAVVQGAEVKVDGSKPKLSKNELKRSLKAKKKVAEKEAKQEELTAVTNHTTDSGVGTEEKSLDPNQHYKIHSQAVYQLNVNGEHPYPHKFHADISFNDFIQEYSHQQPGGHLNDVTLKVAGRIHAKRASEGKFIFYDLQGEGVKLQVMVNPRNYKSEEFIHISKKLHQGDIIGVQGNPGKTKKAVAKLFITYDNALDMRIAPELYHKMLVVGGTKQIYETGCQFQNEGIDLRHNPEFTTCEFYMAYADYHNLLEITEKMVSGMVKHITGSYKKNLRKPWGVKLPETNLFETDETCKLLNDICVAKAVECPLPWTTARLLDKLAWALTKSPFFSKDSNNIKEVLLFPAIKPKDKENVATTDMLESTTAGTSV

SEQ ID NO: 8138 - protein, 748 aa, Homo sapiens
MADSSGQQGKGRRVQPQWSPPAGTQPCRLHLYNSLTRNKEVFIPQDGKKVTWYCCGPTVYDASHMGHARSYISFDILRRVLKDYFKFDVFYCMNITDIDDKIIKRARQNHLFEQYREKRPEAAQLLEDVQAALKPFSVKLNETTDPDKKQMLERIQHAVQLATEPLEKAVQSRLTGEEVNSCVEVLLEEAKDLLSDWLDSTLGCDVTDNSIFSKLPKFWEGDFHRDMEALNVLPPDVLTRVSEYVPEIVNFVQKIVDNGYGYVSNGSVYFDTAKFASSEKHSYGKLVPEAVGDQKALQEGEGDLSISADRLSEKRSPNDFALWKASKPGEPSWPCPWGKGRPGWHIECSAMAGTLLGASMDIHGGGFDLRFPHHDNELAQSEAYFENDCWVRYFLHTGHLTIAGCKMSKSLKNFITIKDALKKHSARQLRLAFLMHSWKDTLDYSSNTMESALQYEKFLNEFFLNVKDILRAPVDITGQFEKWGEEEAELNKNFYDKKTAIHKALCDNVDTRTVMEEMRALVSQCNLYMAARKAVRKRPNQALLENIALYLTHMLKIFGAVEEDSSLGFPVGGPGTSLSLEATVMPYLQVLSEFREGVRKIAREQKVPEILQLSDALRDNILPELGVRFEDHEGLPTVVKLVDRNTLLKEREEKRRVEEEKRKKKEEAARRKQEQEAAKLAKMKIPPSEMFLSETDKYSKFDENGLPTHDMEGKELSKGQAKKLKKLFEAQEKLYKEYLQMAQNGSFQ

SEQ ID NO: 8139 - protein, 748 aa, Homo sapiens; identical to SEQ ID NO: 8138

SEQ ID NO: 8140 - protein, 831 aa, Homo sapiens
MADSSGQQAPDYRSILSISDEAARAQALNEHLSTRSYVQGYSLSQADVDAFRQLSAPPADPQLFHVARWFRHIEALLGSPCGKGQPCRLQASKGRRVQPQWSPPAGTQPCRLHLYNSLTRNKEVFIPQDGKKVTWYCCGPTVYDASHMGHARSYISFDILRRVLKDYFKFDVFYCMNITDIDDKIIKRARQNHLFEQYREKRPEAAQLLEDVQAALKPFSVKLNETTDPDKKQMLERIQHAVQLATEPLEKAVQSRLTGEEVNSCVEVLLEEAKDLLSDWLDSTLGCDVTDNSIFSKLPKFWEGDFHRDMEALNVLPPDVLTRVSEYVPEIVNFVQKIVDNGYGYVSNGSVYFDTAKFASSEKHSYGKLVPEAVGDQKALQEGEGDLSISADRLSEKRSPNDFALWKASKPGEPSWPCPWGKGRPGWHIECSAMAGTLLGASMDIHGGGFDLRFPHHDNELAQSEAYFENDCWVRYFLHTGHLTIAGCKMSKSLKNFITIKDALKKHSARQLRLAFLMHSWKDTLDYSSNTMESALQYEKFLNEFFLNVKDILRAPVDITGQFEKWGEEEAELNKNFYDKKTAIHKALCDNVDTRTVMEEMRALVSQCNLYMAARKAVRKRPNQALLENIALYLTHMLKIFGAVEEDSSLGFPVGGPGTSLSLEATVMPYLQVLSEFREGVRKIAREQKVPEILQLSDALRDNILPELGVRFEDHEGLPTVVKLVDRNTLLKEREEKRRVEEEKRKKKEEAARRKQEQEAAKLAKMKIPPSEMFLSETDKYSKFDENGLPTHDMEGKELSKGQAKKLKKLFEAQEKLYKEYLQMAQNGSFQ

SEQ ID NO: 8141 - protein, 622 aa, Homo sapiens
MGHARSYISFDILRRVLKDYFKFDVFYCMNITDIDDKIIKRARQNHLFEQYREKRPEAAQLLEDVQAALKPFSVKLNETTDPDKKQMLERIQHAVQLATEPLEKAVQSRLTGEEVNSCVEVLLEEAKDLLSDWLDSTLGCDVTDNSIFSKLPKFWEGDFHRDMEALNVLPPDVLTRVSEYVPEIVNFVQKIVDNGYGYVSNGSVYFDTAKFASSEKHSYGKLVPEAVGDQKALQEGEGDLSISADRLSEKRSPNDFALWKASKPGEPSWPCPWGKGRPGWHIECSAMAGTLLGASMDIHGGGFDLRFPHHDNELAQSEAYFENDCWVRYFLHTGHLTIAGCKMSKSLKNFITIKDALKKHSARQLRLAFLMHSWKDTLDYSSNTMESALQYEKFLNEFFLNVKDILRAPVDITGQFEKWGEEEAELNKNFYDKKTAIHKALCDNVDTRTVMEEMRALVSQCNLYMAARKAVRKRPNQALLENIALYLTHMLKIFGAVEEDSSLGFPVGGPGTSLSLEATVMPYLQVLSEFREGVRKIAREQKVPEILQLSDALRDNILPELGVRFEDHEGLPTVVKLVDRNTLLKEREEKRRVEEEKRKKKEEAARRKQEQEHSESEGLEAS

SEQ ID NO: 8142 - protein, 123 aa, Homo sapiens
MVNPTRFLDIIVDGSYFHRIVPGFMCQGGDFTQHNGTGGKSIYGKKFDDENFVLNYTGPGILSVENVLDPTQMVPSFSSALPCLSGWMACRWSLAREGRREYCGSHGVLWVHKWQDQQEDHHC

SEQ ID NO: 8143 - protein, 80 aa, Homo sapiens [sequence omitted]

SEQ ID NO: 8144 - protein, 180 aa, Homo sapiens
MSAFNLLHLVTKSQPVALRAWSCRDKKNCKVVFSQQELRKRLTPLQYHVTQEKGTESAFEGEYTHHKDPGIYKCVVCGTPLFKSETKFDSGSGWPSFHDVINSEAITFTDDFSYGMHRVETSCSQCGAHLGHIFDDGPRPTGKRYCINSAALSFTPADSSGTAEGGSGVASPAQADKAEL

SEQ ID NO: 8145 - protein, 131 aa, Homo sapiens
MVNPTMFFHIAVNGEPLGHASLELFADMFSKSAKNLHALSTREKECGYKVSCFHKIIPGCMSWHFAMAIAGPNTNHSQFFICTAKTEWLDGKHVVFGKVKESMSIVEAMEHFGSRNGKTNKKITIADYEQL

SEQ ID NO: 8146 - protein, 375 aa, Homo sapiens
MSQPKKRKLESGGGGEGGEGTEEEDGAEREAALERPRRTKRERDQLYYECYSDVSVHEEMIADRVRTDAYRLGILRNWAALRGKTVLDVGAGTGILSIFCAQAGARRVYAVEASAIWQQAREVVRFNGLEDRVHVLPGPVETVELPEQVDAIVSEWMGYGLLHESMLSSVLHARTKWLKEGGLLLPASAELFIAPISDQMLEWRLGFWSQVKQHYGVDMSCLEGFATRCLMGHSEIVVQGLSGEDVLARPQRFAQLELSRAGLEQELEAGVGGRFRCSCYGSAPMHGFAIWFQVTFPGGESEKPLVLSTSPFHPATHWKQALLYLNEPVQVEQDTDVSGEITLLPSRDNPRRLRVLLRYKVGDQEEKTKDFAMED

SEQ ID NO: 8147 - protein, 209 aa, Homo sapiens
MEPLAAYPLKCSGPRAKVFAVLLSIVLCTVTLFLLQLKFLKPKINSFYAFEVKDAKGRTVSLEKYKGKVSLVVNVASDCQLTDRNYLGLKELHKEFGPSHFSVLAFPCNQFGESEPRPSKEVESFARKNYGVTFPIFHKIKILGSEGEPAFRFLVDSSKKEPRWNFWKYLVNPEGQVVKFWRPEEPIEVIRPDIAALVRQVIIKKKEDL

SEQ ID NO: 8148 - protein, 180 aa, Homo sapiens [sequence omitted]

SEQ ID NO: 8149 - protein, 183 aa, Homo sapiens
MEEEGEEEDYCTPGAFELERLFWKGSPQYTHVNEVWPKLYIGDEATALDRYRLQKAGFTHVLNAAHGRWNVDTGPDYYRDMDIQYHGVEADDLPTFDLSVFFYPAAAFIDRALSDDHSKILVHCVMGRSRSATLVLAYLMIHKDMTLVDAIQQVAKNRCVLPNRGFLKQLRELDKQLVQQRRR

SEQ ID NO: 8150 - protein, 1693 aa, Homo sapiens
MDFLKIEPGPPVFLAGERVGSAGILLSWNTPPNPNGRIISYIVKYKEVCPWMQTVYTQVRSKPDSLEVLLTNLNPGTTYEIKVAAENSAGIGVFSDPFLFQTAESAPGKVVNLTVEAYNASAVKLIWYLPRQPNGKITSFKISVKHARSGIVVKDVSIRVEDILTGKLPECNENSESFLWSTASPSPTLGRVTPPSRTTHSSSTLTQNEISSVWKEPISFVVTHLRPYTTYLFEVSAVTTEAGYIDSTIVRTPESVPEGPPQNCVTGNITGKSFSILWDPPTIVTGKFSYRVELYGPSGRILDNSTKDLKFAFTNLTPFTMYDVYIAAETSAGTGPKSNISVFTPPDVPGAVFDLQLAEVESTQVRITWKKPRQPNGIINQYRVKVLVPETGIILENTLLTGNNEYINDPMAPEIVNIVEPMVGLYEGSAEMSSDLHSLATFIYNSHPDKNFPARNRAEDQTSPVVTTRNQYITDIAAEQLSYVIRRLVPFTEHMISVSAFTIMGEGPPTVLSVRTRQQVPSSIKIINYKNISSSSILLYWDPPEYPNGKITHYTIYAMELDTNRAFQITTIDNSFLITGLKKYTKYKMRVAASTHVGESSLSEENDIFVRTSEDEPESSPQDVEVIDVTADEIRLKWSPPEKPNGIIIAYEVLYKNIDTLYMKNTSTTDIILRNLRPHTLYNISVRSYTRFGHGNQVSSLLSVRTSETVPDSAPENITYKNISSGEIELSFLPPSSPNGIIKKYTIYLKRSNGNEERTINTTSLTQNIKVLKKYTQYIIEVSASTLKGEGVRSAPISILTEEDAPDSPPQDFSVKQLSGVTVKLSWQPPLEPNGIILYYTVYVWNRSSLKTINVTETSLELSDLDYNVEYSAYVTASTRFGDGKTRSNIISFQTPEGAPSDPPKDVYYANLSSSSIILFWTPPSKPNGIIQYYSVYYRNTSGTFMQNFTLHEVTNDFDNMTVSTIIDKLTIFSYYTFWLTASTSVGNGNKSSDIIEVYTDQDIPEGFVGNLTYESISSTAINVSWVPPAQPNGLVFYYVSLILQQTPRHVRPPLVTYERSIYFDNLEKYTDYILKITPSTEKGFSDTYTAQLYIKTEEDVPETSPIINTFKNLSSTSVLLSWDPPVKPNGAIISYDLTLQGPNENYSFITSDNYIILEELSPFTLYSFFAAARTRKGLGPSSILFFYTDESVPLAPPQNLTLINCTSDFVWLKWSPSPLPGGIVKVYSFKIHEHETDTIYYKNISGFKTEAKLVGLEPVSTYSIRVSAFTKVGNGNQFSNVVKFTTQESVPDVVQNMQCMATSWQSVLVKWDPPKKANGIITQYMVTVERNSTKVSPQDHMYTFIKLLANTSYVFKVRASTSAGEGDESTCHVSTLPETVPSVPTNIAFSDVQSTSATLTWIRPDTILGYFQNYKITTQLRAQKCKEWESEECVEYQKIQYLYEAHLTEETVYGLKKFRWYRFQVAASTNAGYGNASNWISTKTLPGPPDGPPENVHVVATSPFSISISWSEPAVITGPTCYLIDVKSVDNDEFNISFIKSNEENKTIEIKDLEIFTRYSVVITAFTGNISAAYVEGKSSAEMIVTTLESAPKDPPNNMTFQKIPDEVTKFQLTFLPPSQPNGNIQVYQALVYREDDPTAVQIHNLSIIQKTNTFVIAMLEGLKGGHTYNISLQHDQKPNQPLFMMPQENCL

SEQ ID NO: 8151 - protein, 105 aa, Homo sapiens [sequence omitted]

SEQ ID NO: 8152 - protein, 157 aa, Homo sapiens
MLSQVAHSATTMVAPSLKNTAFIGPGILQATKTFHTGQPHLALLPPLPEYGGKVHLGLIPEEFFQFLYPKTGVTGPYVLRTGLILYGLSKEIYMITPETFSTTSINMMLRKKQEHMINWVEKHVVQSISAQQEKETIAKCIANLKLLAKKAQAQPVM

SEQ ID NO: 8153 - protein, 305 aa, Homo sapiens [sequence omitted]

SEQ ID NO: 8154 - protein, 210 aa, Homo sapiens
MACILKRKSVIAVSFIAAFLFLLVVRLVNEVNFPLLLNCFGQPGTKWIPFSYTYRRPLRTHYGYINVKTQEPLQLDCDLCAIVSNSGQMVGQKVGNEIDRSSCIWRMNNAPTKGYEEDVGRMTMIRVVSHTSVPLLLKNPDYFFKEANTTIYVIWGPFRNMRKDGNGIVYNMLKKTVGIYPNAQIYVTTEKRMSYCDGVFKKETGKDSTE

SEQ ID NO: 8155 - protein, 215 aa, Homo sapiens [sequence omitted]

SEQ ID NO: 8156 - protein, 42 aa, Homo sapiens
MTFIAPASSRSKAYARVWRFCCCPLGSTRRSTARRRSTLRRW

SEQ ID NO: 8157 - protein, 100 aa, Homo sapiens
MSDVEKGNKIFVQKCAQCHTVEKGGKRKTETNLHGLFGQNTGQAVGFSYMDPNKNKGITWGEGILMEYLENPKKCILGTKMIFASIKKKAEKAGLIASNE

SEQ ID NO: 8158 - protein, 715 aa, Homo sapiens [sequence omitted]

SEQ ID NO: 8159 - protein, 109 aa, Homo sapiens [sequence omitted]

SEQ ID NO: 8160 - protein, 167 aa, Homo sapiens [sequence omitted]

SEQ ID NO: 8161 - protein, 156 aa, Homo sapiens [sequence omitted]

SEQ ID NO: 8162 - protein, 184 aa, Homo sapiens
MMGDAPDYDRSQWLNEKFKLGLDFPNLPYLIDGAHKITQSKAILGCIAYKHNLCGETEGEKIWEDILENQLVDNHVQLARLCYNPDFKKLKPEYLEALPAMLKLYSQFLGKQLLFLGDKITLVDFIAYGILERNQVFEPKWLDAFPNLKDFISRFEGLEISAYMKSSCFLLRPVFTKMAVWGNK

SEQ ID NO: 8163 - protein, 337 aa, Homo sapiens
DIMVKVKARVDRFGHVRCLVTRAAFNSAKVDIVAISDLFIDLNYMVYMFQYGSTHGKFHGTVKAENRKLVITGNLITIFQERDPSKIKWGDAGTEYSVESTSIFTIMEKSGAHLQGGAKRVILSAPSANTLMFVMGVTHENYDSSLKIISNASCTMNCLAPLAKVIRDNFGIMEGLMTTVHAVPATQKTVDGPSRRLWCDSHGALQNIIPAPSDAAKAVAKVIPELNGKLTGMAFCVPTANLSVVDLTCCLEKPAKYDDIKKVVKQVSEGPLKGILGYTEYQLVSSDFNSDTHSSTFDAGASIALNDHFFKLISWYDNEFGYSNRVMDLMAHMSSKE

SEQ ID NO: 8164 - protein, 326 aa, Homo sapiens
MASKVSCLYVLTVVCWASALWYLSITRPTSSYTGSKPFSHLTVARKNFTFGNIRTRPINPHSFEFLINEPNKCEKNIPFLVILISTTHKEFDARQAIRETWGDENNFKGIKIATLFLLGKNADPVLNQMVEQESQIFHDIIVEDFIDSYHNLTLKTLMGMRWVATFCSKAKYVMKTDSDIFVNMDNLIYKLLKPSTKPRRRYFTGYVINGGPIRDVRSKWYMPRDLYPDSNYPPFCSGTGYIFSADVAELIYKTSLHTRLLHLEDVYVGLCLRKLGIHPFQNSGFNHWKMAYSLCRYRRVITVHQISPEEMHRIWNDMSSKKHLRC

SEQ ID NO: 8165 - protein, 326 aa, Homo sapiens; identical to SEQ ID NO: 8164

SEQ ID NO: 8166 - protein, 314 aa, Homo sapiens
MGPLINRCKKILLPTTVPPATMRIWLLGGLLPFLLLLSGLQRPTEGSEVAIKIDFDFAPGSFDDQYQGCSKQVMEKLTQGDYFTKDIEAQKNYFRMWQKAHLAWLNQGKVLPQNMTTTHAVAILFYTLNSNVHSDFTRAMASVARTPQQYERSFHFKYLHYYLTSAIQLLRKDSIMENGTLCYEVHYRTKDVHFNAYTGATIRFGQFLSTSLLKEEAQEFGNQTLFTIFTCLGAPVQYFSLKKEVLIPPYELFKVINMSYHPRGDWLQLRSTGNLSTYNCQLLKASSKKCIPDPIAIASLSFLTSVIIFSKSRV

SEQ ID NO: 8167 - protein, 209 aa, Homo sapiens
MPKTLDGQITMEKTPSYFVTNEAPKRIHSMAKDIKLIVVVRNPVTRAISDYTQTLSKKPEIPTFEVLAFKNRTLGLIDASWSAIRIGIYALHLENWLQYFPLSQILFVSGERLIVDPAGEMAKVQDFLGLKRVVTEKHFYFNKTKGFPCLKKPEDSSAPRCLGKSKGRTHPRIDPDVIHRLRKFYKPFNLMFYQMTGQDFQWEQEEGDK

SEQ ID NO: 8168 - protein, 453 aa, Homo sapiens
MKIFKCYFKHTLQQKVFILFLTLWLLSLLKLLNVRRLFPQKDIYLVEYSLSTSPFVRNRYTHVKDEVRYEVNCSGIYEQEPLEIGKSLEIRRRDIIDLEDDDVVAMTSDCDIYQTLRGYAQKLVSKEEKSFPIAYSLVVHKDAIMVERLIHAIYNQHNIYCIHYDRKAPDTFKVAMNNLAKCFSNIFIASKLEAVEYAHISRLQADLNCLSDLLKSSIQWKYVINLCGQDFPLKSNFELVSELKKLNGANMLETVKPPNSKLERFTYHHELRRVPYEYVKLPIRTNISKEAPPHNIQIFVGSAYFVLSQAFVKYIFNNSIVQDFFAWSKDTYSPDEHFWATLIRVPGIPGEISRSAQDVSDLQSKTRLVKWNYYEGFFYPSCTGSHLRSVCIYGAAELRWLIKDGHWFANKFDSKVDPILIKCLAEKLEEQQRDWITLPSEKLFMDRNLTTTS

SEQ ID NO: 8169 - protein, 100 aa, Homo sapiens
MVLCACGESSEVVRPVSECKLFMTTAAKMPKHMERNRKGSHIVTRSHTDQNGRLLITIWHLNPTACNKGKCERNNGVGTGLFGGCFVMYNGLSLTEGNKR

SEQ ID NO: 8170 - protein, 674 aa, Homo sapiens
MQTSSSRSVHLSEWQKNYFAITSGICTGPKADAYRAQILRIQYAWANSEISQVCATKLFKKYAEKYSAIIDSDNVESGLNNYAENILTLAGSQQTDSDKWQSGLSINNVFKMSSVQKMMQAGKKFKDSLLEPALASVVIHKEATVFDLPKFSVCGSSQESDSLPNSAHDRDRTQDFPESNRLKLLQNAQPPMVTNTARTCPTFSAPVGESATAKFHVTPLFGNVKKENHSSAKENIGLNVFLSNQSCFPAACENPQRKSFYGSGTIDALSNPILNKACSKTEDNGPKEDSSLPTFKTAKEQLWVDQQKKYHQPQRASGSSYGGVKKSLGASRSRGILGKFVPPIPKQDGGEQNGGMQCKPYGAGPTEPAHPVDERLKNLEPKMIELIMNEIMDHGPPVNWEDIAGVEFAKATIKEIVVWPMLRPDIFTGLRGPPKGILLFGPPGTGKTLIGKCIASQSGATFFSISASSLTSKWVGEGEKMVRALFAVARCQQPAVIFIDEIDSLLSQRGDGEHESSRRIKTEFLVQLDGATTSSEDRILVVGATNRPQEIDEAARRRLVKRLYIPLPEASARKQIVINLMSKEQCCLSEEEIEQIVQQSDAFSGADMTQLCREASLGPIRSLQTADIATITPDQVRPIAYIDFENAFRTVRPSVSPKDLELYENWNKTFGCGK

SEQ ID NO: 8171 - protein, 179 aa, Homo sapiens
MVLENNSNVIAMITREIEGGIIKCYHYWPISLKKPLELKHFRVFLENYQILQYFIIRMFQVVEKSTGTSHSVKQLQFTKWPDHGTPASADSFIKYIRYARKSHLTGPMVVHCSAGIGRTGVFLCVDVVFCAIVKNCSFNIMDIVAQMREQRSGMVQTKEQYHFCYDIVLEVLRKLLTLD

SEQ ID NO: 8172 - protein, 315 aa, Homo sapiens
MVSASGTSFFKGMLLGSISWVLITMFGQIHIRHRGQTQDHEHHHLRPPNRNDFLNTSKVILLELSKSIRVFCIIFGESEDESYWAVLKETWTKHCDKAELYDTKNDNLFNIESNDRWVQMRTAYKYVFEKYGDNYNWFFLALPTTFAVIENLKYLLFTRDASQPFYLGHTVIFGDLEYVTVEGGIVLSRELMKRLNRLLDNSETCADQSVIWKLSEDKQLAICLKYAGVHAENAEDYEGRDVFNTKPIAQLIEEALSNNPQQVVEGCCSDMAITFNGLTPQKMEVMMYGLYRLRAFGHYFNDTLVFLPPVGSEND

SEQ ID NO: 8173 - protein, 402 aa, Homo sapiens
MRRRLRLRRDALLTLLLGASLGLLLYAQRDGAAPTASAPRGRGRAAPRPTPGPRAFQLPDAGAAPPAYEGDTPAPPTPTGPFDFARYLRAKDQRRFPLLINQPHKCRGDGAPGGRPDLLIAVKSVAEDFERRQAVRQTWGAEGRVQGALVRRVFLLGVPRGAGSGGADEVGEGARTHWRALLRAESLAYADILLWAFDDTFFNLTLKEIHFLAWASAFCPDVRFVFKGDADVFVNVGNLLEFLAPRDPAQDLLAGDVIVHARPIRTRASKYYIPEAVYGLPAYPAYAGGGGFVLSGATLHRLAGACAQVELFPIDDVFLGMCLQRLRLTPEPHPAFRTFGIPQPSAAPHLSTFDPCFYRELVVVHGLSAADIWLMWRLLHGPHGPACAHPQPVAAGPFQWDS

SEQ ID NO: 8174 - protein, 361 aa, Homo sapiens
MDPLGAAKPQWPWRRCLAALLFQLLVAVCFFSYLRVSRDDATGSPRAPSGSSRQDTTPTRPTLLILLWTWPFHIPVALSRCSEMVPGTADCHITADRKVYPQADTVIVHHWDIMSNPKSRLPPSPRPQGQRWIWFNLEPPPNCQHLEALDRYFNLTMSYRSDSDIFTPYGWLEPWSGQPAHPPLNLSAKTELVAWAVSNWKPDSARVRYYQSLQAHLKVDVYGRSHKPLPKGTMMETLSRYKFYLAFENSLHPDYITEKLWRNALEAWAVPVVLGPSRSNYERFLPPDAFIHVDDFQSPKDLARYLQELDKDHARYLSYFRWRETLRPRSFSWALDFCKACWKLQQESRYQTVRSIAAWFT

SEQ ID NO: 8175 - protein, 215 aa, Homo sapiens
MEFDCEGLRRLLGKYKFRDLTVEELRNVNVFFPHFKYSMDTYVFKDSSQKDLLNFTGTIPVMYQGNTYNIPIRFWILDSHPFAPPICFLKPTANMGILVGKHVDAQGRIYLPYLQNWSHPKSVIVGLIKEMIAKFQEELPMYSLSSSDEARQVDLLAYIAKITEGVSDTNSKSWANHENKTVNKITVVGGGELGIACTLAISAKVESRSVTQAGV

SEQ ID NO: 8176 - protein, 471 aa, Homo sapiens
MEFDCEGLRRLLGKYKFRDLTVEELRNVNVFFPHFKYSMDTYVFKDSSQKDLLNFTGTIPVMYQGNTYNIPIRFWILDSHPFAPPICFLKPTANMGILVGKHVDAQGRIYLPYLQNWSHPKSVIVGLIKEMIAKFQEELPMYSLSSSDEARQVDLLAYIAKITEGVSDTNSKSWANHENKTVNKITVVGGGELGIACTLAISAKGIADRLVLLDLSEGTKGATMDLEIFNLPNVEISKDLSASAHSKVVIFTVNSLGSSQSYLDVVQSNVDMFRALVPALGHYSQHSVLLVASQPVEIMTYVTWKLSTFPANRVIGIGCNLDSQRLQYIITNVLKAQTSGKEVWVIGEQGEDKVLTWSGQEEVVSHTSQVQLSNRAMELLRVKGQRSWSVGLSVADMVDSIVNNKKKVHSVSALAKGYYDINSEVFLSLPCILGTNGVSEVIKTTLKEDTVTEKLQSSASSIHSLQQQLKL

SEQ ID NO: 8177 - protein, 341 aa, Homo sapiens
MDTYVFKDSSQKDLLNFTGTIPVMYQGNTYNIPIRFWILDSHPFAPPICFLKPTANMGILVGKHVDAQGRIYLPYLQNWSHPKSVIVGLIKEMIAKFQEELPMYSLSSSDEARQVDLLAYIAKITEGVSDTNSKSWANHENKTVNKITVVGGGELGIACTLAISAKGIADRLVLLDLSEGTKGATMDLEIFNLPNVEISKDLSASAHSKVVIFTVNSLGSSQSYLDVVQSNVDMFRALVPALGHYSQHSVLLVASQPVEIMTYVTWKLSTFPANRVIGIGCNLDSQRLQYIITNVLKAQTSGKEVWVIGEQGEDKVLTWSGQEEVVSHTSQVQLSNRDIMI

SEQ ID NO: 8178 - protein, 41 aa, Homo sapiens [sequence omitted]

SEQ ID NO: 8179 - protein, 260 aa, Homo sapiens [sequence omitted]

SEQ ID NO: 8180 - protein, 155 aa, Homo sapiens [sequence omitted]

SEQ ID NO: 8181 - protein, 626 aa, Homo sapiens
MMANDAKPDVKTVQVLRDTANRLRIHSIRATCASGSGQLTSCCSAAEVVSVLFFHTMKYKQTDPEHPDNDRFILSRGHAAPILYAAWVEVGDISESDLLNLRKLHSDLERHPTPRLPFVDVATGSLGQGLGTACGMAYTGKYLDKASYRVFCLMGDGESSEGSVWEAFAFASHYNLDNLVAVFDVNRLGQSGPAPLEHGADIYQNCCEAFGWNTYLVDGHDVEALCQAFWQASQVKNKPTAIVAKTFKGRGIPNIEDAENWHGKPVPKERADAIVKLIESQIQTNENLIPKSPVEDSPQISITDIKMTSPPAYKVGDKIATQKTYGLALAKLGRANERVIVLSGDTMNSTFSEIFRKEHPERFIECIIAEQNMVSVALGCATRGRTIAFAGAFAAFFTRAFDQLRMGAISQANINLIGSHCGVSTGEDGVSQMALEDLAMFRSIPNCTVFYPSDAISTEHAIYLAANTKGMCFIRTSQPETAVIYTPQENFEIGQAKVVRHGVNDKVTVIGAGVTLHEALEAADHLSQQGISVRVIDPFTIKPLDAATIISSAKATGGRVITVEDHYREGGIGEAVCAAVSREPDILVHQLAVSGVPQRGKTSELLDMFGISTRHIIAAVTLTLMK

SEQ ID NO: 8182 - protein, 69 aa, Homo sapiens
MMEMMLKKKKIRVIFLFEVKMGHKAVETTRKINNTFGSGTANKCTVQWWFKKFCKGEESLENEENSGWL

SEQ ID NO: 8183 - protein, 260 aa, Homo sapiens [sequence omitted]

SEQ ID NO: 8184 - protein, 97 aa, Homo sapiens [sequence omitted]

SEQ ID NO: 8185 - protein, 427 aa, Homo sapiens [sequence omitted]

SEQ ID NO: 8186 - protein, 471 aa, Homo sapiens [sequence omitted]

SEQ ID NO: 8187 - protein, 272 aa, Homo sapiens
MPGDHRRIRGPEESQPPQLYAADEEEAPGTRDPTRLRPVYARAGLLSQAKGSAYLEAGGTKVLCAVSGPRQAEGGERGGGPAGAGGEAPAALRGRLLCDFRRAPFAGRRRRAPPGGCEERELALALQEALEPAVRLGRYPRAQLEVSALLLEDGGSALAAALTAAALALADAGVEMYDLVVGCGLSLAPGPAPTWLLDPTRLEEERAAAGLTVALMPVLNQVAGLLGSGEGGLTESWAEAVRLGLEGCQRLYPVLQQSLVRAARRRGAAAQP

SEQ ID NO: 8188 - protein, 346 aa, Homo sapiens
MLFKQQAWLRQKLLVLGSLAVGSLLYLVARVGSLDRLQPICPIEGRLGGARTQAEFPLRALQFKRGLLHEFRKGNASKEQVRLHDLVQQLPKAIIIGVRKGGTRALLEMLNLHPAVVKASQEIHFFDNDENYGKGIEWYRKKMPFSYPQQITIEKSPAYFITEEVPERIYKMNSSIKLLIIVREPTTRAISDYTQVLEGKERKNKTYYKFEKLAIDPNTCEVNTKYKAVRTSIYTKHLERWLKYFPIEQFHVVDGDRLITEPLPELQLVEKFLNLPPRISQYNLYFNATRGFYCLRFNIIFNKCLAGSKGRIHPEVDPSVITKLRKFFHPFNQKFYQITGRTLNWP

SEQ ID NO: 8189 - protein, 183 aa, Homo sapiens [sequence omitted]

SEQ ID NO: 8190 - protein, 200 aa, Homo sapiens [sequence omitted]

SEQ ID NO: 8191 - protein, 424 aa, Homo sapiens
MTLRPGTMRLACMFSSILLFGAAGLLLFISLQDPTELAPQQVPGIKFNIRPRQPHHDLPPGGSQDGDLKEPTERVTRDLSSGAPRGRNLPAPDQPQPPLQRGTRLRLRQRRRRLLIKKMPAAATIPANSSDAPFIRPGPGTLDGRWVSLHRSQQERKRVMQEACAKYRASSSRRAVTPRHVSRIFVEDRHRVLYCEVPKAGCSNWKRVLMVLAGLASSTADIQHNTVHYGSALKRLDTFDRQGILHRLSTYTKMLFVREPFERLVSAFRDKFEHPNSYYHPVFGKAILARYRANASREALRTGSGVRFPEFVQYLLDVHRPVGMDIHWDHVSRLCSPCLIDYDFVGKFESMEDDANFFLSLIRAPRNLTFPRFKDRHSQEARTTARIAHQYFAQLSALQRQRTYDFYYMDYLMFNYSKPFADLY

SEQ ID NO: 8192 - protein, 424 aa, Homo sapiens; identical to SEQ ID NO: 8191

SEQ ID NO: 8193 - protein, 424 aa, Homo sapiens; identical to SEQ ID NO: 8191

SEQ ID NO: 8194 - protein, 64 aa, Homo sapiens
LPAYLLVSSRCYALGTVGYGAATLPDSKDTIHELHNQNQEPKADSAHRHPTLIPAQTALSPIPH

SEQ ID NO: 8195 - protein, 190 aa, Homo sapiens
MEVDSGTRWGGRSAPTEVRESKMHVVHSNTKYQSMEEAPRHGDGLECRPCCWRTPRTWSPSQEQDCSNTNFCAIVSGLRKVPEPVNLMSTFPLASMRPNTSSYCRFAGSLTPPDCEPTVLWTVFEDPIPIRWVQMTLFYTLPQAGPSHFHPIPLTAAPCSSPTLAVVHCALMGLGLSLWFCQPWATLHVK

SEQ ID NO: 8196 - protein, 77 aa, Homo sapiens
MSTFPLASMRPNTSSYCRFAGSLTPPDCEPTVLWTVFEDPIPIRWVQVEPPSPLAPHTPPRALPGSSRRRCPSPTPF

SEQ ID NO: 8197 - protein, 326 aa, Homo sapiens
MALCPRQAACMPLMGTWLFTSVSKMATVKSELIECFTSEEPFHHRKVSITGTGSVGMACATSILLKGLSDELAFVDLDEGKLKGETMDLQHGSPFMKMSNIVCSKDYLVTANPHLVIITAGARREKGEMRFNLVRQNVAIFKLMISSIVQQSPLCKLIIVSNPVDILTYVAWKLSAFPKNRVIGSGCNLDTVRFQFFIGQKLGIHSESCRGWILGEHGDSSVPVWSGMNIAGVLLKDLNSDIGTDKDPEKWKNVHKEVIASAYEIIEMKSSTSWAIGLSGADLTESILKNLRRKHPVSTIIKGLYGINEEVFLSIPSLERRVLPTL

SEQ ID NO: 8198 - protein, 258 aa, Homo sapiens
MSNVQNVDVESPRHWQLGLRCAAMLEESARSPGKGSTPLGLVPEGLICICSMRFCPFAERTHLVLKAEGIRHEVIYINLKDKPEWFFKKNPFSLVPVLENSQGQLIYESAITCEYLDEAYSGKKLLPDDPYDKACQKMVFELFSKVPSLVGSFLRTQNKEDGAGLKEALCKEFSKLEEVLINKKTTFFGGSSISMIDYVIWPSFERLEAMKLNECVEHTPELKLWMAAMREDPTVSALLTGVKDWQGFTELYLQPGGL

SEQ ID NO: 8199 - protein, 288 aa, Homo sapiens [sequence omitted]

SEQ ID NO: 8200 - protein, 114 aa, Homo sapiens
  VARIANT (1)...(114): Xaa = Any Amino Acid
MQAVAGRDGAAVRFQRPRPGGAPFSACAPCTSATRKGAQVSSRSRITSASRFPQLGGCYLARIPQDGGSTPAPPLPALLRVARPSGDSEIHQIQMAAGSLSGRKQAAPKARQVX

SEQ ID NO: 8201 - protein, 221 aa, Homo sapiens
MPAKPSCRPSLQFVGNALSVSNRLARDNELRENDKEQLKAISTRDPLSEITAQEKDFLWTTDWPPIKPEQAMELLDCNYPDPMVRSFAVQCLEKYLTDNKLSQYLIQLVQVLKYEQYLDNLLVRFLLKKALTNQRIGHFFFWHLKSEMHNKTLSQRFGLLLESYCRACGMYLKHLNRQVEAMEKLINLTDIVKQEKKDETQKLCDSSLCLRLFSLQGGRVV

SEQ ID NO: 8202 - protein, 193 aa, Homo sapiens
MTKNSSKQFLHEILSLKSLRRRKIFYGMYCLVKDWPPIKPEQAMELLDCNYPDPMVRSFAVQCLEKYLTDNKLSQYLIQLVQVLKYEQYLDNLLVRFLLKKALTNQRIGHFFFWHLKSEMHNKTLSQRFGLLLESYCRACGMYLKHLNRQVEAMEKLINLTDIVKQEKKDETQKLCDSSLCLRLFSLQGGRVV

SEQ ID NO: 8203 - protein, 652 aa, Homo sapiens
MASLEEGIYSLKINSKRSSYNSMNPQFTAGSEGQNETEEPNKFQSRKGRPQDSGSSLSLSVLQEILGDDIPKVKEEAVISSQSDLGECPYCGERPARNATIFAPQKEKESAPEMSSSCDKRVTVNPPEKFSEGRPKTQNTLICEKCSQPSNFLDDYNPHVIIQKRLSNQSRVICEKSSPPLNVPDNYNSHSVIQKHKEKMAIERPSSGSDWSDVGGTTVIFSEEKPFSLCLPVVSEPPYYATDYTTFPPHYSPWHDYTSSWFSSTKSSCYPSLGSSSNTLQAGKSSCSSSSRSNNNIFQGERSSHQSFLSDYSTSFPVSSENTSRDLKMTEEGRSKNSSLFYYSRNVEAEAKEERVYQEETLGHPYGGRASSFPPRTIWQPEQPGFIDTHCHLDLLYSRLPFKGTFTKFRKIYSNTFPKEFQGCISCFCNPQNLSDNLWEDQLKDDLVWGVFGCRPHFAHYYNNYQERSILKALRHPKAVAFGEMGLDYSSKCTTHIPEQQKVFKRLLRLAVSLKKPMMIHCREADEDLLHILKNYVPSDHKIHRHCFTGSYSVIEPLLNHFPNLYVGFTAILTYSSAGQARETVRKIPLERIIVETDAPFFLPRWVPKSYCQYAHPGLALHTVREIARIKGVSLSHTLTVLRENTHRLYHL

SEQ ID NO: 8204 - protein, 216 aa, Homo sapiens
MKLNLVQIFFMLLMLLLGLGMGLGLGLHMATAVLEESDQPLNEFWSSDSQDKAEATEEGDGTQTTETLVLSNKEVVQPGWPEDPILGEDEVGGNKMLRASALFQSNKDYLRLDQTDRECNDMMAHKMKEPSQSCIAQYAFIHEDLNTVKAVCNSPVIACELKGGKCHKSSRPFDLTLCELSQPDQVTPNCNYLTSVIKKHIIITCNDMKRQLPTGQ

SEQ ID NO: 8205 - protein, 272 aa, Homo sapiens
MVDCGPPVQWADVAGQGALKAALEEELVWPLLRPPAYPGSLRPPRTVLLFGPRGAGKALLGRCLATQLGATLLRLRGATLAAPGAAEGARLLQAAFAAARCRPPSVLLISELEALLPARDDGAAAGGALQVPLLACLDGGCGAGADGVLVVGTTSRPAALDEATRRRFSLRFYVALPDSPARGQILQRALAQQGCALSERELAALVQGTQGFSGGELGQLCQQAAAGAGLPGLQRPLSYKDLEAALAKVGPRASAKELDSFVEWDKMYGSGH

SEQ ID NO: 8206 - protein, 748 aa, Homo sapiens
MQWTPEHAQWPEQHFDITSTTRSPAHKVEAYRGHLQRTYQYAWANDDISALTASNLLKKYAEKYSGILEGPVDRPVLSNYSDTPSGLVNGRKNESEPWQPSLNSEAVYPMNCVPDVITASKAGVSSALPPADVSASIGSSPGVASNLTEPSYSSSTCGSHTVPSLHAGLPSQEYAPGYNGSYLHSTYSSQPAPALPSPHPSPLHSSGLLQPPPPPPPPPALVPGYNGTSNLSSYSYPSASYPPQTAVGSGYSPGGAPPPPSAYLPSGIPAPTPLPPTTVPGYTYQGHGLTPIAPSALTNSSASSLKRKAFYMAGQGDMDSSYGNYSYGQQRSTQSPMYRMPDNSISNTNRGNGFDRSAETSSLAFKPTKQLMSSEQQRKFSSQSSRALTPPSYSTAKNSLGSRSSESFGKYTSPVMSEHGDEHRQLLSHPMQGPGLRAATSSNHSVDEQLKNTDTHLIDLVTNEIITQGPPVDWNDIAGLDLVKAVIKEEVLWPVLRSDAFSGLTALPRSILLFGPRGTGKTLLGRCIASQLGATFFKIAGSGLVAKWLGEAEKIIHASFLVARCRQPSVIFVSDIDMLLSSQVNEEHSPVSRMRTEFLMQLDTVLTSAEDQIVVICATSKPEEIDESLRRYFMKRLLIPLPDSTARHQIIVQLLSQHNYCLNDKEFALLVQRTEGFSGLDVAHLCQEAVVGPLHAMPATDLSAIMPSQLRPVTYQDFENAFCKIQPSISQKELDMYVEWNKMFGCSQ

SEQ ID NO: 8207 - protein, 101 aa, Homo sapiens [sequence omitted]

SEQ ID NO: 8208 - protein, 173 aa, Homo sapiens [sequence omitted]

SEQ ID NO: 8209 - protein, 179 aa, Homo sapiens [sequence omitted]

SEQ ID NO: 8210 - protein, 228 aa, Homo sapiens [sequence omitted]

SEQ ID NO: 8211 - protein, 889 aa, Homo sapiens
MEVLREKVEEEEEAEREEAAEWAEWARMEKMMRPVEVRKEEITLKQETLRDLEKKLSEIQITVSAELPAFTKDTIDISKLPISYKTNTPKEEHLLQVADNFSRQYSHLCPDRVPLFLHPLNECEVPKFVSTTLRPTLMPYPELYNWDSCAQFVSDFLTMVPLPDPLKPPSHLYSSTTVLKYQKGNCFDFSTLLCSMLIGSGYDAYCVNGYGSLDLCHMDLTREVCPLTVKPKEEAEKAKPDALHGLRVHSWVLVLSGKREVPENFFIDPFTGHSYSTQDEHFLGIESLWNHKNYWINMQDCWNCCKVPREGELGDPEERLAHLFGGLDCLSICMADVASLLLLNSRLTILSQLPSWCMSLFLQQQDLIFDLGDPVRWEYMLLGTDKSQLSLTEEDDSGINDEDDVENLGKEDEDKSFDMPHSWVEQIEISPEEEAMGSAQMVRGVSGPERGSKKRPQLTVSTAFETRCPNGKKVIQYKRAKLEKWAPYLNSNGLVSRLTTYEDLQCTNILEIKEWYQNREDMLELKHINKTTDLKTDYFKPGHPQALRVHSYKSMQPEMDRVIEFYETARVDGLMKREETPRTMTEYYQGRPDFLSYRHASFGPRVKKLTLSSAESNPRPIVKITERFFRNPAKPAEEDVAERVFLVAEERIQLRYHCREDHITASKREFLRRTEVDSKGNKIIMTPDMCISFEVEPMEHTKKLLYQYEAMMHLKREEKLSRHQVWESELEVLEILKLREEEEAAHTLTISIYDTKRNEKSKEYREAMERMMHEEHLRQVETQLDYLKDECLSDFKQRLINKANLIQARFEKETQELQKKQQWYQENQVTLTPEDEDLYLSYCSQAMFRIRILEQRLNRHKELAPLKYLALEEKLYKDPRLGELQKIFA

SEQ ID NO: 8212 - protein, 910 aa, Homo sapiens
MEVLREKVEEEEEAEREEAAEWAEWARMEKMMRPVEVRKEEITLKQETLRDLEKKLSEIQITVSAELPAFTKDTIDISKLPISYKTNTPKEEHLLQVADNFSRQYSHLCPDRVPLFLHPLNECEVPKFVSTTLRPTLMPYPELYNWDSCAQFVSDFLTMVPLPDPLKPPSHLYSSTTVLKYQKGNCFDFSTLLCSMLIGSGYDAYCVNGYGSLDLCHMDLTREVCPLTVKPKEEAEKAKPDALHGLRVHSWVLVLSGKREVPENFFIDPFTGHSYSTQDEHFLGIESLWNHKNYWINMQDCWNCCKVPREGELGDPEERLAHLFGGLDCLSICMADVASLLLLNSRLTILSQLPSWCMSLFLQQQDLIFDLGDPVRWEYMLLGTDKSQLSLTEEDDSGINDEDDVENLGKEDEDKSFDMPHSWVEQIEISPEEEAMGSAQMVRGVSGPERGSKKRPQLTVSTAFETRCPNGKKVIQYKRAKLEKWAPYLNSNGLVSRLTTYEDLQCTNILEIKEWYQNREDMLELKHINKTTDLKTDYFKPGHPQALRVHSYKSMQPEMDRVIEFYETARVDGLMKREETPRTMTEYYQGRPDFLSYRHASFGPRVKKLTLSSAESNPRPIVKITERFFRNPAKPAEEDVAERVFLVAEERIQLRYHCREDHITASKREFLRRTEVDSKGNKIIMTPDMCISFEVEPMEHTKKLLYQYEAMMHLKREEKLSRHQVWESELEVLEILKLREEEEAAHTLTISIYDTKRNEKSKEYREAMERMMHEEHLRQVETQLDYLAPFLAQLPPGEKLTCWQAVRLKDECLSDFKQRLINKANLIQARFEKETQELQKKQQWYQENQVTLTPEDEDLYLSYCSQAMFRIRILEQRLNRHKELAPLKYLALEEKLYKDPRLGELQKIFA

SEQ ID NO: 8213 - protein, 356 aa, Homo sapiens [sequence omitted]

SEQ ID NO: 8214 - protein, 524 aa, Homo sapiens
MQDCWNCCKDLIFDLGDPVRWEYMLLGTDKSQLSLTEEDDSGINDEDDVENLGKEDEDKSFDMPHSWVEQIEISPEAFETRCPNGKKVIQYKRAKLEKWAPYLNSNGLVSRLTTYEDLQCTNILEIKEWYQNREDMLELKHINKTTDLKTDYFKPGHPQALRVHSYKSMQPEMDRVIEFYETARVDGLMKREETPRTMTEYYQGRPDFLSYRHASFGPRVKKLTLSSAESNPRPIVKITERFFRNPAKPAEEDVAERVFLVAEERIQLRYHCREDHITASKREFLRRTEVDSKGNKIIMTPDMCISFEVEPMEHTKKLLYQYEAMMHLKREEKLSRHQVWESELEVLEILKLREEEEAAHTLTISIYDTKRNEKSKEYREAMERMMHEEHLRQVETQLDYLAPFLAQLPPGEKLTCWQAVRLKDECLSDFKQRLINKANLIQARFEKETQELQKKQQWYQENQVTLTPEDEDLYLSYCSQAMFRIRILEQRLNRHKELAPLKYLALEEKLYKDPRLGELQKIFA

SEQ ID NO: 8215 - protein, 464 aa, Homo sapiens
MGDRPVQFEILSDQSVNFGFSKFPWVNYQDGNLNISIPVFSIHGNHDDPMGADARCALDILSCVGFVNHFGLSMSVEKIDISLVLLQKGSTNIALYDLGSIPDERLSRIPEQFLDDFIDLVIWGHAHEYNPKVNQAIQSFCLAKIEEMLENAKWEHLGNSCQPEKSLIPLRVDYSGGFEPFNVLRFSQKFVHRVANPKDIIHFFRHREQKEKTGEEINFGKLTAKPSSEGTTLRVEDLVKQYFQTEEKNVPLSLLTERGMERHIDALEDKINEEVCRFRENRQKNTSEDDDVHEAINRAREAFKSTRQQPSQNVTKNYSEVIEVDESDMEEDIFPATSQTHQKWSSTSSSKNMSQSQHDVGQHPNVSLAAVPAIKSHAGMPEEASSCESWGRDQGDTKCTNGALEAHRFHSPSSFLNGNACYSEASPYYLENRFFTPSSIPAVLQTRSLSSSSYVDTLSLCLAT

SEQ ID NO: 8216 - protein, 137 aa, Homo sapiens [sequence omitted]

SEQ ID NO: 8217 - protein, 488 aa, Homo sapiens
  VARIANT (1)...(488): Xaa = Any Amino Acid
MASVDWREPEGLVSPQGPKQDWHQRIFVNRSLALGKIRCFGFDMDYTLAAYKSPAYEALTFELLLERLVCIGYPHEILRYTYDPTFPTRRLVFDELYGNLLKVDAHGNVLLGAYGFTFLSEAEIWSFYPSKFIQRDDLQCFYILNMLFNLPETYLYACLVDFFSGCSRYTNCDTGYQHGNLFMSFRSLFQDVTDAMNNIHQSGCLKKTLEDLEKYVKKDPRLPILLGKMKEVGKVFLATNSSYNYTNAIMTYLFSISEAEASGRPWRSYFDLIVVDTQKPHFFAEGLVLRQVNTVMAGAEDSGKLHVGTSTGPHQHCAVYSGGSSDMVCELLGVRGMDILYIGDHIFGDILKSKKRQGWRTCLVVPELSWELDIWAQEKERLEELKRLDTHLADIYQHMDGSSCELQVINFTKREIQRVTQGAGPVLQHHGQLVPLRFPPDTLLQPADALCRPLHCRLPRLPVLPSELSSLGRPRSWWVPAESPRLFX

SEQ ID NO: 8218 - protein, 373 aa, Homo sapiens
MPAWWDSKRLIARTHSDARLHTCSHMLTCTLTLAFRHTWVQAGPWLGLTCFPCAFCSCRGCSALLCGVSTPSVLGPWILGGWWTDANILLSLPRIFVNRSLALGKIRCFGFDMDYTLAAYKSPAYEALTFELLLERLVCIGYPHEILRYTYDPTFPTRRLVFDELYGNLLKVDAHGNVLLGAYGFTFLSEAEIWSFYPSKFIQRDDLQCFYILNMLFNLPETYLYACLVDFFSGCSRYTNCDTGYQHGNLFMSFRSLFQDVTDAMNNIHQSGCLKKTLEDLEKYVKKDPRLPILLGKMKEVGKVFLATNSSYNYTNVSMCMEGWTVGLLPGPRGHSGTASNREGWGGEPRPSYPHHWAGLLDSISWPFKASEE

SEQ ID NO: 8219 - protein, 113 aa, Homo sapiens
MCVYAYLICTHIFTTYVCMIYSYIHAVCLIISKMVSLYQIVSSCGVHLHVALTLKPLPDLEPQSVCLPVHLSPRERPFKYVTFPFSFNHGLCEPERALRKMAASTRVEASRSA

SEQ ID NO: 8220 - protein, 386 aa, Homo sapiens
MAGYEYVSPEQLAGFDKYKYSAVDTNPLSLYVMHPFWNTIVKVFPTWLAPNLITFSGFLLVVFNFLLMAYFDPDFYASAPGHKHVPDWVWIVVGILNFVAYTLDGVDGKQARRTNSSTPLGELFDHGLDSWSCVYFVVTVYSIFGRGSTGVSVFVLYLLLWVVLFSFILSHWEKYNTGILFLPWGYDISQVTISFVYIVTAVVGVEAWYEPFLFNFLYRDLFTAMIIGCALCVTLPMSLLNFFRSYKNNTLKLNSVYEAMVPLFSPCLLFILSTAWILWSPSDILELHPRVFYFMVGTAFANSTCQLIVCQMSSTRCPTLNWLLVPLFLVVLVVNLGVASYVESILLYTLTTAFTLAHIHYGVRVVKQLSSHFQIYPFSLRKPNSD

SEQ ID NO: 8221 - protein, 268 aa, Homo sapiens
MVSAYNLNRAFTWLGGSGGLPTNETTFAKLLQHRGYRTGLIGKWHLGLSCASRNDHCYHPLNHGFHYFYGVPFGLLSDCQASKTPELHRWLRIKLWISTVALALVPFLLLIPKFARWFSVPWKVIFVFALLAFLFFTSWYSSYGFTRRWNCILMRNHEIIQQPMKEEKVASLMLKEALAFIERYKREPFLLFFSFLHVHTPLISKKKFVGRSKYGRYGDNVEEMDWMVAMVFHFGIQYFSSSSECKLLKTVLCRTIETNNLPVISRLC

SEQ ID NO: 8222 - protein, 518 aa, Homo sapiens
MAKFVIAGRADCPYYAKTELVADYLQKNLPDFRIHKITQRPEVWEDWLKDVCEKNKWSHKNSPIIWRELLDRGGKGLLLGGYNEFLEHAQLYYDVTSSMTTELMMVIAQENLGAHIEKEQEEEALKTCINPLQVWITSASAPACYNLIPILTSGEVFGMHTEISITLFDNKQAEEHLKSLVVETQDLASPVLRSVSICTKVEEAFRQAHVIVVLDDSTNKEVFTLEDCLRSRVPLCRLYGYLIEKNAHESVRVIVGGRTFVNLKTVLLMRYAPRIAHNIIAVALGVEGEAKAILARKLKTAPSYIKDVIIWGNISGNNYVDLRKTRVYRYESAIWGPLHYSRPVLNLIFDSEWVKREFVAILKNLTTTGRQFGGILAAHSIATTLKYWYHGSPPGEIVSLGILSEGQFGIPKGIVFSMPVKFENGTWVVLTDLKDVEISEQIMTRMTSDLIQEKLVALGDKIHFQPYQSGHKDLVPDEEKNLAMSDAAEFPNQIPQTTFEKPQSLEFLNEFEGKTVES

SEQ ID NO: 8223 - protein, 156 aa, Homo sapiens
MAPARAGFCPLLLLLLLGLWVAEIPVSAKPKGMTSSQWFKIQHMQPSPQACNSAMKNINKHTKRCKDLNTFLHEPFSSVAATCQTPKIACKNGDKNCHQSHGPVSLTMCKLTSGKYPNCRYKEKRQNKSYVVACKPPQKKDSQQFHLVPVHLDRVL

SEQ ID NO: 8224 - protein, 156 aa, Homo sapiens; identical to SEQ ID NO: 8223

SEQ ID NO: 8225 - protein, 296 aa, Homo sapiens [sequence omitted]

SEQ ID NO: 8226 - protein, 53 aa, Homo sapiens
MRQPAPLWLSLNQLLSLLIQTVPDLLLDLQLFDFTVVQKQYAFHRNCISNFEF

SEQ ID NO: 8227 - protein, 432 aa, Homo sapiens
MRQSDSETRGLLHWPSLDTVTNRSSEGQGPVETNRLSSMPPTLKRGLLCDFRHAPTGGGEEPEPAMVLQEALEPAMCLDRYPHVQLEASELLLEDGGSALATELNTAKLALAYAGMEMNDLVVSCGLGLAPGSVPTWLLDPMRLEEEHTAPGVTLALLPMLNQDLRGRRIALQEEQKAEDPSALCGNKQTLTTHLGLILGAVLRFPSQQNYLEASEDPVRCGGRKGIKAPTHSQIQPHRLAFPKSPPSVSHKDRLPLAMVLRSVSVKQSAPPYSGPVDLIVASEAASCSPAPKGQDAQDLGNERFPNTRLNPLELKLDSVKLKFITSLWAASYPQPYYTHTHQMNFCDSHCGKLQRTFVCPLPRSDTGRSTMQLSPGDQLSPEDNMAPDGLSRMLGEAKRWPRVSTEAAIRTGVNAGSFFVILTFTDLDYSM

SEQ ID NO: 8228 - protein, 109 aa, Homo sapiens
MVLQEALEPAMCLDRYPHVQLEASELLLEDGGSALATELNTAKLALAYAGMEMNDLVVSCGLGLAPGSVPTWLLDPMRLEEEHTAPGVTLALLPMLNQVARLLAAGRAA

SEQ ID NO: 8229 - protein, 259 aa, Homo sapiens
MATATGVAEERLLAALAYLQCAVGCAVFARNRQTNSVYGRHALPSHRLRVPARAAWVVQELPSLALPLYQYASESAPRLRSAPNCILLAMFLVHYGHRCLIYPFLMRGGKPMPLLACTMAIMFCTCNGYLQSRYLSHCAVYADDWVTDPRFLIGFGLWLTGMLINIHSDHILRNLRKPGDTGYKIPRGGLFEYVTAANYFGEIMEWCGYALASWSVQGAAFAFFTFCFLSGRAKEHHEWYLRKFEEYPKFRKIIIPFLF

SEQ ID NO: 8230 - protein, 211 aa, Homo sapiens
MATATGVAEERLLAALAYLQCAVGCASAPRLRSAPNCILLAMFLVHYGHRCLIYPFLMRGGKPMPLLACTMAIMFCTCNGYLQSRYLSHCAVYADDWVTDPRFLIGFGLWLTGMLINIHSDHILRNLRKPGDTGYKIPRGGLFEYVTAANYFGEIMEWCGYALASWSVQGAAFAFFTFCFLSGRAKEHHEWYLRKFEEYPKFRKIIIPFLF

SEQ ID NO: 8231 - protein, 224 aa, Homo sapiens
MASKKEPKKELGLHRGILHFYPGSDQPDGRHCHRHEYILAPGAPATSSSVAQETPSSLFRIHTVYMIDTGNVEEHVSHKTVTNPDKLPKTAENFHALSTGEKGFGYKGSCFHRIIPGFMCQGGGFTCHNGTGGKSIYGEKLDDENFILKHTCPGTLSMANAGPNTNGSRFFICTAKTVVGQKHVVSSKVKEGMNIVGAMEHFGSRNGKTSKMITTADCGQLEYI

SEQ ID NO: 8232 - protein, 1337 aa, Homo sapiens [sequence omitted]

SEQ ID NO: 8233 - protein, 1338 aa, Homo sapiens
MDRASELLFYVNGRKVIEKNVDPETMLLPYLRKKLRLTGTKYGCGGGGCGACTVMISRYNPITKRIRHHPANACLIPICSLYGAAVTTVEGIGSTHTRIHPVQERIAKCHGTQCGFCTPGMVMSIYTLLRNHPEPTLDQLTDALGGNLCRCTGYRPIIDACKTFCKTSGCCQSKENGVCCLDQGINGLPEFEEGSKTSPKLFAEEEFLPLDPTQELIFPPELMIMAEKQSQRTRVFGSERMMWFSPVTLKELLEFKFKYPQAPVIMGNTSVGPEVKFKGVFHPVIISPDRIEELSVVNHAYNGLTLGAGLSLAQVKDILADVVQKLPEEKTQMYHALLKHLGTLAGSQIRNMASLGGHIISRHPDSDLNPILAVGNCTLNLLSKEGKRQIPLNEQFLSKCPNADLKPQEILVSVNIPYSRKWEFVSAFRQAQRQENALAIVNSGMRVFFGEGDGIIRELCISYGGVGPATICAKNSCQKLIGRHWNEQMLDIACRLILNEVSLLGSAPGGKVEFKRTLIISFLFKFYLEVSQILKKMDPVHYPSLADKYESALEDLHSKHHCSTLKYQNIGPKQHPEDPIGHPIMHLSGVKHATGEAIYCDDMPLVDQELFLTFVTSSRAHAKIVSIDLSEALSMPGVVDIMTAEHLSDVNSFCFFTEAEKFLATDKVFCVGQLVCAVLADSEVQAKRAAKRVKIVYQDLEPLILTIEESIQHNSSFKPERKLEYGNVDEAFKVVDQILEGEIHMGGQEHFYMETQSMLVVPKGEDQEMDVYVSTQFPKYIQDIVASTLKLPANKVMCHVRRVGGAFGGKVLKTGIIAAVTAFAANKHGRAVRCVLERGEDMLITGGRHPYLGKYKAGFMNDGRILALDMEHYSNAGASLDESLFVIEMGLLKMDNAYKFPNLRCRGWACRTNLPSNTAFRGFGFPQAALITESCITEVAAKCGLSPEKVRIINMYKEIDQTPYKQEINAKNLIQCWRECMAMSSYSLRKVAVEKFNAENYWKKKGLAMVPLKFPVGLGSRAAGQAAALVHIYLDGSVLVTHGGIEMGQGVHTKMIQVVSRELRMPMSNVHLRGTSTETVPNANISGGSVVADLNGLAVKDACQTLLKRLEPIISKNPKGTWKDWAQTAFDESINLSAVGYFRGYESDMNWEKGEGQPFEYFVYGAACSEVEIDCLTGDHKNIRTDIVMDVGCSINPAIDIGQIEGAFIQGMGLYTIEELNYSPQGILHTRGPDQYKIPAICDMPTELHIALLPPSQNSNTLYSSKGLGESGVFLGCSVFFAIHDAVSAARQERGLHGPLTLNSPLTPEKIRMACEDKFTKMIPRDEPGSYVPWNVPI

SEQ ID NO: 8234 - protein, 161 aa, Homo sapiens
MSVTLHTDVGDIKIEVFCERTPKTCENFLALCASNYYNGCIFHRNIKGFMVQTGDPTGTGRGGNSIWGKKFEDEYSEYLKHNVRGVVSMANNGPNTNGSQFFITYGKQPHLDMKYTVFGKVIDGLETLDELEKLPVNEKTYRPLNDVHIKDITIHANPFAQ

SEQ ID NO: 8235 - protein, 161 aa, Homo sapiens; identical to SEQ ID NO: 8234

SEQ ID NO: 8236 - protein, 165 aa, Homo sapiens
MSVTLHTDVGDIKIEVFCERTPKTCEMESRCVPQAGVQWRDLGSLQPPPPGFKQVFCLSLPRTGRGGNSIWGKKFEDEYSEYLKHNVRGVVSMANNGPNTNGSQFFITYGKQPHLDMKYTVFGKVIDGLETLDELEKLPVNEKTYRPLNDVHIKDITIHANPFAQ

SEQ ID NO: 8237 - protein, 109 aa, Homo sapiens
MSVGLAIAGFHSTYICTLLPCAKQQGTQRQVQLTEEEDNMWTNMSRKLKTFMPPFCLQGKNKFTDMSYEEKWGKLTFVDFPIYDVLDQKCMFEPKCLDEFPHLKAFMCR

SEQ ID NO: 8238 - protein, 121 aa, Homo sapiens
MDGKNKVTQSNAILCYTAGKHMCGKTEKIQVDILENQATSFCTQLIQCCYNSDHEKLKPQYLEQLPEQLKQFSMFLGEILMVCRGKLTFVDFPIYDVLDQKCMFEPKCLDEFPHLKAFMCR

SEQ ID NO: 8239 - protein, 743 aa, Homo sapiens
MEAVAVAAAVGVLLLAGAGGAAGDEAREAAAVRALVARLLGPGPAADFSVSVERALAAKPGLDTYSLGGGGAARVRVRGSTGVAAAAGLHRYLRDFCGCHVAWSGSQLRLPRPLPAVPGELTEATPNRYRYYQNVCTQSYSFVWWDWARWEREIDWMALNGINLALAWSGQEAIWQRVYLALGLTQAEINEFFTGPAFLAWGRMGNLHTWDGPLPPSWHIKQLYLQHRVLDQMRSFGMTPVLPAFAGHVPEAVTRVFPQVNVTKMGSWGHFNCSYSCSFLLAPEDPIFPIIGSLFLRELIKEFGTDHIYGADTFNEMQPPSSEPSYLAAATTAVYEAMTAVDTEAVWLLQGWLFQHQPQFWGPAQIRAVLGAVPRGRLLVLDLFAESQPVYTRTASFQGQPFIWCMLHNFGGNHGLFGALEAVNGGPEAARLFPNSTMVGTGMAPEGISQNEVVYSLMAELGWRKDPVPDLAAWVTSFAARRYGVSHPDAGAAWRLLLRSVYNCSGEACRGHNRSPLVRRPSLQMNTSIWYNRSDVFEAWRLLLTSAPSLATSPAFRYDLLDLTRQAVQELVSLYYEEARSAYLSKELASLLRAGGVLAYELLPALDEVLASDSRFLLGSWLEQARAAAVSEAEADFYEQNSRYQLTLWGPEGNILDYANKQLAGLVANYYTPRWRLFLEALVDSVAQGIPFQQHQFDKNVFQLEQAFVLSKQRYPSQPRGDTVDLAKKIFLKYYPGWVAGSW

SEQ ID NO: 8240 - protein, 639 aa, Homo sapiens
MGDLFQGRGPSRVGCAPAHDTARRYRYYQNVCTQSYSFVWWDWARWEREIDWMALNGINLALAWSGQEAIWQRVYLALGLTQAEINEFFTGPAFLAWGRMGNLHTWDGPLPPSWHIKQLYLQHRVLDQMRSFGMTPVLPAFAGHVPEAVTRVFPQVNVTKMGSWGHFNCSYSCSFLLAPEDPIFPIIGSLFLRELIKEFGTDHIYGADTFNEMQPPSSEPSYLAAATTAVYEAMTAVDTEAVWLLQGWLFQHQPQFWGPAQIRAVLGAVPRGRLLVLDLFAESQPVYTRTASFQGQPFIWCMLHNFGGNHGLFGALEAVNGGPEAARLFPNSTMVGTGMAPEGISQNEVVYSLMAELGWRKDPVPDLAAWVTSFAARRYGVSHPDAGAAWRLLLRSVYNCSGEACRGHNRSPLVRRPSLQMNTSIWYNRSDVFEAWRLLLTSAPSLATSPAFRYDLLDLTRQAVQELVSLYYEEARSAYLSKELASLLRAGGVLAYELLPALDEVLASDSRFLLGSWLEQARAAAVSEAEADFYEQNSRYQLTLWGPEGNILDYANKQLAGLVANYYTPRWRLFLEALVDSVAQGIPFQQHQFDKNVFQLEQAFVLSKQRYPSQPRGDTVDLAKKIFLKYYPGWVAGSW

SEQ ID NO: 8241 - protein, 831 aa, Homo sapiens
MGELFRSEEMTLAQLFLQSEAAYCCVSELGELGKVQFRDLNPDVNVFQRKFVNEVRRCEEMDRKLRFVEKEIRKANIPIMDTGENPEVPFPRDMIDLEANFEKIENELKEINTNQEALKRNFLELTELKFILRKTQQFFDEMADPDLLEESSSLLEPSEMGRGTPLRLGFVAGVINRERIPTFERMLWRVCRGNVFLRQAEIENPLEDPVTGDYVHKSVFIIFFQGDQLKNRVKKICEGFRASLYPCPETPQERKEMASGVNTRIDDLQMVLNQTEDHRQRVLQAAAKNIRVWFIKVRKMKAIYHTLNLCNIDVTQKCLIAEVWCPVTDLDSIQFALRRGTEHSGSTVPSILNRMQTNQTPPTYNKTNKFTYGFQNIVDAYGIGTYREINPAPYTIITFPFLFAVMFGDFGHGILMTLFAVWMVLRESRILSQKNENEMFSTVFSGRYIILLMGVFSMYTGLIYNDCFSKSLNIFGSSWSVRPMFTYNWTEETLRGNPVLQLNPALPGVFGGPYPFGIDPIWNIATNKLTFLNSFKMKMSVILGIIHMLFGVSLSLFNHIYFKKPLNIYFGFIPEIIFMTSLFGYLVILIFYKWTAYDAHTSENAPSLLIHFINMFLFSYPESGYSMLYSGQKGIQCFLVVVALLCVPWMLLFKPLVLRRQYLRRKHLGTLNFGGIRVGNGPTEEDAEIIQHDQLSTHSEDADEFDFGDTMVHQAIHTIEYCLGCISNTASYLRLWALSLAHAQLSEVLWTMVIHIGLSVKSLAGGLVLFFFFTAFATLTVAILLIMEGLSAFLHALRLHWVEFQNKFYSGTGFKFLPFSFEHIREGKFEE

SEQ ID NO: 8242 - protein, 146 aa, Homo sapiens [sequence omitted]

SEQ ID NO: 8243 - protein, 146 aa, Homo sapiens [sequence omitted]

SEQ ID NO: 8244 - protein, 71 aa, Homo sapiens
  VARIANT (1)...(71): Xaa = Any Amino Acid
MAEVWWLWRLLLTIVVALLFVAPGVPTHPSRWKKGLAKKVSQLMGWTKKDRVIRMSDTMFYHFVLDAPKNX

SEQ ID NO: 8245 - protein, 362 aa, Homo sapiens
MCNVLLQLEDINCINLDWINGSREYIHAVNNLRVVGAEVAYFIDVLMKKFEYSPSKVHLIGHSLGAHLAGEAGSRIPGLGRITGLDPAGPFFHNTPKEVRLDPSDANFVDVIHTNAARILFELGVGTIDACGHLDFYPNGGKHMPGCEDLITPLLKFNFNAYKKEMASFFDCNHARSYQFYAESILNPDAFIAYPCRSYTSFKAGNCFFCSKEGCPTMGHFADRFHFKNMKTNGSHYFLNTGSLSPFARWRHKLSVKLSGSEVTQGTVFLRVGGAIGKTGEFAIVSGKLEPGMTYTKLIDADVNVGNITSVQFIWKKHLFEDSQNKLGAEMVINTSGKYGYKSTFCSQDIMGPNILQNLKPC

SEQ ID NO: 8246 - protein, 443 aa, Homo sapiens [sequence omitted]

SEQ ID NO: 8247 - protein, 294 aa, Homo sapiens
MLVLHNSQKLQILYKSLEKSIPESIKVYGAIFNIKDKNPFNMEVLVDAWPDYQIVITRPQKQEMKDDQDHYTNTYHIFTKAPDKLEEVLSYSNVISWEQTLQIQGCQEGLDEAIRKVATSKSVQVDYMKTILFIPELPKKHKTSSNDKMELFEVDDDNKEGNFSNMFLDASHAGLVNEHWAFGKNERSLKYIERCLQDFLGFGVLGPEGQLVSWIVMEQSCELRMGYTVPKYRHQGNMLQIGYHLEKYLSQKEIPFYFHVADNNEKSLQALNNLGFKICPCGWHQWKCTPKKYC

SEQ ID NO: 8248 - protein, 309 aa, Homo sapiens
MDEKVFTKELDQWIEQLNECKQLSESQVKSLCEKAKEILTKESNVQEVRCPVTVCGDVHGQFHDLMELFRIGGKSPDTNYLFMGDYVDRGYYSVETVTLLVALKVRYRERITILRGNHESRQITQVYGFYDECLRKYGNANVWKYFTDLFDYLPLTALVDGQIFCLHGGLSPSIDTLDHIRALDRLQEVPHEGPMCDLLWSDPDDRGGWGISPRGAGYTFGQDISETFNHANGLTLVSRAHQLVMEGYNWCHDRNVVTIFSAPNYCYRCGNQAAIMELDDTLKYSFLQFDPAPRRGEPHVTRRTPDYFL

SEQ ID NO: 8249 - protein, 309 aa, Homo sapiens; identical to SEQ ID NO: 8248

SEQ ID NO: 8250 - protein, 273 aa, Homo sapiens
MKRSAFLLCEEHPRRPDHGRRGRGEGRRSVRYPVPQPQAPRSRKRGGKGSRLLTQTSEGRSARRGVWLPSGDSRAHYGWPCVAKFKLSLRECLPRRRNTASSGHSAKRGGGDLRAEERRPSWERGGRASGGCALGAPGRRGSGESSLGRASGGAPGGSSPGACGPGPGVCKKPWNEADPPVQRWPRQGSPFWAGYQLGAEGGAETVVPAARCRRVHAAKPHTAPKPRGSPALAASFPRETWRLGGEKRTRCCSDPTVRRSQSHALRAVGRVQD

SEQ ID NO: 8251 - protein, 204 aa, Homo sapiens
SHRADQRGCPAPRCGQSGLAAGAGCPQQEERPLQTTKSPTPDSAASVTIRYRHPAGHRVWWSVRRLSWSVPLYATVRFPRRPRRPRSLPSAPSSAEAYPCCPSHPGIATSALYQAPGPVPRTGRQGLRTMALKLIHKEFLELARDPQPHCSAGPVWDDMLHWQATITRPNDSSYLGGVFFLKFPSDYLFKPPKIKFTNGIYHQR

SEQ ID NO: 8252 - protein, 883 aa, Homo sapiens [sequence omitted]

SEQ ID NO: 8253 - protein, 1032 aa, Homo sapiens [sequence omitted]

SEQ ID NO: 8254 - protein, 883 aa, Homo sapiens [sequence omitted]

SEQ ID NO: 8255 - protein, 283 aa, Homo sapiens
MLHTHTPAKQDEKVIMAVGQKRKGVEHGPAARRKIGLMKRVSNLGCCLKDFEKFSFTPVPTDELFNNPTVNLCSVAQPTSNWLSWLAEQCCLATAASRIHDGCKGFKIRDTTKMKSLRKVVTASVILGRAVATESLLVKGLLKPTCRYLKVQYNEFLAAMYVINLLTCYIFNKIAVEASSDSKDTSFITELHPEDLLEVQQGFKYSDSLFQKLHFKQQATEERNLNTFAAVPRKMANYGKHCWELRESERCKKGMAFHSSKRNLWEGLLYFGPDWGDQVKTTL

SEQ ID NO: 8256 - protein, 2442 aa, Homo sapiens
MAENLLDGPPNPKRAKLSSPGFSANDSTDFGSLFDLENDLPDELIPNGGELGLLNSGNLVPDAASKHKQLSELLRGGSGSSINPGIGNVSASSPVQQGLGGQAQGQPNSANMASLSAMGKSPLSQGDSSAPSLPKQAASTSGPTPAASQALNPQAQKQVGLATSSPATSQTGPGICMNANFNQTHPGLLNSNSGHSLINQASQGQAQVMNGSLGAAGRGRGAGMPYPTPAMQGASSSVLAETLTQVSPQMTGHAGLNTAQAGGMAKMGITGNTSPFGQPFSQAGGQPMGATGVNPQLASKQSMVNSLPTFPTDIKNTSVTNVPNMSQMQTSVGIVPTQAIATGPTADPEKRKLIQQQLVLLLHAHKCQRREQANGEVRACSLPHCRTMKNVLNHMTHCQAGKACQVAHCASSRQIISHWKNCTRHDCPVCLPLKNASDKRNQQTILGSPASGIQNTIGSVGTGQQNATSLSNPNPIDPSSMQRAYAALGLPYMNQPQTQLQPQVPGQQPAQPQTHQQMRTLNPLGNNPMNIPAGGITTDQQPPNLISESALPTSLGATNPLMNDGSNSGNIGTLSTIPTAAPPSSTGVRKGWHEHVTQDLRSHLVHKLVQAIFPTPDPAALKDRRMENLVAYAKKVEGDMYESANSRDEYYHLLAEKIYKIQKELEEKRRSRLHKQGILGNQPALPAPGAQPPVIPQAQPVRPPNGPLSLPVNRMQVSQGMNSFNPMSLGNVQLPQAPMGPRAASPMNHSVQMNSMGSVPGMAISPSRMPQPPNMMGAHTNNMMAQAPAQSQFLPQNQFPSSSGAMSVGMGQPPAQTGVSQGQVPGAALPNPLNMLGPQASQLPCPPVTQSPLHPTPPPASTAAGMPSLQHTTPPGMTPPQPAAPTQPSTPVSSSGQTPTPTPGSVPSATQTQSTPTVQAAAQAQVTPQPQTPVQPPSVATPQSSQQQPTPVHAQPPGTPLSQAAASIDNRVPTPSSVASAETNSQQPGPDVPVLEMKTETQAEDTEPDPGESKGEPRSEMMEEDLQGASQVKEETDIAEQKSEPMEVDEKKPEVKVEVKEEEESSSNGTASQSTSPSQPRKKIFKPEELRQALMPTLEALYRQDPESLPFRQPVDPQLLGIPDYFDIVKNPMDLSTIKRKLDTGQYQEPWQYVDDVWLMFNNAWLYNRKTSRVYKFCSKLAEVFEQEIDPVMQSLGYCCGRKYEFSPQTLCCYGKQLCTIPRDAAYYSYQNRYHFCEKCFTEIQGENVTLGDDPSQPQTTISKDQFEKKKNDTLDPEPFVDCKECGRKMHQICVLHYDIIWPSGFVCDNCLKKTGRPRKENKFSAKRLQTTRLGNHLEDRVNKFLRRQNHPEAGEVFVRVVASSDKTVEVKPGMKSRFVDSGEMSESFPYRTKALFAFEEIDGVDVCFFGMHVQEYGSDCPPPNTRRVYISYLDSIHFFRPRCLRTAVYHEILIGYLEYVKKLGYVTGHIWACPPSEGDDYIFHCHPPDQKIPKPKRLQEWYKKMLDKAFAERIIHDYKDIFKQATEDRLTSAKELPYFEGDFWPNVLEESIKELEQEEEERKKEESTAASETTEGSQGDSKNAKKKNNKKTNKNKSSISRANKKKPSMPNVSNDLSQKLYATMEKHKEVFFVIHLHAGPVINTLPPIVDPDPLLSCDLMDGRDAFLTLARDKHWEFSSLRRSKWSTLCMLVELHTQGQDRFVYTCNECKHHVETRWHCTVCEDYDLCINCYNTKSHAHKMVKWGLGLDDEGSSQGEPQSKSPQESRRLSIQRCIQSLVHACQCRNANCSLPSCQKMKRVVQHTKGCKRKTNGGCPVCKQLIALCCYHAKHCQENKCPVPFCLNIKHKLRQQQIQHRLQQAQLMRRRMATMNTRNVPQQSLPSPTSAPPGTPTQQPSTPQTPQPPAQPQPSPVSMSPAGFPSVARTQPPTTVSTGKPTSQVPAPPPPAQPPPAAVEAARQIEREAQQQQHLYRVNINNSMPPGRTGMGTPGSQMAPVSLNVPRPNQVSGPVMPSMPPGQWQQAPLPQQQPMPGLPRPVISMQAQAAVAGPRMPSVQPPRSISPSALQDLLRTLKSPSSPQQQQQVLNILKSNPQLMAAFIKQRTAKYVANQPGMQPQPGLQSQPGMQPQPGMHQQPSLQNLNAMQAGVPRPGVPPQQQAMGGLNPQGQALNIMNPGHNPNMASMNPQYREMLRRQLLQQQQQQQQQQQQQQQQQQGSAGMAGGMAGHGQFQQPQGPGGYPPAMQQQQRMQQHLPLQGSSMGQMAAQMGQLGQMGQPGLGADSTPNIQQALQQRILQQQQMKQQIGSPGQPNPMSPQQHMLSGQPQASHLPGQQIATSLSNQVRSPAPVQSPRPQSQPPHSSPSPRIQPQPSPHHVSPQTGSPHPGLAVTMASSIDQGHLGNPEQSAMLPQLNTPSRSALSSELSLVGDTTGDTLEKFVEGL

SEQ ID NO: 8257 - protein, 2307 aa, Homo sapiens [sequence omitted]

SEQ ID NO: 8258 - protein, 2442 aa, Homo sapiens; identical to SEQ ID NO: 8256

SEQ ID NO: 8259 - protein, 564 aa, Homo sapiens
MEIHLQTNAEKGTITIQDTGIGMTQEELVSNLGTIARSGSKAFLDALQNQAEASSKIIGQFGVGFYSAFMVADRVEVYSRSAAPGSLGYQWLSDGSGVFEIAEASGVRTGTKIIIHLKSDCKEFSSEARVRDVVTKYSNFVSFPLYLNGRRMNTLQAIWMMDPKDVREWQHEEFYRYVAQAHDKPRYTLHYKTDAPLNIRSIFYVPDMKPSMFDVSRELGSSVALYSRKVLIQTKATDILPKWLRFIRGVVDSEDIPLNLSRELLQESALIRKLRDVLQQRLIKFFIDQSKKDAEKYAKFFEDYGLFMREGIVTATEQEVKEDIAKLLRYESSALPSGQLTSLSEYASRMRAGTRNIYYLCAPNRHLAEHSPYYEAMKKKDTEVLFCFEQFDELTLLHLREFDKKKLISVETDIVVDHYKEEKFEDRSPAAECLSEKETEELMAWMRNVLGSRVTNVKVTLRLDTHPAMVTVLEMGAARHFLRMQQLAKTQEERAQLLQPTLEINPRHALIKKLNQLRASEPGLAQLLVDQIYENAMIAAGLVDDPRAMVGRLNELLVKALERH

SEQ ID NO: 8260 - protein, 704 aa, Homo sapiens
MARELRALLLWGRRLRPLLRAPALAAVPGGKPILCPRRTTAQLGPRRNPAWSLQAGRLFSTQTAEDKEEPLHSIISSTESVQGSTSKHEFQAETKKLLDIVARSLYSEKEVFIRELISNASDALEKLRHKLVSDGQALPEMEIHLQTNAEKGTITIQDTGIGMTQEELVSNLGTIARSGSKAFLDALQNQAEASSKIIGQFGVGFYSAFMVADRVEVYSRSAAPGSLGYQWLSDGSGVFEIAEASGVRTGTKIIIHLKSDCKEFSSEARVRDVVTKYSNFVSFPLYLNGRRMNTLQAIWMMDPKDVREWQHEEFYRYVAQAHDKPRYTLHYKTDAPLNIRSIFYVPDMKPSMFDVSRELGSSVALYSRKVLIQTKATDILPKWLRFIRGVVDSEDIPLNLSRELLQESALIRKLRDVLQQRLIKFFIDQSKKDAEKYAKFFEDYGLFMREGIVTATEQEVKEDIAKLLRYESSALPSGQLTSLSEYASRMRAGTRNIYYLCAPNRHLAEHSPYYEAMKKKDTEVLFCFEQFDELTLLHLREFDKKKLISVETDIVVDHYKEEKFEDRSPAAECLSEKETEELMAWMRNVLGSRVTNVKVTLRLDTHPAMVTVLEMGAARHFLRMQQLAKTQEERAQLLQPTLEINPRHALIKKLNQLRASEPGLAQLLVDQIYENAMIAAGLVDDPRAMVGRLNELLVKALERH

SEQ ID NO: 8261 - protein, 495 aa, Homo sapiens
MVADRVEVYSRSAAPGSLGYQWLSDGSGVFEIAEASGVRTGTKIIIHLKSDCKEFSSEARVRDVVTKYSNFVSFPLYLNGRRMNTLQAIWMMDPKDVREWQHEEFYRYVAQAHDKPRYTLHYKTDAPLNIRSIFYVPDMKPSMFDVSRELGSSVALYSRKVLIQTKATDILPKWLRFIRGVVDSEDIPLNLSRELLQESALIRKLRDVLQQRLIKFFIDQSKKDAEKYAKFFEDYGLFMREGIVTATEQEVKEDIAKLLRYESSALPSGQLTSLSEYASRMRAGTRNIYYLCAPNRHLAEHSPYYEAMKKKDTEVLFCFEQFDELTLLHLREFDKKKLISVETDIVVDHYKEEKFEDRSPAAECLSEKETEELMAWMRNVLGSRVTNVKVTLRLDTHPAMVTVLEMGAARHFLRMQQLAKTQEERAQLLQPTLEINPRHALIKKLNQLRASEPGLAQLLVDQIYENAMIAAGLVDDPRAMVGRLNELLVKALERH

SEQ ID NO: 8262 - protein, 282 aa, Homo sapiens [sequence omitted]

SEQ ID NO: 8263 - protein, 212 aa, Homo sapiens [sequence omitted]

SEQ ID NO: 8264 - protein, 282 aa, Homo sapiens [sequence omitted]

SEQ ID NO: 8265 - protein, 1353 aa, Homo sapiens
MASPPHQQLLHHHSTEVSCDSSGDSNSVRVKINPKQLSSNSHPKHCKYSISSSCSSSGDSGGVPRRVGGGGRLRRQKKLPQLFERASSRWWDPKFDSVNLEEACLERCFPQTQRRFRYALFYIGFACLLWSIYFAVHMRSRLIVMVAPALCFLLVCVGFFLFTFTKLYARHYAWTSLALTLLVFALTLAAQFQVLTPVSGRGDSSNLTATARPTDTCLSQVGSFSMCIEVLFLLYTVMHLPLYLSLCLGVAYSVLFETFGYHFRDEACFPSPGAGALHWELLSRGLLHGCIHAIGVHLFVMSQVRSRSTFLKVGQSIMHGKDLEVEKALKERMIHSVMPRIIADDLMKQGDEESENSVKRHATSSPKNRKKKSSIQKAPIAFRPFKMQQIEEVSILFADIVGFTKMSANKSAHALVGLLNDLFGRFDRLCEETKCEKISTLGDCYYCVAGCPEPRADHAYCCIEMGLGMIKAIEQFCQEKKEMVNMRVGVHTGTVLCGILGMRRFKFDVWSNDVNLANLMEQLGVAGKVHISEATAKYLDDRYEMEDGKVIERLGQSVVADQLKGLKTYLISGQRAKESRCSCAEALLSGFEVIDGSQVSSGPRGQGTASSGNVSDLAQTVKTFDNLKTCPSCGITFAPKSEAGAEGGAPQNGCQDEHKNSTKASGGPNPKTQNGLLSPPQEEKLTNSQTSLCEILQEKGRWAGVSLDQSALLPLRFKNIREKTDAHFVDVIKEDSLMKDYFFKPPINQFSLNFLDQELERSYRTSYQEEVIKNSPVKTFASPTFSSLLDVFLSTTVFLTLSTTCFLKYEAATVPPPPAALAVFSAALLLEVLSLAVSIRMVFFLEDVMACTKRLLEWIAGWLPRHCIGAILVSLPALAVYSHVTSEYETNIHFPVFTGSAALIAVVHYCNFCQLSSWMRSSLATVVGAGPLLLLYVSLCPDSSVLTSPLDAVQNFSSERNPCNSSVPRDLRRPASLIGQEVVLVFFLLLLLVWFLNREFEVSYRLHYHGDVEADLHRTKIQSMRDQADWLLRNIIPYHVAEQLKVSQTYSKNHDSGGVIFASIVNFSEFYEENYEGGKECYRVLNELIGDFDELLSKPDYSSIEKIKTIGATYMAASGLNTAQAQDGSHPQEHLQILFEFAKEMMRVVDDFNNNMLWFNFKLRVGFNHGPLTAGVIGTTKLLYDIWGDTVNIASRMDTTGVECRIQVSEESYRVLSKMGYDFDYRGTVNVKGKGQMKTYLYPKCTDHRVIPQHQLSISPDIRVQVDGSIGRSPTDEIANLVPSVQYVDKTSLGSDSSTQAKDAHLSPKRPWKEPVKAEERGRFGKAIEKDDCDETGIEEANELTKLNVSKSV

SEQ ID NO: 8266 - protein, 1353 aa, Homo sapiens; identical to SEQ ID NO: 8265

SEQ ID NO: 8267 - protein, 588 aa, Homo sapiens [sequence omitted]

SEQ ID NO: 8268 - protein, 588 aa, Homo sapiens [sequence omitted]

SEQ ID NO: 8269 - protein, 774 aa, Homo sapiens [sequence omitted]

SEQ ID NO: 8270 - protein, 855 aa, Homo sapiens [sequence omitted]

SEQ ID NO: 8271 - protein, 855 aa, Homo sapiens [sequence omitted]

SEQ ID NO: 8272 - protein, 322 aa, Homo sapiens
MSLRPRRACAQLLWHPAAGMASWAKGRSYLAPGLLQGQVAIVTGGATGIGKAIVKELLELGSNVVIASRKLERLKSAADELQANLPPTKQARVIPIQCNIRNEEEVNNLVKSTLDTFGKINFLVNNGGGQFLSPAEHISSKGWHAVLETNLTGTFYMCKAVYSSWMKEHGGSIVNIIVPTKAGFPLAVHSGAARAGVYNLTKSLALEWACSGIRINCVAPGVIYSQTAVENYGSWGQSFFEGSFQKIPAKRIGVPEEVSSVVCFLLSPAASFITGQSVDVDGGRSLYTHSYEVPDHDNWPKGAGDLSVVKKMKETFKEKAKL

SEQ ID NO: 8273 - protein, 324 aa, Homo sapiens [sequence omitted]

SEQ ID NO: 8274 - protein, 533 aa, Homo sapiens [sequence omitted]

SEQ ID NO: 8275 - protein, 592 aa, Homo sapiens [sequence omitted]

SEQ ID NO: 8276 - protein, 97 aa, Homo sapiens
MAPGQLALFSVSDKTGLVEFARNLTALGLNLVASGGTAKALRDAGLAVRDVSELTGFPEMLGGRVKTLHPAVHAGILARNIPEDNADMARLDFNLIR

SEQ ID NO: 8277 - protein, 591 aa, Homo sapiens [sequence omitted]

SEQ ID NO: 8278 - protein, 359 aa, Homo sapiens
MTSTSKGILRPFLIVCIILGCFMACLLIYIKPTNSWIFSPMESASSVLKMKNFFSTKTDYFNETTILVWVWPFGQTFDLTSCQAMFNIQGCHLTTDRSLYNKSHAVLIHHRDISWDLTNLPQQARPPFQKWIWMNLESPTHTPQKSGIEHLFNLTLTYRRDSDIQVPYGFLTVSTNPFVFEVPSKEKLVCWVVSNWNPEHARVKYYNELSKSIEIHTYGQAFGEYVNDKNLIPTISACKFYLSFENSIHKDYITEKLYNAFLAGSVPVVLGPSRENYENYIPADSFIHVEDYNSPSELAKYLKEVDKNNKLYLSYFNWRKDFTVNLPRFWESHACLACDHVKRHQEYKSVGNLEKWFWN

SEQ ID NO: 8279 - protein, 359 aa, Homo sapiens; identical to SEQ ID NO: 8278

SEQ ID NO: 8280 - protein, 359 aa, Homo sapiens; identical to SEQ ID NO: 8278

SEQ ID NO: 8281 - protein, 1500 aa, Homo sapiens
MTRILTAFKVVRTLKTGFGFTNVTAHQKWKFSRPGIRLLSVKAQTAHIVLEDGTKMKGYSFGHPSSVAGEVVFNTGLGGYPEAITDPAYKGQILTMANPIIGNGGAPDTTALDELGLSKYLESNGIKVSGLLVLDYSKDYNHWLATKSLGQWLQEEKVPAIYGVDTRMLTKIIRDKGTMLGKIEFEGQPVDFVDPNKQNLIAEVSTKDVKVYGKGNPTKVVAVDCGIKNNVIRLLVKRGAEVHLVPWNHDFTKMEYDGILIAGGPGNPALAEPLIQNVRKILESDRKEPLFGISTGNLITGLAAGAKTYKMSMANRGQNQPVLNITNKQAFITAQNHGYALDNTLPAGWKPLFVNVNDQTNEGIMHESKPFFAVQFHPEVTPGPIDTEYLFDSFFSLIKKGKATTITSVLPKPALVASRVEVSKVLILGSGGLSIGQAGEFDYSGSQAVKAMKEENVKTVLMNPNIASVQTNEVGLKQADTVYFLPITPQFVTEVIKAEQPDGLILGMGGQTALNCGVELFKRGVLKEYGVKVLGTSVESIMATEDRQLFSDKLNEINEKIAPSFAVESIEDALKAADTIGYPVMIRSAYALGGLGSGICPNRETLMDLSTKAFAMTNQILVEKSVTGWKEIEYEVVRDADDNCVTVCNMENVDAMGVHTGDSVVVAPAQTLSNAEFQMLRRTSINVVRHLGIVGECNIQFALHPTSMEYCIIEVNARLSRSSALASKATGYPLAFIAAKIALGIPLPEIKNVVSGKTSACFEPSLDYMVTKIPRWDLDRFHGTSSRIGSSMKSVGEVMAIGRTFEESFQKALRMCHPSIEGFTPRLPMNKEWPSNLDLRKELSEPSSTRIYAIAKAIDDNMSLDEIEKLTYIDKWFLYKMRDILNMEKTLKGLNSESMTEETLKRAKEIGFSDKQISKCLGLTEAQTRELRLKKNIHPWVKQIDTLAAEYPSVTNYLYVTYNGQEHDVNFDDHGMMVLGCGPYHIGSSVEFDWCAVSSIRTLRQLGKKTVVVNCNPETVSTDFDECDKLYFEELSLERILDIYHQEACGGCIISVGGQIPNNLAVPLYKNGVKIMGTSPLQIDRAEDRSIFSAVLDELKVAQAPWKAVNTLNEALEFAKSVDYPCLLRPSYVLSGSAMNVVFSEDEMKKFLEEATRVSQEHPVVLTKFVEGAREVEMDAVGKDGRVISHAISEHVEDAGVHSGDATLMLPTQTISQGAIEKVKDATRKIAKAFAISGPFNVQFLVKGNDVLVIECNLRASRSFPFVSKTLGVDFIDVATKVMIGENVDEKHLPTLDHPIIPADYVAIKAPMFSWPRLRDADPILRCEMASTGEVACFGEGIHTAFLKAMLSTGFKIPQKGILIGIQQSFRPRFLGVAEQLHNEGFKLFATEATSDWLNANNVPATPVAWPSQEGQNPSLSSIRKLIRDGSIDLVINLPNNNTKFVHDNYVIRRTAVDSGIPLLTNFQVTKLFAEAVQKSRKVDSKSLFHYRQYSAGKAA

SEQ ID NO: 8282 - protein, 1500 aa, Homo sapiens; identical to SEQ ID NO: 8281

SEQ ID NO: 8283 - protein, 1500 aa, Homo sapiens [sequence omitted]

SEQ ID NO: 8284 - protein, 541 aa, Homo sapiens
THARTHTRTPDPARTRTEGASEQTRTPASQVPQPGMASGDLYEVERIVDKRKNKKGKWEYLIRWKGYGSTEDTWEPEHHLLHCEEFIDEFNGLHMSKDKRIKSGKQSSTSKLLRDSRGPSVEKLSHRPSDPGKSKGTSHKRKRINPPLAKPKKGYSGKPSSGGDRATKTVSYRTTPSGLQIMPLKKSQNGMENGDAGSEKDERHFGNGSHQPGLDLNDHVGEQDMGECDVNHATLAENGLGSALTNGGLNLHSPVKRKLEAEKDYVFDKRLRYSVRQNESNCRFRDIVVRKEEGFTHILLSSQTSDNNALTPEIMKEVRRALCNAATDDSKLLLLSAVGSVFCSGLDYSYLIGRLSSDRRKESTRIAEAIRDFVKAFIQFKKPIVVAINGPALGLGASILPLCDIVWASEKAWFQTPYATIRLTPAGCSSYTFPQILGVALANEMLFCGRKLTAQEACSRGLVSQVFWPTTFSQEVMLRVKEMASCSAVVLEESKCLVRSFLKSVLEDVNEKECLMLKQLWSSSKGLDSLFSYLQDKIYEV

SEQ ID NO: 8285 - protein, 653 aa, Homo sapiens
MPVGGLLPLFSSPAGGVLGGGLGGGGGRKGSGPAALRLTEKFVLLLVFSAFITLCFGAIFFLPDSSKLLSGVLFHSSPALQPAADHKPGPGARAEDAAEGRARRREEGAPGDPEAALEDNLARIRENHERALREAKETLQKLPEEIQRDILLEKKKVAQDQLRDKAPFRGLPPVDFVPPIGVESREPADAAIREKRAKIKEMMKHAWNNYKGYAWGLNELKPISKGGHSSSLFGNIKGATIVDALDTLFIMEMKHEFEEAKSWVEENLDFNVNAEISVFEVNIRFVGGLLSAYYLSGEEIFRKKAVELGVKLLPAFHTPSGIPWALLNMKSGIGRNWPWASGGSSILAEFGTLHLEFMHLSHLSGNPIFAEKVMNIRTVLNKLEKPQGLYPNYLNPSSGQWGQHHVSVGGLGDSFYEYLLKAWLMSDKTDLEAKKMYFDAVQAIETHLIRKSSSGLTYIAEWKGGLLEHKMGHLTCFAGGMFALGADAAPEGMAQHYLELGAEIARTCHESYNRTFMKLGPEAFRFDGGVEAIATRQNEKYYILRPEVMETYMYMWRLTHDPKYRKWAWEAVEALENHCRVNGGYSGLRDVYLLHESYDDVQQSFFLAETLKYLYLIFSDDDLLPLEHWIFNSEAHLLPILPKDKKEVEIREE

SEQ ID NO: 8286 - protein, 653 aa, Homo sapiens; identical to SEQ ID NO: 8285

SEQ ID NO: 8287 - protein, 520 aa, Homo sapiens
MSNKCDVVVVGGGISGMAAAKLLHDSGLNVVVLEARDRVGGRTYTLRNQKVKYVDLGGSYVGPTQNRILRLAKELGLETYKVNEVERLIHHVKGKSYPFRGPFPPVWNPITYLDHNNFWRTMDDMGREIPSDAPWKAPLAEEWDNMTMKELLDKLCWTESAKQLATLFVNLCVTAETHEVSALWFLWYVKQCGGTTRIISTTNGGQERKFVGGSGQVSERIMDLLGDRVKLERPVIYIDQTRENVLVETLNHEMYEAKYVISAIPPTLGMKIHFNPPLPMMRNQMITRVPLGSVIKCIVYYKEPFWRKKDYCGTMIIDGEEAPVAYTLDDTKPEGNYAAIMGFILAHKARKLARLTKEERLKKLCELYAKVLGSLEALEPVHYEEKNWCEEQYSGGCYTTYFPPGILTQYGRVLRQPVDRIYFAGTETATHWSGYMEGAVEAGERAAREILHAMGKIPEDEIWQSEPESVDVPAQPITTTFLERHLPSVPGLLRLIGLTTIFSATALGFLAHKRGLLVRV

SEQ ID NO: 8288 - protein, 520 aa, Homo sapiens; identical to SEQ ID NO: 8287

SEQ ID NO: 8289 - protein, 104 aa, Homo sapiens
  VARIANT (1)...(104): Xaa = Any Amino Acid
MKIHFNPPLPMMRNQMITRVPLGSVIKCIVYYKEPFWRKKDYCGTMIIDGEEAPVAYTLDDTKPEGNYAAIMGLKKLCELYAKVLGSLEALEDLLCRHRDCHTX

SEQ ID NO: 8290 - protein, 527 aa, Homo sapiens
MENQEKASIAGHMFDVVVIGGGISGLSAAKLLTEYGVSVLVLEARDRVGGRTYTIRNEHVDYVDVGGAYVGPTQNRILRLSKELGIETYKVNVSERLVQYVKGKTYPFRGAFPPVWNPIAYLDYNNLWRTIDNMGKEIPTDAPWEAQHADKWDKMTMKELIDKICWTKTARRFAYLFVNINVTSEPHEVSALWFLWYVKQCGGTTRIFSVTNGGQERKFVGGSGQVSERIMDLLGDQVKLNHPVTHVDQSSDNIIIETLNHEHYECKYVINAIPPTLTAKIHFRPELPAERNQLIQRLPMGAVIKCMMYYKEAFWKKKDYCGCMIIEDEDAPISITLDDTKPDGSLPAIMGFILARKADRLAKLHKEIRKKKICELYAKVLGSQEALHPVHYEEKNWCEEQYSGGCYTAYFPPGIMTQYGRVIRQPVGRIFFAGTETATKWSGYMEGAVEAGERAAREVLNGLGKVTEKDIWVQEPESKDVPAVEITHTFWERNLPSVSGLLKIIGFSTSVTALGFVLYKYKLLPRS

SEQ ID NO: 8291 - protein, 527 aa, Homo sapiens; identical to SEQ ID NO: 8290

SEQ ID NO: 8292 - protein, 527 aa, Homo sapiens; identical to SEQ ID NO: 8290

SEQ ID NO: 8293 - protein, 266 aa, Homo sapiens
MNGDQKSDVYAQEKQDFVQHFPQIIRVLSEDEMGHSETGDAVDRLKEVLEYNAIGGKYHQDLMVLVAFWELVEPRKQDADSLQQALTVGWCVELLQAFFLVADDIMDSSVSRRGQIWWYQKPGMGLDAINDAMLLELQPCTAGIDGDKEHANGKKILLEMGEFFQIQDDYLDLFGDPSVTSKVGTDIQDNKCGWLYQILKENYRQKKAKKVAQVKALSEELNLLAVFLQYEEDSYSHIMGLIEQYAAPLTPAIFLGLVRKIYKQKK

SEQ ID NO: 8294 - protein, 685 aa, Homo sapiens
MATANFGKIQIGIYVEIKRSRIHQAMVTSLNEDNESVTVEWIENGDTKGKEIDLESIFSLNPDLVPDEEIEPSPETPPPPASSAKVNKIVKNRRTVASIKNDPPSRDNRVVGSARARPSQFPEQSSSAQQNARRKSNCVKEVEKLQEKREKRRLQQQELREKRAQDVDATNPNYEIMCMIRDFRGSLDYRPLTTADPIDEHRICVCVRKRPLNKKETQMKDLDVITIPSKDVVMVHEPKQKVDLTRYLENQTFRFDYAFDDSAPNEMVYRFTARPLVETIFERGMATCFAYGQTGSGKTHTMGGDFSGKNQDCSKGIYALAARDVFLMLKKPNYKKLELQVYATFFEIYSGKVFDLLNRKTKLRVLEDGKQQVQVVGLQEREVKCVEDVLKLIDIGNSCRTSGQTSANAHSSRSHAVFQIILRRKGKLHGKFSLIDLAGNERGADTSSADRQTRLEGAEINKSLLALKECIRALGRNKPHTPFRASKLTQVLRDSFIGENSRTCMIATISPGMASCENTLNTLRYANRVKELTVDPTAAGDVRPIMHHPPNQIDDLETQWGVGSSPQRDDLKLLCEQNEEEVSPQLFTFHEAVSQMVEMEEQVVEDHRAVFQESIRWLEDEKALLEMTEEVDYDVDSYATQLEAILEQKIDILTELRDKVKSFRAALQEEEQASKQINPKRPRAL

SEQ ID NO: 8295 - protein, 679 aa, Homo sapiens
MVTSLNEDNESVTVEWIENGDTKGKEIDLESIFSLNPDLVPDEEIEPSPETPPPPASSAKVNKIVKNRRTVASIKNDPPSRDNRVVGSARARPSQFPEQSSSAQQNGSVSDISPVQAAKKEFGPPSRRKSNCVKEVEKLQEKREKRRLQQQELREKRAQDVDATNPNYEIMCMIRDFRGSLDYRPLTTADPIDEHRICVCVRKRPLNKKETQMKDLDVITIPSKDVVMVHEPKQKVDLTRYLENQTFRFDYAFDDSAPNEMVYRFTARPLVETIFERGMATCFAYGQTGSGKTHTMGGDFSGKNQDCSKGIYALAARDVFLMLKKPNYKKLELQVYATFFEIYSGKVFDLLNRKTKLRVLEDGKQQVQVVGLQEREVKCVEDVLKLIDIGNSCRTSGQTSANAHSSRSHAVFQIILRRKGKLHGKFSLIDLAGNERGADTSSADRQTRLEGAEINKSLLALKECIRALGRNKPHTPFRASKLTQVLRDSFIGENSRTCMIATISPGMASCENTLNTLRYANRVKELTVDPTAAGDVRPIMHHPPNQIDDLETQWGVGSSPQRDDLKLLCEQNEEEVSPQLFTFHEAVSQMVEMEEQVVEDHRAVFQESIRWLEDEKALLEMTEEVDYDVDSYATQLEAILEQKIDILTELRDKVKSFRAALQEEEQASKQINPKRPRAL

SEQ ID NO: 8296 - protein, 704 aa, Homo sapiens
MATANFGKIQIGIYVEIKRSRIHQAMVTSLNEDNESVTVEWIENGDTKGKEIDLESIFSLNPDLVPDEEIEPSPETPPPPASSAKVNKIVKNRRTVASIKNDPPSRDNRVVGSARARPSQFPEQSSSAQQNGSVSDISPVQAAKKEFGPPSRRKSNCVKEVEKLQEKREKRRLQQQELREKRAQDVDATNPNYEIMCMIRDFRGSLDYRPLTTADPIDEHRICVCVRKRPLNKKETQMKDLDVITIPSKDVVMVHEPKQKVDLTRYLENQTFRFDYAFDDSAPNEMVYRFTARPLVETIFERGMATCFAYGQTGSGKTHTMGGDFSGKNQDCSKGIYALAARDVFLMLKKPNYKKLELQVYATFFEIYSGKVFDLLNRKTKLRVLEDGKQQVQVVGLQEREVKCVEDVLKLIDIGNSCRTSGQTSANAHSSRSHAVFQIILRRKGKLHGKFSLIDLAGNERGADTSSADRQTRLEGAEINKSLLALKECIRALGRNKPHTPFRASKLTQVLRDSFIGENSRTCMIATISPGMASCENTLNTLRYANRVKELTVDPTAAGDVRPIMHHPPNQIDDLETQWGVGSSPQRDDLKLLCEQNEEEVSPQLFTFHEAVSQMVEMEEQVVEDHRAVFQESIRWLEDEKALLEMTEEVDYDVDSYATQLEAILEQKIDILTELRDKVKSFRAALQEEEQASKQINPKRPRAL

SEQ ID NO: 8297 - protein, 679 aa, Homo sapiens; identical to SEQ ID NO: 8295

SEQ ID NO: 8298 - protein, 706 aa, Homo sapiens
MATANFGKIQIGIYVEIKRSDGRIHQAMVTSLNEDNESVTVEWIENGDTKGKEIDLESIFSLNPDLVPDEEIEPSPETPPPPASSAKVNKIVKNRRTVASIKNDPPSRDNRVVGSARARPSQFPEQSSSAQQNGSVSDISPVQAAKKEFGPPSRRKSNCVKEVEKLQEKREKRRLQQQELREKRAQDVDATNPNYEIMCMIRDFRGSLDYRPLTTADPIDEHRICVCVRKRPLNKKETQMKDLDVITIPSKDVVMVHEPKQKVDLTRYLENQTFRFDYAFDDSAPNEMVYRFTARPLVETIFERGMATCFAYGQTGSGKTHTMGGDFSGKNQDCSKGIYALAARDVFLMLKKPNYKKLELQVYATFFEIYSGKVFDLLNRKTKLRVLEDGKQQVQVVGLQEREVKCVEDVLKLIDIGNSCRTSGQTSANAHSSRSHAVFQIILRRKGKLHGKFSLIDLAGNERGADTSSADRQTRLEGAEINKSLLALKECIRALGRNKPHTPFRASKLTQVLRDSFIGENSRTCMIATISPGMASCENTLNTLRYANRVKELTVDPTAAGDVRPIMHHPPNQIDDLETQWGVGSSPQRDDLKLLCEQNEEEVSPQLFTFHEAVSQMVEMEEQVVEDHRAVFQESIRWLEDEKALLEMTEEVDYDVDSYATQLEAILEQKIDILTELRDKVKSFRAALQEEEQASKQINPKRPRAL

SEQ ID NO: 8299 - protein, 679 aa, Homo sapiens; identical to SEQ ID NO: 8295

SEQ ID NO: 8300 - protein, 681 aa, Homo sapiens [sequence omitted]

SEQ ID NO: 8301 - protein, 169 aa, Homo sapiens
MDLDIEFDVHLGIAHTRWATHGEPSPVNSHPQRSDKNNEFIVIHNGIITNYKDLKKFLESKGYDFESETDTETIAKLVKYMYDNRESQDTSFTTLVERVIQQLEGAFALVFKSVHFPGQAVGTRRGSPLLIGVRSEHKLSTDHIPILYRTARTQIGSKFTRWGSQGERG

SEQ ID NO: 8302 - protein, 573 aa, Homo sapiens [sequence omitted]

SEQ ID NO: 8303 - protein, 197 aa, Homo sapiens
MDLDIEFDVHLGIAHTRWATHGEPSPVNSHPQRSDKNNEFIVIHNGIITNYKDLKKFLESKGYDFESETDTETIAKLVKYMYDNRESQDTSFTTLVERVIQQLEGAFALVFKSVHFPGQAVGTRRGSPLLIGVRSEHKLSTDHIPILYRTARTQIGSKFTRWGSQGERGKDKKGSCNLSRVDSTTCLFPVEEKAVEY

SEQ ID NO: 8304 - protein, 490 aa, Homo sapiens [sequence omitted]

SEQ ID NO: 8305 - protein, 509 aa, Homo sapiens [sequence omitted]

SEQ ID NO: 8306 - protein, 509 aa, Homo sapiens [sequence omitted]

SEQ ID NO: 8307 - protein, 509 aa, Homo sapiens [sequence omitted]

SEQ ID NO: 8308 - protein, 673 aa, Homo sapiens [sequence omitted]

SEQ ID NO: 8309 - protein, 673 aa, Homo sapiens [sequence omitted]

SEQ ID NO: 8310 - protein, 694 aa, Homo sapiens [sequence omitted]

SEQ ID NO: 8311 - protein, 673 aa, Homo sapiens [sequence omitted]

SEQ ID NO: 8312 - protein, 772 aa, Homo sapiens
MAEAHQAVAFQFTVTPDGVDFRLSREALKHVYLSGINSWKKRLIRIKNGILRGVYPGSPTSWLVVIMATVGSSFCNVDISLGLVSCIQRCLPQGCGPYQTPQTRALLSMAIFSTGVWVTGIFFFRQTLKLLLCYHGWMFEMHGKTSNLTRIWAMCIRLLSSRHPMLYSFQTSLPKLPVPRVSATIQRYLESVRPLLDDEEYYRMELLAKEFQDKTAPRLQKYLVLKSWWASNYVSDWWEEYIYLRGRSPLMVNSNYYVMDLVLIKNTDVQAARLGNIIHAMIMYRRKLDREEIKPVMALGIVPMCSYQMERMFNTTRIPGKDTDVLQHLSDSRHVAVYHKGRFFKLWLYEGARLLKPQDLEMQFQRILDDPSPPQPGEEKLAALTAGGRVEWAQARQAFFSSGKNKAALEAIERAAFFVALDEESYSYDPEDEASLSLYGKALLHGNCYNRWFDKSFTLISFKNGQLGLNAEHAWADAPIIGHLWEFVLGTDSFHLGYTETGHCLGKPNPALAPPTRLQWDIPKQCQAVIESSYQVAKALADDVELYCFQFLPFGKGLIKKCRTSPDAFVQIALQLAHFRDRGKFCLTYEASMTRMFREGRTETVRSCTSESTAFVQAMMEGSHTKADLRDLFQKAAKKHQNMYRLAMTGAGIDRHLFCLYLVSKYLGVSSPFLAEVLSEPWRLSTSQIPQSQIRMFDPEQHPNHLGAGGGFGPVADDGYGVSYMIAGENTIFFHISSKFSSSETNAQRFGNHIRKALLDIADLFQVPKAYS

SEQ ID NO: 8313 - protein, 772 aa, Homo sapiens; identical to SEQ ID NO: 8312

SEQ ID NO: 8314 - protein, 772 aa, Homo sapiens; identical to SEQ ID NO: 8312

SEQ ID NO: 8315 - protein, 772 aa, Homo sapiens; identical to SEQ ID NO: 8312

SEQ ID NO: 8316 - protein, 772 aa, Homo sapiens; identical to SEQ ID NO: 8312

SEQ ID NO: 8317 - protein, 395 aa, Homo sapiens
MAAEATAVAGSGAVGGCLAKDGLQQSKCPDTTPKRRRASSLSRDAERRAYQWCREYLGGAWRRVQPEELRVYPVSGGLSNLLFRCSLPDHLPSVGEEPREVLLRLYGAILQGVDSLVLESVMFAILAERSLGPQLYGVFPEGRLEQYIPSRPLKTQELREPVLSAAIATKMAQFHGMEMPFTKEPHWLFGTMERYLKQIQDLPPTGLPEMNLLEMYSLKDEMGNLRKLLESTPSPVVFCHNDIQEGNILLLSEPENADSLMLVDFEYSSYNYRGFDIGNHFCEWVYDYTHEEWPFYKARPTDYPTQEQQLHFIRHYLAEAKKGETLSQEEQRKLEEDLLVEVSRYALASHFFWGLWSILQASMSTIEFGYLDYAQSRFQFYFQQKGQLTSVHSSS

SEQ ID NO: 8318 - protein, 772 aa, Homo sapiens; identical to SEQ ID NO: 8312

SEQ ID NO: 8319 - protein, 772 aa, Homo sapiens; identical to SEQ ID NO: 8312

SEQ ID NO: 8320 - protein, 1868 aa, Homo sapiens
MARLADYFVLVAFGPHPRGSGEGQGQILQRFPEKDWEDNPFPQGIELFCQPSGWQLCPERNPPTFFVAVLTDINSERHYCACLTFWEPAEPSQQETTRVEDATEREEEGDEGGQTHLSPTAPAPSAQLFAPKTLVLVSRLDHTEVFRNSLGLIYAIHVEGLNVCLENVIGNLLTCTVPLAGGSQRTISLGAGDRQVIQTPLADSLPVSRCSVALLFRQLGITNVLSLFCAALTEHKVLFLSRSYQRLADACRGLLALLFPLRYSFTYVPILPAQLLEVLSTPTPFIIGVNAAFQAETQELLDVIVADLDGGTVTIPECVHIPPLPEPLQSQTHSVLSMVLDPELELADLAFPPPTTSTSSLKMQDKELRAVFLRLFAQLLQGYRWCLHVVRIHPEPVIRFHKAAFLGQRGLVEDDFLMKVLEGMAFAGFVSERGVPYRPTDLFDELVAHEVARMRADENHPQRVLRHVQELAEQLYKNENPYPAVAMHKVQRPGESSHLRRVPRPFPRLDEGTVQWIVDQAAAKMQGAPPAVKAERRTTVPSGPPMTAILERCSGLHVNSARRLEVVRNCISYVFEGKMLEAKKLLPAVLRALKGRAARRCLAQELHLHVQQNRAVLDHQQFDFVVRMMNCCLQDCTSLDEHGIAAALLPLVTAFCRKLSPGVTQFAYSCVQEHVVWSTPQFWEAMFYGDVQTHIRALYLEPTEDLAPAQEVGEAPSQEDERSALDVASEQRRLWPTLSREKQQELVQKEESTVFSQAIHYANRMSYLLLPLDSSKSRLLRERAGLGDLESASNSLVTNSMAGSVAESYDTESGFEDAETCDVAGAVVRFINRFVDKVCTESGVTSDHLKGLHVMVPDIVQMHIETLEAVQRESRRLPPIQKPKLLRPRLLPGEECVLDGLRVYLLPDGREEGAGGSAGGPALLPAEGAVFLTTYRVIFTGMPTDPLVGEQVVVRSFPVAALTKEKRISVQTPVDQLLQDGLQLRSCTFQLLKMAFDEEVGSDSAELFRKQLHKLRYPPDIRATFAFTLGSAHTPGRPPRVTKDKGPSLRTLSRNLVKNAKKTIGRQHVTRKKYNPPSWEHRGQPPPEDQEDEISVSEELEPSTLTPSSALKPSDRMTMSSLVERACCRDYQRLGLGTLSSSLSRAKSEPFRISPVNRMYAICRSYPGLLIVPQSVQDNALQRVSRCYRQNRFPVVCWRSGRSKAVLLRSGGLHGKGVVGLFKAQNAPSPGQSQADSSSLEQEKYLQAVVSSMPRYADASGRNTLSGFSSAHMGSHGKWGSVRTSGRSSGLGTDVGSRLAGRDALAPPQANGGPPDPGFLRPQRAALYILGDKAQLKGVRSDPLQQWELVPIEVFEARQVKASFKKLLKACVPGCPAAEPSPASFLRSLEDSEWLIQIHKLLQVSVLVVELLDSGSSVLVGLEDGWDITTQVVSLVQLLSDPFYRTLEGFRLLVEKEWLSFGHRFSHRGAHTLAGQSSGFTPVFLQFLDCVHQVHLQFPMEFEFSQFYLKFLGYHHVSRRFRTFLLDSDYERIELGLLYEEKGERRGQVPCRSVWEYVDRLSKRTPVFHNYMYAPEDAEVLRPYSNVSNLKVWDFYTEETLAEGPPYDWELAQGPPEPPEEERSDGGAPQSRRRVVWPCYDSCPRAQPDAISRLLEELQRLETELGQPAERWKDTWDRVKAAQRLEGRPDGRGTPSSLLVSTAPHHRRSLGVYLQEGPVGSTLSLSLDSDQSSGSTTSGSRQAARRSTSTLYSQFQTAESENRSYEGTLYKKGAFMKPWKARWFVLDKTKHQLRYYDHRVDTECKGVIDLAEVEAVAPGTPTMGAPKTVDEKAFFDVKTTRRVYNFCAQDVPSAQQWVDRIQSCLSDA

SEQ ID NO: 8321 - protein, 1893 aa, Homo sapiens
MARLADYFVLVAFGPHPRGSGEGQGQILQRFPEKDWEDNPFPQGIELFCQPSGWQLCPERNPPTFFVAVLTDINSERHYCACLTFWEPAEPSQETTRVEDATEREEEGDEGGQTHLSPTAPAPSAQLFAPKTLVLVSRLDHTEVFRNSLGLIYAIHVEGLNVCLENVIGNLLTCTVPLAGGSQRTISLGAGDRQVIQTPLADSLPVSRCSVALLFRQLGITNVLSLFCAALTEHKVLFLSRSYQRLADACRGLLALLFPLRYSFTYVPILPAQLLEVLSTPTPFIIGVNAAFQAETQELLDVIVADLDGGTVTIPECVHIPPLPEPLQSQTHSVLSMVLDPELELADLAFPPPTTSTSSLKMQDKELRAVFLRLFAQLLQGYRWCLHVVRIHPEPVIRFHKAAFLGQRGLVEDDFLMKVLEGMAFAGFVSERGVPYRPTDLFDELVAHEVARMRADENHPQRVLRHVQELAEQLYKNENPYPAVAMHKVQRPGESSHLRRVPRPFPRLDEGTVQWIVDQAAAKMQGAPPAVKAERRTTVPSGPPMTAILERCSGLHVNSARRLEVVRNCISYVFEGKMLEAKKLLPAVLRALKGRAARRCLAQELHLHVQQNRAVLDHQQFDFVVRMMNCCLQDCTSLDEHGIAAALLPLVTAFCRKLSPGVTQFAYSCVQEHVVWSTPQFWEAMFYGDVQTHIRALYLEPTEDLAPAQEVGEAPSQEDERSALDVASEQRRLWPTLSREKQQELVQKEESTVFSQAIHYANRMSYLLLPLDSSKSRLLRERAGLGDLESASNSLVTNSMAGSVAESYDTESGFEDAETCDVAGAVVRFINRFVDKVCTESGVTSDHLKGLHVMVPDIVQMHIETLEAVQRESRRLPPIQKPKLLRPRLLPGEECVLDGLRVYLLPDGREEGAGGSAGGPALLPAEGAVFLTTYRVIFTGMPTDPLVGEQVVVRSFPVAALTKEKRISVQTPVDQLLQDGLQLRSCTFQLLKMAFDEEVGSDSAELFRKQLHKLRYPPDIRATFAFTLGSAHTPGRPPRVTKDKGPSLRTLSRNLVKNAKKTIGRQHVTRKKYNPPSWEHRGQPPPEDQEDEISVSEELEPSTLTPSSALKPSDRMTMSSLVERACCRDYQRLGLGTLSSSLSRAKSEPFRISPVNRMYAICRSYPGLLIVPQSVQDNALQRVSRCYRQNRFPVVCWRSGRSKAVLLRSGGLHGKGVVGLFKAQNAPSPGQSQADSSSLEQEKYLQAVVSSMPRYADASGRNTLSGFSSAHMGSHVPSPRARVTTLSNPMAASASRRTAPRGKWGSVRTSGRSSGLGTDVGSRLAGRDALAPPQANGGPPDPGFLRPQRAALYILGDKAQLKGVRSDPLQQWELVPIEVFEARQVKASFKKLLKACVPGCPAAEPSPASFLRSLEDSEWLIQIHKLLQVSVLVVELLDSGSSVLVGLEDGWDITTQVVSLVQLLSDPFYRTLEGFRLLVEKEWLSFGHRFSHRGAHTLAGQSSGFTPVFLQFLDCVHQVHLQFPMEFEFSQFYLKFLGYHHVSRRFRTFLLDSDYERIELGLLYEEKGERRGQVPCRSVWEYVDRLSKRTPVFHNYMYAPEDAEVLRPYSNVSNLKVWDFYTEETLAEGPPYDWELAQGPPEPPEEERSDGGAPQSRRRVVWPCYDSCPRAQPDAISRLLEELQRLETELGQPAERWKDTWDRVKAAQRLEGRPDGRGTPSSLLVSTAPHHRRSLGVYLQEGPVGSTLSLSLDSDQSSGSTTSGSRQAARRSTSTLYSQFQTAESENRSYEGTLYKKGAFMKPWKARWFVLDKTKHQLRYYDHRVDTECKGVIDLAEVEAVAPGTPTMGAPKTVDEKAFFDVKTTRRVYNFCAQDVPSAQQWVDRIQSCLSDA

SEQ ID NO: 8322 - protein, 1906 aa, Homo sapiens [sequence omitted]

SEQ ID NO: 8323 - protein, 540 aa, Homo sapiens [sequence omitted]

SEQ ID NO: 8324 - protein, 414 aa, Homo sapiens [sequence omitted]

SEQ ID NO: 8325 - protein, 605 aa, Homo sapiens
MEDVEARFAHLLQPIRDLTKNWEVDVAAQLGEYLEELDQICISFDEGKTTMNFIEAALLIQGSACVYSKKVEYLYSLVYQALDFISGKRRAKQLSSVQEDRANGVASSGVPQEAENEFLSLDDFPDSRTNVDLKNDQTPSEVLIIPLLPMALVAPDEMEKNNNPLYSRQGEVLASRKDFRMNTCVPHPRGAFMLEPEGMSPMEPAGVSPMPGTQKDTGRTEEQPMEVSVCRSPVPALGFSQEPGPSPEGPMPLGGGEDEDAEEAVELPEASAPKAALEPKESRSPQQSAALPRRYMLREREGAPEPASCVKETPDPWQSLDPFDSLESKPFKKGRPYSVPPCVEEALGQKRKRKGAAKLQDFHQWYLAAYADHADSRRLRRKGPSFADMEVLYWTHVKEQLETLRKLQRREVAEQWLRPAEEDHLEDSLEDLGAADDFLEPEEYMEPEGADPREAADLDAVPMSLSYEELVRRNVELFIATSQKFVQETELSQRIRDWEDTVQPLLQEQEQHVPFDIHTYGDQLVSRFPQLNEWCPFAELVAGQPAFEVCRSMLASLQLANDYTVEITQQPGLEMAVDTMSLRLLTHQRAHKRFQTYAAPSMAQP

SEQ ID NO: 8326 - protein, 562 aa, Homo sapiens [sequence omitted]

SEQ ID NO: 8327 - protein, 546 aa, Homo sapiens [sequence omitted]

SEQ ID NO: 8328 - protein, 361 aa, Homo sapiens
MAGGRHRRVVGTLHLLLLVAALPWASRGVSPSASAWPEEKNYHQPAILNSSALRQIAEGTSISEMWQNDLQPLLIERYPGSPGSYAARQHIMQRIQRLQADWVLEIDTFLSQTPYGYRSFSNIISTLNPTAKRHLVLACHYDSKYFSHWNNRVFVGATDSAVPCAMMLELARALDKKLLSLKTVSDSKPDLSLQLIFFDGEEAFLHWSPQDSLYGSRHLAAKMASTPHPPGARGTSQLHGMDLLVLLDLIGAPNPTFPNFFPNSARWFERLQAIEHELHELGLLKDHSLEGRYFQNYSYGGVIQDDHIPFLRRGVPVLHLIPSPFPEVWHTMDDNEENLDESTIDNLNKILQVFVLEYLHL

SEQ ID NO: 8329 - protein, 270 aa, Homo sapiens
MQRIQRLQADWVLEIDTFLSQTPYGYRSFSNIISTLNPTAKRHLVLACHYDSKYFSHWNNRVFVGATDSAVPCAMMLELARALDKKLLSLKTVSDSKPDLSLQLIFFDGEEAFLHWSPQDSLYGSRHLAAKMASTPHPPGARGTSQLHGMDLLVLLDLIGAPNPTFPNFFPNSARWFERLQAIEHELHELGLLKDHSLEGRYFQNYSYGGVIQDDHIPFLRRGVPVLHLIPSPFPEVWHTMDDNEENLDESTIDNLNKILQVFVLEYLHL

SEQ ID NO: 8330 - protein, 361 aa, Homo sapiens; identical to SEQ ID NO: 8328

SEQ ID NO: 8331 - protein, 312 aa, Homo sapiens
MAGGRHRRVVGTLHLLLLVAALPWASRGVSPSASAWPEEKHIMQRIQRLQADWVLEIDTFLSQTPYGYRSFSNIISTLNPTAKRHLVLACHYDSKYFSHWNNRVFVGATDSAVPCAMMLELARALDKKLLSLKTVSDSKPDLSLQLIFFDGEEAFLHWSPQDSLYGSRHLAAKMASTPHPPGARGTSQLHGMDLLVLLDLIGAPNPTFPNFFPNSARWFERLQAIEHELHELGLLKDHSLEGRYFQNYSYGGVIQDDHIPFLRRGVPVLHLIPSPFPEVWHTMDDNEENLDESTIDNLNKILQVFVLEYLHL

SEQ ID NO: 8332 - protein, 297 aa, Homo sapiens
MWQNDLQPLLIERYPGSPGSYAARQHIMQRIQRLQADWVLEIDTFLSQTPYGYRSFSNIISTLNPTAKRHLVLACHYDSKYFSHWNNRVFVGATDSAVPCAMMLELARALDKKLLSLKTVSDSKPDLSLQLIFFDGEEAFLHWSPQDSLYGSRHLAAKMASTPHPPGARGTSQLHGMDLLVLLDLIGAPNPTFPNFFPNSARWFERLQAIEHELHELGLLKDHSLEGRYFQNYSYGGVIQDDHIPFLRRGVPVLHLIPSPFPEVWHTMDDNEENLDESTIDNLNKILQVFVLEYLHL

SEQ ID NO: 8333 - protein, 361 aa, Homo sapiens; identical to SEQ ID NO: 8328

SEQ ID NO: 8334 - protein, 1479 aa, Homo sapiens
MAKRSRGPGRRCLLALVLFCAWGTLAVVAQKPGAGCPSRCLCFRTTVRCMHLLLEAVPAVAPQTSILDLRFNRIREIQPGAFRRLRNLNTLLLNNNQIKRIPSGAFEDLENLKYLYLYKNEIQSIDRQAFKGLASLEQLYLHFNQIETLDPDSFQHLPKLERLFLHNNRITHLVPGTFNHLESMKRLRLDSNTLHCDCEILWLADLLKTYAESGNAQAAAICEYPRRIQGRSVATITPEELNCERPRITSEPQDADVTSGNTVYFTCRAEGNPKPEIIWLRNNNELSMKTDSRLNLLDDGTLMIQNTQETDQGIYQCMAKNVAGEVKTQEVTLRYFGSPARPTFVIQPQNTEVLVGESVTLECSATGHPPPRISWTRGDRTPLPVDPRVNITPSGGLYIQNVVQGDSGEYACSATNNIDSVHATAFIIVQALPQFTVTPQDRVVIEGQTVDFQCEAKGNPPPVIAWTKGGSQLSVDRRHLVLSSGTLRISGVALHDQGQYECQAVNIIGSQKVVAHLTVQPRVTPVFASIPSDTTVEVGANVQLPCSSQGEPEPAITWNKDGVQVTESGKFHISPEGFLTINDVGPADAGRYECVARNTIGSASVSMVLSVNVPDVSRNGDPFVATSIVEAIATVDRAINSTRTHLFDSRPRSPNDLLALFRYPRDPYTVEQARAGEIFERTLQLIQEHVQHGLMVDLNGTSYHYNDLVSPQYLNLIANLSGCTAHRRVNNCSDMCFHQKYRTHDGTCNNLQHPMWGASLTAFERLLKSVYENGFNTPRGINPHRLYNGHALPMPRLVSTTLIGTETVTPDEQFTHMLMQWGQFLDHDLDSTVVALSQARFSDGQHCSNVCSNDPPCFSVMIPPNDSRARSGARCMFFVRSSPVCGSGMTSLLMNSVYPREQINQLTSYIDASNVYGSTEHEARSIRDLASHRGLLRQGIVQRSGKPLLPFATGPPTECMRDENESPIPCFLAGDHRANEQLGLTSMHTLWFREHNRIATELLKLNPHWDGDTIYYETRKIVGAEIQHITYQHWLPKILGEVGMRTLGEYHGYDPGINAGIFNAFATAAFRFGHTLVNPLLYRLDENFQPIAQDHLPLHKAFFSPFRIVNEGGIDPLLRGLFGVAGKMRVPSQLLNTELTERLFSMAHTVALDLAAINIQRGRDHGIPPYHDYRVYCNLSAAHTFEDLKNEIKNPEIREKLKRLYGSTLNIDLFPALVVEDLVPGSRLGPTLMCLLSTQFKRLRDGDRLWYENPGVFSPAQLTQIKQTSLARILCDNADNITRVQSDVFRVAEFPHGYGSCDEIPRVDLRVWQDCCEDCRTRGQFNAFSYHFRGRRSLEFSYQEDKPTKKTRPRKIPSVGRQGEHLSNSTSAFSTRSDASGTNDFREFVLEMQKTITDLRTQIKKLESRLSTTECVDAGGESHANNTKWKKDACTICECKDGQVTCFVEACPPATCAVPVNIPGACCPVCLQKRAEEKP

SEQ ID NO: 8335 - protein, 1479 aa, Homo sapiens; identical to SEQ ID NO: 8334

SEQ ID NO: 8336 - protein, 1102 aa, Homo sapiens
MELENYKQPVVLREDNCRRRRRMKPRSAAASLSSMELIPIEFVLPTSQRKCKSPETALLHVAGHGNVEQMKAQVWLRALETSVAADFYHRLGPHHFLLLYQKKGQWYEIYDKYQVVQTLDCLRYWKATHRSPGQIHLVQRHPPSEESQAFQRQLTALIGYDVTDVSNVHDDELEFTRRGLVTPRMAEVASRDPKLYAMHPWVTSKPLPEYLWKKIANNCIFIVIHRSTTSQTIKVSPDDTPGAILQSFFTKMAKKKSLMDIPESQSEQDFVLRVCGRDEYLVGETPIKNFQWVRHCLKNGEEIHVVLDTPPDPALDEVRKEEWPLVDDCTGVTGYHEQLTIHGKDHESVFTVSLWDCDRKFRVKIRGIDIPVLPRNTDLTVFVEANIQHGQQVLCQRRTSPKPFTEEVLWNVWLEFSIKIKDLPKGALLNLQIYCGKAPALSSKASAESPSSESKGKVQLLYYVNLLLIDHRFLLRRGEYVLHMWQISGKGEDQGSFNADKLTSATNPDKENSMSISILLDNYCHPIALPKHQPTPDPEGDRVRAEMPNQLRKQLEAIIATDPLNPLTAEDKELLWHFRYESLKHPKAYPKLFSSVKWGQQEIVAKTYQLLARREVWDQSALDVGLTMQLLDCNFSDENVRAIAVQKLESLEDDDVLHYLLQLVQAVKFEPYHDSALARFLLKRGLRNKRIGHFLFWFLRSEIAQSRHYQQRFAVILEAYLRGCGTAMLHDFTQQVQVIEMLQKVTLDIKSLSAEKYDVSSQVISQLKQKLENLQNSQLPESFRVPYDPGLKAGALAIEKCKVMASKKKPLWLEFKCADPTALSNETIGIIFKHGDDLRQDMLILQILRIMESIWETESLDLCLLPYGCISTGDKIGMIEIVKDATTIAKIQQSTVGNTGAFKDEVLNHWLKEKSPTEEKFQAAVERFVYSCAGYCVATFVLGIGDRHNDNIMITETGNLFHIDFGHILGNYKSFLGINKERVPFVLTPDFLFVMGTSGKKTSPHFQKFQDICVKAYLALRHHTNLLIILFSMMLMTGMPQLTSKEDIEYIRDALTVGKNEEDAKKYFLDQIEVCRDKGWTVQFNWFLHLVLGIKQGEKHSA

SEQ ID NO: 8337 - protein, 1102 aa, Homo sapiens; identical to SEQ ID NO: 8336

SEQ ID NO: 8338 - protein, 331 aa, Homo sapiens
MASALWTVLPSRMSLRSLKWSLLLLSLLSFFVMWYLSLPHYNVIERVNWMYFYEYEPIYRQDFHFTLREHSNCSHQNPFLVILVTSHPSDVKARQAIRVTWGEKKSWWGYEVLTFFLLGQEAEKEDKMLALSLEDEHLLYGDIIRQDFLDTYNNLTLKTIMAFRWVTEFCPNAKYVMKTDTDVFINTGNLVKYLLNLNHSEKFFTGYPLIDNYSYRGFYQKTHISYQEYPFKVFPPYCSGLGYIMSRDLVPRIYEMMGHVKPIKFEDVYVGICLNLLKVNIHIPEDTNLFFLYRIHLDVCQLRRVIAAHGFSSKEIITFWQVMLRNTTCHY

SEQ ID NO: 8339 - protein, 363 aa, Homo sapiens
MSFENVFSVWNINPIFDNSSRTFGSRASELLWMASALWTVLPSRMSLRSLKWSLLLLSLLSFFVMWYLSLPHYNVIERVNWMYFYEYEPIYRQDFHFTLREHSNCSHQNPFLVILVTSHPSDVKARQAIRVTWGEKKSWWGYEVLTFFLLGQEAEKEDKMLALSLEDEHLLYGDIIRQDFLDTYNNLTLKTIMAFRWVTEFCPNAKYVMKTDTDVFINTGNLVKYLLNLNHSEKFFTGYPLIDNYSYRGFYQKTHISYQEYPFKVFPPYCSGLGYIMSRDLVPRIYEMMGHVKPIKFEDVYVGICLNLLKVNIHIPEDTNLFFLYRIHLDVCQLRRVIAAHGFSSKEIITFWQVMLRNTTCHY

SEQ ID NO: 8340 - protein, 331 aa, Homo sapiens; identical to SEQ ID NO: 8338

SEQ ID NO: 8341 - protein, 331 aa, Homo sapiens; identical to SEQ ID NO: 8338

SEQ ID NO: 8342 - protein, 331 aa, Homo sapiens; identical to SEQ ID NO: 8338

SEQ ID NO: 8343 - protein, 331 aa, Homo sapiens; identical to SEQ ID NO: 8338

SEQ ID NO: 8344 - protein, 181 aa, Homo sapiens
MLEKLTVSYDEAGTTCLIALLSDKDLTVANVGDSRGVLCDKDGNAIPLSHDHKPYQLKERKRIKRAGGFISFNGSWRVQGILAMSRSLGDYPLKNLNVVIPDPDILTFDLDKLQPEFMILASDGLWDAFSNEEAVRFIKERLDEPHFGAKSIVLQSFYRGCPDNITVMVVKFRNSSKTEEQ

SEQ ID NO: 8345 - protein, 585 aa, Homo sapiens
MTQNEDLRENMLRQVLEHLSQQSESQYLKILTSLAEVATTNGHKLLSLSSNYDAQMKSLLRIVRMFCHVFRIGPSSPSNGIDMGYNGNKTPRSQVFKPLELLWHSLDEWLVLIATELMKNKRDSTEITSILLKQKGQDQDAASIPPFEPPGPGSYENLSTGTRESKPDALAGRQEASADCQDVISMTANRLSAVIQAFYMCCSCQMPPGMTSPRFIEFVCKHDEVLKCFVNRNPKIIFDHFHFLLECPELMSRFMHIIKAQPFKDRCEWFYEHLHSGQPDSDMVHRPVNENDILLVHRDSIFRSSCEVVSKANCAKLKQGIAVRFHGEEGMGQGVVREWFDILSNEIVNPDYALFTQSADGTTFQPNSNSYVNPDHLNYFRFAGQILGLALNHRQLVNIYFTRSFYKHILGIPVNYQDVASIDPEYAKNLQWILDNDISDLGLELTFSVETDVFGAMEEVPLKPGGGSILVTQNNKELLLSGMPEIDVSDWIKNTEYTSGYEREDPVIQFVTGSSRVPHGGFANIMGGSGLQNFTIAAVPYTPNLLPTSSTCINMLKLPEYPSKEILKDRLLVALHCGSYGYTMA

SEQ ID NO: 8346 - protein, 562 aa, Homo sapiens
MMFKKHFCFSQPLELLWHSLDEWLVLIATELMKNKRDSTEITSILLKQKGQDQDAASIPPFEPPGPGSYENLSTGTRESKPDALAGRQEASADCQDVISMTANRLSAVIQAFYMCCSCQMPPGMTSPRFIEFVCKHDEVLKCFVNRNPKIIFDHFHFLLECPELMSRFMHIIKAQPFKDRCEWFYEHLHSGQPDSDMVHRPVNENDILLVHRDSIFRSSCEVVSKANCAKLKQGIAVRFHGEEGMGQGVVREWFDILSNEIVNPDYALFTQSADGTTFQPNSNSYVNPDHLNYFRFAGQILGLALNHRQLVNIYFTRSFYKHILGIPVNYQDVASIDPEYAKNLQWILDNDISDLGLELTFSVETDVFGAMEEVPLKPGGGSILVTQNNKAEYVQLVTELRMTRAIQPQINAFLQGFHMFIPPSLIQLFDEYELELLLSGMPEIDVSDWIKNTEYTSGYEREDPVIQWFWEVVEDITQEERVLLLQFVTGSSRVPHGGFANIMGGSGLQNFTIAAVPYTPNLLPTSSTCINMLKLPEYPSKEILKDRLLVALHCGSYGYTMA

SEQ ID NO: 8347 - protein, 604 aa, Homo sapiens
MTQNEDLRENMLRQVLEHLSQQSESQYLKILTSLAEVATTNGHKLLSLSSNYDAQMKSLLRIVRMFCHVFRIGPSSPSNGIDMGYNGNKTPRSQVFKPLELLWHSLDEWLVLIATELMKNKRDSTEITSILLKQKGQDQDAASIPPFEPPGPGSYENLSTGTRESKPDALAGRQEASADCQDVISMTANRLSAVIQAFYMCCSCQMPPGMTSPRFIEFVCKHDEVLKCFVNRNPKIIFDHFHFLLECPELMSRFMHIIKAQPFKDRCEWFYEHLHSGQPDSDMVHRPVNENDILLVHRDSIFRSSCEVVSKANCAKLKQGIAVRFHGEEGMGQGVVREWFDILSNEIVNPDYALFTQSADGTTFQPNSNSYVNPDHLNYFRFAGQILGLALNHRQLVNIYFTRSFYKHILGIPVNYQDVASIDPEYAKNLQWILDNDISDLGLELTFSVETDVFGAMEEVPLKPGGGSILVTQNNKELLLSGMPEIDVSDWIKNTEYTSGYEREDPVIQWFWEVVEDITQEERVLLLQFVTGSSRVPHGGFANIMGGSGLQNFTIAAVPYTPNLLPTSSTCINMLKLPEYPSKEILKDRLLVALHCGSYGYTMA

SEQ ID NO: 8348 - protein, 250 aa, Homo sapiens
MDLSAASHRIPLSDGNSIPIIGLGTYSEPKSTPKGACATSVKVAIDTGYRHIDGAYIYVRREDIFYCGKLWATNHVPEMVRPTLERTLRVLQLDYVDLYIIEVPMAFKPGDEIYPRDENGKWLYHKSNLCATWEAMEACKDAGLVKSLGVSNFNRRQLELILNKPGLKHKPVSNQVECHPYFTQPKLLKFCQQHDIVITAYSPLGTSRNPIWRQLHKLALLDLPILRVTLHSVHTLHSEKLVTGDLQCPG

SEQ ID NO: 8349 - protein, 326 aa, Homo sapiens
MDLSAASHRIPLSDGNSIPIIGLGTYSEPKSTPKGACATSVKVAIDTGYRHIDGAYIYQNEHEVGEAIREKIAEGKVRREDIFYCGKLWATNHVPEMVRPTLERTLRVLQLDYVDLYIIEVPMAFKPGDEIYPRDENGKWLYHKSNLCATWEAMEACKDAGLVKSLGVSNFNRRQLELILNKPGLKHKPVSNQVECHPYFTQPKLLKFCQQHDIVITAYSPLGTSRNPIWVNVSSPPLLKDALLNSLGKRYNKTAAQIVLRFNIQRGVVVIPKSFNLERIKENFQIFDFSLTEEEMKDIEALNKNVRFVELLMWRDHPEYPFHDEY

SEQ ID NO: 8350 - protein, 328 aa, Homo sapiens
MARTVVLITGCSSGIGLHLAVRLASDPSQSFKVYATLRDLKTQGRLWEAARALACPPGSLETLQLDVRDSKSVAAARERVTEGRVDVLVCNAGLGLLGPLEALGEDAVASVLDVNVVGTVRMLQAFLPDMKRRGSGRVLVTGSVGGLMGLPFNDVYCASKFALEGLCESLAVLLLPFGVHLSLIECGPVHTAFMEKVLGSPEEVLDRTDIHTFHRFYQYLAHSKQVFREAAQNPEEVAEVFLTALRAPKPTLRYFTTERFLPLLRMRLDDPSGSNYVTAMHREVFGDVPAKAEAGAEAGGGAGPGAEDEAGRSAVGDPELGDPPAAPQ

SEQ ID NO: 8351 - protein, 384 aa, Homo sapiens
MTTRYVDGGFGMGKYTTPLTRGVDCPYLATYVDWHFLLESQAPKTIRDAFCVFEQNQGLPLRRHHSDLYSHYFGGLAETVLVVRSMSTLLNYDYVWDTVFHPSGAIEIRFYATGYISSAFLFGATGKYGNQVSEHTLGTVHTHSAHFKVDLDVAGLENWVWAEDMVFVPMAVPWSPEHQLQRLQVTRKLLEMEEQAAFLVGSATPRYLYLASNHSNKWGHPRGYRIQMLSFAGEPLPQNSSMARGFSWERYQLAVTQRKEEEPSSSSVFNQNDPWAPTVDFSDFINNETIAGKDLVAWVTAGFLHIPHAEDIPNTVTVGNGVGFFLRPYNFFDEDPSFYSADSIYFRGDQDAGACEVNPLACLPQAAACAPDLPAFSHGGFSHN

SEQ ID NO: 8352 - protein, 359 aa, Homo sapiens
MRMEEGMNVLHDFGIQSTHYLQVNYQDSQDWFILVSVIADLRNAFYVLFPIWFHLQEAVGIKLLWVAVIGDWLNLVFKWILFGQRPYWWVLDTDYYSNTSVPLIKQFPVTCETGPGSPSGHAMGTAGVYYVMVTSTLSIFQGKIKPTYRFRCLNVILWLGFWAVQLNVCLSRIYLAAHFPHQVVAGVLSGIAVAETFSHIHSIYNASLKKYFLITFFLFSFAIGFYLLLKGLGVDLLWTLEKAQRWCEQPEWVHIDTTPFASLLKNLGTLFGLGLALNSSMYRESCKGKLSKWLPFRLSSIVASLVLLHVFDSLKPPSQVELVFYVLSFCKSAVVPLASVSVIPYCLAQVLGQPHKKSL

SEQ ID NO: 8353 - protein, 359 aa, Homo sapiens; identical to SEQ ID NO: 8352

SEQ ID NO: 8354 - protein, 756 aa, Homo sapiens
MHLKIVLAFLALSLITIFALAYVLLTSPGGSSQPPHCPSVSHRAQPWPHPGQSQLFADLSREELTAVMRFLTQRLGPGLVDAAQAQPSDNCIFSVELQLPPKAAALAHLDRGSPPPAREALAIVLFGGQPQPNVSELVVGPLPHPSYMRDVTVERHGGPLPYHRRPVLRAEFTQMWRHLKEVELPKAPIFLSSTFNYNGSTLAAVHATPRGLRSGDRATWMALYHNISGVGLFLHPVGLELLLDHRALDPAHWTVQQVFYLGHYYADLGQLEREFKSGRLEVVRVPLPPPNGASSLRSRNSPGPLPPLQFSPQGSQYSVQGNLVVSSLWSFTFGHGVFSGLRIFDVRFQGERIAYEVSVQECVSIYGADSPKTMLTRYLDSSFGLGRNSRGLVRGVDCPYQATMVDIHILVGKGAVQLLPGAVCVFEEAQGLPLRRHHNYLQNHFYGGLASSALVVRSVSSVGNYDYIWDFVLYPNGALEGRVHATGYINTAFLKGGEEGLLFGNRVGERVLGTVHTHAFHFKLDLDVAGLKNWVVAEDVVFKPVAAPWNPEHWLQRPQLTRQVLGKEDLTAFSLGSPLPRYLYLASNQTNAWGHQRGYRIQIHSPLGIHIPLESDMERALSWGRYQLVVTQRKEEESQSSSIYHQNDIWTPTVTFADFINNETLLGEDLVAWVTASFLHIPHAEDIPNTVTLGNRVGFLLRPYNFFDEDPSIFSPGSVYFEKGQDAGLCSINPVACLPDLAACVPDLPPFSYHGF

SEQ ID NO: 8355 - protein, 729 aa, Homo sapiens
MHLKIVLAFLALSLITIFALAYVLLTSPGGSSQPPHCPSVSHRAQPWPHPGQSQLFADLSREELTAVMRFLTQRLGPGLVDAAQAQPSDNCIFSVELQLPPKAAALAHLDRGSPPPAREALAIVLFGGQPQPNVSELVVGPLPHPSYMRDVTVERHGGPLPYHRRPVLRAEFTQMWRHLKEVELPKAPIFLSSTFNYNGSTLAAVHATPRGLRSGDRATWMALYHNISGVGLFLHPVGLELLLDHRALDPAHWTVQQVFYLGHYYADLGQLEREFKSGRLEVVRVPLPPPNGASSLRSRNSPGPLPPLQFSPQGSQYSVQGNLVVSSLWSFTFGHGVFSGLRIFDVRFQGERIAYEVSVQECVSIYGADSPKTMLTRYLDSSFGLGRNSRGLVRGVDCPYQATMVDIHILVGKGAVQLLPGAVCVFEEAQGLPLRRHHNYLQNHFYGGLASSALVVRSVSSVGNYDYIWDFVLYPNGALEGRVHATGYINTAFLKGGEEGLLFGNRVGERVLGTVHTHAFHFKLDLDVAGLKNWVVAEDVVFKPVAAPWNPEHWLQRPQLTRQVLGKEDLTAFSLGSPLPRYLYLASNQTNAWGHQRGYQLVVTQRKEEESQSSSIYHQNDIWTPTVTFADFINNETLLGEDLVAWVTASFLHIPHAEDIPNTVTLGNRVGFLLRPYNFFDEDPSIFSPGSVYFEKGQDAGLCSINPVACLPDLAACVPDLPPFSYHGF

SEQ ID NO: 8356 - protein, 393 aa, Homo sapiens
MSDEREVAEAATGEDASSPPPKTEAASDPQHPAASEGAAAAAASPPLLRCLVLTGFGGYDKVKLQSRPAAPPAPGPGQLTLRLRACGLNFADLMARQGLYDRLPPLPVTPGMEGAGVVIAVGEGVSDRKAGDRVMVLNRSGMWQEEVTVPSVQTFLIPEAMTFEEAAALLVNYITAYMVLFDFGNLQPGHSVLVHMAAGGVGMAAVQLCRTVENVTVFGTASASKHEALKENGVTHPIDYHTTDYVDEIKKISPKGVDIVMDPLGGSDTAKGYNLLKPMGKVVTYGMANLLTGPKRNLMALARTWWNQFSVTALQLLQANRAVCGFHLGYLDGEVELVSGVVARLLALYNQGHIKPHIDSVWPFEKVADAMKQMQEKKNVGKVLLVPGPEKEN

SEQ ID NO: 8357 - protein, 393 aa, Homo sapiens; identical to SEQ ID NO: 8356

SEQ ID NO: 8358 - protein, 500 aa, Homo sapiens [sequence omitted]

SEQ ID NO: 8359 - protein, 783 aa, Homo sapiens
MAACRYCCSCLRLRPLSDGPFLLPRRDRALTQLQVRALWSSAGSRAVAVDLGNRKLEISSGKLARFADGSAVVQSGDTAVMVTAVSKTKPSPSQFMPLVVDYRQKAAAAGRIPTNYLRREIGTSDKEILTSRIIDRSIRPLFPAGYFYDTQVLCNLLAVDGVNEPDVLAINGASVALSLSDIPWNGPVGAVRIGIIDGEYVVNPTRKEMSSSTLNLVVAGAPKSQIVMLEASAENILQQDFCHAIKVGVKYTQQIIQGIQQLVKETGVTKRTPQKLFTPSPEIVKYTHKLAMERLYAVFTDYEHDKVSRDEAVNKIRLDTEEQLKEKFPEADPYEIIESFNVVAKEVFRSIVLNEYKRCDGRDLTSLRNVSCEVDMFKTLHGSALFQRGQTQVLCTVTFDSLESGIKSDQVITAINGIKDKNFMLHYEFPPYATNEIGKVTGLNRRELGHGALAEKALYPVIPRDFPFTIRVTSEVLESNGSSSMASACGGSLALMDSGVPISSAVAGVAIGLVTKTDPEKGEIEDYRLLTDILGIEDYNGDMDFKIAGTNKGITALQADIKLPGIPIKIVMEAIQQASVAKKEILQIMNKTISKPRASRKENGPVVETVQVPLSKRAKFVGPGGYNLKKLQAETGVTISQVDEETFSVFAPTPSAMHEARDFITEICKDDQEQQLEFGAVYTATITEIRDTGVMVKLYPNMTAVLLHNTQLDQRKIKHPTALGLEVGQEIQVKYFGRDPADGRMRLSRKVLQSPATTVVRTLNDRSSIVMGEPISQSSSNSQ

SEQ ID NO: 8360 - protein, 396 aa, Homo sapiens [sequence omitted]

SEQ ID NO: 8361 - protein, 1663 aa, Homo sapiens
MDSKKRSSTEAEGSKERGLVHIWQAGSFPITPERLPGWGGKTVLQAALGVKHGVLLTEDGEVYSFGTLPWRSGPVEICPSSPILENALVGQYVITVATGSFHSGAVTDNGVAYMWGENSAGQCAVANQQYVPEPNPVSIADSEASPLLAVRILQLACGEEHTLALSISREIWAWGTGCQLGLITTAFPVTKPQKVEHLAGRVVLQVACGAFHSLALVQCLPSQDLKPVPERCNQCSQLLITMTDKEDHVIISDSHCCPLGVTLTESQAENHASTALSPSTETLDRQEEVFENTLVANDQSVATELNAVSAQITSSDAMSSQQNVMGTTEISSARNIPSYPDTQAVNEYLRKLSDHSVREDSEHGEKPMPSQPLLEEAIPNLHSPPTTSTSALNSLVVSCASAVGVRVAATYEAGALSLKKVMNFYSTTPCETGAQAGSSAIGPEGLKDSREEQVKQESMQGKKSSSLVDIREEETEGGSRRLSLPGLLSQVSPRLLRKAARVKTRTVVLTPTYSGEADALLPSLRTEVWTWGKGKEGQLGHGDVLPRLQPLCVKCLDGKEVIHLEAGGYHSLALTAKSQVYSWGSNTFGQLGHSDFPTTVPRLAKISSENGVWSIAAGRDYSLFLVDTEDFQPGLYYSGRQDPTEGDNLPENHSGSKTPVLLSCSKLGYISRVTAGKDSYLALVDKNIMGYIASLHELATTERRFYSKLSDIKSQILRPLLSLENLGTTTTVQLLQEVASRFSKLCYLIGQHGASLSSFLHGVKEARSLVILKHSSLFLDSYTEQVSSPVYCTSITNFLVMGGFQLLAKPAIDFLNKNQELLQDLSEVNDENTQLMEILNTLFFLPIRRLHNYAKVLLKLATCFEVASPEYQKLQDSSSCYECLALHLGRKRKEAEYTLGFWKTFPGKMTDSLRKPERRLLCESSNRALSLQHAGRFSVNWFILFNDALVHAQFSTHHVFPLATLWAEPLSEEAGGVNGLKITTPEEQFTLISSTPQEKTKWLRAISQAVDQALRGMSDLPPYGSGSSVQRQEPPISRSAKYTFYKDPRLKDATYDGRWLSGKPHGRGVLKWPDGKMYSGMFRNGLEDGYGEYRIPNKAMNKEDHYVGHWKEGKMCGQGVYSYASGEVFEGCFQDNMRHGHGLLRSGKLTSSSPSMFIGQWVMDKKAGYGVFDDITRGEKYMGMWQDDVCQGNGVVVTQFGLYYEGNFHLNKMMGNGVLLSEDDTIYEGEFSDDWTLSGKGTLTMPNGDYIEGYFSGEWGSGIKITGTYFKPSLYESDKDRPKVFRKLGNLAVPADEKWKAVFDECWRQLGCEGPGQGEVWKAWDNIAVALTTSRRQHRDSPEILSRSQTQTLESLEFIPQHVGAFSVEKYDDIRKYLIKACDTPLHPLGRLVETLVAVYRMTYVGVGANRRLLQEAVKEIKSYLKRIFQLVRFLFPELPEEGSTIPLSAPLPTERKSFCTGKSDSRSESPEPGYVVTSSGLLLPVLLPRLYPPLFMLYALDNDREEDIYWECVLRLNKQPDIALLGFLGVQRKFWPATLSILGESKKVLPTTKDACFASAVECLQQISTTFTPSDKLKVIQQTFEEISQSVLASLHEDFLWSMDDLFPVFLYVVLRARIRNLGSEVHLIEDLMDPYLQHGEQGIMFTTLKACYYQIQREKLN

SEQ ID NO: 8362 - protein, 1657 aa, Homo sapiens
MDSKKRSSTEAEGSKERGLVHIWQAGSFPITPERLPGWGGKTVLQAALGVKHGVLLTEDGEVYSFGTLPWRSGPVEICPSSPILENALVGQYVITVATGSFHSGAVTDNGVAYMWGENSAGQCAVANQQYVPEPNPVSIADSEASPLLAVRILQLACGEEHTLALSISREIWAWGTGCQLGLITTAFPVTKPQKVEHLAGRVVLQVACGAFHSLALVQCLPSQDLKPVPERCNQCSQLLITMTDKEDHVIISDSHCCPLGVTLTESQAENHASTALSPSTETLDRQEEVFENTLVANDQSVATELNAVSAQITSSDAMSSQQNVMGTTEISSARNIPSYPDTQAVNEYLRKLSDHSVREDSEHGEKPMPSQPLLEEAIPNLHSPPTTSTSALNSLVVSCASAVGVRVAATYEAGALSLKKVMNFYSTTPCETGAQAGSSAIGPEGLKDSREEQVKQESMQGKKSSSLVDIREEETEGGSRRLSLPGLLSQVSPRLLRKAARVKTRTVVLTPTYSGEADALLPSLRTEVWTWGKGKEGQLGHGDVLPRLQPLCVKCLDGKEVIHLEAGGYHSLALTAKSQVYSWGSNTFGQLGHSDFPTTVPRLAKISSENGVWSIAAGRDYSLFLVDTEDFQPGLYYSGRQDPTEGDNLPENHSGSKTPVLLSCSKLGYISRVTAGKDSYLALVDKNIMGYIASLHELATTERRFYSKLSDIKSQILRPLLSLENLGTTTTVQLLQEVASRFSKLCYLIGQHGASLSSFLHGVKEARSLVILKHSSLFLDSYTEYCTSITNFLVMGGFQLLAKPAIDFLNKNQELLQDLSEVNDENTQLMEILNTLFFLPIRRLHNYAKVLLKLATCFEVASPEYQKLQDSSSCYECLALHLGRKRKEAEYTLGFWKTFPGKMTDSLRKPERRLLCESSNRALSLQHAGRFSVNWFILFNDALVHAQFSTHHVFPLATLWAEPLSEEAGGVNGLKITTPEEQFTLISSTPQEKTKWLRAISQAVDQALRGMSDLPPYGSGSSVQRQEPPISRSAKYTFYKDPRLKDATYDGRWLSGKPHGRGVLKWPDGKMYSGMFRNGLEDGYGEYRIPNKAMNKEDHYVGHWKEGKMCGQGVYSYASGEVFEGCFQDNMRHGHGLLRSGKLTSSSPSMFIGQWVMDKKAGYGVFDDITRGEKYMGMWQDDVCQGNGVVVTQFGLYYEGNFHLNKMMGNGVLLSEDDTIYEGEFSDDWTLSGKGTLTMPNGDYIEGYFSGEWGSGIKITGTYFKPSLYESDKDRPKVFRKLGNLAVPADEKWKAVFDECWRQLGCEGPGQGEVWKAWDNIAVALTTSRRQHRDSPEILSRSQTQTLESLEFIPQHVGAFSVEKYDDIRKYLIKACDTPLHPLGRLVETLVAVYRMTYVGVGANRRLLQEAVKEIKSYLKRIFQLVRFLFPELPEEGSTIPLSAPLPTERKSFCTGKSDSRSESPEPGYVVTSSGLLLPVLLPRLYPPLFMLYALDNDREEDIYWECVLRLNKQPDIALLGFLGVQRKFWPATLSILGESKKVLPTTKDACFASAVECLQQISTTFTPSDKLKVIQQTFEEISQSVLASLHEDFLWSMDDLFPVFLYVVLRARIRNLGSEVHLIEDLMDPYLQHGEQGIMFTTLKACYYQIQREKLN

SEQ ID NO: 8363 - protein, 698 aa, Homo sapiens
MQAHELFRYFRMPELVDFRQYVRTLPTNTLMGFGAFAALTTFWYATRPKPLKPPCDLSMQSVEVAGSGGARRSALLDSDEPLVYFYDDVTTLYEGFQRGIQVSNNGPCLGSRKPDQPYEWLSYKQVAELSECIGSALIQKGFKTAPDQFIGIFAQNRPEWVIIEQGCFAYSMVIVPLYDTLGNEAITYIVNKAELSLVFVDKPEKAKLLLEGVENKLIPGLKIIVVMDAYGSELVERGQRCGVEVTSMKAMEDLGRANRRKPKPPAPEDLAVICFTSGTTGNPKGAMVTHRNIVSDCSAFVKATENTVNPCPDDTLISFLPLAHMFERVVECVMLCHGAKIGFFQGDIRLLMDDLKVLQPTVFPVVPRLLNRMFDRIFGQANTTLKRWLLDFASKRKEAELRSGIIRNNSLWDRLIFHKVQSSLGGRVRLMVTGAAPVSATVLTFLRAALGCQFYEGYGQTECTAGCCLTMPGDWTAGHVGAPMPCNLIKLVDVEEMNYMAAEGEGEVCVKGPNVFQGYLKDPAKTAEALDKDGWLHTGDIGKWLPNGTLKIIDRKKHIFKLAQGEYIAPEKIENIYMRSEPVAQVFVHGESLQAFLIAIVVPDVETLCSWAQKRGFEGSFEELCRNKDVKKAILEDMVRLGKDSGLKPFEQVKGITLHPELFSIDNGLLTPTMKAKRPELRNYFRSQIDDLYSTIKV

SEQ ID NO: 8364 - protein, 698 aa, Homo sapiens; identical to SEQ ID NO: 8363

SEQ ID NO: 8365 - protein, 698 aa, Homo sapiens; identical to SEQ ID NO: 8363

SEQ ID NO: 8366 - protein, 698 aa, Homo sapiens; identical to SEQ ID NO: 8363

SEQ ID NO: 8367 - protein, 319 aa, Homo sapiens
MLFWVLGLLILCGFLWTRKGKLKIEDITDKYIFITGCDSGFGNLAARTFDKKGFHVIAACLTESGSTALKAETSERLRTVLLDVTDPENVKRTAQWVKNQVGEKGLWGLINNAGVPGVLAPTDWLTLEDYREPIEVNLFGLISVTLNMLPLVKKAQGRVINVSSVGGRLAIVGGGYTPSKYAVEGFNDSLRRDMKAFGVHVSCIEPGLFKTNLADPVKVIEKKLAIWEQLSPDIKQQYGEGYIEKSLDKLKGNKSYVNMDLSPVVECMDHALTSLFPKTHYAAGKDAKIFWIPLSHMPAALQDFLLLKQKAELANPKAV

SEQ ID NO: 8368 - protein, 319 aa, Homo sapiens; identical to SEQ ID NO: 8367

SEQ ID NO: 8369 - protein, 279 aa, Homo sapiens
MLFWVLGLLILCGFLWTRKGKLKIEDITDKYIFITGCDSGFGNLAARTFDKKGFHVIAACLTESGSTALKAETSERLRTVLLDVTDPENVKRTAQWVKNQVGEKGLWGLINNAGVPGVLAPTDWLTLEDYREPIEVNLFGLISVTLNMLPLVKKAQGRVINVSSVGGRLAIVGGGYTPSKYAVEGFNDSLRRDMKAFGVHVSCIERLDKLKGNKSYVNMDLSPVVECMDHALTSLFPKTHYAAGKDAKIFWIPLSHMPAALQDFLLLKQKAELANPKAV

SEQ ID NO: 8370 - protein, 163 aa, Homo sapiens
MLFWVLGLLILCGFLWTRKGKLKIEDITDKYIFITGCDSGFGNLAARTFDKKGFHVIAACLTESGSTALKAETSERLRTVLLDVTDPENVKRTAQWVKNQVGEKGLWGLINNAGVPGVLAPTDWLTLEDYREPIEVNLFGLISVTLNMLPTGHESFWCARLMH

SEQ ID NO: 8371 - protein, 163 aa, Homo sapiens; identical to SEQ ID NO: 8370

SEQ ID NO: 8372 - protein, 210 aa, Homo sapiens
MPGVKLTTQAYCKMVLHGAKYPHCAVNGLLVAEKQKPRKEHLPLGGPGAHHTLFVDCIPLFHGTLALAPMLEVALTLIDSWCKDHSYVIAGYYQANERVKDASPNQVAEKVASRIAEGFSDTALIMVDNTKFTMDCVAPTIHVYEHHENRWRCRDPHHDYCEDWPEAQRISASLLDSRSYETLVDFDNHLDDIRNDWTNPEINKAVLHLC

SEQ ID NO: 8373 - protein, 210 aa, Homo sapiens; identical to SEQ ID NO: 8372

SEQ ID NO: 8374 - protein, 169 aa, Homo sapiens
MLATRVFSLVGKRAISTSVCVRAHESVVKSEDFSLPAYMDRRDHPLPEVAHVKHLSASQKALKEKEKASWSSLSMDEKVELYRIKFKESFAEMNRGSNEWKTVVGGAMFFIGFTALVIMWQKHYVYGPLPQSFDKEWVAKQTKRMLDMKVNPIQGLASKWDYEKNEWKK

SEQ ID NO: 8375 - protein, 169 aa, Homo sapiens; identical to SEQ ID NO: 8374

SEQ ID NO: 8376 - protein, 178 aa, Homo sapiens
MSEVSCKKRDDYLEWPEYFMAVAFLSAQRSKDPNSQVGACIVNSENKIVGIGYNGMPNGCSDDVLPWRRTAENKLDTKYPYVCHAELNAIMNKNSTDVKGCSMYVALFPCNECAKLIIQAGIKEVIFMSDKYHDSDEATAARLLFNMAGVTFRKFIPKCSKIVIDFDSINSRPSQKLQ

SEQ ID NO: 8377 - protein, 178 aa, Homo sapiens; identical to SEQ ID NO: 8376

SEQ ID NO: 8378 - protein, 119 aa, Homo sapiens
MARVFYGCGLLISTEKQRSKFPVCHAELNAIMNKNSTDVKGCSMYVALFPCNECAKLIIQAGIKEVIFMSDKYHDSDEATAARLLFNMAGVTFRKFIPKCSKIVIDFDSINSRPSQKLQ

SEQ ID NO: 8379 - protein, 178 aa, Homo sapiens; identical to SEQ ID NO: 8376

SEQ ID NO: 8380 - protein, 189 aa, Homo sapiens
MVGGGQPCGPNMSEVSCKKRDDYLEWPEYFMAVAFLSAQRSKDPNSQVGACIVNSENKIVGIGYNGMPNGCSDDVLPWRRTAENKLDTKYPYVCHAELNAIMNKNSTDVKGCSMYVALFPCNECAKLIIQAGIKEVIFMSDKYHDSDEATAARLLFNMAGVTFRKFIPKCSKIVIDFDSINSRPSQKLQ

SEQ ID NO: 8381 - protein, 189 aa, Homo sapiens; identical to SEQ ID NO: 8380

SEQ ID NO: 8382 - protein, 936 aa, Homo sapiens [sequence omitted]

SEQ ID NO: 8383 - protein, 651 aa, Homo sapiens
MFSFEGDFKTRPKVSLGGASRKEEKASLLHRTQEERRKREEERRRLKNAIIIQSFIRGYRDRKQQYSIQRSAFDRCATLSQSGGAFPIANGPNLTLLVRQLLFFYKQNEDSKRLIWLYQNLIKHSSLFVKQLDGSERLTCLFQIKRLMSLCCRLLQNCNDDSLNVALPMRMLEVFSSENTYLPVLQDASYVVSVIEQILHYMIHNGYYRSLYLLINSKLPSSIEYSDLSRVPIAKILLENVLKPLHFTYNSCPEGARQQVFTAFTEEFLAAPFTDQIFHFIIPALADAQTVFPYEPFLNALLLIESRCSRKSGGAPWLFYFVLTVGENYLGALSEEGLLVYLRVLQTFLSQLPVSPASASCHDSASDSEEESEEADKPSSPEDGRLSVSYITEECLKKLDTKQQTNTLLNLVWRDSASEEVFTTMASVCHTLMVQHRMMVPKVRQVLLYSLAFNARFLRHLWFLISSMSTRMITGSMVPLLQVISRGSPMSFEDSSRIIPLFYLFSSLFSHSLISIHDNEFFGDPIEVVGQRQSSMMPFTLEELIMLSRCLRDACLGIIKLAYPETKPEVREEYITAFQSIGVTTSSEMQQCIQMEQKRWIQLFKVITNLVKMLKSRDTRRNFCPPNHWLSEQEDIKADKVLLKDLFNIYH

SEQ ID NO: 8384 - protein, 1083 aa, Homo sapiens
MFSFEGDFKTRPKVSLGGASRKEEKASLLHRTQEERRKREEERRRLKNAIIIQSFIRGYRDRKQQYSIQRSAFDRCATLSQSGGAFPIANGPNLTLLVRQLLFFYKQNEDSKRLIWLYQNLIKHSSLFVKQLDGSERLTCLFQIKRLMSLCCRLLQNCNDDSLNVALPMRMLEVFSSENTYLPVLQDASYVVSVIEQILHYMIHNGYYRSLYLLINSKLPSSIEYSDLSRVPIAKILLENVLKPLHFTYNSCPEGARQQVFTAFTEEFLAAPFTDQIFHFIIPALADAQTVFPYEPFLNALLLIESRCSRKSGGAPWLFYFVLTVGENYLGALSEEGLLVYLRVLQTFLSQLPVSPASASCHDSASDSEEESEEADKPSSPEDGRLSVSYITEECLKKLDTKQQTNTLLNLVWRDSASEEVFTTMASVCHTLMVQHRMMVPKVRLLYSLAFNARFLRHLWFLISSMSTRMITGSMVPLLQVISRGSPMSFEDSSRIIPLFYLFSSLFSHSLISIHDNEFFGDPIEVVGQRQSSMMPFTLEELIMLSRCLRDACLGIIKLAYPETKPEVREEYITAFQSIGVTTSSEMQQCIQMEQKRWIQLFKVITNLVKMLKSRDTRRNFCPPNHWLSEQEDIKADKVTQLYVPASRHVWRFRRMGRIGPLQSTLDVGLESPPLSVSEERQLAVLTELPFVVPFEERVKIFQRLIYADKQEVQGDGPFLDGINVTIRRNYIYEDAYDKLSPENEPDLKKRIRVHLLNAHGLDEAGIDGGGIFREFLNELLKSGFNPNQGFFKTTNEGLLYPNPAAQMLVGDSFARHYYFLGRMLGKALYENMLVELPFAGFFLSKLLGTSADVDIHHLASLDPEVYKNLLFLKSYEDDVEELGLNFTVVNNDLGEAQVVELKFGGKDIPVTSANRIAYIHLVADYRLNRQIRQHCLAFRQGLANVVSLEWLRMFDQQEIQVLISGAQVPISLEDLKSFTNYSGGYSADHPVIKVFWRVVEGFTDEEKRKLLKFVTSCSRPPLLGFKELYPAFCIHNGGSDLERLPTASTCMNLLKLPEFYDETLLRSKLLYAIECAAGFELS

SEQ ID NO: 8385 - protein, 1083 aa, Homo sapiens; identical to SEQ ID NO: 8384

SEQ ID NO: 8386 - protein, 1085 aa, Homo sapiens
MFSFEGDFKTRPKVSLGGASRKEEKASLLHRTQEERRKREEERRRLKNAIIIQSFIRGYRDRKQQYSIQRSAFDRCATLSQSGGAFPIANGPNLTLLVRQLLFFYKQNEDSKRLIWLYQNLIKHSSLFVKQLDGSERLTCLFQIKRLMSLCCRLLQNCNDDSLNVALPMRMLEVFSSENTYLPVLQDASYVVSVIEQILHYMIHNGYYRSLYLLINSKLPSSIEYSDLSRVPIAKILLENVLKPLHFTYNSCPEGARQQVFTAFTEEFLAAPFTDQIFHFIIPALADAQTVFPYEPFLNALLLIESRCSRKSGGAPWLFYFVLTVGENYLGALSEEGLLVYLRVLQTFLSQLPVSPASASCHDSASDSEEESEEADKPSSPEDGRLSVSYITEECLKKLDTKQQTNTLLNLVWRDSASEEVFTTMASVCHTLMVQHRMMVPKVRQVLLYSLAFNARFLRHLWFLISSMSTRMITGSMVPLLQVISRGSPMSFEDSSRIIPLFYLFSSLFSHSLISIHDNEFFGDPIEVVGQRQSSMMPFTLEELIMLSRCLRDACLGIIKLAYPETKPEVREEYITAFQSIGVTTSSEMQQCIQMEQKRWIQLFKVITNLVKMLKSRDTRRNFCPPNHWLSEQEDIKADKVTQLYVPASRHVWRFRRMGRIGPLQSTLDVGLESPPLSVSEERQLAVLTELPFVVPFEERVKIFQRLIYADKQEVQGDGPFLDGINVTIRRNYIYEDAYDKLSPENEPDLKKRIRVHLLNAHGLDEAGIDGGGIFREFLNELLKSGFNPNQGFFKTTNEGLLYPNPAAQMLVGDSFARHYYFLGRMLGKALYENMLVELPFAGFFLSKLLGTSADVDIHHLASLDPEVYKNLLFLKSYEDDVEELGLNFTVVNNDLGEAQVVELKFGGKDIPVTSANRIAYIHLVADYRLNRQIRQHCLAFRQGLANVVSLEWLRMFDQQEIQVLISGAQVPISLEDLKSFTNYSGGYSADHPVIKVFWRVVEGFTDEEKRKLLKFVTSCSRPPLLGFKELYPAFCIHNGGSDLERLPTASTCMNLLKLPEFYDETLLRSKLLYAIECAAGFELS

SEQ ID NO: 8387 - protein, 502 aa, Homo sapiens
MALIPDLAMETWLLLAVSLVLLYLYGTHSHGLFKKLGIPGPTPLPFLGNILSYHKGFCMFDMECHKKYGKVWGFYDGQQPVLAITDPDMIKTVLVKECYSVFTNRRPFGPVGFMKSAISIAEDEEWKRLRSLLSPTFTSGKLKEMVPIIAQYGDVLVRNLRREAETGKPVTLKDVFGAYSMDVITSTSFGVNIDSLNNPQDPFVENTKKLLRFDFLDPFFLSIIFPFLIPILEVLNICVFPREVTNFLRKSVKRMKESRLEDTQKHRVDFLQLMIDSQNSKETESHKALSDLELVAQSIIFIFAGYETTSSVLSFIMYELATHPDVQQKLQEEIDAVLPNKAPPTYDTVLQMEYLDMVVNETLRLFPIAMRLERVCKKDVEINGMFIPKGVVVMIPSYALHRDPKYWTEPEKFLPERFSKKNKDNIDPYIYTPFGSGPRNCIGMRFALMNMKLALIRVLQNFSFKPCKETQIPLKLSLGGLLQPEKPVVLKVESRDGTVSGA

SEQ ID NO: 8388 - protein, 503 aa, Homo sapiens
MALIPDLAMETWLLLAVSLVLLYLYGTHSHGLFKKLGIPGPTPLPFLGNILSYHKGFCMFDMECHKKYGKVWGFYDGQQPVLAITDPDMIKTVLVKECYSVFTNRRPFGPVGFMKSAISIAEDEEWKRLRSLLSPTFTSGKLKEMVPIIAQYGDVLVRNLRREAETGKPVTLKDVFGAYSMDVITSTSFGVNIDSLNNPQDPFVENTKKLLRFDFLDPFFLSITVFPFLIPILEVLNICVFPREVTNFLRKSVKRMKESRLEDTQKHRVDFLQLMIDSQNSKETESHKALSDLELVAQSIIFIFAGYETTSSVLSFIMYELATHPDVQQKLQEEIDAVLPNKAPPTYDTVLQMEYLDMVVNETLRLFPIAMRLERVCKKDVEINGMFIPKGVVVMIPSYALHRDPKYWTEPEKFLPERFSKKNKDNIDPYIYTPFGSGPRNCIGMRFALMNMKLALIRVLQNFSFKPCKETQIPLKLSLGGLLQPEKPVVLKVESRDGTVSGA

SEQ ID NO: 8389 - protein, 544 aa, Homo sapiens
MRVAVAGCCHGELDKIYETLALAERRGPGPVDLLLCCGDFQAVRNEADLRCMAVPPKYRHMQTFYRYYSGEKKAPVLTLFIGGNHEASNHLQELPYGGWVAPNIYYLGLAGVVKYRGVRIGGISGIFKSHDYRKGHFECPPYNSSTIRSIYHVRNIEVYKLKQLKQPIDIFLSHDWPRSIYHYGNKKQLLKTKSFFRQEVENNTLGSPAASELLEHLKPTYWFSAHLHVKFAALMQHQAKDKGQTARATKFLALDKCLPHRDFLQILEIEHDPSAPDYLEYDIEWLTILRATDDLINVTGRLWNMPENNGLHARWDYSATEEGMKEVLEKLNHDLKVPCNFSVTAACYDPSKPQTQMQLIHRINPQTTEFCAQLGIIDINVRLQKSKEEHHVCGEYEEQDDVESNDSGEDQSEYNTDTSALSSINPDEIMLDEEEDEDSIVSAHSGMNTPSVEPSDQASEFSASFSDVRILPGSMIVSSDDTVDSTIDREGKPGGTVESGNGEDLTKVPLKRLSDEHEPEQRKKIKRRNQAIYAAVDDDDDDAA

SEQ ID NO: 8390 - protein, 509 aa, Homo sapiens
MQSWSRVYCSLAKRGHFNRISHGLQGLSAVPLRTYADQPIDADVTVIGSGPGGYVAAIKAAQLGFKTVCIEKNETLGGTCLNVGCIPSKALLNNSHYYHMAHGKDFASRGIEMSEVRLNLDKMMEQKSTAVKALTGGIAHLFKQNKVVHVNGYGKITGKNQVTATKADGGTQVIDTKNILIATGSEVTPFPGITIDEDTIVSSTGALSLKKVPEKMVVIGAGVIGVELGSVWQRLGADVTAVEFLGHVGGVGIDMEISKNFQRILQKQGFKFKLNTKVTGATKKSDGKIDVSIEAASGGKAEVITCDVLLVCIGRRPFTKNLGLEELGIELDPRGRIPVNTRFQTKIPNIYAIGDVVAGPMLAHKAEDEGIICVEGMAGGAVHIDYNCVPSVIYTHPEVAWVGKSEEQLKEEGIEYKVGKFPFAANSRAKTNADTDGMVKILGQKSTDRVLGAHILGPGAGEMVNEAALALEYGASCEDIARVCHAHPTLSEAFREANLAASFGKSINF

SEQ ID NO: 8391 - protein, 509 aa, Homo sapiens; identical to SEQ ID NO: 8390

SEQ ID NO: 8392 - protein, 782 aa, Homo sapiens
MSINLTVDIYIYLLSNARSVCGKQRSKQLYFLFSPKHYWRISHISLQRGFHTNIIRCKWTKSEAHSCSKHCYSPSNHGLHIGILKLSTSAPKGLTKVNICMSRIKSTLNSVSKAVFGNQNEMISRLAQFKPSSQILRKVSDSGWLKQKNIKQAIKSLKKYSDKSAEKSPFPEEKSHIIDKEEDIGKRSLFHYTSSITTKFGDSFYFLSNHINSYFKRKEKMSQQKENEHFRDKSELEDKKVEEGKLRSPDPGILAYKPGSESVHTVDKPTSPSAIPDVLQVSTKQSIANFLSRPTEGVQALVGGYIGGLVPKLKYDSKSQSEEQEEPAKTDQAVSKDRNAEEKKRLSLQREKIIARVSIDNRTRALVQALRRTTDPKLCITRVEELTFHLLEFPEGKGVAVKERIIPYLLRLRQIKDETLQAAVREILALIGYVDPVKGRGIRILSIDGGGTRGVVALQTLRKLVELTQKPVHQLFDYICGVSTGAILAFMLGLFHMPLDECEELYRKLGSDVFSQNVIVGTVKMSWSHAFYDSQTWENILKDRMGSALMIETARNPTCPKVAAVSTIVNRGITPKAFVFRNYGHFPGINSHYLGGCQYKMWQAIRASSAAPGYFAEYALGNDLHQDGGLLLNNPSALAMHECKCLWPDVPLECIVSLGTGRYESDVRNTVTYTSLKTKLSNVINSATDTEEVHIMLDGLLPPDTYFRFNPVMCENIPLDESRNEKLDQLQLEGLKYIERNEQKMKKVAKILSQEKTTLQKINDWIKLKTDMYEGLPFFSKL

SEQ ID NO: 8393 - protein, 246 aa, Homo sapiens
MAGYLKLVCVSFQRQGFHTVGSRCKNRTGAEHLWLTRHLRDPFVKAAKVESYRCRSAFKLLEVNERHQILRPGLRVLDCGAAPGAWSQVAVQKVNAAGTDPSSPVGFVLGVDLLHIFPLEGATFLCPADVTDPRTSQRILEVLPGRRADVILSDMAPNATGFRDLDHDRLISLCLTLLSVTPDILQPGGTFLCKTWAGSQSRRLQRRLTEEFQNVRIIKPEASRKESSEVYFLATQYHGRKGTVKQ

SEQ ID NO: 8394 - protein, 246 aa, Homo sapiens; identical to SEQ ID NO: 8393

SEQ ID NO: 8395 - protein, 185 aa, Homo sapiens [sequence omitted]

SEQ ID NO: 8396 - protein, 185 aa, Homo sapiens [sequence omitted]

SEQ ID NO: 8397 - protein, 119 aa, Homo sapiens [sequence omitted]

SEQ ID NO: 8398 - protein, 572 aa, Homo sapiens
MSYQGKKNIPRITSDRLLIKGGKIVNDDQSFYADIYMEDGLIKQIGENLIVPGGVKTIEAHSRMVIPGGIDVHTRFQMPDQGMTSADDFFQGTKAALAGGTTMIIDHVVPEPGTSLLAAFDQWREWADSKSCCDYSLHVDISEWHKGIQEEMEALVKDHGVNSFLVYMAFKDRFQLTDCQIYEVLSVIRDIGAIAQVHAENGDIIAEEQQRILDLGITGPEGHVLSRPEEVEAEAVNRAITIANQTNCPLYITKVMSKSSAEVIAQARKKGTVVYGEPITASLGTDGSHYWSKNWAKAAAFVTSPPLSPDPTTPDFLNSLLSCGDLQVTGSAHCTFNTAQKAVGKDNFTLIPEGTNGTEERMSVIWDKAVVTGKMDENQFVAVTSTNAAKVFNLYPRKGRIAVGSDADLVIWDPDSVKTISAKTHNSSLEYNIFEGMECRGSPLVVISQGKIVLEDGTLHVTEGSGRYIPRKPFPDFVYKRIKARSRLAELRGVPRGLYDGPVCEVSVTPKTVTPASSAKTSPAKQQAPPVRNLHQSGFSLSGAQIDDNIPRRTTQRIVAPPGGRANITSLG

SEQ ID NO: 8399 - protein, 572 aa, Homo sapiens; identical to SEQ ID NO: 8398

SEQ ID NO: 8400 - protein, 447 aa, Homo sapiens
MAGAGGGNDIQWCFSQVKGAVDDDVAEADIISTVEFNHSGELLATGDKGGRVVIFQQEQENKIQSHSRGEYNVYSTFQSHEPEFDYLKSLEIEEKINKIRWLPQKNAAQFLLSTNDKTIKLWKISERDKRPEGYNLKEEDGRYRDPTTVTTLRVPVFRPMDLMVEASPRRIFANAHTYHINSISINSDYETYLSADDLRINLWHLEITDRSFNIVDIKPANMEELTEVITAAEFHPNSCNTFVYSSSKGTIRLCDMRASALCDRHSKLFEEPEDPSNRSFFSEIISSISDVKFSHSGRYMMTRDYLSVKIWDLNMENRPVETYQVHEYLRSKLCSLYENDCIFDKFECCWNGSDSVVMTGSYNNFFRMFDRNTKRDITLEASRENNKPRTVLKPRKVCASGKRKKDEISVDSLDFNKKILHTAWHPKENIIAVATTNNLYIFQDKVN

SEQ ID NO: 8401 - protein, 436 aa, Homo sapiens
MAGAGGGNDIQWCFSQVKGAVDDDVAEADIISTVEFNHSGELLATGDKGGRVVIFQQEQENKIQSHSRGEYNVYSTFQSHEPEFDYLKSLEIEEKINKIRWLPQKNAAQFLLSTNDKTIKLWKISERDKRPEGYNLKEEDGRYRDPTTVTTLRVPVFRPMDLMVEASPRRIFANAHTYHINSISINSDYETYLSADDLRINLWHLEITDRSFNIVDIKPANMEELTEVITAAEFHPNSCNTFVYSSSKGTIRLCDMRASALCDRHSKLFEEPEDPSNRSFFSEIISSISDVKFSHSGRYMMTRDYLSVKIWDLNMENRPVETYQVHEYLRSKLCSLYENDCIFDKFECCWNGSDSVVMTGSYNNFFRMFDRNTKRDITLEASRENNKPRTVLKPRKVCASGKRKKDEISVDSLDFNKNIIAVATTNNLYIFQDKVN

SEQ ID NO: 8402 - protein, 110 aa, Homo sapiens
MDLMVEASPRRIFANAHTYHINSISINSDYETYLSADDLRINLWHLEITDRSFNIVDIKPANMEELTEVITAAEFHPNSCNTFVYSSSKGTIRLCDMRASALCDRHSKCA

SEQ ID NO: 8403 - protein, 476 aa, Homo sapiens [sequence omitted]

SEQ ID NO: 8404 - protein, 1043 aa, Homo sapiens [sequence omitted]

SEQ ID NO: 8405 - protein, 1319 aa, Homo sapiens [sequence omitted]

SEQ ID NO: 8406 - protein, 1070 aa, Homo sapiens
MCFSFIMPPAMADILDIWAVDSQIASDGSIPVDFLLPTGIYIQLEVPREATISYIKQMLWKQVHNYPMFNLLMDIDSYMFACVNQTAVYEELEDETRRLCDVRPFLPVLKLVTRSCDPGEKLDSKIGVLIGKGLHEFDSLKDPEVNEFRRKMRKFSEEKILSLVGLSWMDWLKQTYPPEHEPSIPENLEDKLYGGKLIVAVHFENCQDVFSFQVSPNMNPIKVNELAIQKRLTIHGKEDEVSPYDYVLQVSGRVEYVFGDHPLIQFQYIRNCVMNRALPHFILVECCKIKKMYEQEMIAIEAAINRNSSNLPLPLPPKKTRIISHVWENNNPFQIVLVKGNKLNTEETVKVHVRAGLFHGTELLCKTIVSSEVSGKNDHIWNEPLEFDINICDLPRMARLCFAVYAVLDKVKTKKSTKTINPSKYQTIRKAGKVHYPVAWVNTMVFDFKGQLRTGDIILHSWSSFPDELEEMLNPMGTVQTNPYTENATALHVKFPENKKQPYYYPPFDKIIEKAAEIASSDSANVSSRGGKKFLPVLKEILDRDPLSQLCENEMDLIWTLRQDCREIFPQSLPKLLLSIKWNKLEDVAQLQALLQIWPKLPPREALELLDFNYPDQYVREYAVGCLRQMSDEELSQYLLQLVQVLKYEPFLDCALSRFLLERALGNRRIGQFLFWHLRSEVHIPAVSVQFGVILEAYCRGSVGHMKVLSKQVEALNKLKTLNSLIKLNAVKLNRAKGKEAMHTCLKQSAYREALSDLQSPLNPCVILSELYVEKCKYMDSKMKPLWLVYNNKVFGEDSVGVIFKNGDDLRQDMLTLQMLRLMDLLWKEAGLDLRMLPYGCLATGDRSGLIEVVSTSETIADIQLNSSNVAAAAAFNKDALLNWLKEYNSGDDLDRAIEEFTLSCAGYCVASYVLGIGDRHSDNIMVKKTGQLFHIDFGHILGNFKSKFGIKRERVPFILTYDFIHVIQQGKTGNTEKFGRFRQCCEDAYLILRRHGNLFITLFALMLTAGLPELTSVKDIQYLKDSLALGKSEEEALKQFKQKFDEALRESWTTKVNWMAHTVRKDYRS

SEQ ID NO: 8407 - protein, 1070 aa, Homo sapiens; identical to SEQ ID NO: 8406

SEQ ID NO: 8408 - protein, 1070 aa, Homo sapiens; identical to SEQ ID NO: 8406

SEQ ID NO: 8409 - protein, 368 aa, Homo sapiens
MWNFRELSENSQQAANVLSGACGLQRGDRVAVVLPRVPEWWLVILGCIRAGLIFMPGTIQMKSTDILYRLQMSKAKAIVAGDEVIQEVDTVASECPSLRIKLLVSEKSCDGWLNFKKLLNEASTTHHCVETGSQEASAIYFTSGTSGLPKMAEHSYSSLGLKAKMDAGWTGLQASDIMWTISDTGWILNILCSLMEPWALGACTFVHLLPKFDPLVILKTLSSYPIKSMMGAPIVYRMLLQQDLSSYKFPHLQNCVTVGESLLPETLENWRAQTGLDIRESYGQTETGLTCMVSKTMKIKPGYMGTAASCYDVQIIDDKGNVLPPGTEGDIGIRVKPIRPIGIFSGYVVSSPCSMPLIFFRAMPGTLQ

SEQ ID NO: 8410 - protein, 600 aa, Homo sapiens [sequence omitted]

SEQ ID NO: 8411 - protein, 471 aa, Homo sapiens
MSGASSSEQNNNSYETKTPNLRMSEKKCSWASYMTNSPTLIVMIGLPARGKTYVSKKLTRYLNWIGVPTKVFNLGVYRREAVKSYKSYDFFRHDNEEAMKIRKQCALVALEDVKAYLTEENGQIAVFDATNTTRERRDMILNFAEQNSFKVFFVESVCDDPDVIAANILEVKVSSPDYPERNRENVMEDFLKRIECYKVTYRPLDPDNYDKDLSFIKVINVGQRFLVNRVQDYIQSKIVYYLMNIHVQPRTIYLCRHGESEFNLLGKIGGDSGLSVRGKQFAQALRKFLEEQEITDLKVWTSQLKRTIQTAESLGVPYEQWKILNEIDAGVCEEMTYAEIEKRYPEEFALRDQEKYLYRYPGGESYQDLVQRLEPVIMELERQGNVLVISHQAVMRCLLAYFLDKGADELPYLRCPLHTIFKLTPVAYGCKVETIKLNVEAVNTHRDKPTAAETTLAVRRRPSAASLMLPC

SEQ ID NO: 8412 - protein, 505 aa, Homo sapiens
MSGASSSEQNNNSYETKTPNLRMSEKKCSWASYMTNSPTLIVMIGLPARGKTYVSKKLTRYLNWIGVPTKVFNLGVYRREAVKSYKSYDFFRHDNEEAMKIRKQCALVALEDVKAYLTEENGQIAVFDATNTTRERRDMILNFAEQNSFKVFFVESVCDDPDVIAANILEVKVSSPDYPERNRENVMEDFLKRIECYKVTYRPLDPDNYDKDLSFIKVINVGQRFLVNRVQDYIQSKIVYYLMNIHVQPRTIYLCRHGESEFNLLGKIGGDSGLSVRGKQFAQALRKFLEEQEITDLKVWTSQLKRTIQTAESLGVPYEQWKILNEIDAGVCEEMTYAEIEKRYPEEFALRDQEKYLYRYPGGESYQDLVQRLEPVIMELERQGNVLVISHQAVMRCLLAYFLDKGADELPYLRCPLHTIFKLTPVAYGCKVETIKLNVEAVNTHRDKPTNNFPKNQTPVRMRRNSFTPLSSSNTIRRPRNYSVGSRPLKPLSPLRAQDMQEGAD

SEQ ID NO: 8413 - protein, 195 aa, Homo sapiens
MGQIEWAMWANEQALASGLILITGGIVATAGRFTQWYFGAYSIVAGVFVCLLEYPRGKRKKGSTMERWGQKYMTAVVKLFGPFTRNYYVRAVLHLLLSVPAGFLLATILGTACLAIASGIYLLAAVRGEQWTPIEPKPRERPQIGGTIKQPPSNPPPRPPAEARKKPSEEEAAAAAGGPPGGPQVNPIPVTDEVV

SEQ ID NO: 8414 - protein, 201 aa, Homo sapiens
APYRCGSPPSRGHLGGWGRGLGGAGFGRERRGGSARLAVSQPGSCRHGADRVGHVGQRTGAGVRPDPHHRGHRGHSWALHPVVLWCLLHCGGRVCVPAGVPPGEEEEGLHHGALGTEVHDRRGEAVRALYQELLCSGRPASPALGARRLPAGHHPWDRLPGHCERHLPTGEWRPLRSAPATPIPSPCPDTLGHAWPLKPAL

SEQ ID NO: 8415 - protein, 170 aa, Homo sapiens [sequence omitted]

SEQ ID NO: 8416 - protein, 348 aa, Homo sapiens
MAAGVAGWGVEAEEFEDAPDVEPLEPTLSNIIEQRSLKWIFVGGKGGVGKTTCSCSLAVQLSKGRESVLIISTDPAHNISDAFDQKFSKVPTKVKGYDNLFAMEIDPSLGVAELPDEFFEEDNMLSMGKKMMQEAMSAFPGIDEAMSYAEVMRLVKGMNFSVVVFDTAPTGHTLRLLNFPTIVERGLGRLMQIKNQISPFISQMCNMLGLGDMNADQLASKLEETLPVIRSVSEQFKDPEQTTFICVCIAEFLSLYETERLIQELAKCKIDTHNIIVNQLVFPDPEKPCKMCEARHKIQAKYLDQMEDLYEDFHIVKLPLLPHEVRGADKVNTFSALLLEPYKPPSAQ

SEQ ID NO: 8417 - protein, 348 aa, Homo sapiens; identical to SEQ ID NO: 8416

SEQ ID NO: 8418 - protein, 438 aa, Homo sapiens
MALRGVSVRLLSRGPGLHVLRTWVSSAAQTEKGGRTQSQLAKSSRPEFDWQDPLVLEEQLTTDEILIRDTFRTYCQERLMPRILLANRNEVFHREIISEMGELGVLGPTIKGYGCAGVSSVAYGLLARELERVDSGYRSAMSVQSSLVMHPIYAYGSEEQRQKYLPQLAKGELLGCFGLTEPNSGSDPSSMETRAHYNSSNKSYTLNGTKTWITNSPMADLFVVWARCEDGCIRGFLLEKGMRGLSAPRIQGKFSLRASATGMIIMDGVEVPEENVLPGASSLGGPFGCLNNARYGIAWGVLGASEFCLHTARQYALDRMQFGVPLARNQLIQKKLADMLTEITLGLHACLQLGRLKDQDKAAPEMVSLLKRNNCGKALDIARQARDMLGGNGISDEYHVIRHAMNLEAVNTYEGTHDIHALILGRAITGIQAFTASK

SEQ ID NO: 8419 - protein, 438 aa, Homo sapiens; identical to SEQ ID NO: 8418

SEQ ID NO: 8420 - protein, 428 aa, Homo sapiens [sequence omitted]

SEQ ID NO: 8421 - protein, 494 aa, Homo sapiens
MADGQVAELLLRRLEASDGGLDSAELAAELGMEHQAVVGAVKSLQALGEVIEAELRSTKHWELTAEGEEIAREGSHEARVFRSIPPEGLAQSELMRLPSGKVGFSKAMSNKWIRVDSMEDEVQRRLQLVRGGQAEKLGEKERSELRKRKLLAEVTLKTYWVSKGSAFSTSISKQETELSPEMISSGSWRDRPFKPYNFLAHGVLPDSGHLHPLLKVRSQFRQIFLEMGFTEMPTDNFIESSFWNFDALFQPQQHPARDQHDTFFLRDPAEALQLPMDYVQRVKRTHSQGGYGSQGYKYNWKLDEARKNLLRTHTTSASARALYRLAQKKPFTPVKYFSIDRVFRNETLDATHLAEFHQIEGVVADHGLTLGHLMGVLREFFTKLGITQLRFKPAYNPYTEPSMEVFSYHQGLKKWVEVGNSGVFRPEMLLPMGLPENVSVIAWGLSLERPTMIKYGINNIRELVGHKVNLQMVYDSPLCRLDAEPRPPPTQEAA

SEQ ID NO: 8422 - protein, 508 aa, Homo sapiens
MADGQVAELLLRRLEASDGGLDSAELAAELGMEHQAVVGAVKSLQALGEVIEAELRSTKHWELTAEGEEIAREGSHEARVFRSIPPEGLAQSELMRLPSGKVGFSKAMSNKWIRVDKSAADGPRVFRVVDSMEDEVQRRLQLVRGGQAEKLGEKERSELRKRKLLAEVTLKTYWVSKGSAFSTSISKQETELSPEMISSGSWRDRPFKPYNFLAHGVLPDSGHLHPLLKVRSQFRQIFLEMGFTEMPTDNFIESSFWNFDALFQPQQHPARDQHDTFFLRDPAEALQLPMDYVQRVKRTHSQGGYGSQGYKYNWKLDEARKNLLRTHTTSASARALYRLAQKKPFTPVKYFSIDRVFRNETLDATHLAEFHQIEGVVADHGLTLGHLMGVLREFFTKLGITQLRFKPAYNPYTEPSMEVFSYHQGLKKWVEVGNSGVFRPEMLLPMGLPENVSVIAWGLSLERPTMIKYGINNIRELVGHKVNLQMVYDSPLCRLDAEPRPPPTQEAA

SEQ ID NO: 8423 - protein, 348 aa, Homo sapiens
MIPLLLAALLCVPAGALTCYGDSGQPVDWFVVYKLPALRGSGEAAQRGLQYKYLDESSGGWRDGRALINSPEGAVGRSLQPLYRSNTSQLAFLLYNDQPPQPSKAQDSSMRGHTKGVLLLDHDGGFWLVHSVPNFPPPASSAAYSWPHSACTYGQTLLCKQLTYTYPWVYNYQLEGIFAQEFPDLENVVKGHHVSQEPWNSSITLTSQAGAVFQSFAKFSKFGDDLYSGWLAAALGTNLQVQFWHKTVGILPSNCSDIWQVLNVNQIAFPGPAGPSFNSTEDHSKWCVSPKGPWTCVGDMNRNQGEEQRGGGTLCAQLPALWKAFQPLVKNYQPCNGMARKPSRAYKI

SEQ ID NO: 8424 - protein, 360 aa, Homo sapiens
MIPLLLAALLCVPAGALTCYGDSGQPVDWFVVYKLPALRGSGEAAQRGLQYKYLDESSGGWRDGRALINSPEGAVGRSLQPLYRSNTSQLAFLLYNDQPPQPSKAQDSSMRGHTKGVLLLDHDGGFWLVHSVPNFPPPASSAAYSWPHSACTYGQTLLCVSFPFAQFSKMGKQLTYTYPWVYNYQLEGIFAQEFPDLENVVKGHHVSQEPWNSSITLTSQAGAVFQSFAKFSKFGDDLYSGWLAAALGTNLQVQFWHKTVGILPSNCSDIWQVLNVNQIAFPGPAGPSFNSTEDHSKWCVSPKGPWTCVGDMNRNQGEEQRGGGTLCAQLPALWKAFQPLVKNYQPCNGMARKPSRAYKI

SEQ ID NO: 8425 - protein, 360 aa, Homo sapiens; identical to SEQ ID NO: 8424

SEQ ID NO: 8426 - protein, 142 aa, Homo sapiens
MASGNARIGKPAPDFKATAVVDGAFKEVKLSDYKGKYVVLFFYPLDFTFVCPTEIIAFSNRAEDFRKLGCEVLGVSVDSQFTHLAWYEQGPKREVAAKLTPSGPSSVASWPLLNLWNLRFPIVKIMETLPPKSLRMMTVISI

SEQ ID NO: 8427 - protein, 198 aa, Homo sapiens
MASGNARIGKPAPDFKATAVVDGAFKEVKLSDYKGKYVVLFFYPLDFTFVCPTEIIAFSNRAEDFRKLGCEVLGVSVDSQFTHLAWINTPRKEGGLGPLNIPLLADVTRRLSEDYGVLKTDEGIAYRGLFIIDGKGVLRQITVNDLPVGRSVDEALRLVQAFQYTDEHGEVCPAGWKPGSDTIKPNVDDSKEYFSKHN

SEQ ID NO: 8428 - protein, 299 aa, Homo sapiens
MDLSELERDNTGRCRLSSPVPAVCRKEPCVLGVDEAGRGPVLGPMVYAICYCPLPRLADLEALKVADSKTLLESERERLFAKMEDTDFVGWALDVLSPNLISTSMLGRVKYNLNSLSHDTATGLIQYALDQGVNVTQVFVDTVGMPETYQARLQQSFPGIEVTVKAKADALYPVVSAASICAKVARDQAVKKWQFVEKLQDLDTDYGSGYPNDPKTKAWLKEHVEPVFGFPQFVRFSWRTAQTILEKEAEDVIWEDSASENQEGLRKITSYFLNEGSQARPRSSHRYFLERGLESATSL

SEQ ID NO: 8429 - protein, 315 aa, Homo sapiens
MAFPEPKPRPPELPQKRLKTLDCGQGAVRAVRFNVDGNYCLTCGSDKTLKLWNPLRGTLLRTYSGHGYEVLDAAGSFDNSSLCSGGGDKAVVLWDVASGQVVRKFRGHAGKVNTVQFNEEATVILSGSIDSSIRCWDCRSRRPEPVQTLDEARDGVSSVKVSDHEILAGSVDGRVRRYDLRMGQLFSDYVGSPITCTCFSRDGQCTLVSSLDSTLRLLDKDTGELLGEYKGHKNQEYKLDCCLSERDTHVVSCSEDGKVFFWDLVEGALALALPVGSGVVQSLAYHPTEPCLLTAMGGSVQCWREEAYEAEDGAG

SEQ ID NO: 8430 - protein, 344 aa, Homo sapiens [sequence omitted]

SEQ ID NO: 8431 - protein, 71 aa, Homo sapiens
MAFPEPKPRPPELPQKRLKTLDCGQGAVRAVRFNVDGNYCLTCGSDKTLKLWNPLRGTLLRTYSGHGYELL

SEQ ID NO: 8432 - protein, 741 aa, Homo sapiens
MRIRGSSGTLSRINMLRIPVRKALVGLSKSPKGCVRTTATAASNLIEVFVDGQSVMVEPGTTVLQACEKVGMQIPRFCYHERLSVAGNCRMCLVEIEKAPKVVAACAMPVMKGWNILTNSEKSKKAREGVMEFLLANHPLDCPICDQGGECDLQDQSMMFGNDRSRFLEGKRAVEDKNIGPLVKTIMTRCIQCTRCIRFASEIAGVDDLGTTGRGNDMQVGTYIEKMFMSELSGNIIDICPVGALTSKPYAFTARPWETRKTESIDVMDAVGSNIVVSTRTGEVMRILPRMHEDINEEWISDKTRFAYDGLKRQRLTEPMVRNEKGLLTYTSWEDALSRVAGMLQSFQGKDVAAIAGGLVDAEALVALKDLLNRVDSDTLCTEEVFPTAGAGTDLRSNYLLNTTIAGVEEADVVLLVGTNPRFEAPLFNARIRKSWLHNDLKVALIGSPVDLTYTYDHLGDSPKILQDIASGSHPFSQVLKEAKKPMVVLGSSALQRNDGAAILAAVSSIAQKIRMTSGVTGDWKVMNILHRIASQVAALDLGYKPGVEAIRKNPPKVLFLLGADGGCITRQDLPKDCFIIYQGHHGDVGAPIADVILPGAAYTEKSATYVNTEGRAQQTKVAVTPPGLAREDWKIIRALSEIAGMTLPYDTLDQVRNRLEEVSPNLVRYDDIEGANYFQQANELSKLVNQQLLADPLVPPQLTIKDFYMTDSISRASQTMAKCVKAVTEGAQAVEEPSIC

SEQ ID NO: 8433 - protein, 727 aa, Homo sapiens
MLRIPVRKALVGLSKSPKGCVRTTATAASNLIEVFVDGQSVMVEPGTTVLQACEKVGMQIPRFCYHERLSVAGNCRMCLVEIEKAPKVVAACAMPVMKGWNILTNSEKSKKAREGVMEFLLANHPLDCPICDQGGECDLQDQSMMFGNDRSRFLEGKRAVEDKNIGPLVKTIMTRCIQCTRCIRFASEIAGVDDLGTTGRGNDMQVGTYIEKMFMSELSGNIIDICPVGALTSKPYAFTARPWETRKTESIDVMDAVGSNIVVSTRTGEVMRILPRMHEDINEEWISDKTRFAYDGLKRQRLTEPMVRNEKGLLTYTSWEDALSRVAGMLQSFQGKDVAAIAGGLVDAEALVALKDLLNRVDSDTLCTEEVFPTAGAGTDLRSNYLLNTTIAGVEEADVVLLVGTNPRFEAPLFNARIRKSWLHNDLKVALIGSPVDLTYTYDHLGDSPKILQDIASGSHPFSQVLKEAKKPMVVLGSSALQRNDGAAILAAVSSIAQKIRMTSGVTGDWKVMNILHRIASQVAALDLGYKPGVEAIRKNPPKVLFLLGADGGCITRQDLPKDCFIIYQGHHGDVGAPIADVILPGAAYTEKSATYVNTEGRAQQTKVAVTPPGLAREDWKIIRALSEIAGMTLPYDTLDQVRNRLEEVSPNLVRYDDIEGANYFQQANELSKLVNQQLLADPLVPPQLTIKDFYMTDSISRASQTMAKCVKAVTEGAQAVEEPSIC

SEQ ID NO: 8434 - protein, 341 aa, Homo sapiens
MEELLRRELGCSSVRATGHSGGGCISQGRSYDTDQGRVFVKVNPKAEARRMFEGEMASLTAILKTNTVKVPKPIKVLDAPGGGSVLVMEHMDMRHLSSHAAKLGAQLADLHLDNKKLGEMRLKEAGTVGRGGGQEERPFVARFGFDVVTCCGYLPQVNDWQEDWVVFYARQRIQPQMDMVEKESGDREALQLWSALQLKIPDLFRDLEIIPALLHGDLWGGNVAEDSSGPVIFDPASFYGHSEYELAIAGMFGGFSSSFYSAYHGKIPKAPGFEKRLQLYQLFHYLNHWNHFGSGYRGSSLNIMRNLVKAPQQKAEQNRVPLECWFLCGVRKDRECGQFPT

SEQ ID NO: 8435 - protein, 309 aa, Homo sapiens
MEELLRRELGCSSVRATGHSGGGCISQGRSYDTDQGRVFVKVNPKAEARRMFEGEMASLTAILKTNTVKVPKPIKVLDAPGGGSVLVMEHMDMRHLSSHAAKLGAQLADLHLDNKKLGEMRLKEAGTVGRGGGQEERPFVARFGFDVVTCCGYLPQVNDWQEDWVVFYARQRIQPQMDMVEKESGDREALQLWSALQLKIPDLFRDLEIIPALLHGDLWGGNVAEDSSGPVIFDPASFYGHSEYELAIAGMFGGFSSSFYSAYHGKIPKAPGFEKRLQLYQLFHYLNHWNHFGSGYRGSSLNIMRNLVK

SEQ ID NO: 8436 - protein, 742 aa, Homo sapiens
MHVYSLGMTLYWSAGFHVPPHQPLQLCEPLHSILLTMCEDQPHRRCTLQSVLEACRVHEKEVSVYPAPAGLHIRRLVGLVLGTISEVSREPCFSTKKGKSYLALRDLCVVLLNGQHLEVKCDVESTVGAVFNAVTSFANLEELTYFGLAYMKSKEFFFLDSETRLCKIAPEGWREQPQKTSMNTFTLFLRIKFFVSHYGLLQHSLTRHQFYLQLRKDILEERLYCNEEILLQLGVLALQAEFGNYPKEVESKPYFHVEDYIPASLIERMTALRVQVEVSEMHRLSSALWGEDAELKFLRVTQQLPEYGVLVHQVFSEKRRPEEEMALGICAKGVIVYEVKNNSRIAMLRFQWRETGKISTYQKKFTITSSVTGKKHTFVTDSAKTSKYLLDLCSAQHGFNAQMGSGQNRRKSFIAEPGREIVRVTLKRDPHRGFGFVINEGEYSGQADPGIFISSIIPGGPAEKAKTIKPGGQILALNHISLEGFTFNMAVRMIQNSPDNIELIISQSKSSCPPSPPEISAGEIYFVELVKEDGTLGFSVTGGINTSVPYGGIYVKSIVPGGPAAKEGQILQGDRLLQVDGVILCGLTHKQAVQCLKGPGQVSGLLLTSFPSFRNFPEQHQKLKSPLGGREAGKKQDFFFVSPKFEVKLKKNANGLGFSFVQMEKESCSHLKSDLVRIKRLFPGQPAEENGAIAAGDIILAVNGRSTEGLIFQEVLHLLRGAPQEVTLLLCRPPPGALPELE

SEQ ID NO: 8437 - protein, 289 aa, Homo sapiens
MRVKDPTKALPEKAKRSKRPTVPHDEDSSDDIAVGLTCQHVSHAISVNHVKRAIAENLWSVCSECLKERRFYDGQLVLTSDIWLCLKCGFQGCGKNSESQHSLKHFKSSRTEPHCIIINLSTWIIWCYECDEKLSTHCNKKVLAQIVDFLQKHASKTQTSAFSRIMKLCEEKCETDEIQKGGKCRNLSVRGITNLGNTCFFNAVMQNLAQTYTLTDLMNEIKESSTKLKIFPSSDSQLDPLVVELSRPGPLTSALFLFLHSMKETEKGPLSPKVLFNQLCQKWVHLHLI

SEQ ID NO: 8438 - protein, 345 aa, Homo sapiens
MRVKDPTKALPEKAKRSKRPTVPHDEDSSDDIAVGLTCQHVSHAISVNHVKRAIAENLWSVCSECLKERRFYDGQLVLTSDIWLCLKCGFQGCGKNSESQHSLKHFKSSRTEPHCIIINLSTWIIWCYECDEKLSTHCNKKVLAQIVDFLQKHASKTQTSAFSRIMKLCEEKCETDEIQKGGKCRNLSVRGITNLGNTCFFNAVMQNLAQTYTLTDLMNEIKESSTKLKIFPSSDSQLDPLVVELSRPGPLTSALFLFLHSMKETEKGPLSPKVLFNQLCQKAPRFKDFQQQDSQELLHYLLDAVRTEETKRIQASILKAFNNPTTKTADDETRKKVKDVTRQNV

SEQ ID NO: 8439 - protein, 289 aa, Homo sapiens; identical to SEQ ID NO: 8437

SEQ ID NO: 8440 - protein, 163 aa, Homo sapiens
MRVKDPTKALPEKAKRSKRPTVPHDEDSSDDIAGAFSRIMKLCEEKCETDEIQKGGKCRNLSVRGITNLGNTCFFNAVMQNLAQTYTLTDLMNEIKESSTKLKIFPSSDSQLDPLVVELSRPGPLTSALFLFLHSMKETEKGPLSPKVLFNQLCQKWVHLHLI

SEQ ID NO: 8441 - protein, 88 aa, Homo sapiens [sequence omitted]

SEQ ID NO: 8442 - protein, 194 aa, Homo sapiens [sequence omitted]

SEQ ID NO: 8443 - protein, 139 aa, Homo sapiens
MKVLLLKDAKEDDCGQDPYIRELGLYGLEATLIPVLSFEFLSLPSFSEKLSHPEDYGGLIFTSPRAVEAAELCLEQNNKTEVWERSLKEKWNAKSVYVVGNATASLVSKIGLDTEGETCGNAEKLAEYICSSEEVKGIF

SEQ ID NO: 8444 - protein, 139 aa, Homo sapiens; identical to SEQ ID NO: 8443

SEQ ID NO: 8445 - protein, 265 aa, Homo sapiens
MKVLLLKDAKEDDCGQDPYIRELGLYGLEATLIPVLSFEFLSLPSFSEKLSHPEDYGGLIFTSPRAVEAAELCLEQNNKTEVWERSLKEKWNAKSVYVVGNATASLVSKIGLDTEGETCGNAEKLAEYICSRESSALPLLFPCGNLKREILPKALKDKGIAMESITVYQTVAHPGIQGNLNSYYSQQGVPASITFFSPSGLTYSLKHIQELSGDNIDQIKFAAIGPTTARALAAQGLPVSCTAESPTPQALATGIRKALQPHGCC

SEQ ID NO: 8446 - protein, 210 aa, Homo sapiens
MKVLLLKDAKEDDCGQDPYIRELGLYGLEATLIPVLSFEFLSLPSFSEKLSHPEDYGGLIFTSPRAVEAAELCLEQNNKTEVWERSLKEKWNAKSVYVVGNATASLVSKIGLDTEGETCGNAEKLAEYICSNLKREILPKALKDKGIAMESITVYQTVAHPGIQGNLNSYYSQQGVPASITFFSPSGLTYSLKHIQELSGDNIDQIKKHP

SEQ ID NO: 8447 - protein, 242 aa, Homo sapiens
MKVLLLKDAKEDDCGQDPYIRELGLYGLEATLIPVLSFEFLSLPSFSEKLSHPEDYGGLIFTSPRAVEAAELCLEQNNKTEVWERSLKEKWNAKSVYVVGNATASLVSKIGLDTEGETCGNAEKLAEYICSRESSALPLLFPCGNLKREILPKALKDKGIAMESITVYQTVAHPGIQGNLNSYYSQQGVPASITFFSPSGLTYSLKHIQELSGDNIDQIKMRRWRPERMGHGPRSLSCGAGI

SEQ ID NO: 8448 - protein, 265 aa, Homo sapiens; identical to SEQ ID NO: 8445

SEQ ID NO: 8449 - protein, 223 aa, Homo sapiens
MKVLLLKDAKEDDCGQDPYIRELGLYGLEATLIPVLSFEFLSLPSFSEKLSHPEDYGGLIFTSPRAVEAAELCLEQNNKTEVWERSLKEKWNAKSVYVVGNATASLVSKIGLDTEGETCGNAEKLAEYICSRESSALPLLFPCGNLKREILPKALKDKGIAMESITVYQTVAHPGIQGNLNSYYSQQGVPASITFFSPSGLTYSLKHIQELSGDNIDQIKKHP

SEQ ID NO: 8450 - protein, 265 aa, Homo sapiens [sequence omitted]

SEQ ID NO: 8451 - protein, 167 aa, Homo sapiens
MVPASASGEASGSLQSWQKAKEKQACHLELTDLQRDPPAQCSAGPVGDDLFHWQATIMGPNDSPYQGGVFFLTIHFPTDYPFKPPKVAFTTKIYHPNINSNGSICLDILRSQWSPALTVSKVLLSICSLLCDPNPDDPLVPEIAHTYKADREKYNRLAREWTQKYAM

SEQ ID NO: 8452 - protein, 129 aa, Homo sapiens
  VARIANT (1)...(129): Xaa = Any Amino Acid
MTNDSPYQGGVFFLTIHFPTDYPFKPPKSFALVAQDGVQWRDLGSPQHPPPRFKQFSCLSLPSSWDYRPAPPCPANFVFLIEMGFLHVEAGLELLTSGDPPVSASQSAGITGVSHHAWPSVWFSVLVIX

SEQ ID NO: 8453 - protein, 109 aa, Homo sapiens
MTNDSPYQGGVFFLTIHFPTDYPFKPPKVAFTTKIYHPNINSNGSICLDILRSQWSPALTVSKVLLSICSLLCDPNPDDPLVPEIAHTYKADREKYNRLAREWTQKYAM

SEQ ID NO: 8454 - protein, 147 aa, Homo sapiens
MALKRIQKELTDLQRDPPAQCSAGPVGDDLFHWQATIMGPNDSPYQGGVFFLTIHFPTDYPFKPPKVAFTTKIYHPNINSNGSICLDILRSQWSPALTVSKVLLSICSLLCDPNPDDPLVPEIAHTYKADREKYNRLAREWTQKYAM

SEQ ID NO: 8455 - protein, 120 aa, Homo sapiens
MALKRIQKELTDLQRDPPAQCSAGPVGDDLFHWQATIMGPNDSPYQGGVFFLTIHFPTDYPFKPPKSFALVAQDGVQWRDLGSPQHPPPRLLSQPKFITLISTAMAASALISCGLSGLQR

SEQ ID NO: 8456 - protein, 83 aa, Homo sapiens [sequence omitted]

SEQ ID NO: 8457 - protein, 147 aa, Homo sapiens; identical to SEQ ID NO: 8454

SEQ ID NO: 8458 - protein, 221 aa, Homo sapiens
MEVLCKEMVTFLDKLGLSQAVFIGHDWGGMLVWYMALFYPERVRAVASLNTPFIPANPNMSPLESIKANPVFDYQLYFQEPGVAEAELEQNLSRTFKSLFRASDESVLSMHKVCEAGGLFVNSPEEPSLSRMVTEEEIQFYVQQFKKSGFRGPLNWYRNMERNWKWACKSLGRKILIPALMVTAEKDFVLVPQMSQHMEDWIPHLKRGHIEDCGHWTQMDK

SEQ ID NO: 8459 - protein, 568 aa, Homo sapiens
MTLRAAVFDLDGVLALPAVFGVLGRTEEALALPSSGGWKSKIKMSAGGLLNDAFQKGGPEGATTRLMKGEITLSQWIPLMEENCRKCSETAKVCLPKNFSIKEIFDKAISARKINRPMLQAALMLRKKGFTTAILTNTWLDDRAERDGLAQLMCELKMHFDFLIESCQVGMVKPEPQIYKFLLDTLKASPSEVVFLDDIGANLKPARDLGMVTILVQDTDTALKELEKVTGIQLLNTPAPLPTSCNPSDMSHGYVTVKPRVRLHFVELGSGPAVCLCHGFPESWYSWRYQIPALAQAGYRVLAMDMKGYGESSAPPEIEEYCMEVLCKEMVTFLDKLGLSQAVFIGHDWGGMLVWYMALFYPERVRAVASLNTPFIPANPNMSPLESIKANPVFDYQLYFQEPGVAEAELEQNLSRTFKSLFRASDESVLSMHKVCEAGGLFVNSPEEPSLSRMVTEEEIQFYVQQFKKSGFRGPLNWYRNMERNWKWACKSLGRKILIPALMVTAEKDFVLVPQMSQHMEDWIPHLKRGHIEDCGHWTQMDKPTEVNQILIKWLDSDARNPPVVSKM

SEQ ID NO: 8460 - protein, 555 aa, Homo sapiens
MTLRAAVFDLDGVLALPAVFGVLGRTEEALALPRGLLNDAFQKGGPEGATTRLMKGEITLSQWIPLMEENCRKCSETAKVCLPKNFSIKEIFDKAISARKINRPMLQAALMLRKKGFTTAILTNTWLDDRAERDGLAQLMCELKMHFDFLIESCQVGMVKPEPQIYKFLLDTLKASPSEVVFLDDIGANLKPARDLGMVTILVQDTDTALKELEKVTGIQLLNTPAPLPTSCNPSDMSHGYVTVKPRVRLHFVELGSGPAVCLCHGFPESWYSWRYQIPALAQAGYRVLAMDMKGYGESSAPPEIEEYCMEVLCKEMVTFLDKLGLSQAVFIGHDWGGMLVWYMALFYPERVRAVASLNTPFIPANPNMSPLESIKANPVFDYQLYFQEPGVAEAELEQNLSRTFKSLFRASDESVLSMHKVCEAGGLFVNSPEEPSLSRMVTEEEIQFYVQQFKKSGFRGPLNWYRNMERNWKWACKSLGRKILIPALMVTAEKDFVLVPQMSQHMEDWIPHLKRGHIEDCGHWTQMDKPTEVNQILIKWLDSDARNPPVVSKM

SEQ ID NO: 8461 - protein, 369 aa, Homo sapiens [sequence omitted]

SEQ ID NO: 8462 - protein, 455 aa, Homo sapiens
MRQKRKGDLSPAELMMLTIGDVIKQLIEAHEQGKDIDLNKVKTKTAAKYGLSAQPRLVDIIAAVPPQYRKVLMPKLKAKPIRTASGIAVVAVMCKPHRCPHISFTGNICVYCPGGPDSDFEYSTQSYTGYEPTSMRAIRARYDPFLQTRHRIEQLKQLGHSVDKVEFIVMGGTFMALPEEYRDYFIRNLHDALSGHTSNNIYEAVKYSERSLTKCIGITIETRPDYCMKRHLSDMLTYGCTRLEIGVQSVYEDVARDTNRGHTVKAVCESFHLAKDSGFKVVAHMMPDLPNVGLERDIEQFTEFFENPAFRPDGLKLYPTLVIRGTGLYELWKSGRYKSYSPSDLVELVARILALVPPWTRVYRVQRDIPMPLVSSGVEHGNLRELALARMKDLGIQCRDVRTREVGIQEIHHKVRPYQVELVRRDYVANGGWETFLSYEDPDQDILIGLLRLRK

SEQ ID NO: 8463 - protein, 547 aa, Homo sapiens
MRQKRKGDLSPAELMMLTIGDVIKQLIEAHEQGKDIDLNKVKTKTAAKYGLSAQPRLVDIIAAVPPQYRKVLMPKLKAKPIRTASGIAVVAVMCKPHRCPHISFTGNICVYCPGGPDSDFEYSTQSYTGYEPTSMRAIRARYDPFLQTRHRIEQLKQLGHSVDKVEFIVMGGTFMALPEEYRDYFIRNLHDALSGHTSNNIYEAVKYSERSLTKCIGITIETRPDYCMKRHLSDMLTYGCTRLEIGVQSVYEDVARDTNRGHTVKAVCESFHLAKDSGFKVVAHMMPDLPNVGLERDIEQFTEFFENPAFRPDGLKLYPTLVIRGTGLYELWKSGRYKSYSPSDLVELVARILALVPPWTRVYRVQRDIPMPLVSSGVEHGNLRELALARMKDLGIQCRDVRTREVGIQEIHHKVRPYQVELVRRDYVANGGWETFLSYEDPDQDILIGLLRLRKCSEETFRFELGGGVSIVRELHVYGSVVPVSSRDPTKFQHQGFGMLLMEEAERIAREEHGSGKIAVISGVGTRNYYRKIGYRLQGPYMVKMLK

SEQ ID NO: 8464 - protein, 302 aa, Homo sapiens
MILLNNSHKLLALYKSLARSIPESLKVYGSVYHINHGNPFNMEVLVDSWPEYQMVIIRPQKQEMTDDMDSYTNVYRMFSKEPQKSEEVLKNCEIVNWKQRLQIQGLQESLGEGIRVATFSKSVKVEHSRALLLVTEDILKLNASSKSKLGSWAETGHPDDEFESETPNFKYAQLDVSYSGLVNDNWKRGKNERSLHYIKRCIEDLPAACMLGPEGVPVSWVTMDPSCEVGMAYSMEKYRRTGNMARVMVRYMKYLRQKNIPFYISVLEENEDSRRFVGQFGFFEASCEWHQWTCYPQNLVPF

SEQ ID NO: 8465 - protein, 302 aa, Homo sapiens; identical to SEQ ID NO: 8464

SEQ ID NO: 8466 - protein, 226 aa, Homo sapiens [sequence omitted]

SEQ ID NO: 8467 - protein, 527 aa, Homo sapiens
MVYVKDLKEKVPKVWKKYKKQVWQGSGFLARKAFGHFTNSKGYTLAFSKVFSSFRYLKGFEEFVLNIETLSFFLKGSRTEASHKMILLNNSEQLLALFKSLARSIPESLKVKEQWEVYGSLFHINHGNPFNMEVLVDSWPGYQMVIIRPQKQEMTDDMDSYTNVYRIFSKDPQKSQEVLKNSEIINWKQKLQIQGFQESLGEGIKAAAFSNSVKVEHSRALLFVTEDILKLYATNKSKLGSWAETGHPDDELESETPNFKYAQLNVSYSGLVNDNWKLGMNKRSLHYIKRCLGALPAVCMLGPEGVPVSWVTMDPSCEIGMGYSVEKYRRRGNATRMMIQMSVLSDTKCFYSSTVQPPEPDVLVPRVLVPGQIPGDFTQTRVQPALGLEVRWSLSLCIIRVELSLLLPKDPAWMLIPPPSPTPQLQNGSNCHTPKQLGWLFALQLPPARCPSWQSKVWESAKAPRASHSAQLPRSSSLASTGRQGTPMRRKEQGSDCLVYPGTRELSPWTEWRGEGITETGKGHPDK

SEQ ID NO: 8468 - protein, 313 aa, Homo sapiens
MKSPPLLSPCLSWKRMAGIFFLPFISSGFAPRFKQEENFMLGRAHPSQPRFNWSHLTPLELKNRSVGLGTESTGRGKPHFTLEGHKFLIFGGSIHYFRVPREYWRDRLLKLKACGFNTVTTYVPWNLHEPERGKFDFSGNLDLEAFVLMAAEIGLWVILRPGPYICSEMDLGGLPSWLLQDPRLLLRTTNKSFIEAVEKYFDHLIPRVIPLQYRQAGPVIAVQVENEYGSFNKDKTYMPYLHKALLRRGIVELLLTSDGEKHVLSGHTKGVLAAINLQKLHQDTFNQLHKVQGASIDAGLLSDASQAATSSSL

SEQ ID NO: 8469 - protein, 159 aa, Homo sapiens [sequence omitted]

SEQ ID NO: 8470 - protein, 501 aa, Homo sapiens
MSSSGTPDLPVLLTDLKIQYTKIFINNEWHDSVSGKKFPVFNPATEEELCQVEEGDKEDVDKAVKAARQAFQIGSPWRTMDASERGRLLYKLADLIERDRLLLATMESMNGGKLYSNAYLNDLAGCIKTLRYCAGWADKIQGRTIPIDGNFFTYTRHEPIGVCGQIIPWNFPLVMLIWKIGPALSCGNTVVVKPAEQTPLTALHVASLIKEAGFPPGVVNIVPGYGPTAGAAISSHMDIDKVAFTGSTEVGKLIKEAAGKSNLKRVTLELGGKSPCIVLADADLDNAVEFAHHGVFYHQGQCCIAASRIFVEESIYDEFVRRSVERAKKYILGNPLTPGVTQGPQIDKEQYDKILDLIESGKKEGAKLECGGGPWGNKGYFVQPTVFSNVTDEMRIAKEEIFGPVQQIMKFKSLDDVIKRANNTFYGLSAGVFTKDIDKAITISSALQAGTVWVNCYGVVSAQCPFGGFKMSGNGRELGEYGFHEYTEVKTVTVKISQKNS

SEQ ID NO: 8471 - protein, 501 aa, Homo sapiens; identical to SEQ ID NO: 8470

SEQ ID NO: 8472 - protein, 501 aa, Homo sapiens; identical to SEQ ID NO: 8470

SEQ ID NO: 8473 - protein, 501 aa, Homo sapiens; identical to SEQ ID NO: 8470

SEQ ID NO: 8474 - protein, 425 aa, Homo sapiens
MNYARFITAASAARNPSPIRTMTDILSRGPKSMISLAGGLPNPNMFPFKTAVITVENGKTIQFGEEMMKRALQYSPSAGIPELLSWLKQLQIKLHNPPTIHYPPSQGQMDLCVTSGSQQGLCKVFEMIINPGDNVLLDEPAYSGTLQSLHPLGCNIINVASDESGIVPDSLRDILSRWKPEDAKNPQKNTPKFLYTVPNGNNPTGNSLTSERKKEIYELARKYDFLIIEDDPYYFLQFNKFRVPTFLSMDVDGRVIRADSFSKIISSGLRIGFLTGPKPLIERVILHIQVSTLHPSTFNQLMISQLLHEWGEEGFMAHVDRVIDFYSNQKDAILAAADKWLTGLAEWHVPAAGMFLWIKVKGINDVKELIEEKAVKMGVLMLPGNAFYVDSSAPSPYLRASFSSASPEQMDVAFQVLAQLIKESL

SEQ ID NO: 8475 - protein, 425 aa, Homo sapiens; identical to SEQ ID NO: 8474

SEQ ID NO: 8476 - protein, 875 aa, Homo sapiens
MGKTANSPGSGARPDPVRSFNRWKKKHSHRQNKKKQLRKQLKKPEWQVERESISRLMQNYEKINVNEITRFSDFPLSKKTLKGLQEAQYRLVTEIQKQTIGLALQGKDVLGAAKTGSGKTLAFLVPVLEALYRLQWTSTDGLGVLIISPTRELAYQTFEVLRKVGKNHDFSAGLIIGGKDLKHEAERINNINILVCTPGRLLQHMDETVSFHATDLQMLVLDEADRILDMGFADTMNAVIENLPKKRQTLLFSATQTKSVKDLARLSLKNPEYVWVHEKAKYSTPATLEQNYIVCELQQKISVLYSFLRSHLKKKSIVFFSSCKEVQYLYRVFCRLRPGVSILALHGRQQQMRRMEVYNEFVRKRAAVLFATDIAARGLDFPAVNWVLQFDCPEDANTYIHRAGRTARYKEDGEALLILLPSEKAMVQQLLQKKVPVKEIKINPEKLIDVQKKLESILAQDQDLKERAQRCFVSYVRSVYLMKDKEVFDVSKLPIPEYALSLGLAVAPRVRFLQKMQKQPTKELVRSQADKVIEPRAPSLTNDEVEEFRAYFNEKMSILQKGGKRLEGTEHRQDNDTGNEEQEEEEDDEEEMEEKLAKAKGSQAPSLPNTSEAQKIKEVPTQFLDRDEEEEDADFLKVKRHNVFGLDLKDEKTLQKKEPSKSSIKKKMTKVAEAKKVMKRNFKVNKKITFTDEGELVQQWPQMQKSAIKDAEEDDDTGGINLHKAKERLQEEDKFDKEEYRKKIKAKHREKRLKEREARREANKRQAKAKDEEEAFLDWSDDDDDDDDGFDPSTLPDPDKYRSSEDSDSEDMENKISDTKKKQGMKKRSNSEVEDVGPTSHNRKKARWDTLEPLDTGLSLAEDEELVLHLLRSQS

SEQ ID NO: 8477 - protein, 308 aa, Homo sapiens
MNPIVVVHGGGAGPISKDRKERVHQGMVRAATVGYGILREGGSAVDAVEGAVVALEDDPEFNAGCGSVLNTNGEVEMDASIMDGKDLSAGAVSAVQCIANPIKLARLVMEKTPHCFLTDQGAAQFAAAMGVPEIPGEKLVTERNKKRLEKEKHEKGAQKTDCQKNLGTVGAVALDCKGNVAYATSTGGIVNKMVGRVGDSPCLGAGGYADNDIGAVSTTGHGESILKVNLARLTLFHIEQGKTVEEAADLSLGYMKSRVKGLGGLIVVSKTGDWVAKWTSTSMPWAAAKDGKLHFGIDPDDTTITDLP

SEQ ID NO: 8478 - protein, 308 aa, Homo sapiens; identical to SEQ ID NO: 8477

SEQ ID NO: 8479 - protein, 232 aa, Homo sapiens
MDASIMDGKDLSAGAVSAVQCIANPIKLARLVMEKTPHCFLTDQGAAQFAAAMGVPEIPGEKLVTERNKKRLEKEKHEKGAQKTDCQKNLGTVGAVALDCKGNVAYATSTGGIVNKMVGRVGDSPCLGAGGYADNDIGAVSTTGHGESILKVNLARLTLFHIEQGKTVEEAADLSLGYMKSRVKGLGGLIVVSKTGDWVAKWTSTSMPWAAAKDGKLHFGIDPDDTTITDLP

SEQ ID NO: 8480 - protein, 308 aa, Homo sapiens; identical to SEQ ID NO: 8477

SEQ ID NO: 8481 - protein, 419 aa, Homo sapiens
MSFIPVAEDSDFPIHNLPYGVFSTRGDPRPRIGVAIGDQILDLSIIKHLFTGPVLSKHQDVFNQPTLNSFMGLGQAAWKEARVFLQNLLSVSQARLRDDTELRKCAFISQASATMHLPATIGDYTDFYSSRQHATNVGIMFRDKENALMPNWLHLPVGYHGRASSVVVSGTPIRRPMGQMKPDDSKPPVYGACKLLDMELEMAFFVGPGNRLGEPIPISKAHEHIFGMVLMNDWSARDIQKWEYVPLGPFLGKSFGTTVSPWVVPMDALMPFAVPNPKQDPRPLPYLCHDEPYTFDINLSVNLKGEGMSQAATICKSNFKYMYWTMLQQLTHHSVNGCNLRPGDLLASGTISGPEPENFGSMLELSWKGTKPIDLGNGQTRKFLLDGDEVIITGYCQGDGYRIGFGQCAGKVLPALLPS

SEQ ID NO: 8482 - protein, 419 aa, Homo sapiens; identical to SEQ ID NO: 8481

SEQ ID NO: 8483 - protein, 419 aa, Homo sapiens; identical to SEQ ID NO: 8481

SEQ ID NO: 8484 - protein, 442 aa, Homo sapiens
MAVDGGCGDTGDWEGRWNHVKKFLERSGPFTHPDFEPSTESLQFLLDTCKVLVIGAGGLGCELLKNLALSGFRQIHVIDMDTIDVSNLNRQFLFRPKDIGRPKAEVAAEFLNDRVPNCNVVPHFNKIQDFNDTFYRQFHIIVCGLDSIIARRWINGMLISLLNYEDGVLDPSSIVPLIDGGTEGFKGNARVILPGMTACIECTLELYPPQVNFPMCTIASMPRLPEHCIEYVRMLQWPKEQPFGEGVPLDGDDPEHIQWIFQKSLERASQYNIRGVTYRLTQGVVKRIIPAVASTNAVIAAVCATEVFKIATSAYIPLNNYLVFNDVDGLYTYTFEAERKENCPACSQLPQNIQFSPSAKLQEVLDYLTNSASLQMKSPAITATLEGKNRTLYLQSVTSIEERTRPNLSKTLKELGLVDGQELAVADVTTPQTVLFKLHFTS

SEQ ID NO: 8485 - protein, 463 aa, Homo sapiens
MADGEEPEKKRRRIEELLAEKMAVDGGCGDTGDWEGRWNHVKKFLERSGPFTHPDFEPSTESLQFLLDTCKVLVIGAGGLGCELLKNLALSGFRQIHVIDMDTIDVSNLNRQFLFRPKDIGRPKAEVAAEFLNDRVPNCNVVPHFNKIQDFNDTFYRQFHIIVCGLDSIIARRWINGMLISLLNYEDGVLDPSSIVPLIDGGTEGFKGNARVILPGMTACIECTLELYPPQVNFPMCTIASMPRLPEHCIEYVRMLQWPKEQPFGEGVPLDGDDPEHIQWIFQKSLERASQYNIRGVTYRLTQGVVKRIIPAVASTNAVIAAVCATEVFKIATSAYIPLNNYLVFNDVDGLYTYTFEAERKENCPACSQLPQNIQFSPSAKLQEVLDYLTNSASLQMKSPAITATLEGKNRTLYLQSVTSIEERTRPNLSKTLKELGLVDGQELAVADVTTPQTVLFKLHFTS

SEQ ID NO: 8486 - protein, 926 aa, Homo sapiens
MTSRFRLPAGRTYNVRASELARDRQHTEVVCNILLLDNTVQAFKVNKHDQGQVLLDVVFKHLDLTEQDYFGLQLADDSTDNPRWLDPNKPIRKQLKRGSPYSLNFRVKFFVSDPNKLQEEYTRYQYFLQIKQDILTGRLPCPSNTAALLASFAVQSELGDYDQSENLSGYLSDYSFIPNQPQDFEKEIAKLHQQHIGLSPAEAEFNYLNTARTLELYGVEFHYARDQSNNEIMIGVMSGGILIYKNRVRMNTFPWLKIVKISFKCKQFFIQLRKELHESRETLLGFNMVNYRACKNLWKACVEHHTFFRLDRPLPPQKNFFAHYFTLGSKFRYCGRTEVQSVQYGKEKANKDRVFARSPSKPLARKLMDWEVVSRNSISDDRLETQSLPSRSPPGTPNHRNSTFTQEGTRLRPSSVGHLVDHMVHTSPSEVFVNQRSPSSTQANSIVLESSPSQETPGDGKPPALPPKQSKKNSWNQIHYSHSQQDLESHINETFDIPSSPEKPTPNGGIPHDNLVLIRMKPDENGRFGFNVKGGYDQKMPVIVSRVAPGTPADLCVPRLNEGDQVVLINGRDIAEHTHDQVVLFIKASCERHSGELMLLVRPNAVYDVVEEKLENEPDFQYIPEKAPLDSVHQDDHSLRESMIQLAEGLITGTVLTQFDQLYRKKPGMTMSCAKLPQNISKNRYRDISPYDATRVILKGNEDYINANYINMEIPSSSIINQYIACQGPLPHTCTDFWQMTWEQGSSMVVMLTTQVERGRVKCHQYWPEPTGSSSYGCYQVTCHSEEGNTAYIFRKMTLFNQEKNESRPLTQIQYIAWPDHGVPDDSSDFLDFVCHVRNKRAGKEEPVVVHCSAGIGRTGVLITMETAMCLIECNQPVYPLDIVRTMRDQRAMMIQTPSQYRFVCEAILKVYEEGFVKPLTTSTNK

SEQ ID NO: 8487 - protein, 926 aa, Homo sapiens; identical to SEQ ID NO: 8486

SEQ ID NO: 8488 - protein, 426 aa, Homo sapiens
MAGLGFWGHPAGPLLLLLLLVLPPRALPEGPLVFVALVFRHGDRAPLASYPMDPHKEVASTLWPRGLGQLTTEGVRQQLELGRFLRSRYEAFLSPEYRREEVYIRSTDFDRTLESAQANLAGLFPEAAPGSPEARWRPIPVHTVPVAEDKLLRFPMRSCPRYHELLREATEAAEYQEALEGWTGFLSRLENFTGLSLVGEPLRRAWKVLDTLMCQQAHGLPLPAWASPDVLRTLAQISALDIGAHVGPPRAAEKAQLTGGILLNAILANFSRVQRLGLPLKMVMYSAHDSTLLALQGALGLYDGHTPPYAACLGFEFRKHLGNPAKDGGNVTVSLFYRNDSAHLPLPLSLPGCPAPCPLGRFYQLTAPARPPAHGVSCHGPYEAAIPPAPVVPLLAGAVAVLVALSLGLGLLAWRPGCLRALGGPV

SEQ ID NO: 8489 - protein, 333 aa, Homo sapiens
MAGLGFWGHPAGPLLLLLLLVLPPRALPEGPLVFVALVFRHGDRAPLASYPMDPHKEVASTLWPRGLGQLTTEGVRQQLELGRFLRSRYEGFLSRLENFTGLSLVGEPLRRAWKVLDTLMCQQAHGLPLPAWASPDVLRTLAQISALDIGAHVGPPRAAEKAQLTGGILLNAILANFSRVQRLGLPLKMVMYSAHDSTLLALQGALGLYDGHTPPYAACLGFEFRKHLGNPAKDGGNVTVSLFYRNDSAHLPLPLSLPGCPAPCPLGRFYQLTAPARPPAHGVSCHGPYEAAIPPAPVVPLLAGAVAVLVALSLGLGLLAWRPGCLRALGGPV

SEQ ID NO: 8490 - protein, 341 aa, Homo sapiens [sequence omitted]

SEQ ID NO: 8491 - protein, 177 aa, Homo sapiens
MEGSGHPHVPGILLNAILANFSRVQRLGLPLKMVMYSAHDSTLLALQGALGLYDGHTPPYAACLGFEFRKHLGNPAKDGGNVTVSLFYRNDSAHLPLPLSLPGCPAPCPLGRFYQLTAPARPPAHGVSCHGPYEAAIPPAPVVPLLAGAVAVLVALSLGLGLLAWRPGCLRALGGPV

SEQ ID NO: 8492 - protein, 375 aa, Homo sapiens
MDPHKEVASTLWPRGLGQLTTEGVRQQLELGRFLRSRYEAFLSPEYRREEVYIRSTDFDRTLESAQANLAGLFPEAAPGSPEARWRPIPVHTVPVAEDKLLRFPMRSCPRYHELLREATEAAEYQEALEGWTGFLSRLENFTGLSLVGEPLRRAWKVLDTLMCQQAHGLPLPAWASPDVLRTLAQISALDIGAHVGPPRAAEKAQLTGGILLNAILANFSRVQRLGLPLKMVMYSAHDSTLLALQGALGLYDGHTPPYAACLGFEFRKHLGNPAKDGGNVTVSLFYRNDSAHLPLPLSLPGCPAPCPLGRFYQLTAPARPPAHGVSCHGPYEAAIPPAPVVPLLAGAVAVLVALSLGLGLLAWRPGCLRALGGPV

SEQ ID NO: 8493 - protein, 317 aa, Homo sapiens
MLAALTPSRLAVAFQAMGAMKLGLTIAIRYSHSRRQFGPKTKEEVKIIEHQTQTLRLMPHLATALALTFVSRYAGALLDEDVFQGKELVNSRSLQALVAGLKAYSTWENIRCLQDCRECTGGMGYMMENRISGLKCDTDVFATFEGDDVVMLQVVGRELLAQYTKQYEEKPLFGLLQNWAESVGDKLRTSFLAFNMDTVDDLAFLLKAVKFRERVLQRGLVARIYYKVKTKKEDFFHAWNSCLHHVASLSLAHTHRVTLEQFSLAVKSCPDQEDQTLLMKFCLLYGTKLVFQERAWYLEHKYLTPMASTRIRNQERC

SEQ ID NO: 8494 - protein, 279 aa, Homo sapiens
MRALTVQRVKFAMDLPLLKRAGQDLAEKTKNFVSRSLVIGEVLSMADMATGVKCGIIYWLFGGAIRNLGSPEHVTKWFQPLQEQKYTGMFAMTERGHGSNARGIQTEATFDLSAQEFVIDTPCENAEKMYIGNAMYGNYAAVFAQLIIDGRSQGPHCFIVPVRDENGSLYPGVTAIDMMYKEGLHGVDNGILIFDKVRIPRENLLDKFGSVAPDGQYHSPIRNKSARFNAMLAALTPSRLAVAFQAMGAMKLGLTIAIRYSHRSRIISQNCCSAPAGLY

SEQ ID NO: 8495 - protein, 370 aa, Homo sapiens
MMYKEGLHGVDNGILIFDKVRIPRENLLDKFGSVAPDGQYHSPIRNKSARFNAMLAALTPSRLAVAFQAMGAMKLGLTIAIRYSHSRRQFGPKTKEEVKIIEHQTQTLRLMPHLATALALTFVSRYAGALLDEDVFQGKELVNSRSLQALVAGLKAYSTWENIRCLQDCRECTGGMGYMMENRISGLKCDTDVFATFEGDDVVMLQVVGRELLAQYTKQYEEKPLFGLLQNWAESVGDKLRTSFLAFNMDTVDDLAFLLKAVKFRERVLQRGLVARIYYKVKTKKEDFFHAWNSCLHHVASLSLAHTHRVTLEQFSLAVKSCPDQEDQTLLMKFCLLYGTKLVFQERAWYLEHKYLTPMASTRIRNQERC

SEQ ID NO: 8496 - protein, 547 aa, Homo sapiens
MRALTVQRVKFAMDLPLLKRAGQDLAEKTKNFVSRSLVIGEVLSMADMATGVKCGIIYWLFGGAIRNLGSPEHVTKWFQPLQEQKYTGMFAMTERGHGSNARGIQTEATFDLSAQEFVIDTPCENAEKMYIGNAMYGNYAAVFAQLIIDGRSQGPHCFIVPVRDENGSLYPGVTAIDMMYKEGLHGVDNGILIFDKVRIPRENLLDKFGSVAPDGQYHSPIRNKSARFNAMLAALTPSRLAVAFQAMGAMKLGLTIAIRYSHSRRQFGPKTKEEVKIIEHQTQTLRLMPHLATALALTFVSRYAGALLDEDVFQGKELVNSRSLQALVAGLKAYSTWENIRCLQDCRECTGGMGYMMENRISGLKCDTDVFATFEGDDVVMLQVVGRELLAQYTKQYEEKPLFGLLQNWAESVGDKLRTSFLAFNMDTVDDLAFLLKAVKFRERVLQRGLVARIYYKVKTKKEDFFHAWNSCLHHVASLSLAHTHRVTLEQFSLAVKSCPDQEDQTLLMKFCLLYGTKLVFQERAWYLEHKYLTPMASTRIRNQERC

SEQ ID NO: 8497 - protein, 138 aa, Homo sapiens
MDPFAWGPCHLAALGWSGAHGSRRQFGPKTKEEVKIIEHQTQTLRLMPHLATALALTFVSRYAGALLDEDVFQGKELVNSRSLQALVAGLKAYSTWENIRCLQDCRECTGGMCVPEFHKEEQKQPKQGEKNIYKIGAQ

SEQ ID NO: 8498 - protein, 244 aa, Homo sapiens [sequence omitted]

SEQ ID NO: 8499 - protein, 374 aa, Homo sapiens
MDPLGPAKPQWLWRRCLAGLLFQLLVAVCFFSYLRVSRDDATGSPRPGLMAVEPVTGAPNGSRCQDSMATPAHPTLLILLWTWPFNTPVALPRCSEMVPGAADCNITADSSVYPQADAVIVHHWDIMYNPSANLPPPTRPQGQRWIWFSMESPSNCRHLEALDGYFNLTMSYRSDSDIFTPYGWLEPWSGQPAHPPLNLSAKTELVAWAVSNWKPDSARVRYYQSLQAHLKVDVYGRSHKPLPKGTMMETLSRYKFYLAFENSLHPDYITEKLWRNALEAWAVPVVLGPSRSNYERFLPPDAFIHVDDFQSPKDLARYLQELDKDHARYLSYFRWRETLRPRSFSWALAFCKACWKLQQESRYQTVRSIAAWFT

SEQ ID NO: 8500 - protein, 296 aa, Homo sapiens
MALTSDLGKQIKLKEVEGTLLQPATVDNWSQIQSFEAKPDDLLICTYPKAGTTWIQEIVDMIEQNGDVEKCQRAIIQHRHPFIEWARPPQPSGVEKAKAMPSPRILKTHLSTQLLPPSFWENNCKFLYVARNAKDCMVSYYHFQRMNHMLPDPGTWEEYFETFINGKVVWGSWFDHVKGWWEMKDRHQILFLFYEDIKRDPKHEIRKVMQFMGKKVDETVLDKIVQETSFEKMKENPMTNRSTVSKSILDQSISSFMRKGTVGDWKNHFTVAQNERFDEIYRRKMEGTSINFCMEL

SEQ ID NO: 8501 - protein, 307 aa, Homo sapiens
MALTSDLGKQIKLKEVEGTLLQPATVDNWSQIQSFEAKPDDLLICTYPKAGTTWIQEIVDMIEQNGDVEKCQRAIIQHRHPFIEWARPPQPSETGFHHVAQAGLKLLSSSNPPASTSQSAKITDLLPPSFWENNCKFLYVARNAKDCMVSYYHFQRMNHMLPDPGTWEEYFETFINGKVVWGSWFDHVKGWWEMKDRHQILFLFYEDIKRDPKHEIRKVMQFMGKKVDETVLDKIVQETSFEKMKENPMTNRSTVSKSILDQSISSFMRKGTVGDWKNHFTVAQNERFDEIYRRKMEGTSINFCMEL

SEQ ID NO: 8502 - protein, 252 aa, Homo sapiens
MTSEFFSAQLRAQISDDTTHPISYYKPEFYMPDDGGTAHLSVVAEDGSAVSATSTINLYFGSKVRSPVSGILLNNEMDDFSSTSITNEFGVPPSPANFIQPGKQPLSSMCPTIMVGQDGQVRMVVGAAGGTQITMATALVCVTPFLPGRAHPAQPPSHADHTPMPQAIIYNLWFGYDVKWAVEEPRLHNQLLPNVTTVERNIDQEVTAALETRHHHTQITSTFIAVVQAIVRMAGGWAAASDSRKGGEPAGY

SEQ ID NO: 8503 - protein, 252 aa, Homo sapiens; identical to SEQ ID NO: 8502

SEQ ID NO: 8504 - protein, 225 aa, Homo sapiens
MTSEFFSAQLRAQISDDTTHPISYYKPEFYMPDDGGTAHLSVVAEDGSAVSATSTINLYFGSKVRSPVSGILLNNEMDDFSSTSITNEFGVPPSPANFIQPGKQPLSSMCPTIMVGQDGQVRMVVGAAGGTQITMATALAIIYNLWFGYDVKWAVEEPRLHNQLLPNVTTVERNIDQEVTAALETRHHHTQITSTFIAVVQAIVRMAGGWAAASDSRKGGEPAGY

SEQ ID NO: 8505 - protein, 225 aa, Homo sapiens; identical to SEQ ID NO: 8504

SEQ ID NO: 8506 - protein, 225 aa, Homo sapiens; identical to SEQ ID NO: 8504

SEQ ID NO: 8507 - protein, 252 aa, Homo sapiens; identical to SEQ ID NO: 8502

SEQ ID NO: 8508 - protein, 225 aa, Homo sapiens; identical to SEQ ID NO: 8504

SEQ ID NO: 8509 - protein, 89 aa, Homo sapiens
MLVMDLTCHLEKPAKYSDIKRMVKQALREILKGILGCTEHKVVSSDFDSDTHSSIFNAGAGIALNNDFVKLISWYDRVVNLMVHMASKE

SEQ ID NO: 8510 - protein, 738 aa, Homo sapiens
MTSSGPGPRFLLLLPLLLPPAASASDRPRGRDPVNPEKLLVITVATAETEGYLRFLRSAEFFNYTVRTLGLGEEWRGGDVARTVGGGQKVRWLKKEMEKYADREDMIIMFVDSYDVILAGSPTELLKKFVQSGSRLLFSAESFCWPEWGLAEQYPEVGTGKRFLNSGGFIGFATTIHQIVRQWKYKDDDDDQLFYTRLYLDPGLREKLSLNLDHKSRIFQNLNGALDEVVLKFDRNRVRIRNVAYDTLPIVVHGNGPTKLQLNYLGNYVPNGWTPEGGCGFCNQDRRTLPGGQPPPRVFLAVFVEQPTPFLPRFLQRLLLLDYPPDRVTLFLHNNEVFHEPHIADSWPQLQDHFSAVKLVGPEEALSPGEARDMAMDLCRQDPECEFYFSLDADAVLTNLQTLRILIEENRKVIAPMLSRHGKLWSNFWGALSPDEYYARSEDYVELVQRKRVGVWNVPYISQAYVIRGDTLRMELPQRDVFSGSDTDPDMAFCKSFRDKGIFLHLSNQHEFGRLLATSRYDTEHLHPDLWQIFDNPVDWKEQYIHENYSRALEGEGIVEQPCPDVYWFPLLSEQMCDELVAEMEHYGQWSGGRHEDSRLAGGYENVPTVDIHMKQVGYEDQWLQLLRTYVGPMTESLFPGYHTKARAVMNFVVRYRPDEQPSLRPHHDSSTFTLNVALNHKGLDYEGGGCRFLRYDCVISSPRKGWALLHPGRLTHYHEGLPTTWGTRYIMVSFVDP

SEQ ID NO: 8511 - protein, 738 aa, Homo sapiens; identical to SEQ ID NO: 8510

SEQ ID NO: 8512 - protein, 155 aa, Homo sapiens [sequence omitted]

SEQ ID NO: 8513 - protein, 154 aa, Homo sapiens
MVEKKTSVRSQDPGQRRVLDRAARQRRINRQLEALENDNFQDDPHAGLPQLGKRLPQFDDDADTGKKKKKTRGDHFKLRFRKNFQALLEEQNLSVAEGPNYLTACAGPPSRPQRPFCAVCGFPSPYTCVSCGARYCTVRCLGTHQETRCLKWTV

SEQ ID NO: 8514 - protein, 88 aa, Homo sapiens [sequence omitted]

SEQ ID NO: 8515 - protein, 384 aa, Homo sapiens
MKPHFRNTVERMYRDTFSYNFYNRPILSRRNTVWLCYEVKTKGPSRPPLDAKIFRGQVYSELKYHPEMRFFHWFSKWRKLHRDQEYEVTWYISWSPCTKCTRDMATFLAEDPKVTLTIFVARLYYFWDPDYQEALRSLCQKRDGPRATMKIMNYDEFQHCWSKFVYSQRELFEPWNNLPKYYILLHIMLGEILRHSMDPPTFTFNFNNEPWVRGRHETYLCYEVERMHNDTWVLLNQRRGFLCNQAPHKHGFLEGRHAELCFLDVIPFWKLDLDQDYRVTCFTSWSPCFSCAQEMAKFISKNKHVSLCIFTARIYDDQGRCQEGLRTLAEAGAKISIMTYSEFKHCWDTFVDHQGCPFQPWDGLDEHSQDLSGRLRAILQNQEN

SEQ ID NO: 8516 - protein, 382 aa, Homo sapiens [sequence omitted]

SEQ ID NO: 8517 - protein, 490 aa, Homo sapiens [sequence omitted]

SEQ ID NO: 8518 - protein, 386 aa, Homo sapiens [sequence omitted]

SEQ ID NO: 8519 - protein, 98 aa, Homo sapiens [sequence omitted]

SEQ ID NO: 8520 - protein, 56 aa, Homo sapiens
MELVSRLQERNVQVFLISGGFRSIIEHVASKLNIPATNVFASRLKFYLNGKMLTVT

SEQ ID NO: 8521 - protein, 27 aa, Homo sapiens
MNFYKLHRLILFAYNCLLQLAIESWYR

SEQ ID NO: 8522 - protein, 570 aa, Homo sapiens [sequence omitted]

SEQ ID NO: 8523 - protein, 647 aa, Homo sapiens
MGPLSARLLMQRGRPKSDRLGKIRSLDLSGLELLSEHLDPKLLCRLTQLQELDLSNNHLETLPDNLGLSHLRVLRCANNQLGDVTALCQFPKLEELSLEGNPFLTVNDNLKVSFLLPTLRKVNGKDASSTYSQVENLNRELTSRVTAHWEKFMATLGPEEEAEKAQADFVKSAVRDVRYGPESLSEFTQWRVRMISEELVAASRTQVQKANSPEKPPEAGAAHKPRARLAALKRPDDVPLSLSPSKRACASPSAQVEGSPVAGSDGSQPAVKLEPLHFLQCHSKNNSPQDLETQLWACAFEPAWEEGATSQTVATCGGEAVCVIDCQTGIVLHKYKAPGEEFFSVAWTALMVVTQAGHKKRWSVLAAAGLRGLVRLLHVRAGFCCGVIRAHKKAIATLCFSPAHETHLFTASYDKRIILWDIGVPNQDYEFQASQLLTLDTTSIPLRLCPVASCPDARLLAGCEGGCCCWDVRLDQPQKRRVCEVEFVFSEGSEASGRRVDGLAFVNEDIVASKGSGLGTICLWSWRQTWGGRGSQSTVAVVVLARLQWSSTELAYFSLSACPDKGIVLCGDEEGNVWLYDVSNILKQPPLLPAALQAPTQILKWPQPWALGQVVTKTMVNTVVANASFTYLTALTDSNIVAIWGRM

SEQ ID NO: 8524 - protein, 403 aa, Homo sapiens [sequence omitted]

SEQ ID NO: 8525 - protein, 403 aa, Homo sapiens [sequence omitted]

SEQ ID NO: 8526 - protein, 403 aa, Homo sapiens [sequence omitted]

SEQ ID NO: 8527 - protein, 559 aa, Homo sapiens
MLLFPQVAVKTEPMSSSETASTTADGSLNNFSGSAIGSSSFSPRPTHQFSPPQIYPSNRPYPHILPTPSSQTMAAYGQTQFTTGMQQATAYATYPQPGQPYGISSYGALWAGIKTEGGLSQSQSPGQTGFLSYGTSFSTPQPGQAPYSYQMQGSSFTTSSGIYTGNNSLTNSSGFNSSQQDYPSYPSFGQGQYAQYYNSSPYPAHYMTSSNTSPTTPSTNATYQLQEPPSGITSQAVTDPTAEYSTIHSPSTPIKDSDSDRLRRGSDGKSRGRGRRNNNPSPPPDSDLERVFIWDLDETIIVFHSLLTGSYANRYGRDPPTSVSLGLRMEEMIFNLADTHLFFNDLEECDQVHIDDVSSDDNGQDLSTYNFGTDGFPAAATSANLCLATGVRGGVDWMRKLAFRYRRVKEIYNTYKNNVGGLLGPAKREAWLQLRAEIEALTDSWLTLALKALSLIHSRTNCVNILVTTTQLIPALAKVLLYGLGIVFPIENIYSATKIGKESCFERIIQRFGRKVVYVVIGDGVEEEQGAKKHAMPFWRISSHSDLMALHHALELEYL

SEQ ID NO: 8528 - protein, 602 aa, Homo sapiens [sequence omitted]

SEQ ID NO: 8529 - protein, 592 aa, Homo sapiens
MEMQDLTSPHSRLSGSSESPSGPKLGNSHINSNSMTPNGTEVKTEPMSSSETASTTADGSLNNFSGSAIGSSSFSPRPTHQFSPPQIYPSNRPYPHILPTPSSQTMAAYGQTQFTTGMQQATAYATYPQPGQPYGISSYGALWAGIKTEGGLSQSQSPGQTGFLSYGTSFSTPQPGQAPYSYQMQGSSFTTSSGIYTGNNSLTNSSGFNSSQQDYPSYPSFGQGQYAQYYNSSPYPAHYMTSSNTSPTTPSTNATYQLQEPPSGITSQAVTDPTAEYSTIHSPSTPIKDSDSDRLRRGSDGKSRGRGRRNNNPSPPPDSDLERVFIWDLDETIIVFHSLLTGSYANRYGRDPPTSVSLGLRMEEMIFNLADTHLFFNDLEECDQVHIDDVSSDDNGQDLSTYNFGTDGFPAAATSANLCLATGVRGGVDWMRKLAFRYRRVKEIYNTYKNNVGGLLGPAKREAWLQLRAEIEALTDSWLTLALKALSLIHSRTNCVNILVTTTQLIPALAKVLLYGLGIVFPIENIYSATKIGKESCFERIIQRFGRKVVYVVIGDGVEEEQGAKKHAMPFWRISSHSDLMALHHALELEYL

SEQ ID NO: 8530 - protein, 567 aa, Homo sapiens [sequence omitted]

SEQ ID NO: 8531 - protein, 256 aa, Homo sapiens
  VARIANT (1)...(256): Xaa = Any Amino Acid
MHPAVFLSLPDLRCSLLLLVTWVFTPVTTEITSLDTENIDEILNNADVALVNFYADWCRFSQMLHPIFEEASDVIKEEFPNENQVVFARVDCDQHSDIAQRYRISKYPTLKLFRNGMMMKREYRGQRSVKALADYIRQQKSDPIQEIRDLAEITTLDRSKRNIIGYFEQKDSDNYRVFERVANILHDDCAFLSAFGDVSKPERYSGDNIIYKPPGHSAPDMVYLGAMTNFDVTYNWIQDKCVPLVREITFENGEVX

SEQ ID NO: 8532 - protein, 111 aa, Homo sapiens [sequence omitted]

SEQ ID NO: 8533 - protein, 672 aa, Homo sapiens
MDPSAPQPRAETSGKDIWHPGERCLAPSPDNGKLCEASIKSITVDENGKSFAVVLYADFQERKIPLKQLQEVKFVKDCPRNLIFDDEDLEKPYFPNRKFPSSSVAFKLSDNGDSIPYTINRYLRDYQREGTRFLYGHYIHGGGCILGDDMGLGKTVQVISFLAAVLHKKGTREDIENNMPEFLLRSMKKEPLSSTAKKMFLIVAPLSVLYNWKDELDTWGYFRVTVLHGNRKDNELIRVKQRKCEIALTTYETLRLCLDELNSLEWSAVIVDEAHRIKNPKARVTEVMKALKCNVRIGLTGTILQNNMKELWCVMDWAVPGLLGSGTYFKKQFSDPVEHGQRHTATKRELATGRKAMQRLAKKMSGWFLRRTKTLIKDQLPKKEDRMVYCSLTDFQKAVYQTVLETEDVTLILQSSEPCTCRSGQKRRNCCYKTNSHGETVKTLYLSYLTVLQKVANHVALLQAASTSKQQETLIKRICDQVFSRFPDFVQKSKDAAFETLSDPKYSGKMKVLQQLLNHCRKNRDKVLLFSFSTKLLDVLQQYCMASGLDYRRLDGSTKSEERLKIVKEFNSTQDVNICLVSTMAGGLGLNFVGANVVVLFDPTWNPANDLQAIDRTQTHCRRERDAEPLSSAPGLQNGSENAVPYPWWCCVTGASISCWRCEICRIQDVLE

SEQ ID NO: 8534 - protein, 700 aa, Homo sapiens
MDPSAPQPRAETSGKDIWHPGERCLAPSPDNGKLCEASIKSITVDENGKSFAVVLYADFQERKIPLKQLQEVKFVKDCPRNLIFDDEDLEKPYFPNRKFPSSSVAFKLSDNGDSIPYTINRYLRDYQREGTRFLYGHYIHGGGCILGDDMGLGKTVQVISFLAAVLHKKGTREDIENNMPEFLLRSMKKEPLSSTAKKMFLIVAPLSVLYNWKDELDTWGYFRVTVLHGNRKDNELIRVKQRKCEIALTTYETLRLCLDELNSLEWSAVIVDEAHRIKNPKARVTEVMKALKCNVRIGLTGTILQNNMKELWCVMDWAVPGLLGSGTYFKKQFSDPVEHGQRHTATKRELATGRKAMQRLAKKMSGWFLRRTKTLIKDQLPKKEDRMVYCSLTDFQKAVYQTVLETEDVTLILQSSEPCTCRSGQKRRNCCYKTNSHGETVKTLYLSYLTVLQKVANHVALLQAASTSKQQETLIKRICDQVFSRFPDFVQKSKDAAFETLSDPKYSGKMKVLQQLLNHCRKNRDKVLLFSFSTKLLDVLQQYCMASGLDYRRLDGSTKSEERLKIVKEFNSTQDVNICLVSTMAGGLGLNFVGANVVVLFDPTWNPANDLQAIDRAYRIGQCRDVKVLRLISLGTVEEIMYLRQIYKQQLHCVVVGSENAKRYFEAVQGSKEHQGELFGIHNLFKFRSQGSCLTKDILE

SEQ ID NO: 8535 - protein, 302 aa, Homo sapiens
MVWKRLGALVMFPLQMIYLVVKAAVGLVLPAKLRDLSRENVLITGGGRGIGRQLAREFAERGARKIVLWGRTEKCLKETTEEIRQMGTECHYFICDVGNREEVYQTAKAVREKVGDITILVNNAAVVHGKSLMDSDDDALLKSQHINTLGQFWTTKAFLPRMLELQNGHIVCLNSVLALSAIPGAIDYCTSKASAFAFMESLTLGLLDCPGVSATTVLPFHTSTEMFQGMRVRFPNLFPPLKPETVARRTVEAVQLNQALLLLPWTMHALVILKSILPQAALEEIHKFSGTYTCMNTFKGRT

SEQ ID NO: 8536 - protein, 731 aa, Homo sapiens [sequence omitted]

SEQ ID NO: 8537 - protein, 655 aa, Homo sapiens [sequence omitted]

SEQ ID NO: 8538 - protein, 700 aa, Homo sapiens
MASTVEGGDTALLPEFPRGPLDAYRARASFSWKELALFTEGEGMLRFKKTIFSALENDPLFARSPGADLSLEKYRELNFLRCKRIFEYDFLSVEDMFKSPLKVPALIQCLGMYDSSLAAKYLLHSLVFGSAVYSSGSERHLTYIQKIFRMEIFGCFALTELSHGSNTKAIRTTAHYDPATEEFIIHSPDFEAAKFWVGNMGKTATHAVVFAKLCVPGDQCHGLHPFIVQIRDPKTLLPMPGVMVGDIGKKLGQNGLDNGFAMFHKVRVPRQSLLNRMGDVTPEGTYVSPFKDVRQRFGASLGSLSSGRVSIVSLAILNLKLAVAIALRFSATRRQFGPTEEEEIPVLEYPMQQWRLLPYLAAVYALDHFSKSLFLDLVELQRGLASGDRSARQAELGREIHALASASKPLASWTTQQGIQECREACGGHGYLAMNRLGVLRDDNDPNCTYEGDNNILLQQTSNYLLGLLAHQVHDGACFRSPLKSVDFLDAYPGILDQKFEVSSVADCLDSAVALAAYKWLVCYLLRETYQKLNQEKRSGSSDFEARNKCQVSHGRPLALAFVELTVVQRFHEHVHQPSVPPSLRAVLGRLSALYALWSLSRHAALLYRGGYFSGEQAGEVLESAVLALCSQLKDDAVALVDVIAPPDFVLDSPIGRADGELYKNLWGAVLQESKVLERASWWPEFSVNKPVIGSLKSKL

SEQ ID NO: 8539 - protein, 144 aa, Homo sapiens
MKTLLLLAVIMIFGLLQAHGNLVNFHRMIKLTTGKEAALSYGFYGCHCGVGGRGSPKDATDRCCVTHDCCYKRLEKRGCGTKFLSYKFSNSGSRITCAKQDSCRSQLCECDKAAATCFARNKTTYNKKYQYYSNKHCRGSTPRC

SEQ ID NO: 8540 - protein, 144 aa, Homo sapiens; identical to SEQ ID NO: 8539

SEQ ID NO: 8541 - protein, 144 aa, Homo sapiens; identical to SEQ ID NO: 8539

SEQ ID NO: 8542 - protein, 107 aa, Homo sapiens [sequence omitted]

SEQ ID NO: 8543 - protein, 192 aa, Homo sapiens
MAPLGGAPRLVLLFSGKRKSGKDFVTEALQSRLGADVCAVLRLSGPLKEQYAQEHGLNFQRLLDTSTYKEAFRKDMIRWGEEKRQADPGFFCRKIVEGISQPIWLVSDTRRVSDIQWFREAYGAVTQTVRVVALEQSRQQRGWVFTPGVDDAESECGLDNFGDFDWVIENHGVEQRLEEQLENLIEFIRSRL

SEQ ID NO: 8544 - protein, 192 aa, Homo sapiens; identical to SEQ ID NO: 8543

SEQ ID NO: 8545 - protein, 335 aa, Homo sapiens
MSKRKAPQETLNGGITDMLTELANFEKNVSQAIHKYNAYRKAASVIAKYPHKIKSGAEAKKLPGVGTKIAEKIDEFLATGKLRKLEKIRQDDTSSSINFLTRVSGIGPSAARKFVDEGIKTLEDLRKNEDKLNHHQRIGLKYFGDFEKRIPREEMLQMQDIVLNEVKKVDSEYIATVCGSFRRGAESSGDMDVLLTHPSFTSESTKQPKLLHQVVEQLQKVHFITDTLSKGETKFMGVCQLPSKNDEKEYPHRRIDIRLIPKDQYYCGVLYFTGSDIFNKNMRAHALEKGFTINEYTIRPLGVTGVAGEPLPVDSEKDIFDYIQWKYREPKDRSE

SEQ ID NO: 8546 - protein, 1040 aa, Homo sapiens
MAAAPALKHWRTTLERVEKFVSPLYFTDCNLRGRLFGASCPVAVLSSFLTPERLPYQEAVQRDFRPAQVGDSFGPTWWTCWFRVELTIPEAWVGQEVHLCWESDGEGLVWRDGEPVQGLTKEGEKTSYVLTDRLGERDPRSLTLYVEVACNGLLGAGKGSMIAAPDPEKMFQLSRAELAVFHRDVHMLLVDLELLLGIAKGLGKDNQRSFQALYTANQMVNVCDPAQPETFPVAQALASRFFGQHGGESQHTIHATGHCHIDTAWLWPFKETVRKCARSWVTALQLMERNPEFIFACSQAQQLEWVKSRYPGLYSRIQEFACRGQFVPVGGTWVEMDGNLPSGEAMVRQFLQGQNFFLQEFGKMCSEFWLPDTFGYSAQLPQIMHGCGIRRFLTQKLSWNLVNSFPHHTFFWEGLDGSRVLVHFPPGDSYGMQGSVEEVLKTVANNRDKGRANHSAFLFGFGDGGGGPTQTMLDRLKRLSNTDGLPRVQLSSPRQLFSALESDSEQLCTWVGELFLELHNGTYTTHAQIKKGNRECERILHDVELLSSLALARSAQFLYPAAQLQHLWRLLLLNQFHDVVTGSCIQMVAEEAMCHYEDIRSHGNTLLSAAAAALCAGEPGPEGLLIVNTLPWKRIEVMALPKPGGAHSLALVTVPSMGYAPVPPPTSLQPLLPQQPVFVVQETDGSVTLDNGIIRVKLDPTGRLTSLVLVASGREAIAEGAVGNQFVLFDDVPLYWDAWDVMDYHLETRKPVLGQAGTLAVGTEGGLRGSAWFLLQISPNSRLSQEVVLDVGCPYVRFHTEVHWHEAHKFLKVEFPARVRSSQATYEIQFGHLQRPTHYNTSWDWARFEVWAHRWMDLSEHGFGLALLNDCKYGASVRGSILSLSLLRAPKAPDATADTGRHEFTYALMPHKGSFQDAGVIQAAYSLNFPLLALPAPSPAPATSWSAFSVSSPAVVLETVKQAESSPQRRSLVLRLYEAHGSHVDCWLHLSLPVQEAILCDLLERPDPAGHLTLRDNRLKLTFSPFQVLSLLLVLQPPPH

SEQ ID NO: 8547 - protein, 1041 aa, Homo sapiens [sequence omitted]

SEQ ID NO: 8548 - protein, 390 aa, Homo sapiens
MPEGPELHLASQFVNEACRALVFGGCVEKSSVSRNPEVPFESSAYRISASARGKELRLILSPLPGAQPQQEPLALVFRFGMSGSFQLVPREELPRHAHLRFYTAPPGPRLALCFVDIRRFGRWDLGGKWQPGRGPCVLQEYQQFRENVLRNLADKAFDRPICEALLDQRFFNGIGNYLRAEILYRLKIPPFEKARSVLEALQQHRPSPELTLSQKIRTKLQNPDLLELCHSVPKEVVQLGGKGYGSESGEEDFAAFRAWLRCYGMPGMSSLQDRHGRTIWFQGDPGPLAPKGRKSRKKKSKATQLSPEDRVEDALPPSKAPSRTRRAKRDLPKRTATQRPEGTSLQQDPEAPTVPKKGRRKGRQAASGHCRPRKVKADIPSLEPEGTSAS

SEQ ID NO: 8549 - protein, 465 aa, Homo sapiens
MGRTGPRAPLLPKTRIWSLTFSRKTSPVGARPGAAPRCGGGKVRASAVAKCPLPLKAHLRLRFRTARGQRQVAKQGGRRTLPPSLRMPEGPELHLASQFVNEACRALVFGGCVEKSSVSRNPEVPFESSAYRISASARGKELRLILSPLPGAQPQQEPLALVFRFGMSGSFQLVPREELPRHAHLRFYTAPPGPRLALCFVDIRRFGRWDLGGKWQPGRGPCVLQEYQQFRLKIPPFEKARSVLEALQQHRPSPELTLSQKIRTKLQNPDLLELCHSVPKEVVQLGGKGYGSESGEEDFAAFRAWLRCYGMPGMSSLQDRHGRTIWFQGDPGPLAPKGRKSRKKKSKATQLSPEDRVEGPVSPPSRTLCLQARPLPGHEGQRETFLRGLQPSGLRGPASSRTQKLPQCPRRGGGRGDRQPLATADPGRSRLTSHPWNQRGPQPLSRRLSLLALTLSYCLALHLGV

SEQ ID NO: 8550 - protein, 424 aa, Homo sapiens
MPEGPELHLASQFVNEACRALVFGGCVEKSSVSRNPEVPFESSAYRISASARGKELRLILSPLPGAQPQQEPLALVFRFGMSGSFQLVPREELPRHAHLRFYTAPPGPRLALCFVDIRRFGRWDLGGKWQPGRGPCVLQEYQQFRENVLRNLADKAFDRPICEALLDQRFFNGIGNYLRAEILYRLKIPPFEKARSVLEALQQHRPSPELTLSQKIRTKLQNPDLLELCHSVPKEVVQLGGKGYGSESGEEDFAAFRAWLRCYGMPGMSSLQDRHGRTIWFQAKRAERTSRLQGLQHPSPPYPPATLGVTPGQDRTLQLQHQCPAGRKSRKKKSKATQLSPEDRVEDALPPSKAPSRTRRAKRDLPKRTATQRPEGTSLQQDPEAPTVPKKGRRKGRQAASGHCRPRKVKADIPSLEPEGTSAS

SEQ ID NO: 8551 - protein, 390 aa, Homo sapiens; identical to SEQ ID NO: 8548

SEQ ID NO: 8552 - protein, 317 aa, Homo sapiens
MASVIPASNRSMRSDRNTYVGKRFVHVKNPYLDLMDEDILYHLDLGTKTHNLPAMFGDVKFVCVGGSPNRMKAFALFMHKELGFEEAEEDIKDICAGTDRYCMYKTGPVLAISHGMGIPSISIMLHELIKLLHHARCCDVTIIRIGTSGGIGIAPGTVVITDIAVDSFFKPRFEQVILDNIVTRSTELDKELSEELFNCSKEIPNFPTLVGHTMCTYDFYEGQGRLDGALCSFSREKKLDYLKRAFKAGVRNIEMESTVFAAMCGLCGLKAAVVCVTLLDRLDCDQINLPHDVLVEYQQRPQLLISNFIRRRLGLCD

SEQ ID NO: 8553 - protein, 1058 aa, Homo sapiens
MSSSPLSKKRRVSGPDPKPGSNCSPAQSVLSEVPSVPTNGMAKNGSEADIDEGLYSRQLYVLGHEAMKRLQTSSVLVSGLRGLGVEIAKNIILGGVKAVTLHDQGTAQWADLSSQFYLREEDIGKNRAEVSQPRLAELNSYVPVTAYTGPLVEDFLSGFQVVVLTNTPLEDQLRVGEFCHNRGIKLVVADTRGLFGQLFCDFGEEMILTDSNGEQPLSAMVSMVTKDNPGVVTCLDEARHGFESGDFVSFSEVQGMVELNGNQPMEIKVLGPYTFSICDTSNFSDYIRGGIVSQVKVPKKISFKSLVASLAEPDFVVTDFAKFSRPAQLHIGFQALHQFCAQHGRPPRPRNEEDAAELVALAQAVNARALPAVQQNNLDEDLIRKLAYVAAGDLAPINAFIGGLAAQEVMKACSGKFMPIMQWLYFDALECLPEDKEVLTEDKCLQRQNRYDGQVAVFGSDLQEKLGKQKYFLVGAGAIGCELLKNFAMIGLGCGEGGEIIVTDMDTIEKSNLNRQFLFRPWDVTKLKSDTAAAAVRQMNPHIRVTSHQNRVGPDTERIYDDDFFQNLDGVANALDNVDARMYMDRRCVYYRKPLLESGTLGTKGNVQVVIPFLTESYSSSQDPPEKSIPICTLKNFPNAIEHTLQWARDEFEGLFKQPAENVNQYLTDPKFVERTLRLAGTQPLEVLEAVQRSLVLQRPQTWADCVTWACHHWHTQYSNNIRQLLHNFPPDQLTSSGAPFWSGPKRCPHPLTFDVNNPLHLDYVMAAANLFAQTYGLTGSQDRAAVATFLQSVQVPEFTPKSGVKIHVSDQELQSANASVDDSRLEELKATLPSPDKLPGFKMYPIDFEKDDDSNFHMDFIVAASNLRAENYDIPSADRHKSKLIAGKIIPAIATTTAAVVGLVCLELYKVVQGHRQLDSYKNGFLNLALPFFGFSEPLAAPRHQYYNQEWTLWDRFEVQGLQPNGEEMTLKQFLDYFKTEHKLEITMLSQGVSMLYSFFMPAAKLKERLDQPMTEIVSRVSKRKLGRHVRALVLELCCNDESGEDVEVPYVRYTIR

SEQ ID NO: 8554 - protein, 568 aa, Homo sapiens
MSSSPLSKKRRVSGPDPKPGSNCSPAQSVLSEVPSVPTNGMAKNGSEADIDEGLYSRQLYVLGHEAMKRLQTSSVLVSGLRGLGVEIAKNIILGGVKAVTLHDQGTAQWADLSSQFYLREEDIGKNRAEVSQPRLAELNSYVPVTAYTGPLVEDFLSGFQVVVLTNTPLEDQLRVGEFCHNRGIKLVVADTRGLFGQLFCDFGEEMILTDSNGEQPLSAMVSMVTKDNPGVVTCLDEARHGFESGDFVSFSEVQGMVELNGNQPMEIKVLGPYTFSICDTSNFSDYIRGGIVSQVKVPKKISFKSLVASLAEPDFVVTDFAKFSRPAQLHIGFQALHQFCAQHGRPPRPRNEEDAAELVALAQAVNARALPAVQDLAPINAFIGGLAAQEVMKACSGKFMPIMQWLYFDALECLPEDKEVLTEDKCLQRQNRYDGQVAVFGSDLQEKLGKQKYFLVGAGAIGCELLKNFAMIGLGCGEGGEIIVTDMDTIEKSNLNRQFLFRPWDVTKLKSDTAAAAVRQMNPHIRVTSHQNRVGPDTERIYDDDFFQNLDGVANALDNVDAREFGGG

SEQ ID NO: 8555 - protein, 1058 aa, Homo sapiens; identical to SEQ ID NO: 8553

SEQ ID NO: 8556 - protein, 1058 aa, Homo sapiens; identical to SEQ ID NO: 8553

SEQ ID NO: 8557 - protein, 231 aa, Homo sapiens
MACAINILMKDLADELDLVDVIEDKLKGEMMDLQHGSLFLRTPKIVSGKDYNGTANSKLVIIMAGTCQQEEESRLNLVQRNVNIFKFIILNVVKYSPNCKLLIVSNPVDILTYVAWKISGFPKNHVIGSGCNLDSAQFRYLMGERLGVHPLSCHGWVLGEHGDSSAPVWSGMNVAGVSLKTPHPDLETDKHKEQWKEVHKLVVESAYEVIKLKGYTSWAIGLSVADLAEVQ

SEQ ID NO: 8558 - protein, 236 aa, Homo sapiens
MGFSFILNDDEMTYDNKSDFKVGKSLKPDSVWSQLETSLKRLQCPRLDLFYLHAPDHGTPVEETLCACHQRHQEGKFVELGLSNYAGWEVEMELFPCLGHFGLRFYAYNPLAGGLLTGKYKYEDKGRKQSGGHFFGNSWAEIHRNRFWKEHHFEAISLMQKATQAVYGVSAPSMTLATHPLLQGAHRDVVILGMSSLEKLEQNLAVMEEGPMDPAVMDTFNQTWHFVAHECPNYFR

SEQ ID NO: 8559 - protein, 146 aa, Homo sapiens
MYNATTRQVEMELFPCLGHFGLRFYAYNPLAGGLLTGKYKYEDKGRKQSGGHFFGNSWAEIHRNRFWKEHHFEAISLMQKATQAVYGVSAPSMTLATHPLVDVPPLTAAGCPQRRGHPGHVQPGEAGAELGSDGGRAHGPGCHGHF

SEQ ID NO: 8560 - protein, 107 aa, Homo sapiens [sequence omitted]

SEQ ID NO: 8561 - protein, 107 aa, Homo sapiens [sequence omitted]

SEQ ID NO: 8562 - protein, 329 aa, Homo sapiens
MGRTSKDKRDVYYRLAKENGWRARSAFKLLQLDKEFQLFQGVTRAVDLCAAPGSWSQVLSQKIGGQGSGHVVAVDLQAMAPLPGVVQIQGDITQLSTAKEIIQHFKGCPADLVVCDGAPDVTGLHDVDEYMQAQLLLAALNIATHVLKPGGCFVAKIFRGRDVTLLYSQLQVFFSSVLCAKPRSSRNSSIEAFAVCQGYDPPEGFIPDLSKPLLDHSYDPDFNQLDGPTRIIVPFVTCGDLSSYDSDRSYPLDLEGGSEYKYTPPTQPPISPPYQEACTLKRKGQLAKEIRPQDCPISRVDTFPQPLAAPQCHTLLAPEMEDNEMSCSP

SEQ ID NO: 8563 - protein, 329 aa, Homo sapiens; identical to SEQ ID NO: 8562

SEQ ID NO: 8564 - protein, 1086 aa, Homo sapiens
MANLLKTVVTGCSCPLLSNLGSCKGLRVKKDFLRTFYTHQELWCKAPVKPGIPYKQLTVGVPKEIFQNEKRVALSPAGVQNLVKQGFNVVVESGAGEASKFSDDHYRVAGAQIQGAKEVLASDLVVKVRAPMVNPTLGVHEADLLKTSGTLISFIYPAQNPELLNKLSQRKTTVLAMDQVPRVTIAQGYDALSSMANIAGYKAVVLAANHFGRFFTGQITAAGKVPPAKILIVGGGVAGLASAGAAKSMGAIVRGFDTRAAALEQFKSLGAEPLEVDLKESGEGQGGYAKEMSKEFIEAEMKLFAQQCKEVDILISTALIPGKKAPVLFNKEMIESMKEGSVVVDLAAEAGGNFETTKPGELYIHKGITHIGYTDLPSRMATQASTLYSNNITKLLKAISPDKDNFYFDVKDDFDFGTMGHVIRGTVVMKDGKVIFPAPTPKNIPQGAPVKQKTVAELEAEKAATITPFRKTMSTASAYTAGLTGILGLGIAAPNLAFSQMVTTFGLAGIVGYHTVWGVTPALHSPLMSVTNAISGLTAVGGLALMGGHLYPSTTSQGLAALAAFISSVNIAGGFLVTQRMLDMFKRPTDPPEYNYLYLLPAGTFVGGYLAALYSGYNIEQIMYLGSGLCCVGALAGLSTQGTARLGNALGMIGVAGGLAATLGVLKPGPELLAQMSGAMALGGTIGLTIAKRIQISDLPQLVAAFHSLVGLAAVLTCIAEYIIEYPHFATDAAANLTKIVAYLGTYIGGVTFSGSLIAYGKLQGLLKSAPLLLPGRHLLNAGLLAASVGGIIPFMVDPSFTTGITCLGSVSALSAVMGVTLTAAIGGADMPVVITVLNSYSGWALCAEGFLLNNNLLTIVGALIGSSGAILSYIMCVAMNRSLANVILGGYGTTSTAGGKPMEISGTHTEINLDNAIDMIREANSIIITPGYGLCAAKAQYPIADLVKMLTEQGKKVRFGIHPVAGRMPGQLNVLLAEAGVPYDIVLEMDEINHDFPDTDLVLVIGANDTVNSAAQEDPNSIIAGMPVLEVWKSKQVIVMKRSLGVGYAAVDNPIFYKPNTAMLLGDAKKTCDALQAKVRESYQK

SEQ ID NO: 8565 - protein, 1086 aa, Homo sapiens; identical to SEQ ID NO: 8564

SEQ ID NO: 8566 - protein, 1086 aa, Homo sapiens; identical to SEQ ID NO: 8564

SEQ ID NO: 8567 - protein, 535 aa, Homo sapiens
MDLIPNLAVETWLLLAVSLILLYLYGTRTHGLFKKLGIPGPTPLPFLGNALSFRKGYWTFDMECYKKYRKVWGIYDCQQPMLAITDPDMIKTVLVKECYSVFTNRRPFGPVGFMKNAISIAEDEEWKRIRSLLSPTFTSGKLKEMVPIIAQYGDVLVRNLRREAETGKPVTLKHVFGAYSMDVITSTSFGVSIDSLNNPQDPFVENTKKLLRFNPLDPFVLSIKVFPFLTPILEALNITVFPRKVISFLTKSVKQIKEGRLKETQKHRVDFLQLMIDSQNSKDSETHKALSDLELMAQSIIFIFAGYETTSSVLSFIIYELATHPDVQQKVQKEIDTVLPNKAPPTYDTVLQLEYLDMVVNETLRLFPVAMRLERVCKKDVEINGMFIPKGVVVMIPSYVLHHDPKYWTEPEKFLPERFSKKNKDNIDPYIYTPFGSGPRNCIGMRFALVNMKLALVRVLQNFSFKPCKETQIPLKLRFGGLLLTEKPIVLKAESRDETFVDMEPIHMDFLRSLAFQGPHLCFFWELLCPTIRSR

SEQ ID NO: 8568 - protein, 503 aa, Homo sapiens
MDLIPNLAVETWLLLAVSLILLYLYGTRTHGLFKKLGIPGPTPLPFLGNALSFRKGYWTFDMECYKKYRKVWGIYDCQQPMLAITDPDMIKTVLVKECYSVFTNRRPFGPVGFMKNAISIAEDEEWKRIRSLLSPTFTSGKLKEMVPIIAQYGDVLVRNLRREAETGKPVTLKHVFGAYSMDVITSTSFGVSIDSLNNPQDPFVENTKKLLRFNPLDPFVLSIKVFPFLTPILEALNITVFPRKVISFLTKSVKQIKEGRLKETQKHRVDFLQLMIDSQNSKDSETHKALSDLELMAQSIIFIFAGYETTSSVLSFIIYELATHPDVQQKVQKEIDTVLPNKAPPTYDTVLQLEYLDMVVNETLRLFPVAMRLERVCKKDVEINGMFIPKGVVVMIPSYVLHHDPKYWTEPEKFLPERFSKKNKDNIDPYIYTPFGSGPRNCIGMRFALVNMKLALVRVLQNFSFKPCKETQIPLKLRFGGLLLTEKPIVLKAESRDETVSGA

SEQ ID NO: 8569 - protein, 353 aa, Homo sapiens
MTPYDSRCPPKLQISAPAQLPPHSLPSSGTQFPNPPAHSLRHRPSRRRERDTKRHGASSPPKPAACGHPNAPCARDTADPAPLCSLTAFFPPGPLHPIAARSPNQKATSRNAPLSSKASYPQGPFHSRGQAKPLCLCLGLRPPAQPPRFPSASPCQSNLVPNAAAEVFRDTFASPLEEPVTKRDVLSGVPSEQRNSLMVMEAVHFSEGTEKRLEVWFSWQQPNANQGSGDLRTIPRSEKVISQPDQTLENLMSGLDPAVMDQFYMKDGVTAKDVICESGIHNLIPGSVINATMFNPYGYSMNGMKSDGTYWTIHITPEPESFYKIEGFKRLDCQSAMFNDYNFVFTSFAKKQQ

SEQ ID NO: 8570 - protein, 354 aa, Homo sapiens [sequence omitted]

SEQ ID NO: 8571 - protein, 1462 aa, Homo sapiens
MAPVHGDDSLSDSGSFVSSRARREKKSKKGRQEALERLKKAKAGEKYKYEVEDFTGVYEEVDEEQYSKLVQARQDDDWIVDDDGIGYVEDGREIFDDDLEDDALDADEKGKDGKARNKDKRNVKKLAVTKPNNIKSMFIACAGKKTADKAVDLSKDGLLGDILQDLNTETPQITPPPVMILKKKRSIGASPNPFSVHTATAVPSGKIASPVSRKEPPLTPVPLKRAEFAGDDVQVESTEEEQESGAMEFEDGDFDEPMEVEEVDLEPMAAKAWDKESEPAEEVKQEADSGKGTVSYLGSFLPDVSCWDIDQEGDSSFSVQEVQVDSSHLPLVKGADEEQVFHFYWLDAYEDQYNQPGVVFLFGKVWIESAETHVSCCVMVKNIERTLYFLPREMKIDLNTGKETGTPISMKDVYEEFDEKIATKYKIMKFKSKPVEKNYAFEIPDVPEKSEYLEVKYSAEMPQLPQDLKGETFSHVFGTNTSSLELFLMNRKIKGPCWLEVKSPQLLNQPVSWCKVEAMALKPDLVNVIKDVSPPPLVVMAFSMKTMQNAKNHQNEIIAMAALVHHSFALDKAAPKPPFQSHFCVVSKPKDCIFPYAFKEVIEKKNVKVEVAATERTLLGFFLAKVHKIDPDIIVGHNIYGFELEVLLQRINVCKAPHWSKIGRLKRSNMPKLGGRSGFGERNATCGRMICDVEISAKELIRCKSYHLSELVQQILKTERVVIPMENIQNMYSESSQLLYLLEHTWKDAKFILQIMCELNVLPLALQITNIAGNIMSRTLMGGRSERNEFLLLHAFYENNYIVPDKQIFRKPQQKLGDEDEEIDGDTNKYKKGRKKAAYAGGLVLDPKVGFYDKFILLLDFNSLYPSIIQEFNICFTTVQRVASEAQKVTEDGEQEQIPELPDPSLEMGILPREIRKLVERRKQVKQLMKQQDLNPDLILQYDIRQKALKLTANSMYGCLGFSYSRFYAKPLAALVTYKGREILMHTKEMVQKMNLEVIYGDTDSIMINTNSTNLEEVFKLGNKVKSEVNKLYKLLEIDIDGVFKSLLLLKKKKYAALVVEPTSDGNYVTKQELKGLDIVRRDWCDLAKDTGNFVIGQILSDQSRDTIVENIQKRLIEIGENVLNGSVPVSQFEINKALTKDPQDYPDKKSLPHVHVALWINSQGGRKVKAGDTVSYVICQDGSNLTASQRAYAPEQLQKQDNLTIDTQYYLAQQIHPVVARICEPIDGIDAVLIATWLGLDPTQFRVHHYHKDEENDALLGGPAQLTDEEKYRDCERFKCPCPTCGTENIYDNVFDGSGTDMEPSLYRCSNIDCKASPLTFTVQLSNKLIMDIRRFIKKYYDGWLICEEPTCRNRTRHLPLQFSRTGPLCPACMKATLQPEYSDKSLYTQLCFYRYIFDAECALEKLTTDHEKDKLKKQFFTPKVLQDYRKLKNTAEQFLSRSGYSEVNLSKLFAGCAVKS

SEQ ID NO: 8572 - protein, 137 aa, Homo sapiens [sequence omitted]

SEQ ID NO: 8573 - protein, 230 aa, Homo sapiens
MKNPMLEVVSLLLEKLLLISNFTLFSSGAAGEDKGRNSFYETSSFHRGDVLEVPRTHLTHYGIYLGDNRVAHMMPDILLALTDDMGRTQKVVSNKRLILGVIVKVASIRVDTVEDFAYGANILVNHLDESLQKKALLNEEVARRAEKLLGFTPYSLLWNNCEHFVTYCRYGTPISPQSDKFCETVKIIIRDQRSVLASAVLGLASIVCTGLVSYTTLPAIFIPFFLWMAG

SEQ ID NO: 8574 - protein, 142 aa, Homo sapiens [sequence omitted]

SEQ ID NO: 8575 - protein, 338 aa, Homo sapiens
MAYSGKGYHGMQRNVGSSQFKTIEDDLVSALVRSGCIPENHGEDMRKMSFQRCARTDKGVSAAGQVVSLKVWLIDDILEKINSHLPSHIRILGLKRVTGGFNSKNRCDARTYCYLLPTFAFAHKDRDVQDETYRLSAETLQQVNRLLACYKGTHNFHNFTSQKGPQDPSACRYILEMYCEEPFVREGLEFAVIRVKGQSFMMHQIRKMVGLVVAIVKGYAPESVLERSWGTEKVDVPKAPGLGLVLERVHFEKYNQRFGNDGLHEPLDWAQEEGKVAAFKEEHIYPTIIGTERDERSMAQWLSTLPIHNFSATALTAGGTGAKVPSPLEGSEGDGDTD

SEQ ID NO: 8576 - protein, 338 aa, Homo sapiens; identical to SEQ ID NO: 8575

SEQ ID NO: 8577 - protein, 162 aa, Homo sapiens
MYCEEPFVREGLEFAVIRVKGQSFMMHQIRKMVGLVVAIVKGYAPESVLERSWGTEKVDVPKAPGLGLVLERVHFEKYNQRFGNDGLHEPLDWAQEEGKVAAFKEEHIYPTIIGTERDERSMAQWLSTLPIHNFSATALTAGGTGAKVPSPLEGSEGDGDTD

SEQ ID NO: 8578 - protein, 432 aa, Homo sapiens [sequence omitted]

SEQ ID NO: 8579 - protein, 338 aa, Homo sapiens; identical to SEQ ID NO: 8575

SEQ ID NO: 8580 - protein, 148 aa, Homo sapiens
MFQRRYYKPGLLLMCFILPTLVPWCFWGETFQNSVFVATFLRYAVVLNATWLVNSAAHLFRYRPYDKNISLRENILVSPGAVGEGFHNYHHSFPYDYSASEYRWHINFTTFFIDCMAAFGLAYDQKKVSKAAILARIKRTGEGNYKSG

SEQ ID NO: 8581 - protein, 148 aa, Homo sapiens; identical to SEQ ID NO: 8580

SEQ ID NO: 8582 - protein, 466 aa, Homo sapiens
MAMDVTRSQAQTALTLVEQILAEFQLQEEDLKKVMRRMQKEMDRGLRLETHEEASVKMLPTYVRSTPEGSEVGDFLSLDLGGTNFRVMLVKVGEGEEGQWSVKTKHQMYSIPEDAMTGTAEMLFDYISECISDFLDKHQMKHKKLPLGFTFSFPVRHEDIDKGILLNWTKGFKASGAEGNNVVGLLRDAIKRRGDFEMDVVAMVNDTVATMISCYYEDHQCEVGMIVGTGCNACYMEEMQNVELVEGDEGRMCVNTEWGAFGDSGELDEFLLEYDRLVDESSANPGQQLYEKLIGGKYMGELVRLVLLRLVDENLLFHGEASEQLRTRGAFETRFVSQVESDTGDRKQIYNILSTLGLRPSTTDCDIVRRACESVSTRAAHMCSAGLAGVINRMRESRSEDVMRITVGVDGSVYKLHPSFKERFHASVRRLTPSCEITFIESEEGSGRGAALVSAVACKKACMLGQ

SEQ ID NO: 8583 - protein, 465 aa, Homo sapiens [sequence omitted]

SEQ ID NO: 8584 - protein, 464 aa, Homo sapiens
MPRPRSQLPQPNSQVEQILAEFQLQEEDLKKVMRRMQKEMDRGLRLETHEEASVKMLPTYVRSTPEGSEVGDFLSLDLGGTNFRVMLVKVGEGEEGQWSVKTKHQMYSIPEDAMTGTAEMLFDYISECISDFLDKHQMKHKKLPLGFTFSFPVRHEDIDKGILLNWTKGFKASGAEGNNVVGLLRDAIKRRGDFEMDVVAMVNDTVATMISCYYEDHQCEVGMIVGTGCNACYMEEMQNVELVEGDEGRMCVNTEWGAFGDSGELDEFLLEYDRLVDESSANPGQQLYEKLIGGKYMGELVRLVLLRLVDENLLFHGEASEQLRTRGAFETRFVSQVESDTGDRKQIYNILSTLGLRPSTTDCDIVRRACESVSTRAAHMCSAGLAGVINRMRESRSEDVMRITVGVDGSVYKLHPSFKERFHASVRRLTPSCEITFIESEEGSGRGAALVSAVACKKACMLGQ

SEQ ID NO: 8585 - protein, 242 aa, Homo sapiens
MLPKRRRARVGSPSGDAASSTPPSTRFPGVAIYLVEPRMGRSRRAFLTGLARSKGFRVLDACSSEATHVVMEETSAEEAVSWQERRMAAAPPGCTPPALLDISWLTESLGAGQPVPVECRHRLEVAGPRKGPLSPAWMPAYACQRPTPLTHHNTGLSEALEILAEAAGFEGSEGRLLTFCRAASVLKALPSPVTTLSQLQGLPHFGEHSSRVVQELLEHGVCEEVERVRRSESSSPRSSGSV

SEQ ID NO: 8586 - protein, 494 aa, Homo sapiens
MLPKRRRARVGSPSGDAASSTPPSTRFPGVAIYLVEPRMGRSRRAFLTGLARSKGFRVLDACSSEATHVVMEETSAEEAVSWQERRMAAAPPGCTPPALLDISWLTESLGAGQPVPVECRHRLEVAGPRKGPLSPAWMPAYACQRPTPLTHHNTGLSEALEILAEAAGFEGSEGRLLTFCRAASVLKALPSPVTTLSQLQGLPHFGEHSSRVVQELLEHGVCEEVERVRRSERYQTMKLFTQIFGVGVKTADRWYREGLRTLDDLREQPQKLTQQQKAGLQHHQDLSTPVLRSDVDALQQVVEEAVGQALPGATVTLTGGFRRGKLQGHDVDFLITHPKEGQEAGLLPRVMCRLQDQGLILYHQHQHSCCESPTRLAQQSHMDAFERSFCIFRLPQPPGAAVGGSTRPCPSWKAVRVDLVVAPVSQFPFALLGWTGSKLFQRELRRFSRKEKGLWLNSHGLFDPEQKTFFQAASEEDIFRHLGLEYLPPEQRNA

SEQ ID NO: 8587 - protein, 494 aa, Homo sapiens; identical to SEQ ID NO: 8586

SEQ ID NO: 8588 - protein, 253 aa, Homo sapiens
MATHRLVMVRHGESTWNQENRFCGWFDAELSEKGTEEAKRGAKAIKDAKMEFDICYTSVLKRAIRTLWAILDGTDQMWLPVVRTWRLNERHYGGLTGLNKAETAAKHGEEQVKIWRRSFDIPPPPMDEKHPYYNSISKERRYAGLKPGELPTCESLKDTIARALPFWNEEIVPQIKAGKRVLIAAHGNSLRGIVKHLEGMSDQAIMELNLPTGIPIVYELNKELKPTKPMQFLGDEETVRKAMEAVAAQGKAK

SEQ ID NO: 8589 - protein, 625 aa, Homo sapiens
MSENLDNEGPKPMESCGQESSSALSCPTVSVPPAAPAALEEVEKEGAGAATGPGPQPGLYSYIRDDLFTSEIFKLELQNVPRHASFSDVRRFLGRFGLQPHKTKLFGQPPCAFVTFRSAAERDKALRVLHGALWKGRPLSVRLARPKADPMARRRRQEGESEPPVTRVADVVTPLWTVPYAEQLERKQLECEQVLQKLAKEIGSTNRALLPWLLEQRHKHNKACCPLEGVRPSPQQTEYRNKCEFLVGVGVDGEDNTVGCRLGKYKGGTCAVAAPFDTVHIPEATKQVVKAFQEFIRSTPYSAYDPETYTGHWKQLTVRTSRRHQAMAIAYFHPQKLSPEELAELKTSLAQHFTAGPGRASGVTCLYFVEEGQRKTPSQEGLPLEHVAGDRCIHEDLLGLTFRISPHAFFQVNTPAAEVLYTVIQDWAQLDAGSMVLDVCCGTGTIGLALARKVKRVIGVELCPEAVEDARVNAQDNELSNVEFHCGRAEDLVPTLVSRLASQHLVAILDPPRAGLHSKVILAIRRAKNLRRLLYVSCNPRAAMGNFVDLCRAPSNRVKGIPFRPVKAVAVDLFPQTPHCEMLILFERVEHPNGTGVLGPHSPPAQPTPGPPDNTLQETGTFPSS

SEQ ID NO: 8590 - protein, 562 aa, Homo sapiens
MSENLDNEGPKPMESCGQESSSALSCPTVSVPPAAPAALEEVEKEGAGAATGPGPQPGLYSYIRDDLFTSEIFKLELQNVPRHASFSDVRRFLGRFGLQPHKTKLFGQPPCAFVTFRSAAERDKALRVLHGALWKGRPLSVRLARPKADPMARRRRQEGESEPPVTRVADVVTPLWTVPYAEQLERKQLECEQVLQKLAKEIGSTNRALLPWLLEQRHKHNKACCPLEGVRPSPQQTEYRNKCEFLVGVGVDGEDNTVGCRLGKYKGGTCAVAAPFDTVHIPEATKQVVKAFQEFIRSTPYSAYDPETYTGHWKQLTVRTSRRHQAMAIAYFHPQKLSPEELAELKTSLAQHFTAGPGRASGVTCLYFVEEGQRKTPSQEGLPLEHVAGDRCIHEDLLGLTFRISPHAFFQVNTPAAEVLYTVIQDWAQLDAGSMVLDVCCGTGTIGLALARKVKRVIGVELCPEAVEDARVNAQDNELSNVEFHCGRAEDLVPTLVSRLASQHLVAILDPPRAGLHSKVILAIRRAKNLRRLLYVSCNPRAAMGNFVDAPLFPPQPLQSPI

SEQ ID NO: 8591 - protein, 562 aa, Homo sapiens; identical to SEQ ID NO: 8590

SEQ ID NO: 8592 - protein, 625 aa, Homo sapiens; identical to SEQ ID NO: 8589

SEQ ID NO: 8593 - protein, 267 aa, Homo sapiens
MVSNSAGSNSRQLPLPLSADAPPASSSHWSWQPSRHTNQPIDRAILRSRPCCRLSRTCHWSLQPPHPPRRASGWAASLGRAAVPARARLASLVRAGSAGRARLRGAALEETEAAGGPEAQEEDEDEEEALPHSEAMDVFQEGLAMVVQDPLLCDLPIQVTLEEVNSQIALEYGQAMTVRVCKMDGEVMPVVVVQSATVLDLKKAIQRYVQLKQEREGGIQHISWSYVWRTYHLTSAGEKLTEDRKKLRDYGIRNRDEVSFIKKLRQK

SEQ ID NO: 8594 - protein, 173 aa, Homo sapiens
MMGWSCLVTGAGGFPGQRIVNLLVKEKELKEIRALDKAFRSGLREKCSKLQNKTKMTVLEGDILDQSCLKRACQDISVVIHTASIIDIFGVTHRESIMNFNVKGTQQLLEACVQASVLVFIHTSSIQVAWPNSYKEIFQNRHKQEHLENTWSAPYPYSKNLLRRLCWWLMCGL

SEQ ID NO: 8595 - protein, 207 aa, Homo sapiens
AIPEESLPGHVGHHPHCLYHICHRCHSQSTQLLLEACVQATVPIFIYTSTLEVARPNSYKEIIQNGHEEEPLENTWYAPYPHSKKLAEKAVLAANGLTLKNGGTLYTCAVRPMFIYGEGSPILSAGINEALNNHGILSSFSKFSRVNPVYVGNIAWAHILALRALREPKKAPSVRGQFYYISDDTPHQSYDNLSYTLSKEFGLCLDS

SEQ ID NO: 8596 - protein, 479 aa, Homo sapiens
MEKGLTLPQDCRDFVHSLKMRSKYALFLVFVVIVFVFIEKENKIISRVSDKLKQIPQALADANSTDPALILAENASLLSLSELDSAFSQLQSRLRNLSLQLGVEPAMEAAGEEEEEQRKEEEPPRPAVAGPRRHVLLMATTRTGSSFVGEFFNQQGNIFYLFEPLWHIERTVSFEPGGANAAGSALVYRDVLKQLFLCDLYVLEHFITPLPEDHLTQFMFRRGSSRSLCEDPVCTPFVKKVFEKYHCKNRRCGPLNVTLAAEACRRKEHMALKAVRIRQLEFLQPLAEDPRLDLRVIQLVRDPRAVLASRMVAFAGKYKTWKKWLDDEGQDGLREEEVQRLRGNCESIRLSAELGLRQPAWLRGRYMLVRYEDVARGPLQKAREMYRFAGIPLTPQVEDWIQKNTQAAHDGSGIYSTQKNSSEQFEKWRFSMPFKLAQVVQAACGPAMRLFGYKLARDAAALTNRSVSLLEERGTFWVT

SEQ ID NO: 8597 - protein, 435 aa, Homo sapiens
MAAHLLPICALFLTLLDMAQGFRGPLLPNRPFTTVWNANTQWCLERHGVDVDVSVFDVVANPGQTFRGPDMTIFYSSQLGTYPYYTPTGEPVFGGLPQNASLIAHLARTFQDILAAIPAPDFSGLAVIDWEAWRPRWAFNWDTKDIYRQRSRALVQAQHPDWPAPQVEAVAQDQFQGAARAWMAGTLQLGRALRPRGLWGFYGFPDCYNYDFLSPNYTGQCPSGIRAQNDQLGWLWGQSRALYPSIYMPAVLEGTGKSQMYVQHRVAEAFRVAVAAGDPNLPVLPYVQIFYDTTNHFLPLDELEHSLGESAAQGAAGVVLWVSWENTRTKESCQAIKEYMDTTLGPFILNVTSGALLCSQALCSGHGRCVRRTSHPKALLLLNPASFSIQLTPGGGPLSLRGALSLEDQAQMAVEFKCRCYPGWQAPWCERKSMW

SEQ ID NO: 8598 - protein, 435 aa, Homo sapiens; identical to SEQ ID NO: 8597

SEQ ID NO: 8599 - protein, 435 aa, Homo sapiens; identical to SEQ ID NO: 8597

SEQ ID NO: 8600 - protein, 165 aa, Homo sapiens
MGPLPVCLPIMLLLLLPSLLLLLLLPGPGSGEASRILRVHRRGILELAGTVGCVGPRTPIAYMKYGCFCGLGGHGQPRDAIDWCCHGHDCCYTRAEEAGCSPKTERYSWQCVNQSVLCGPAENKCQELLCKCDQEIANCLAQTEYNLKYLFYPQFLCEPDSPKCD

SEQ ID NO: 8601 - protein, 280 aa, Homo sapiens
MGKADVWLIRNSWNFQFPHPLLPNVDFVGGLHCKPAKPLPKEMEDFVQSSGENGVVVFSLGSMVSNMTEERANVIASALAQIPQKVLWRFDGNKPDTLGLNTRLYKWIPQNDLLGHPKTRAFITHGGANGIYEAIYHGIPMVGIPLFADQPDNIAHMKARGAAVRVDFNTMSSTDLLNALKRVINDPSYKENVMKLSRIQHDQPVKPLDRAVFWIEFVMRHKGAKHLRVAAHDLTWFQYHSLDVIGFLLVCVATVIFIVTKCCLFCFWKFARKAKKGKND

SEQ ID NO: 8602 - protein, 280 aa, Homo sapiens; identical to SEQ ID NO: 8601

SEQ ID NO: 8603 - protein, 521 aa, Homo sapiens [sequence omitted]

SEQ ID NO: 8604 - protein, 454 aa, Homo sapiens
VYPASLTKTELEDIIMQLVKRWSDLPKDTFWLYFSQVQEIMSIFGDITRKFCKDVVSNKKFMKKVQESRFDVIFADAIFPCSELLAELFNIPFVYSLSFSPGYTFEKHSGGFIFPPSYVPVVMSELTDQMTFMERVKNMIYVLYFDFWFEIFDMKKWDQFYSEVLGRPTTLSETMGKADVWLIRNSWNFQFPHPLLPNVDFVGGLHCKPAKPLPKEMEDFVQSSGENGVVVFSLGSMVSNMTEERANVIASALAQIPQKVLWRFDGNKPDTLGLNTRLYKWIPQNDLLGHPKTRAFITHGGANGIYEAIYHGIPMVGIPLFADQPDNIAHMKARGAAVRVDFNTMSSTDLLNALKRVINDPSYKENVMKLSRIQHDQPVKPLDRAVFWIEFVMRHKGAKHLRVAAHDLTWFQYHSLDVIGFLLVCVATVIFIVTKCCLFCFWKFARKAKKGKND

SEQ ID NO: 8605 - protein, 280 aa, Homo sapiens; identical to SEQ ID NO: 8601

SEQ ID NO: 8606 - protein, 530 aa, Homo sapiens
MSLKWTSVFLLIQLSCYFSSGSCGKVLVWPTEYSHWINMKTILEELVQRGHEVTVLTSSASTLVNASKSSAIKLEVYPTSLTKNYLEDSLLKILDRWIYGVSKNTFWSYFSQLQELCWEYYDYSNKLCKDAVLNKKLMMKLQESKFDVILADALNPCGELLAELFNIPFLYSLRFSVGYTFEKNGGGFLFPPSYVPVVMSELSDQMIFMERIKNMIHMLYFDFWFQIYDLKKWDQFYSEVLGRPTTLFETMGKAEMWLIRTYWDFEFPRPFLPNVDFVGGLHCKPAKPLPKEMEEFVQSSGENGIVVFSLGSMISNMSEESANMIASALAQIPQKVLWRFDGKKPNTLGSNTRLYKWLPQNDLLGHPKTKAFITHGGTNGIYEAIYHGIPMVGIPLFADQHDNIAHMKAKGAALSVDIRTMSSRDLLNALKSVINDPVYKENVMKLSRIHHDQPMKPLDRAVFWIEFVMRHKGAKHLRVAAHNLTWIQYHSLDVIAFLLACVATVIFIITKFCLFCFRKLAKKGKKKKRD

SEQ ID NO: 8607 - protein, 530 aa, Homo sapiens; identical to SEQ ID NO: 8606

SEQ ID NO: 8608 - protein, 140 aa, Homo sapiens
MVGIPLFFDQPDNIAHMKAKGAAVRVDFNTMSSTDLLNALKTVINDPSYKENIMKLSRIQHDQPVKPLDRAVFWIEFVMRHKGAKHLRVAAHNLTWFQYHSLDVIGFLLACVATVLFIITKCCLFCFWKFARKGKKGKRD

SEQ ID NO: 8609 - protein, 528 aa, Homo sapiens
MALKWTTVLLIQLSFYFSSGSCGKVLVWAAEYSLWMNMKTILKELVQRGHEVTVLASSASILFDPNDSSTLKLEVYPTSLTKTEFENIIMQLVKRLSEIQKDTFWLPFSQEQEILWAINDIIRNFCKDVVSNKKLMKKLQESRFDIVFADAYLPCGELLAELFNIPFVYSHSFSPGYSFERHSGGFIFPPSYVPVVMSKLSDQMTFMERVKNMLYVLYFDFWFQIFNMKKWDQFYSEVLGRPTTLSETMRKADIWLMRNSWNFKFPHPFLPNVDFVGGLHCKPAKPLPKEMEEFVQSSGENGVVVFSLGSMVSNMTEERANVIATALAKIPQKVLWRFDGNKPDALGLNTRLYKWIPQNDLLGHPKTRAFITHGGANGIYEAIYHGIPMVGIPLFFDQPDNIAHMKAKGAAVRVDFNTMSSTDLLNALKTVINDPSYKENIMKLSRIQHDQPVKPLDRAVFWIEFVMRHKGAKHLRVAAHNLTWFQYHSLDVIGFLLACVATVLFIITKCCLFCFWKFARKGKKGKRD

SEQ ID NO: 8610 - protein, 280 aa, Homo sapiens
MRKADIWLMRNSWNFKFPHPFLPNVDFVGGLHCKPAKPLPKEMEEFVQSSGENGVVVFSLGSMVSNMTEERANVIATALAKIPQKVLWRFDGNKPDALGLNTRLYKWIPQNDLLGHPKTRAFITHGGANGIYEAIYHGIPMVGIPLFFDQPDNIAHMKAKGAAVRVDFNTMSSTDLLNALKTVINDPSYKENIMKLSRIQHDQPVKPLDRAVFWIEFVMRHKGAKHLRVAAHNLTWFQYHSLDVIGFLLACVATVLFIITKCCLFCFWKFARKGKKGKRD

SEQ ID NO: 8611 - protein, 339 aa, Homo sapiens
MTDRSPFETDMLTLTRYVMEKGRQAKGTGELTQLLNSMLTAIKAISSAVRKAGLAHLYGIAGSVNVTGDEVKKLDVLSNSLVINMLQSSYSTCVLVSEENKDAIITAKEKRGKYVVCFDPLDGSSNIDCLASIGTIFAIYRKTSEDEPSEKDALQCGRNIVAAGYALYGSATLVALSTGQGVDLFMLDPALGEFVLVEKDVKIKKKGKIYSLNEGYAKYFDAATTEYVQKKKFPEDGSAPYGARYVGSMVADVHRTLVYGGIFLYPANQKSPKGKLRLLYECNPVAYIIEQAGGLATTGTQPVLDVKPEAIHQRVPLILGSPEDVQEYLTCVQKNQAGS

SEQ ID NO: 8612 - protein, 134 aa, Homo sapiens
MTLQELVHKAASCYMDRVAVCFDECNNQLPVYYTYKTVVNAASELSNFLLLHCDFQGIREIGLYCQPGIDLPSWILGILQVPAAYVPIEPDSPPSLSTHFMKKCNLKYILVEKKQINVSLDVSIVFCLYYIYFN

SEQ ID NO: 8613 - protein, 223 aa, Homo sapiens
  VARIANT (1)...(223): Xaa = Any Amino Acid
MTLQELVHKAASCYMDRVAVCFDECNNQLPVYYTYKTVVNAASELSNFLLLHCDFQGIREIGLYCQPGIDLPSWILGILQVPAAYVPIEPDSPPSLSTHFMKKCNLKYILVEKKQINKFKSFHETLLNYDTFTVEHNDLVLFRLHWKNTEVNLMLNDGKEKYEKEKIKSISSEHVNEEKAEEHMDLRLKHCLAYVLHTSGTTGIPKIVRVPHKCIVPNIQHFX

SEQ ID NO: 8614 - protein, 287 aa, Homo sapiens
MTLQELVHKAASCYMDRVAVCFDECNNQLPVYYTYKTVVNAASELSNFLLLHCDFQGIREIGLYCQPGIDLPSWILGILQVPAAYVPIEPDSPPSLSTHFMKKCNLKYILVEKKQINKFKSFHETLLNYDTFTVEHNDLVLFRLHWKNTEVNLMLNDGKEKYEKEKIKSISSEHVNEEKAEEHMDLRLKHCLAYVLHTSGTTGIPKIVRVPHKCIVPNIQHFRVLFDITQEDVLFLASPLTFDPSVVEIFLALSSGASLLIVPTSVKLLPSKLASVLFSHHRVTVLQ

SEQ ID NO: 8615 - protein, 194 aa, Homo sapiens [sequence omitted]

SEQ ID NO: 8616 - protein, 194 aa, Homo sapiens [sequence omitted]

SEQ ID NO: 8617 - protein, 232 aa, Homo sapiens
GGGSCGGGGGQRLPARTGVVSGLEHREHRPGAAGCAGAGEAMRTLSWKHTLGLVTMDVELADRTLSVAVTPVQAVILLYFQDQASWTLEELSKAVKMPVALLRRRMSVWLQQGVLREEPPGTFSVIEEERPQDRDNMVLIDSDDESDSGMASQADQKEEELLLFWTYIQAMLTNLESLSLDRIYNMLRMFVVTGPALAEIDLQELQGYLQKKVRDQQLVYSAGVYRLPKNCS

SEQ ID NO: 8618 - protein, 369 aa, Homo sapiens
MMELQWDLESRCVKDGGLKDKEYVGFAALPNQLHRKSVKKGFDFTLMVAGESGLGKSTLINSLFLTNLYEDRQVPEASARLTQTLAIERRGVEIEEGGVKVKLTLVDTPGFGDSVDCSDCWLPVVKFIEEQFEQYLRDESGLNRKNIQDSRVHCCLYFISPFGRGLRPLDVAFLRAVHEKVNIIPVIGKADALMPQETQALKQKIRDQLKEEEIHIYQFPECDSDEDEDFKRQDAEMKESIPFAVVGSCEVVRDGGNRPVRGRRYSWGTVEVENPHHCDFLNLRRMLVQTHLQDLKEVPLLIPVPFPLSRSKLSRQSATEIPLPMLPLADTEKLIREKDEELRRMQEMLEKMQAQMQQSQAQGEQSDAL

SEQ ID NO: 8619 - protein, 287 aa, Homo sapiens
MVAGESGLGKSTLINSLFLTNLYEDRQVPEASARLTQTLAIERRGVEIEEGGVKVKLTLVDTPGFGDSVDCSDCWLPVVKFIEEQFEQYLRDESGLNRKNIQDSRVHCCLYFISPFGRGLRPLDVAFLRAVHEKVNIIPVIGKADALMPQETQALKQKIRDQLKEEEIHIYQFPECDSDEDEDFKRQDAEMKESIPFAVVGSCEVVRDGGNRPVRGRRYSWGTVEVENPHHCDFLNLRRMLVQTHLQDLKEVTHDLLYEGYRAAVSFPARAPQRSRCPCCLWRTPRS

SEQ ID NO: 8620 - protein, 333 aa, Homo sapiens
MMELQWDLESRCVKDGGLKDKEYVGFAALPNQLHRKSVKKGFDFTLMVAGESGLGKSTLINSLFLTNLYEDRQVPEASARLTQTLAIERRGVEIEEGGVKVKLTLVDTPGFGDSVDCSDCWLPVVKFIEEQFEQYLRDESGLNRKNIQDSRVHCCLYFISPFGRGLRPLDVAFLRAVHEKVNIIPVIGKADALMPQETQALKQKIRDQLKEEEIHIYQFPECDSDEDEDFKRQDAEMKESIPFAVVGSCEVVRDGGNRPVRGRRYSWGTVEVENPHHCDFLNLRRMLVQTHLQDLKEVTHDLLYEGYRAAVSFPARAPQRSRCPCCLWRTPRS

SEQ ID NO: 8621 - protein, 330 aa, Homo sapiens
MDSCVIPLRHGGLSLVQTTDFFYPLVEDPYMMGRIACANVLSDLYAMGITECDNMLMLLSVSQSMSEEEREKVTPLMVKGFRDAAEEGGTAVTGGQTVVNPWIIIGGVATVVCQPNEFIMPDSAVVGDVLVLTKPLGTQVAVNAHQWLDNPERWNKVKMVVSREEVELAYQEAMFNMATLNRTAAGLMHTFNAHAATDITGFGILGHSQNLAKQQRNEVSFVIHNLPIIAKMAAVSKASGRFGLLQGTSAETSGGLLICLPREQAARFCSEIKSSKYGEGHQAWIVGIVEKGNRTARIIDKPRVIEVLPRGATAAVLAPDSSNASSEPSS

SEQ ID NO: 8622 - protein, 245 aa, Homo sapiens
MAGLELLSDQGYRVDGRRAGELRKIQARMGVFAQADGSAYIEQGNTKALAVVYGPHEIRGSRARALPDRALVNCQYSSATFSTGERKRRPHGDRKSCEMGLQLRQTFEAAILTQLHPRSQIDIYVQVLQADGGTYAACVNAATLAVLDAGIPMRDFVCACSAGFVDGTALADLSHVEEAAGGPQLALALLPASGQIALLEMDARLHEDHLERVLEAAAQAARDVHTLLDRVVRQHVREASILLGD

SEQ ID NO: 8623 - protein, 171 aa, Homo sapiens
MAAETWNVAEAEAPQPQKRYYRQCAQSNPMADHTLRYPVKPEEMDWSELYPEFFAPLTQNQSHDDPKDKKEKRAQAQAESADIGCGYGGLLVELSPLFPDTLILGLEIQVKVSDYVQDRIWALRAAPGDKAQAANHQSHSASKICLRAESWGVGIYDNPCAGATRLDVHSF

SEQ ID NO: 8624 - protein, 152 aa, Homo sapiens [sequence omitted]

SEQ ID NO: 8625 - protein, 214 aa, Homo sapiens
MAAETWNVAEAEAPQPQKRYYRQCAQSNPMADHTLRYPVKPEEMDWSELYPEFFAPLTQNQSHDDPKDKKEKRAQAQAESADIGCGYGGLLLTKMFFLFPDPHFKQIKHKRQIISPTLLAKYAYVLRVGGLVYTITHVLELHDWMCTHFEEHPLFERMPVEDLSEDSIVGHLGTSTEEGKKVLRNGGKNFPAIFRRIQDPVLQAVTPQTSLPGH

SEQ ID NO: 8626 - protein, 319 aa, Homo sapiens
MLFNIHSLEWDKQLCEFFGIPMEILPNVRSSSEIYGLMKAGALEGVPISGCLGDQSAALVGQMCFQIGQAKNTYGTGCFLLCNTGHKCVFSDHGLLTTVAYKLGRDKPVYYALEGSVAIAGAVIRWLRDNLGIIKTSEEIEKLAKEVGTSYGCYFVPAFSGLYAPYWEPSTRGIICGLTQFTNKCHIAFAALEAVCFQTREILDAMNRDCGIPLSHLQVDGGMTSNKILMQLQADILYIPVVKPSMPETTALGAAMEAGAAEGVGVWSLEPEDLSAVTMERFEPQINAEESEIRYSTWKKAVMKSMGWVTTQSPESGIP

SEQ ID NO: 8627 - protein, 220 aa, Homo sapiens
MSGGSMDYNRERGSPEGMDPDGAIESNCNEIVDNFDDMNLKESLLWGIYAYDFEKSSAIQQRAIITCMKGYDVIAQAQSGTGKTATFAISILQLAPTRELAPQIQKVILALGDYMGATCHACIGGTNVQTEMQKLQAEAPHIVVGTLGRVFDMLNRRYLFPKWIKMLVLDEADEMLSHGFKDEIYEIFQKLNTSIQVVLLSATMPTDVLEVTKKFMRDPI

SEQ ID NO: 8628 - protein, 106 aa, Homo sapiens
MGATCHACIGGTNVQTEMQKLQAEAPHIVVGTLGRVFDMLNRRYLFPKWIKMLVLDEADEMLSHGFKDEIYEIFQKLNTSIQVVLLSATMPTDVLEVTKKFMRDPI

SEQ ID NO: 8629 - protein, 223 aa, Homo sapiens
MSGGSMDYNRERGSPEGMDPDGAIESNCNEIVDNFDDMNLKESLLWGIYAYDFEKSSAIQQRAIITCMKGYDVIAQAQSGTGKTATFAISILQQLEMAPTRELAPQIQKVILALGDYMGATCHACIGGTNVQTEMQKLQAEAPHIVVGTLGRVFDMLNRRYLFPKWIKMLVLDEADEMLSHGFKDEIYEIFQKLNTSIQVVLLSATMPTDVLEVTKKFMRDPI

SEQ ID NO: 8630 - protein, 312 aa, Homo sapiens
MRMLLALLALSAARPSASAESHWCYEVQAESSNYPCLVPVKWGGNCQKDRQSPINIVTTKAKVDKKLGRFFFSGYDKKQTWTVQNNGHSVMMLLENKASISGGGLPAPYQAKQLHLHWSDLPYKGSEHSLDGEHFAMEMHIVHEKEKGTSRNVKEAQDPEDEIAVLAFLVEAGTQVNEGFQPLVEALSNIPKPEMSTTMAESSLLDLLPKEEKLRHYFRYLGSLTTPTCDEKVVWTVFREPIQLHREQILAFSQKLYYDKEQTVSMKDNVRPLQQLGQRTVIKSGAPGRPLPWALPALLGPMLACLLAGFLR

SEQ ID NO: 8631 - protein, 294 aa, Homo sapiens
MRMLLALLALSAARPSASAVPVKWGGNCQKDRQSPINIVTTKAKVDKKLGRFFFSGYDKKQTWTVQNNGHSVMMLLENKASISGGGLPAPYQAKQLHLHWSDLPYKGSEHSLDGEHFAMEMHIVHEKEKGTSRNVKEAQDPEDEIAVLAFLVEAGTQVNEGFQPLVEALSNIPKPEMSTTMAESSLLDLLPKEEKLRHYFRYLGSLTTPTCDEKVVWTVFREPIQLHREQILAFSQKLYYDKEQTVSMKDNVRPLQQLGQRTVIKSGAPGRPLPWALPALLGPMLACLLAGFLR

SEQ ID NO: 8632 - protein, 154 aa, Homo sapiens [sequence omitted]

SEQ ID NO: 8633 - protein, 154 aa, Homo sapiens [sequence omitted]

SEQ ID NO: 8634 - protein, 214 aa, Homo sapiens
MPIIFGSGTVVTVLQQLANEFPFPVNIILSNPWLFEPLISRFMERNPLTNAIIRTTTALTIFKAGVKFNVIPPVAQATVNFRIHPGQTVQEVLELTKNIVADNRVQFHVLSAFDPLPVSPSDDKALGYQLLRQTVQSVFPEVNITAPDSRFFTNLTTGIYRFYPIYIQPEDFKRIHGVNEKISVQAYETQVKFIFELIQNADTDQEPVSHLHKL

SEQ ID NO: 8635 - protein, 144 aa, Homo sapiens
MICRRHLILESRPLAFRPSPTLPHPLCTDRWCIRGRAELEQDILDSAAVTIIQKWHIKGRPALHPAGVLGHVEAPFSLVLQLERSRFLKNRWESAGARYPGREEGNEIRHRGCGDRGSQEAAVRCKGPPTRPAVELPPRLPVLS

SEQ ID NO: 8636 - protein, 88 aa, Homo sapiens [sequence omitted]

SEQ ID NO: 8637 - protein, 212 aa, Homo sapiens
MRPRGTATHGQPRCHRRPRCHDTPARTRVRTRRIPGTGRWRKTASATMRTRRPPRTGATSVHQSGRAERPAPPPPAAASATLWTRPPPAHSAPRASPSAPPAPWARSVTKSAPPHSPPVLPLCSRERMQRGAAPKPPLQICTGCGPAVPPPSPPNTPPPPAPVSKFLHSRIHKAVPFSGSRICIISALESPGPGPLPRGQESAITLRWCQRF

SEQ ID NO: 8638 - protein, 212 aa, Homo sapiens; identical to SEQ ID NO: 8637

SEQ ID NO: 8639 - protein, 603 aa, Homo sapiens
MGNWVVNHWFSVLFLVVWLGLNVFLFVDAFLKYEKADKYYYTRKILGSTLACARASALCLNFNSTLILLPVCRNLLSFLRGTCSFCSRTLRKQLDHNLTFHKLVAYMICLHTAIHIIAHLFNFDCYSRSRQATDGSLASILSSLSHDEKKGGSWLNPIQSRNTTVEYVTFTSIAGLTGVIMTIALILMVTSATEFIRRSYFEVFWYTHHLFIFYILGLGIHGIGGIVRGQTEESMNESHPRKCAESFEMWDDRDSHCRRPKFEGHPPESWKWILAPVILYICERILRFYRSQQKVVITKVKNMHFPLAVIRVIFYRTTELNFYVVTLKEELGNWAQWVVVMHPSKVLELQMNKRGFSMEVGQYIFVNCPSISLLEWHPFTLTSAPEEDFFSIHIRAAGDWTENLIRAFEQQYSPIPRIEVDGPFGTASEDVFQYEVAVLVGAGIGVTPFASILKSIWYKFQCADHNLKTKKIYFYWICRETGAFSWFNNLLTSLEQEMEELGKVGFLNYRLFLTGWDSNIVGHAALNFDKATDIVTGLKQKTSFGRPMWDNEFSTIATSHPKSVVGVFLCGPRTLAKSLRKCCHRYSSLDPRKVQFYFNKENF

SEQ ID NO: 8640 - protein, 564 aa, Homo sapiens
MGNWVVNHWFSVLFLVVWLGLNVFLFVDAFLKYEKADKYYYTRKILGSTLACARASALCLNFNSTLILLPVCRNLLSFLRGTCSFCSRTLRKQLDHNLTFHKLVAYMICLHTAIHIIAHLFNFDCYSRSRQATDGSLASILSSLSHDEKKGGSWLNPIQSRNTTVEYVTFTSIAGLTGVIMTIALILMVTSATEFIRRSYFEVFWYTHHLFIFYILGLGIHGIGGIVRGQTEESMNESHPRKCAESFEMWDDRDSHCRRPKFEGHPPESWKWILAPVILYICERILRFYRSQQKVVITKVVMHPSKVLELQMNKRGFSMEVGQYIFVNCPSISLLEWHPFTLTSAPEEDFFSIHIRAAGDWTENLIRAFEQQYSPIPRIEVDGPFGTASEDVFQYEVAVLVGAGIGVTPFASILKSIWYKFQCADHNLKTKKIYFYWICRETGAFSWFNNLLTSLEQEMEELGKVGFLNYRLFLTGWDSNIVGHAALNFDKATDIVTGLKQKTSFGRPMWDNEFSTIATSHPKSVVGVFLCGPRTLAKSLRKCCHRYSSLDPRKVQFYFNKENF

SEQ ID NO: 8641 - protein, 515 aa, Homo sapiens
MGNWVVNHWFSVLFLVVWLGLNVFLFVDAFLKYEKADKYYYTRKILGSTLACARASALCLNFNSTLILLPVCRNLLSFLRGTCSFCSRTLRKQLDHNLTFHKLVAYMICLHTAIHIIAHLFNFDCYSRSRQATDGSLASILSSLSHDEKKGGSWLNPIQSRNTTVEYVTFTSIAGLTGVIMTIALILMVTSATEFIRRSYFEVFWYTHHLFIFYILGLGIHGIGGIVRGQTEESMNESHPRKCAESFEMWDDRDSHCRRPKFEGHPPESWKWILAPVILYICERILRFYRSQQKVVITKVVMHPSKVLELQMNKRGFSMEVGQYIFVNCPSISLLEWHPFTLTSAPEEDFFSIHIRAAGDWTENLIRAFEQQYSPIPRIEVDGPFGTASEDVFQYEVAVLVGAGIGVTPFASILKSIWYKFQCADHNLKTKKVGHAALNFDKATDIVTGLKQKTSFGRPMWDNEFSTIATSHPKSVVGVFLCGPRTLAKSLRKCCHRYSSLDPRKVQFYFNKENF

SEQ ID NO: 8642 - protein, 480 aa, Homo sapiens [sequence omitted]

SEQ ID NO: 8643 - protein, 480 aa, Homo sapiens [sequence omitted]

SEQ ID NO: 8644 - protein, 480 aa, Homo sapiens [sequence omitted]

SEQ ID NO: 8645 - protein, 372 aa, Homo sapiens
MWQEAMRRRRYLRDRSEEAAGGGDGLPRSRDWLYESYYCMSQQHPLIVFLLLIVMGSCLALLAVFFALGLEVEDHVAFLITVPTALAIFFAIFILVCIESVFKKLLRLFSLVIWICLVAMGYLFMCFGGTVSPWDQVSFFLFIIFVVYTMLPFNMRDAIIASVLTSSSHTIVLSVCLSATPGGKEHLVWQILANVIIFICGNLAGAYHKHLMELALQQTYQDTCNCIKSRIKLEFEKRQQAKESAHISACHVITIFQGRTAIQSMRVSRLGSLTTSTILIINMEKAKRLGASPPGQEPMIGGTKVHLRERKHTPGMRHDANDERNKTHSQHEANVCKCLAEVLAQTLPVTLPVQDHWNAAAISAATRELDPG

SEQ ID NO: 8646 - protein, 1091 aa, Homo sapiens
MWQEAMRRRRYLRDRSEEAAGGGDGLPRSRDWLYESYYCMSQQHPLIVFLLLIVMGSCLALLAVFFALGLEVEDHVAFLITVPTALAIFFAIFILVCIESVFKKLLRLFSLVIWICLVAMGYLFMCFGGTVSPWDQVSFFLFIIFVVYTMLPFNMRDAIIASVLTSSSHTIVLSVCLSATPGGKEHLVWQILANVIIFICGNLAGAYHKHLMELALQQTYQDTCNCIKSRIKLEFEKRQQERLLLSLLPAHIAMEMKAEIIQRLQGPKAGQMENTNNFHNLYVKRHTNVSILYADIVGFTRLASDCSPGELVHMLNELFGKFDQIAKENECMRIKILGDCYYCVSGLPISLPNHAKNCVKMGLDMCEAIKKVRDATGVDINMRVGVHSGNVLCGVIGLQKWQYDVWSHDVTLANHMEAGGVPGRVHISSVTLEHLNGAYKVEEGDGDIRDPYLKQHLVKTYFVINPKGERRSPQHLFRPRHTLDGAKMRASVRMTRYLESWGAAKPFAHLHHRDSMTTENGKISTTDVPMGQHNFQNRTLRTKSQKKRFEEELNERMIQAIDGINAQKQWLKSEDIQRISLLFYNKVLEKEYRATALPAFKYYVTCACLIFFCIFIVQILVLPKTSVLGISFGAAFLLLAFILFVCFAGQLLQCSKKASPLLMWLLKSSGIIANRPWPRISLTIITTAIILMMAVFNMFFLSDSEETIPPTANTTNTSFSASNNQVAILRAQNLFFLPYFIYSCILGLISCSVFLRVNYELKMLIMMVALVGYNTILLHTHAHVLGDYSQVLFERPGIWKDLKTMGSVSLSIFFITLLVLGRQNEYYCRLDFLWKNKFKKEREEIETMENLNRVLLENVLPAHVAEHFLARSLKNEELYHQSYDCVCVMFASIPDFKEFYTESDVNKEGLECLRLLNEIIADFDDLLSKPKFSGVEKIKTIGSTYMAATGLSAVPSQEHSQEPERQYMHIGTMVEFAFALVGKLDAINKHSFNDFKLRVGINHGPVIAGVIGAQKPQYDIWGNTVNVASRMDSTGVLDKIQVTEETSLVLQTLGYTCTCRGIINVKGKGDLKTYFVNTEMSRSLSQSNVAS

SEQ ID NO: 8647 - protein, 123 aa, Homo sapiens
MSIANGESSWNKEDVGMFLEMHLVSFFLFIIFVVYTMLPFNMRDAIIASVLTSSSHTIVLSVCLSATPGGKEHLVWQTFPAEDYPDLYGVEVLYCRHGGAPSGTHFHPQTNRVGQIWPLQYWR

SEQ ID NO: 8648 - protein, 447 aa, Homo sapiens
MRRRRYLRDRSEEAAGGGDGLPRSRDWLYESYYCMSQQHPLIVFLLLIVMGSCLALLAVFFALGLEPDASESRVDTEVEDHVAFLITVPTALAIFFAIFILVCIESVFKKLLRLFSLVIWICLVAMGYLFMCFGGTVSPWDQTLPTSVTLIFPPHGHKLLKGWLRIPAEKPTFIHFAPFEALGLRKTSSGAKGTGRAFTRMPHRVQSSHSPASPCAVPAMGPVTSLEACPVLLTVSRAPDLCVQLSGHLEEPPREGNTRAQQGGDLELPALASTLCNGFEVMAPFAISKECDPNEEWPWEAHQAQNLGEKSFAKSEDIVEESRALHVMDEDGEEQEELSWLQVLNVAERRNGRHRWEGVKEFTTLQVKNSGEKFMVVETRKRMNLIERLKMFLGDSGFKGGIGSQEERTNAGGSNSNSQATKKAMGDDLGDRSYVLHFGCCVLVHLM

SEQ ID NO: 8649 - protein, 190 aa, Homo sapiens
MTASASSFSSSQGVQQPSIYSFSQITRSLFLSNGVAANDKLLLSSNRITAIVNASVEVVNVFFEGIQYIKVPVTDARDSRLYDFFDPIADLIHTIDMRQGRTLLHCMAGVSRSASLCLAYLMKYHSMSLLDAHTWTKSRRPIIRPNNGFWEQLINYEFKLFNNNTVRMINSPVGNIPDIYEKDLRMMISM

SEQ ID NO: 8650 - protein, 177 aa, Homo sapiens
MEDLPGAREPKTKAAAPGVEDEPLLRGNPCRFVIFPIEYHDIWQMYEKAEASFWTTEEVDLSKDIRHWESLKPEERYFISHVLVFFAASDGIINENLVERFSQIVQITEARCFYGFQIAMENIHSEMYSLLIDTYIKDPKEREFLFNAIERCLVSRRRQIGPCAGLGTKRLPMVNVL

SEQ ID NO: 8651 - protein, 47 aa, Homo sapiens
MKYVDAVQFIRQKRRGVLNSKQLLYLRCDYASEIPMGIAVFSRKKCK

SEQ ID NO: 8652 - protein, 47 aa, Homo sapiens; identical to SEQ ID NO: 8651

SEQ ID NO: 8653 - protein, 116 aa, Homo sapiens
SGSGGQARREATPQDSGGSRKCSGGRSSSKTDRWRGAAAAGPGVARRGSGGVVAAAATATAAAAAAAAQVTEERGTSSLPPPPDFNAQSPARQRFSLEYTLHIYGDSECESRFLPG

SEQ ID NO: 8654 - protein, 378 aa, Homo sapiens
MQLRLFRRLLLAALLLVIVWTLFGPSGLGEELLSLSLASLLPAPASPGPPLALPRLLIPNQEACSGPGAPPFLLILVCTAPENLNQRNAIRASWGGLREARGLRVQTLFLLGEPNAQHPVWGSQGSDLASESAAQGDILQAAFQDSYRNLTLKTLSGLNWAEKHCPMARYVLKTDDDVYVNVPELVSELVLRGGRWGQWERSTEPQREAEQEGGQVLHSEEVPLLYLGRVHWRVNPSRTPGGRHRVSEEQWPHTWGPFPPYASGTGYVLSASAVQLILKVASRAPLLPLEDVFVGVSARRGGLAPTQCVKLAGATHYPLDRCCYGKFLLTSHRLDPWKMQEAWKLVGGSDGERTAPFCSWFQGVLGILRCRAIAWLQS

SEQ ID NO: 8655 - protein, 211 aa, Homo sapiens
HHSSTNRQNDTHVSLPLFPGISGGPLENHYRLKQFHFHWGAVNEGGSEHTVDGHAYPAELHLVHWNSVKYQNYKEAVVGENGLAVIGVFLKLGAHHQTLQRLVDILPEIKHKDARAAMRPFDPSTLLPTCWDYWTYAGSLTTPPLTESVTWIIQKEPVEVAPSQLSAFRTLLFSALGEEEKMMVNNYRPLQPLMNRKVWASFQATNEGTRS

SEQ ID NO: 8656 - protein, 305 aa, Homo sapiens
MLGRNTWKTSAFSFLVEQMWAPLWSRSMRPGRWCSQRSCAWQTSNNTLHPLWTVPVSVPGGTRQSPINIQWRDSVYDPQLKPLRVSYEAASCLYIWNTGYLFQVEFDDATEASGISGGPLENHYRLKQFHFHWGAVNEGGSEHTVDGHAYPAELHLVHWNSVKYQNYKEAVVGENGLAVIGVFLKLGAHHQTLQRLVDILPEIKHKDARAAMRPFDPSTLLPTCWDYWTYAGSLTTPPLTESVTWIIQKEPVEVAPSQLSAFRTLLFSALGEEEKMMVNNYRPLQPLMNRKVWASFQATNEGTRS

SEQ ID NO: 8657 - protein, 550 aa, Homo sapiens [sequence omitted]

SEQ ID NO: 8658 - protein, 549 aa, Homo sapiens [sequence omitted]

SEQ ID NO: 8659 - protein, 371 aa, Homo sapiens
MSFRKVNIIILVLAVALFLLVLHHNFLSLSSLLRNEVTDSGIVGPQPIDFVPNALRHAVDGRQEEIPVVIAASEDRLGGAIAAINSIQHNTRSNVIFYIVTLNNTADHLRSWLNSDSLKSIRYKIVNFDPKLLEGKVKEDPDQGESMKPLTFARFYLPILVPSAKKAIYMDDDVIVQGDILALYNTALKPGHAAAFSEDCDSASTKVVIRGAGNQYNYIGYLDYKKERIRKLSMKASTCSFNPGVFVANLTEWKRQNITNQLEKWMKLNVEEGLYSRTLAGSITTPPLLIVFYQQHSTIDPMWNVRHLGSSAGKRYSPQFVKAAKLLHWNGHLKPWGRTASYTDVWEKWYIPDPTGKFNLIRRYTEISNIK

SEQ ID NO: 8660 - protein, 371 aa, Homo sapiens; identical to SEQ ID NO: 8659

SEQ ID NO: 8661 - protein, 390 aa, Homo sapiens
MRKMLAAVSRVLSGASQKPASRVLVASRNFANDATFEIKKCDLHRLEEGPPVTTVLTREDGLKYYRMMQTVRRMELKADQLYKQKIIRGFCHLCDGQEACCVGLEAGINPTDHLITAYRAHGFTFTRGLSVREILAELTGRKGGCAKGKGGSMHMYAKNFYGGNGIVGAQVPLGAGIALACKYNGKDEVCLTLYGDGAANQGQIFEAYNMAALWKLPCIFICENNRYGMGTSVERAAASTDYYKRGDFIPGLRVDGMDILCVREATRFAAAYCRSGKGPILMELQTYRYHGHSMSDPGVSYRTREEIQEVRSKSDPIMLLKDRMVNSNLASVEELKEIDVEVRKEIEDAAQFATADPEPPLEELGYHIYSSDPPFEVRGANQWIKFKSVS

SEQ ID NO: 8662 - protein, 390 aa, Homo sapiens; identical to SEQ ID NO: 8661

SEQ ID NO: 8663 - protein, 888 aa, Homo sapiens [sequence omitted]

SEQ ID NO: 8664 - protein, 888 aa, Homo sapiens [sequence omitted]

SEQ ID NO: 8665 - protein, 217 aa, Homo sapiens
MPSIISPEIVTALAIARTLSSTQRPTALWARMARSSSWRLQTQYELPQAQFDPGQDTYQHPPKDSSRQHVDVSSTSQHLQLVEPFDKWDGKDLEDLQILIKVKGKCPTDHISAAGPWLKFHGHLEYISNNLLIGAMNIENSKANSVHNALTQEFGPIPDTARYYKKHGIRWVVIRDENYREDSHGEHTALEHHLLRGRAIITKSFARIHETRACRAC

SEQ ID NO: 8666 - protein, 269 aa, Homo sapiens
MPSIISPEIVTALAIARTLSSTQRPTALWARMARSSSWRLQTQYELPQAQFDPGQDTYQHPPKDSSRQHVDVSSTSQHLQLVEPFDKWDGKDLEDLQILIKVKGKCPTDHISAAGPWLKFHGHLEYISNNLLIGAMNIENSKANSVHNALTQEFGPIPDTARYYKKHGIRWVGPGHHHQELCQDPRDQGLQGLLTLTFADPAHYNKIHPVDKLTIQGLKNVSPGKSLKCIIKHPNGTQETILLNRTFKETQIEWFHTGSALNRMKELQE

SEQ ID NO: 8667 - protein, 318 aa, Homo sapiens
MPNIVLFSGSSHQDLSQRVADRLGLELGKVVTKKFSNQETSVEIGESVRGEDVYIIQSGCGEINDNLMELLIMINACKIASSSRVTAVIPCFPYARQDKKDKSRAPISAKLVANMLSVAGADHIITMDLHASQIQGFFDIPVDNLYAEPAVLQWIRENIAEWKNCIIVSPDAGGAKRVTSIADRLNVEFALIHKERKKANEVDRMVLVGDVKDRVAILVDDMADTCGTICHAADKLLSAGATKVYAILTHGIFSGPAISRINNAAFEAVVVTNTIPQEDKMKHCTKIQVIDISMILAEAIRRTHNGESVSYLFSHVPL

SEQ ID NO: 8668 - protein, 173 aa, Homo sapiens
MARMNRPAPVEVTYKNMRFLITHNPTNATLNKFIEELKKYGVTTIVRVCEATYDTTLVEKEGIHVLDWPFDDGAPPSNQIVDDWLSLVKIKFREEPGCCIAVHCVAGLGRAPVLVALALIEGGMKYEDAVQFIRQKRRGAFNSKQLLYLEKYRPKMRLRFKDSNGHRNNCCIQ

SEQ ID NO: 8669 - protein, 173 aa, Homo sapiens; identical to SEQ ID NO: 8668

SEQ ID NO: 8670 - protein, 125 aa, Homo sapiens
MEPDHPFYNISKDRRFANLTEDQLPSCESLKDTIAKALPFWNEEIVPQIKEGKQVLIAAHGNSPPGIVKHLEGLSEEAIMELNLPTGIPVVYELDKNLKPIQFLGDEETMRKAMEAVAAQGKAKK

SEQ ID NO: 8671 - protein, 176 aa, Homo sapiens
MLIVFAAACVLAFAPGPASPRSSPPPRPQSLPPPHPQTMSESKNGPEYASFFAVMAASAAMVFSAPRAAYGTVKTGAGIAAMSVMRPELIMKSIIPVVTAGIIAIYGLVELPPASAGLSVGLSGLAAGFAIDILGDAGVRATAQQPRLFMGMILILIFPEVLGLYGLVVALILSTE

SEQ ID NO: 8672 - protein, 262 aa, Homo sapiens [sequence omitted]

SEQ ID NO: 8673 - protein, 262 aa, Homo sapiens [sequence omitted]

SEQ ID NO: 8674 - protein, 78 aa, Homo sapiens
MVEIDQYRMQRDKEFRLKQSKIMGSQNNLSDEIEEQTLGKIQELNGHYNKYMESVMNQLLSMVCDMKPEIHVNYRATN

SEQ ID NO: 8675 - protein, 118 aa, Homo sapiens
MTSQSQGIHQLLQAEKRAKDKLEEAKKRKGKRLKQAKEEAMVEIDQYRMQRDKEFRLKQSKIMGSQNNLSDEIEEQTLGKIQELNGHYNKYMESVMNQLLSMVCDMKPEIHVNYRATN

SEQ ID NO: 8676 - protein, 390 aa, Homo sapiens
MGATTMDQKSLWAGVVVLLLLQGGSAYKLVCYFTNWSQDRQEPGKFTPENIDPFLCSHLIYSFASIENNKVIIKDKSEVMLYQTINSLKTKNPKLKILLSIGGYLFGSKGFHPMVDSSTSRLEFINSIILFLRNHNFDGLDVSWIYPDQKENTHFTVLIHELAEAFQKDFTKSTKERLLLTAGVSAGRQMIDNSYQVEKLAKDLDFINLLSFDFHGSWEKPLITGHNSPLSKGWQDRGPSSYYNVEYAVGYWIHKGMPSEKVVMGIPTYGHSFTLASAETTVGAPASGPGAAGPITESSGFLAYYEICQFLKGAKITRLQDQQVPYAVKGNQWVGYDDVKSMETKVQFLKNLNLGGAMIWSIDMDDFTGKSCNQGPYPLVQAVKRSLGSL

SEQ ID NO: 8677 - protein, 311 aa, Homo sapiens
MLYQTINSLKTKNPKLKILLSIGGYLFGSKGFHPMVDSSTSRLEFINSIILFLRNHNFDGLDVSWIYPDQKENTHFTVLIHELAEAFQKDFTKSTKERLLLTAGVSAGRQMIDNSYQVEKLAKDLDFINLLSFDFHGSWEKPLITGHNSPLSKGWQDRGPSSYYNVEYAVGYWIHKGMPSEKVVMGIPTYGHSFTLASAETTVGAPASGPGAAGPITESSGFLAYYEICQFLKGAKITRLQDQQVPYAVKGNQWVGYDDVKSMETKVQFLKNLNLGGAMIWSIDMDDFTGKSCNQGPYPLVQAVKRSLGSL

SEQ ID NO: 8678 - protein, 413 aa, Homo sapiens [sequence omitted]

SEQ ID NO: 8679 - protein, 212 aa, Homo sapiens
MQNNEITTIEWDDMTLYQAFNGLKNKNSQLKTLLAIGGWNFGTAPFTAMVSTPENHQTFINSVIKFLRQYEFDGLDFDWEYPGSRVSPPQDKHLFTVLVQEMREAFEQEAKHINKPRLMVTAAVAAGISNIQSGYEIPQLSQYPDYIHVMTYDLHGSWEGYTGENSPLYKYPTDTGSNAYLNVDYVMNYWKDNRAPAEKLMLDSQPMDTPSF

SEQ ID NO: 8680 - protein, 218 aa, Homo sapiens [sequence omitted]

SEQ ID NO: 8681 - protein, 218 aa, Homo sapiens [sequence omitted]

SEQ ID NO: 8682 - protein, 332 aa, Homo sapiens
MWYHRLSHLHSRLQDLLKGGVIYPALPQPNFKSLLPLAVHWHHTASKSLTCAWQQHEDHFELKYANTVMRFDYVWLRDHCRSASCYNSKTHQRSLDTASVDLCIKPKTIRLDETTLFFTWPDGHVTKYDLNWLVKNSYEGQKQKVIQPRILWNAEIYQQAQVPSVDCQSFLETNEGLKKFLQNFLLYGIAFVENVPPTQEHTEKLAERISLIRETIYGRMWYFTSDFSRGDTAYTKLALDRHTDTTYFQEPCGIQVFHCLKHEGTGGRTLLVDGFYAAEQVLQKAPEEFELLSKVPLKHEYIEDVGECHNHMIGIGPVLNIYPWNKELYLIR

SEQ ID NO: 8683 - protein, 343 aa, Homo sapiens
MKIDSFLPILRMWYHRLSHLHSRLQDLLKGGVIYPALPQPNFKSLLPLAVHWHHTASKSLTCAWQQHEDHFELKYANTVMRFDYVWLRDHCRSASCYNSKTHQRSLDTASVDLCIKPKTIRLDETTLFFTWPDGHVTKYDLNWLVKNSYEGQKQKVIQPRILWNAEIYQQAQVPSVDCQSFLETNEGLKKFLQNFLLYGIAFVENVPPTQEHTEKLAERISLIRETIYGRMWYFTSDFSRGDTAYTKLALDRHTDTTYFQEPCGIQVFHCLKHEGTGGRTLLVDGFYAAEQVLQKAPEEFELLSKVPLKHEYIEDVGECHNHMIGIGPVLNIYPWNKELYLIR

SEQ ID NO: 8684 - protein, 862 aa, Homo sapiens
MAKPLTDSEKRKQISVRGLAGLGDVAEVRKSFNRHLHFTLVKDRNVATPRDYFFALAHTVRDHLVGRWIRTQQHYYERDPKRIYYLSLEFYMGRTLQNTMVNLGLQNACDEAIYQLGLDLEELEEIEEDAGLGNGGLGRLAACFLDSMATLGLAAYGYGIRYEFGIFNQKIVNGWQVEEADDWLRYGNPWEKARPEYMLPVHFYGRVEHTPDGVKWLDTQVVLAMPYDTPVPGYKNNTVNTMRLWSAKAPNDFKLQDFNVGDYIEAVLDRNLAENISRVLYPNDNFFEGKELRLKQEYFVVAATLQDIIRRFKSSKFGCRDPVRTCFETFPDKVAIQLNDTHPALSIPELMRILVDVEKVDWDKAWEITKKTCAYTNHTVLPEALERWPVSMFEKLLPRHLEIIYAINQRHLDHVAALFPGDVDRLRRMSVIEEGDCKRINMAHLCVIGSHAVNGVARIHSEIVKQSVFKDFYELEPEKFQNKTNGITPRRWLLLCNPGLADTIVEKIGEEFLTDLSQLKKLLPLVSDEVFIRDVAKVKQENKLKFSAFLEKEYKVKINPSSMFDVHVKRIHEYKRQLLNCLHVVTLYNRIKRDPAKAFVPRTVMIGGKAAPGYHMAKLIIKLVTSIGDVVNHDPVVGDRLKVIFLENYRVSLAEKVIPAADLSQQISTAGTEASGTGNMKFMLNGALTIGTMDGANVEMAEEAGAENLFIFGLRVEDVEALDRKGYNAREYYDHLPELKQAVDQISSGFFSPKEPDCFKDIVNMLMHHDRFKVFADYEAYMQCQAQVDQLYRNPKEWTKKVIRNIACSGKFSSDRTITEYAREIWGSWPALQLQHLPHPEWESGGATCWAPPELCTHLAMY

SEQ ID NO: 8685 - protein, 843 aa, Homo sapiens
MAKPLTDSEKRKQISVRGLAGLGDVAEVRKSFNRHLHFTLVKDRNVATPRDYFFALAHTVRDHLVGRWIRTQQHYYERDPKRIYYLSLEFYMGRTLQNTMVNLGLQNACDEAIYQLGLDLEELEEIEEDAGLGNGGLGRLAACFLDSMATLGLAAYGYGIRYEFGIFNQKIVNGWQVEEADDWLRYGNPWEKARPEYMLPVHFYGRVEHTPDGVKWLDTQVVLAMPYDTPVPGYKNNTVNTMRLWSAKAPNDFKLQDFNVGDYIEAVLDRNLAENISRVLYPNDNFFEGKELRLKQEYFVVAATLQDIIRRFKSSKFGCRDPVRTCFETFPDKVAIQLNDTHPALSIPELMRILVDVEKVDWDKAWEITKKTCAYTNHTVLPEALERWPVSMFEKLLPRHLEIIYAINQRHLDHVAALFPGDVDRLRRMSVIEEGDCKRINMAHLCVIGSHAVNGVARIHSEIVKQSVFKDFYELEPEKFQNKTNGITPRRWLLLCNPGLADTIVEKIGEEFLTDLSQLKKLLPLVSDEVFIRDVAKVKQENKLKFSAFLEKEYKVKINPSSMFDVHVKRIHEYKRQLLNCLHVVTLYNRIKRDPAKAFVPRTVMIGGKAAPGYHMAKLIIKLVTSIGDVVNHDPVVGDRLKVIFLENYRVSLAEKVIPAADLSQQISTAGTEASGTGNMKFMLNGALTIGTMDGANVEMAEEAGAENLFIFGLRVEDVEALDRKGYNAREYYDHLPELKQAVDQISSGFFSPKEPDCFKDIVNMLMHHDRFKVFADYEAYMQCQAQVDQLYRNPKEWTKKVIRNIACSGKFSSDRTITEYAREIWGVEPSDLQIPPPNIPRD

SEQ ID NO: 8686 - protein, 843 aa, Homo sapiens; identical to SEQ ID NO: 8685

SEQ ID NO: 8687 - protein, 190 aa, Homo sapiens
MKKGIRYETSRKTSYIFQQPQHGPWQTRMRKISNHGSLRVAKVAYPLGLCVGVFIYVAYIKWHRATATQAFFSITRAAPGARWGQQAHSPLGTAADGHEVFYGIMFDAGSTGTRVHVFQFTRPPRETPTLTHETFKALKPGLSAYADDVEKSAQGIRELLDVAKQDIPFDFWKAIFHYIDSLNRQKSPAS

SEQ ID NO: 8688 - protein, 484 aa, Homo sapiens
MKKGIRYETSRKTSYIFQQPQHGPWQTRMRKISNHGSLRVAKVAYPLGLCVGVFIYVAYIKWHRATATQAFFSITRAAPGARWGQQAHSPLGTAADGHEVFYGIMFDAGSTGTRVHVFQFTRPPRETPTLTHETFKALKPGLSAYADDVEKSAQGIRELLDVAKQDIPFDFWKATPLVLKATAGLRLLPGEKAQKLLQKVKEVFKASPFLVGDDCVSIMNGTDEGVSAWITINFLTGSLKTPGGSSVGMLDLGGGSTQIAFLPRVEGTLQASPPGYLTALRMFNRTYKLYSYSYLGLGLMSARLAILGGVEGQPAKDGKELVSPCLSPSFKGEWEHAEVTYRVSGQKAAASLHELCAARVSEVLQNRVHRTEEVKHVDFYAFSYYYDLAAGVGLIDAEKGGSLVVGDFEIAAKYVCRTLETQPQSSPFSCMDLTYVSLLLQEFGFPRSKVLKLTRKIDNVETSWALGAIFHYIDSLNRQKSPAS

SEQ ID NO: 8689 - protein, 483 aa, Homo sapiens
MKKGIRYETSRKTSYIFQPQHGPWQTRMRKISNHGSLRVAKVAYPLGLCVGVFIYVAYIKWHRATATQAFFSITRAAPGARWGQQAHSPLGTAADGHEVFYGIMFDAGSTGTRVHVFQFTRPPRETPTLTHETFKALKPGLSAYADDVEKSAQGIRELLDVAKQDIPFDFWKATPLVLKATAGLRLLPGEKAQKLLQKVKEVFKASPFLVGDDCVSIMNGTDEGVSAWITINFLTGSLKTPGGSSVGMLDLGGGSTQIAFLPRVEGTLQASPPGYLTALRMFNRTYKLYSYSYLGLGLMSARLAILGGVEGQPAKDGKELVSPCLSPSFKGEWEHAEVTYRVSGQKAAASLHELCAARVSEVLQNRVHRTEEVKHVDFYAFSYYYDLAAGVGLIDAEKGGSLVVGDFEIAAKYVCRTLETQPQSSPFSCMDLTYVSLLLQEFGFPRSKVLKLTRKIDNVETSWALGAIFHYIDSLNRQKSPAS

SEQ ID NO: 8690 - protein, 759 aa, Homo sapiens [sequence omitted]

SEQ ID NO: 8691 - protein, 860 aa, Homo sapiens [sequence omitted]

SEQ ID NO: 8692 - protein, 689 aa, Homo sapiens [sequence omitted]

SEQ ID NO: 8693 - protein, 271 aa, Homo sapiens
MEALPLLAATTPDHGRHRRLLLLPLLLFLLPAGAVQGWETEERPRTREEECHFYAGGQVYPGEASRVSVADHSLHLSKAKISKPAPYWEGTAVIDGEFKELKLTDYRGKYLVFFFYPLDFTFVCPTEIIAFGDRLEEFRSINTEVVACSVDSQFTHLAWINTPRRQGGLGPIRIPLLSDLTHQISKDYGVYLEDSGHTLRGLFIIDDKGILRQITLNDLPVGRSVDETLRLVQAFQYTDKHGEVCPAGWKPGSETIIPDPAGKLKYFDKLN

SEQ ID NO: 8694 - protein, 570 aa, Homo sapiens
MPYKLKKEKEPPKVAKCTAKPSSSGKDGGGENTEEAQPQPQPQPQPQAQSQPPSSNKRPSNSTPPPTQLSKIKYSGGPQIEREELFIQKLRQCCVLFDFVSDPLSDLKFKEVKRAGLNEMVEYITHSRDVVTEAIYPEAVTMFSVNLFRTLPPSSNPTGAEFDPEEDEPTLEAAWPHLQLVYEFFLRFLESPDFQPNIAKKYIDQKFVLALLDLFDSEDPRERDFLKTILHRIYGKFLGLRAYIRRQINHIFYRFIYETEHHNGIAELLEILGSIINGFALPLKEEHKMFLIRVLLPLHKVKSLSVYHPQLAYCVVQFLEKESSLTEPVIVGLLKFWPKTHSPKEVMFLNELEEILDVIEPSEFSKVMEPLFRQLAKCVSSPHFQVAERALYYWNNEYIMSLISDNAARVLPIMFPALYRNSKSHWNKTIHGLIYNALKLFMEMNQKLFDDCTQQYKAEKQKGRFRMKEREEMWQKIEELARLNPQYPMFRAPPPLPPVYSMETETPTAEDIQLLKRTVETEAVQMLKDIKKEKVLLRRKSELPQDVYTIKALEAHKRAEEFLTASQEAL

SEQ ID NO: 8695 - protein, 496 aa, Homo sapiens
MPYKLKKEKELFIQKLRQCCVLFDFVSDPLSDLKFKEVKRAGLNEMVEYITHSRDVVTEAIYPEAVTMFSVNLFRTLPPSSNPTGAEFDPEEDEPTLEAAWPHLQLVYEFFLRFLESPDFQPNIAKKYIDQKFVLALLDLFDSEDPRERDFLKTILHRIYGKFLGLRAYIRRQINHIFYRFIYETEHHNGIAELLEILGSIINGFALPLKEEHKMFLIRVLLPLHKVKSLSVYHPQLAYCVVQFLEKESSLTEPVIVGLLKFWPKTHSPKEVMFLNELEEILDVIEPSEFSKVMEPLFRQLAKCVSSPHFQVAERALYYWNNEYIMSLISDNAARVLPIMFPALYRNSKSHWNKTIHGLIYNALKLFMEMNQKLFDDCTQQYKAEKQKGRFRMKEREEMWQKIEELARLNPQYPMFRAPPPLPPVYSMETETPTAEDIQLLKRTVETEAVQMLKDIKKEKVLLRRKSELPQDVYTIKALEAHKRAEEFLTASQEAL

SEQ ID NO: 8696 - protein, 602 aa, Homo sapiens
MPYKLKKEKEPPKVAKCTAKPSSSGKDGGGENTEEAQPQPQPQPQPQAQSQPPSSNKRPSNSTPPPTQLSKIKYSGGPQIVKKERRQSSSRFNLSKNRELQKLPALKDSPTQEREELFIQKLRQCCVLFDFVSDPLSDLKFKEVKRAGLNEMVEYITHSRDVVTEAIYPEAVTMFSVNLFRTLPPSSNPTGAEFDPEEDEPTLEAAWPHLQLVYEFFLRFLESPDFQPNIAKKYIDQKFVLALLDLFDSEDPRERDFLKTILHRIYGKFLGLRAYIRRQINHIFYRFIYETEHHNGIAELLEILGSIINGFALPLKEEHKMFLIRVLLPLHKVKSLSVYHPQLAYCVVQFLEKESSLTEPVIVGLLKFWPKTHSPKEVMFLNELEEILDVIEPSEFSKVMEPLFRQLAKCVSSPHFQVAERALYYWNNEYIMSLISDNAARVLPIMFPALYRNSKSHWNKTIHGLIYNALKLFMEMNQKLFDDCTQQYKAEKQKGRFRMKEREEMWQKIEELARLNPQYPMFRAPPPLPPVYSMETETPTAEDIQLLKRTVETEAVQMLKDIKKEKVLLRRKSELPQDVYTIKALEAHKRAEEFLTASQEAL

SEQ ID NO: 8697 - protein, 602 aa, Homo sapiens; identical to SEQ ID NO: 8696

SEQ ID NO: 8698 - protein, 185 aa, Homo sapiens
MGPERHLSGAPARMATVVLGGDTMGPERIFPNQTEELGHQGPSEGTGDWSSEEPEEEQEETGSGPAGYSYQPLNQDPEQEEVELAPVGDGDVVADIQDRIQALGLHLPDPPLESEDEDEEGATALNNHSSIPMDPEHVELVKRTMAGVSLPAPGVPAWAREISDAQWEDVVQKALQARQASPAWK

SEQ ID NO: 8699 - protein, 295 aa, Homo sapiens
MVDSVYRTRSLGVAAEGLPDQYADGEAARVWQLYIGDTRSRTAEYKAWLLGLLRQHGCQRVLDVACGTGVDSIMLVEEGFSVTSVDASDKMLKYALKERWNRRHEPAFDKWVIEEANWMTLDKDVPQSAEGGFDAVICLGNSFAHLPDCKGDQSEHRLALKNIASMVRAGGLLVIDHRNYDHILSTGCAPPGKNIYYKSDLTKDVTTSVLIVNNKAHMVTLDYTVQVPGAGQDGSPGLSKFRLSYYPHCLASFTELLQAAFGGKCQHSVLGDFKPYKPGQTYIPCYFIHVLKRTD

SEQ ID NO: 8700 - protein, 296 aa, Homo sapiens [sequence omitted]

SEQ ID NO: 8701 - protein, 980 aa, Homo sapiens
MALAVLRVLEPFPTETPPLAVLLPPGGPWPAAELGLVLALRPAGESPAGPALLVAALEGPDAGTEEQGPGPPQLLVSRALLRLLALGSGAWVRARAVRRPPALGWALLGTSLGPGLGPRVGPLLVRRGETLPVPGPRVLETRPALQGLLGPGTRLAVTELRGRARLCPESGDSSRPPPPPVVSSFAVSGTVRRLQGVLGGTGDSLGVSRSCLRGLGLFQGEWVWVAQARESSNTSQPHLARVQVLEPRWDLSDRLGPGSGPLGEPLADGLALVPATLAFNLGCDPLEMGELRIQRYLEGSIAPEDKGSCSLLPGPPFARELHIEIVSSPHYSTNGNYDGVLYRHFQIPRVVQEGDVLCVPTIGQVEILEGSPEKLPRWREMFFKVKKTVGEAPDGPASAYLADTTHTSLYMVGSTLSPVPWLPSEESTLWSSLSPPGLEALVSELCAVLKPRLQPGGALLTGTSSVLLRGPPGCGKTTVVAAACSHLGLHLLKVPCSSLCAESSGAVETKLQAIFSRARRCRPAVLLLTAVDLLGRDRDGLGEDARVMAVLRHLLLNEDPLNSCPPLMVVATTSRAQDLPADVQTAFPHELEVPALSEGQRLSILRALTAHLPLGQEVNLAQLARRCAGFVVGDLYALLTHSSRAACTRIKNSGLAGGLTEEDEGELCAAGFPLLAEDFGQALEQLQTAHSQAVGAPKIPSVSWHDVGGLQEVKKEILETIQLPLEHPELLSLGLRRSGLLLHGPPGTGKTLLAKAVATECSLTFLSVKGPELINMYVGQSEENVREVFARARAAAPCIIFFDELDSLAPSRGRSGDSGGVMDRVVSQLLAELDGLHSTQDVFVIGATNRPDLLDPALLRPGRFDKLVFVGANEDRASQLRVLSAITRKFKLEPSVSLVNVLDCCPPQLTGADLYSLCSDAMTAALKRRVHDLEEGLEPGSSALMLTMEDLLQAAARLQPSVSEQELLRYKRIQRKFAAC

SEQ ID NO: 8702 - protein, 980 aa, Homo sapiens; identical to SEQ ID NO: 8701

SEQ ID NO: 8703 - protein, 892 aa, Homo sapiens
MALAVLRVLEPFPTETPPLAVLLPPGGPWPAAELGLVLALRPAGESPAGPALLVAALEGPDAGTEEQGPGPPQLLVSRALLRLLALGSGAWVRARAVRRPPALGWALLGTSLGPGLGPRVGPLLVRRGETLPVPGPRVLETRPALQGLLGPGTRLAVTELRGRARLCPESGDSSRPPPPPVVSSFAVSGTVRRLQGVLGGTGDSLGRYLEGSIAPEDKGSCSLLPGPPFARELHIEIVSSPHYSTNGNYDGVLYRHFQIPRVVQEGDVLCVPTIGQVEILEGSPEKLPRWREMFFKVKKTVGEAPDGPASAYLADTTHTSLYMVGSTLSPVPWLPSEESTLWSSLSPPGLEALVSELCAVLKPRLQPGGALLTGTSSVLLRGPPGCGKTTVVAAACSHLGLHLLKVPCSSLCAESSGAVETKLQAIFSRARRCRPAVLLLTAVDLLGRDRDGLGEDARVMAVLRHLLLNEDPLNSCPPLMVVATTSRAQDLPADVQTAFPHELEVPALSEGQRLSILRALTAHLPLGQEVNLAQLARRCAGFVVGDLYALLTHSSRAACTRIKNSGLAGGLTEEDEGELCAAGFPLLAEDFGQALEQLQTAHSQAVGAPKIPSVSWHDVGGLQEVKKEILETIQLPLEHPELLSLGLRRSGLLLHGPPGTGKTLLAKAVATECSLTFLSVKGPELINMYVGQSEENVREVFARARAAAPCIIFFDELDSLAPSRGRSGDSGGVMDRVVSQLLAELDGLHSTQDVFVIGATNRPDLLDPALLRPGRFDKLVFVGANEDRASQLRVLSAITRKFKLEPSVSLVNVLDCCPPQLTGADLYSLCSDAMTAALKRRVHDLEEGLEPGSSALMLTMEDLLQAAARLQPSVSEQELLRYKRIQRKFAAC

SEQ ID NO: 8704 - protein, 348 aa, Homo sapiens
MHMARLAVSLKFPRMQLSFLRQIELLDFKGEDLFEDGGIIRRTKRKGEGYSNPNEGATVEIHLEGRCGGRMFDCRDVAFTVGEGEDHDIPIGIDKALEKMQREEQCILYLGPRYGFGEAGKPKFGIEPNAELIYEVTLKSFEKAKESWEMDTKEKLEQAAIVKEKGTVYFKGGKYMQAVIQYGKIVSWLEMEYGLSEKESKASESFLLAAFLNLAMCYLKLREYTKAVECCDKALGLDSANEKGLYRRGEAQLLMNEFESAKGDFEKVLEVNPQNKAARLQISMCQKKAKEHNERDRRIYANMFKKFAEQDAKEEANKAMGKKTSEGVTNEKGTDSQAMEEEKPEGHV

SEQ ID NO: 8705 - protein, 457 aa, Homo sapiens
MTTDEGAKNNEESPTATVAEQGEDITSKKDRGVLKIVKRVGNGEETPMIGDKVYVHYKGKLSNGKKFDSSHDRNEPFVFSLGKGQVIKAWDIGVATMKKGEICHLLCKPEYAYGSAGSLPKIPSNATLFFEIELLDFKGEDLFEDGGIIRRTKRKGEGYSNPNEGATVEIHLEGRCGGRMFDCRDVAFTVGEGEDHDIPIGIDKALEKMQREEQCILYLGPRYGFGEAGKPKFGIEPNAELIYEVTLKSFEKAKESWEMDTKEKLEQAAIVKEKGTVYFKGGKYMQAVIQYGKIVSWLEMEYGLSEKESKASESFLLAAFLNLAMCYLKLREYTKAVECCDKALGLDSANEKGLYRRGEAQLLMNEFESAKGDFEKVLEVNPQNKAARLQISMCQKKAKEHNERDRRIYANMFKKFAEQDAKEEANKAMGKKTSEGVTNEKGTDSQAMEEEKPEGHV

SEQ ID NO: 8706 - protein, 331 aa, Homo sapiens [sequence omitted]

SEQ ID NO: 8707 - protein, 158 aa, Homo sapiens
MGRTVVVLGGGISGLAASYHLSRAPCPPKVVLVESSERLGGWIRSVRGPNGAIFELGPRGIRPAGALGARTLLLVSELGLDSEVLPVRGDHPAAQNRFLYVGGALHALPTGLRGLLRPSPPFSKPLFWAGLRELTKPRGKEPDETVHSFAQRRLGPES

SEQ ID NO: 8708 - protein, 438 aa, Homo sapiens
MGRTVVVLGGGISGLAASYHLSRAPCPPKVVLVESSERLGGWIRSVRGPNGAIFELGPRGIRPAGALGARTLLLVSELGLDSEVLPVRGDHPAAQNRFLYVGGALHALPTGLRGLLRPSPPFSKPLFWAGLRELTKPRGKEPDETVHSFAQRRLGPEVASLAMDSLCRGVFAGNSRELSIRSCFPSLFQAEQTHRSILLGLLLGAGRTPQPDSALIRQALAERWSQWSLRGGLEMLPQALETHLTSRGVSVLRGQPVCGLSLQAEGRWKVSLRDSSLEADHVISAIPASVLSELLPAEAAPLARALSAITAVSVAVVNLQYQGAHLPVQGFGHLVPSSEDPGVLGIVYDSVAFPEQDGSPPGLRVTVMLGGSWLQTLEASGCVLSQELFQQRAQEAAATQLGLKEMPSHCLVHLHKNCIPQYTLGHWQKLGKLGKQLG

SEQ ID NO: 8709 - protein, 103 aa, Homo sapiens
MGRTVVVLGGGISGLAASYHLSRAPCPPKVVLVESSERLGGWIRSVRGPNGAIFELGPRGIRPAGALGARTLLLGATPPFTPLLQTSVLGWAEGADQAPGQRA

SEQ ID NO: 8710 - protein, 477 aa, Homo sapiens
MGRTVVVLGGGISGLAASYHLSRAPCPPKVVLVESSERLGGWIRSVRGPNGAIFELGPRGIRPAGALGARTLLLVSELGLDSEVLPVRGDHPAAQNRFLYVGGALHALPTGLRGLLRPSPPFSKPLFWAGLRELTKPRGKEPDETVHSFAQRRLGPEVASLAMDSLCRGVFAGNSRELSIRSCFPSLFQAEQTHRSILLGLLLGAGRTPQPDSALIRQALAERWSQWSLRGGLEMLPQALETHLTSRGVSVLRGQPVCGLSLQAEGRWKVSLRDSSLEADHVISAIPASVLSELLPAEAAPLARALSAITAVSVAVVNLQYQGAHLPVQGFGHLVPSSEDPGVLGIVYDSVAFPEQDGSPPGLRVTVMLGGSWLQTLEASGCVLSQELFQQRAQEAAATQLGLKEMPSHCLVHLHKNCIPQYTLGHWQKLESARQFLTAHRLPLTLAGASYEGVAVNDCIESGRQAAVSVLGTEPNS

SEQ ID NO: 8711 - protein, 158 aa, Homo sapiens; identical to SEQ ID NO: 8707

SEQ ID NO: 8712 - protein, 477 aa, Homo sapiens; identical to SEQ ID NO: 8710

SEQ ID NO: 8713 - protein, 393 aa, Homo sapiens
MLRRLLERPCTLALLVGSQLAVMMYLSLGGFRSLSALFGRDQGPTFDYSHPRDVYSNLSHLPGAPGGPPAPQGLPYCPERSPLLVGPVSVSFSPVPSLAEIVERNPRVEPGGRYRPAGCEPRSRTAIIVPHRAREHHLRLLLYHLHPFLQRQQLAYGIYVIHQAGNGTFNRAKLLNVGVREALRDEEWDCLFLHDVDLLPENDHNLYVCDPRGPRHVAVAMNKFGYSLPYPQYFGGVSALTPDQYLKMNGFPNEYWGWGGEDDDIATRVRLAGMKISRPPTSVGHYKMVKHRGDKGNEENPHRFDLLVRTQNSWTQDGMNSLTYQLLARELGPLYTNITADIGTDPRGPRAPSGPRYPPGSSQAFRQEMLQRRPPARPGPLSTANHTALRGSH

SEQ ID NO: 8714 - protein, 393 aa, Homo sapiens; identical to SEQ ID NO: 8713

SEQ ID NO: 8715 - protein, 393 aa, Homo sapiens; identical to SEQ ID NO: 8713

SEQ ID NO: 8716 - protein, 393 aa, Homo sapiens; identical to SEQ ID NO: 8713

SEQ ID NO: 8717 - protein, 104 aa, Homo sapiens
MSKRVGIIGAGVSGLAAIWCCLEEGLEPTCFERSDDVGGLWKFSDHTEEGRASIYQSVFTNSSKEMMCFPDFPYPDDYPNYIHHSKLQEYIKTYAQKKDLLRYI

SEQ ID NO: 8718 - protein, 578 aa, Homo sapiens
MAVRWTWAGKSCLLLAFLTVAYIFVELLVSTFHASAGAGRARELGSRRLSDLQKNTEDLSRPLYKKPPADSRALGEWGKASKLQLNEDELKQQEELIERYAINIYLSDRISLHRHIEDKRMYECKSQKFNYRTLPTTSVIIAFYNEAWSTLLRTIHSVLETSPAVLLKEIILVDDLSDRVYLKTQLETYISNLDRVRLIRTNKREGLVRARLIGATFATGDVLTFLDCHCECNSGWLEPLLERIGRDETAVVCPVIDTIDWNTFEFYMQIGEPMIGGFDWRLTFQWHSVPKQERDRRISRIDPIRSPTMAGGLFAVSKKYFQYLGTYDTGMEVWGGENLELSFRVWQCGGKLEIHPCSHVGHVFPKRAPYARPNFLQNTARAAEVWMDEYKEHFYNRNPPARKEAYGDISERKLLRERLRCKSFDWYLKNVFPNLHVPEDRPGWHGAIRSRGISSECLDYNSPDNNPTGANLSLFGCHGQGGNQFFEYTSNKEIRFNSVTELCAEVPEQKNYVGMQNCPKDGFPVPANIIWHFKEDGTIFHPHSGLCLSAYRTPEGRPDVQMRTCDALDKNQIWSFEK

SEQ ID NO: 8719 - protein, 514 aa, Homo sapiens [sequence omitted]

SEQ ID NO: 8720 - protein, 686 aa, Homo sapiens
MDHITVPKVENVKLVDRYVSKKPANGILYLTATHLIYVEASGAARKETWIALHHIATVEKLPITSLGCPLTLRCKNFRVAHFVLDSDLVCHEVYISLLKLSQPALPEDLYAFSYNPKSSKEMRESGWKLIDPISDFGRMGIPNRNWTITDANRNYEICSTYPPEIVVPKSVTLGTVVGSSKFRSKERVPVLSYLYKENNAAICRCSQPLSGFYTRCVDDELLLEAISQTNPGSQFMYVVDTRPKYANIRFRFMGIENIHVMRSSLQKLLEVCELKTPTMSEFLSGLESSGWLRHIKAIMDAGIFITKAVKVEKASVLVHCSDGWDRTAQVCSVASILLDPFYRTFKGLMILIEKEWISMGHKFSQRCGHLDGDSKEVSPIFTQFLDCIWQLMEQFPCAFEFNENFLLEIHDHVFSCQFGNFLGNCQKDREDLRVYEKTHSVWPFLVQRKPDFRNPLYKGFTMYGVLNPSTVPYNIQFWCGMYNRFDKGLQPKQSMLESLLEIKKQRAMLETDVHELEKKLKVRDEPPEEICTCSQLGNILSQHLGSPLTNPLGFMGINGDLNTLMENGTLSREGGLRAQMDQVKSQGADLHHNCCEIVGSLRAINISGDVGISEAMGISGDMCTFEATGFSKDLGICGAMDISEATGISGNLGISEARGFSGDMGILGDTGISKASTKEADYSKHQ

SEQ ID NO: 8721 - protein, 704 aa, Homo sapiens
MDHITVPKVENVKLVDRYVSKKPANGILYLTATHLIYVEASGAARKETWIALHHIATVEKLPITSLGCPLTLRCKNFRVAHFVLDSDLVCHEVYISLLKLSQPALPEDLYAFSYNPKSSKEMRESGWKLIDPISDFGRMGIPNRNWTITDANRNYEICSTYPPEIVVPKSVTLGTVVGSSKFRSKERVPVLSYLYKENNAAICRCSQPLSGFYTRCVDDELLLEAISQTNPGSQFMYVVDTRPKLNAMANRAAGKGYENEDNYANIRFRFMGIENIHVMRSSLQKLLEVCELKTPTMSEFLSGLESSGWLRHIKAIMDAGIFITKAVKVEKASVLVHCSDGWDRTAQVCSVASILLDPFYRTFKGLMILIEKEWISMGHKFSQRCGHLDGDSKEVSPIFTQFLDCIWQLMEQFPCAFEFNENFLLEIHDHVFSCQFGNFLGNCQKDREDLRVYEKTHSVWPFLVQRKPDFRNPLYKGFTMYGVLNPSTVPYNIQFWCGMYNRFDKGLQPKQSMLESLLEIKKQRAMLETDVHELEKKLKVRDEPPEEICTCSQLGNILSQHLGSPLTNPLGFMGINGDLNTLMENGTLSREGGLRAQMDQVKSQGADLHHNCCEIVGSLRAINISGDVGISEAMGISGDMCTFEATGFSKDLGICGAMDISEATGISGNLGISEARGFSGDMGILGDTGISKASTKEADYSKHQ

SEQ ID NO: 8722 - protein, 595 aa, Homo sapiens [sequence omitted]

SEQ ID NO: 8723 - protein, 683 aa, Homo sapiens [sequence omitted]

SEQ ID NO: 8724 - protein, 55 aa, Homo sapiens
MAVLSKEYGFVLLTGAASFIMVAHLAINVSKARKKYKVEWTLPLRFSHTQFLFFY

SEQ ID NO: 8725 - protein, 153 aa, Homo sapiens
MAVLSKEYGFVLLTGAASFIMVAHLAINVSKARKKYKVEYPIMYSTDPENGHIFNCIQRAHQNTLEVYPPFLFFLAVGGVYHPLLAWAWPGLLDEFFMLMAITRENPASVVEEPWGPSPSWAWWAQLCALLSSILVGLKVAWAVDPNAAIKEL

SEQ ID NO: 8726 - protein, 152 aa, Homo sapiens
MAVLSKEYGFVLLTGAASFIMVAHLAINVSKARKKYKVEYPIMYSTDPENGHIFNCIQRAHQNTLEVYPPFLFFLAVGGVYHPRIASGLGLAWIVGRVLYAYGYYTGEPSKRSRGALGSIALLGLVGTTVCSAFQHLGWVKSGLGSGPKCCH

SEQ ID NO: 8727 - protein, 152 aa, Homo sapiens; identical to SEQ ID NO: 8726

SEQ ID NO: 8728 - protein, 152 aa, Homo sapiens; identical to SEQ ID NO: 8726

SEQ ID NO: 8729 - protein, 120 aa, Homo sapiens
MAEISDLDRQIEQLRRCELIKESEVKALCAKAREILVEESNVQRVDSPVTVCGDIHGQFYDLKELFRVGGDVPETNYLFMGDFVDRGFYSVETFLLLLALKVAVPGFCTPNLGDLGPGLS

SEQ ID NO: 8730 - protein, 307 aa, Homo sapiens
MAEISDLDRQIEQLRRCELIKESEVKALCAKAREILVEESNVQRVDSPVTVCGDIHGQFYDLKELFRVGGDVPETNYLFMGDFVDRGFYSVETFLLLLALKVRYPDRITLIRGNHESRQITQVYGFYDECLRKYGSVTVWRYCTEIFDYLSLSAIIDGKIFCVHGGLSPSIQTLDQIRTIDRKQEVPHDGPMCDLLWSDPEDTTGWGVSPRGAGYLFGSDVVAQFNAANDIDMICRAHQLVMEGYKWHFNETVLTVWSAPNYCYRCGNVAAILELDEHLQKDFIIFEAAPQETRGIPSKKPVADYFL

SEQ ID NO: 8731 - protein, 308 aa, Homo sapiens
MAEISDLDRQIEQLRRCELIKESEVKALCAKAREILVEESNVQRVDSPVTVCGDIHGQFYDLKELFRVGGDVPETNYLFMGDFVDRGFYSVETFLLLLALKVRYPDRITLIRGNHESRQITQVYGFYDECLRKYGSVTVWRYCTEIFDYLSLSAIIDGKIFCVHGGLSPSIQTLDQIRTIDRKQEVPHDGPMCDLLWSDPEDTTGWGVSPRGAGYLFGSDVVAQFNAANDIDMICRAHQLVMEGYKWHFNETVLTVWSAPNYCYRCGNVAAILELDEHLQKDFIIFEAAPQETRGPLPPPTLLALAPL

SEQ ID NO: 8732 - protein, 307 aa, Homo sapiens; identical to SEQ ID NO: 8730

SEQ ID NO: 8733 - protein, 307 aa, Homo sapiens; identical to SEQ ID NO: 8730

SEQ ID NO: 8734 - protein, 582 aa, Homo sapiens
MFPAGPPSHSLLRLPLLQLLLLVVQAVGRGLGRASPAGGPLEDVVIERYHIPRACPREVQMGDFVRYHYNGTFEDGKKFDSSYDRNTLVAIVVGVGRLITGMDRGLMGMCVNERRRLIVPPHLGYGSIGLAGLIPPDATLYFDVVLLDVWNKEDTVQVSTLLRPPHCPRMVQDGDFVRYHYNGTLLDGTSFDTSYSKGGTYDTYVGSGWLIKGMDQGLLGMCPGERRKIIIPPFLAYGEKGYGTVIPPQASLVFHVLLIDVHNPKDAVQLETLELPPGCVRRAGAGDFMRYHYNGSLMDGTLFDSSYSRNHTYNTYIGQGYIIPGMDQGLQGACMGERRRITIPPHLAYGENGTGDKIPGSAVLIFNVHVIDFHNPADVVEIRTLSRPSETCNETTKLGDFVRYHYNCSLLDGTQLFTSHDYGAPQEATLGANKVIEGLDTGLQGMCVGERRQLIVPPHLAHGESGARGVPGSAVLLFEVELVSREDGLPTGYLFVWHKDPPANLFEDMDLNKDGEVPPEEFSTFIKAQVSEGKGRLMPGQDPEKTIGDMFQNQDRNQDGKITVDELKLKSDEDEERVHEEL

SEQ ID NO: 8735 - protein, 643 aa, Homo sapiens
MFPAGPPSHSLLRLPLLQLLLLVVQAVGRGLGRASPAGGPLEDVVIERYHIPRACPREVQMGDFVRYHYNGTFEDGKKFDSSYDRNTLVAIVVGVGRLITGMDRGLMGMCVNERRRLIVPPHLGYGSIGLAGLIPPDATLYFDVVLLDVWNKEDTVQVSTLLRPPHCPRMVQDGDFVRYHYNGTLLDGTSFDTSYSKGGTYDTYVGSGWLIKGMDQGLLGMCPGERRKIIIPPFLAYGEKGYGTVIPPQASLVFHVLLIDVHNPKDAVQLETLELPPGCVRRAGAGDFMRYHYNGSLMDGTLFDSSYSRNHTYNTYIGQGYIIPGMDQGLQGACMGERRRITIPPHLAYGENGTDSIGFLQGSAPLRPFRSGEGQPSLGREGGYGKTEPAYPQDPAVLGASVSSPVKWASHADPQGDKIPGSAVLIFNVHVIDFHNPADVVEIRTLSRPSETCNETTKLGDFVRYHYNCSLLDGTQLFTSHDYGAPQEATLGANKVIEGLDTGLQGMCVGERRQLIVPPHLAHGESGARGVPGSAVLLFEVELVSREDGLPTGYLFVWHKDPPANLFEDMDLNKDGEVPPEEFSTFIKAQVSEGKGRLMPGQDPEKTIGDMFQNQDRNQDGKITVDELKLKSDEDEERVHEEL

SEQ ID NO: 8736 - protein, 582 aa, Homo sapiens; identical to SEQ ID NO: 8734

SEQ ID NO: 8737 - protein, 401 aa, Homo sapiens
MSSSGAKDKPELQFPFLQDEDTVATLLECKTLFILRGLPGSGKSTLARVIVDKYRDGTKMVSADAYKITPGARGAFSEEYKRLDEDLAAYCRRRDIRILVLDDTNHERERLEQLFEMADQYQYQVVLVEPKTAWRLDCAQLKEKNQWQLSADDLKKLKPGLEKDFLPLYFGWFLTKKSSETLRKAGQVFLEELGNHKAFKKELRQFVPGDEPREKMDLVTYFGKRPPGVLHCTTKFCDYGKAPGAEEYAQQDVLKKSYSKAFTLTISALFVTPKTTGARVELSEQQLQLWPSDVDKLSPTDNLPRGSRAHITLGCAADVEAVQTGLDLLEILRQEKGGSRGEEVGELSRGKLYSLGNGRWMLTLAKNMEVRAIFTGYYGKGKPVPTQGSRKGGALQSCTII

SEQ ID NO: 8738 - protein, 421 aa, Homo sapiens
MNRGFSRKSHTFLPKIFFRKMSSSGAKDKPELQFPFLQDEDTVATLLECKTLFILRGLPGSGKSTLARVIVDKYRDGTKMVSADAYKITPGARGAFSEEYKRLDEDLAAYCRRRDIRILVLDDTNHERERLEQLFEMADQYQYQVVLVEPKTAWRLDCAQLKEKNQWQLSADDLKKLKPGLEKDFLPLYFGWFLTKKSSETLRKAGQVFLEELGNHKAFKKELRQFVPGDEPREKMDLVTYFGKRPPGVLHCTTKFCDYGKAPGAEEYAQQDVLKKSYSKAFTLTISALFVTPKTTGARVELSEQQLQLWPSDVDKLSPTDNLPRGSRAHITLGCAADVEAVQTGLDLLEILRQEKGGSRGEEVGELSRGKLYSLGNGRWMLTLAKNMEVRAIFTGYYGKGKPVPTQGSRKGGALQSCTII

SEQ ID NO: 8739 - protein, 575 aa, Homo sapiens [sequence omitted]

SEQ ID NO: 8740 - protein, 304 aa, Homo sapiens
MATGAFTQGQLKVRLTAQTSLGPLSDFYTLPVGIRTVAVTESQFFINGKPFYFHSINKHEDADLRLCSWVLVGAASGHLPLLPSILGKGFDWLLLVKDFNLLHWLGANAFCTSHYPYAGEVLQMCDRYGIVVIDECPAVGLVLVQLFNNVSVHQHMWVMEELVCRDKNHPAVVMWSVANKPASYLEPAGYYFRYVALSWGFFTCEFLNLIQPLVPSPASSHSFVTAPGTPIDIQGPPLMFTEEYQKSLPEQYHLGLDQKRRKYVVGELIGNSADFTTMQCCLANSGHFDYKNIGNKGGKLAYSM

SEQ ID NO: 8741 - protein, 261 aa, Homo sapiens
MTCWLRGVTATFGRPAEWPGYLSHLCGRSAAMDLGPMRKSYRGDREAFEETHLTSLDPVKQFAAWFEEAVQCPDIGEANAMCLATCTRDGKPSARMLLLKGFGKDGFRFFTNFESRKGKELDSNPFASLVFYWEPLNRQVRVEGPVKKLPEEEAECYFHSRPKSSQIGAVVSHQSSVIPDREYLRKKNEELEQLYQDQEVPKPKSWGGYVLYPQVMEFWQGQTNRLHDRIVFRRGLPTGDSPLGPMTHRGEEDWLYERLAP

SEQ ID NO: 8742 - protein, 261 aa, Homo sapiens; identical to SEQ ID NO: 8741

SEQ ID NO: 8743 - protein, 163 aa, Homo sapiens
MMVNGILKVPAINVNDSLTKSEFNKLYGCWESLIDGIKWATVVMIAGKVAMVAGYGNVGKGCAQALWGFGAHVIITKIDPINALQAAMEGYEVTTMDEACQEGNIFITTTACVNIILGRHFEQMKDDAIVCNTGHFEVEINVKWLSENPWRRWPSSPRWPGTG

SEQ ID NO: 8744 - protein, 145 aa, Homo sapiens
MDYGRVNDIMRKLIGDRPDTYIDTKALAEYVVQQEGAKLNVEIRNPLEQAFRWPNVNLTSNHLLYHYWIAVSHKASAFLDDIYLRMTGRSPRMMKTIIHLHKAVMLLEYFTSNSWVWNTDNVNMLMNQLNLEDKKTFNIDVRQLH

SEQ ID NO: 8745 - protein, 318 aa, Homo sapiens
MERGDQPKRTRNENIFNCLYKNPEATFKLICFPWMGGGSTHFAKWGQDTHDLLEETASHHVAKAGLKLRRSSDPPASAYPCAGVSHRRREPPCLAKILGLFWILIFFMHSLRLPGRESRVEEPLENDISQLVDEVVCALQPVIQDKPFAFFGHSMGSYIAFRTALGLKENNQPEPLHLFLSSATPVHSKAWHRIPKDDELSEEQISHYLMEFGGTPKHFAEAKEFVKQCSPIIRADLNIVRSCTSNVPSKAVLSCDLTCFVGSEDIAKDMEAWKDVTSGNAKIYQLPGGHFYLLDPANEKLIKNYIIKCLEVSSISNF

SEQ ID NO: 8746 - protein, 265 aa, Homo sapiens
MERGDQPKRTRNENIFNCLYKNPEATFKLICFPWMGGGSTHFAKWGQDTHDLLEVHSLRLPGRESRVEEPLENDISQLVDEVVCALQPVIQDKPFAFFGHSMGSYIAFRTALGLKENNQPEPLHLFLSSATPVHSKAWHRIPKDDELSEEQISHYLMEFGGTPKHFAEAKEFVKQCSPIIRADLNIVRSCTSNVPSKAVLSCDLTCFVGSEDIAKDMEAWKDVTSGNAKIYQLPGGHFYLLDPANEKLIKNYIIKCLEVSSISNF

SEQ ID NO: 8747 - protein, 318 aa, Homo sapiens; identical to SEQ ID NO: 8745

SEQ ID NO: 8748 - protein, 454 aa, Homo sapiens [sequence omitted]

SEQ ID NO: 8749 - protein, 454 aa, Homo sapiens [sequence omitted]

SEQ ID NO: 8750 - protein, 454 aa, Homo sapiens [sequence omitted]

SEQ ID NO: 8751 - protein, 364 aa, Homo sapiens
MALHCQEFGGKNYEASMSHVDKFVKELLSSDAMKEYNRARVYLDENYKSQEHFTALGSFYFLHESLKNIYQFDFKAKKYRKVAGKEIYSDTLESTPMLEKEKFPQDYFPECKWSRKGFIRTRWCIADCAFDLVNIHLFHDASNLVAWETSPSVYSGIRHKALGYVLDRIIDQRFEKVSYFVFGDFNFRLDSKSVVETLCTKATMQTVRAADTNEVVKLIFRESDNDRKVMLQLEKKLFDYFNQEVFRDNNGTALLEFDKELSVFKDRLYELDISFPPSYPYSEDARQGEQYMNTRCPAWCDRILMSPSAKELVLRSESEEKVVTYDHIGPNVCMGDHKPVFLAFRIMPGAGKPHAHVHKCCVVQ

SEQ ID NO: 8752 - protein, 364 aa, Homo sapiens; identical to SEQ ID NO: 8751

SEQ ID NO: 8753 - protein, 412 aa, Homo sapiens
MAGKAAAPGTAVLLVTANVGSLFDDPENLQKNWLREFYQVVHTHKPHFMALHCQEFGGKNYEASMSHVDKFVKELLSSDAMKEYNRARVYLDENYKSQEHFTALGSFYFLHESLKNIYQFDFKAKKYRKVAGKEIYSDTLESTPMLEKEKFPQDYFPECKWSRKGFIRTRWCIADCAFDLVNIHLFHDASNLVAWETSPSVYSGIRHKALGYVLDRIIDQRFEKVSYFVFGDFNFRLDSKSVVETLCTKATMQTVRAADTNEVVKLIFRESDNDRKVMLQLEKKLFDYFNQEVFRDNNGTALLEFDKELSVFKDRLYELDISFPPSYPYSEDARQGEQYMNTRCPAWCDRILMSPSAKELVLRSESEEKVVTYDHIGPNVCMGDHKPVFLAFRIMPGAGKPHAHVHKCCVVQ

SEQ ID NO: 8754 - protein, 412 aa, Homo sapiens; identical to SEQ ID NO: 8753

SEQ ID NO: 8755 - protein, 153 aa, Homo sapiens
MALVFVYGTLKRGQPNHRVLRDGAHGSAAFRARGRTLEPYPLVIAGEHNIPWLLHLPGSGRLVEGEVYAVDERMLRFLDDFESCPALYQRTVLRVQLLEDRAPGAEEPPAPTAVQCFVYSRATFPPEWAQLPHHDSYDSEGPHGLRYNPRENR

SEQ ID NO: 8756 - protein, 621 aa, Homo sapiens
MEHIRTTKVEQVKLLDRFSTSNKSLTGTLYLTATHLLFIDSHQKETWILHHHIASVEKLALTTSGCPLVIQCKNFRTVHFIVPRERDCHDIYNSLLQLSKQAKYEDLYAFSYNPKQNDSERLQGWQLIDLAEEYKRMGVPNSHWQLSDANRDYKICETYPRELYVPRIASKPIIVGSSKFRSKGRFPVLSYYHQDKEAAICRCSQPLSGFSARCLEDEHLLQAISKANPVNRYMYVMDTRPKLNAMANRAAGKGYENEDNYSNIRFQFVGIENIHVMRSSLQKLLEVNGTKGLSVNDFYSGLESSGWLRHIKAVMDAAVFLAKAITVENASVLVHCSDGWDRTSQVCSLGSLLLDSYYRTIKGFMVLIEKDWISFGHKFSERCGQLDGDPKEVSPVFTQFLECVWHLTEQFPQAFEFSEAFLLQIHEHIHSCQFGNFLGNCQKEREELKLKEKTYSLWPFLLEDQKKYLNPLYSSESHRFTVLEPNTVSFNFKFWRNMYHQFDRTLHPRQSVFNIIMNMNEQNKQLEKDIKDLESKIKQRKNKQTDGILTKELLHSVHPESPNLKTSLCFKEQTLLPVNDALRTIEGSSPADNRYSEYAEEFSKSEPAVVSLEYGVARMTC

SEQ ID NO: 8757 - protein, 124 aa, Homo sapiens [sequence omitted]

SEQ ID NO: 8758 - protein, 264 aa, Homo sapiens [sequence omitted]

SEQ ID NO: 8759 - protein, 252 aa, Homo sapiens
MTGHHGWGYGQDDGPSHWHKLYPIAQGDRQSPINIISSQAVYSPSLQPLELSYEACMSLSITNNGHSVQVDFNDSDDRTVVTGGPLEGPYRLKQFHFHWGKKHDVGSEHTVDGKSFPSELHLVHWNAKKYSTFGEAASAPDGLAVVGVFLETGDEHPSMNRLTDALYMVRFKCLLPASRHYWTYPGSLTTPPLSESVTWIVLREPICISERQMGKFRSLLFTSEDDERIHMVNNFRPPQPLKGRVVKASFRA

SEQ ID NO: 8760 - protein, 230 aa, Homo sapiens
MFRACPSCSLKALSPSQNQSRAPPALAAVSRPGNGRWPPPSQPQPGRKSRASEEALRARAGSGSRGAGSRWAHRGSWEAGPRRALPGGQARRCTLRGPGPEAGLPRLPGPKQRSARAAQPRSGHSSIAGRADPEARGSFLCESARTTASPAVGRRLDPGAWPLKRPGRISSQQEEKYSKGEVRRWQPEALPLLGRWQNAPITWQHSEDGWQIIPATEGLINDCRLIEHLL

SEQ ID NO: 8761 - protein, 529 aa, Homo sapiens
MSSTVSYWILNSTRNSIATLQGGRRLYSRYVSNRNKLKWRLFSRVPPTLNSSPCGGFTLCKAYRHTSTEEDDFHLQLSPEQINEVLRAGETTHKILDLESRVPNSVLRFESNQLAANSPVEDRRGVASCLQTNGLMFGIFDGHGGHACAQAVSERLFYYVAVSLMSHQTLEHMEGAMESMKPLLPILHWLKHPGDSIYKDVTSVHLDHLRVYWQELLDLHMEMGLSIEEALMYSFQRLDSDISLEIQAPLEDEVTRNLSLQVAFSGATACMAHVDGIHLHVANAGDCRAILGVQEDNGMWSCLPLTRDHNAWNQAELSRLKREHPESEDRTIIMEDRLLGVLIPCRAFGDVQLKWSKELQRSILERGFNTEALNIYQFTPPHYYTPPYLTAEPEVTYHRLRPQDKFLVLASDGLWDMLSNEDVVRLVVGHLAEADWHKTDLAQRPANLGLMQSLLLQRKASGLHEADQNAATRLIRHAIGNNEYGEMEAERLAAMLTLPEDLARMYRDDITVTVVYFNSESIGAYYKGG

SEQ ID NO: 8762 - protein, 417 aa, Homo sapiens
MEFVKCLGHPEEFYNLVRFRIGGKRKVMPKMDQDSLSSSLKTCYKYLNQTSRSFAAVIQALDGEMRNAVCIFYLVLRALDTLEDDMTISVEKKVPLLHNFHSFLYQPDWRFMESKEKDRQVLEDFPTISLEFRNLAEKYQTVIADICRRMGIGMAEFLDKHVTSEQEWDKYCHYVAGLVGIGLSRLFSASEFEDPLVGEDTERANSMGLFLQKTNIIRDYLEDQQGGREFWPQEVWSRYVKKLGDFAKPENIDLAVQCLNELITNALHHIPDVITYLSRLRNQSVFNFCAIPQVMAIATLAACYNNQQVFKGAVKIRKGQAVTLMMDATNMPAVKAIIYQYMEEIYHRIPDSDPSSSKTRQIISTIRTQNLPNCQLISRSHYSPIYLSFVMLLAALSWQYLTTLSQVTEDYVQTGEH

SEQ ID NO: 8763 - protein, 417 aa, Homo sapiens; identical to SEQ ID NO: 8762

SEQ ID NO: 8764 - protein, 417 aa, Homo sapiens; identical to SEQ ID NO: 8762

SEQ ID NO: 8765 - protein, 417 aa, Homo sapiens; identical to SEQ ID NO: 8762

SEQ ID NO: 8766 - protein, 108 aa, Homo sapiens
MEKSAGPYDKGEYLTSVQKTLCDIQVLSLSRVPAIEDMEISLPNIHYFNIDMSKMGLINKEEVRGLAAIRQSIWKNYWYSQEEVVFKTVTLWPPIGVHSQLRNSLSHL

SEQ ID NO: 8767 - protein, 419 aa, Homo sapiens [sequence omitted]

SEQ ID NO: 8768 - protein, 701 aa, Homo sapiens [sequence omitted]

SEQ ID NO: 8769 - protein, 119 aa, Homo sapiens
MKQETAIKYMTDGCLLKHILGDPNLTKFSVIILDEAHERTLTTDILFGLLKKLFQEKSPNRKEHLKVVVMSATMELAKLSAFFGNCPIFDIPGRLYPVREKFCNLIGPRDRENTAYIQA

SEQ ID NO: 8770 - protein, 645 aa, Homo sapiens [sequence omitted]

SEQ ID NO: 8771 - protein, 449 aa, Homo sapiens [sequence omitted]

SEQ ID NO: 8772 - protein, 405 aa, Homo sapiens
MERWPWPSGGAWLLVAARALLQLLRSDLRLGRPLLAALALLAALDWLCQRLLPPPAALAVLAAAGWIALSRLARPQRLPVATRAVLITGCDSGFGKETAKKLDSMGFTVLATVLELNSPGAIELRTCCSPRLRLLQMDLTKPGDISRVLEFTKAHTTSTGLWGLVNNAGHNEVVADAELSPVATFRSCMEVNFFGALELTKGLLPLLRSSRGRIVTVGSPAGDMPYPCLGAYGTSKAAVALLMDTFSCELLPWGVKVSIIQPGCFKTESVRNVGQWEKRKQLLLANLPQELLQAYGKDYIEHLHGQFLHSLRLAMSDLTPVVDAITDALLAARPRRRYYPGQGLGLMYFIHYYLPEGLRRRFLQAFFISHCLPRALQPGQPGTTPPQDAAQDPNLSPGPSPAVAR

SEQ ID NO: 8773 - protein, 571 aa, Homo sapiens
MERAVRVESGVLVGVVCLLLACPATATGPEVAQPEVDTTLGRVRGRQVGVKGTDRLVNVFLGIPFAQPPLGPDRFSAPHPAQPWEGVRDASTAPPMCLQDVESMNSSRFVLNGKQQIFSVSEDCLVLNVYSPAEVPAGSGRPVMVWVHGGALITGAATSYDGSALAAYGDVVVVTVQYRLGVLGFFSTGDEHAPGNQGFLDVVAALRWVQENIAPFGGDLNCVTVFGGSAGGSIISGLVLSPVAAGLFHRAITQSGVITTPGIIDSHPWPLAQKIANTLACSSSSPAEMVQCLQQKEGEELVLSKKLKNTIYPLTVDGTVFPKSPKELLKEKPFHSVPFLMGVNNHEFSWLIPRGWGLLDTMEQMSREDMLAISTPVLTSLDVPPEMMPTVIDEYLGSNSDAQAKCQAFQEFMGDVFINVPTVSFSRYLRDSGSPVFFYEFQHRPSSFAKIKPAWVKADHGAEGAFVFGGPFLMDESSRLAFPEATEEEKQLSLTMMAQWTHFARTGDPNSKALPPWPQFNQAEQYLEINPVPRAGQKFREAWMQFWSETLPSKIQQWHQKQKNRKAQEDL

SEQ ID NO: 8774 - protein, 592 aa, Homo sapiens
MERAVRVESGVLVGVVCLLLACPATATGPEVAQPEVDTTLGRVRGRQVGVKGTDRLVNVFLGIPFAQPPLGPDRFSAPHPAQPWEGVRDASTAPPMCLQDVESMNSSRFVLNGKQQIFSVSEDCLVLNVYSPAEVPAGSGRPVMVWVHGGALITGAATSYDGSALAAYGDVVVVTVQYRLGVLGFFSTGDEHAPGNQGFLDVVAALRWVQENIAPFGGDLNCVTVFGGSAGGSIISGLVLSPVAAGLFHRAITQSGVITTPGIIDSHPWPLAQKIANTLACSSSSPAEMVQCLQQKEGEELVLSKKLKNTIYPLTVDGTVFPKSPKELLKEKPFHSVPFLMGVNNHEFSWLIPRSLDPSSRLQCSSAIMTLYCLNGWGLLDTMEQMSREDMLAISTPVLTSLDVPPEMMPTVIDEYLGSNSDAQAKCQAFQEFMGDVFINVPTVSFSRYLRDSGSPVFFYEFQHRPSSFAKIKPAWVKADHGAEGAFVFGGPFLMDESSRLAFPEATEEEKQLSLTMMAQWTHFARTGDPNSKALPPWPQFNQAEQYLEINPVPRAGQKFREAWMQFWSETLPSKIQQWHQKQKNRKAQEDL

SEQ ID NO: 8775 - protein, 350 aa, Homo sapiens
MERAVRVESGVLVGVVCLLLACPATATGPEVAQPEVDTTLGRVRGRQVGVKGTDRLVNVFLGIPFAQPPLGPDRFSAPHPAQPWEGVRDASTAPPMCLQDVESMNSSRFVLNGKQQIFSVSEDCLVLNVYSPAEVPAGSGRPVMVWVHGGALITGAATSYDGSALAAYGDVVVVTVQYRLGVLGFFSTGDEHAPGNQGFLDVVAALRWVQENIAPFGGDLNCVTVFGGSAGGSIISGLVLSPVAAGLFHRAITQSGVITTPGIIDSHPWPLAQKIANTLACSSSSPAEMVQCLQQKEGEELVLSKKLVWPPFWGWCRAMAQRGFYPSPAGAEGQSTPRWGWGQQLMRGRG

SEQ ID NO: 8776 - protein, 351 aa, Homo sapiens
MSFFPELYFNVDNGYLEGLVRGLKAGVLSQADYLNLVQCETLEDLKLHLQSTDYGNFLANEASPLTVSVIDDRLKEKMVVEFRHMRNHAYEPLASFLDFITYSYMIDNVILLITGTLHQRSIAELVPKCHPLGSFEQMEAVNIAQTPAELYNAILVDTPLAAFFQDCISEQDLDEMNIEIIRNTLYKAYLESFYKFCTLLGGTTADAMCPILEFEADRRAFIITINSFGTELSKEDRAKLFPHCGRLYPEGLAQLARADDYEQVKNVADYYPEYKLLFEGAGSNPGDKTLEDRFFEHEVKLNKLAFLNQFHFGVFYAFVKLKEQECRNIVWIAECIAQRHRAKIDNYIPIF

SEQ ID NO: 8777 - protein, 584 aa, Homo sapiens
MPSTVLPSTVLPSLLPTAGAGWSMRWILCWSLTLCLMAQTALGALHTKRPQVVTKYGTLQGKQMHVGKTPIQVFLGVPFSRPPLGILRFAPPEPPEPWKGIRDATTYPPGCLQESWGQLASMYVSTRERYKWLRFSEDCLYLNVYAPARAPGDPQLPVMVWFPGGAFIVGAASSYEGSDLAAREKVVLVFLQHRLGIFGFLSTDDSHARGNWGLLDQMAALRWVQENIAAFGGDPGNVTLFGQSAGAMSISGLMMSPLASGLFHRAISQSGTALFRLFITSNPLKVAKKVAHLAGCNHNSTQILVNCLRALSGTKVMRVSNKMRFLQLNFQRDPEEIIWSMSPVVDGVVIPDDPLVLLTQGKVSSVPYLLGVNNLEFNWLLPYIMKFPLNRQAMRKETITKMLWSTRTLLNITKEQVPLVVEEYLDNVNEHDWKMLRNRMMDIVQDATFVYATLQTAHYHRDAGLPVYLYEFEHHARGIIVKPRTDGADHGDEMYFLFGGPFATGLSMGKEKALSLQMMKYWANFARTGNPNDGNLPCWPRYNKDEKYLQLDFTTRVGMKLKEKKMAFWMSLYQSQRPEKQRQF

SEQ ID NO: 8778 - protein, 385 aa, Homo sapiens
MAAVVAATALKGRGARNARVLRGILAGATANKASHNRTRALQSHSSPEGKEEPEPLSPELEYIPRKRGKNPMKAVGLAWYSLYTRTWLGYLFYRQQLRRARNRYPKGHSKTQPRLFNGVKVLPIPVLSDNYSYLIIDTQAQLAVAVDPSDPRAVQASIEKEGVTLVAILCTHKHWDHSGGNRDLSRRHRDCRVYGSPQDGIPYLTHPLCHQDVVSVGRLQIRALATPGHTQGHLVYLLDGEPYKGPSCLFSGDLLFLSGCGRTFEGNAETMLSSLDTVLGLGDDTLLWPGHEYAEENLGFAGVVEPENLARERKMQWVQRQRLERKGTCPSTLGEERSYNPFLRTHCLALQEALGPGPGPTGDDDYSRAQLLEELRRLKDMHKSK

SEQ ID NO: 8779 - protein, 294 aa, Homo sapiens
MPSSVHHTKRQMMSIYCYWYSLYTRTWLGYLFYRQQLRRARNRYPKGHSKTQPRLFNGVKVLPIPVLSDNYSYLIIDTQAQLAVAVDPSDPRAVQASIEKEGVTLVAILCTHKHCPLCHQDVVSVGRLQIRALATPGHTQGHLVYLLDGEPYKGPSCLFSGDLLFLSGCGRTFEGNAETMLSSLDTVLGLGDDTLLWPGHEYAEENLGFAGVVEPENLARERKMQWVQRQRLERKGTCPSTLGEERSYNPFLRTHCLALQEALGPGPGPTGDDDYSRAQLLEELRRLKDMHKSK

SEQ ID NO: 8780 - protein, 142 aa, Homo sapiens
MAAVVAATALKGRGARNARVLRGILAGATANKASHNRTRALQSHSSPEGKEEPEPLSPELEYIPRKRGKNPMKAVGLAWAIGFPCGILLFILTKREVDKDRVKQMKARQNMRLSNTGEYESQRFRASSQSAPSPDVGSGVQT

SEQ ID NO: 8781 - protein, 385 aa, Homo sapiens; identical to SEQ ID NO: 8778

SEQ ID NO: 8782 - protein, 361 aa, Homo sapiens
MAWQGWPAAWQWVAGCWLLLVLVLVLLVSPRGCRARRGLRGLLMAHSQRLLFRIGYSLYTRTWLGYLFYRQQLRRARNRYPKGHSKTQPRLFNGVKVLPIPVLSDNYSYLIIDTQAQLAVAVDPSDPRAVQASIEKEGVTLVAILCTHKHWDHSGGNRDLSRRHRDCRVYGSPQDGIPYLTHPLCHQDVVSVGRLQIRALATPGHTQGHLVYLLDGEPYKGPSCLFSGDLLFLSGCGRTFEGNAETMLSSLDTVLGLGDDTLLWPGHEYAEENLGFAGVVEPENLARERKMQWVQRQRLERKGTCPSTLGEERSYNPFLRTHCLALQEALGPGPGPTGDDDYSRAQLLEELRRLKDMHKSK

SEQ ID NO: 8783 - protein, 118 aa, Homo sapiens
MVGATPFAVARLEILQLLKGKLVVGHDLKHDFQALKEDMSGYTIYDTSTDRLLWREAKLDHCRRVSLRVLSERLLHKSIQNSLLGHSSVEDARATMELYQISQRIRARRGLPRLAVSD

SEQ ID NO: 8784 - protein, 102 aa, Homo sapiens [sequence omitted]

SEQ ID NO: 8785 - protein, 118 aa, Homo sapiens; identical to SEQ ID NO: 8783

SEQ ID NO: 8786 - protein, 118 aa, Homo sapiens; identical to SEQ ID NO: 8783

SEQ ID NO: 8787 - protein, 654 aa, Homo sapiens
MPPPRTREGRDRRDHHRAPSEEEALEKWDWNCPETRRLLEDAFFREEDYIRQGSEECQKFWTFFERLQRFQNLKTSRKEEKDPGQPKHSIPALADLPRTYDPRYRINLSVLGPATRGSQGLGRHLPAERVAEFRRALLHYLDFGQKQAFGRLAKLQRERAALPIAQYGNRILQTLKEHQVVVVAGDTGCGKSTQVPQYLLAAGFSHVACTQPRRIACISLAKRVGFESLSQYGSQVGYQIRFESTRSAATKIVFLTVGLLLRQIQREPSLPQYEVLIVDEVHERHLHNDFLLGVLQRLLPTRPDLKVILMSATINISLFSSYFSNAPVVQVPGRLFPITVVYQPQEAEPTTSKSEKLDPRPFLRVLESIDHKYPPEERGDLLVFLSGMAEISAVLEAAQTYASHTQRWVVLPLHSALSVADQDKVFDVAPPGVRKCILSTNIAETSVTIDGIRFVVDSGKVKEMSYDPQAKLQRLQEFWISQASAEQRKGRAGRTGPGVCFRLYAESDYDAFAPYPVPEIRRVALDSLVLQMKSMSVGDPRTFPFIEPPPPASLETAILYLRDQGALDSSEALTPIGSLLAQLPVDVVIGKMLILGSMFSLVEPVLTIAAALSVQSPFTRSAQSSPECAAARRPLESDQGDPFTLFNVFNAWVQ

SEQ ID NO: 8788 - protein, 578 aa, Homo sapiens
MPPPRTREGRDRRDHHRAPSEEEALEKWDWNCPETRRLLEDAFFREEDYIRQGSEECQKFWTFFERLQRFQNLKTSRKEEKDPGQPKHSIPALADLPRTYDPRYRINLSVLGPATRGSQGLGRHLPAERVAEFRRALLHYLDFGQKQAFGRLAKLQRERAALPIAQYGNRILQTLKEHQVVVVAGDTGCGKSTQVPQYLLAAGFSHVACTQPRRIACISLAKRVGFESLSQYGSQVGYQIRFESTRSAATKIVFLTVGLLLRQIQREPSLPQYEVLIVDEVHERHLHNDFLLGVLQRLLPTRPDLKVILMSATINISLFSSYFSNAPVVQVPGRLFPITVFDVAPPGVRKCILSTNIAETSVTIDGIRFVVDSGKVKEMSYDPQAKLQRLQEFWISQASAEQRKGRAGRTGPGVCFRLYAESDYDAFAPYPVPEIRRVALDSLVLQMKSMSVGDPRTFPFIEPPPPASLETAILYLRDQGALDSSEALTPIGSLLAQLPVDVVIGKMLILGSMFSLVEPVLTIAAALSVQSPFTRSAQSSPEAPCCTPPASSLAAPRCCTHRSWRPATATEAETTRTR

SEQ ID NO: 8789 - protein, 578 aa, Homo sapiens; identical to SEQ ID NO: 8788

SEQ ID NO: 8790 - protein, 578 aa, Homo sapiens; identical to SEQ ID NO: 8788

SEQ ID NO: 8791 - protein, 208 aa, Homo sapiens
MSSKHQLLSFVSLLETNKPYLVNCVRIPALQSLLLFSRSLDTNGDCSRLVADGWLELQLADSESAIRLLAASLRLRARWESALDRQLAHQAQQQLEEEEEDTPVSPKEVATLSKELLQFTASKIPYSLRRLTGLEVQNMYVGPQTIPATPHLPGLFGSSTLSPHPTKGGYAVTDFLTYNCLTVSMNPPSLKVGFQEDPTTPFHLSPGT

SEQ ID NO: 8792 - protein, 463 aa, Homo sapiens
  VARIANT (1)...(463): Xaa = Any Amino Acid
MPPPRTREGRDRRDHHRAPSEEEALEKWDWNCPETRRLLEDAFFREEDYIRQGSEECQKFWTFFERLQRFQNLKTSRKEEKDPGQPKHSIPALADLPRTYDPRYRINLSVLGPATRGSQGLGRHLPAERVAEFRRALLHYLDFGQKQAFGRLAKLQRERAALPIAQYGNRILQTLKEHQVVVVAGDTGCGKSTQVPQYLLAAGFSHVACTQPRRIACISLAKRVGFESLSQYGSQVGYQIRFESTRSAATKIVFLTVGLLLRQIQREPSLPQYEVLIVDEVHERHLHNDFLLGVLQRLLPTRPDLKVILMSATINISLFSSYFSNAPVVQVPGRLFPITVFDVAPPGVRKCILSTNIAETSVTIDGIRFVVDSDEEHECGGPPNLPLHRAPTTSQPGNRHPLPPGPGGPGQLRGPHTHWVPASPAACGRCDCLVEPVLTIAAALSVQSPFTRSAQSSPECAAX

SEQ ID NO: 8793 - protein, 185 aa, Homo sapiens
MSSRKLSGPKGRRLSIHVVTWNVASAAPPLDLSDLLQLNNRNLNLDIYVIGLQELNSGIISLLSDAAFNDSWSSFLMDVLSPLSFIKVSHVRMQGILLLVFAKYQHLPYIQILSTKSTPTGLFGYWGNKGGVNICLKLYGYYVSIINCHLPPHISNNYQRLEHFDRILEMQNCEGRDIPNILDHE

SEQ ID NO: 8794 - protein, 449 aa, Homo sapiens
MSSRKLSGPKGRRLSSIHVVTWNVASAAPPLDLSDLLQLNNRNLNLDIYVIGLQELNSGIISLLSDAAFNDSWSSFLMDVLSPLSFIKVSHVRMQGILLLVFAKYQHLPYIQILSTKSTPTGLFGYWGNKGGVNICLKLYGYYVSIINCHLPPHISNNYQRLEHFDRILEMQNCEGRDIPNILDHDLIIWFGDMNFRIEDFGLHFVRESIKNRCYGGLWEKDQLSIAKKHDPLLREFQEGRLLFPPTYKFDRNSNDYDTSEKKRKPAWTDRILWRLKRQPCAGPDTPIPPASHFSLSLRGYSSHMTYGISDHKPVSGTFDLELKPLVSAPLIVLMPEDLWTVENDMMVSYSSTSDFPSSPWDWIGLYKVGLRDVNDYVSYAWVGDSKVSCSDNLNQVYIDISNIPTTEDEFLLCYYSNSLRSVVGISRPFQIPPGSLREDPLGEAQPQI

SEQ ID NO: 8795 - protein, 448 aa, Homo sapiens
MSSRKLSGPKGRRLSIHVVTWNVASAAPPLDLSDLLQLNNRNLNLDIYVIGLQELNSGIISLLSDAAFNDSWSSFLMDVLSPLSFIKVSHVRMQGILLLVFAKYQHLPYIQILSTKSTPTGLFGYWGNKGGVNICLKLYGYYVSIINCHLPPHISNNYQRLEHFDRILEMQNCEGRDIPNILDHDLIIWFGDMNFRIEDFGLHFVRESIKNRCYGGLWEKDQLSIAKKHDPLLREFQEGRLLFPPTYKFDRNSNDYDTSEKKRKPAWTDRILWRLKRQPCAGPDTPIPPASHFSLSLRGYSSHMTYGISDHKPVSGTFDLELKPLVSAPLIVLMPEDLWTVENDMMVSYSSTSDFPSSPWDWIGLYKVGLRDVNDYVSYAWVGDSKVSCSDNLNQVYIDISNIPTTEDEFLLCYYSNSLRSVVGISRPFQIPPGSLREDPLGEAQPQI

SEQ ID NO: 8796 - protein, 448 aa, Homo sapiens; identical to SEQ ID NO: 8795

SEQ ID NO: 8797 - protein, 372 aa, Homo sapiens
MDVLSPLSFIKVSHVRMQGILLLVFAKYQHLPYIQILSTKSTPTGLFGYWGNKGGVNICLKLYGYYVSIINCHLPPHISNNYQRLEHFDRILEMQNCEGRDIPNILDHDLIIWFGDMNFRIEDFGLHFVRESIKNRCYGGLWEKDQLSIAKKHDPLLREFQEGRLLFPPTYKFDRNSNDYDTSEKKRKPAWTDRILWRLKRQPCAGPDTPIPPASHFSLSLRGYSSHMTYGISDHKPVSGTFDLELKPLVSAPLIVLMPEDLWTVENDMMVSYSSTSDFPSSPWDWIGLYKVGLRDVNDYVSYAWVGDSKVSCSDNLNQVYIDISNIPTTEDEFLLCYYSNSLRSVVGISRPFQIPPGSLREDPLGEAQPQI

SEQ ID NO: 8798 - protein, 306 aa, Homo sapiens
MASPGCLWLLAVALLPWTCASRALQHLDPPAPLPLVIWHGMGDSCCNPLSMGAIKKMVEKKIPGIYVLSLEIGKTLMEDVENSFFLNVNSQVTTVCQALAKDPKLQQGYNAMGFSQGGQFLRAVAQRCPSPPMINLISVGGQHQGVFGLPRCPGESSHICDFIRKTLNAGAYSKVVQERLVQAEYWHDPIKEDVYRNHSIFLADINQERGINESYKKNLMALKKFVMVKFLNDSIVDPVDSEWFGFYRSGQAKETIPLQETSLYTQDRLGLKEMDNAGQLVFLATEGDHLQLSEEWFYAHIIPFLG

SEQ ID NO: 8799 - protein, 306 aa, Homo sapiens; identical to SEQ ID NO: 8798

SEQ ID NO: 8800 - protein, 132 aa, Homo sapiens [sequence omitted]

SEQ ID NO: 8801 - protein, 145 aa, Homo sapiens
MQGKAVNRHTCAFFLTLVKLMACTGAEVPRVAAHMLAALASCTTQAPGWVGSYHSTEPAPSLMSRSSGSPVPANTEQPKLLGGRGGGGRCVRTGECGGDSDSGWPGSGFSKHKRFDLGLDDVLIPHVVAGKGAKNPEVFLIYAPN

SEQ ID NO: 8802 - protein, 109 aa, Homo sapiens
MPKDTLIRTHLVVVFESSVAAERWPLEAHVLNKEKDGGVLSARNKDNESQQAGKWSKDGAVRLLSCWLELPEDSVRMQVEEGSPPEPSSLWGGAGSLNLQDKPRQPWGP

SEQ ID NO: 8803 - protein, 660 aa, Homo sapiens [sequence omitted]

SEQ ID NO: 8804 - protein, 660 aa, Homo sapiens [sequence omitted]

SEQ ID NO: 8805 - protein, 660 aa, Homo sapiens [sequence omitted]

SEQ ID NO: 8806 - protein, 660 aa, Homo sapiens [sequence omitted]

SEQ ID NO: 8807 - protein, 411 aa, Homo sapiens
MRTPPAIEATPKGTLQPAGGRLRFLSGCVPILHQVAGHRYGKDKMGILQHPDGTVLKQLQPPPRGPRELEFYNMVYAADCTDGVLLELRQYLPKYYGIWPPPAAPNDLYLKLENVTHKFNKPCIMDHYAALGRDSVGAASVNLEPSDVPQDVYSSVAAQVEVFRRQDAQRGMRVAQVLEGFITRKVVKQTVMTVVYGVTRYGGRLQIEKRLRELNDFPQEFVWEASHYLVRQVFRSLQEMFSGTRAIQHWLIESAHLVSHTGSVVEWVTPLGVPIIQPYRLESKVKQSGGGIQSITYTHNRDISRKPNTPKQKNGFRPNFIHSLDSSHMMLTTLHCYRKGLTFVSVHDCYRTHAADVSIMNQDLSRFLVRRFCSEPQKILEASQMKETLQVVPKPGAFDLELVKRSTYFFS

SEQ ID NO: 8808 - protein, 316 aa, Homo sapiens
MAEQDVENDLLDYDEEEEPQAPQESTPAPPKKDIKGSYVSIHSSGFRDFLLKPELLRAIVDCGFEHPSEVQHECIPQAILGMDVLCQAKSGMGKTAVFVLATLQQIEPVNGQVTVLVMCHTRELAFQISKEYERFSKYMPSVKVSVFFGGLSIKKDEEVLKKNCPHVVVGTPGRILALVRNRSFSLKNVKHFVLDECDKMLEQLDMRRDVQEIFRLTPHEKQCMMFSATLSKDIRPVCRKFMQDVSRARVAALAFPRGLEPGAPGHPHGPHGTEDAGMLGAGGASFPPLGLVKLGVKLGPHLSRARAYIQLLSDVY

SEQ ID NO: 8809 - protein, 427 aa, Homo sapiens
MAEQDVENDLLDYDEEEEPQAPQESTPAPPKKDIKGSYVSIHSSGFRDFLLKPELLRAIVDCGFEHPSEVQHECIPQAILGMDVLCQAKSGMGKTAVFVLATLQQIEPVNGQVTVLVMCHTRELAFQISKEYERFSKYMPSVKVSVFFGGLSIKKDEEVLKKNCPHVVVGTPGRILALVRNRSFSLKNVKHFVLDECDKMLEQLDMRRDVQEIFRLTPHEKQCMMFSATLSKDIRPVCRKFMQDPMEVFVDDETKLTLHGLQQYYVKLKDSEKNRKLFDLLDVLEFNQVIIFVKSVQRCMALAQLLVEQNFPAIAIHRGMAQEERLSRYQQFKDFQRRILVATNLFGRGMDIERVNIVFNYDMPEDSDTYLHRVARAGRFGTKGLAITFVSDENDAKILNDVQDRFEVNVAELPEEIDISTYIEQSR

SEQ ID NO: 8810 - protein, 222 aa, Homo sapiens
MGLCPGRQLQLSPQRLSLPQAPLPEAWLEAHGHGCSAPACKWIAAPPAPALAGHPPAPQAPGLATPAAHSALVTVPLAPWHRLGGVWVWSGVGVLHGRRSCPPMSCPPHLDMRRDVQEIFRLTPHEKQCMMFSATLSKDIRPVCRKFMQDVSRARVAALAFPRGLEPGAPGHPHGPHGTEDAGMLGAGGASFPPLGLVKLGVKLGPHLSRARAYIQLLSDVY

SEQ ID NO: 8811 - protein, 166 aa, Homo sapiens
MYSLNQEIKAFSRNNLRKQCTRVTTLTGKKIIETWKDARIHVVEEVEPSSGGGCGYVQDLSSDLQVGVIKPWLLLGSQDAAHDLDTLKKNKDGVVLVHCNAGVSRAAAIVIGFLMNSEQTSFTSAFSLVKNARPSICPNSGFMEQLRTYQEGKESNKCDRIQENSS

SEQ ID NO: 8812 - protein, 217 aa, Homo sapiens
MYSLNQEIKAFSRNNLRKQCTRVTTLTGKKIIETWKDARIHVVEEVEPSSGGGCGYVQDLSSDLQVGVIKPWLLLGSQDAAHDLDTLKKNKVTHILNVAYGVENAFLSDFTYKSISILDLPETNILSYFPECFEFIEEAKRKDGVVLVHCNAGVSRAAAIVIGFLMNSEQTSFTSAFSLVKNARPSICPNSGFMEQLRTYQEGKESNKCDRIQENSS

SEQ ID NO: 8813 - protein, 346 aa, Homo sapiens
MTATLAAAADIATMVSGSSGLAAARLLSRSFLLPQNGIRHCSYTASRQHLYVDKNTKIICQGFTGKQGTFHSQQALEYGTKLVGGTTPGKGGQTHLGLPVFNTVKEAKEQTGATASVIYVPPPFAAAAINEAIEAEIPLVVCITEGIPQQDMVRVKHKLLRQEKTRLIGPNCPGVINPGECKIGIMPGHIHKKGRIGIVSRSGTLTYEAVHQTTQVGLGQSLCVGIGGDPFNGTDFIDCLEIFLNDSATEGIILIGEIGGNAEENAAEFLKQHNSGPNSKPVVSFIAGLTAPPGRRMGHAGAIIAGGKGGAKEKISALQSAGVVVSMSPAQLGTTIYKEFEKRKML

SEQ ID NO: 8814 - protein, 530 aa, Homo sapiens [sequence omitted]

SEQ ID NO: 8815 - protein, 532 aa, Homo sapiens [sequence omitted]

SEQ ID NO: 8816 - protein, 215 aa, Homo sapiens
  VARIANT (1)...(215): Xaa = Any Amino Acid
MQGPWVLLLLGLRLQLSLGIIPVEEENPDFWNRQAAEALGAAKKLQPAQTAAKNLIIFLGDGMGVSTVTAARILKGQKKDKLGPETFLAMDRFPYVALSKTYSVDKHVPDSGATATAYLCGVKGNFQTIGLSAAARFNQCNTTRGNEVISVMNRAKKAGELGPAVGSGPGDRPLSHILTSITLRKVSGSGNHHTGAACLASRRLRPHGEPQLVLX

SEQ ID NO: 8817 - protein, 693 aa, Homo sapiens
MESPCLCHRWSPRHTAPGTRPPASGSARAWRCACARWRRRTAPSAGSSAWPRAEPHPIAEATTPRPTPWRRALETARTFGLASWQATAPSVGSSRSWRNARRNPLHFHLIADSIAEQILATLFQTWMVPAVRVDFYNADELKSEVSWIPNKHYSGIYGLMKLVLTKTLPANLERVIVLDTDITFATDIAELWAVFHKFKGQQVLGLVENQSDWYLGNLWKNHRPWPALGRGYNTGVILLLLDKLRKMKWEQMWRLTAERELMGMLSTSLADQDIFNAVIKQNPFLVYQLPCFWNVQLSDHTRSEQCYRDVSDLKVIHWNSPKKLRVKNKHVEFFRNLYLTFLEYDGNLLRRELFGCPSEADVNSENLQKQLSELDEDDLCYEFRRERFTVHRTHLYFLHYEYEPAADSTDVTLVAQLSMDRLQMLEAICKHWEGPISLALYLSDAEAQQFLRYAQGSEVLMSRHNVGYHIVYKEGQFYPVNLLRNVAMKHISTPYMFLSDIDFLPMYGLYEYLRKSVIQLDLANTKKAMIVPAFETLRYRLSFPKSKAELLSMLDMGTLFTFRYHVWTKGHAPTNFAKWRTATTPYRVEWEADFEPYVVVRRDCPEYDRRFVGFGWNKVAHIMELDVQEYEFIVLPNAYMIHMPHAPSFDITKFRSNKQYRICLKTLKEEFQQDMSRRYGFAALKYLTAENNS

SEQ ID NO: 8818 - protein, 756 aa, Homo sapiens
MLGICRGRRKFLAASLSLLCIPAITWIYLFSGSFEDGKPVSLSPLESQAHSPRYTASSQRERESLEVRMREVEEENRALRRQLSLAQGRAPSHRRGNHSKTYSMEEGTGDSENLRAGIVAGNSSECGQQPVVEKCETIHVAIVCAGYNASRDVVTLVKSVLFHRRNPLHFHLIADSIAEQILATLFQTWMVPAVRVDFYNADELKSEVSWIPNKHYSGIYGLMKLVLTKTLPANLERVIVLDTDITFATDIAELWAVFHKFKGQQVLGLVENQSDWYLGNLWKNHRPWPALGRGYNTGVILLLLDKLRKMKWEQMWRLTAERELMGMLSTSLADQDIFNAVIKQNPFLVYQLPCFWNVQLSDHTRSEQCYRDVSDLKVIHWNSPKKLRVKNKHVEFFRNLYLTFLEYDGNLLRRELFGCPSEADVNSENLQKQLSELDEDDLCYEFRRERFTVHRTHLYFLHYEYEPAADSTDVTLVAQLSMDRLQMLEAICKHWEGPISLALYLSDAEAQQFLRYAQGSEVLMSRHNVGYHIVYKEGQFYPVNLLRNVAMKHISTPYMFLSDIDFLPMYGLYEYLRKSVIQLDLANTKKAMIVPAFETLRYRLSFPKSKAELLSMLDMGTLFTFRYHVWTKGHAPTNFAKWRTATTPYRVEWEADFEPYVVVRRDCPEYDRRFVGFGWNKVAHIMELDVQEYEFIVLPNAYMIHMPHAPSFDITKFRSNKQYRICLKTLKEEFQQDMSRRYGFAALKYLTAENNS

SEQ ID NO: 8819 - protein, 617 aa, Homo sapiens
MAEFRVRVSTGEAFGAGTWDKVSVSIVGTRGESPPLPLDNLGKEFTAGAEEDFQVTLPEDVGRVLLLRVHKAPPVLPLLGPLAPDAWFCRWFQLTPPRGGHLLFPCYQWLEGAGTLVLQEGTAKVSWADHHPVLQQQRQEELQARQEMYQWKAYNPGWPHCLDEKTVEDLELNIKYSTAKNANFYLQAGSAFAEMKIKGLLDRKGLWRSLNEMKRIFNFRRTPAAEHAFEHWQEDAFFASQFLNGLNPVLIRRCHYLPKNFPVTDAMVASVLGPGTSLQAELEKGSLFLVDHGILSGIQTNVINGKPQFSAAPMTLLYQSPGCGPLLPLAIQLSQTPGPNSPIFLPTDDKWDWLLAKTWVRNAEFSFHEALTHLLHSHLLPEVFTLATLRQLPHCHPLFKLLIPHTRYTLHINTLARELLIVPGQVVDRSTGIGIEGFSELIQRNMKQLNYSLLCLPEDIRTRGVEDIPGYYYRDDGMQIWGAVERFVSEIIGIYYPSDESVQDDRELQAWVREIFSKGFLNQESSGIPSSLETREALVQYVTMVIFTCSAKHAAVSAGQVRKGQRPRWQAGGDPAPQPHSALSAFSLTPVLGCPTCHPACSCHHPPPKAWQHARAS

SEQ ID NO: 8820 - protein, 602 aa, Homo sapiens [sequence omitted]

SEQ ID NO: 8821 - protein, 676 aa, Homo sapiens [sequence omitted]

SEQ ID NO: 8822 - protein, 647 aa, Homo sapiens [sequence omitted]

SEQ ID NO: 8823 - protein, 676 aa, Homo sapiens [sequence omitted]

SEQ ID NO: 8824 - protein, 227 aa, Homo sapiens
MAPCHIRKYQESDRQWVVGLLSRGMAEHAPATFRQLLKLPRTLILLLGGPLALLLVSGSWLLALVFSISLFPALWFLAKKPWTEYVDMTLCTDMSDITKSYLSERGSCFWVAESEEKVVGMVGALPVDDPTLREKRLQLFHLFVDSEHRRQGIAKALVRTVLQFARDQGYSEVILDTGTIQLSAMALYQSMGFKKTGQSFFCVWARLVALHTVHFIYHLPSSKVGSL

SEQ ID NO: 8825 - protein, 143 aa, Homo sapiens
MAEHAPATFRRLLKLPRTLILLLGGALALLLVSGSWILALVFSLSLLPALWFLAKKPWTRYVDIALRTDMSDITKSYLSECGSCFWVGESEEKVVGTVGALPVDDPTLREKRLQLFHLSVDNEHRGQGIAKALVRTVLQFARD

SEQ ID NO: 8826 - protein, 221 aa, Homo sapiens [sequence omitted]

SEQ ID NO: 8827 - protein, 413 aa, Homo sapiens
MASCAEPSEPSAPLPAGVPPLEDFEVLDGVEDAEGEEEEEEEEEEEDDLSELPPLEDMGQPPAEEAEQPGALAREFLAAMEPEPAPAPAPEEWLDILGNGLLRKKTLVPGPPGSSRPVKGQVVTVHLQTSLENGTRVQEEPELVFTLGDCDVIQALDLSVPLMDVGETAMVTADSKYCYGPQGSRSPYIPPHAALCLEVTLKTAVDGPDLEMLTGQERVALANRKRECGNAHYQRADFVLAANSYDLAIKAITSSAKVDMTFEEEAQLLQLKVKCLNNLAASQLKLDHYRAALRSCSLVLEHQPDNIKALFRKGKVLAQQGEYSEAIPILRAALKLEPSNKTIHAELSKLVKKHAAQRSTETALYRKMLGNPSRLPAKCPGKGAWSIPWKWLFGATAVALGGVALSVVIAARN

SEQ ID NO: 8828 - protein, 413 aa, Homo sapiens; identical to SEQ ID NO: 8827

SEQ ID NO: 8829 - protein, 412 aa, Homo sapiens
MASCAEPSEPSAPLPAGVPPLEDFEVLDGVEDAEGEEEEEEEEEEEDDLSELPPLEDMGQPPAEEAEQPGALAREFLAAMEPEPAPAPAPEEWLDILGNGLLRKKTLVPGPPGSSRPVKGQVVTVHLQTSLENGTRVQEEPELVFTLGDCDVIQALDLSVPLMDVGETAMVTADSKYCYGPQGRSPYIPPHAALCLEVTLKTAVDGPDLEMLTGQERVALANRKRECGNAHYQRADFVLAANSYDLAIKAITSSAKVDMTFEEEAQLLQLKVKCLNNLAASQLKLDHYRAALRSCSLVLEHQPDNIKALFRKGKVLAQQGEYSEAIPILRAALKLEPSNKTIHAELSKLVKKHAAQRSTETALYRKMLGNPSRLPAKCPGKGAWSIPWKWLFGATAVALGGVALSVVIAARN

SEQ ID NO: 8830 - protein, 412 aa, Homo sapiens; identical to SEQ ID NO: 8829

SEQ ID NO: 8831 - protein, 135 aa, Homo sapiens [sequence omitted]

SEQ ID NO: 8832 - protein, 250 aa, Homo sapiens
MTLSPLLLFLPPLLLLLDVPTAAVQASPLQALDFFGNGPPVNYKTGNLYLRGPLKKSNAPLVNVTLYYEALCGGCRAFLIRELFPTWLLVMEILNVTLVPYGNAQEQNVSGRWEFKCQHGEEECKFNKVEACVLDELDMELAFLTIVCMEEFEDMERSLPLCLQLYAPGLSPDTIMECAMGDRGMQLMHANAQRTDALQPPHEYVPWVTVNGKPLEDQTQLLTLVCQLYQGKKPDVCPSSTSSLRSVCFK

SEQ ID NO: 8833 - protein, 250 aa, Homo sapiens; identical to SEQ ID NO: 8832

SEQ ID NO: 8834 - protein, 250 aa, Homo sapiens; identical to SEQ ID NO: 8832

SEQ ID NO: 8835 - protein, 117 aa, Homo sapiens
MTAPSCAFPVQFRQPSVSGLSQITKSLYISNGVAANNKLMLSSNQITMVINVSVERGDEAGPYFAALCCWCEPLSCPVPRLPHEVPRHVPAGRPHVDQVMPAHHPTQQRLLGAAHPL

SEQ ID NO: 8836 - protein, 188 aa, Homo sapiens
MTAPSCAFPVQFRQPSVSGLSQITKSLYISNGVAANNKLMLSSNQITMVINVSVEVVNTLYEDIQYMQVPVADSPNSRLCDFFDPIADHIHSVEMKQGRTLLHCAAGVSRSAALCLAYLMKYHAMSLLDAHTWTKSCRPIIRPNSGFWEQLIHYEFQLFGKNTVHMVSSPVGMIPDIYEKEVRLMIPL

SEQ ID NO: 8837 - protein, 216 aa, Homo sapiens
MPGMPSCTPCRPVMVVCLTLPWCFGAASHPCQVSVPPAPVLPFPLSALAQLASMLLSSVPGAKPGVSERKMTPFWINSPDQVPEQERQRKQQGTKEFTFPMPYTSSMPTAHRGSLAPPRGPWPPYFPSLSSPSGTAWGPPTAFDLLKSIWLVATPPPPRPWGVGLPQPLPQPSSPLLPRTSVLDWSPSPPSPLPSLSWVVAQSSPEAWSFPPMRLY

SEQ ID NO: 8838 - protein, 223 aa, Homo sapiens
MVIVLYLSRKYQIRGHWYPPELQARTCVDEYLAWKHVTIQLPATNVYLCKPADAAQLERLLGRLTPALQHLDGGVLVARPFLAMEQISLEDLVLTEVMQAHMKAALGTELFLEAHKLILQPLNHSEARQDPQLAQKQAQVCGWLAAAVGPGMCLNMALELYMDLLSAPCRAVYIFSKKHDIQFNFQFVDLLKGHHHSKEYIDINPLRKLPSLKDGKFILSESC

SEQ ID NO: 8839 - protein, 210 aa, Homo sapiens
MLSTFARQNDIPFQLQTVELAWGEHLKPEFLKVNPLGKVPALRDGDFLLAERLEKRSLTPPAHSMVIVLYLSRKYQIRGHWYPPELQARTCVDEYLAWKHVTIQLPATNVYLCKPADAAQLERLLGRLTPALQHLDGGVLVARPFLAMEQISLEDLVLTEVMQAHMKAALGTELFLEAHKLILQPLNHSEARQDPQLAQKQVQLLQEWLH

SEQ ID NO: 8840 - protein, 109 aa, Homo sapiens
MEHAVEEVKNSLQLFEEYFLQDKMFITGNQISLADLVAVVEMMQPMAANYNVFLNSSKLAEWRMQVELNIGSGLFREAHDRLMQLADWDFSTLDSMVKENISELLKKSR

SEQ ID NO: 8841 - protein, 282 aa, Homo sapiens
  VARIANT (1)...(282): Xaa = Any Amino Acid
MGKGSIQQEELTILNIYAPKIGAPRFIRQVLSDLQRDLDSHTIIMGDFNTPLSTLDRSTRQKVSKDIQELDSALHQADLIDIYRTLHPISTEYTFFSAPHHTYSKIDHILGSKALLSKCKRTEIITNCLSDHSAIKLELRMKKLTQNRSTTWKLNNLLLNDYWVYNEMKAEIKMFFETNENKDTTYQNLWDAFKAVCRGKFIALNAHKRKQERSKIDTLTSQLKEPEKQEQTHSKASRRQEITKIRAELKEIETQKTLQKINESRSWFFERINKIDRPLARX

SEQ ID NO: 8842 - protein, 104 aa, Homo sapiens [sequence omitted]

SEQ ID NO: 8843 - protein, 89 aa, Homo sapiens
MVNPTVYFHIAIDTEPLGRVSFELFADEVPKTAENFRALSAGKKGFGCEGSCFHRIITGFICQGGDFTCHMALVASPSTGRNLMRRTSS

SEQ ID NO: 8844 - protein, 152 aa, Homo sapiens
MIVLRLMPVGGRRPIVTSFGGCSTAPRANFPLPLPALRQSRSKMAVVGVSSVSRLLGRSRPQLGRPMSSGAHGEEGSARMWKTLTFFVALPGVAVSMLNVYLKSHHGEHERPEFIAYPHLRIRTKPFPWGDGNHTLFHNPHVNPLPTGYEDE

SEQ ID NO: 8845 - protein, 152 aa, Homo sapiens; identical to SEQ ID NO: 8844

SEQ ID NO: 8846 - protein, 235 aa, Homo sapiens [sequence omitted]

SEQ ID NO: 8847 - protein, 372 aa, Homo sapiens
MKYLRHRRPNATLILAIGAFTLLLFSLLVSPPTCKVQEQPPAIPEALAWPTPPTRPAPAPCHANTSMVTHPDFATQPQHVQNFLLYRHCRHFPLLQDVPPSKCAQPVFLLLVIKSSPSNYVRRELLRRTWGRERKVRGLQLRLLFLVGTASNPHEARKVNRLLELEAQTHGDILQWDFHDSFFNLTLKQVLFLQWQETRCANASFVLNGDDDVFAHTDNMVFYLQDHDPGRHLFVGQLIQNVGPIRAFWSKYYVPEVVTQNERYPPYCGGGGFLLSRFTAAALRRAAHVLDIFPIDDVFLGMCLELEGLKPASHSGIRTSGVRAPSQHLSSFDPCFYRDLLLVHRFLPYEMLLMWDALNQPNLTCGNQTQIY

SEQ ID NO: 8848 - protein, 183 aa, Homo sapiens
TPWRIQVVTLLLVTLSLCWLQTHLLSRLPIPESQVITINPELPVEEAAEDYAKKLRQAFQGDSIPVFDLLILGVGPDGHTCSLFPDHPLLQEREKIVAPISDSPKPPPQRVTLTLPVLNAARTVIFVATGEGKAAVLKRILEDQEENPLPAALVQPHTGKLCWFLDEAAARLLTVPFEKHSTL

SEQ ID NO: 8849 - protein, 258 aa, Homo sapiens
MAAPAPGLISVFSSSQELGAALAQLVAQRAACCLAGARARFALGLSGGSLVSMLARELPAAVAPAGPASLARWTLGFCDERLVPFDHAESTYGLYRTHLLSRLPIPESQVITINPELPVEEAAEDYAKKLRQAFQGDSIPVFDLLILGVGPDGHTCSLFPDHPLLQEREKIVAPISDSPKPPPQRVTLTLPVLNAARTVIFVATGEGKAAVLKRILEDQEENPLPAALVQPHTGKLCWFLDEAAARLLTVPFEKHSTL

SEQ ID NO: 8850 - protein, 375 aa, Homo sapiens
MSTAGKVIKCKAAVLWELKKPFSIEEVEVAPPKAHEVRIKMVAVGICGTDDHVVSGTMVTPLPVILGHEAAGIVESVGEGVTTVKPGDKVIPLAIPQCGKCRICKNPESNYCLKNDVSNPQGTLQDGTSRFTCRRKPIHHFLGISTFSQYTVVDENAVAKIDAASPLEKVCLIGCGFSTGYGSAVNVAKVTPGSTCAVFGLGGVGLSAIMGCKAAGAARIIAVDINKDKFAKAKELGATECINPQDYKKPIQEVLKEMTDGGVDFSFEVIGRLDTMMASLLCCHEACGTSVIVGVPPDSQNLSMNPMLLLTGRTWKGAILGGFKSKECVPKLVADFMAKKFSLDALITHVLPFEKINEGFDLLHSGKSIRTILMF

SEQ ID NO: 8851 - protein, 375 aa, Homo sapiens; identical to SEQ ID NO: 8850

SEQ ID NO: 8852 - protein, 385 aa, Homo sapiens
MSTAGKVIKCKAAVLWELKKPFSIEEVEVAPPKAHEVRIKMVAVGICGTDDHVVSGTMVTPLPVILGHEAAGIVESVGEGVTTVKPGDKVIPLAIPQCGKCRICKNPESNYCLKNDVSNPQGTLQDGTSRFTCRRKPIHHFLGISTFSQYTVVDENAVAKIDAASPLEKVCLIGCGFSTGYGSAVNVAKVTPGSTCAVFGLGGVGLSAIMGCKAAGAARIIAVDINKDKFAKAKELGATECINPQDYKKPIQEVLKEMTDGGVDFSFEVIGRLDTMVCTMTCPEISMASLLCCHEACGTSVIVGVPPDSQNLSMNPMLLLTGRTWKGAILGGFKSKECVPKLVADFMAKKFSLDALITHVLPFEKINEGFDLLHSGKSIRTILMF

SEQ ID NO: 8853 - protein, 335 aa, Homo sapiens
MVAAGICRSDEHVVSGNLVTPLPVILGHEAAGIVESVGEGVTTVKPGDKVIPLFTPQCGKCRICKNPESNYCLKNDLGNPRGTLQDGTRRFTCSGKPIHHFVGVSTFSQYTVVDENAVAKIDAASPLEKVCLIGCGFSTGYGSAVKVAKVTPGSTCAVFGLGGVGLSVVMGCKAAGAARIIAVDINKDKFAKAKELGATECINPQDYKKPIQEVLKEMTDGGVDFSFEVIGRLDTMMASLLCCHEACGTSVIVGVPPDSQNLSINPMLLLTGRTWKGAIFGGFKSKESVPKLVADFMAKKFSLDALITNILPFEKINEGFDLLRSGKSIRTVLTF

SEQ ID NO: 8854 - protein, 375 aa, Homo sapiens
MSTAGKVIKCKAAVLWELKKPFSIEEVEVAPPKAHEVRIKMVAAGICRSDEHVVSGNLVTPLPVILGHEAAGIVESVGEGVTTVKPGDKVIPLFTPQCGKCRICKNPESNYCLKNDLGNPRGTLQDGTRRFTCSGKPIHHFVGVSTFSQYTVVDENAVAKIDAASPLEKVCLIGCGFSTGYGSAVKVAKVTPGSTCAVFGLGGVGLSVVMGCKAAGAARIIAVDINKDKFAKAKELGATECINPQDYKKPIQEVLKEMTDGGVDFSFEVIGRLDTMMASLLCCHEACGTSVIVGVPPDSQNLSINPMLLLTGRTWKGAIFGGFKSKESVPKLVADFMAKKFSLDALITNILPFEKINEGFDLLRSGKSIRTVLTF

SEQ ID NO: 8855 - protein, 872 aa, Homo sapiens
MNLIVKLRRSFRTLIVLLATFCLVSIVISAYFLYSGYKQEMTLIETTAEAECTDIKILPYRSMELKTVKPIDTSKTDPTVLLFVESQYSQLGQDIIAILESSRFQYHMVIAPGKGDIPPLTDNGKGKYTLVIYENILKYVSMDSWNRELLEKYCVEYSVSIIGFHKANENSLPSTQLKGFPLNLFNNLALKDCFVNPQSPLLHITKAPKVEKGPLPGEDWTIFQYNHSTYQPVLLTELQTEKSLSSLSSKTLFATVIQDLGLHDGIQRVLFGNNLNFWLHKLIFIDAISFLSGKRLTLSLDRYILVDIDDIFVGKEGTRMNVKDVKALLETQNLLRTQVANFTFNLGFSGKFYHTGTEEEDEGDDLLLRSVDEFWWFPHMWSHMQPHLFHNESSLVEQMILNKEFALEHGIPINMGYAVAPHHSGVYPVHIQLYAAWKKVWGIQVTSTEEYPHLKPARYRKGFIHNSIMVLPRQTCGLFTHTIFYKEYPGGPQELDKSIRGGELFLTILLNPISIFMTHLSNYGNDRLGLYTFVNLVNFVQSWTNLKLQTLPPVQLAHQYFELFPEQKDPLWQNPCDDKRHKDIWSREKTCDHLPKFLVIGPQKTGTTALYLFLLMHPSIISNLPSPKTFEEVQFFNGNNYHKGIDWYMDFFPTPSNTTSDFLFEKSANYFHSEEAPRRAASLVPKAKIITILIDPSDRAYSWYQHQRSHEDPAALRFNFYEVISTGHWAPSDLKTLQRRCLVPGWYAVHIERWLTYFATSQLLIIDGQQLRSDPATVMDEVQKFLGVTPRYNYSEALTFDPQKGFWCQLLEGGKTKCLGKSKGRKYPPMDPESRTFLSNYYRDHNVELSKLLHRLGQPLPSWLRQELQKVR

SEQ ID NO: 8856 - protein, 872 aa, Homo sapiens; identical to SEQ ID NO: 8855

SEQ ID NO: 8857 - protein, 141 aa, Homo sapiens [sequence omitted]

SEQ ID NO: 8858 - protein, 577 aa, Homo sapiens [sequence omitted]

SEQ ID NO: 8859 - protein, 77 aa, Homo sapiens
MRKARGCMVNLSSIAGRVSLFGAGYCISKYSVEAFSDSLWRELSHFGVKVSVIEPGHFRTSMAGSERHLQNLKELSD

SEQ ID NO: 8860 - protein, 169 aa, Homo sapiens
VVRSVRALLCTLHAVPSPAAPCPPRPWQLGVDAVRTLRTGPALLWVRKFTEKHECVTTENGIGTVGISNLAQEALGDVVYYSLPEVGTKLNKQDEFGALESVKAASELCSPLSGEVTEINEALAENPGLVNKSCYEDGWQIKMTLSNPSELDELMSEEAYEKYIKSIEE

SEQ ID NO: 8861 - protein, 45 aa, Homo sapiens
MALEQWESAIWHNGWQIKMTLSNPSELDELMSEEAYEKYIKSIEE

SEQ ID NO: 8862 - protein, 161 aa, Homo sapiens
MVPKLFTSQICLLLLLGLLAVEGSLHVKPPQFTWAQWFETQHINMTSQQCTNAMQVINNYQRRCKNQNTFLLTTFANVVNVCGNPNMTCPSNKTRKNCHHSGSQVPLIHCNLTTPSPQNISNCRYAQTPANMFYIVACDNRDQRRDPPQYPVVPVHLDRII

SEQ ID NO: 8863 - protein, 59 aa, Homo sapiens
MVKAEPDVKKLEDQLQGGQLEEVILQAEHELNLARKMREWKLWEPLVEEPPADQWKWPI

SEQ ID NO: 8864 - protein, 141 aa, Homo sapiens
FRLGGLTPVIPALWEAEVGGSPEVRSLRPSWPTWQNPVSTKNRKNSQRLRILYTKILDVLEEIPKNAAYRKYTEQITNEKLAMVKAEPDVKKLEDQLQGGQLEEVILQAEHELNLARKMREWKLWEPLVEEPPADQWKWPI

SEQ ID NO: 8865 - protein, 59 aa, Homo sapiens; identical to SEQ ID NO: 8863

SEQ ID NO: 8866 - protein, 116 aa, Homo sapiens
MAGVLKKTTGLVGLAVCNTPHERLRILYTKILDVLEEIPKNAAYRKYTEQITNEKLAMVKAEPDVKKLEDQLQGGQLEEVILQAEHELNLARKMREWKLWEPLVEEPPADQWKWPI

SEQ ID NO: 8867 - protein, 116 aa, Homo sapiens; identical to SEQ ID NO: 8866

SEQ ID NO: 8868 - protein, 55 aa, Homo sapiens
MVKAEPDVKKLEDQLQGGQLEEAEHELNLARKMREWKLWEPLVEEPPADQWKWPI

SEQ ID NO: 8869 - protein, 55 aa, Homo sapiens; identical to SEQ ID NO: 8868

SEQ ID NO: 8870 - protein, 380 aa, Homo sapiens [sequence omitted]

SEQ ID NO: 8871 - protein, 380 aa, Homo sapiens [sequence omitted]

SEQ ID NO: 8872 - protein, 222 aa, Homo sapiens
MAEKPKLHYSNIRGRMESIRWLLAAAGVEFEEKFIKSAEDLDKLRNDGYLMFQQVPMVEIDGMKLVQTRAILNYIASKYNLYGKDIKEKALIDMYIEGIADLGEMILLLPFSQPEEQDAKLALIQEKTKNRYFPAFEKVLKSHGQDYLVGNKLSRADIHLVELLYYVEELDSSLISSFPLLKALKTRISNLPTVKKFLQPGSPRKPPMDEKSLEESRKIFRF

SEQ ID NO: 8873 - protein, 222 aa, Homo sapiens
MAEKPKLHYSNARGSMESIRWLLAAAGVELEEKFLESAEDLDKLRNDGSLLFQQIPMVEIDGMKLVQTRAILNYIASKYNLYGKDMKERALIDMYTEGIVDLTEMILLLLICQPEERDAKTALVKEKIKNRYFPAFEKVLKSHRQDYLVGNKLSWADIHLVELFYYVEELDSSLISSFPLLKALKTRISNLPTVKKFLQPGSQRKPPMDEKSLEEARKIFRF

SEQ ID NO: 8874 - protein, 347 aa, Homo sapiens
MAEKPKLHYSNARGSMESIRWLLAAAGVELEEKFLESAEDLDKLRNDGSLLFQQIPMVEIDGMKLVQTRAILNYIASKYNLYGKDMKERALIDMYTEGIVDLTEMILLLLICQPEERDAKTALVKEKIKNRYFPAFEKVLKSHRQDYLVGNKLSWADIHLVELFYYVEELDSSLISSFPLLKALKTRISNLPTVKKFLQPGSQRKPPMDEKSLEEARKIFSACAPGSSSLCSLRLCGGHRHEHSLSSLSATQAWAAKIQMFEEKFLESAKDLEKLRNSKIKSLSASEEDGSLFFQQVPMVEIDGMKLMQTRAILNYIASKYNLCGKDIKERAPYSIFFVLPSTENTE

SEQ ID NO: 8875 - protein, 127 aa, Homo sapiens
MGESDWRDSGRSRGPSLTAHVMENQGSQPYCPCDPDLIPPILDVLKSNGQDYLVGNKLSWADIHLVELLYYMEELDSSLIFSFPLLKALKTRISNLPMVKKFLQPGSPRKSLMDEKSLEEARKIFRF

SEQ ID NO: 8876 - protein, 193 aa, Homo sapiens
MASEKQPGRACWVDKCRGSPEVETRAFLRYIAAKYDLYGRNMKEQAWIHMYVEGLKDLSDMIMFQPLSLPEEKMNLAYILERATTRLFPVCEKALRDHRQDFLVGNRLSWADTQQPEVILMTEECKPSVLLGFPLLQKFKARISHIPTINKFLQPGSQRKPPLDEESIETVKNIFKFEHGLFLKNMSTTVAEY

SEQ ID NO: 8877 - protein, 89 aa, Homo sapiens
RFGLCVHVLESQWALISQSYDVLGLACFYSACLDLLLYGKGLLCRPFSECLRFVQVYEHSRVLTSQSNVMLGVHSSLAMCTVRSSSLNV

SEQ ID NO: 8878 - protein, 100 aa, Homo sapiens [sequence omitted]

SEQ ID NO: 8879 - protein, 194 aa, Homo sapiens
MTQNLGSEMASILRSPQALQLTLALIKPDAVAHPLILEAVHQQILSNKFLIVRMRELLWRKEDCQRFYREHEGRFFYQRLVEFMASGPIRAYILAHKDAIQLWRTLMGPTRVFRARHVAPDSIRGSFGLTDTRNTTHGSDSVVSASREIAAFFPDFSEQRWYEEEEPQLRCGPVCYSPEGGVHYVAGTGGLGPA

SEQ ID NO: 8880 - protein, 324 aa, Homo sapiens [sequence omitted]

SEQ ID NO: 8881 - protein, 159 aa, Homo sapiens
MTAEAVKANWKKTCDFENASKPQSIQKSTGSIIVVLSKIDSEGGVSTNHISHATSTATSGFAGAIGHKLPPFSSAYTELEAIMYALGVGASIKDPKDFKFVHERSSDFFCLPTFGVIISQKSIMGGELAEVPGISRNFAKVLYGEQYLQLYKPLPRAGK

SEQ ID NO: 8882 - protein, 210 aa, Homo sapiens [sequence omitted]

SEQ ID NO: 8883 - protein, 55 aa, Homo sapiens
  VARIANT (1)...(55): Xaa = Any Amino Acid
MICLWDAPWMRLCGWSRPSSTQKSTRKFVPLAGSLALTRLSSTWVTARKIYPNTX

SEQ ID NO: 8884 - protein, 255 aa, Homo sapiens
RVCEWPSHLGPHPGAERTPDRGPAEPHPRVFRATLGRQLQGAREEARAAGQRLATQAVVLCSCQGQLRQAEAENARLQLQLKKLKDEYVLRLQHCAWQAVEHADGAGQAPATTALRTFLEATLEDIRAAHRSREQQLARAARSYHKRLVDLSRRHEELLVAYRGLDAASWAQIHQKLRDFSRSTQAELERERAQLLVRATMAEEQLSELQEYVDQHLGRYKHEILRLRKLAGAGDPWKVGAVPPAKPQHPRTGSH

SEQ ID NO: 8885 - protein, 386 aa, Homo sapiens
MLLPKKMKLLLFLVSQMAILALFFHMYSHNISSLSMKAQPERMHVLVLSSWRSGSSFVGQLFGQHPDVFYLMEPAWHVWMTFKQSTAWMLHMAVRDLIRAVFLCDMSVFDAYMEPGPRRQSSLFQWENSRALCSAPACDIIPQDEIIPRAHCRLLCSQQPFEVVEKACRSYSHVVLKEVRFFNLQSLYPLLKDPSLNLHIVHLVRDPRAVFRSRERTKGDLMIDSRIVMGQHEQKLKKEDQPYYVMQVICQSQLEIYKTIQSLPKALQERYLLVRYEDLARAPVAQTSRMYEFVGLEFLPHLQTWVHNITRGKGMGDHAFHTNARDALNVSQAWRWSLPYEKVSRLQKACGDAMNLLGYRHVRSEQEQRNLLLDLLSTWTVPEQIH

SEQ ID NO: 8886 - protein, 664 aa, Homo sapiens
MAAVGPPQQQVRMAHQQVWAALEVALRVPCLYIIDAIFNSYPDSSQSRFCIVLQIFLRLFGVFASSIVLILSQRSLFKFYTYSSAFLLAATSVLVNYYASLHIDFYGAYNTSAFGIELLPRKGPSLWMALIVLQLTFGIGYVTLLQIHSIYSQLIILDLLVPVIGLITELPLHIRETLLFTSSLILTLNTVFVLAVKLKWFYYSTRYVYLLVRHMYRIYGLQLLMEDTWKRIRFPDILRVFWLTRVTAQATVLMYILRMANETDSFFISWDDFWDLICNLIISGCDSTLTVLGMSAVISSVAHYLGLGILAFIGSTEEDDRRLGFVAPVLFFILALQTGLSGLRPEERLIRLSRNMCLLLTAVLHFIHGMTDPVLMSLSASHVSSFRRHFPVLFVSACLFILPVLLSYVLWHHYALNTWLFAVTAFCVELCLKVIVSLTVYTLFMIDGYYNVLWEKLDDYVYYVRSTGSIIEFIFGVVMFGNGAYTMMFESGSKIRAFMMCLHAYFNIYLQAKNGWKTFMNRRTAVKKINSLPEIKGSRLQEINDVCAICYHEFTTSARITPCNHYFHALCLRKWLYIQDTCPMCHQKVYIEDDIKDNSNVSNNNGFIPPNETPEEAVREAAAESDRELNEDDSTDCDDDVQRERNGVIQHTGAAAEEFNDDTD

SEQ ID NO: 8887 - protein, 207 aa, Homo sapiens
MSRFKFIDIGINLTDPMFRGIYRGVQKHQDDLQDVIGRAVEIGVKKFMITGGNLQDSKDALHLAQTNGMFFSTVGCHPTRCGEFEKNNPDLYLKELLNLAENNKGKVVAIGECGLDFDRLQFCPKDTQLKYFEKQFELSEQTKLPMFLHCRNSHAEFLDIMKRNRDRCVGGVVHSFDGTKEAAAALIDLDLYIGFNGCIMYTYTRHI

SEQ ID NO: 8888 - protein, 297 aa, Homo sapiens
MSRFKFIDIGINLTDPMFRGIYRGVQKHQDDLQDVIGRAVEIGVKKFMITGGNLQDSKDALHLAQTNGMFFSTVGCHPTRCGEFEKNNPDLYLKELLNLAENNKGKVVAIGECGLDFDRLQFCPKDTQLKYFEKQFELSEQTKLPMFLHCRNSHAEFLDIMKRNRDRCVGGVVHSFDGTKEAAAALIDLDLYIGFNGCSLKTEANLEVLKSIPSEKLMIETDAPWCGVKSTHAGSKYIRTAFPTKKKWESGHCLKDRNEPCHIIQILEIMSAVRDEDPLELANTLYNNTIKVFFPGI

SEQ ID NO: 8889 - protein, 546 aa, Homo sapiens
MTPLVSRLSRLWAIMRKPRAAVGSGHRKQAASQEGRQKHAKNNSQAKPSACDGMIAECPGAPAGLARQPEEVVLQASVSSYHLFRDVAEVTAFRGSLLSWYDQEKRDLPWRRRAEDEMDLDRRAYAVWVSEVMLQQTQVATVINYYTGWMQKWPTLQDLASASLEEVNQLWAGLGYYSRGRRLQEGARKVVEELGGHMPRTAETLQQLLPGVGRYTAGAIASIAFGQATGVVDGNVARVLCRVRAIGADPSSTLVSQQLWGLAQQLVDPARPGDFNQAAMELGATVCTPQRPLCSQCPVESLCRARQRVEQEQLLASGSLSGSPDVEECAPNTGQCHLCLPPSEPWDQTLGVVNFPRKASRKPPREESSATCVLEQPGALGAQILLVQRPNSGLLAGLWEFPSVTWEPSEQLQRKALLQELQRWAGPLPATHLRHLGEVVHTFSHIKLTYQVYGLALEGQTPVTTVPPGARWLTQEEFHTAAVSTAMKKVFRVYQGQQPGTCMGSKRSQVSSPCSRKKPRMGQQVLDNFFRSHISTDAHSLNSAAQ

SEQ ID NO: 8890 - protein, 489 aa, Homo sapiens
MRKPRAAVGSGHRKQAASQEGRQKHAKNNSQAKPSACDGMIAECPGAPAGLARQPEEVVLQASVSSYHLFRDVAEVTAFRGSLLSWYDQEKRDLPWRRRAEDEMDLDRRAYAVWVSEVMLQQTQVATVINYYTGWMQKWPTLQDLASASLEEVNQLWAGLGYYSRGRRLQEGARKVVEELGGHMPRTAETLQQLLPGVGRYTAGAIASIAFGQATGVVDGNVARVLCRVRAIGADPSSTLVSQQLWGLAQQLVDPARPGDFNQAAMELGATVCTPQRPLCSQCPVESLCRARQRVEQEQLLASGSLSGSPDVEECAPNTGQCHLCLPPSEPWDQTLGVVNFPRKASRKPPREESSATCVLEQPGALGAQILLVQRPNSGLLAGLWEFPSVTWEPSEQLQRKALLQELQRWAGPLPATHLRHLGEVVHTFSHIKLTYQVYGLALEGQTPVTTVPPGARWLTQEEFHTAAVSTAMKKVFRVYQGQQPGTCM

SEQ ID NO: 8891 - protein, 199 aa, Homo sapiens
MSSGNAKIGHPAPNFKATAVMPDGQFKDISLSDYKGKYVVFFFYPLDFTFVCPTEIIAFSDRAEEFKKLNCQVIGASVDSHFCHLAWVNTPKKQGGLGPMNIPLVSDPKRTIAQDYGVLKADEGISFRGLFIIDDKGILRQITVNDLPVGRSVDETLRLVQAFQFTDKHGEVCPAGWKPGSDTIKPDVQKSKEYFSKQK

SEQ ID NO: 8892 - protein, 199 aa, Homo sapiens; identical to SEQ ID NO: 8891

SEQ ID NO: 8893 - protein, 199 aa, Homo sapiens; identical to SEQ ID NO: 8891

SEQ ID NO: 8894 - protein, 199 aa, Homo sapiens; identical to SEQ ID NO: 8891

SEQ ID NO: 8895 - protein, 199 aa, Homo sapiens; identical to SEQ ID NO: 8891

SEQ ID NO: 8896 - protein, 199 aa, Homo sapiens; identical to SEQ ID NO: 8891

SEQ ID NO: 8897 - protein, 105 aa, Homo sapiens
MDWAVLTVVLGPCVPGLSGSPPWPLPSSHLLEAKLCETWHSFQTSVPPRPCAGKELNARLHSFPRTGTGSGVAVREMSGTLTRRVLCWLLTQQGDMVGGCTSPSG

SEQ ID NO: 8898 - protein, 228 aa, Homo sapiens
MLSRCRSGLLHVLGLSFLLQTRRPILLCSPRLMKPLVVFVLGGPGAGKGTQCARIVEKYGYTHLSAGELLRDERKNPDSQYGELIEKYIKEGKIVPVEITISLLKREMDQTMAANAQKNKFLIDGFPRNQDNLQGWNKTMDGKADVSFVLFFDCNNEICIERCLERGKSSGRSDDNRESLEKRIQTYLQSTKPIIDLYEEMGKVKKIDASKSVDEVFDEVVQIFDKEG

SEQ ID NO: 8899 - protein, 228 aa, Homo sapiens; identical to SEQ ID NO: 8898

SEQ ID NO: 8900 - protein, 212 aa, Homo sapiens
  VARIANT (1)...(212): Xaa = Any Amino Acid
MSVSVLSPSRLLGDVSGILQAASLLILLLLLIKAVQLYLHRQWLLKALQQFPCPPSHWLFGHIQELQQDQELQRIQKWVETFPSACPHWLWGGKVRVQLYDPDYMKVILGRSDPKSHGSYRFLAPWIGYGLLLLNGQTWFQHRRMLTPAFHYDILKPYVGLMADSVRVMLDKWEELLGQDSPLEVFQHVSLMTLDTIMKSAFSHQGSIQVDX

SEQ ID NO: 8901 - protein, 415 aa, Homo sapiens [sequence omitted]

SEQ ID NO: 8902 - protein, 519 aa, Homo sapiens [sequence omitted]

SEQ ID NO: 8903 - protein, 116 aa, Homo sapiens
MHLPAFSSVYSGITVFINIWALHHNPYFWEDPQVFNPLRFSRENSEKIHPYAFIPFSAGLRNCIGQHFAIIECKVAVALTLLRFKLAPDHSRPPQPVRQVVLKSKNGIHVFAKKVC

SEQ ID NO: 8904 - protein, 235 aa, Homo sapiens
MFAGHDTTSSAISWILYCLAKYPEHQQRCRDEIRELLGDGSSITWEHLSQMPYTTMCIKECLRLYAPVVNISRYLSLDSVEPRAILISQRGRKRIELSGLSKQAQDYQGAKLLRVTFWASDNAVEIRMDVGITVFINIWALHHNPYFWEDPQVFNPLRFSRENSEKIHPYAFIPFSAGLRNCIGQHFAIIECKVAVALTLLRFKLAPDHSRPPQPVRQVVLKSKNGIHVFAKKVC

SEQ ID NO: 8905 - protein, 494 aa, Homo sapiens [sequence omitted]

SEQ ID NO: 8906 - protein, 443 aa, Homo sapiens [sequence omitted]

SEQ ID NO: 8907 - protein, 494 aa, Homo sapiens
MLASGMLLVALLVCLTVMVLMSVWQQRKSKGKLPPGPTPLPFIGNYLQLNTEQMYNSLMKISERYGPVFTIHLGPRRVVVLCGHDAVREALVDQAEEFSGRGEQATFDWVFKGYGVVFSNGERAKQLRRFSIATLRDFGVGKRGIEERIQEEAGFLIDALRGTGGANIDPTFFLSRTVSNVISSIVFGDRFDYKDKEFLSLLRMMLGIFQFTSTSTGQLYEMFSSVMKHLPGPQQQAFQLLQGLEDFIAKKVEHNQRTLDPNSPRDFIDSFLIRMQEEEKNPNTEFYLKNLVMTTLNLFIGGTETVSTTLRYGFLLLMKHPEVEAKVHEEIDRVIGKNRQPKFEDRAKMPYMEAVIHEIQRFGDVIPMSLARRVKKDTKFRDFFLPKGTEVYPMLGSVLRDPSFFSNPQDFNPQHFLNEKGQFKKSDAFVPFSIGKRNCFGEGLARMELFLFFTTVMQNFRLKSSQSPKDIDVSPKHVGFATIPRNYTMSFLPR

SEQ ID NO: 8908 - protein, 112 aa, Homo sapiens
MSVMRPEQIMKSIIPVVMAGIIAIYGLVVAVLIANSLNDDISLYKSFLQLGAGLSVGLSGLAAGFAIGIVGDAGVRGTAQQPRLFVGMILILIFAEVLGLYGLIVALILSTK

SEQ ID NO: 8909 - protein, 199 aa, Homo sapiens
MGTSSTDSQQAGHRRCSTSNTSAENLTCLSLPGSPGKTAPLPGPAQAGAGQPLPKGCAAVKAEVGIPAPHTSQEVRIHIRRLLSWAAPGACGLRSTPCALPQALPQARPCPGRWFFPGCSLPTGGAQTILSLWTWRHFLNWALQQREENSGRARRVPPVPRTAPVSKGEGSHPPQNSNGEKVKTITPDVGLHQSLTSDP

SEQ ID NO: 8910 - protein, 480 aa, Homo sapiens
MAVARAALGPLVTGLYDVQAFKFGDFVLKSGLSSPIYIDLRGIVSRPRLLSQVADILFQTAQNAGISFDTVCGVPYTALPLATVICSTNQIPMLIRRKETKDYGTKRLVEGTINPGETCLIIEDVVTSGSSVLETVEVLQKEGLKVTDAIVLLDREQGGKDKLQAHGIRLHSVCTLSKMLEILEQQKKVDAETVGRVKRFIQENVFVAANHNGSPLSIKEAPKELSFGARAELPRIHPVASKLLRLMQKKETNLCLSADVSLARELLQLADALGPSICMLKTHVDILNDFTLDVMKELITLAKCHEFLIFEDRKFADIGNTVKKQYEGGIFKIASWADLVNAHVVPGSGVVKGLQEVGLPLHRGCLLIAEMSSTGSLATGDYTRAAVRMAEEHSEFVVGFISGSRVSMKPEFLHLTPGVQLEAGGDNLGQQYNSPQEVIGKRGSDIIIVGRGIISAADRLEAAEMYRKAAWEAYLSRLGV

SEQ ID NO: 8911 - protein, 165 aa, Homo sapiens
MPPPNSPPQDPGVSSLPPGEWLPRGNLFTSGSGSDFCGCTRNPGFLSLAPPDSGLGTGFTGCAGESRALAGEQPGGGASRASRGAECPQSPQVHPFPEAEVRFGGLSPRQGCLLGSQTGAAPTPCQWWRPTTTSTRCCTARAARALARTSAWPPSTAEPRPPGLS

SEQ ID NO: 8912 - protein, 190 aa, Homo sapiens
MATHHTLWMGLALLGVLGDLQAAPEAQVSVQPNFQQDKFLGRWFSAGLASNSSWLREKKAALSMCKSVVAPATDGGLNLTSTFLRKNQCETRTMLLQPAGSLGSYSYRSPHWGSTYSVSVVETDYDQYALLYSQGSKGPGEDFRMATLYSRTQTPRAELKEKFTAFCKAQGFTEDTIVFLPQTDKCMTEQ

SEQ ID NO: 8913 - protein, 190 aa, Homo sapiens; identical to SEQ ID NO: 8912

SEQ ID NO: 8914 - protein, 498 aa, Homo sapiens
MRPPACWWLLAPPALLALLTCSLAFGLASEDTKKEVKQSQDLEKSGISRKNDIDLKGIVFVIQSQSNSFHAKRAEQLKKSILKQAADLTQELPSVLLLHQLAKQEGAWTILPLLPHFSVTYSRNSSWIFFCEEETRIQIPKLLETLRRYDPSKEWFLGKALHDEEATIIHHYAFSENPTVFKYPDFAAGWALSIPLVNKLTKRLKSESLKSDFTIDLKHEIALYIWDKGGGPPLTPVPEFCTNDVDFYCATTFHSFLPLCRKPVKKKDIFVAVKTCKKFHGDRIPIVKQTWESQASLIEYYSDYTENSIPTVDLGIPNTDRGHCGKTFAILERFLNRSQDKTAWLVIVDDDTLISISRLQHLLSCYDSGKPVFLGERYGYGLGTGGYSYITGGGGMVFSREAVRRLLASKCRCYSNDAPDDMVLGMCFSGLGIPVTHSPLFHQARPVDYPKDYLSHQVPISFHKHWNIDPVKVYFTWLAPSDEDKARQETQKGFREEL

SEQ ID NO: 8915 - protein, 334 aa, Homo sapiens
MFYSIDLSPVKCRSPLQTPSSGQFSSSPIQASAKKYSLGSITSPSPISSPTFSPIEFQIGETPLSEQRKFTVHSPDASSGTNSNGITNPCIRSPYIDGCSPIKNWSPMRLQMYSGGTQYRTSVIQIPFTLETQGEDEEDKENIPSTDVSSPAMDAAGIHLRQFSNEASTHGTHLVVTAMSVTQNQSSASEKELALLQDVEREKDNNTVDMVDPIEIADETTWIKEPVDNGSLPMTDFVSGIAFSIENSHMCMSPLAESSVIPCESSNIQMDSGYNTQNCGSNIMDTVGAESYCKESDAQTCEVESKSQAFNMKQDHTTQRCWMKTASPFQCSSP

SEQ ID NO: 8916 - protein, 619 aa, Homo sapiens
MAGRHDWLVAHKPRALVGPRQRGSGELKSLCLSWKLAWPPELPGVGTGGFVLYAPFSLCAMGDVKESKMQITPETPGRIPVLNPFESPSDYSNLHEQTLASPSVFKSTKLPTPGKFRWSIDQLAVINPVEIDPEDIHRQALYLSHSRIDKDVEDKRQKAIEEFFTKDVIVPSPWTDHEGKQLSQCHSSKCTNINSDSPVGKKLTIHSEKSDAACQTLLSLPVDFNLENILGDYFRADEFADQSPGNLSSSSLRRKLFLDGNGSISDSLPSASPGSPHSGVQTSLEMFYSIDLSPVKCRSPLQTPSSGQFSSSPIQASAKKYSLGSITSPSPISSPTFSPIEFQIGETPLSEQRKFTVHSPDASSGTNSNGITNPCIRSPYIDGCSPIKNWSPMRLQMYSGGTQYRTSVIQIPFTLETQGEDEEDKENIPSTDVSSPAMDAAGIHLRQFSNEASTHGTHLVVTAMSVTQNQSSASEKELALLQDVEREKDNNTVDMVDPIEIADETTWIKEPVDNGSLPMTDFVSGIAFSIENSHMCMSPLAESSVIPCESSNIQMDSGYNTQNCGSNIMDTVGAESYCKESDAQTCEVESKSQAFNMKQDHTTQRCWMKTASPFQCSSP

SEQ ID NO: 8917 - protein, 489 aa, Homo sapiens
MNKLSPVLLFLNQQNYQIDKDVEDKRQKAIEEFFTKDVIVPSPWTDHEGKQLSQCHSSKCTNINSDSPVGKKLTIHSEKSDAACQTLLSLPVDFNLENILGDYFRADEFADQSPGNLSSSSLRRKLFLDGNGSISDSLPSASPGSPHSGVQTSLEMFYSIDLSPVKCRSPLQTPSSGQFSSSPIQASAKKYSLGSITSPSPISSPTFSPIEFQIGETPLSEQRKFTVHSPDASSGTNSNGITNPCIRSPYIDGCSPIKNWSPMRLQMYSGGTQYRTSVIQIPFTLETQGEDEEDKENIPSTDVSSPAMDAAGIHLRQFSNEASTHGTHLVVTAMSVTQNQSSASEKELALLQDVEREKDNNTVDMVDPIEIADETTWIKEPVDNGSLPMTDFVSGIAFSIENSHMCMSPLAESSVIPCESSNIQMDSGYNTQNCGSNIMDTVGAESYCKESDAQTCEVESKSQAFNMKQDHTTQRCWMKTASPFQCSSP

SEQ ID NO: 8918 - protein, 169 aa, Homo sapiens
MGHGSDYSLSEVLWVCASLFSDVWLKMSHTRIMLLTSEENPHGNDSAKASQARTEAGDLQDTGIFLDLMHLKKPGGFDLSLFYRDTINIAEDEDLRVHFEESSKLEDLLPKVHAKDTRKQALSRLKLKLNKDIVISVGICNLVQKALKPPPVKLYQETNEPVKTKTPDI

SEQ ID NO: 8919 - protein, 1065 aa, Homo sapiens
MKILILGIFLFLCSTPAWAKEKHYYIGIIETTWDYASDHGEKKLISVDTEHSNIYLQNGPDRIGRLYKKALYLQYTDETFRTTIEKPVWLGFLGPIIKAETGDKVYVHLKNLASRPYTFHSHGITYYKEHEGAIYPDNTTDFQRADDKVYPGEQYTYMLLATEEQSPGEGDGNCVTRIYHSHIDAPKDIASGLIGPLIICKKDSLDKEKEKHIDREFVVMFSVVDENFSWYLEDNIKTYCSEPEKVDKDNEDFQESNRMYSVNGYTFGSLPGLSMCAEDRVKWYLFGMGNEVDVHAAFFHGQALTNKNYRIDTINLFPATLFDAYMVAQNPGEWMLSCQNLNHLKAGLQAFFQVQECNKSSSKDNIRGKHVRHYYIAAEEIIWNYAPSGIDIFTKENLTAPGSDSAVFFEQGTTRIGGSYKKLVYREYTDASFTNRKERGPEEEHLGILGPVIWAEVGDTIRVTFHNKGAYPLSIEPIGVRFNKNNEGTYYSPNYNPQSRSVPPSASHVAPTETFTYEWTVPKEVGPTNADPVCLAKMYYSAVDPTKDIFTGLIGPMKICKKGSLHANGRQKDVDKEFYLFPTVFDENESLLLEDNIRMFTTAPDQVDKEDEDFQESNKMHSMNGFMYGNQPGLTMCKGDSVVWYLFSAGNEADVHGIYFSGNTYLWRGERRDTANLFPQTSLTLHMWPDTEGTFNVECLTTDHYTGGMKQKYTVNQCRRQSEDSTFYLGERTYYIAAVEVEWDYSPQREWEKELHHLQEQNVSNAFLDKGEFYIGSKYKKVVYRQYTDSTFRVPVERKAEEEHLGILGPQLHADVGDKVKIIFKNMATRPYSIHAHGVQTESSTVTPTLPGETLTYVWKIPERSGAGTEDSACIPWAYYSTVDQVKDLYSGLIGPLIVCRRPYLKVFNPRRKLEFALLFLVFDENESWYLDDNIKTYSDHPEKVNKDDEEFIESNKMHAINGRMFGNLQGLTMHVGDEVNWYLMGMGNEIDLHTVHFHGHSFQYKHRGVYSSDVFDIFPGTYQTLEMFPRTPGIWLLHCHVTDHIHAGMETTYTVLQNEDTKSG

SEQ ID NO: 8920 - protein, 1072 aa, Homo sapiens
MKILILGIFLFLCSTPAWAKEKHYYIGIIETTWDYASDHGEKKLISVDTEHSNIYLQNGPDRIGRLYKKALYLQYTDETFRTTIEKPVWLGFLGPIIKAETGDKVYVHLKNLASRPYTFHSHGITYYKEHEGAIYPDNTTDFQRADDKVYPGEQYTYMLLATEEQSPGEGDGNCVTRIYHSHIDAPKDIASGLIGPLIICKKDSLDKEKEKHIDREFVVMFSVVDENFSWYLEDNIKTYCSEPEKVDKDNEDFQESNRMYSVNGYTFGSLPGLSMCAEDRVKWYLFGMGNEVDVHAAFFHGQALTNKNYRIDTINLFPATLFDAYMVAQNPGEWMLSCQNLNHLKAGLQAFFQVQECNKSSSKDNIRGKHVRHYYIAAEEIIWNYAPSGIDIFTKENLTAPGSDSAVFFEQGTTRIGGSYKKLVYREYTDASFTNRKERGPEEEHLGILGPVIWAEVGDTIRVTFHNKGAYPLSIEPIGVRFNKNNEGTYYSPNYNPQSRSVPPSASHVAPTETFTYEWTVPKEVGPTNADPVCLAKMYYSAVDPTKDIFTGLIGPMKICKKGSLHANGRQKDVDKEFYLFPTVFDENESLLLEDNIRMFTTAPDQVDKEDEDFQESNKMHSMNGFMYGNQPGLTMCKGDSVVWYLFSAGNEADVHGIYFSGNTYLWRGERRDTANLFPQTSLTLHMWPDTEGTFNVECLTTDHYTGGMKQKYTVNQCRRQSEDSTFYLGERTYYIAAVEVEWDYSPQREWEKELHHLQEQNVSNAFLDKGEFYIGSKYKKVVYRQYTDSTFRVPVERKAEEEHLGILGPQLHADVGDKVKIIFKNMATRPYSIHAHGVQTESSTVTPTLPGETLTYVWKIPERSGAGTEDSACIPWAYYSTVDQVKDLYSGLIGPLIVCRRPYLKVFNPRRKLEFALLFLVFDENESWYLDDNIKTYSDHPEKVNKDDEEFIESNKMHAINGRMFGNLQGLTMHVGDEVNWYLMGMGNEIDLHTVHFHGHSFQYKHRGVYSSDVFDIFPGTYQTLEMFPRTPGIWLLHCHVTDHIHAGMETTYTVLQNEGEYPGSNSRSHI

SEQ ID NO: 8921 - protein, 341 aa, Homo sapiens
MNISQIISYWGYPDEEYDIVTEDGYILGLYRIPYWRTDNNKNLAQRVVVYLQHGLLTSASSWISNLPNNSLGFILADAGYDVWMGNSRGNTWSRKHLYLETSSKEFWAFSFDEMAKYDLPASIDFTVKQTRQEEIFYVGHSQGTTIGFITFSTISKIAERIKIFFALAPVFSTKYLKSPLIKKFVGSKLCPLQIFDKICLNILFMMFGYDPKNLNMSRLDVYFSHNPAGTSVQNMLHWSQLLNSTHLKAYDWGSPDLNLVHYNQTTSPLYNMTNMNVATAIWNGKSDLLADPEDVNILHSEITNHIYYKTISYYNHIDSLFGLDVYDQVYHEIIDIIQDNL

SEQ ID NO: 8922 - protein, 112 aa, Homo sapiens
MDLAGLLKSQFLCHLVFCYVFIASGLIINTIQLFTLLLWPINKQLFRKINCRLSYCISSRGSHWKTSLKTMTSARPGCTSSTRRRMPFRRSTTGRAPSQRRPWCPPGGPGPS

SEQ ID NO: 8923 - protein, 186 aa, Homo sapiens
MDLAGLLKSQFLCHLVFCYVFIASGLIINTIQLFTLLLWPINKQLFRKINCRLSYCISSQLVMLLEWWSGTECTIFTDPRAYLKYGKENAIVVLNHKFEIDFLCGWSLSERFGLLGGSKVLAKKELAYVPIIGWMWYFTEMVFCSRKWEQDRKTVATSLQHLRDYPEKYFVCRHQSSCVPRAPAGL

SEQ ID NO: 8924 - protein, 378 aa, Homo sapiens
MDLAGLLKSQFLCHLVFCYVFIASGLIINTIQLFTLLLWPINKQLFRKINCRLSYCISSQLVMLLEWWSGTECTIFTDPRAYLKYGKENAIVVLNHKFEIDFLCGWSLSERFGLLGGSKVLAKKELAYVPIIGWMWYFTEMVFCSRKWEQDRKTVATSLQHLRDYPEKYFFLIHCEGTRFTEKKHEISMQVARAKGLPRLKHHLLPRTKGFAITVRSLRNVVSAVYDCTLNFRNNENPTLLGVLNGKKYHADLYVRRIPLEDIPEDDDECSAWLHKLYQEKDAFQEEYYRTGTFPETPMVPPRRPWTLVNWLFWASLVLYPFFQFLVSMIRSGSSLTLASFILVFFVASVGVRWMIGVTEIDKGSAYGNSDSKQKLND

SEQ ID NO: 8925 - protein, 378 aa, Homo sapiens; identical to SEQ ID NO: 8924

SEQ ID NO: 8926 - protein, 324 aa, Homo sapiens
MDLAGLLKSQFLCHLVFCYVFIASGLIINTIQLFTLLLWPINKQLFRKINCRLSYCISSQLVMLLEWWSGTECTIFTDPRAYLKYGKENAIVVLNHKFEIDFLCGWSLSERFGLLGFLIHCEGTRFTEKKHEISMQVARAKGLPRLKHHLLPRTKGFAITVRSLRNVVSAVYDCTLNFRNNENPTLLGVLNGKKYHADLYVRRIPLEDIPEDDDECSAWLHKLYQEKDAFQEEYYRTGTFPETPMVPPRRPWTLVNWLFWASLVLYPFFQFLVSMIRSGSSLTLASFILVFFVASVGVRWMIGVTEIDKGSAYGNSDSKQKLND

SEQ ID NO: 8927 - protein, 528 aa, Homo sapiens [sequence omitted]

SEQ ID NO: 8928 - protein, 369 aa, Homo sapiens
MSMKWTSALLLIQLSCYFSSGSCGKVLVWPTEFSHWMNIKTILDELVQRGHEVTVLASSASISFDPNSPSTLKFEVYPVSLTKTEFEDIIKQLVKRWAELPKDTFWSYFSQVQEIMWTFNDILRKFCKDIVSNKKLMKKLQESRFDVVLADAVFPFGELLAELLKIPFVYSLRFSPGYAIEKHSGGLLFPPSYVPVVMSELSDQMTFIERVKNMIYVLYFEFWFQIFDMKKWDQFYSEVLGRPTTLSETMAKADIWLIRNYWDFQFPHPLLPNVEFVGGLHCKPAKPLPKEMEEFVQSSGENGVVVFSLGSMVSNTSEERANVIASALAKIPQKVLWRFDGNKPDTLGLNTRLYKWIPQNDLLDIKRML

SEQ ID NO: 8929 - protein, 527 aa, Homo sapiens
MLNNLLLFSLQISLIGTTLGGNVLIWPMEGSHWLNVKIIIDELIKKEHNVTVLVASGALFITPTSNPSLTFEIYKVPFGKERIEGVIKDFVLTWLENRPSPSTIWRFYQEMAKVIKDFHMVSQEICDGVLKNQQLMAKLKKSKFEVLVSDPVFPCGDIVALKLGIPFMYSLRFSPASTVEKHCGKVPYPPSYVPAVLSELTDQMSFTDRIRNFISYHLQDYMFETLWKSWDSYYSKALGRPTTLCETMGKAEIWLIRTYWDFEFPRPYLPNFEFVGGLHCKPAKPLPKEMEEFIQSSGKNGVVVFSLGSMVKNLTEEKANLIASALAQIPQKVLWRYKGKKPATLGNNTQLFDWIPQNDLLGHPKTKAFITHGGTNGIYEAIYHGVPMVGVPMFADQPDNIAHMKAKGAAVEVNLNTMTSVDLLSALRTVINEPSYKENAMRLSRIHHDQPVKPLDRAVFWIEFVMRHKGAKHLRVAAHDLTWFQYHSLDVIGFLLVCVTTAIFLVIQCCLFSCQKFGKIGKKKKRE

SEQ ID NO: 8930 - protein, 75 aa, Homo sapiens
MAPEVLPKPRMRGLLARRLRNHMAVAFVLSLGVAALYKFRVADQRKKAYADFYRNYDVMKDFEEMRKAGIFQSVK

SEQ ID NO: 8931 - protein, 75 aa, Homo sapiens; identical to SEQ ID NO: 8930

SEQ ID NO: 8932 - protein, 75 aa, Homo sapiens; identical to SEQ ID NO: 8930

SEQ ID NO: 8933 - protein, 432 aa, Homo sapiens
MEGLAVRLLRGSRLLRRNFLTCLSSWKIPPHVSKSSQSEALLNITNNGIHFAPLQTFTDEEMMIKSSVKKFAQEQIAPLVSTMDENSKMEKSVIQGLFQQGLMGIEVDPEYGGTGASFLSTVLVIEELAKVDASVAVFCEIQNTLINTLIRKHGTEEQKATYLPQLTTEKVGSFCLSEAGAGSDSFALKTRADKEGDYYVLNGSKMWISSAEHAGLFLVMANVDPTIGYKGITSFLVDRDTPGLHIGKPENKLGLRASSTCPLTFENVKVPEANILGQIGHGYKYAIGSLNEGRIGIAAQMLGLAQGCFDYTIPYIKERIQFGKRLFDFQGLQHQVAHVATQLEAARLLTYNAARLLEAGKPFIKEASMAKYYASEIAGQTTSKCIEWMGGVGYTKDYPVEKYFRDAKIGTIYEGASNIQLNTIAKHIDAEY

SEQ ID NO: 8934 - protein, 132 aa, Homo sapiens
MPGPATDAGKIPFCDAKEEIRAGLESSEGGGGPERPGARGQRQNIVWRNVVLMSLLHLGAVYSLVLIPKAKPLTLLWAYFCFLLAALGVTAGAHRLWSHRSYRAKLPLRIFLAVANSMAFQAAAEVVLTQMP

SEQ ID NO: 8935 - protein, 330 aa, Homo sapiens
MPGPATDAGKIPFCDAKEEIRAGLESSEGGGGPERPGARGQRQNIVWRNVVLMSLLHLGAVYSLVLIPKAKPLTLLWAYFCFLLAALGVTAGAHRLWSHRSYRAKLPLRIFLAVANSMAFQNDIFEWSRDHRAHHKYSETDADPHNARRGFFFSHIGWLFVRKHRDVIEKGRKLDVTDLLADPVVRIQRKYYKISVVLMCFVVPTLVPWYIWGESLWNSYFLASILRYTISLNISWLVNSAAHMYGNRPYDKHISPRQNPLVALGAIGEGFHNYHHTFPFDYSASEFGLNFNPTTWFIDFMCWLGLATDRKRATKPMIEARKARTGDSSA

SEQ ID NO: 8936 - protein, 146 aa, Homo sapiens [sequence omitted]

SEQ ID NO: 8937 - protein, 256 aa, Homo sapiens
MPGPATDAGKIPFCDAKEEIRAGLESSEGGGGPERPGARGQRQNIVWRNVVLMSLLHLGAVYSLVLIPKAKPLTLLWAYFCFLLAALGVTAGAHRLWSHRSYRAKLPLRIFLAVANSMAFQNDIFEWSRDHRAHHKYSETDADPHNARRGFFFSHIGWLFVRKHRDVIEKGRKLDVTDLLADPVVRIQRNTQHIQKEGRALNQEAACEMLREWHQGHILKVTLPGLHILALLHTHCNHSEKCCLMLRALSVSLEVF

SEQ ID NO: 8938 - protein, 593 aa, Homo sapiens [sequence omitted]

SEQ ID NO: 8939 - protein, 1176 aa, Homo sapiens
MAERKGTAKVDFLKKIEKEIQQKWDTERVFEVNASNLEKQTSKGKYFVTFPYPYMNGRLHLGHTFSLSKCEFAVGYQRLKGKCCLFPFGLHCTGMPIKACADKLKREIELYGCPPDFPDEEEEEEETSVKTEDIIIKDKAKGKKSKAAAKAGSSKYQWGIMKSLGLSDEEIVKFSEAEHWLDYFPPLAIQDLKRMGLKVDWRRSFITTDVNPYYDSFVRWQFLTLRERNKIKFGKRYTIYSPKDGQPCMDHDRQTGEGVGPQEYTLLKLKVLEPYPSKLSGLKGKNIFLVAATLRPETMFGQTNCWVRPDMKYIGFETVNGDIFICTQKAARNMSYQGFTKDNGVVPVVKELMGEEILGASLSAPLTSYKVIYVLPMLTIKEDKGTGVVTSVPSDSPDDIAALRDLKKKQALRAKYGIRDDMVLPFEPVPVIEIPGFGNLSAVTICDELKIQSQNDREKLAEAKEKIYLKGFYEGIMLVDGFKGQKVQDVKKTIQKKMIDAGDALIYMEPEKQVMSRSSDECVVALCDQWYLDYGEENWKKQTSQCLKNLETFCEETRRNFEATLGWLQEHACSRTYGLGTHLPWDEQWLIESLSDSTIYMAFYTVAHLLQGGNLHGQAESPLGIRPQQMTKEVWDYVFFKEAPFPKTQIAKEKLDQLKQEFEFWYPVDLRVSGKDLVPNHLSYYLYNHVAMWPEQSDKWPTAVRANGHLLLNSEKMSKSTGNFLTLTQAIDKFSADGMRLALADAGDTVEDANFVEAMADAGILRLYTWVEWVKEMVANWDSLRSGPASTFNDRVFASELNAGIIKTDQNYEKMMFKEALKTGFFEFQAAKDKYRELAVEGMHRELVFRFIEVQTLLLAPFCPHLCEHIWTLLGKPDSIMNASWPVAGPVNEVLIHSSQYLMEVTHDLRLRLKNYMMPAKGKKTDKQPLQKPSHCTIYVAKNYPPWQHTTLSVLRKHFEANNGKLPDNKVIASELGSMPELKKYMKKVMPFVAMIKENLEKMGPRILDLQLEFDEKAVLMENIVYLTNSLELEHIEVKFASEAEDKIREDCCPGKPLNVFRIEPGVSVSLVNPQPSNGHFSTKIEIRQGDNCDSIIRRLMKMNRGIKDLSKVKLMRFDDPLLGPRRVPVLGKEYTEKTPISEHAVFNVDLMSKKIHLTENGIRVDIGDTIIYLVH

SEQ ID NO: 8940 - protein, 144 aa, Homo sapiens
MNGRLHLGHTFSLSKCEFAVGYQRLKGKCCLFPFGLHCTGMPIKACADKLKREIELYGCPPDFPDEEEEEEETSVKTEDIIIKDKAKGKKSKAAAKAGSSKYQWGIMKSLGLSDEEIVKFSEAEHWLDYFPPLAIQDLKRMGLK

SEQ ID NO: 8941 - protein, 144 aa, Homo sapiens; identical to SEQ ID NO: 8940

SEQ ID NO: 8942 - protein, 1093 aa, Homo sapiens [sequence omitted]

SEQ ID NO: 8943 - protein, 547 aa, Homo sapiens [sequence omitted]

SEQ ID NO: 8944 - protein, 710 aa, Homo sapiens [sequence omitted]

SEQ ID NO: 8945 - protein, 207 aa, Homo sapiens
MSSDRQRSDDESPSTSSGSSDADQRDPAAPEPEEQEERKPSATQQKKNTKLSSKTTAKLSTSAKKIQKELAEITLDPPPNCSAGPKGDNICEWRSTILGPLGSVYEGGVFFLDITFSSDYPFKPPKVTFRTRIDHCNINSQGVICLDILKDNWSPALTVSKVLLSICSLLMDCNPVDPLVGSIATQYLTNRAEHDRIARQRTKRYAT

SEQ ID NO: 8946 - protein, 66 aa, Homo sapiens
LATFWYYAKFELVPPTPAEIPRAIQSLKKIVNSAQTGSFKQLTVKEAVLNGLVATEVLCGFMSERS

SEQ ID NO: 8947 - protein, 490 aa, Homo sapiens
MSEEARFCFSPGENSKTMSTELFSSTREEGSSGSGPSFRSNQRKMLNLLLERDTSFTVCPDVPRTPVGKFLGDSANLSILSGGTPKRCLDLSNLSSGEITATQLTTSADLDETGHLDSSGLQEVHLAGMNHDQHLMKCSPAQLLCSTPNGLDRGHRKRDAMCSSSANKENDNGNLVDSEMKYLGSPITTVPKLDKNPNLGEDQAEEISDELMEFSLKDQEAKVSRSGLYRSPSMPENLNRPRLKQVEKFKDNTIPDKVKKKYFSGQGKLRKGLCLKKTVSLCDITITQMLEEDSNQGHLIGDFSKVCALPTVSGKHQDLKYVNPETVAALLSGKFQGLIEKFYVIDCRYPYEYLGGHIQGALNLYSQEELFNFFLKKPIVPLDTQKRIIIVFHCEFSSERGPRMCRCLREEDRSLNQYPALYYPELYILKGGYRDFFPEYMELCEPQSYCPMHHQDHKTELLRCRSQSKVQEGERQLREQIALLVKDMSP

SEQ ID NO: 8948 - protein, 473 aa, Homo sapiens
MSTELFSSTREEGSSGSGPSFRSNQRKMLNLLLERDTSFTVCPDVPRTPVGKFLGDSANLSILSGGTPKRCLDLSNLSSGEITATQLTTSADLDETGHLDSSGLQEVHLAGMNHDQHLMKCSPAQLLCSTPNGLDRGHRKRDAMCSSSANKENDNGNLVDSEMKYLGSPITTVPKLDKNPNLGEDQAEEISDELMEFSLKDQEAKVSRSGLYRSPSMPENLNRPRLKQVEKFKDNTIPDKVKKKYFSGQGKLRKGLCLKKTVSLCDITITQMLEEDSNQGHLIGDFSKVCALPTVSGKHQDLKYVNPETVAALLSGKFQGLIEKFYVIDCRYPYEYLGGHIQGALNLYSQEELFNFFLKKPIVPLDTQKRIIIVFHCEFSSERGPRMCRCLREEDRSLNQYPALYYPELYILKGGYRDFFPEYMELCEPQSYCPMHHQDHKTELLRCRSQSKVQEGERQLREQIALLVKDMSP

SEQ ID NO: 8949 - protein, 400 aa, Homo sapiens
MSTELFSSTREEGSSGSGPSFRSNQRKMLNLLLERDTSFTVCPDVPRTPVGKFLGDSANLSILSGSPGFFRTSGSAFSWDDNGNLVDSEMKYLGSPITTVPKLDKNPNLGEDQAEEISDELMEFSLKDQEAKVSRSGLYRSPSMPENLNRPRLKQVEKFKDNTIPDKVKKKYFSGQGKLRKGLCLKKTVSLCDITITQMLEEDSNQGHLIGDFSKVCALPTVSGKHQDLKYVNPETVAALLSGKFQGLIEKFYVIDCRYPYEYLGGHIQGALNLYSQEELFNFFLKKPIVPLDTQKRIIIVFHCEFSSERGPRMCRCLREEDRSLNQYPALYYPELYILKGGYRDFFPEYMELCEPQSYCPMHHQDHKTELLRCRSQSKVQEGERQLREQIALLVKDMSP

SEQ ID NO: 8950 - protein, 166 aa, Homo sapiens [sequence omitted]

SEQ ID NO: 8951 - protein, 402 aa, Homo sapiens
MTALPGPLWLLGLALCALGGGGPGLRPPPGCPQRRLGARERRDVQREILAVLGLPGRPRPRAPPAASRLPASAPLFMLDLYHAMAGDDDEDGAPAERRLGRADLVMSFVNMVERDRALGHQEPHWKEFRFDLTQIPAGEAVTAAEFRIYKVPSIHLLNRTLHVSMFQVVQEQSNRESDLFFLDLQTLRAGDEGWLVLDVTAASDCWLLKRHKDLGLRLYVETEDGHSVDPGLAGLLGQRAPRSQQPFVVTFFRASPSPIRTPRAVRPLRRRQPKKSNELPQANRLPGIFDDVHGSHGRQVCRRHELYVSFQDLGWLDWVIAPQGYSAYYCEGECSFPLDSCMNATNHAILQSLVHLMMPDAVPKACCAPTKLSATSVLYYDSSNNVILRKHRNMVVKACGCH

SEQ ID NO: 8952 - protein, 204 aa, Homo sapiens [sequence omitted]

SEQ ID NO: 8953 - protein, 402 aa, Homo sapiens
MAARPGPLWLLGLTLCALGGGGPGLRPPPGCPQRRLGARERRDVQREILAVLGLPGRPRPRAPPAASRLPASAPLFMLDLYHAMAGDDDEDGAPAEQRLGRADLVMSFVNMVERDRALGHQEPHWKEFRFDLTQIPAGEAVTAAEFRIYKVPSIHLLNRTLHVSMFQVVQEQSNRESDLFFLDLQTLRAGDEGWLVLDVTAASDCWLLKRHKDLGLRLYVETEDGHSVDPGLAGLLGQRAPRSQQPFVVTFFRASPSPIRTPRAVRPLRRRQPKKSNELPQANRLPGIFDDVHGSHGRQVCRRHELYVSFQDLGWLDWVIAPQGYSAYYCEGECSFPLDSCMNATNHAILQSLVHLMKPNAVPKACCAPTKLSATSVLYYDSSNNVILRKHRNMVVKACGCH

SEQ ID NO: 8954 - protein, 252 aa, Homo sapiens
  VARIANT (1)...(252): Xaa = Any Amino Acid
MAALRLLASVLGRGVPAGGSGLALSQGCARCFATSPRPRAKFYADPVEMVKDISDGATVMIGGFGLCGIPENLIAALLRTRVKDLQVVSSNVGVEDFGLGLLLAARQVRRIVCSYVGENTLCESQYLAGELELELTPQGTLAERIRAGGAGVPAFYTPTGYGTLVQEGGAPIRYTPDGHLALMSQPREVREFNGDHFLLERAIRADFALVKGWKADRAGNVVFRRSARNFNVPMCKAADXXXXXXXTFLTFM

SEQ ID NO: 8955 - protein, 106 aa, Homo sapiens
MPFLDIQKRFGLNIDRWLTIQSGEQPYKMAGRCHAFEKEWIECAHGIGYTRAEKECKIEYDDFVECLLRQKTMRRAGTIRKQRDKLIKEGKYTPPPHHIGKGEPRP

SEQ ID NO: 8956 - protein, 106 aa, Homo sapiens; identical to SEQ ID NO: 8955

SEQ ID NO: 8957 - protein, 131 aa, Homo sapiens
MDIKIGNKPAGCIQTLLRSDVVPMTTENFLYMCTHLKDSASREAASTALSPSSFARAVISQTTVAPGVCAGMALSVPWHIWPSWRPQKGRTSTLFYGGRNGHSRLADPAPLPTSALGGLMRPQWNIEFLPP

SEQ ID NO: 8958 - protein, 119 aa, Homo sapiens
MDIKIGNKPAGCIQTLLRSDVVPMTTENFLYMCTHLKDSASREAASTALSPSSFARAVISQTTVAPGVCAGMALSVPWHIWPSWRPQKGRTSTLFYGGRNGHSRNKESQQLPASQGPGS

SEQ ID NO: 8959 - protein, 509 aa, Homo sapiens
MAERAALEELVKLQGERVRGLKQQKASAELIEEEVAKLLKLKAQLGPDESKQKFVLKTPKGTRDYSPRQMAVREKVFDVIIRCFKRHGAEVIDTPVFELKETLMGKYGEDSKLIYDLKDQGGELLSLRYDLTVPFARYLAMNKLTNIKRYHIAKVYRRDNPAMTRGRYREFYQCDFDIAGNFDPMIPDAECLKIMCEILSSLQIGDFLVKVNDRRILDGMFAICGVSDSKFRTICSSVDKLDKVSWEEVKNEMVGEKGLAPEVADRIGDYVQQHGGVSLVEQLLQDPKLSQNKQALEGLGDLKLLFEYLTLFGIDDKISFDLSLARGLDYYTGVIYEAVLLQTPAQAGEEPLGVGSVAAGGRYDGLVGMFDPKGRKVPCVGLSIGVERIFSIVEQRLEALEEKIRTTETQVLVASAQKKLLEERLKLVSELWDAGIKAELLYKKNPKLLNQLQYCEEAGIPLVAIIGEQELKDGVIKLRSVTSREEVDVRREDLVEEIKRRTGQPLCIC

SEQ ID NO: 8960 - protein, 509 aa, Homo sapiens; identical to SEQ ID NO: 8959

SEQ ID NO: 8961 - protein, 383 aa, Homo sapiens
MDRTCEERPAEDGSDEEDPDSMEAPTRIRDTPEDIVLEAPASGLAFHPARDLLAAGDVDGDVFVFSYSCQEGETKELWSSGHHLKACRAVAFSEDGQKLITVSKDKAIHVLDVEQGQLERRVSKAHGAPINSLLLVDENVLATGDDTGGIRLWDQRKEGPLMDMRQHEEYIADMALDPAKKLLLTASGDGCLGIFNIKRRRFELLSEPQSGDLTSVTLMKWGKKVACGSSEGTIYLFNWNGFGATSDRFALRAESIDCMVPVTESLLCTGSTDGVIRAVNILPNRVVGSVGQHTGEPVEELALSHCGRFLASSGHDQRLKFWDMAQLRAVVVDDYRRRKKKGGPLRALSSKTWSTDDFFAGLREEGEDSMAQEEKEETGDDSD

SEQ ID NO: 8962 - protein, 222 aa, Homo sapiens
MDMRQHEEYIADMALDPAKKLLLTASGDGCLGIFNIKRRRFELLSEPQSGDLTSVTLMKWGKKVACGSSEGTIYLFNWNGFGATSDRFALRAESIDCMVPVTESLLCTGSTDGVIRAVNILPNRVVGSVGQHTGEPVEELALSHCGRFLASSGHDQRLKFWDMAQLRAVVVDDYRRRKKKGGPLRALSSKTWSTDDFFAGLREEGEDSMAQEEKEETGDDSD

SEQ ID NO: 8963 - protein, 360 aa, Homo sapiens
MEAPTRIRDTPEDIVLEAPASGLAFHPARDLLAAGDVDGDVFSYSCQEGETKELWSSGHHLKACRAVAFSEDGQKLITVSKDKAIHVLDVEQGQLERRVSKAHGAPINSLLLVDENVLATGDDTGGIRLWDQRKEGPLMDMRQHEEYIADMALDPAKKLLLTASGDGCLGIFNIKRRRFELLSEPQSGDLTSVTLMKWGKKVACGSSEGTIYLFNWNGFGATSDRFALRAESIDCMVPVTESLLCTGSTDGVIRAVNILPNRVVGSVGQHTGEPVEELALSHCGRFLASSGHDQRLKFWDMAQLRAVVVDDYRRRKKKGGPLRALSSKTWSTDDFFAGLREEGEDSMAQEEKEETGDDSD

SEQ ID NO: 8964 - protein, 99 aa, Homo sapiens
MAAAAASRGVGAKLGLREIRIHLCQRSPGSQGVRDFIEKRYVELKKANPDLPILIRECSDVQPKLWARYAFGQETNVPLNNFSADQVTRALENVLSGKA

SEQ ID NO: 8965 - protein, 99 aa, Homo sapiens; identical to SEQ ID NO: 8964

SEQ ID NO: 8966 - protein, 373 aa, Homo sapiens [sequence omitted]

SEQ ID NO: 8967 - protein, 373 aa, Homo sapiens [sequence omitted]

SEQ ID NO: 8968 - protein, 504 aa, Homo sapiens
MAGLKRRVPLHSLRYFISMVGLFSKPGLLPWYARNPPGWSQLFLGTVCKGDFTRVIATKCQKGQKSQKKPSHLGPLDGSWQERLADVVTPLWRLSYEEQLKVKFAAQKKILQRLESYIQMLNGVSVTTAVPKSERLSCLLHPIIPSPVINGYRNKSTFSVNRGPDGNPKTVGFYLGTWRDGNVVCVQSNHLKNIPEKHSQVAQYYEVFLRQSPLEPCLVFHEGGYWRELTVRTNSQGHTMAIITFHPQKLSQEELHVQKEIVKEFFIRGPGAACGLTSLYFQESTMTRCSHQQSPYQLLFGEPYIFEELLSLKIRISPDAFFQINTAGAEMLYRTVGELTGVNSDTILLDICCGTGVIGLSLAQHTSRVLGIELLEQAVEDARWTAAFNGITNSEFHTGQAEKILPGLLKSKEDGQSIVAVVNPARAGLHYKVIQAIRNFRAIHTLVFVSCKLHGESTRNVIELCCPPDPAKKLLGEPFVLQQAVPVDLFPHTPHCELVLLFTR

SEQ ID NO: 8969 - protein, 289 aa, Homo sapiens
MAIITFHPQKLSQEELHVQKEIVKEFFIRGPGAACGLTSLYFQESTMTRCSHQQSPYQLLFGEPYIFEELLSLKIRISPDAFFQINTAGAEMLYRTVGELTGVNSDTILLDICCGTGKWKPRAESACCSAPKALVACGGGRGEVVVVVQHTSRVLGIELLEQAVEDARWTAAFNGITNSEFHTGQAEKILPGLLKSKEDGQSIVAVVNPARAGLHYKVIQAIRNFRAIHTLVFVSCKLHGESTRNVIELCCPPDPAKKLLGEPFVLQQAVPVDLFPHTPHCELVLLFTR

SEQ ID NO: 8970 - protein, 171 aa, Homo sapiens
MAWASGFLCSLAGRFSRSPGCGQAVGVAGGPKPPLHVGQGSLGEIRPDVAQQRQPVGKAPPGLGDHLSQDADAGGDHLSLDADAGVVPAGRSGAEGPDADPVLPVEVGDLAVLLDLGAEEGPGLQNPVLLGGAQLSGKRLGPSSRHWAARSFRNLRSRPEIKCQGSVTSDG

SEQ ID NO: 8971 - protein, 82 aa, Homo sapiens
RGLYLGDQPWHDQRLQSQSRVLGHSESRHVFGESDKLIGQKVAHALAKGLRVIACTGEKLAEREVASLRSLFSRRKRSSQIT

SEQ ID NO: 8972 - protein, 524 aa, Homo sapiens
MAASKKAVLGPLVGAVDQGTSSTRFLVFNSRTAELLSHHQVEIKQEFPREGWVEQDPKEILHSVYECIEKTCEKLGQLNIGISNIKAIGVSNQRETTVVWDKITGEPLYNAVVWLDLRTQSTVESLSKRIPGNNNFVKSKTGLPLSTYFSAVKLRWLLDNVRKVQKAVEEKRALFGTIDSWLIWSLTGGVNGGVHCTDVTNASRTMLFNIHSLEWDKQLCEFFGIPMEILPHVRSSSEIYGLMKAGALEGVPISGCLGDQSAALVGQMCFQIGQAKNTYGTGCFLLCNTGHKCVFSDHGLLTTVAYKLGRDKPVYYALEGSVAIAGAVIRWLRDNLGIIKTSEEIEKLAKEVGTSYGCYFVPAFSGLYAPYWEPSARGIICGLTQFTNKCHIAFAALEAVCFQTREILDAMNRDCGIPLSHLQVDGGMTSNKILMQLQADILYIPVVKPLMPETTALGAAMAAGAAEGVDVWSLEPEDLSAVTMERFEPQINAEESEIRYSTWKKAVMKSMGWVTTQSPEGGIP

SEQ ID NO: 8973 - protein, 524 aa, Homo sapiens; identical to SEQ ID NO: 8972

SEQ ID NO: 8974 - protein, 687 aa, Homo sapiens
MAPAEILNRKEISAQIRARLKNQVTQLKDKYLLKAAEEIGMKATDIKLPRTTTESEVIKYIISLNEDSTVHGQYTEGVINAIAPEKDVDGLTSISAGKLARGDLNDCFIPCMPKGCLELMKETGSTVESAKRFLEKFKPGKWMIQYNNLNLKTPVPKVELYGETKAKVLLSALERLKHQPVGKYQVVTGITPTPLGEGKSTTTIGLVQALLAHLYQNFFMCVRQPSQGPTFGIKGGVAGGGYSQVIPMEEFNLHLTGDIHAITVSNNLVAAAIDAQIFHELTQTDKATFTHLVPSVNGVRKFSDIHIQRLNRLGIDKTDSTTLTDEEINRFARLDIDPETIAWQRVLNTNDRFLRKITIGQAPTKKSHTQTVHFDISVASEIMAVLALTTSLEDRRERLGKMVVASSKKGDPVSAEDLGLVGPEGFVVTEAGFGADIGIEKFLNIKSQYSGLHPHVVVLVATVSALKMHRGGPMVTAGMPLPKAYIEENLELVEKGFSNLKKQTENARMFGIPVVVAVNAFKTDTETELDLIGCLSREQRAFDAVKCTHWQKGARLPVEDKIRIIAQKIYGADNIELLLKAQHKAEVYTKQGFGNLPICMAKTHLSLSHNPERKGVPTGFILPIRNIHASIGAGFLYPLVGTMSTMDSPPSPVFMILIWTLKQNSSPGKYQFALPLAFYGLSTQATK

SEQ ID NO: 8975 - protein, 250 aa, Homo sapiens [sequence omitted]

SEQ ID NO: 8976 - protein, 286 aa, Homo sapiens [sequence omitted]

SEQ ID NO: 8977 - protein, 194 aa, Homo sapiens
MQDAPLSCLSPTKWSSVSSADSTEKSASAAGTRNLPFQFCLRQALRMKAAGILTLIGCLVTGAESKIYTRCKLAKIFSRAGLDNYWGFSLGNWICMAYYESGYNTTAQTVLDDGSIDYGIFQINSFAWCRRGKLKENNHCHVACSALVTDDLTDAIICAKKIVKETQGMNYWQGWKKHCEGRDLSDWKKDCEVS

SEQ ID NO: 8978 - protein, 743 aa, Homo sapiens
MLHFNRCHHLKKITQKCFSSIHVKTDKHAQRFLSRTFALAELRKSWYSTHSLVGDKNIILMGPPGAGKTTVGRIIGQKLGCCVIDVDDDILEKTWNMSVSEKLQDVGNEQFLEEEGKAVLNFSASGSVISLTGSNPMHDASMWHLKKNGIIVYLDVPLLDLICRLKLMKTDRIVGQNSGTSMKDLLKFRRQYYKKWYDARVFCESGASPEEVADKVLNAIKRYQDVDSETFISTRHVWPEDCEQKVSAKFFSEAVIEGLASDGGLFVPAKEFPKLSCGEWKSLVGATYVERAQILLERCIHPADIPAARLGEMIETAYGENFACSKIAPVRHLSGNQFILELFHGPTGSFKDLSLQLMPHIFAHCIPPSCNYMILVATSGDTGSAVLNGFSRLNKNDKQRIAVVAFFPENGVSDFQKAQIIGSQRENGWAVGVESDFDFCQTAIKRIFNDSDFTGFLTVEYGTILSSANSINWGRLLPQVVYHASAYLDLVSQGFISFGSPVDVCIPTGNFGNILAAVYAKMMGIPIRKFICASNQNHVLTDFIKTGHYDLRERKLAQTFSPSIDILKSSNLERHLHLMANKDGQLMTELFNRLESQHHFQIEKALVEKLQQDFVADWCSEGECLAAINSTYNTSGYILDPHTAVAKVVADRVQDKTCPVIISSTAHYSKFAPAIMQALKIKEINETSSSQLYLLGSYNALPPLHEALLERTKQQEKMEYQVCAADMNVLKSHVEQLVQNQFI

SEQ ID NO: 8979 - protein, 743 aa, Homo sapiens; identical to SEQ ID NO: 8978

SEQ ID NO: 8980 - protein, 743 aa, Homo sapiens; identical to SEQ ID NO: 8978

SEQ ID NO: 8981 - protein, 477 aa, Homo sapiens [sequence omitted]

SEQ ID NO: 8982 - protein, 268 aa, Homo sapiens
MLRRPALEDYVVLMKRGTAITFPKDINMILSMMDINPGDTVLEAGSGSGGMSLFLSKAVGSQGRVISFEVRKDHHDLAKKNYKHWRDSWKLSHVEEWPDNVDFIHKDISGATEDIKSLTFDAVALDMLNPHVTLPVFYPHLKHGGVCAVYVVNITQVIELLDGIRTCELALSCEKISEVIVRDWLVCLAKQKNGILAQKVESKINTDVQLDSQEKIGVKGELFQEDDHEESHSDFPYGSFPYVARPVHWQPGHTAFLVKLRKVKPQLN

SEQ ID NO: 8983 - protein, 313 aa, Homo sapiens
MRHNQMCCETPPTVTVYVKSGSNRSHQPKKPITLKRPICKDNWQAFEKNTHNNNKSKRPKGPCLVIQRQDMTAFFKLFDDDLIQDFLWMDCCCKIADKYLLAMTFVYFKRAKFTISEHTRINFFIALYLANTVEEDEEETKYEIFPWALGKNWRKLFPNFLKLRDQLWDRIDYRAIVSRRCCEEVMAIAPTHYIWQRERSVHHSGAVRNYNRDEVQLPRGPSATPVDCSLCGKKRRYVRLGLSSSSSLSSHTAGVTEKHSQDSYNSLSMDIIGDPSQAYTGSEVVNDHQSNKGKKTNFLKKDKSMEWFTGSEE

SEQ ID NO: 8984 - protein, 519 aa, Homo sapiens
MRRLTRRLVLPVFGVLWITVLLFFWVTKRKLEVPTGPEVQTPKPSDADWDDLWDQFDERRYLNAKKWRVGDDPYKLYAFNQRESERISSNRAIPDTRHLSVLNRTPTHLIREIILVDDFSNDPDDCKQLIKLPKVKCLRNNERQGLVRSRIRGADIAQGTTLTFLDSHCEVNRDWLQPLLHRVKEDYTRVVCPVIDIINLDTFTYIESASELRGGFDWSLHFQWEQLSPEQKARRLDPTEPIRTPIIAGGLFVIDKAWFDYLGKYDMDMDIWGGENFEISFRVWMCGGSLEIVPCSRVGHVFRKKHPYVFPDGNANTYIKNTKRTAEVWMDEYKQYYYAARPFALERPFGNVESRLDLRKNLRCQSFKWYLENIYPELSIPKESSIQKGNIRQRQKCLESQRQNNQETPNLKLSPCAKVKGEDAKSQVWAFTYTQQILQEELCLSVITLFPGAPVVLVLCKNGDDRQQWTKTGSHIEHIASHLCLDTDMFGDGTENGKEIVVNPCESSLMSQHWDMVSS

SEQ ID NO: 8985 - protein, 557 aa, Homo sapiens
MRRLTRRLVLPVFGVLWITVLLFFWVTKRKLEVPTGPEVQTPKVWSLFFKVAGMSPWAPQVPVSPTPPYQRGHLPTGGHLAVCHFPCLLQEAQFHLQTQVFLQVRCTLLVYCTDLPPTSIIITFHNEARSTLLRTIRSVLNRTPTHLIREIILVDDFSNDPDDCKQLIKLPKVKCLRNNERQGLVRSRIRGADIAQGTTLTFLDSHCEVNRDWLQPLLHRVKEDYTRVVCPVIDIINLDTFTYIESASELRGGFDWSLHFQWEQLSPEQKARRLDPTEPIRTPIIAGGLFVIDKAWFDYLGKYDMDMDIWGGENFEISFRVWMCGGSLEIVPCSRVGHVFRKKHPYVFPDGNANTYIKNTKRTAEVWMDEYKQYYYAARPFALERPFGNVESRLDLRKNLRCQSFKWYLENIYPELSIPKESSIQKGNIRQRQKCLESQRQNNQETPNLKLSPCAKVKGEDAKSQVWAFTYTQQILQEELCLSVITLFPGAPVVLVLCKNGDDRQQWTKTGSHIEHIASHLCLDTDMFGDGTENGKEIVVNPCESSLMSQHWDMVSS

SEQ ID NO: 8986 - protein, 552 aa, Homo sapiens
MRRLTRRLVLPVFGVLWITVLLFFWVTKRKLEVPTGPEVQTPKPSDADWDDLWDQFDERRYLNAKKWRVGDDPYKLYAFNQRESERISSNRAIPDTRHLRCTLLVYCTDLPPTSIIITFHNEARSTLLRTIRSVLNRTPTHLIREIILVDDFSNDPDDCKQLIKLPKVKCLRNNERQGLVRSRIRGADIAQGTTLTFLDSHCEVNRDWLQPLLHRVKEDYTRVVCPVIDIINLDTFTYIESASELRGGFDWSLHFQWEQLSPEQKARRLDPTEPIRTPIIAGGLFVIDKAWFDYLGKYDMDMDIWGGENFEISFRVWMCGGSLEIVPCSRVGHVFRKKHPYVFPDGNANTYIKNTKRTAEVWMDEYKQYYYAARPFALERPFGNVESRLDLRKNLRCQSFKWYLENIYPELSIPKESSIQKGNIRQRQKCLESQRQNNQETPNLKLSPCAKVKGEDAKSQVWAFTYTQQILQEELCLSVITLFPGAPVVLVLCKNGDDRQQWTKTGSHIEHIASHLCLDTDMFGDGTENGKEIVVNPCESSLMSQHWDMVSS

SEQ ID NO: 8987 - protein, 447 aa, Homo sapiens
MHAHTRASLHMLTLTLTMSHACAHPHKHTSALTSTRGLAHAHMRTHARTHAHTHTGARSPSGRGRSGGAGGAAKGQVRRAGRRLALAPDSARPGRRLQPGGRRGAATWSGPGEAGGGRRGAGGAAARSAHGAGPPEPRGAAAVPGRMLPLTMTVLILLLLPTGQAAPKDGVTRPDSEVQHQLLPNPFQPGQEQLGLLQSYLKGLGRTEVQLEHLSREQVLLYLFALHDYDQSGQLDGLELLSMLTAALAPGAANSPTTNPVILIVDKVLETQDLNGDGLMTPAELINFPGVALRHVEPGEPLAPSPQEPQAVGRQSLLAKSPLRQETQEAPGPREEAKGQVEARRESLDPVQEPGGQAEADGDVPGPRGEAEGQAEAKGDAPGPRGEAGGQAEAEGDAPGPRGEAGGQAEARENGEEAKELPGETLESKNTQNDFEVHIVQVENDEI

SEQ ID NO: 8988 - protein, 301 aa, Homo sapiens
MLPLTMTVLILLLLPTGQAAPKDGVTRPDSEVQHQLLPNPFQPGQEQLGLLQSYLKGLGRTEVQLEHLSREQVLLYLFALHDYDQSGQLDGLELLSMLTAALAPGAANSPTTNPVILIVDKVLETQDLNGDGLMTPAELINFPGVALRHVEPGEPLAPSPQEPQAVGRQSLLAKSPLRQETQEAPGPREEAKGQVEARRESLDPVQEPGGQAEADGDVPGPRGEAEGQAEAKGDAPGPRGEAGGQAEAEGDAPGPRGEAGGQAEARENGEEAKELPGETLESKNTQNDFEVHIVQVENDEI

SEQ ID NO: 8989 - protein, 407 aa, Homo sapiens
MSGGSADYNREHGGPEGMDPDGVIESNWNEIVDNFDDMNLKESLLRGIYAYGFEKPSAIQQRAIIPCIKGYDVIAQAQSGTGKTATFAISILQQLEIEFKETQALVLAPTRELAQQIQKVILALGDYMGATCHACIGGTNVRNEMQKLQAEAPHIVVGTPGRVFDMLNRRYLSPKWIKMFVLDEADEMLSRGFKDQIYEIFQKLNTSIQVVLLSATMPTDVLEVTKKFMRDPIRILVKKEELTLEGIKQFYINVEREEWKLDTLCDLYETLTITQAVIFLNTRRKVDWLTEKMHARDFTVSALHGDMDQKERDVIMREFRSGSSRVLITTDLLARGIDVQQVSLVINYDLPTNRENYIHRIGRGGRFGRKGVAINFVTEEDKRILRDIETFYNTTVEEMPMNVADLI

SEQ ID NO: 8990 - protein, 312 aa, Homo sapiens
MLTVLRSLPLFSRELLFPVLKIQKVILALGDYMGATCHACIGGTNVRNEMQKLQAEAPHIVVGTPGRVFDMLNRRYLSPKWIKMFVLDEADEMLSRGFKDQIYEIFQKLNTSIQVVLLSATMPTDVLEVTKKFMRDPIRILVKKEELTLEGIKQFYINVEREEWKLDTLCDLYETLTITQAVIFLNTRRKVDWLTEKMHARDFTVSALHGDMDQKERDVIMREFRSGSSRVLITTDLLARGIDVQQVSLVINYDLPTNRENYIHRIGRGGRFGRKGVAINFVTEEDKRILRDIETFYNTTVEEMPMNVADLI

SEQ ID NO: 8991 - protein, 407 aa, Homo sapiens; identical to SEQ ID NO: 8989

SEQ ID NO: 8992 - protein, 299 aa, Homo sapiens
MLTVLRSLPLFSRELLFPVLKIQKVILALGDYMGATCHACIGGTNVRNEMQKLQAEAPHIVVGTPGRVFDMLNRRYLSPKWIKMFVLDEADEMLSRGFKDQIYEIFQKLNTSIQVVLLSATMPTDVLEVTKKFMRDPIRILVKKEELTLEGIKQFYINVEREEWKLDTLCDLYETLTITQAVIFLNTRRKVDWLTEKMHARDFTVSALHGDMDQKERDVIMREFRSGSSRVLITTDLLVSLLMLFKNLPKVSFLGGRFLSNLCQLGLFGRVKDHTPQWAIPLSIVRYYFVAYMTGVKFF

SEQ ID NO: 8993 - protein, 312 aa, Homo sapiens; identical to SEQ ID NO: 8990

SEQ ID NO: 8994 - protein, 312 aa, Homo sapiens; identical to SEQ ID NO: 8990

SEQ ID NO: 8995 - protein, 408 aa, Homo sapiens
MSGGSADYNSREHGGPEGMDPDGVIESNWNEIVDNFDDMNLKESLLRGIYAYGFEKPSAIQQRAIIPCIKGYDVIAQAQSGTGKTATFAISILQQLEIEFKETQALVLAPTRELAQQIQKVILALGDYMGATCHACIGGTNVRNEMQKLQAEAPHIVVGTPGRVFDMLNRRYLSPKWIKMFVLDEADEMLSRGFKDQIYEIFQKLNTSIQVVLLSATMPTDVLEVTKKFMRDPIRILVKKEELTLEGIKQFYINVEREEWKLDTLCDLYETLTITQAVIFLNTRRKVDWLTEKMHARDFTVSALHGDMDQKERDVIMREFRSGSSRVLITTDLLARGIDVQQVSLVINYDLPTNRENYIHRIGRGGRFGRKGVAINFVTEEDKRILRDIETFYNTTVEEMPMNVADLI

SEQ ID NO: 8996 - protein, 277 aa, Homo sapiens [sequence omitted]

SEQ ID NO: 8997 - protein, 537 aa, Homo sapiens
MGLFMRMGDQFVFYEDWGENMVSKSIPVLCVLDVESGNISVLEGVPENVSPGQAFWAPGDAGVVFVGWWHEPFRLGIRFCTNRRSALYYVDLIGGKCELLSDDSLAVSSPRLSPDQCRIVYLQYPSLIPHHQCSQLCLYDWYTKVTSVVVDVVPRQLGENFSGIYCSLLPLGCWSADSQRVVFDSAQRSRQDLFAVDTQVGTVTSLTAGGSGGSWKLLTIDQDLMVAQFSTPSLPPTLKVGFLPSAGKEQSVLWVSLEEAEPIPDIHWGIRVLQPPPEQENVQYAGLDFEAILLQPGSPPDKTQVPMVVMPHGGPHSSFVTAWMLFPAMLCKMGFAVLLVNYRGSTGFGQDSILSLPGNVGHQDVKDVQFAVEQVLQEEHFDASHVALMGGSHGGFISCHLIGQYPETYRACVARNPVINIASMLGSTDIPDWCVVEAGFPFSSDCLPDLSVWAEMLDKSPIRYIPQVKTPLLLMLGQEDRRVPFKQGMEYYRALKTRNVPVRLLLYPKSTHALSEVEVESDSFMNAVLWLRTHLGS

SEQ ID NO: 8998 - protein, 732 aa, Homo sapiens
MERQVLLSEPEEAAALYRGLSRQPALSAACLGPEVTTQYGGQYRTVHTEWTQRDLERMENIRFCRQYLVFHDGDSVVFAGPAGNSVETRGELLSRESPSGTMKAVLRKAGGTGPGEEKQFLEVWEKNRKLKSFNLSALEKHGPVYEDDCFGCLSWSHSETHLLYVAEKKRPKAESFFQTKALDVSASDDEIARLKKPDQAIKGDQFVFYEDWGENMVSKSIPVLCVLDVESGNISVLEGVPENVSPGQAFWAPGDAGVVFVGWWHEPFRLGIRFCTNRRSALYYVDLIGGKCELLSDDSLAVSSPRLSPDQCRIVYLQYPSLIPHHQCSQLCLYDWYTKVTSVVVDVVPRQLGENFSGIYCSLLPLGCWSADSQRVVFDSAQRSRQDLFAVDTQVGTVTSLTAGGSGGSWKLLTIDQDLMVAQFSTPSLPPTLKVGFLPSAGKEQSVLWVSLEEAEPIPDIHWGIRVLQPPPEQENVQYAGLDFEAILLQPGSPPDKTQVPMVVMPHGGPHSSFVTAWMLFPAMLCKMGFAVLLVNYRGSTGFGQDSILSLPGNVGHQDVKDVQFAVEQVLQEEHFDASHVALMGGSHGGFISCHLIGQYPETYRACVARNPVINIASMLGSTDIPDWCVVEAGFPFSSDCLPDLSVWAEMLDKSPIRYIPQVKTPLLLMLGQEDRRVPFKQGMEYYRALKTRNVPVRLLLYPKSTHALSEVEVESDSFMNAVLWLRTHLGS

SEQ ID NO: 8999 - protein, 557 aa, Homo sapiens [sequence omitted]

SEQ ID NO: 9000 - protein, 732 aa, Homo sapiens; identical to SEQ ID NO: 8998

SEQ ID NO: 9001 - protein, 1012 aa, Homo sapiens
MDALDASKLLDEELYSRQLYVLGSPAMQRIQGARVLVSGLQGLGAEVAKNLVLMGVGSLTLHDPHPTCWSDLAAQFLLSEQDLERSRAEASQELLAQLNRAVQVVVHTGDITEDLLLDFQVVVLTAAKLEEQLKVGTLCHKHGVCFLAADTRGLVGQLFCDFGEDFTVQDPTEAEPLTAAIQHISQGSPGILTLRKGANTHYFRDGDLVTFSGIEGMVELNDCDPRSIHVREDGSLEIGDTTTFSRYLRGGAITEVKRPKTVRHKSLDTALLQPHVVAQSSQEVHHAHCLHQAFCALHKFQHLHGRPPQPWDPVDAETVVGLARDLEPLKRTEEEPLEEPLDEALVRTVALSSAGVLSPMVAMLGAVAAQEVLKAISRKFMPLDQWLYFDALDCLPEDGELLPSPEDCALRGSRYDGQIAVFGAGFQEKLRRQHYLLVGAGAIGCELLKVFALVGLGAGNSGGLTVVDMDHIERSNLSRQFLFRSQDVGRPKAEVAAAAARGLNPDLQVIPLTYPLDPTTEHIYGDNFFSRVDGVAAALDSFQARRYVAARCTHYLKPLLEAGTSGTWGSATVFMPHVTEAYRAPASAAASEDAPYPVCTVRYFPSTAEHTLQWARHEFEELFRLSAETINHHQQAHTSLADMDEPQTLTLLKPVLGVLRVRPQNWQDCVAWALGHWKLCFHYGIKQLLRHFPPNKVLEDGTPFWSGPKQCPQPLEFDTNQDTHLLYVLAAANLYAQMHGLPGSQDWTALRELLKLLPQPDPQQMAPIFASNLELASASAEFGPEQQKELNKALEVWSVGPPLKPLMFEKDDDSNFHVDFVVAAASLRCQNYGIPPVNRAQSKRIVGQIIPAIATTTAAVAGLLGLELYKVVSGPRPRSAFRHSYLHLAENYLIRYMPFAPAIQTFHHLKWTSWDRLKVPAGQPERTLESLLAHLQEQHGLRVRILLHGSALLYAAGWSPEKQAQHLPLRVTELVQQLTGQAPAPGQRVLVLELSCEGDDEDTAFPPLHYEL

SEQ ID NO: 9002 - protein, 632 aa, Homo sapiens
MPLDQWLYFDALDCLPEDGELLPSPEDCALRGSRYDGQIAVFGAGFQEKLRRQHYLLVGAGAIGCELLKVFALVGLGAGNSGGLTVVDMDHIERSNLSRQFLFRSQDVGRPKAEVAAAAARGLNPDLQVIPLTYPLDPTTEHIYGDNFFSRVDGVAAALDSFQARRYVAARCTHYLKPLLEAGTSGTWGSATVFMPHVTEAYRAPASAAASEDAPYPVCTVRYFPSTAEHTLQWARHEFEELFRLSAETINHHQQAHTSLADMDEPQTLTLLKPVLGVLRVRPQNWQDCVAWALGHWKLCFHYGIKQLLRHFPPNKVLEDGTPFWSGPKQCPQPLEFDTNQDTHLLYVLAAANLYAQMHGLPGSQDWTALRELLKLLPQPDPQQMAPIFASNLELASASAEFGPEQQKELNKALEVWSVGPPLKPLMFEKDDDSNFHVDFVVAAASLRCQNYGIPPVNRAQSKRIVGQIIPAIATTTAAVAGLLGLELYKVVSGPRPRSAFRHSYLHLAENYLIRYMPFAPAIQTFHHLKWTSWDRLKVPAGQPERTLESLLAHLQEQHGLRVRILLHGSALLYAAGWSPEKQAQHLPLRVTELVQQLTGQAPAPGQRVLVLELSCEGDDEDTAFPPLHYEL

SEQ ID NO: 9003 - protein, 443 aa, Homo sapiens
MQPSEMVMNPKQVFLSVLIFGVAGLLLFMYLQVWIEEQHTGRVEKRREQKVTSGWGPVKYLRPVPRIMSTEKIQEHITNQNPKFHMPEDVREKKENLLLNSERSTRLLTKTSHSQGGDQALSKSTGSPTEKLIEKRQGAKTVFNKFSNMNWPVDIHPLNKSLVKDNKWKKTEETQEKRRSFLQEFCKKYGGVSHHQSHLFHTVSRIYVEDKHKILYCEVPKAGCSNWKRILMVLNGLASSAYNISHNAVHYGKHLKKLDSFDLKGIYTRLNTYTKAVFVRDPMERLVSAFRDKFEHPNSYYHPVFGKAIIKKYRPNACEEALINGSGVKFKEFIHYLLDSHRPVGMDIHWEKVSKLCYPCLINYDFVGKFETLEEDANYFLQMIGAPKELKFPNFKDRHSSDERTNAQVVRQYLKDLTRTERQLIYDFYYLDYLMFNYTTPFL

SEQ ID NO: 9004 - protein, 358 aa, Homo sapiens
MPEDVREKKENLLLNSERSTRLLTKTSHSQGGDQALSKSTGSPTEKLIEKRQGAKTVFNKFSNMNWPVDIHPLNKSLVKDNKWKKTEETQEKRRSFLQEFCKKYGGVSHHQSHLFHTVSRIYVEDKHKILYCEVPKAGCSNWKRILMVLNGLASSAYNISHNAVHYGKHLKKLDSFDLKGIYTRLNTYTKAVFVRDPMERLVSAFRDKFEHPNSYYHPVFGKAIIKKYRPNACEEALINGSGVKFKEFIHYLLDSHRPVGMDIHWEKVSKLCYPCLINYDFVGKFETLEEDANYFLQMIGAPKELKFPNFKDRHSSDERTNAQVVRQYLKDLTRTERQLIYDFYYLDYLMFNYTTPFL

SEQ ID NO: 9005 - protein, 583 aa, Homo sapiens [sequence omitted]

SEQ ID NO: 9006 - protein, 625 aa, Homo sapiens [sequence omitted]

SEQ ID NO: 9007 - protein, 625 aa, Homo sapiens [sequence omitted]

SEQ ID NO: 9008 - protein, 684 aa, Homo sapiens
MSAIPAEESDQLLIRPLGAGQEVGRSCIILEFKGRKIMLDCGIHPGLEGMDALPYIDLIDPAEIDLLLISHFHLDHCGALPWFLQKTSFKGRTFMTHATKAIYRWLLSDYVKVSNISADDMLYTETDLEESMDKIETINFHEVKEVAGIKFWCYHAGHVLGAAMFMIEIAGVKLLYTGDFSRQEDRHLMAAEIPNIKPDILIIESTYGTHIHEKREEREARFCNTVHDIVNRGGRGLIPVFALGRAQELLLILDEYWQNHPELHDIPIYYASSLAKKCMAVYQTYVNAMNDKIRKQININNPFVFKHISNLKSMDHFDDIGPSVVMASPGMMQSGLSRELFESWCTDKRNGVIIAGYCVEGTLAKHIMSEPEEITTMSGQKLPLKMSVDYISFSAHTDYQQTSEFIRALKPPHVILVHGEQNEMARLKAALIREYEDNDEVHIEVHNPRNTEAVTLNFRGEKLAKVMGFLADKKPEQGQRVSGILVKRNFNYHILSPCDLSNYTDLAMSTVKQTQAIPYTGPFNLLCYQLQKLTGDVEELEIQEKPALKVFKNITVIQEPGMVVLEWLANPSNDMYADTVTTVILEVQSNPKIRKGAVQKVSKKLEMHVYSKRLEIMLQDIFGEDCVSVKDDSILSVTVDGKTANLNLETRTVECEEGSEDDESLREMVELAAQRLYEALTPVH

SEQ ID NO: 9009 - protein, 102 aa, Homo sapiens
MPAQWKFQIGPCEGISMEDHLWVTCFILHRVCEDFGVIATFDPKPIPGNWNGAGCHTNISTKAMRENGLKYIEEAIKKLSKQQQYHIHIPMKLLTSTTFLLL

SEQ ID NO: 9010 - protein, 294 aa, Homo sapiens
MAGILASGLGVLAHLERLETQVSRSRKQSEELQSVQAQEGALGTKIHKLRRLRDELRAVVRHRRASVKACIANVEPNQTVEINEQEALEEKLENVKAILQAYHFTGLSGKLTSRGVCVCISTAFEGNLLDSYFVDLVIQKPLRIHHHSVPVFIPLEEIAAKYLQTNIQHFLFSLCEYLNAYSGRKYQADRLQSDFAALLTGPLQRNPLCNLLSFTYKLDPGGQSFPFCARLLYKDLTATLPTDVTVTCQGVEVLSTSWEEQRASHETLFCTKPLHQVFASFTRKGEKLDMSLVS

SEQ ID NO: 9011 - protein, 300 aa, Homo sapiens
MEQANPLRPDGESKGGVLAHLERLETQVSRSRKQSEELQSVQAQEGALGTKIHKLRRLRDELRAVVRHRRASVKACIANVEPNQTVEINEQEALEEKLENVKAILQAYHFTGLSGKLTSRGVCVCISTAFEGNLLDSYFVDLVIQKPLRIHHHSVPVFIPLEEIAAKYLQTNIQHFLFSLCEYLNAYSGRKYQADRLQSDFAALLTGPLQRNPLCNLLSFTYKLDPGGQSFPFCARLLYKDLTATLPTDVTVTCQGVEVLSTSWEEQRASHETLFCTKPLHQVFASFTRKGEKLDMSLVS

SEQ ID NO: 9012 - protein, 300 aa, Homo sapiens; identical to SEQ ID NO: 9011

SEQ ID NO: 9013 - protein, 367 aa, Homo sapiens
MEANGLGPQGFPELKNDTFLRAAWGEETDYTPVWCMRQAGRYLPEFRETRAAQDFFSTCRSPEACCELTLQPLRRFPLDAAIIFSDILVVPQALGMEVTMVPGKGPSFPEPLREEQDLERLRDPEVVASELGYVFQAITLTRQRLAGRVPLIGFAGAPWTLMTYMVEGGGSSTMAQAKRWLYQRPQASHQLLRILTDALVPYLVGQVVAGAQALQLFESHAGHLGPQLFNKFALPYIRDVAKQVKARLREAGLAPVPMIIFAKDGHFALEELAQAGYEVVGLDWTVAPKKARECVGKTVTLQGNLDPCALYASEEEIGQLVKQMLDDFGPHRYIANLGHGLYPDMDPEHVGAFVDAVHKHSRLLRQN

SEQ ID NO: 9014 - protein, 157 aa, Homo sapiens [sequence omitted]
